(19) United States
(12) Patent Application Publication
(10) Pub. No.: US 2019/0365929 A1
(43) Pub. Date: Dec. 5, 2019

(54) MATERIALS AND METHODS FOR TREATMENT OF DYSTROPHIC EPIDERMOLYSIS BULLOSA (DEB) AND OTHER COLLAGEN TYPE VII ALPHA 1 CHAIN (COL7A1) GENE RELATED CONDITIONS OR DISORDERS

(71) Applicant: CRISPR THERAPEUTICS AG, Zug (CH)

(72) Inventors: Ante Sven LUNDBERG, Cambridge, MA (US); Samarth KULKARNI, Cambridge, MA (US); Lawrence KLEIN, Cambridge, MA (US); Hari Kumar PADMANABHAN, Cambridge, MA (US)

(73) Assignee: CRISPR THERAPEUTICS AG, Zug (CH)

(21) Appl. No.: 16/487,413

(22) PCT Filed: Feb. 14, 2018
(86) PCT No.: PCT/IB2018/050914

§ 371 Date: Aug. 20, 2019

Related U.S. Application Data
(60) Provisional application No. 62/461,868, filed on Feb. 22, 2017.

(51) Int. Cl. A61K 48/00; A61K 35/36; A61K 35/34; A61K 35/28; A61K 35/545; C12N 15/10; C12N 15/113; C12N 15/86; A61K 38/19; A61L 27/36

(52) U.S. Cl. CPC A61K 48/0075; A61K 35/36; A61K 48/005; A61K 35/34; A61K 35/28; A61K 35/545; C12N 2320/30; C12N 15/113; C12N 15/86; A61K 38/193; A61L 27/362; C12N 2310/20; C12N 2750/14143; C12N 15/102

(57) ABSTRACT

The present disclosure provides materials and methods for treating a patient with one or more conditions or disorders associated with COL7A1 whether ex vivo or in vivo. For example, the present disclosure provides materials and methods for treating a patient with Dystrophic Epidermolysis Bullosa (DEB). Also provided are materials and methods for editing a COL7A1 gene in a cell by genome editing. The present disclosure also provides materials and methods for altering the contiguous genomic sequence of a COL7A1 gene in a cell. In addition, the present disclosure provides one or more gRNAs for editing a COL7A1 gene. Also provided are therapeutics comprising at least one or more gRNAs for editing a COL7A1 gene. In addition, the present disclosure provides therapeutics for treating patients with a COL7A1 related condition or disorder.

### FIELD

[0001] The present disclosure provides materials and methods for treating a patient with Dystrophic Epidermolysis Bullosa (DEB) and other Collagen Type VII Alpha 1 Chain (COL7A1) gene related conditions or disorders, both ex vivo and in vivo.

### RELATED APPLICATIONS

[0002] This application claims the benefit of U.S. Provisional Application No. 62/461,868 filed Feb. 22, 2017, which is incorporated herein in its entirety by reference.

### INCORPORATION BY REFERENCE OF SEQUENCE LISTING

[0003] This application contains a Sequence Listing in computer readable form (filename: 170818PCT Sequence Listing (Original): 19,174,212 bytes—ASCII text file; created Jan. 19, 2018), which is incorporated herein by reference in its entirety and forms part of the disclosure.

### BACKGROUND

[0004] Genome engineering refers to the strategies and techniques for the targeted, specific modification of the genetic information (genome) of living organisms. Genome engineering is a very active field of research because of the wide range of possible applications, particularly in the areas of human health. For example, genome engineering can be used to alter (e.g., correct or knock-out) a gene carrying a harmful mutation or to explore the function of a gene. Early technologies developed to insert a transgene into a living cell were often limited by the random nature of the insertion of the new sequence into the genome. Random insertions into the genome may result in disrupting normal regulation of neighboring genes leading to severe unwanted effects. Furthermore, random integration technologies offer little reproducibility, as there is no guarantee that the sequence would be inserted at the same place in two different cells. Recent genome engineering strategies, such as zinc finger nucleases (ZFNs), transcription activator like effector nucleases (TALENs), homing endonucleases (HEs) and MegaTALs, enable a specific area of the DNA to be modified, thereby increasing the precision of the alteration compared to early technologies. These newer platforms offer a much larger degree of reproducibility, but still have their limitations.

[0005] Despite efforts from researchers and medical professionals worldwide who have been trying to address genetic disorders, there still remains a critical need for developing safe and effective treatments involving COL7A1 related indications.

### SUMMARY

[0006] The present disclosure presents an approach to address the genetic basis of diseases related to the gene Collagen Type VII Alpha 1 Chain (COL7A1). Provided herein are cellular, ex vivo and in vivo methods for creating permanent changes to the genome of human cells that can result in a permanent correction of one or more mutations, replacement of one or more exons and/or introns, or insertion of one or more exons and/or introns within or near the COL7A1 gene or its regulatory genetic elements, which can restore COL7A1 function in the patient's cells, and ameliorate the effects of COL7A1 related conditions or disorders, such as Dystrophic Epidermolysis Bullosa (DEB), with as few as a single treatment.

[0007] Provided herein is a method for editing a COL7A1 gene in a cell by genome editing. The method can comprise: introducing into the cell one or more deoxyribonucleic acid (DNA) endonucleases to effect one or more single-strand breaks (SSBs) or double-strand breaks (DSBs) within or near the COL7A1 gene or COL7A1 regulatory elements that results in a permanent correction of one or more mutations or replacement of one or more exons and/or introns within or near the COL7A1 gene, thereby restoring the COL7A1 protein activity.

[0008] Also provided herein is a method for editing a COL7A1 gene in a cell by genome editing. The method can comprise: introducing into the cell one or more DNA endonucleases to effect one or more SSBs or DSBs within or near the COL7A1 gene or COL7A1 regulatory elements that results in a permanent insertion of one or more exons and/or introns within or near the COL7A1 gene, wherein the one or more exons and/or introns comprise the corrected COL7A1 gene sequence, thereby restoring expression of the corrected COL7A1 transcript.

[0009] Also provided herein is an ex vivo method for treating a patient having a COL7A1 related condition or disorder. The method can comprise: editing a keratinocyte or fibroblast within or near a COL7A1 gene or other DNA sequences that encode regulatory elements of the COL7A1 gene; and implanting the edited keratinocyte or fibroblast into the patient.

[0010] The editing step can comprise introducing into the keratinocyte or fibroblast one or more DNA endonucleases to effect one or more SSBs or DSBs within or near the COL7A1 gene or COL7A1 regulatory elements that results in a permanent correction of one or more mutations or replacement of one or more exons and/or introns within or near the COL7A1 gene, thereby restoring the COL7A1 protein activity.

[0011] The editing step can comprise introducing into the keratinocyte or fibroblast one or more DNA endonucleases to effect one or more SSBs or DSBs within or near the COL7A1 gene or COL7A1 regulatory elements that results in a permanent insertion of one or more exons and/or introns within or near the COL7A1 gene, wherein the one or more exons and/or introns comprise the corrected COL7A1 gene sequence, thereby restoring expression of the corrected COL7A1 transcript.

[0012] The method can further comprise: isolating the keratinocyte or fibroblast from the patient. The implanting can comprise culturing the keratinocyte or fibroblast to form sheets of skin and implanting the skin grafts onto the patient's skin.

[0013] Also provided herein is an ex vivo method for treating a patient having a COL7A1 related condition or disorder. The method can comprise: editing a patient specific induced pluripotent stem cell (iPSC) within or near a COL7A1 gene or other DNA sequences that encode regulatory elements of the COL7A1 gene; differentiating the edited iPSC into a keratinocyte or fibroblast; and implanting the keratinocyte or fibroblast into the patient.

[0014] The editing step can comprise introducing into the iPSC one or more DNA endonucleases to effect one or more SSBs or DSBs within or near the COL7A1 gene or COL7A1 regulatory elements that results in a permanent correction of one or more mutations or replacement of one or more exons and/or introns within or near the COL7A1 gene, thereby restoring the COL7A1 protein activity.

[0015] The editing step can comprise introducing into the iPSC one or more DNA endonucleases to effect one or more SSBs or DSBs within or near the COL7A1 gene or COL7A1 regulatory elements that results in a permanent insertion of one or more exons and/or introns within or near the COL7A1 gene, wherein the one or more exons and/or introns comprise the corrected COL7A1 gene sequence, thereby restoring expression of the corrected COL7A1 transcript.

[0016] The method can further comprise: creating the iPSC, wherein the creating step comprises: isolating a somatic cell from the patient; and introducing a set of pluripotency-associated genes into the somatic cell to induce the somatic cell to become the iPSC. The somatic cell can be a fibroblast. The set of pluripotency-associated genes can be one or more of the genes selected from the group consisting of: OCT4, SOX2, KLF4, Lin28, NANOG and cMYC.

[0017] The implanting can comprise culturing the keratinocyte or fibroblast to form sheets of skin and implanting the skin grafts onto the patient's skin.

[0018] Also provided herein is an ex vivo method for treating a patient having a COL7A1 related condition or disorder. The method can comprise: editing a CD34+ cell within or near a COL7A1 gene or other DNA sequences that encode regulatory elements of the COL7A1 gene; and implanting the edited CD34+ cell into the patient.

[0019] The editing step can comprise introducing into the CD34+ cell one or more DNA endonucleases to effect one or more SSBs or DSBs within or near the COL7A1 gene or COL7A1 regulatory elements that results in a permanent correction of one or more mutations or replacement of one or more exons and/or introns within or near the COL7A1 gene, thereby restoring the COL7A1 protein activity.

[0020] The editing step can comprise introducing into the CD34+ cell one or more DNA endonucleases to effect one or more SSBs or DSBs within or near the COL7A1 gene or COL7A1 regulatory elements that results in a permanent insertion of one or more exons and/or introns within or near the COL7A1 gene, wherein the one or more exons and/or introns comprise the corrected COL7A1 gene sequence, thereby restoring expression of the corrected COL7A1 transcript.

[0021] The CD34+ cell can be a hematopoietic progenitor cell. The method can further comprise: isolating a CD34+ cell from the patient. The method can further comprise treating the patient with granulocyte colony stimulating factor (GCSF) prior to the isolating step. The treating step can be performed in combination with Plerixafor.

[0022] Also provided herein is an ex vivo method for treating a patient having a COL7A1 related condition or disorder comprising: editing a mesenchymal stem cell within or near a COL7A1 gene or other DNA sequences that encode regulatory elements of the COL7A1 gene; differentiating the edited mesenchymal stem cell into a keratinocyte or fibroblast; and implanting the keratinocyte or fibroblast into the patient.

[0023] The editing step can comprise introducing into the mesenchymal stem cell one or more DNA endonucleases to effect one or more SSBs or DSBs within or near the COL7A1 gene or COL7A1 regulatory elements that results in a permanent correction of one or more mutations or replacement of one or more exons and/or introns within or near the COL7A1 gene, thereby restoring the COL7A1 protein activity.

[0024] The editing step can comprise introducing into the mesenchymal stem cell one or more DNA endonucleases to effect one or more SSBs or DSBs within or near the COL7A1 gene or COL7A1 regulatory elements that results in a permanent insertion of one or more exons and/or introns within or near the COL7A1 gene, wherein the one or more exons and/or introns comprise the corrected COL7A1 gene sequence, thereby restoring expression of the corrected COL7A1 transcript.

[0025] The method can further comprise: isolating the mesenchymal stem cell from the patient, wherein the mesenchymal stem cell is isolated from the patient's bone marrow or peripheral blood. The isolating step can comprise: aspiration of bone marrow and isolation of mesenchymal cells using density gradient centrifugation media.

[0026] The implanting step can comprise culturing the keratinocyte or fibroblast to form sheets of skin and implanting the skin grafts onto the patient's skin.

[0027] Also provided herein is an in vivo method for treating a patient with a COL7A1 related disorder. The method can comprise: editing the COL7A1 gene in a cell of the patient.

[0028] The editing step can comprise introducing into the cell one or more DNA endonucleases to effect one or more SSBs or DSBs within or near the COL7A1 gene or COL7A1 regulatory elements that results in a permanent correction of one or more mutations or replacement of one or more exons and/or introns within or near the COL7A1 gene, thereby restoring the COL7A1 protein activity.

[0029] The editing step can comprise: introducing into the cell one or more DNA endonucleases to effect one or more SSBs or DSBs within or near the COL7A1 gene or COL7A1 regulatory elements that results in a permanent insertion of one or more exons and/or introns within or near the COL7A1 gene, wherein the one or more exons and/or introns comprise the corrected COL7A1 gene sequence, thereby restoring expression of the corrected COL7A1 transcript.

[0030] The cell can be a keratinocyte or fibroblast. The one or more DNA endonuclease can be delivered to the keratinocyte or fibroblast by intradermal injection.

[0031] The COL7A1 related condition or disorder can be DEB.

[0032] Also provided herein is a method of altering the contiguous genomic sequence of a COL7A1 gene in a cell. The method can comprise: contacting the cell with one or more DNA endonuclease to effect one or more SSBs or DSBs.

[0033] The alteration of the contiguous genomic sequence can occur in exon 1, intron 1, exon 2, intron 2, exon 3, intron 3, exon 4, intron 4, exon 5, intron 5, exon 6, intron 6, exon 7, intron 7, exon 8, intron 8, exon 9, intron 9, exon 10, intron 10, exon 11, intron 11, exon 12, intron 12, exon 13, intron 13, exon 14, intron 14, exon 15, intron 15, exon 16, intron 16, exon 17, intron 17, exon 18, intron 18, exon 19, intron 19, exon 20, intron 20, exon 21, intron 21, exon 22, intron 22, exon 23, intron 23, exon 24, intron 24, exon 25, intron 25, exon 26, intron 26, exon 27, intron 27, exon 28, intron 28, exon 29, intron 29, exon 30, intron 30, exon 31, intron 31, exon 32, intron 32, exon 33, intron 33, exon 34, intron 34, exon 35, intron 35, exon 36, intron 36, exon 37, intron 37, exon 38, intron 38, exon 39, intron 39, exon 40, intron 40, exon 41, intron 41, exon 42, intron 42, exon 43, intron 43, exon 44, intron 44, exon 45, intron 45, exon 46, intron 46, exon 47, intron 47, exon 48, intron 48, exon 49, intron 49, exon 50, intron 50, exon 51, intron 51, exon 52, intron 52, exon 53, intron 53, exon 54, intron 54, exon 55, intron 55, exon 56, intron 56, exon 57, intron 57, exon 58, intron 58, exon 59, intron 59, exon 60, intron 60, exon 61, intron 61, exon 62, intron 62, exon 63, intron 63, exon 64, intron 64, exon 65, intron 65, exon 66, intron 66, exon 67, intron 67, exon 68, intron 68, exon 69, intron 69, exon 70, intron 70, exon 71, intron 71, exon 72, intron 72, exon 73, intron 73, exon 74, intron 74, exon 75, intron 75, exon 76, intron 76, exon 77, intron 77, exon 78, intron 78, exon 79, intron 79, exon 80, intron 80, exon 81, intron 81, exon 82, intron 82, exon 83, intron 83, exon 84, intron 84, exon 85, intron 85, exon 86, intron 86, exon 87, intron 87, exon 88, intron 88, exon 89, intron 89, exon 90, intron 90, exon 91, intron 91, exon 92, intron 92, exon 93, intron 93, exon 94, intron 94, exon 95, intron 95, exon 96, intron 96, exon 97, intron 97, exon 98, intron 98, exon 99, intron 99, exon 100, intron 100, exon 101, intron 101, exon 102, intron 102, exon 103, intron 103, exon 104, intron 104, exon 105, intron 105, exon 106, intron 106, exon 107, intron 107, exon 108, intron 108, exon 109, intron 109, exon 110, intron 110, exon 111, intron 111, exon 112, intron 112, exon 113, intron 113, exon 114, intron 114, exon 115, intron 115, exon 116, intron 116, exon 117, intron 117, exon 118, intron 118, exon 119, intron 119, exon 120, intron 120, exon 121, intron 121, exon 122, intron 122, exon 123, intron 123, exon 124, intron 124, exon 125, intron 125, exon 126, intron 126, exon 127, intron 127, exon 128, intron 128, exon 129, intron 129, exon 130, intron 130, exon 131, intron 131, exon 132, intron 132, exon 133, intron 133, exon 134, intron 134, exon 135, intron 135, exon 136, intron 136, exon 137, intron 137, exon 138, intron 138, exon 139, intron 139, exon 140, intron 140, exon 141, intron 141, exon 142, intron 142, exon 143, intron 143, exon 144, intron 144, exon 145, intron 145, exon 146, intron 146, exon 147, intron 147, exon 148, intron 148, exon 149, intron 149, exon 150, intron 150, exon 151, intron 151, exon 152, intron 152, exon 153, intron 153, exon 154, intron 154, exon 155, intron 155, exon 156, intron 156, exon 157, intron 157, exon 158, intron 158, exon 159, intron 159, exon 160, intron 160, exon 161, intron 161, exon 162, intron 162, exon 163, intron 163, exon 164, intron 164, exon 165, intron 165, exon 166, intron 166, exon 167, intron 167, exon 168, intron 168, exon 169, intron 169, exon 170, intron 170, exon 171, intron 171, exon 172, intron 172, exon 173, intron 173, exon 174, intron 174, exon 175, intron 175, exon 176, intron 176, exon 177, intron 177, exon 178, intron 178, exon 179, intron 179, exon 180, intron 180, exon 181, intron 181, exon 182, intron 182, exon 183, intron 183, exon 184, intron 184, exon 185, intron 185, exon 186, intron 186, exon 187, intron 187, exon 188, intron 188, exon 189, intron 189, exon 190, intron 190, exon 191, intron 191, exon 192, intron 192, exon 193, intron 193, exon 194, intron 194, exon 195, intron 195, exon 196, intron 196, exon 197, intron 197, exon 198, intron 198, exon 199, intron 199, exon 200, intron 200, exon 201, intron 201, exon 202, intron 202, exon 203, intron 203, exon 204, intron 204, exon 205, intron 205, exon 206, intron 206, exon 207, intron 207, exon 208, intron 208, exon 209, intron 209, exon 210, intron 210, exon 211, intron 211, exon 212, intron 212, exon 213, intron 213, exon 214, intron 214, exon 215, intron 215, exon 216, intron 216, exon 217, intron 217, or exon 218 of the COL7A1 gene. The alteration can result in a permanent correction of one or more mutations or replacement of one or more exons and/or introns within or near the COL7A1 gene, thereby restoring the COL7A1 protein activity. The alteration can result in a permanent insertion of one or more exons and/or introns of the COL7A1 gene, wherein the one or more exons and/or introns comprise the corrected COL7A1 gene sequence, thereby restoring expression of the corrected COL7A1 transcript. The permanent insertion of one or more exons and/or introns of the COL7A1 gene, can occur in any one or more introns or exons selected from the group consisting of: intron 31, exon 32, intron 32, exon 33, intron 33, exon 34, intron 34, exon 35, intron 35, exon 36, intron 36, exon 37, intron 37, exon 38, intron 38, exon 39, intron 39, exon 40, intron 40, exon 41, intron 41, exon 42, intron 42, exon 43, intron 43, exon 44, intron 44, exon 45, intron 45, exon 46, and intron 46.

[0034] The one or more DNA endonuclease can be selected from any of those sequences in SEQ ID NOs: 1-620 and variants having at least 90% homology to any of those sequences disclosed in SEQ ID NOs: 1-620. The one or more DNA endonuclease can be one or more proteins or polypeptides. The one or more proteins or polypeptides can be flanked at the N-terminus, the C-terminus, or both the N-terminus and C-terminus by one or more nuclear localization signals (NLSs). The one or more proteins or polypeptides can be flanked by two NLSs, one NLS located at the N-terminus and the second NLS located at the C-terminus. The one or more NLSs can be a SV40 NLS. The one or more DNA endonuclease can be one or more polynucleotide encoding the one or more DNA endonuclease. The one or more DNA endonuclease can be one or more ribonucleic acid (RNA) encoding the one or more DNA endonuclease. The one or more RNA can be one or more chemically modified RNA. The one or more RNA can be chemically modified in the coding region. The one or more polynucleotide or one or more RNA can be codon optimized.

[0035] The method can further comprise: introducing one or more gRNA or one or more sgRNA. The one or more gRNA or one or more sgRNA can be chemically modified. The one or more modified sgRNAs can comprise three 2′-O-methyl-phosphorothioate residues at or near each of its 5′ and 3′ ends. The one or more gRNA or one or more sgRNA can comprise a spacer sequence that is complementary to a DNA sequence within or near exon 1, intron 1, exon 2, intron 2, exon 3, intron 3, exon 4, intron 4, exon 5, intron 5, exon 6, intron 6, exon 7, intron 7, exon 8, intron 8, exon 9, intron 9, exon 10, intron 10, exon 11, intron 11, exon 12, intron 12, exon 13, intron 13, exon 14, intron 14, exon 15, intron 15, exon 16, intron 16, exon 17, intron 17, exon 18, intron 18, exon 19, intron 19, exon 20, intron 20, exon 21, intron 21, exon 22, intron 22, exon 23, intron 23, exon 24, intron 24, exon 25, intron 25, exon 26, intron 26, exon 27, intron 27, exon 28, intron 28, exon 29, intron 29, exon 30, intron 30, exon 31, intron 31, exon 32, intron 32, exon 33, intron 33, exon 34, intron 34, exon 35, intron 35, exon 36, intron 36, exon 37, intron 37, exon 38, intron 38, exon 39, intron 39, exon 40, intron 40, exon 41, intron 41, exon 42, intron 42, exon 43, intron 43, exon 44, intron 44, exon 45, intron 45, exon 46, intron 46, exon 47, intron 47, exon 48, intron 48, exon 49, intron 49, exon 50, intron 50, exon 51, intron 51, exon 52, intron 52, exon 53, intron 53, exon 54, intron 54, exon 55, intron 55, exon 56, intron 56, exon 57, intron 57, exon 58, intron 58, exon 59, intron 59, exon 60, intron 60, exon 61, intron 61, exon 62, intron 62, exon 63, intron 63, exon 64, intron 64, exon 65, intron 65, exon 66, intron 66, exon 67, intron 67, exon 68, intron 68, exon 69, intron 69, exon 70, intron 70, exon 71, intron 71, exon 72, intron 72, exon 73, intron 73, exon 74, intron 74, exon 75, intron 75, exon 76, intron 76, exon 77, intron 77, exon 78, intron 78, exon 79, intron 79, exon 80, intron 80, exon 81, intron 81, exon 82, intron 82, exon 83, intron 83, exon 84, intron 84, exon 85, intron 85, exon 86, intron 86, exon 87, intron 87, exon 88, intron 88, exon 89, intron 89, exon 90, intron 90, exon 91, intron 91, exon 92, intron 92, exon 93, intron 93, exon 94, intron 94, exon 95, intron 95, exon 96, intron 96, exon 97, intron 97, exon 98, intron 98, exon 99, intron 99, exon 100, intron 100, exon 101, intron 101, exon 102, intron 102, exon 103, intron 103, exon 104, intron 104, exon 105, intron 105, exon 106, intron 106, exon 107, intron 107, exon 108, intron 108, exon 109, intron 109, exon 110, intron 110, exon 111, intron 111, exon 112, intron 112, exon 113, intron 113, exon 114, intron 114, exon 115, intron 115, exon 116, intron 116, exon 117, intron 117, exon 118, intron 118, exon 119, intron 119, exon 120, intron 120, exon 121, intron 121, exon 122, intron 122, exon 123, intron 123, exon 124, intron 124, exon 125, intron 125, exon 126, intron 126, exon 127, intron 127, exon 128, intron 128, exon 129, intron 129, exon 130, intron 130, exon 131, intron 131, exon 132, intron 132, exon 133, intron 133, exon 134, intron 134, exon 135, intron 135, exon 136, intron 136, exon 137, intron 137, exon 138, intron 138, exon 139, intron 139, exon 140, intron 140, exon 141, intron 141, exon 142, intron 142, exon 143, intron 143, exon 144, intron 144, exon 145, intron 145, exon 146, intron 146, exon 147, intron 147, exon 148, intron 148, exon 149, intron 149, exon 150, intron 150, exon 151, intron 151, exon 152, intron 152, exon 153, intron 153, exon 154, intron 154, exon 155, intron 155, exon 156, intron 156, exon 157, intron 157, exon 158, intron 158, exon 159, intron 159, exon 160, intron 160, exon 161, intron 161, exon 162, intron 162, exon 163, intron 163, exon 164, intron 164, exon 165, intron 165, exon 166, intron 166, exon 167, intron 167, exon 168, intron 168, exon 169, intron 169, exon 170, intron 170, exon 171, intron 171, exon 172, intron 172, exon 173, intron 173, exon 174, intron 174, exon 175, intron 175, exon 176, intron 176, exon 177, intron 177, exon 178, intron 178, exon 179, intron 179, exon 180, intron 180, exon 181, intron 181, exon 182, intron 182, exon 183, intron 183, exon 184, intron 184, exon 185, intron 185, exon 186, intron 186, exon 187, intron 187, exon 188, intron 188, exon 189, intron 189, exon 190, intron 190, exon 191, intron 191, exon 192, intron 192, exon 193, intron 193, exon 194, intron 194, exon 195, intron 195, exon 196, intron 196, exon 197, intron 197, exon 198, intron 198, exon 199, intron 199, exon 200, intron 200, exon 201, intron 201, exon 202, intron 202, exon 203, intron 203, exon 204, intron 204, exon 205, intron 205, exon 206, intron 206, exon 207, intron 207, exon 208, intron 208, exon 209, intron 209, exon 210, intron 210, exon 211, intron 211, exon 212, intron 212, exon 213, intron 213, exon 214, intron 214, exon 215, intron 215, exon 216, intron 216, exon 217, intron 217, or exon 218 of the COL7A1 gene. The one or more gRNA or one or more sgRNA can comprise a spacer sequence that is complementary to a DNA sequence within or near any one or more introns or exons selected from the group consisting of: intron 31, exon 32, intron 32, exon 33, intron 33, exon 34, intron 34, exon 35, intron 35, exon 36, intron 36, exon 37, intron 37, exon 38, intron 38, exon 39, intron 39, exon 40, intron 40, exon 41, intron 41, exon 42, intron 42, exon 43, intron 43, exon 44, intron 44, exon 45, intron 45, exon 46, and intron 46. The one or more gRNA or one or more sgRNA can comprise a RNA sequence corresponding to a sequence selected from the group consisting of SEQ ID NOs: 20203, 12355, 12342, 20135, 20126, 12414, 20127, 20131, 12415, 20156, 12437, 20219, 20202, 12302, 12264, 20286, 12416, 20307, 20205, 12399, 20297, 20322, 20130, 12423, 12412, 20128, 12349, 20285, 12243, 20155, 12256, 20305, 20246, and 20223.

[0036] The one or more gRNA or one or more sgRNA can be pre-complexed with the one or more DNA endonuclease to form one or more RNPs. The pre-complexing can involve a covalent attachment of the one or more gRNA or one or more sgRNA to the one or more DNA endonuclease. The weight ratio of sgRNA to DNA endonuclease in the RNP can be 1:1. The one or more DNA endonuclease can be formulated in a liposome or lipid nanoparticle. The one or more DNA endonuclease can be formulated in a liposome or lipid nanoparticle which also comprises the one or more gRNA or one or more sgRNA. The one or more DNA endonuclease can be encoded in an AAV vector particle. The one or more gRNA or one or more sgRNA can be encoded in an AAV vector particle. The one or more DNA endonuclease can be encoded in an AAV vector particle which also encodes the one or more gRNA or one or more sgRNA. The AAV vector particle can be selected from the group consisting of any of those sequences disclosed in SEQ ID NOs: 4734-5302 and Table 2.

[0037] The method further can comprise: introducing into the cell a donor template comprising at least a portion of the wild-type or corrected COL7A1 gene. The at least a portion of the wild-type or corrected COL7A1 gene can comprise one or more sequences selected from the group consisting of a COL7A1 exon, a COL7A1 intron, a sequence comprising an exon:intron junction of COL7A1. The donor template can comprise homologous arms to the genomic locus of the COL7A1 gene. The donor template can be either a single or double stranded polynucleotide. The donor template can be encoded in an AAV vector particle, wherein the AAV vector particle is selected from the group consisting of any of those sequences listed in SEQ ID NOs: 4734-5302 and Table 2.

[0038] The one or more polynucleotide encoding one or more DNA endonuclease can be formulated into a lipid nanoparticle, and the one or more gRNA or one or more sgRNA can be delivered to the cell ex vivo by electroporation and the donor template can be delivered to the cell by an AAV vector. The one or more polynucleotide encoding one or more DNA endonuclease can be formulated into a liposome or lipid nanoparticle which also comprises the one or more gRNA or one or more sgRNA and the donor template.

[0039] The COL7A1 gene can be located on Chromosome 3: 48,564,073 - 48,595,267

[0040] (Genome Reference Consortium—GRCh38).

[0041] Also provided herein is a single-molecule guide RNA comprising at least a spacer sequence that is an RNA sequence corresponding to any one of SEQ ID NOs: 5305-33,088. The single-molecule guide RNA can further comprise a spacer extension region. The single-molecule guide RNA can further comprise a tracrRNA extension region. The single-molecule guide RNA can be chemically modified. The single-molecule guide RNA can be pre-complexed with a DNA endonuclease. The DNA endonuclease can be a Cas9 or Cpf1 endonuclease. The Cas9 or Cpf1 endonuclease can be selected from the group consisting of: S. pyogenes Cas9, S. aureus Cas9, N. meningitidis Cas9, S. thermophilus CRISPR1 Cas9, S. thermophilus CRISPR 3 Cas9, T denticola Cas9, L. bacterium ND2006 Cpf1 and Acidaminococcus sp. BV3L6 Cpf1, and variants having at least 90% homology to the endonucleases. The Cas9 or Cpf1 endonuclease can comprise one or more NLSs. At least one NLS can be at or within 50 amino acids of the amino-terminus of the Cas9 or Cpf1 endonuclease and/or at least one NLS can be at or within 50 amino acids of the carboxy-terminus of the Cas9 or Cpf1 endonuclease.

[0042] Also provided herein is a DNA encoding the single-molecule guide RNA.

[0043] Also provided herein is a therapeutic comprising at least one or more gRNAs for editing a COL7A1 gene in a cell from a patient with a COL7A1 related condition or disorder, the one or more gRNAs comprising a spacer sequence selected from the group consisting of nucleic acid sequences in any one of SEQ ID NOs: 5305-33,088 of the Sequence Listing.

[0044] Also provided herein is a therapeutic for treating a patient with a COL7A1 related condition or disorder formed by the method comprising: introducing one or more DNA endonucleases; introducing one or more gRNA or one or more sgRNA for editing a COL7A1 gene; wherein the one or more gRNAs or sgRNAs comprise a spacer sequence selected from the group consisting of nucleic acid sequences in SEQ ID NOs: 5305-33,088 of the Sequence Listing.

[0045] The COL7A1 related condition or disorder can be DEB.

[0046] It is understood that the inventions described in this specification are not limited to the examples summarized in this Summary. Various other aspects are described and exemplified herein.

### BRIEF DESCRIPTION OF THE DRAWINGS

[0047] Various aspects of materials and methods disclosed and described in this specification can be better understood by reference to the accompanying figures, in which:

[0048] FIGS. 1A-B depict the type II CRISPR/Cas system;

[0049] FIG. 1A is a depiction of the type II CRISPR/Cas system including gRNA;

[0050] FIG. 1B is another depiction of the type II CRISPR/Cas system including sgRNA;

[0051] FIGS. 2A-B describes the cutting efficiencies in the range of 8.8-87.8% of S. pyogenes gRNAs selected via an in-vitro transcribed (IVT) gRNA screen in HEK293T cells;

[0052] FIGS. 2A describes the cutting efficiencies in the range of 39.6-87.8% of S. pyogenes gRNAs selected via an in-vitro transcribed (IVT) gRNA screen in HEK293T cells;

[0053] FIGS. 2B describes the cutting efficiencies in the range of 8.8-39.2% of S. pyogenes gRNAs selected via an in-vitro transcribed (IVT) gRNA screen in HEK293T cells; and

[0054] FIG. 3 is a graph describing the cutting efficiencies in the range of 8.8-87.8% of S. pyogenes gRNAs in HEK293T cells.

### BRIEF DESCRIPTION OF SEQUENCE LISTING

[0055] SEQ ID NOs: 1-620 are Cas endonuclease ortholog sequences.

[0056] SEQ ID NOs: 621-631 do not include sequences.

[0057] SEQ ID NOs: 632-4715 are microRNA sequences.

[0058] SEQ ID NOs: 4716-4733 do not include sequences.

[0059] SEQ ID NOs: 4734-5302 are AAV serotype sequences.

[0060] SEQ ID NO: 5303 is a COL7A1 nucleotide sequence.

[0061] SEQ ID NO: 5304 is a gene sequence including 1-5 kilobase pairs upstream and/or downstream of the COL7A1 gene.

[0062] SEQ ID NOs: 5305-5329 are 20 bp spacer sequences for targeting within or near a COL7A1 gene or other DNA sequence that encodes a regulatory element of the COL7A1 gene with a T denticola Cas9 endonuclease.

[0063] SEQ ID NOs: 5330-5462 are 20 bp spacer sequences for targeting within or near a COL7A1 gene or other DNA sequence that encodes a regulatory element of the COL7A1 gene with a S. thermophilus Cas9 endonuclease.

[0064] SEQ ID NOs: 5463-6990 are 20 bp spacer sequences for targeting within or near a COL7A1 gene or other DNA sequence that encodes a regulatory element of the COL7A1 gene with a S. aureus Cas9 endonuclease.

[0065] SEQ ID NOs: 6991 - 7470 are 20 bp spacer sequences for targeting within or near a COL7A1 gene or other DNA sequence that encodes a regulatory element of the COL7A1 gene with a N. meningitidis Cas9 endonuclease.

[0066] SEQ ID NOs: 7471-23,594 are 20 bp spacer sequences for targeting within or near a COL7A1 gene or other DNA sequence that encodes a regulatory element of the COL7A1 gene with a S. pyogenes Cas9 endonuclease.

[0067] SEQ ID NOs: 23,595-33,088 are 20 bp spacer sequences for targeting within or near a COL7A1 gene or other DNA sequence that encodes a regulatory element of the COL7A1 gene with an Acidaminococcus, a Lachnospiraceae, and a Franciscella Novicida Cpf1 endonuclease.

[0068] SEQ ID NOs: 33,089 - 33,118 do not include sequences.

[0069] SEQ ID NO: 33,119 is a sample spacer sequence, including the PAM, for a guide RNA (gRNA) for a S. pyogenes Cas9 endonuclease.

[0070] SEQ ID NOs: 33,120-33,122 show sample sgRNA sequences.

[0071] SEQ ID NO: 33,123 shows a known family of homing endonuclease, as classified by its structure.

### DETAILED DESCRIPTION

### I. INTRODUCTION

### Genome Editing

[0072] The present disclosure provides strategies and techniques for the targeted, specific alteration of the genetic information (genome) of living organisms. As used herein, the term “alteration” or “alteration of genetic information” refers to any change in the genome of a cell. In the context of treating genetic disorders, alterations may include, but are not limited to, insertion, deletion and correction. As used herein, the term “insertion” refers to an addition of one or more nucleotides in a DNA sequence. Insertions can range from small insertions of a few nucleotides to insertions of large segments such as a cDNA or a gene. The term “deletion” refers to a loss or removal of one or more nucleotides in a DNA sequence or a loss or removal of the function of a gene. In some cases, a deletion can include, for example, a loss of a few nucleotides, an exon, an intron, a gene segment, or the entire sequence of a gene. In some cases, deletion of a gene refers to the elimination or reduction of the function or expression of a gene or its gene product. This can result from not only a deletion of sequences within or near the gene, but also other events (e.g., insertion, nonsense mutation) that disrupt the expression of the gene. The term “correction” or “corrected” as used herein, refers to a change of one or more nucleotides of a genome in a cell, whether by insertion, deletion or substitution. Such correction may result in a more favorable genotypic or phenotypic outcome, whether in structure or function, to the genomic site which was corrected. One non-limiting example of a “correction” includes the correction of a mutant or defective sequence to a wild-type sequence which restores structure or function to a gene or its gene product(s). Depending on the nature of the mutation, correction may be achieved via various strategies disclosed herein. In one non-limiting example, a missense mutation may be corrected by replacing the region containing the mutation with its wild-type counterpart. As another example, duplication mutations (e.g., repeat expansions) in a gene may be corrected by removing the extra sequences.

[0073] In some aspects, alterations may also include a gene knock-in, knock-out or knock-down. As used herein, the term “knock-in” refers to an addition of a DNA sequence, or fragment thereof into a genome. Such DNA sequences to be knocked-in may include an entire gene or genes, may include regulatory sequences associated with a gene or any portion or fragment of the foregoing. For example, a cDNA encoding the wild-type protein may be inserted into the genome of a cell carrying a mutant gene. Knock-in strategies need not replace the defective gene, in whole or in part. In some cases, a knock-in strategy may further involve substitution of an existing sequence with the provided sequence, e.g., substitution of a mutant allele with a wild-type copy. On the other hand, the term “knock-out” refers to the elimination of a gene or the expression of a gene. For example, a gene can be knocked out by either a deletion or an addition of a nucleotide sequence that leads to a disruption of the reading frame. As another example, a gene may be knocked out by replacing a part of the gene with an irrelevant sequence. Finally, the term “knock-down” as used herein refers to reduction in the expression of a gene or its gene product(s). As a result of a gene knock-down, the protein activity or function may be attenuated or the protein levels may be reduced or eliminated.

[0074] Genome editing generally refers to the process of modifying the nucleotide sequence of a genome, preferably in a precise or pre-determined manner. Examples of methods of genome editing described herein include methods of using site-directed nucleases to cut deoxyribonucleic acid (DNA) at precise target locations in the genome, thereby creating single-strand or double-strand DNA breaks at particular locations within the genome. Such breaks can be and regularly are repaired by natural, endogenous cellular processes, such as homology-directed repair (HDR) and non-homologous end joining (NHEJ), as reviewed in Cox et al., Nature Medicine 21(2), 121-31 (2015). These two main DNA repair processes consist of a family of alternative pathways. NHEJ directly joins the DNA ends resulting from a double-strand break, sometimes with the loss or addition of nucleotide sequence, which may disrupt or enhance gene expression. HDR utilizes a homologous sequence, or donor sequence, as a template for inserting a defined DNA sequence at the break point. The homologous sequence can be in the endogenous genome, such as a sister chromatid. Alternatively, the donor can be an exogenous nucleic acid, such as a plasmid, a single-strand oligonucleotide, a double-stranded oligonucleotide, a duplex oligonucleotide or a virus, that has regions of high homology with the nuclease-cleaved locus, but which can also contain additional sequence or sequence changes including deletions that can be incorporated into the cleaved target locus. A third repair mechanism can be microhomology-mediated end joining (MMEJ), also referred to as “Alternative NHEJ,” in which the genetic outcome is similar to NHEJ in that small deletions and insertions can occur at the cleavage site. MMEJ can make use of homologous sequences of a few base pairs flanking the DNA break site to drive a more favored DNA end joining repair outcome, and recent reports have further elucidated the molecular mechanism of this process; see, e.g., Cho and Greenberg, Nature 518, 174-76 (2015); Kent et al., Nature Structural and Molecular Biology, Adv. Online doi:10.1038/nsmb.2961(2015); Mateos-Gomez etal., Nature 518, 254-57 (2015); Ceccaldi etal., Nature 528, 258-62 (2015). In some instances, it may be possible to predict likely repair outcomes based on analysis of potential microhomologies at the site of the DNA break.

[0075] Each of these genome editing mechanisms can be used to create desired genomic alterations. A step in the genome editing process can be to create one or two DNA breaks, the latter as double-strand breaks or as two single-stranded breaks, in the target locus as near the site of intended mutation. This can be achieved via the use of site-directed polypeptides, as described and illustrated herein.

### CRISPR Endonuclease System

[0076] A CRISPR (Clustered Regularly Interspaced Short Palindromic Repeats) genomic locus can be found in the genomes of many prokaryotes (e.g., bacteria and archaea). In prokaryotes, the CRISPR locus encodes products that function as a type of immune system to help defend the prokaryotes against foreign invaders, such as virus and phage. There are three stages of CRISPR locus function: integration of new sequences into the CRISPR locus, expression of CRISPR RNA (crRNA), and silencing of foreign invader nucleic acid. Five types of CRISPR systems (e.g., Type I, Type II, Type III, Type U, and Type V) have been identified.

[0077] A CRISPR locus includes a number of short repeating sequences referred to as “repeats.” When expressed, the repeats can form secondary structures (e.g., hairpins) and/or comprise unstructured single-stranded sequences. The repeats usually occur in clusters and frequently diverge between species. The repeats are regularly interspaced with unique intervening sequences referred to as “spacers,” resulting in a repeat-spacer-repeat locus architecture. The spacers are identical to or have high homology with known foreign invader sequences. A spacer-repeat unit encodes a crisprRNA (crRNA), which is processed into a mature form of the spacer-repeat unit. A crRNA comprises a “seed” or spacer sequence that is involved in targeting a target nucleic acid (in the naturally occurring form in prokaryotes, the spacer sequence targets the foreign invader nucleic acid). A spacer sequence is located at the 5′ or 3′ end of the crRNA.

[0078] A CRISPR locus also comprises polynucleotide sequences encoding CRISPR Associated (Cas) genes. Cas genes encode endonucleases involved in the biogenesis and the interference stages of crRNA function in prokaryotes. Some Cas genes comprise homologous secondary and/or tertiary structures.

### Type II CRISPR Systems

[0079] crRNA biogenesis in a Type II CRISPR system in nature requires a trans-activating CRISPR RNA (tracrRNA). Non-limiting examples of Type II CRISPR systems are shown in FIGS. 1A and 1B. The tracrRNA can be modified by endogenous RNaseIII, and then hybridizes to a crRNA repeat in the pre-crRNA array. Endogenous RNaseIII can be recruited to cleave the pre-crRNA. Cleaved crRNAs can be subjected to exoribonuclease trimming to produce the mature crRNA form (e.g., 5′ trimming). The tracrRNA can remain hybridized to the crRNA, and the tracrRNA and the crRNA associate with a site-directed polypeptide (e.g., Cas9). The crRNA of the crRNA-tracrRNA-Cas9 complex can guide the complex to a target nucleic acid to which the crRNA can hybridize. Hybridization of the crRNA to the target nucleic acid can activate Cas9 for targeted nucleic acid cleavage. The target nucleic acid in a Type II CRISPR system is referred to as a protospacer adjacent motif (PAM). In nature, the PAM is essential to facilitate binding of a site-directed polypeptide (e.g., Cas9) to the target nucleic acid. Type II systems (also referred to as Nmeni or CASS4) are further subdivided into Type II-A

[0080] (CASS4) and II-B (CASS4a). Jinek et al., Science, 337(6096): 816-821 (2012) showed that the CRISPR/Cas9 system is useful for RNA-programmable genome editing, and international patent application publication number WO2013/176772 provides numerous examples and applications of the CRISPR/Cas endonuclease system for site-specific gene editing.

### Type V CRISPR Systems

[0081] Type V CRISPR systems have several important differences from Type II systems. For example, Cpf1 is a single RNA-guided endonuclease that, in contrast to Type II systems, lacks tracrRNA. In fact, Cpf1-associated CRISPR arrays can be processed into mature crRNAs without the requirement of an additional trans-activating tracrRNA. The Type V CRISPR array can be processed into short mature crRNAs of 42-44 nucleotides in length, with each mature crRNA beginning with 19 nucleotides of direct repeat followed by 23-25 nucleotides of spacer sequence. In contrast, mature crRNAs in Type II systems can start with 20-24 nucleotides of spacer sequence followed by about 22 nucleotides of direct repeat. Also, Cpf1 can utilize a T-rich protospacer-adjacent motif such that Cpf1-crRNA complexes efficiently cleave target DNA preceded by a short T-rich PAM, which is in contrast to the G-rich PAM following the target DNA for Type II systems. Thus, Type V systems cleave at a point that is distant from the PAM, while Type II systems cleave at a point that is adjacent to the PAM. In addition, in contrast to Type II systems, Cpf1 cleaves DNA via a staggered DNA double-stranded break with a 4 or 5 nucleotide 5′ overhang. Type II systems cleave via a blunt double-stranded break. Similar to Type II systems, Cpf1 contains a predicted RuvC-like endonuclease domain, but lacks a second HNH endonuclease domain, which is in contrast to Type II systems.

### Cas Genes/Polypeptides and Protospacer Adjacent Motifs

[0082] Exemplary CRISPR/Cas polypeptides include the Cas9 polypeptides as published in

[0083] Fonfara et al., Nucleic Acids Research, 42: 2577-2590 (2014). The CRISPR/Cas gene naming system has undergone extensive rewriting since the Cas genes were discovered. Fonfara et al., also provides PAM sequences for the Cas9 polypeptides from various species (see also Table 1 infra).

### II. COMPOSITIONS AND METHODS OF THE DISCLOSURE

### Editing Strategy

[0084] Provided herein are cellular, ex vivo and in vivo methods for using genome engineering tools to create permanent changes to the genome. In certain aspects these changes may include: 1) inserting a wild-type COL7A1 gene, a cDNA or a minigene (comprised of one or more exons and optionally one or more introns, including natural or synthetic introns) into the COL7A1 gene locus or a safe harbor locus, 2) deleting the mutant COL7A1 gene and inserting a wild-type COL7A1 gene, a cDNA or a minigene (comprised of one or more exons and optionally one or more introns, including natural or synthetic introns) into the COL7A1 gene locus or a safe harbor locus, or 3) correcting one or more mutations within or near the COL7A1 gene or other

[0085] DNA sequences that encode regulatory elements of the COL7A1 gene. Such methods use endonucleases, such as CRISPR-associated (Cas9, Cpf1 and the like) nucleases, to permanently correct the entire gene or correct one or more mutations within or near the genomic locus of the COL7A1 gene or other DNA sequences that encode regulatory elements of the COL7A1 gene. In this way, examples set forth in the present disclosure can help to correct the COL7A1 gene with a single treatment (rather than deliver potential therapies for the lifetime of the patient).

[0086] The methods provided herein, regardless of whether a cellular or ex vivo or in vivo method, can involve one or a combination of the following: 1) using one or more gRNA for inserting one or more exons and/or introns within or near the COL7A1 gene wherein the one or more exons and/or introns comprise the corrected COL7A1 gene sequences; 2) using one or more gRNA for correcting one or more mutations within or near the COL7A1 gene or COL7A1 regulatory elements; 3) using one or more gRNA for replacing one or more exons and/or introns within or near the COL7A1 gene.

[0087] In the first editing strategy, a wild-type or corrected COL7A1 gene, a cDNA or a minigene (comprised of one or more exons and optionally one or more introns, including natural or synthetic introns) can be inserted into a locus of the COL7A1 gene. In certain aspects, this can be achieved by delivering into the cell one or more CRISPR endonucleases, one or more gRNAs (e.g., crRNA+tracrRNA, or sgRNA) targeting upstream, downstream, or within an intron or exon of the COL7A1 gene and a donor DNA that contains the desired sequence and homology arms to the flanking regions of the target locus. In certain aspects, this can be achieved by delivering into the cell one or more CRISPR endonucleases, one or more gRNAs (e.g., crRNA+tracrRNA, or sgRNA) targeting intron 36, exon 41, or any intron or exon from intron 36 through exon 41 of the COL7A1 gene, and a donor DNA that contains the desired sequence and homology arms to the flanking regions of the target locus. The cytogenetic location of the COL7A1 gene is 3p21.31. Alternatively, the wild-type or corrected COL7A1 gene, cDNA or minigene (comprised of one or more exons and optionally one or more introns, including natural or synthetic introns) can be inserted into a safe harbor locus. A “safe harbor locus” refers to a region of the genome where the integrated material can be adequately expressed without perturbing endogenous genome structure or function. The safe harbor loci include but are not limited to AAVS1 (intron 1 of PPP1R12C), HPRT, H11, hRosa26, and/or F-A region. The safe harbor loci can be selected from the group consisting of: exon 1, intron 1, or exon 2 of PPP1R12C; exon 1, intron 1, or exon 2 of HPRT; and exon 1, intron 1, or exon 2 of hRosa26. The safe harbor loci may be exons or introns of ubiquitously expressed genes and/or genes with tissue specific expression (e.g. skin). A safe harbor locus may also include a region of the genome devoid of endogeneous genes and with open chromatin that allows for the expression of the inserted transgene without perturbing the genome structure or function.

[0088] The donor DNA can be single or double stranded DNA. The donor template can have homologous arms to the 3p21.31 region. The donor template can have homologous arms to a safe harbor locus. For example, the donor template can have homologous arms to an AAVS1 safe harbor locus, such as, intron 1 of the PPP1R12C gene. As another example, the donor template can have homologous arms to a hRosa26 safe harbor locus.

[0089] In the second and third editing strategies, one or more mutated sequences in the COL7A1 gene can be replaced with wild-type or corrected sequences by inducing one single stranded break or double stranded break in the COL7A1 gene with one or more CRISPR endonucleases and a gRNA (e.g., crRNA+tracrRNA, or sgRNA), or two or more single stranded breaks or double stranded breaks in the COL7A1 gene with one or more CRISPR endonucleases and two or more gRNAs, in the presence of a donor DNA template introduced exogenously to direct the cellular DSB response to Homology-Directed Repair (the donor DNA template can be a short single stranded oligonucleotide, a short double stranded oligonucleotide, a long single or double stranded DNA molecule). This strategy can be used to correct one or more mutations in one or more exons, introns, intron:exon junctions, or other DNA sequences encoding regulatory elements of the COL7A1 gene, or combination thereof. This strategy may be employed to correct mutational hotspots within or near the COL7A1 gene. The term “mutational hotspot” used herein refers to a region in a genome that exhibits higher frequency of mutations or has higher propensity to mutate compared to the average mutation frequency or mutation rate in said genome. This approach can require development and optimization of gRNAs and donor DNA molecules for the COL7A1 gene.

[0090] Alternatively, NHEJ may be used to restore the reading frame in the COL7A1 gene by inducing one single stranded break or double stranded break in the COL7A1 gene with one or more CRISPR endonucleases and a gRNA (e.g., crRNA +tracrRNA, or sgRNA), or two or more single stranded breaks or double stranded breaks in the gene of interest with two or more

[0091] CRISPR endonucleases and two or more sgRNAs. This approach can require development and optimization of sgRNAs for the COL7A1 gene.

[0092] The advantages for the above strategies are similar, including in principle both short and long term beneficial clinical and laboratory effects. The whole gene correction approach does provide one advantage over the mutational correction approach—the ability to treat all patients versus only a subset of patients.

[0093] In addition to the above genome editing strategies, another strategy involves modulating expression, function, or activity of COL7A1 by editing in the regulatory sequence.

[0094] In addition to the editing options listed above, Cas9 or similar proteins can be used to target effector domains to the same target sites that can be identified for editing, or additional target sites within range of the effector domain. A range of chromatin modifying enzymes, methylases, or demethylases can be used to alter expression of the target gene. One possibility is increasing the expression of the COL7A1 protein if the mutation leads to lower activity. These types of epigenetic regulation have some advantages, particularly as they are limited in possible off-target effects.

[0095] A number of types of genomic target sites can be present in addition to mutations in the coding and splicing sequences.

[0096] The regulation of transcription and translation implicates a number of different classes of sites that interact with cellular proteins or nucleotides. Often the DNA binding sites of transcription factors or other proteins can be targeted for mutation or deletion to study the role of the site, though they can also be targeted to change gene expression. Sites can be added through non-homologous end joining NHEJ or direct genome editing by homology directed repair (HDR). Increased use of genome sequencing, RNA expression and genome-wide studies of transcription factor binding have increased our ability to identify how the sites lead to developmental or temporal gene regulation. These control systems can be direct or can involve extensive cooperative regulation that can require the integration of activities from multiple enhancers. Transcription factors typically bind 6-12 bp-long degenerate DNA sequences. The low level of specificity provided by individual sites suggests that complex interactions and rules are involved in binding and the functional outcome. Binding sites with less degeneracy can provide simpler means of regulation. Artificial transcription factors can be designed to specify longer sequences that have less similar sequences in the genome and have lower potential for off-target cleavage. Any of these types of binding sites can be mutated, deleted or even created to enable changes in gene regulation or expression (Canver, M.C. et al., Nature (2015)).

Site-Directed Polypeptides (endonucleases, enzymes)

[0097] A site-directed polypeptide is a nuclease used in genome editing to cleave DNA. The site-directed polypeptide can be administered to a cell or a patient as either: one or more polypeptides, or one or more mRNAs encoding the polypeptide. Any of the enzymes or orthologs listed in SEQ ID NOs: 1-620, or disclosed herein, may be utilized in the methods herein. Single molecule guide RNA can be pre-complexed with a site-directed polypeptide. The site-directed polypeptide can be any of the DNA endonuclease disclosed herein.

[0098] In the context of a CRISPR/Cas9 or CRISPR/Cpf1 system, the site-directed polypeptide can bind to a guide RNA that, in turn, specifies the site in the target DNA to which the polypeptide is directed. In the CRISPR/Cas9 or CRISPR/Cpf1 systems disclosed herein, the site-directed polypeptide can be an endonuclease, such as a DNA endonuclease.

[0099] A site-directed polypeptide can comprise a plurality of nucleic acid-cleaving (i.e., nuclease) domains. Two or more nucleic acid-cleaving domains can be linked together via a linker. For example, the linker can comprise a flexible linker. Linkers can comprise 1, 2, 3, 4, 5, 6, 7, 8, 9, 10, 11, 12, 13, 14, 15, 16, 17, 18, 19, 20, 21, 22, 23, 24, 25, 30, 35, 40 or more amino acids in length.

[0100] Naturally-occurring wild-type Cas9 enzymes comprise two nuclease domains, a HNH nuclease domain and a RuvC domain. Herein, the term “Cas9” refers to both a naturally-occurring and a recombinant Cas9. Cas9 enzymes contemplated herein can comprise a HNH or HNH-like nuclease domain, and/or a RuvC or RuvC-like nuclease domain.

[0101] HNH or HNH-like domains comprise a McrA-like fold. HNH or HNH-like domains comprises two antiparallel β-strands and an α-helix. HNH or HNH-like domains comprises a metal binding site (e.g., a divalent cation binding site). HNH or HNH-like domains can cleave one strand of a target nucleic acid (e.g., the complementary strand of the crRNA targeted strand).

[0102] RuvC or RuvC-like domains comprise an RNaseH or RNaseH-like fold. RuvC/RNaseH domains are involved in a diverse set of nucleic acid-based functions including acting on both RNA and DNA. The RNaseH domain comprises 5 (3-strands surrounded by a plurality of a-helices. RuvC/RNaseH or RuvC/RNaseH-like domains comprise a metal binding site (e.g., a divalent cation binding site). RuvC/RNaseH or RuvC/RNaseH-like domains can cleave one strand of a target nucleic acid (e.g., the non-complementary strand of a double-stranded target DNA).

[0103] Site-directed polypeptides can introduce double-strand breaks or single-strand breaks in nucleic acids, e.g., genomic DNA. The double-strand break can stimulate a cell's endogenous DNA-repair pathways (e.g., homology-dependent repair (HDR) or NHEJ or alternative non-homologous end joining (A-NHEJ) or microhomology-mediated end joining (MMEJ)). NHEJ can repair cleaved target nucleic acid without the need for a homologous template. This can sometimes result in small deletions or insertions (indels) in the target nucleic acid at the site of cleavage, and can lead to disruption or alteration of gene expression. HDR can occur when a homologous repair template, or donor, is available. The homologous donor template can comprise sequences that are homologous to sequences flanking the target nucleic acid cleavage site. The sister chromatid can be used by the cell as the repair template. However, for the purposes of genome editing, the repair template can be supplied as an exogenous nucleic acid, such as a plasmid, duplex oligonucleotide, single-strand oligonucleotide or viral nucleic acid. With exogenous donor templates, an additional nucleic acid sequence (such as a transgene) or modification (such as a single or multiple base change or a deletion) can be introduced between the flanking regions of homology so that the additional or altered nucleic acid sequence also becomes incorporated into the target locus. MMEJ can result in a genetic outcome that is similar to NHEJ in that small deletions and insertions can occur at the cleavage site. MMEJ can make use of homologous sequences of a few base pairs flanking the cleavage site to drive a favored end-joining DNA repair outcome. In some instances, it may be possible to predict likely repair outcomes based on analysis of potential microhomologies in the nuclease target regions.

[0104] Thus, in some cases, homologous recombination can be used to insert an exogenous polynucleotide sequence into the target nucleic acid cleavage site. An exogenous polynucleotide sequence is termed a “donor polynucleotide” (or donor or donor sequence) herein. The donor polynucleotide, a portion of the donor polynucleotide, a copy of the donor polynucleotide, or a portion of a copy of the donor polynucleotide can be inserted into the target nucleic acid cleavage site. The donor polynucleotide can be an exogenous polynucleotide sequence, i.e., a sequence that does not naturally occur at the target nucleic acid cleavage site.

[0105] The modifications of the target DNA due to NHEJ and/or HDR can lead to, for example, mutations, deletions, alterations, integrations, gene correction, gene replacement, gene tagging, transgene insertion, nucleotide deletion, gene disruption, translocations and/or gene mutation. The processes of deleting genomic DNA and integrating non-native nucleic acid into genomic DNA are examples of genome editing.

[0106] The site-directed polypeptide can comprise an amino acid sequence having at least 10%, at least 15%, at least 20%, at least 30%, at least 40%, at least 50%, at least 60%, at least 70%, at least 75%, at least 80%, at least 85%, at least 90%, at least 95%, at least 99%, or 100% amino acid sequence identity to a wild-type exemplary site-directed polypeptide [e.g., Cas9 from S. pyogenes, US2014/0068797 Sequence ID No. 8 or Sapranauskas et al., Nucleic Acids Res, 39(21): 9275-9282 (2011)], and various other site-directed polypeptides. The site-directed polypeptide can comprise at least 70, 75, 80, 85, 90, 95, 97, 99, or 100% identity to a wild-type site-directed polypeptide (e.g., Cas9 from S. pyogenes, supra) over 10 contiguous amino acids.

[0107] The site-directed polypeptide can comprise at most: 70, 75, 80, 85, 90, 95, 97, 99, or 100% identity to a wild-type site-directed polypeptide (e.g., Cas9 from S. pyogenes, supra) over 10 contiguous amino acids. The site-directed polypeptide can comprise at least: 70, 75, 80, 85, 90, 95, 97, 99, or 100% identity to a wild-type site-directed polypeptide (e.g., Cas9 from S. pyogenes, supra) over 10 contiguous amino acids in a HNH nuclease domain of the site-directed polypeptide. The site-directed polypeptide can comprise at most: 70, 75, 80, 85, 90, 95, 97, 99, or 100% identity to a wild-type site-directed polypeptide (e.g., Cas9 from S. pyogenes, supra) over 10 contiguous amino acids in a HNH nuclease domain of the site-directed polypeptide. The site-directed polypeptide can comprise at least: 70, 75, 80, 85, 90, 95, 97, 99, or 100% identity to a wild-type site-directed polypeptide (e.g., Cas9 from S. pyogenes, supra) over 10 contiguous amino acids in a RuvC nuclease domain of the site-directed polypeptide. The site-directed polypeptide can comprise at most: 70, 75, 80, 85, 90, 95, 97, 99, or 100% identity to a wild-type site-directed polypeptide (e.g., Cas9 from S. pyogenes, supra) over 10 contiguous amino acids in a RuvC nuclease domain of the site-directed polypeptide.

[0108] The site-directed polypeptide can comprise a modified form of a wild-type exemplary site-directed polypeptide. The modified form of the wild-type exemplary site-directed polypeptide can comprise a mutation that reduces the nucleic acid-cleaving activity of the site-directed polypeptide. The modified form of the wild-type exemplary site-directed polypeptide can have less than 90%, less than 80%, less than 70%, less than 60%, less than 50%, less than 40%, less than 30%, less than 20%, less than 10%, less than 5%, or less than 1% of the nucleic acid-cleaving activity of the wild-type exemplary site-directed polypeptide (e.g., Cas9 from S. pyogenes, supra). The modified form of the site-directed polypeptide can have no substantial nucleic acid-cleaving activity. When a site-directed polypeptide is a modified form that has no substantial nucleic acid-cleaving activity, it is referred to herein as “enzymatically inactive.”

[0109] The modified form of the site-directed polypeptide can comprise a mutation such that it can induce a single-strand break (SSB) on a target nucleic acid (e.g., by cutting only one of the sugar-phosphate backbones of a double-strand target nucleic acid). In some aspects, the mutation can result in less than 90%, less than 80%, less than 70%, less than 60%, less than 50%, less than 40%, less than 30%, less than 20%, less than 10%, less than 5%, or less than 1% of the nucleic acid-cleaving activity in one or more of the plurality of nucleic acid-cleaving domains of the wild-type site directed polypeptide (e.g., Cas9 from S. pyogenes, supra). In some aspects, the mutation can result in one or more of the plurality of nucleic acid-cleaving domains retaining the ability to cleave the complementary strand of the target nucleic acid, but reducing its ability to cleave the non-complementary strand of the target nucleic acid. The mutation can result in one or more of the plurality of nucleic acid-cleaving domains retaining the ability to cleave the non-complementary strand of the target nucleic acid, but reducing its ability to cleave the complementary strand of the target nucleic acid. For example, residues in the wild-type exemplary S. pyogenes Cas9 polypeptide, such as Asp10, His840, Asn854 and Asn856, are mutated to inactivate one or more of the plurality of nucleic acid-cleaving domains (e.g., nuclease domains). The residues to be mutated can correspond to residues Asp10, His840, Asn854 and Asn856 in the wild-type exemplary S. pyogenes Cas9 polypeptide (e.g., as determined by sequence and/or structural alignment). Non-limiting examples of mutations include D10A, H840A, N854A or N856A. One skilled in the art will recognize that mutations other than alanine substitutions can be suitable.

[0110] In some aspects, a D10A mutation can be combined with one or more of H840A, N854A, or N856A mutations to produce a site-directed polypeptide substantially lacking DNA cleavage activity. A H840A mutation can be combined with one or more of D10A, N854A, or N856A mutations to produce a site-directed polypeptide substantially lacking DNA cleavage activity. A N854A mutation can be combined with one or more of H840A, D10A, or N856A mutations to produce a site-directed polypeptide substantially lacking DNA cleavage activity. A N856A mutation can be combined with one or more of H840A, N854A, or D10A mutations to produce a site-directed polypeptide substantially lacking DNA cleavage activity. Site-directed polypeptides that comprise one substantially inactive nuclease domain are referred to as “mckases.”

[0111] Nickase variants of RNA-guided endonucleases, for example Cas9, can be used to increase the specificity of CRISPR-mediated genome editing. Wild type Cas9 is typically guided by a single guide RNA designed to hybridize with a specified ˜20 nucleotide sequence in the target sequence (such as an endogenous genomic locus). However, several mismatches can be tolerated between the guide RNA and the target locus, effectively reducing the length of required homology in the target site to, for example, as little as 13 nt of homology, and thereby resulting in elevated potential for binding and double-strand nucleic acid cleavage by the CRISPR/Cas9 complex elsewhere in the target genome—also known as off-target cleavage. Because nickase variants of Cas9 each only cut one strand, in order to create a double-strand break it is necessary for a pair of nickases to bind in close proximity and on opposite strands of the target nucleic acid, thereby creating a pair of nicks, which is the equivalent of a double-strand break. This requires that two separate guide RNAs—one for each nickase—must bind in close proximity and on opposite strands of the target nucleic acid. This requirement essentially doubles the minimum length of homology needed for the double-strand break to occur, thereby reducing the likelihood that a double-strand cleavage event will occur elsewhere in the genome, where the two guide RNA sites—if they exist—are unlikely to be sufficiently close to each other to enable the double-strand break to form. As described in the art, nickases can also be used to promote HDR versus NHEJ. HDR can be used to introduce selected changes into target sites in the genome through the use of specific donor sequences that effectively mediate the desired changes.

[0112] Mutations contemplated can include substitutions, additions, and deletions, or any combination thereof. The mutation converts the mutated amino acid to alanine. The mutation converts the mutated amino acid to another amino acid (e.g., glycine, serine, threonine, cysteine, valine, leucine, isoleucine, methionine, proline, phenylalanine, tyrosine, tryptophan, aspartic acid, glutamic acid, asparagine, glutamine, histidine, lysine, or arginine). The mutation converts the mutated amino acid to a non-natural amino acid (e.g., selenomethionine). The mutation converts the mutated amino acid to amino acid mimics (e.g., phosphomimics). The mutation can be a conservative mutation. For example, the mutation converts the mutated amino acid to amino acids that resemble the size, shape, charge, polarity, conformation, and/or rotamers of the mutated amino acids (e.g., cysteine/serine mutation, lysine/asparagine mutation, histidine/phenylalanine mutation). The mutation can cause a shift in reading frame and/or the creation of a premature stop codon. Mutations can cause changes to regulatory regions of genes or loci that affect expression of one or more genes.

[0113] The site-directed polypeptide (e.g., variant, mutated, enzymatically inactive and/or conditionally enzymatically inactive site-directed polypeptide) can target nucleic acid. The site-directed polypeptide (e.g., variant, mutated, enzymatically inactive and/or conditionally enzymatically inactive endoribonuclease) can target DNA. The site-directed polypeptide (e.g., variant, mutated, enzymatically inactive and/or conditionally enzymatically inactive endoribonuclease) can target RNA.

[0114] The site-directed polypeptide can comprise one or more non-native sequences (e.g., the site-directed polypeptide is a fusion protein).

[0115] The site-directed polypeptide can comprise an amino acid sequence comprising at least 15% amino acid identity to a Cas9 from a bacterium (e.g., S. pyogenes), a nucleic acid binding domain, and two nucleic acid cleaving domains (i.e., a HNH domain and a RuvC domain).

[0116] The site-directed polypeptide can comprise an amino acid sequence comprising at least 15% amino acid identity to a Cas9 from a bacterium (e.g., S. pyogenes), and two nucleic acid cleaving domains (i.e., a HNH domain and a RuvC domain).

[0117] The site-directed polypeptide can comprise an amino acid sequence comprising at least 15% amino acid identity to a Cas9 from a bacterium (e.g., S. pyogenes), and two nucleic acid cleaving domains, wherein one or both of the nucleic acid cleaving domains comprise at least 50% amino acid identity to a nuclease domain from Cas9 from a bacterium (e.g., S. pyogenes).

[0118] The site-directed polypeptide can comprise an amino acid sequence comprising at least 15% amino acid identity to a Cas9 from a bacterium (e.g., S. pyogenes), two nucleic acid cleaving domains (i.e., a HNH domain and a RuvC domain), and a non-native sequence (for example, a nuclear localization signal) or a linker linking the site-directed polypeptide to a non-native sequence.

[0119] The site-directed polypeptide can comprise an amino acid sequence comprising at least 15% amino acid identity to a Cas9 from a bacterium (e.g., S. pyogenes), two nucleic acid cleaving domains (i.e., a HNH domain and a RuvC domain), wherein the site-directed polypeptide comprises a mutation in one or both of the nucleic acid cleaving domains that reduces the cleaving activity of the nuclease domains by at least 50%.

[0120] The site-directed polypeptide can comprise an amino acid sequence comprising at least 15% amino acid identity to a Cas9 from a bacterium (e.g., S. pyogenes), and two nucleic acid cleaving domains (i.e., a HNH domain and a RuvC domain), wherein one of the nuclease domains comprises mutation of aspartic acid 10, and/or wherein one of the nuclease domains can comprise a mutation of histidine 840, and wherein the mutation reduces the cleaving activity of the nuclease domain(s) by at least 50%.

[0121] The one or more site-directed polypeptides, e.g. DNA endonucleases, can comprise two nickases that together effect one double-strand break at a specific locus in the genome, or four nickases that together effect or cause two double-strand breaks at specific loci in the genome. Alternatively, one site-directed polypeptide, e.g. DNA endonuclease, can effect or cause one double-strand break at a specific locus in the genome.

[0122] Non-limiting examples of Cas9 orthologs from other bacterial strains include but are not limited to, Cas proteins identified in Acaryochloris marina MBIC11017; Acetohalobium arabaticum DSM 5501; Acidithiobacillus caldus; Acidithiobacillus ferrooxidans ATCC 23270; Alicyclobacillus acidocaldarius LAA1; Alicyclobacillus acidocaldarius subsp. acidocaldarius DSM 446; Allochromatium vinosum DSM 180; Ammonifex degensii KC4; Anabaena variabilis ATCC 29413; Arthrospira maxima CS-328; Arthrospira platensis str. Paraca; Arthrospira sp. PCC 8005; Bacillus pseudomycoides DSM 12442; Bacillus selenitireducens MLS10; Burkholderiales bacterium 1_1_47; Caldicelulosiruptor becscii DSM 6725; Candidatus Desulforudis audaxviator MP104C; Caldicellulosiruptor hydrothermalis_108; Clostridium phage c-st; Clostridium botulinum A3 str. Loch Maree; Clostridium botulinum Ba4 str. 657; Clostridium difficile QCD-63q42; Crocosphaera watsonii WH 8501; Cyanothece sp. ATCC 51142; Cyanothece sp. CCY0110; Cyanothece sp. PCC 7424; Cyanothece sp. PCC 7822; Exiguobacterium sibiricum 255-15; Finegoldia magna ATCC 29328; Ktedonobacter racemifer DSM 44963; Lactobacillus delbrueckii subsp. bulgaricus PB2003/044-T3-4; Lactobacillus salivarius ATCC 11741; Listeria innocua; Lyngbya sp. PCC 8106; Marinobacter sp. ELB17; Methanohalobium evestigatum Z-7303; Microcystis phage Ma-LMM01; Microcystis aeruginosa NIES-843; Microscilla marina ATCC 23134; Microcoleus chthonoplastes PCC 7420; Neisseria meningitidis; Nitrosococcus halophilus Nc4; Nocardiopsis dassonvillei subsp. dassonvillei DSM 43111; Nodularia spumigena CCY9414; Nostoc sp. PCC 7120; Oscillatoria sp. PCC 6506; Pelotomaculum thermopropionicum_SI; Petrotoga mobilis SJ95; Polaromonas naphthalenivorans CJ2; Polaromonas sp. JS666; Pseudoalteromonas haloplanktis TAC125; Streptomyces pristinaespiralis ATCC 25486; Streptomyces pristinaespiralis ATCC 25486; Streptococcus thermophilus; Streptomyces viridochromogenes DSM 40736; Streptosporangium roseum DSM 43021; Synechococcus sp. PCC 7335; and Thermosipho africanus TCF52B (Chylinski et al., RNA Biol., 2013; 10(5): 726-737).

[0123] In addition to Cas9 orthologs, other Cas9 variants such as fusion proteins of inactive dCas9 and effector domains with different functions may be served as a platform for genetic modulation. Any of the foregoing enzymes may be useful in the present disclosure.

[0124] Further examples of endonucleases that may be utilized in the present disclosure are provided in SEQ ID NOs: 1-620. These proteins may be modified before use or may be encoded in a nucleic acid sequence such as a DNA, RNA or mRNA or within a vector construct such as the plasmids or AAV vectors taught herein. Further, they may be codon optimized.

[0125] SEQ ID NOs: 1-620 disclose a non-exhaustive listing of endonuclease sequences.

Genome-targeting Nucleic Acid [000121] The present disclosure provides a genome-targeting nucleic acid that can direct the activities of an associated polypeptide (e.g., a site-directed polypeptide) to a specific target sequence within a target nucleic acid. The genome-targeting nucleic acid can be an RNA. A genome-targeting RNA is referred to as a “guide RNA” or “gRNA” herein. A guide RNA can comprise at least a spacer sequence that hybridizes to a target nucleic acid sequence of interest, and a CRISPR repeat sequence. In Type II systems, the gRNA also comprises a second RNA called the tracrRNA sequence. In the Type II guide RNA (gRNA), the CRISPR repeat sequence and tracrRNA sequence hybridize to each other to form a duplex. In the Type V guide RNA (gRNA), the crRNA forms a duplex. In both systems, the duplex can bind a site-directed polypeptide, such that the guide RNA and site-direct polypeptide form a complex. The genome-targeting nucleic acid can provide target specificity to the complex by virtue of its association with the site-directed polypeptide. The genome-targeting nucleic acid thus can direct the activity of the site-directed polypeptide.

[0126] Exemplary guide RNAs include the spacer sequences in SEQ ID NOs: 5305-33,088 of the Sequence Listing. Each guide RNA can be designed to include a spacer sequence complementary to its genomic target sequence. For example, each of the spacer sequences in

[0127] SEQ ID NOs: 5305-33,088 of the Sequence Listing can be put into a single RNA chimera or a crRNA (along with a corresponding tracrRNA). See Jinek et al., Science, 337, 816-821 (2012) and Deltcheva et al., Nature, 471, 602-607 (2011).

[0128] The genome-targeting nucleic acid can be a double-molecule guide RNA. The genome-targeting nucleic acid can be a single-molecule guide RNA.

[0129] A double-molecule guide RNA can comprise two strands of RNA. The first strand comprises in the 5′ to 3′ direction, an optional spacer extension sequence, a spacer sequence and a minimum CRISPR repeat sequence. The second strand can comprise a minimum tracrRNA sequence (complementary to the minimum CRISPR repeat sequence), a 3′ tracrRNA sequence and an optional tracrRNA extension sequence.

[0130] A single-molecule guide RNA (sgRNA) in a Type II system can comprise, in the 5′ to 3′ direction, an optional spacer extension sequence, a spacer sequence, a minimum CRISPR repeat sequence, a single-molecule guide linker, a minimum tracrRNA sequence, a 3′ tracrRNA sequence and an optional tracrRNA extension sequence. The optional tracrRNA extension can comprise elements that contribute additional functionality (e.g., stability) to the guide RNA. The single-molecule guide linker can link the minimum CRISPR repeat and the minimum tracrRNA sequence to form a hairpin structure. The optional tracrRNA extension can comprise one or more hairpins.

[0131] The sgRNA can comprise a 20 nucleotide spacer sequence at the 5′ end of the sgRNA sequence. The sgRNA can comprise a less than a 20 nucleotide spacer sequence at the 5′ end of the sgRNA sequence. The sgRNA can comprise a more than 20 nucleotide spacer sequence at the 5′ end of the sgRNA sequence. The sgRNA can comprise a variable length spacer sequence with 17-30 nucleotides at the 5′ end of the sgRNA sequence (see Table 1).

[0132] The sgRNA can comprise no uracil at the 3′ end of the sgRNA sequence, such as in SEQ ID NO: 33,121 of Table 1. The sgRNA can comprise one or more uracil at the 3′end of the sgRNA sequence, such as in SEQ ID NO: 33,122 in Table 1. For example, the sgRNA can comprise 1 uracil (U) at the 3′ end of the sgRNA sequence. The sgRNA can comprise 2 uracil (UU) at the 3′ end of the sgRNA sequence. The sgRNA can comprise 3 uracil (UUU) at the 3′ end of the sgRNA sequence. The sgRNA can comprise 4 uracil (UUUU) at the 3′ end of the sgRNA sequence. The sgRNA can comprise 5 uracil (UUUUU) at the 3′ end of the sgRNA sequence. The sgRNA can comprise 6 uracil (UUUUUU) at the 3′ end of the sgRNA sequence. The sgRNA can comprise 7 uracil ( )at the 3′ end of the sgRNA sequence. The sgRNA can comprise 8 uracil (UUUUUUUU) at the 3′ end of the sgRNA sequence.

[0133] The sgRNA can be unmodified or modified. For example, modified sgRNAs can comprise one or more 2′-O-methyl phosphorothioate nucleotides.

TABLE 1

| SEQ | |
|---|---|
| ID NO. | sgRNA sequence |
| 33,120 | nnnnnnnnnnnnnnnnnnnnguuuuagagcuagaaaua |
| | gcaaguuaaaauaaggcuaguccguuaucaacuuga |
| | aaaaguggcaccgagucggugcuuuu |
| 33,121 | nnnnnnnnnnnnnnnnnnnnguuuuagagcuagaaaua |
| | gcaaguuaaaauaaggcuaguccguuaucaacuuga |
| | aaaaguggcaccgagucggugc |
| 33,122 | n₍₁₇₋₃₀₎guuuuagagcuagaaauagcaaguuaaaau |
| | aaggcuaguccguuaucaacuugaaaaagu |
| | ggcaccgagucggugcu₍₁₋₈₎ |

[0134] A single-molecule guide RNA (sgRNA) in a Type V system can comprise, in the 5′ to 3′ direction, a minimum CRISPR repeat sequence and a spacer sequence.

[0135] By way of illustration, guide RNAs used in the CRISPR/Cas9 or CRISPR/Cpf1 system, or other smaller RNAs can be readily synthesized by chemical means, as illustrated below and described in the art. While chemical synthetic procedures are continually expanding, purifications of such RNAs by procedures such as high performance liquid chromatography (HPLC, which avoids the use of gels such as PAGE) tends to become more challenging as polynucleotide lengths increase significantly beyond a hundred or so nucleotides. One approach used for generating RNAs of greater length is to produce two or more molecules that are ligated together. Much longer RNAs, such as those encoding a Cas9 or Cpf1 endonuclease, are more readily generated enzymatically. Various types of RNA modifications can be introduced during or after chemical synthesis and/or enzymatic generation of RNAs, e.g., modifications that enhance stability, reduce the likelihood or degree of innate immune response, and/or enhance other attributes, as described in the art.

### Spacer Extension Sequence

[0136] In some examples of genome-targeting nucleic acids, a spacer extension sequence can modify activity, provide stability and/or provide a location for modifications of a genome-targeting nucleic acid. A spacer extension sequence can modify on- or off-target activity or specificity. In some examples, a spacer extension sequence can be provided. The spacer extension sequence can have a length of more than 1, 5, 10, 15, 20, 25, 30, 35, 40, 45, 50, 60, 70, 80, 90, 100, 120, 140, 160, 180, 200, 220, 240, 260, 280, 300, 320, 340, 360, 380, 400, 1000, 2000, 3000, 4000, 5000, 6000, or 7000 or more nucleotides. The spacer extension sequence can have a length of less than 1, 5, 10, 15, 20, 25, 30, 35, 40, 45, 50, 60, 70, 80, 90, 100, 120, 140, 160, 180, 200, 220, 240, 260, 280, 300, 320, 340, 360, 380, 400, 1000, 2000, 3000, 4000, 5000, 6000, 7000 or more nucleotides. The spacer extension sequence can be less than 10 nucleotides in length. The spacer extension sequence can be between 10-30 nucleotides in length. The spacer extension sequence can be between 30-70 nucleotides in length.

[0137] The spacer extension sequence can comprise another moiety (e.g., a stability control sequence, an endoribonuclease binding sequence, a ribozyme). The moiety can decrease or increase the stability of a nucleic acid targeting nucleic acid. The moiety can be a transcriptional terminator segment (i.e., a transcription termination sequence). The moiety can function in a eukaryotic cell. The moiety can function in a prokaryotic cell. The moiety can function in both eukaryotic and prokaryotic cells. Non-limiting examples of suitable moieties include: a 5′ cap (e.g., a 7-methylguanylate cap (m7 G)), a riboswitch sequence (e.g., to allow for regulated stability and/or regulated accessibility by proteins and protein complexes), a sequence that forms a dsRNA duplex (i.e., a hairpin), a sequence that targets the RNA to a subcellular location (e.g., nucleus, mitochondria, chloroplasts, and the like), a modification or sequence that provides for tracking (e.g., direct conjugation to a fluorescent molecule, conjugation to a moiety that facilitates fluorescent detection, a sequence that allows for fluorescent detection, etc.), and/or a modification or sequence that provides a binding site for proteins (e.g., proteins that act on DNA, including transcriptional activators, transcriptional repressors, DNA methyltransferases, DNA demethylases, histone acetyltransferases, histone deacetylases, and the like).

### Spacer Sequence

[0138] The spacer sequence hybridizes to a sequence in a target nucleic acid of interest. The spacer of a genome-targeting nucleic acid can interact with a target nucleic acid in a sequence-specific manner via hybridization (i.e., base pairing). The nucleotide sequence of the spacer can vary depending on the sequence of the target nucleic acid of interest.

[0139] In a CRISPR/Cas system herein, the spacer sequence can be designed to hybridize to a target nucleic acid that is located 5′ of a PAM of the Cas9 enzyme used in the system. The spacer may perfectly match the target sequence or may have mismatches. Each Cas9 enzyme has a particular PAM sequence that it recognizes in a target DNA. For example, S. pyogenes recognizes in a target nucleic acid a PAM that comprises the sequence 5′-NRG-3′, where R comprises either A or G, where N is any nucleotide and N is immediately 3′ of the target nucleic acid sequence targeted by the spacer sequence.

[0140] The target nucleic acid sequence can comprise 20 nucleotides. The target nucleic acid can comprise less than 20 nucleotides. The target nucleic acid can comprise more than 20 nucleotides. The target nucleic acid can comprise at least: 5, 10, 15, 16, 17, 18, 19, 20, 21, 22, 23, 24, 25, 30 or more nucleotides. The target nucleic acid can comprise at most: 5, 10, 15, 16, 17, 18, 19, 20, 21, 22, 23, 24, 25, 30 or more nucleotides. The target nucleic acid sequence can comprise 20 bases immediately 5′ of the first nucleotide of the PAM. For example, in a sequence comprising 5′-NNNNNNNNNNNNNNNNNNNNNRG-3′ (SEQ ID NO: 33,119), the target nucleic acid can comprise the sequence that corresponds to the Ns, wherein N is any nucleotide, and the underlined NRG sequence is the S. pyogenes PAM. This target nucleic acid sequence is often referred to as the PAM strand, and the complementary nucleic acid sequence is often referred to the non-PAM strand. One of skill in the art would recognize that the spacer sequence hybridizes to the non-PAM strand of the target nucleic acid (FIGS. 1A and 1B).

[0141] The spacer sequence that hybridizes to the target nucleic acid can have a length of at least about 6 nucleotides (nt). The spacer sequence can be at least about 6 nt, at least about 10 nt, at least about 15 nt, at least about 18 nt, at least about 19 nt, at least about 20 nt, at least about 25 nt, at least about 30 nt, at least about 35 nt or at least about 40 nt, from about 6 nt to about 80 nt, from about 6 nt to about 50 nt, from about 6 nt to about 45 nt, from about 6 nt to about 40 nt, from about 6 nt to about 35 nt, from about 6 nt to about 30 nt, from about 6 nt to about 25 nt, from about 6 nt to about 20 nt, from about 6 nt to about 19 nt, from about 10 nt to about 50 nt, from about 10 nt to about 45 nt, from about 10 nt to about 40 nt, from about 10 nt to about 35 nt, from about 10 nt to about 30 nt, from about 10 nt to about 25 nt, from about 10 nt to about 20 nt, from about 10 nt to about 19 nt, from about 19 nt to about 25 nt, from about 19 nt to about 30 nt, from about 19 nt to about 35 nt, from about 19 nt to about 40 nt, from about 19 nt to about 45 nt, from about 19 nt to about 50 nt, from about 19 nt to about 60 nt, from about 20 nt to about 25 nt, from about 20 nt to about 30 nt, from about 20 nt to about 35 nt, from about 20 nt to about 40 nt, from about 20 nt to about 45 nt, from about 20 nt to about 50 nt, or from about 20 nt to about 60 nt. In some examples, the spacer sequence can comprise 20 nucleotides. In some examples, the spacer sequence can comprise 19 nucleotides. In some examples, the spacer sequence can comprise 18 nucleotides. In some examples, the spacer sequence can comprise 22 nucleotides.

[0142] In some examples, the percent complementarity between the spacer sequence and the target nucleic acid is at least about 30%, at least about 40%, at least about 50%, at least about 60%, at least about 65%, at least about 70%, at least about 75%, at least about 80%, at least about 85%, at least about 90%, at least about 95%, at least about 97%, at least about 98%, at least about 99%, or 100%. In some examples, the percent complementarity between the spacer sequence and the target nucleic acid is at most about 30%, at most about 40%, at most about 50%, at most about 60%, at most about 65%, at most about 70%, at most about 75%, at most about 80%, at most about 85%, at most about 90%, at most about 95%, at most about 97%, at most about 98%, at most about 99%, or 100%. In some examples, the percent complementarity between the spacer sequence and the target nucleic acid is 100% over the six contiguous 5′-most nucleotides of the target sequence of the complementary strand of the target nucleic acid. The percent complementarity between the spacer sequence and the target nucleic acid can be at least 60% over about 20 contiguous nucleotides. The length of the spacer sequence and the target nucleic acid can differ by 1 to 6 nucleotides, which may be thought of as a bulge or bulges.

[0143] The spacer sequence can be designed or chosen using a computer program. The computer program can use variables, such as predicted melting temperature, secondary structure formation, predicted annealing temperature, sequence identity, genomic context, chromatin accessibility, % GC, frequency of genomic occurrence (e.g., of sequences that are identical or are similar but vary in one or more spots as a result of mismatch, insertion or deletion), methylation status, presence of SNPs, and the like.

### Minimum CRISPR Repeat Sequence

[0144] In some aspects, a minimum CRISPR repeat sequence is a sequence with at least about 30%, about 40%, about 50%, about 60%, about 65%, about 70%, about 75%, about 80%, about 85%, about 90%, about 95%, or 100% sequence identity to a reference CRISPR repeat sequence (e.g., crRNA from S. pyogenes).

[0145] In some aspects, a minimum CRISPR repeat sequence comprises nucleotides that can hybridize to a minimum tracrRNA sequence in a cell. The minimum CRISPR repeat sequence and a minimum tracrRNA sequence can form a duplex, i.e. a base-paired double-stranded structure. Together, the minimum CRISPR repeat sequence and the minimum tracrRNA sequence can bind to the site-directed polypeptide. At least a part of the minimum CRISPR repeat sequence can hybridize to the minimum tracrRNA sequence. At least a part of the minimum CRISPR repeat sequence can comprise at least about 30%, about 40%, about 50%, about 60%, about 65%, about 70%, about 75%, about 80%, about 85%, about 90%, about 95%, or 100% complementary to the minimum tracrRNA sequence. In some aspects, at least a part of the minimum CRISPR repeat sequence can comprise at most about 30%, about 40%, about 50%, about 60%, about 65%, about 70%, about 75%, about 80%, about 85%, about 90%, about 95%, or 100% complementary to the minimum tracrRNA sequence.

[0146] The minimum CRISPR repeat sequence can have a length from about 7 nucleotides to about 100 nucleotides. For example, the length of the minimum CRISPR repeat sequence is from about 7 nucleotides (nt) to about 50 nt, from about 7 nt to about 40 nt, from about 7 nt to about 30 nt, from about 7 nt to about 25 nt, from about 7 nt to about 20 nt, from about 7 nt to about 15 nt, from about 8 nt to about 40 nt, from about 8 nt to about 30 nt, from about 8 nt to about 25 nt, from about 8 nt to about 20 nt, from about 8 nt to about 15 nt, from about 15 nt to about 100 nt, from about 15 nt to about 80 nt, from about 15 nt to about 50 nt, from about 15 nt to about 40 nt, from about 15 nt to about 30 nt, or from about 15 nt to about 25 nt. In some aspects, the minimum CRISPR repeat sequence is approximately 9 nucleotides in length. In some aspects, the minimum CRISPR repeat sequence is approximately 12 nucleotides in length.

[0147] The minimum CRISPR repeat sequence can be at least about 60% identical to a reference minimum CRISPR repeat sequence (e.g., wild-type crRNA from S. pyogenes) over a stretch of at least 6, 7, or 8 contiguous nucleotides. For example, the minimum CRISPR repeat sequence can be at least about 65% identical, at least about 70% identical, at least about 75% identical, at least about 80% identical, at least about 85% identical, at least about 90% identical, at least about 95% identical, at least about 98% identical, at least about 99% identical or 100% identical to a reference minimum CRISPR repeat sequence over a stretch of at least 6, 7, or 8 contiguous nucleotides.

Minimum tracrRNA Sequence

[0148] A minimum tracrRNA sequence can be a sequence with at least about 30%, about 40%, about 50%, about 60%, about 65%, about 70%, about 75%, about 80%, about 85%, about 90%, about 95%, or 100% sequence identity to a reference tracrRNA sequence (e.g., wild type tracrRNA from S. pyogenes).

[0149] A minimum tracrRNA sequence can comprise nucleotides that hybridize to a minimum CRISPR repeat sequence in a cell. A minimum tracrRNA sequence and a minimum CRISPR repeat sequence form a duplex, i.e. a base-paired double-stranded structure. Together, the minimum tracrRNA sequence and the minimum CRISPR repeat can bind to a site-directed polypeptide. At least a part of the minimum tracrRNA sequence can hybridize to the minimum CRISPR repeat sequence. The minimum tracrRNA sequence can be at least about 30%, about 40%, about 50%, about 60%, about 65%, about 70%, about 75%, about 80%, about 85%, about 90%, about 95%, or 100% complementary to the minimum CRISPR repeat sequence.

[0150] The minimum tracrRNA sequence can have a length from about 7 nucleotides to about 100 nucleotides. For example, the minimum tracrRNA sequence can be from about 7 nucleotides (nt) to about 50 nt, from about 7 nt to about 40 nt, from about 7 nt to about 30 nt, from about 7 nt to about 25 nt, from about 7 nt to about 20 nt, from about 7 nt to about 15 nt, from about 8 nt to about 40 nt, from about 8 nt to about 30 nt, from about 8 nt to about 25 nt, from about 8 nt to about 20 nt, from about 8 nt to about 15 nt, from about 15 nt to about 100 nt, from about 15 nt to about 80 nt, from about 15 nt to about 50 nt, from about 15 nt to about 40 nt, from about 15 nt to about 30 nt or from about 15 nt to about 25 nt long. The minimum tracrRNA sequence can be approximately 9 nucleotides in length. The minimum tracrRNA sequence can be approximately 12 nucleotides. The minimum tracrRNA can consist of tracrRNA nt 23-48 described in Jinek et al., supra.

[0151] The minimum tracrRNA sequence can be at least about 60% identical to a reference minimum tracrRNA (e.g., wild type, tracrRNA from S. pyogenes) sequence over a stretch of at least 6, 7, or 8 contiguous nucleotides. For example, the minimum tracrRNA sequence can be at least about 65% identical, about 70% identical, about 75% identical, about 80% identical, about 85% identical, about 90% identical, about 95% identical, about 98% identical, about 99% identical or 100% identical to a reference minimum tracrRNA sequence over a stretch of at least 6, 7, or 8 contiguous nucleotides.

[0152] The duplex between the minimum CRISPR RNA and the minimum tracrRNA can comprise a double helix. The duplex between the minimum CRISPR RNA and the minimum tracrRNA can comprise at least about 1, 2, 3, 4, 5, 6, 7, 8, 9, or 10 or more nucleotides. The duplex between the minimum CRISPR RNA and the minimum tracrRNA can comprise at most about 1, 2, 3, 4, 5, 6, 7, 8, 9, or 10 or more nucleotides.

[0153] The duplex can comprise a mismatch (i.e., the two strands of the duplex are not 100% complementary). The duplex can comprise at least about 1, 2, 3, 4, or 5 or mismatches. The duplex can comprise at most about 1, 2, 3, 4, or 5 or mismatches. The duplex can comprise no more than 2 mismatches.

### Bulges

[0154] In some cases, there can be a “bulge” in the duplex between the minimum CRISPR RNA and the minimum tracrRNA. A bulge is an unpaired region of nucleotides within the duplex. A bulge can contribute to the binding of the duplex to the site-directed polypeptide. The bulge can comprise, on one side of the duplex, an unpaired 5′-XXXY-3′ where X is any purine and Y comprises a nucleotide that can form a wobble pair with a nucleotide on the opposite strand, and an unpaired nucleotide region on the other side of the duplex. The number of unpaired nucleotides on the two sides of the duplex can be different.

[0155] In one example, the bulge can comprise an unpaired purine (e.g., adenine) on the minimum CRISPR repeat strand of the bulge. In some examples, the bulge can comprise an unpaired 5′-AAGY-3′ of the minimum tracrRNA sequence strand of the bulge, where Y comprises a nucleotide that can form a wobble pairing with a nucleotide on the minimum CRISPR repeat strand.

[0156] A bulge on the minimum CRISPR repeat side of the duplex can comprise at least 1, 2, 3, 4, or 5 or more unpaired nucleotides. A bulge on the minimum CRISPR repeat side of the duplex can comprise at most 1, 2, 3, 4, or 5 or more unpaired nucleotides. A bulge on the minimum CRISPR repeat side of the duplex can comprise 1 unpaired nucleotide.

[0157] A bulge on the minimum tracrRNA sequence side of the duplex can comprise at least 1, 2, 3, 4, 5, 6, 7, 8, 9, or 10 or more unpaired nucleotides. A bulge on the minimum tracrRNA sequence side of the duplex can comprise at most 1, 2, 3, 4, 5, 6, 7, 8, 9, or 10 or more unpaired nucleotides. A bulge on a second side of the duplex (e.g., the minimum tracrRNA sequence side of the duplex) can comprise 4 unpaired nucleotides.

[0158] A bulge can comprise at least one wobble pairing. In some examples, a bulge can comprise at most one wobble pairing. A bulge can comprise at least one purine nucleotide. A bulge can comprise at least 3 purine nucleotides. A bulge sequence can comprise at least 5 purine nucleotides. A bulge sequence can comprise at least one guanine nucleotide. In some examples, a bulge sequence can comprise at least one adenine nucleotide.

### Hairpins

[0159] In various examples, one or more hairpins can be located 3′ to the minimum tracrRNA in the 3′ tracrRNA sequence.

[0160] The hairpin can start at least about 1, 2, 3, 4, 5, 6, 7, 8, 9, 10, 15, or 20 or more nucleotides 3′ from the last paired nucleotide in the minimum CRISPR repeat and minimum tracrRNA sequence duplex. The hairpin can start at most about 1, 2, 3, 4, 5, 6, 7, 8, 9 or 10 or more nucleotides 3′ of the last paired nucleotide in the minimum CRISPR repeat and minimum tracrRNA sequence duplex.

[0161] The hairpin can comprise at least about 1, 2, 3, 4, 5, 6, 7, 8, 9, 10, 15, or 20 or more consecutive nucleotides. The hairpin can comprise at most about 1, 2, 3, 4, 5, 6, 7, 8, 9, 10, 15, or more consecutive nucleotides.

[0162] The hairpin can comprise a CC dinucleotide (i.e., two consecutive cytosine nucleotides).

[0163] The hairpin can comprise duplexed nucleotides (e.g., nucleotides in a hairpin, hybridized together). For example, a hairpin can comprise a CC dinucleotide that is hybridized to a GG dinucleotide in a hairpin duplex of the 3′ tracrRNA sequence.

[0164] One or more of the hairpins can interact with guide RNA-interacting regions of a site-directed polypeptide.

[0165] In some examples, there are two or more hairpins, and in other examples there are three or more hairpins.

3′ tracrRNA sequence

[0166] tracrRNA sequence can comprise a sequence with at least about 30%, about 40%, about 50%, about 60%, about 65%, about 70%, about 75%, about 80%, about 85%, about 90%, about 95%, or 100% sequence identity to a reference tracrRNA sequence (e.g., a tracrRNA from S. pyogenes).

[0167] The 3′ tracrRNA sequence can have a length from about 6 nucleotides to about 100 nucleotides. For example, the 3′ tracrRNA sequence can have a length from about 6 nucleotides (nt) to about 50 nt, from about 6 nt to about 40 nt, from about 6 nt to about 30 nt, from about 6 nt to about 25 nt, from about 6 nt to about 20 nt, from about 6 nt to about 15 nt, from about 8 nt to about 40 nt, from about 8 nt to about 30 nt, from about 8 nt to about 25 nt, from about 8 nt to about 20 nt, from about 8 nt to about 15 nt, from about 15 nt to about 100 nt, from about 15 nt to about 80 nt, from about 15 nt to about 50 nt, from about 15 nt to about 40 nt, from about 15 nt to about 30 nt, or from about 15 nt to about 25 nt. The 3′ tracrRNA sequence can have a length of approximately 14 nucleotides.

[0168] The 3′ tracrRNA sequence can be at least about 60% identical to a reference 3′ tracrRNA sequence (e.g., wild type 3′ tracrRNA sequence from S. pyogenes) over a stretch of at least 6, 7, or 8 contiguous nucleotides. For example, the 3′ tracrRNA sequence can be at least about 60% identical, about 65% identical, about 70% identical, about 75% identical, about 80% identical, about 85% identical, about 90% identical, about 95% identical, about 98% identical, about 99% identical, or 100% identical, to a reference 3′ tracrRNA sequence (e.g., wild type 3′ tracrRNA sequence from S. pyogenes) over a stretch of at least 6, 7, or 8 contiguous nucleotides.

[0169] The 3′ tracrRNA sequence can comprise more than one duplexed region (e.g., hairpin, hybridized region). The 3′ tracrRNA sequence can comprise two duplexed regions.

[0170] The 3′ tracrRNA sequence can comprise a stem loop structure. The stem loop structure in the 3′ tracrRNA can comprise at least 1, 2, 3, 4, 5, 6, 7, 8, 9, 10, 15 or 20 or more nucleotides. The stem loop structure in the 3′ tracrRNA can comprise at most 1, 2, 3, 4, 5, 6, 7, 8, 9 or 10 or more nucleotides. The stem loop structure can comprise a functional moiety. For example, the stem loop structure can comprise an aptamer, a ribozyme, a protein-interacting hairpin, a CRISPR array, an intron, or an exon. The stem loop structure can comprise at least about 1, 2, 3, 4, or 5 or more functional moieties. The stem loop structure can comprise at most about 1, 2, 3, 4, or 5 or more functional moieties.

[0171] The hairpin in the 3′ tracrRNA sequence can comprise a P-domain. In some examples, the P-domain can comprise a double-stranded region in the hairpin.

tracrRNA Extension Sequence

[0172] A tracrRNA extension sequence may be provided whether the tracrRNA is in the context of single-molecule guides or double-molecule guides. The tracrRNA extension sequence can have a length from about 1 nucleotide to about 400 nucleotides. The tracrRNA extension sequence can have a length of more than 1, 5, 10, 15, 20, 25, 30, 35, 40, 45, 50, 60, 70, 80, 90, 100, 120, 140, 160, 180, 200, 220, 240, 260, 280, 300, 320, 340, 360, 380, or 400 nucleotides. The tracrRNA extension sequence can have a length from about 20 to about 5000 or more nucleotides. The tracrRNA extension sequence can have a length of more than 1000 nucleotides. The tracrRNA extension sequence can have a length of less than 1, 5, 10, 15, 20, 25, 30, 35, 40, 45, 50, 60, 70, 80, 90, 100, 120, 140, 160, 180, 200, 220, 240, 260, 280, 300, 320, 340, 360, 380, 400 or more nucleotides. The tracrRNA extension sequence can have a length of less than 1000 nucleotides. The tracrRNA extension sequence can comprise less than 10 nucleotides in length. The tracrRNA extension sequence can be 10-30 nucleotides in length. The tracrRNA extension sequence can be 30-70 nucleotides in length.

[0173] The tracrRNA extension sequence can comprise a functional moiety (e.g., a stability control sequence, ribozyme, endoribonuclease binding sequence). The functional moiety can comprise a transcriptional terminator segment (i.e., a transcription termination sequence). The functional moiety can have a total length from about 10 nucleotides (nt) to about 100 nucleotides, from about 10 nt to about 20 nt, from about 20 nt to about 30 nt, from about 30 nt to about 40 nt, from about 40 nt to about 50 nt, from about 50 nt to about 60 nt, from about 60 nt to about 70 nt, from about 70 nt to about 80 nt, from about 80 nt to about 90 nt, or from about 90 nt to about 100 nt, from about 15 nt to about 80 nt, from about 15 nt to about 50 nt, from about 15 nt to about 40 nt, from about 15 nt to about 30 nt, or from about 15 nt to about 25 nt. The functional moiety can function in a eukaryotic cell. The functional moiety can function in a prokaryotic cell. The functional moiety can function in both eukaryotic and prokaryotic cells.

[0174] Non-limiting examples of suitable tracrRNA extension functional moieties include a 3′ poly-adenylated tail, a riboswitch sequence (e.g., to allow for regulated stability and/or regulated accessibility by proteins and protein complexes), a sequence that forms a dsRNA duplex (i.e., a hairpin), a sequence that targets the RNA to a subcellular location (e.g., nucleus, mitochondria, chloroplasts, and the like), a modification or sequence that provides for tracking (e.g., direct conjugation to a fluorescent molecule, conjugation to a moiety that facilitates fluorescent detection, a sequence that allows for fluorescent detection, etc.), and/or a modification or sequence that provides a binding site for proteins (e.g., proteins that act on DNA, including transcriptional activators, transcriptional repressors, DNA methyltransferases, DNA demethylases, histone acetyltransferases, histone deacetylases, and the like). The tracrRNA extension sequence can comprise a primer binding site or a molecular index (e.g., barcode sequence). The tracrRNA extension sequence can comprise one or more affinity tags.

### Single-Molecule Guide Linker Sequence

[0175] The linker sequence of a single-molecule guide nucleic acid can have a length from about 3 nucleotides to about 100 nucleotides. In Jinek et al., supra, for example, a simple 4 nucleotide “tetraloop” (—GAAA—) was used, Science, 337(6096):816-821 (2012). An illustrative linker has a length from about 3 nucleotides (nt) to about 90 nt, from about 3 nt to about 80 nt, from about 3 nt to about 70 nt, from about 3 nt to about 60 nt, from about 3 nt to about 50 nt, from about 3 nt to about 40 nt, from about 3 nt to about 30 nt, from about 3 nt to about 20 nt, from about 3 nt to about 10 nt. For example, the linker can have a length from about 3 nt to about 5 nt, from about 5 nt to about 10 nt, from about 10 nt to about 15 nt, from about 15 nt to about 20 nt, from about 20 nt to about 25 nt, from about 25 nt to about 30 nt, from about 30 nt to about 35 nt, from about 35 nt to about 40 nt, from about 40 nt to about 50 nt, from about 50 nt to about 60 nt, from about 60 nt to about 70 nt, from about 70 nt to about 80 nt, from about 80 nt to about 90 nt, or from about 90 nt to about 100 nt. The linker of a single-molecule guide nucleic acid can be between 4 and 40 nucleotides. The linker can be at least about 100, 500, 1000, 1500, 2000, 2500, 3000, 3500, 4000, 4500, 5000, 5500, 6000, 6500, or 7000 or more nucleotides. The linker can be at most about 100, 500, 1000, 1500, 2000, 2500, 3000, 3500, 4000, 4500, 5000, 5500, 6000, 6500, or 7000 or more nucleotides.

[0176] Linkers can comprise any of a variety of sequences, although in some examples the linker will not comprise sequences that have extensive regions of homology with other portions of the guide RNA, which might cause intramolecular binding that could interfere with other functional regions of the guide. In Jinek et al., supra, a simple 4 nucleotide sequence —GAAA—was used, Science, 337(6096):816-821 (2012), but numerous other sequences, including longer sequences can likewise be used.

[0177] The linker sequence can comprise a functional moiety. For example, the linker sequence can comprise one or more features, including an aptamer, a ribozyme, a protein-interacting hairpin, a protein binding site, a CRISPR array, an intron, or an exon. The linker sequence can comprise at least about 1, 2, 3, 4, or 5 or more functional moieties. In some examples, the linker sequence can comprise at most about 1, 2, 3, 4, or 5 or more functional moieties.

### Nucleic Acid Modifications (Chemical and Structural Modifications)

[0178] In some aspects, polynucleotides introduced into cells can comprise one or more modifications that can be used individually or in combination, for example, to enhance activity, stability or specificity, alter delivery, reduce innate immune responses in host cells, or for other enhancements, as further described herein and known in the art.

[0179] In certain examples, modified polynucleotides can be used in the CRISPR/Cas9 or CRISPR/Cpf1 system, in which case the guide RNAs (either single-molecule guides or double-molecule guides) and/or a DNA or an RNA encoding a Cas or Cpf1 endonuclease introduced into a cell can be modified, as described and illustrated below. Such modified polynucleotides can be used in the CRISPR/Cas9 or CRISPR/Cpf1 system to edit any one or more genomic loci.

[0180] Using the CRISPR/Cas9 or CRISPR/Cpf1 system for purposes of non-limiting illustrations of such uses, modifications of guide RNAs can be used to enhance the formation or stability of the CRISPR/Cas9 or CRISPR/Cpf1 genome editing complex comprising guide RNAs, which can be single-molecule guides or double-molecule, and a Cas9 or Cpf1 endonuclease. Modifications of guide RNAs can also or alternatively be used to enhance the initiation, stability or kinetics of interactions between the genome editing complex with the target sequence in the genome, which can be used, for example, to enhance on-target activity. Modifications of guide RNAs can also or alternatively be used to enhance specificity, e.g., the relative rates of genome editing at the on-target site as compared to effects at other (off-target) sites.

[0181] Modifications can also or alternatively be used to increase the stability of a guide RNA, e.g., by increasing its resistance to degradation by ribonucleases (RNases) present in a cell, thereby causing its half-life in the cell to be increased. Modifications enhancing guide RNA half-life can be particularly useful in aspects in which a Cas9 or Cpf1 endonuclease is introduced into the cell to be edited via an RNA that needs to be translated in order to generate endonuclease, because increasing the half-life of guide RNAs introduced at the same time as the RNA encoding the endonuclease can be used to increase the time that the guide RNAs and the encoded Cas9 or Cpf1 endonuclease co-exist in the cell.

[0182] Modifications can also or alternatively be used to decrease the likelihood or degree to which RNAs introduced into cells elicit innate immune responses. Such responses, which have been well characterized in the context of RNA interference (RNAi), including small-interfering RNAs (siRNAs), as described below and in the art, tend to be associated with reduced half-life of the RNA and/or the elicitation of cytokines or other factors associated with immune responses.

[0183] One or more types of modifications can also be made to RNAs encoding an endonuclease that are introduced into a cell, including, without limitation, modifications that enhance the stability of the RNA (such as by increasing its degradation by RNases present in the cell), modifications that enhance translation of the resulting product (i.e. the endonuclease), and/or modifications that decrease the likelihood or degree to which the RNAs introduced into cells elicit innate immune responses.

[0184] Combinations of modifications, such as the foregoing and others, can likewise be used. In the case of CRISPR/Cas9 or CRISPR/Cpf1, for example, one or more types of modifications can be made to guide RNAs (including those exemplified above), and/or one or more types of modifications can be made to RNAs encoding Cas endonuclease (including those exemplified above).

[0185] By way of illustration, guide RNAs used in the CRISPR/Cas9 or CRISPR/Cpf1 system, or other smaller RNAs can be readily synthesized by chemical means, enabling a number of modifications to be readily incorporated, as illustrated below and described in the art. While chemical synthetic procedures are continually expanding, purifications of such RNAs by procedures such as high-performance liquid chromatography (HPLC, which avoids the use of gels such as PAGE) tends to become more challenging as polynucleotide lengths increase significantly beyond a hundred or so nucleotides. One approach that can be used for generating chemically-modified RNAs of greater length is to produce two or more molecules that are ligated together. Much longer RNAs, such as those encoding a Cas9 endonuclease, are more readily generated enzymatically. While fewer types of modifications are available for use in enzymatically produced RNAs, there are still modifications that can be used to, e.g., enhance stability, reduce the likelihood or degree of innate immune response, and/or enhance other attributes, as described further below and in the art; and new types of modifications are regularly being developed.

[0186] By way of illustration of various types of modifications, especially those used frequently with smaller chemically synthesized RNAs, modifications can comprise one or more nucleotides modified at the 2′ position of the sugar, in some aspects a 2′-O-alkyl, 2′-O-alkyl-O-alkyl, or 2′-fluoro-modified nucleotide. In some examples, RNA modifications include 2′-fluoro, 2′-amino or 2′-0-methyl modifications on the ribose of pyrimidines, abasic residues, or an inverted base at the 3′ end of the RNA. Such modifications are routinely incorporated into oligonucleotides and these oligonucleotides have been shown to have a higher Tm (i.e., higher target binding affinity) than 2′-deoxyoligonucleotides against a given target.

[0187] A number of nucleotide and nucleoside modifications have been shown to make the oligonucleotide into which they are incorporated more resistant to nuclease digestion than the native oligonucleotide; these modified oligos survive intact for a longer time than unmodified oligonucleotides. Specific examples of modified oligonucleotides include those comprising modified backbones, for example, phosphorothioates, phosphotriesters, methyl phosphonates, short chain alkyl or cycloalkyl intersugar linkages or short chain heteroatomic or heterocyclic intersugar linkages. Some oligonucleotides are oligonucleotides with phosphorothioate backbones and those with heteroatom backbones, particularly CH₂—NH—O—CH₂, CH,˜N(CH₃)˜O˜CH₂ (known as a methylene(methylimino) or MMI backbone), CH₂—O—N (CH₃)—CH₂, CH₂—N (CH₃)—N (CH₃)—CH₂ and O—N (CH₃)—CH₂—CH₂ backbones, wherein the native phosphodiester backbone is represented as O— P— O— CH,); amide backbones [see De Mesmaeker et al., Ace. Chem. Res., 28:366-374 (1995)]; morpholino backbone structures (see Summerton and Weller, U.S. Pat. No. 5,034,506); peptide nucleic acid (PNA) backbone (wherein the phosphodiester backbone of the oligonucleotide is replaced with a polyamide backbone, the nucleotides being bound directly or indirectly to the aza nitrogen atoms of the polyamide backbone, see Nielsen et al., Science 1991, 254, 1497). Phosphorus-containing linkages include, but are not limited to, phosphorothioates, chiral phosphorothioates, phosphorodithioates, phosphotriesters, aminoalkylphosphotriesters, methyl and other alkyl phosphonates comprising 3′alkylene phosphonates and chiral phosphonates, phosphinates, phosphoramidates comprising 3′-amino phosphoramidate and aminoalkylphosphoramidates, thionophosphoramidates, thionoalkylphosphonates, thionoalkylphosphotriesters, and boranophosphates having normal 3′-5′ linkages, 2′-5′ linked analogs of these, and those having inverted polarity wherein the adjacent pairs of nucleoside units are linked 3′-5′ to 5′-3′ or 2′-5′ to 5′-2′; see U.S. Pat. Nos. 3,687,808; 4,469,863; 4,476,301; 5,023,243; 5,177,196; 5,188,897; 5,264,423; 5,276,019; 5,278,302; 5,286,717; 5,321,131; 5,399,676; 5,405,939; 5,453,496; 5,455,233; 5,466,677; 5,476,925; 5,519,126; 5,536,821; 5,541,306; 5,550,111; 5,563,253; 5,571,799; 5,587,361; and 5,625,050.

[0188] Morpholino-based oligomeric compounds are described in Braasch and David Corey, Biochemistry, 41(14): 4503-4510 (2002); Genesis, Volume 30, Issue 3, (2001); Heasman, Dev. Biol., 243: 209-214 (2002); Nasevicius et al., Nat. Genet., 26:216-220 (2000); Lacerra et al., Proc. Natl. Acad. Sci., 97: 9591-9596 (2000); and U.S. Pat. No. 5,034,506, issued Jul. 23, 1991.

[0189] Cyclohexenyl nucleic acid oligonucleotide mimetics are described in Wang et al., J.

[0190] Am. Chem. Soc., 122: 8595-8602 (2000).

[0191] Modified oligonucleotide backbones that do not include a phosphorus atom therein have backbones that are formed by short chain alkyl or cycloalkyl internucleoside linkages, mixed heteroatom and alkyl or cycloalkyl internucleoside linkages, or one or more short chain heteroatomic or heterocyclic internucleoside linkages. These comprise those having morpholino linkages (formed in part from the sugar portion of a nucleoside); siloxane backbones; sulfide, sulfoxide and sulfone backbones; formacetyl and thioformacetyl backbones; methylene formacetyl and thioformacetyl backbones; alkene containing backbones; sulfamate backbones; methyleneimino and methylenehydrazino backbones; sulfonate and sulfonamide backbones; amide backbones; and others having mixed N, O, S, and CH₂ component parts; see U.S. Pat. Nos. 5,034,506; 5,166,315; 5,185,444; 5,214,134; 5,216,141; 5,235,033; 5,264,562; 5,264,564; 5,405,938; 5,434,257; 5,466,677; 5,470,967; 5,489,677; 5,541,307; 5,561,225; 5,596,086; 5,602,240; 5,610,289; 5,602,240; 5,608,046; 5,610,289; 5,618,704; 5,623,070; 5,663,312; 5,633,360; 5,677,437; and 5,677,439.

[0192] One or more substituted sugar moieties can also be included, e.g., one of the following at the 2′ position: OH, SH, SCH₃, F, OCN, OCH₃ OCH₃, OCH₃ O(CH₂)n CH₃, O(CH₂)n NH₂, or O(CH₂)n CH₃, where n is from 1 to about 10; C1 to C10 lower alkyl, alkoxyalkoxy, substituted lower alkyl, alkaryl or aralkyl; C1; Br; CN; CF₃; OCF₃; O—, S—, or N— alkyl; O—, S—, or N-alkenyl; SOCH₃; SO₂ CH₃; ONO₂; NO_{2;} N₃; NH₂; heterocycloalkyl; heterocycloalkaryl; aminoalkylamino; polyalkylamino; substituted silyl; an RNA cleaving group; a reporter group; an intercalator; a group for improving the pharmacokinetic properties of an oligonucleotide; or a group for improving the pharmacodynamic properties of an oligonucleotide and other substituents having similar properties. In some aspects, a modification includes 2′-methoxyethoxy (2′—O—CH₂CH₂OCH₃, also known as 2′-O-(2-methoxyethyl)) (Martin et al, HeIv. Chim. Acta, 1995, 78, 486). Other modifications include 2′-methoxy (2′-O-CH₃), 2′-propoxy (2′-OCH₂ CH₂CH₃) and 2′-fluoro (2′-F). Similar modifications may also be made at other positions on the oligonucleotide, particularly the 3′ position of the sugar on the 3′ terminal nucleotide and the 5′ position of 5′ terminal nucleotide. Oligonucleotides may also have sugar mimetics, such as cyclobutyls in place of the pentofuranosyl group.

[0193] In some examples, both a sugar and an internucleoside linkage, i.e., the backbone, of the nucleotide units can be replaced with novel groups. The base units can be maintained for hybridization with an appropriate nucleic acid target compound. One such oligomeric compound, an oligonucleotide mimetic that has been shown to have excellent hybridization properties, is referred to as a peptide nucleic acid (PNA). In PNA compounds, the sugar-backbone of an oligonucleotide can be replaced with an amide containing backbone, for example, an aminoethylglycine backbone. The nucleobases can be retained and bound directly or indirectly to aza nitrogen atoms of the amide portion of the backbone. Representative U.S. patents that teach the preparation of PNA compounds comprise, but are not limited to, U.S. Pat. Nos. 5,539,082; 5,714,331; and 5,719,262. Further teaching of PNA compounds can be found in Nielsen et al, Science, 254: 1497-1500 (1991).

[0194] Guide RNAs can also include, additionally or alternatively, nucleobase (often referred to in the art simply as “base”) modifications or substitutions. As used herein, “unmodified” or “natural” nucleobases include adenine (A), guanine (G), thymine (T), cytosine (C), and uracil

[0195] (U). Modified nucleobases include nucleobases found only infrequently or transiently in natural nucleic acids, e.g., hypoxanthine, 6-methyladenine, 5-Me pyrimidines, particularly 5-methylcytosine (also referred to as 5-methyl-2′ deoxycytosine and often referred to in the art as 5-Me-C), 5-hydroxymethylcytosine (HMC), glycosyl HMC and gentobiosyl HMC, as well as synthetic nucleobases, e.g., 2-aminoadenine, 2-(methylamino) adenine, 2-(imidazolylalkyl) adenine, 2-(aminoalklyamino) adenine or other heterosubstituted alkyladenines, 2-thiouracil, 2-thiothymine, 5-bromouracil, 5-hydroxymethyluracil, 8-azaguanine, 7-deazaguanine, N6 (6-aminohexyl) adenine, and 2,6-diaminopurine. Kornberg, A., DNA Replication, W. H. Freeman & Co., San Francisco, pp. 75-77 (1980); Gebeyehu et al., Nucl. Acids Res. 15:4513 (1997). A “universal” base known in the art, e.g., inosine, can also be included. 5-Me-C substitutions have been shown to increase nucleic acid duplex stability by 0.6-1.2 ° C. (Sanghvi, Y. S., in Crooke, S. T. and Lebleu, B., eds., Antisense Research and Applications, CRC Press, Boca Raton, 1993, pp. 276-278) and are aspects of base substitutions.

[0196] Modified nucleobases can comprise other synthetic and natural nucleobases, such as 5-methylcytosine (5-me-C), 5-hydroxymethyl cytosine, xanthine, hypoxanthine, 2-aminoadenine, 6-methyl and other alkyl derivatives of adenine and guanine, 2-propyl and other alkyl derivatives of adenine and guanine, 2-thiouracil, 2-thiothymine and 2-thiocytosine, 5-halouracil and cytosine, 5-propynyl uracil and cytosine, 6-azo uracil, cytosine and thymine, 5-uracil (pseudo-uracil), 4-thiouracil, 8-halo, 8-amino, 8-thiol, 8- thioalkyl, 8-hydroxyl and other 8-substituted adenines and guanines, 5-halo particularly 5- bromo, 5-trifluoromethyl and other 5-substituted uracils and cytosines, 7-methylquanine and 7-methyladenine, 8-azaguanine and 8-azaadenine, 7-deazaguanine and 7-deazaadenine, and 3-deazaguanine and 3-deazaadenine.

[0197] Further, nucleobases can comprise those disclosed in U.S. Pat. No. 3,687,808, those disclosed in ‘The Concise Encyclopedia of Polymer Science And Engineering’, pages 858-859, Kroschwitz, J. I., ed. John Wiley & Sons, 1990, those disclosed by Englisch et al., Angewandle Chemie, International Edition', 1991, 30, page 613, and those disclosed by Sanghvi, Y. S., Chapter 15, Antisense Research and Applications', pages 289-302, Crooke, S.T. and Lebleu, B. ea., CRC Press, 1993. Certain of these nucleobases are particularly useful for increasing the binding affinity of the oligomeric compounds of the present disclosure. These include 5-substituted pyrimidines, 6-azapyrimidines and N-2, N-6 and 0-6 substituted purines, comprising 2-aminopropyladenine, 5-propynyluracil and 5-propynylcytosine. 5-methylcytosine substitutions have been shown to increase nucleic acid duplex stability by 0.6-1.2° C. (Sanghvi, Y.S., Crooke, S.T. and Lebleu, B., eds, ‘Antisense Research and Applications’, CRC Press, Boca Raton, 1993, pp. 276-278) and are aspects of base substitutions, even more particularly when combined with 2′-O-methoxyethyl sugar modifications. Modified nucleobases are described in U.S. Pat. No. 3,687,808, as well as U.S. Pat. Nos. 4,845,205; 5,130,302; 5,134,066; 5,175,273; 5,367,066; 5,432,272; 5,457,187; 5,459,255; 5,484,908; 5,502,177; 5,525,711; 5,552,540; 5,587,469; 5,596,091; 5,614,617; 5,681,941; 5,750,692; 5,763,588; 5,830,653; 6,005,096; and U.S. Patent Application Publication 2003/0158403.

[0198] Thus, the term “modified” refers to a non-natural sugar, phosphate, or base that is incorporated into a guide RNA, an endonuclease, or both a guide RNA and an endonuclease. It is not necessary for all positions in a given oligonucleotide to be uniformly modified, and in fact more than one of the aforementioned modifications can be incorporated in a single oligonucleotide, or even in a single nucleoside within an oligonucleotide.

[0199] The guide RNAs and/or mRNA (or DNA) encoding an endonuclease can be chemically linked to one or more moieties or conjugates that enhance the activity, cellular distribution, or cellular uptake of the oligonucleotide. Such moieties comprise, but are not limited to, lipid moieties such as a cholesterol moiety [Letsinger et al., Proc. Natl. Acad. Sci. USA, 86: 6553-6556 (1989)]; cholic acid [Manoharan et al., Bioorg. Med. Chem. Let., 4: 1053-1060 (1994)]; a thioether, e.g., hexyl-S- tritylthiol [Manoharan et al, Ann. N. Y. Acad. Sci., 660: 306-309 (1992) and Manoharan et al., Bioorg. Med. Chem. Let., 3: 2765-2770 (1993)]; a thiocholesterol [Oberhauser et al., Nucl. Acids Res., 20: 533-538 (1992)]; an aliphatic chain, e.g., dodecandiol or undecyl residues [Kabanov et al., FEBS Lett., 259: 327-330 (1990) and Svinarchuk et al., Biochimie, 75: 49- 54 (1993)]; a phospholipid, e.g., di-hexadecyl-rac-glycerol or triethylammonium 1 ,2-di-O-hexadecyl- rac-glycero-3-H-phosphonate [Manoharan et al., Tetrahedron Lett., 36: 3651-3654 (1995) and Shea et al., Nucl. Acids Res., 18: 3777-3783 (1990)]; a polyamine or a polyethylene glycol chain [Mancharan et al., Nucleosides & Nucleotides, 14: 969-973 (1995)]; adamantane acetic acid [Manoharan et al., Tetrahedron Lett., 36: 3651-3654 (1995)]; a palmityl moiety [(Mishra et al., Biochim. Biophys. Acta, 1264: 229-237 (1995)]; or an octadecylamine or hexylamino-carbonyl-t oxycholesterol moiety [Crooke et al., J. Pharmacol. Exp. Ther., 277: 923-937 (1996)]. See also U.S. Pat. Nos. 4,828,979; 4,948,882; 5,218,105; 5,525,465; 5,541,313; 5,545,730; 5,552,538; 5,578,717, 5,580,731; 5,591,584; 5,109,124; 5,118,802; 5,138,045; 5,414,077; 5,486,603; 5,512,439; 5,578,718; 5,608,046; 4,587,044; 4,605,735; 4,667,025; 4,762,779; 4,789,737; 4,824,941; 4,835,263; 4,876,335; 4,904,582; 4,958,013; 5,082,830; 5,112,963; 5,214,136; 5,082,830; 5,112,963; 5,214,136; 5,245,022; 5,254,469; 5,258,506; 5,262,536; 5,272,250; 5,292,873; 5,317,098; 5,371,241, 5,391,723; 5,416,203, 5,451,463; 5,510,475; 5,512,667; 5,514,785; 5,565,552; 5,567,810; 5,574,142; 5,585,481; 5,587,371; 5,595,726; 5,597,696; 5,599,923; 5,599, 928 and 5,688,941.

[0200] Sugars and other moieties can be used to target proteins and complexes comprising nucleotides, such as cationic polysomes and liposomes, to particular sites. For example, hepatic cell directed transfer can be mediated via asialoglycoprotein receptors (ASGPRs); see, e.g., Hu, et al., Protein Pept Lett. 21(10):1025-30 (2014). Other systems known in the art and regularly developed can be used to target biomolecules of use in the present case and/or complexes thereof to particular target cells of interest.

[0201] These targeting moieties or conjugates can include conjugate groups covalently bound to functional groups, such as primary or secondary hydroxyl groups. Conjugate groups of the present disclosure include intercalators, reporter molecules, polyamines, polyamides, polyethylene glycols, polyethers, groups that enhance the pharmacodynamic properties of oligomers, and groups that enhance the pharmacokinetic properties of oligomers. Typical conjugate groups include cholesterols, lipids, phospholipids, biotin, phenazine, folate, phenanthridine, anthraquinone, acridine, fluoresceins, rhodamines, coumarins, and dyes. Groups that enhance the pharmacodynamic properties, in the context of this present disclosure, include groups that improve uptake, enhance resistance to degradation, and/or strengthen sequence-specific hybridization with the target nucleic acid. Groups that enhance the pharmacokinetic properties, in the context of this present disclosure, include groups that improve uptake, distribution, metabolism or excretion of the compounds of the present disclosure. Representative conjugate groups are disclosed in International Patent Application No. PCT/US92/09196, filed Oct. 23, 1992 (published as WO1993007883), and U.S. Pat. No. 6,287,860. Conjugate moieties include, but are not limited to, lipid moieties such as a cholesterol moiety, cholic acid, a thioether, e.g., hexyl-5-tritylthiol, a thiocholesterol, an aliphatic chain, e.g., dodecandiol or undecyl residues, a phospholipid, e.g., di-hexadecyl-rac-glycerol or triethylammonium 1,2-di-O-hexadecyl-rac-glycero-3-H-phosphonate, a polyamine or a polyethylene glycol chain, or adamantane acetic acid, a palmityl moiety, or an octadecylamine or hexylamino-carbonyl-oxy cholesterol moiety. See, e.g., U.S. Pat. Nos. 4,828,979; 4,948,882; 5,218,105; 5,525,465; 5,541,313; 5,545,730; 5,552,538; 5,578,717; 5,580,731; 5,591,584; 5,109,124; 5,118,802; 5,138,045; 5,414,077; 5,486,603; 5,512,439; 5,578,718; 5,608,046; 4,587,044; 4,605,735; 4,667,025; 4,762,779; 4,789,737; 4,824,941; 4,835,263; 4,876,335; 4,904,582; 4,958,013; 5,082,830; 5,112,963; 5,214,136; 5,082,830; 5,112,963; 5,214,136; 5,245,022; 5,254,469; 5,258,506; 5,262,536; 5,272,250; 5,292,873; 5,317,098; 5,371,241, 5,391,723; 5,416,203, 5,451,463; 5,510,475; 5,512,667; 5,514,785; 5,565,552; 5,567,810; 5,574,142; 5,585,481; 5,587,371; 5,595,726; 5,597,696; 5,599,923; 5,599,928 and 5,688,941.

[0202] Longer polynucleotides that are less amenable to chemical synthesis and are typically produced by enzymatic synthesis can also be modified by various means. Such modifications can include, for example, the introduction of certain nucleotide analogs, the incorporation of particular sequences or other moieties at the 5′ or 3′ ends of molecules, and other modifications.

[0203] By way of illustration, the mRNA encoding Cas9 is approximately 4 kb in length and can be synthesized by in vitro transcription. Modifications to the mRNA can be applied to, e.g., increase its translation or stability (such as by increasing its resistance to degradation with a cell), or to reduce the tendency of the RNA to elicit an innate immune response that is often observed in cells following introduction of exogenous RNAs, particularly longer RNAs such as that encoding Cas9.

[0204] Numerous such modifications have been described in the art, such as polyA tails, 5′ cap analogs (e.g., Anti Reverse Cap Analog (ARCA) or m7G(5′)ppp(5′)G (mCAP)), modified 5′ or 3′ untranslated regions (UTRs), use of modified bases (such as Pseudo-UTP, 2-Thio-UTP, 5-Methylcytidine5′-Triphosphate (5-Methyl-CTP) or N6-Methyl-ATP), or treatment with phosphatase to remove 5′ terminal phosphates. These and other modifications are known in the art, and new modifications of RNAs are regularly being developed.

[0205] There are numerous commercial suppliers of modified RNAs, including for example, TriLink Biotech, AxoLabs, Bio-Synthesis Inc., Dharmacon and many others. As described by TriLink, for example, 5-Methyl-CTP can be used to impart desirable characteristics, such as increased nuclease stability, increased translation or reduced interaction of innate immune receptors with in vitro transcribed RNA. 5-Methylcytidine-5′-Triphosphate (5-Methyl-CTP), N6-Methyl-ATP, as well as Pseudo-UTP and 2-Thio-UTP, have also been shown to reduce innate immune stimulation in culture and in vivo while enhancing translation, as illustrated in publications by Kormann et al. and Warren et al. referred to below.

[0206] It has been shown that chemically modified mRNA delivered in vivo can be used to achieve improved therapeutic effects; see, e.g., Kormann et al., Nature Biotechnology 29, 154-157 (2011). Such modifications can be used, for example, to increase the stability of the RNA molecule and/or reduce its immunogenicity. Using chemical modifications such as Pseudo-U, N6-Methyl-A, 2-Thio-U and 5-Methyl-C, it was found that substituting just one quarter of the uridine and cytidine residues with 2-Thio-U and 5-Methyl-C respectively resulted in a significant decrease in toll-like receptor (TLR) mediated recognition of the mRNA in mice. By reducing the activation of the innate immune system, these modifications can be used to effectively increase the stability and longevity of the mRNA in vivo; see, e.g., Kormann et al., supra.

[0207] It has also been shown that repeated administration of synthetic messenger RNAs incorporating modifications designed to bypass innate anti-viral responses can reprogram differentiated human cells to pluripotency. See, e.g., Warren, et al., Cell Stem Cell, 7(5):618-30 (2010). Such modified mRNAs that act as primary reprogramming proteins can be an efficient means of reprogramming multiple human cell types. Such cells are referred to as induced pluripotency stem cells (iPSCs), and it was found that enzymatically synthesized RNA incorporating 5-Methyl-CTP, Pseudo-UTP and an Anti Reverse Cap Analog (ARCA) could be used to effectively evade the cell's antiviral response; see, e.g., Warren et al., supra.

[0208] Other modifications of polynucleotides described in the art include, for example, the use of polyA tails, the addition of 5′ cap analogs (such as m7G(5′)ppp(5′)G (mCAP)), modifications of 5′ or 3′ untranslated regions (UTRs), or treatment with phosphatase to remove 5′ terminal phosphates—and new approaches are regularly being developed.

[0209] A number of compositions and techniques applicable to the generation of modified RNAs for use herein have been developed in connection with the modification of RNA interference (RNAi), including small-interfering RNAs (siRNAs). siRNAs present particular challenges in vivo because their effects on gene silencing via mRNA interference are generally transient, which can require repeat administration. In addition, siRNAs are double-stranded RNAs (dsRNA) and mammalian cells have immune responses that have evolved to detect and neutralize dsRNA, which is often a by-product of viral infection. Thus, there are mammalian enzymes such as PKR (dsRNA-responsive kinase), and potentially retinoic acid-inducible gene I (RIG-I), that can mediate cellular responses to dsRNA, as well as Toll-like receptors (such as TLR3, TLR7 and TLR8) that can trigger the induction of cytokines in response to such molecules; see, e.g., the reviews by Angart et al., Pharmaceuticals (Basel) 6(4): 440-468 (2013); Kanasty et al., Molecular Therapy 20(3): 513-524 (2012); Burnett et al., Biotechnol J. 6(9):1130-46 (2011); Judge and MacLachlan, Hum Gene Ther 19(2):111-24 (2008); and references cited therein.

[0210] A large variety of modifications have been developed and applied to enhance RNA stability, reduce innate immune responses, and/or achieve other benefits that can be useful in connection with the introduction of polynucleotides into human cells, as described herein; see, e.g., the reviews by Whitehead KA et al., Annual Review of Chemical and Biomolecular Engineering, 2:77-96 (2011); Gaglione and Messere, Mini Rev Med Chem, 10(7):578-95 (2010); Chernolovskaya et al, Curr Opin Mol Ther., 12(2):158-67 (2010); Deleavey et al., Curr Protoc Nucleic Acid Chem Chapter 16:Unit 16.3 (2009); Behlke, Oligonucleotides 18(4):305-19 (2008); Fucini et al., Nucleic Acid Ther 22(3): 205-210 (2012); Bremsen et al., Front Genet 3:154 (2012).

[0211] As noted above, there are a number of commercial suppliers of modified RNAs, many of which have specialized in modifications designed to improve the effectiveness of siRNAs. A variety of approaches are offered based on various findings reported in the literature. For example, Dharmacon notes that replacement of a non-bridging oxygen with sulfur (phosphorothioate, PS) has been extensively used to improve nuclease resistance of siRNAs, as reported by Kole, Nature Reviews Drug Discovery 11:125-140 (2012). Modifications of the 2′-position of the ribose have been reported to improve nuclease resistance of the internucleotide phosphate bond while increasing duplex stability (Tm), which has also been shown to provide protection from immune activation. A combination of moderate PS backbone modifications with small, well-tolerated 2′-substitutions (2′-0-Methyl, 2′-Fluoro, 2′-Hydro) have been associated with highly stable siRNAs for applications in vivo, as reported by Soutschek et al. Nature 432:173-178 (2004); and 2′-O-Methyl modifications have been reported to be effective in improving stability as reported by Volkov, Oligonucleotides 19:191-202 (2009). With respect to decreasing the induction of innate immune responses, modifying specific sequences with 2′-O-Methyl, 2′-Fluoro, 2′-Hydro have been reported to reduce TLR7/TLR8 interaction while generally preserving silencing activity; see, e.g., Judge et al., Mol. Ther. 13:494-505 (2006); and Cekaite et al., J. Mol. Biol. 365:90-108 (2007). Additional modifications, such as 2-thiouracil, pseudouracil, 5-methylcytosine, 5-methyluracil, and N6-methyladenosine have also been shown to minimize the immune effects mediated by TLR3, TLR7, and TLR8; see, e.g., Kariko, K. et al., Immunity 23:165-175 (2005).

[0212] As is also known in the art, and commercially available, a number of conjugates can be applied to polynucleotides, such as RNAs, for use herein that can enhance their delivery and/or uptake by cells, including for example, cholesterol, tocopherol and folic acid, lipids, peptides, polymers, linkers and aptamers; see, e.g., the review by Winkler, Ther. Deliv. 4:791-809 (2013), and references cited therein.

### Codon-Optimization

[0213] A polynucleotide encoding a site-directed polypeptide can be codon-optimized according to methods standard in the art for expression in the cell containing the target DNA of interest. For example, if the intended target nucleic acid is in a human cell, a human codon-optimized polynucleotide encoding Cas9 is contemplated for use for producing the Cas9 polypeptide.

### Complexes of a Genome-targeting Nucleic Acid and a Site-Directed Polypeptide

[0214] A genome-targeting nucleic acid interacts with a site-directed polypeptide (e.g., a nucleic acid-guided nuclease such as Cas9), thereby forming a complex. The genome-targeting nucleic acid guides the site-directed polypeptide to a target nucleic acid.

### Ribonucleoprotein Complexes (RNPs)

[0215] The site-directed polypeptide and genome-targeting nucleic acid can each be administered separately to a cell or a patient. On the other hand, the site-directed polypeptide can be pre-complexed with one or more guide RNAs, or one or more crRNA together with a tracrRNA. The pre-complexed material can then be administered to a cell or a patient. Such pre-complexed material is known as a ribonucleoprotein particle (RNP). The site-directed polypeptide in the RNP can be, for example, a Cas9 endonuclease or a Cpf1 endonuclease. The site-directed polypeptide can be flanked at the N-terminus, the C-terminus, or both the N-terminus and C-terminus by one or more nuclear localization signals (NLSs). For example, a Cas9 endonuclease can be flanked by two NLSs, one NLS located at the N-terminus and the second NLS located at the C-terminus. The NLS can be any NLS known in the art, such as a SV40 NLS. The weight ratio of genome-targeting nucleic acid to site-directed polypeptide in the RNP can be 1:1. For example, the weight ratio of sgRNA to Cas9 endonuclease in the RNP can be 1:1.

### Nucleic Acids Encoding System Components

[0216] The present disclosure provides a nucleic acid comprising a nucleotide sequence encoding a genome-targeting nucleic acid of the disclosure, a site-directed polypeptide of the disclosure, and/or any nucleic acid or proteinaceous molecule necessary to carry out the aspects of the methods of the disclosure.

[0217] The nucleic acid encoding a genome-targeting nucleic acid of the disclosure, a site-directed polypeptide of the disclosure, and/or any nucleic acid or proteinaceous molecule necessary to carry out the aspects of the methods of the disclosure can comprise a vector (e.g., a recombinant expression vector).

[0218] The term “vector” refers to a nucleic acid molecule capable of transporting another nucleic acid to which it has been linked. One type of vector is a “plasmid”, which refers to a circular double-stranded DNA loop into which additional nucleic acid segments can be ligated. Another type of vector is a viral vector, wherein additional nucleic acid segments can be ligated into the viral genome. Certain vectors are capable of autonomous replication in a host cell into which they are introduced (e.g., bacterial vectors having a bacterial origin of replication and episomal mammalian vectors). Other vectors (e.g., non-episomal mammalian vectors) are integrated into the genome of a host cell upon introduction into the host cell, and thereby are replicated along with the host genome.

[0219] In some examples, vectors can be capable of directing the expression of nucleic acids to which they are operatively linked. Such vectors are referred to herein as “recombinant expression vectors”, or more simply “expression vectors”, which serve equivalent functions.

[0220] The term “operably linked” means that the nucleotide sequence of interest is linked to regulatory sequence(s) in a manner that allows for expression of the nucleotide sequence. The term “regulatory sequence” is intended to include, for example, promoters, enhancers and other expression control elements (e.g., polyadenylation signals). Such regulatory sequences are well known in the art and are described, for example, in Goeddel; Gene Expression Technology: Methods in Enzymology 185, Academic Press, San Diego, Calif. (1990). Regulatory sequences include those that direct constitutive expression of a nucleotide sequence in many types of host cells, and those that direct expression of the nucleotide sequence only in certain host cells (e.g., tissue-specific regulatory sequences). It will be appreciated by those skilled in the art that the design of the expression vector can depend on such factors as the choice of the target cell, the level of expression desired, and the like.

[0221] Expression vectors contemplated include, but are not limited to, viral vectors based on vaccinia virus, poliovirus, adenovirus, adeno-associated virus, SV40, herpes simplex virus, human immunodeficiency virus, retrovirus (e.g., Murine Leukemia Virus, spleen necrosis virus, and vectors derived from retroviruses such as Rous Sarcoma Virus, Harvey Sarcoma Virus, avian leukosis virus, a lentivirus, human immunodeficiency virus, myeloproliferative sarcoma virus, and mammary tumor virus) and other recombinant vectors. Other vectors contemplated for eukaryotic target cells include, but are not limited to, the vectors pXT1, pSG5, pSVK3, pBPV, pMSG, and pSVLSV40 (Pharmacia). Other vectors can be used so long as they are compatible with the host cell.

[0222] In some examples, a vector can comprise one or more transcription and/or translation control elements. Depending on the host/vector system utilized, any of a number of suitable transcription and translation control elements, including constitutive and inducible promoters, transcription enhancer elements, transcription terminators, etc. can be used in the expression vector. The vector can be a self-inactivating vector that either inactivates the viral sequences or the components of the CRISPR machinery or other elements.

[0223] Non-limiting examples of suitable eukaryotic promoters (i.e., promoters functional in a eukaryotic cell) include those from cytomegalovirus (CMV) immediate early, herpes simplex virus (HSV) thymidine kinase, early and late SV40, long terminal repeats (LTRs) from retrovirus, human elongation factor-1 promoter (EF1), a hybrid construct comprising the cytomegalovirus (CMV) enhancer fused to the chicken beta-actin promoter (CAG), murine stem cell virus promoter (MSCV), phosphoglycerate kinase-1 locus promoter (PGK), and mouse metallothionein-I.

[0224] For expressing small RNAs, including guide RNAs used in connection with Cassuch as RNA polymerase III promoters, including for example U6 and H1, can be advantageous. Descriptions of and parameters for enhancing the use of such promoters are known in art, and additional information and approaches are regularly being described; see, e.g., Ma, H. et al., Molecular Therapy—Nucleic Acids 3, e161 (2014) doi:10.1038/mtna.2014.12.

[0225] The expression vector can also contain a ribosome binding site for translation initiation and a transcription terminator. The expression vector can also comprise appropriate sequences for amplifying expression. The expression vector can also include nucleotide sequences encoding non-native tags (e.g., histidine tag, hemagglutinin tag, green fluorescent protein, etc.) that are fused to the site-directed polypeptide, thus resulting in a fusion protein.

[0226] A promoter can be an inducible promoter (e.g., a heat shock promoter, tetracycline-regulated promoter, steroid-regulated promoter, metal-regulated promoter, estrogen receptor-regulated promoter, etc.). The promoter can be a constitutive promoter (e.g., CMV promoter, UBC promoter). In some cases, the promoter can be a spatially restricted and/or temporally restricted promoter (e.g., a tissue specific promoter, a cell type specific promoter, etc.).

[0227] The nucleic acid encoding a genome-targeting nucleic acid of the disclosure and/or a site-directed polypeptide can be packaged into or on the surface of delivery vehicles for delivery to cells. Delivery vehicles contemplated include, but are not limited to, nanospheres, liposomes, quantum dots, nanoparticles, polyethylene glycol particles, hydrogels, and micelles. As described in the art, a variety of targeting moieties can be used to enhance the preferential interaction of such vehicles with desired cell types or locations.

[0228] Introduction of the complexes, polypeptides, and nucleic acids of the disclosure into cells can occur by viral or bacteriophage infection, transfection, conjugation, protoplast fusion, lipofection, electroporation, nucleofection, calcium phosphate precipitation, polyethyleneimine (PEI)-mediated transfection, DEAE-dextran mediated transfection, liposome-mediated transfection, particle gun technology, calcium phosphate precipitation, direct micro-injection, nanoparticle-mediated nucleic acid delivery, and the like.

Ex vivo Based Therapy

[0229] Provided herein are methods for treating a patient with Dystrophic Epidermolysis Bullosa. An aspect of such method is an ex vivo cell-based therapy. For example, a biopsy of the patient's skin is performed. Then, a primary keratinocyte or fibroblast is isolated from the biopsied material. Next, the chromosomal DNA of these keratinocytes or fibroblasts is corrected using the materials and methods described herein. Finally, the keratinocytes or fibroblasts are implanted into the patient. As a non-limiting example, the gene-corrected keratinocytes or fibroblasts may be expanded to form sheets of skin that are then grafted to replace the patient's damaged skin. Any source or type of cell may be used as the progenitor cell.

[0230] Another aspect of such method is an ex vivo cell-based therapy. For example, a patient specific induced pluripotent stem cell (iPSC) can be created. Then, the chromosomal DNA of these iPSCs can be edited using the materials and methods described herein. Next, the genome-edited iPSCs can be differentiated into keratinocytes or fibroblasts. Finally, the differentiated keratinocytes or fibroblasts are implanted into the patient. As a non-limiting example, the differentiated keratinocytes or fibroblasts can be expanded to form sheets of skin that are then grafted to replace the patient's damaged skin.

[0231] Another aspect of such method is an ex vivo cell-based therapy. For example, a CD34+ cell can be isolated from the patient's peripheral blood or bone marrow. Then, the chromosomal DNA of these CD34+ cells can be edited using the materials and methods described herein. Finally, the CD34+ cells are implanted into the patient. Any source or type of cell may be used as the progenitor cell. In one aspect, the CD34+ cell is a CD34+ hematopoietic progenitor cell.

[0232] Yet another aspect of such method is an ex vivo cell-based therapy. For example, a mesenchymal stem cell can be isolated from the patient, which can be isolated from the patient's bone marrow or peripheral blood. Next, the chromosomal DNA of these mesenchymal stem cells can be edited using the materials and methods described herein. Next, the genome-edited mesenchymal stem cells can be differentiated into keratinocytes or fibroblasts. Finally, the differentiated keratinocytes or fibroblasts are implanted into the patient. As a non-limiting example, the differentiated keratinocytes or fibroblasts may be expanded to form sheets of skin that are then grafted to replace the patient's damaged skin.

[0233] One advantage of an ex vivo cell therapy approach is the ability to conduct a comprehensive analysis of the therapeutic prior to administration. Nuclease-based therapeutics can have some level of off-target effects. Performing gene correction ex vivo allows one to characterize the corrected cell population prior to implantation. The present disclosure includes sequencing the entire genome of the corrected cells to ensure that the off-target effects, if any, can be in genomic locations associated with minimal risk to the patient. Furthermore, populations of specific cells, including clonal populations, can be isolated prior to implantation.

[0234] Another advantage of ex vivo cell therapy relates to genetic correction in iPSCs compared to other primary cell sources. iPSCs are prolific, making it easy to obtain the large number of cells that will be required for a cell-based therapy. Furthermore, iPSCs are an ideal cell type for performing clonal isolations. This allows screening for the correct genomic correction, without risking a decrease in viability. Thus, manipulation of iPSCs for the treatment of Dystrophic Epidermolysis Bullosa can be much easier, and can shorten the amount of time needed to make the desired genetic correction.

In vivo Based Therapy

[0235] Methods can also include an in vivo based therapy. Chromosomal DNA of the cells in the patient is edited using the materials and methods described herein.

[0236] Although certain cells present an attractive target for ex vivo treatment and therapy, increased efficacy in delivery may permit direct in vivo delivery to such cells. Ideally the targeting and editing would be directed to the relevant cells. Cleavage in other cells can also be prevented by the use of promoters only active in certain cells and or developmental stages. Additional promoters are inducible, and therefore can be temporally controlled if the nuclease is delivered as a plasmid. The amount of time that delivered RNA and protein remain in the cell can also be adjusted using treatments or domains added to change the half-life. In vivo treatment would eliminate a number of treatment steps, but a lower rate of delivery can require higher rates of editing. In vivo treatment can eliminate problems and losses from ex vivo treatment and engraftment.

[0237] An advantage of in vivo gene therapy can be the ease of therapeutic production and administration. The same therapeutic approach and therapy will have the potential to be used to treat more than one patient, for example a number of patients who share the same or similar genotype or allele. In contrast, ex vivo cell therapy typically requires using a patient's own cells, which are isolated, manipulated and returned to the same patient.

[0238] Also provided herein is a cellular method for editing the COL7A1 gene in a cell by genome editing. For example, a cell can be isolated from a patient or animal. Then, the chromosomal DNA of the cell can be edited using the materials and methods described herein.

microRNAs (miRNAs)

[0239] Another class of gene regulatory regions having these features is microRNA (miRNA) binding sites. miRNAs are non-coding RNAs that play key roles in post-transcriptional gene regulation. miRNA can regulate the expression of 30% of all mammalian protein-encoding genes. Specific and potent gene silencing by double stranded RNA (RNAi) was discovered, plus additional small non-coding RNA (Canver, M.C. et al., Nature (2015)). The largest class of non-coding RNAs important for gene silencing is miRNAs. In mammals, miRNAs are first transcribed as a long RNA transcript, which can be separate transcriptional units, part of protein introns, or other transcripts. The long transcripts are called primary miRNA (pri-miRNA) that include imperfectly base-paired hairpin structures. These pri-miRNA can be cleaved into one or more shorter precursor miRNAs (pre-miRNAs) by Microprocessor, a protein complex in the nucleus, involving Drosha.

[0240] Pre-miRNAs are short stem loops˜70 nucleotides in length with a 2-nucleotide 3′-overhang that are exported, into the mature 19-25 nucleotide miRNA:miRNA* duplexes. The miRNA strand with lower base pairing stability (the guide strand) can be loaded onto the RNA-induced silencing complex (RISC). The passenger strand (marked with *), can be functional, but is usually degraded. The mature miRNA tethers RISC to partly complementary sequence motifs in target mRNAs predominantly found within the 3′ untranslated regions (UTRs) and induces posttranscriptional gene silencing (Bartel, D.P. Cell 136, 215-233 (2009); Saj, A. & Lai, E.C. Curr Opin Genet Dev 21, 504-510 (2011)).

[0241] miRNAs can be important in development, differentiation, cell cycle and growth control, and in virtually all biological pathways in mammals and other multicellular organisms. miRNAs can also be involved in cell cycle control, apoptosis and stem cell differentiation, hematopoiesis, hypoxia, muscle development, neurogenesis, insulin secretion, cholesterol metabolism, aging, viral replication and immune responses.

[0242] A single miRNA can target hundreds of different mRNA transcripts, while an individual miRNA transcript can be targeted by many different miRNAs. More than 28645 microRNAs have been annotated in the latest release of miRBase (v.21). Some miRNAs can be encoded by multiple loci, some of which can be expressed from tandemly co-transcribed clusters. The features allow for complex regulatory networks with multiple pathways and feedback controls. miRNAs can be integral parts of these feedback and regulatory circuits and can help regulate gene expression by keeping protein production within limits (Herranz, H. & Cohen, S. M. Genes Dev 24, 1339-1344 (2010); Posadas, D. M. & Carthew, R. W. Curr Opin Genet Dev 27, 1-6 (2014)).

[0243] miRNA can also be important in a large number of human diseases that are associated with abnormal miRNA expression. This association underscores the importance of the miRNA regulatory pathway. Recent miRNA deletion studies have linked miRNA with regulation of the immune responses (Stern-Ginossar, N. et al., Science 317, 376-381 (2007)). [000236] miRNA also has a strong link to cancer and can play a role in different types of cancer. miRNAs have been found to be downregulated in a number of tumors. miRNA can be important in the regulation of key cancer-related pathways, such as cell cycle control and the DNA damage response, and can therefore be used in diagnosis and can be targeted clinically. MicroRNAs can delicately regulate the balance of angiogenesis, such that experiments depleting all microRNAs suppress tumor angiogenesis (Chen, S. et al., Genes Dev 28, 1054-1067 (2014)).

[0244] As has been shown for protein coding genes, miRNA genes can also be subject to epigenetic changes occurring with cancer. Many miRNA loci can be associated with CpG islands increasing their opportunity for regulation by DNA methylation (Weber, B., Stresemann,

[0245] C., Brueckner, B. & Lyko, F. Cell Cycle 6, 1001-1005 (2007)). The majority of studies have used treatment with chromatin remodeling drugs to reveal epigenetically silenced miRNAs.

[0246] In addition to their role in RNA silencing, miRNA can also activate translation (Posadas, D. M. & Carthew, R. W. Curr Opin Genet Dev 27, 1-6 (2014)). Knocking out miRNA sites may lead to decreased expression of the targeted gene, while introducing these sites may increase expression.

[0247] Individual miRNA can be knocked out most effectively by mutating the seed sequence (bases 2-8 of the microRNA), which can be important for binding specificity. Cleavage in this region, followed by mis-repair by NHEJ can effectively abolish miRNA function by blocking binding to target sites. miRNA could also be inhibited by specific targeting of the special loop region adjacent to the palindromic sequence. Catalytically inactive Cas9 can also be used to inhibit shRNA expression (Zhao, Y. et al., Sci Rep 4, 3943 (2014)). In addition to targeting the miRNA, the binding sites can also be targeted and mutated to prevent the silencing by miRNA.

[0248] According to the present disclosure, any of the microRNA (miRNA) or their binding sites may be incorporated into the compositions of the present disclosure.

[0249] The compositions may have a region such as, but not limited to, a region comprising the sequence of any of the microRNAs disclosed in SEQ ID NOs: 632-4715 the reverse complement of the microRNAs disclosed in SEQ ID NOs: 632-4715 or the microRNA anti-seed region of any of the microRNAs disclosed in SEQ ID NOs: 632-4715.

[0250] The compositions of the present disclosure may comprise one or more microRNA target sequences, microRNA sequences, or microRNA seeds. Such sequences may correspond to any known microRNA such as those taught in U.S. Publication 2005/0261218 and U.S. Publication 2005/0059005. As a non-limiting example, known microRNAs, their sequences and their binding site sequences in the human genome are disclosed in SEQ ID NOs: 632-4715.

[0251] A microRNA sequence comprises a “seed” sequence, i.e., a sequence in the region of positions 2-8 of the mature microRNA, which sequence has perfect Watson-Crick complementarity to the miRNA target sequence. A microRNA seed may comprise positions 2-8 or 2-7 of the mature microRNA. In some aspects, a microRNA seed may comprise 7 nucleotides (e.g., nucleotides 2-8 of the mature microRNA), wherein the seed-complementary site in the corresponding miRNA target is flanked by an adenine (A) opposed to microRNA position 1. In some aspects, a microRNA seed may comprise 6 nucleotides (e.g., nucleotides 2-7 of the mature microRNA), wherein the seed-complementary site in the corresponding miRNA target is flanked by an adenine (A) opposed to microRNA position 1. See for example, Grimson A, Farh K K, Johnston W K, Garrett-Engele P, Lim L P, Bartel D P; Mol Cell. 2007 Jul. 6; 27(1):91-105. The bases of the microRNA seed have complete complementarity with the target sequence.

[0252] Identification of microRNA, microRNA target regions, and their expression patterns and role in biology have been reported (Bonauer et al., Curr Drug Targets 2010 11:943-949; Anand and Cheresh Curr Opin Hematol 2011 18:171-176; Contreras and Rao Leukemia 2012 26:404-413 (2011 Dec 20. doi: 10.1038/leu.2011.356); Bartel Cell 2009 136:215-233; Landgraf et al, Cell, 2007 129:1401-1414; Gentner and Naldini, Tissue Antigens. 2012 80:393-403).

[0253] For example, if the composition is not intended to be delivered to the liver but ends up there, then miR-122, a microRNA abundant in liver, can inhibit the expression of the sequence delivered if one or multiple target sites of miR-122 are engineered into the polynucleotide encoding that target sequence. Introduction of one or multiple binding sites for different microRNA can be engineered to further decrease the longevity, stability, and protein translation hence providing an additional layer of tenability.

[0254] As used herein, the term “microRNA site” refers to a microRNA target site or a microRNA recognition site, or any nucleotide sequence to which a microRNA binds or associates. It should be understood that “binding” may follow traditional Watson-Crick hybridization rules or may reflect any stable association of the microRNA with the target sequence at or adjacent to the microRNA site.

[0255] Conversely, for the purposes of the compositions of the present disclosure, microRNA binding sites can be engineered out of (i.e. removed from) sequences in which they naturally occur in order to increase protein expression in specific tissues. For example, miR-668 binding sites may be removed to improve protein expression in the keratinocytes.

[0256] Specifically, microRNAs are known to be differentially expressed in immune cells (also called hematopoietic cells), such as antigen presenting cells (APCs) (e.g. dendritic cells and macrophages), macrophages, monocytes, B lymphocytes, T lymphocytes, granulocytes, natural killer cells, etc. Immune cell specific microRNAs are involved in immunogenicity, autoimmunity, the immune-response to infection, inflammation, as well as unwanted immune response after gene therapy and tissue/organ transplantation. Immune cells specific microRNAs also regulate many aspects of development, proliferation, differentiation and apoptosis of hematopoietic cells (immune cells). For example, miR-142 and miR-146 are exclusively expressed in the immune cells, particularly abundant in myeloid dendritic cells. Introducing the miR-142 binding site into the 3′-UTR of a polypeptide of the present disclosure can selectively suppress the gene expression in the antigen presenting cells through miR-142 mediated mRNA degradation, limiting antigen presentation in professional APCs (e.g. dendritic cells) and thereby preventing antigen-mediated immune response after gene delivery (see, Annoni A et al., blood, 2009, 114, 5152-5161).

[0257] In one example, microRNAs binding sites that are known to be expressed in immune cells, in particular, the antigen presenting cells, can be engineered into the polynucleotides to suppress the expression of the polynucleotide in APCs through microRNA mediated RNA degradation, subduing the antigen-mediated immune response, while the expression of the polynucleotide is maintained in non-immune cells where the immune cell specific microRNAs are not expressed.

[0258] Many microRNA expression studies have been conducted, and are described in the art, to profile the differential expression of microRNAs in various cancer cells/tissues and other diseases. Some microRNAs are abnormally over-expressed in certain cancer cells and others are under-expressed. For example, microRNAs are differentially expressed in cancer cells (WO2008/154098, US2013/0059015, US2013/0042333, WO2011/157294); cancer stem cells (US2012/0053224); pancreatic cancers and diseases (US2009/0131348, US2011/0171646, US2010/0286232, US8389210); asthma and inflammation (U.S. Pat. No. 8,415,096); prostate cancer (US2013/0053264); hepatocellular carcinoma (WO2012/151212, US2012/0329672, WO2008/054828, U.S. Pat. No. 8,252,538); lung cancer cells (WO2011/076143, WO2013/033640, WO2009/070653, US2010/0323357); cutaneous T-cell lymphoma (WO2013/011378); colorectal cancer cells (WO2011/0281756, WO2011/076142); cancer positive lymph nodes (WO2009/100430, US2009/0263803); nasopharyngeal carcinoma (EP2112235); chronic obstructive pulmonary disease (US2012/0264626, US2013/0053263); thyroid cancer (WO2013/066678); ovarian cancer cells (US2012/0309645, WO2011/095623); breast cancer cells (WO2008/154098, WO2007/081740, US2012/0214699), leukemia and lymphoma (WO2008/073915, US2009/0092974, US2012/0316081, US2012/0283310, WO2010/018563).

[0259] Non-limiting examples of microRNA sequences and the targeted tissues and/or cells are disclosed in SEQ ID NOs: 632-4715.

### Genome Engineering Strategies

[0260] The methods of the present disclosure can involve correction of one or both of the mutant alleles. Gene editing to correct the mutation has the advantage of restoration of correct expression levels and temporal control. Sequencing the patient's COL7A1 alleles allows for design of the gene editing strategy to best correct the identified mutation(s).

[0261] A step of the ex vivo methods of the present disclosure can comprise editing/correcting a keratinocyte or fibroblast isolated from the patient using genome engineering.

[0262] A step of the ex vivo methods of the present disclosure can comprise editing/correcting the correcting the patient specific iPSC cells, CD34+ cells, or mesenchymal stem cell. Likewise, a step of the in vivo methods of the present disclosure involves editing/correcting the cells in a Dystrophic Epidermolysis Bullosa patient using genome engineering. Similarly, a step in the cellular methods of the present disclosure can comprise editing/correcting the COL7A1 gene in a human cell by genome engineering.

[0263] Dystrophic Epidermolysis Bullosa patients exhibit a wide range of mutations in the COL7A1 gene. Therefore, different patients may require different correction strategies. Any CRISPR endonuclease may be used in the methods of the present disclosure, each CRISPR endonuclease having its own associated PAM, which may or may not be disease specific.

[0264] For example, if there are small or large deletions or multiple mutations, a wild-type gene, a cDNA or a minigene (comprised of one or more exons and introns or natural or synthetic introns) can be knocked into the gene locus or a heterologous location in the genome such as a safe harbor locus. Pairs of nucleases can be used to delete mutated gene regions, and a donor is provided to restore function. In this case two gRNAs and one donor sequence would be supplied. A full length cDNA can be knocked into any safe harbor locus, but must use a supplied or other promoter. If this construct is knocked into the correct location, it will have physiological control, similar to the normal gene.

[0265] For example, the mutation can be corrected by the insertions or deletions that arise due to the imprecise NHEJ repair pathway. If the patient's COL7A1 gene has an inserted or deleted base, a targeted cleavage can result in a NHEJ-mediated insertion or deletion that restores the frame. Missense mutations can also be corrected through NHEJ-mediated correction using one or more guide RNA. The ability or likelihood of the cut(s) to correct the mutation can be designed or evaluated based on the local sequence and micro-homologies. NHEJ can also be used to delete segments of the gene, either directly or by altering splice donor or acceptor sites through cleavage by one gRNA targeting several locations, or several gRNAs. This may be useful if an amino acid, domain or exon contains the mutations and can be removed or inverted, or if the deletion otherwise restored function to the protein. Pairs of guide strands have been used for deletions and corrections of inversions.

[0266] Alternatively, the donor for correction by HDR contains the corrected sequence with small or large flanking homology arms to allow for annealing. HDR is essentially an error-free mechanism that uses a supplied homologous DNA sequence as a template during DSB repair. The rate of homology directed repair (HDR) is a function of the distance between the mutation and the cut site so choosing overlapping or nearest target sites is important. Templates can include extra sequences flanked by the homologous regions or can contain a sequence that differs from the genomic sequence, thus allowing sequence editing.

[0267] Some genome engineering strategies involve correction of one or more mutations in or near the COL7A1 gene, or inserting a wild-type COL7A1 gene, a cDNA or a minigene (comprised of one or more exons and introns or natural or synthetic introns) into the locus of the corresponding gene to replace the mutant gene by homology directed repair (HDR), which is also known as homologous recombination (HR). Homology directed repair can be one strategy for treating patients that have one or more mutations in or near the COL7A1 gene. These strategies can restore the COL7A1 gene and reverse, treat, and/or mitigate the diseased state. These strategies can require a more custom approach based on the location of the patient's mutation(s). Donor nucleotides for correcting mutations often are small (<300 bp). This is advantageous, as HDR efficiencies may be inversely related to the size of the donor molecule. Also, it is expected that the donor templates can fit into size constrained adeno-associated virus (AAV) molecules, which have been shown to be an effective means of donor template delivery.

[0268] Homology directed repair is a cellular mechanism for repairing double-stranded breaks (DSBs). The most common form is homologous recombination. There are additional pathways for HDR, including single-strand annealing and alternative-HDR. Genome engineering tools allow researchers to manipulate the cellular homologous recombination pathways to create site-specific modifications to the genome. It has been found that cells can repair a double-stranded break using a synthetic donor molecule provided in trans. Therefore, by introducing a double-stranded break near a specific mutation and providing a suitable donor, targeted changes can be made in the genome. Specific cleavage increases the rate of HDR more than 1,000 fold above the rate of 1 in 10⁶ cells receiving a homologous donor alone. The rate of homology directed repair (HDR) at a particular nucleotide is a function of the distance to the cut site, so choosing overlapping or nearest target sites is important. Gene editing offers the advantage over gene addition, as correcting in situ leaves the rest of the genome unperturbed.

[0269] Supplied donors for editing by HDR vary markedly but can contain the intended sequence with small or large flanking homology arms to allow annealing to the genomic DNA. The homology regions flanking the introduced genetic changes can be 30 bp or smaller, or as large as a multi-kilobase cassette that can contain promoters, cDNAs, etc. Both single-stranded and double-stranded oligonucleotide donors have been used. These oligonucleotides range in size from less than 100 nt to over many kb, though longer ssDNA can also be generated and used. Double-stranded donors can be used, including PCR amplicons, plasmids, and mini-circles. In general, it has been found that an AAV vector can be a very effective means of delivery of a donor template, though the packaging limits for individual donors is <5 kb. Active transcription of the donor increased HDR three-fold, indicating the inclusion of promoter may increase conversion. Conversely, CpG methylation of the donor decreased gene expression and HDR.

[0270] In addition to wild-type endonucleases, such as Cas9, nickase variants exist that have one or the other nuclease domain inactivated resulting in cutting of only one DNA strand. HDR can be directed from individual Cas nickases or using pairs of nickases that flank the target area. Donors can be single-stranded, nicked, or dsDNA.

[0271] The donor DNA can be supplied with the nuclease or independently by a variety of different methods, for example by transfection, nano-particle, micro-injection, or viral transduction. A range of tethering options has been proposed to increase the availability of the donors for HDR. Examples include attaching the donor to the nuclease, attaching to DNA binding proteins that bind nearby, or attaching to proteins that are involved in DNA end binding or repair.

[0272] The repair pathway choice can be guided by a number of culture conditions, such as those that influence cell cycling, or by targeting of DNA repair and associated proteins. For example, to increase HDR, key NHEJ molecules can be suppressed, such as KU70, KU80 or DNA ligase IV.

[0273] Without a donor present, the ends from a DNA break or ends from different breaks can be joined using the several non-homologous repair pathways in which the DNA ends are joined with little or no base-pairing at the junction. In addition to canonical NHEJ, there are similar repair mechanisms, such as alt-NHEJ. If there are two breaks, the intervening segment can be deleted or inverted. NHEJ repair pathways can lead to insertions, deletions or mutations at the joints.

[0274] NHEJ was used to insert a 15-kb inducible gene expression cassette into a defined locus in human cell lines after nuclease cleavage. (See e.g., Maresca, M., Lin, V.G., Guo, N. & Yang, Y., Genome Res 23, 539-546 (2013); Cristea et al. Biotechnology and Bioengineering, 110 (3):871-80 (2013); Suzuki et al. Nature, 540, 144-149 (2016)).

[0275] In addition to genome editing by NHEJ or HDR, site-specific gene insertions have been conducted that use both the NHEJ pathway and HDR. A combination approach may be applicable in certain settings, possibly including intron/exon borders. NHEJ may prove effective for ligation in the intron, while the error-free HDR may be better suited in the coding region.

[0276] The COL7A1 gene contains a number of exons as shown in Table 3. Any one or more of these exons or nearby introns can be repaired in order to correct a mutation and restore COL7A1 protein activity. Alternatively, there are various mutations associated with Dystrophic Epidermolysis Bullosa, which are a combination of insertions, deletions, missense, nonsense, frameshift and other mutations, with the common effect of inactivating COL7A1. Any one or more of the mutations can be repaired in order to restore the COL7A1. Alternatively, a COL7A1 gene or cDNA can be inserted to the locus of the corresponding gene to replace the mutant gene or knocked-in to a safe harbor locus, such as AAVS1. In some examples, the methods can provide one gRNA or a pair of gRNAs that can be used to facilitate incorporation of a new sequence from a polynucleotide donor template to correct one or more mutations or to knock-in a part of or the entire COL7A1 gene or cDNA.

[0277] The methods can provide gRNA pairs that make a deletion by cutting the gene twice, one gRNA cutting at the 5′ end of one or more mutations and the other gRNA cutting at the 3′ end of one or more mutations that facilitates insertion of a new sequence from a polynucleotide donor template to replace the one or more mutations. The cutting can be accomplished by a pair of DNA endonucleases that each makes a DSB in the genome, or by multiple nickases that together make a DSB in the genome.

[0278] Alternatively, the methods can provide one gRNA to make one double-strand cut around one or more mutations that facilitates insertion of a new sequence from a polynucleotide donor template to replace the one or more mutations. The double-strand cut can be made by a single DNA endonuclease or multiple nickases that together make a DSB in the genome.

[0279] Illustrative modifications within the COL7A1 gene include replacements within or near (proximal) to the mutations referred to above, such as within the region of less than 3 kb, less than 2kb, less than 1 kb, less than 0.5 kb upstream or downstream of the specific mutation. Given the relatively wide variations of mutations in the COL7A1 gene, it will be appreciated that numerous variations of the replacements referenced above (including without limitation larger as well as smaller deletions), would be expected to result in restoration of the COL7A1 gene expression.

[0280] Such variants can include replacements that are larger in the 5′ and/or 3′ direction than the specific mutation in question, or smaller in either direction. Accordingly, by “near” or “proximal” with respect to specific replacements, it is intended that the SSB or DSB locus associated with a desired replacement boundary (also referred to herein as an endpoint) can be within a region that is less than about 3 kb from the reference locus noted. The SSB or DSB locus can be more proximal and within 2 kb, within 1 kb, within 0.5 kb, or within 0.1 kb. In the case of small replacement, the desired endpoint can be at or “adjacent to” the reference locus, by which it is intended that the endpoint can be within 100 bp, within 50 bp, within 25 bp, or less than about 10 bp to 5 bp from the reference locus.

[0281] Examples comprising larger or smaller replacements can be expected to provide the same benefit, as long as the COL7A1 protein activity is restored. It is thus expected that many variations of the replacements described and illustrated herein can be effective for ameliorating Dystrophic Epidermolysis Bullosa.

[0282] In order to ensure that the pre-mRNA is properly processed following deletion, the surrounding splicing signals can be deleted. Splicing donor and acceptors are generally within 100 base pairs of the neighboring intron. In some examples, methods can provide all gRNAs that cut approximately +/−100-3100 bp with respect to each exon/intron junction of interest.

[0283] For any of the genome editing strategies, gene editing can be confirmed by sequencing or PCR analysis.

### Target Sequence Selection

[0284] Shifts in the location of the 5′ boundary and/or the 3′ boundary relative to particular reference loci can be used to facilitate or enhance particular applications of gene editing, which depend in part on the endonuclease system selected for the editing, as further described and illustrated herein.

[0285] In a first non-limiting example of such target sequence selection, many endonuclease systems have rules or criteria that can guide the initial selection of potential target sites for cleavage, such as the requirement of a PAM sequence motif in a particular position adjacent to the DNA cleavage sites in the case of CRISPR Type II or Type V endonucleases.

[0286] In another non-limiting example of target sequence selection or optimization, the frequency of off-target activity for a particular combination of target sequence and gene editing endonuclease (i.e. the frequency of DSBs occurring at sites other than the selected target sequence) can be assessed relative to the frequency of on-target activity. In some cases, cells that have been correctly edited at the desired locus can have a selective advantage relative to other cells. Illustrative, but non-limiting, examples of a selective advantage include the acquisition of attributes such as enhanced rates of replication, persistence, resistance to certain conditions, enhanced rates of successful engraftment or persistence in vivo following introduction into a patient, and other attributes associated with the maintenance or increased numbers or viability of such cells. In other cases, cells that have been correctly edited at the desired locus can be positively selected for by one or more screening methods used to identify, sort or otherwise select for cells that have been correctly edited. Both selective advantage and directed selection methods can take advantage of the phenotype associated with the correction. In some cases, cells can be edited two or more times in order to create a second modification that creates a new phenotype that is used to select or purify the intended population of cells. Such a second modification could be created by adding a second gRNA enabling expression of a selectable or screenable marker. In some cases, cells can be correctly edited at the desired locus using a DNA fragment that contains the cDNA and also a selectable marker.

[0287] Whether any selective advantage is applicable or any directed selection is to be applied in a particular case, target sequence selection can also be guided by consideration of off-target frequencies in order to enhance the effectiveness of the application and/or reduce the potential for undesired alterations at sites other than the desired target. As described further and illustrated herein and in the art, the occurrence of off-target activity can be influenced by a number of factors including similarities and dissimilarities between the target site and various off-target sites, as well as the particular endonuclease used. Bioinformatics tools are available that assist in the prediction of off-target activity, and frequently such tools can also be used to identify the most likely sites of off-target activity, which can then be assessed in experimental settings to evaluate relative frequencies of off-target to on-target activity, thereby allowing the selection of sequences that have higher relative on-target activities. Illustrative examples of such techniques are provided herein, and others are known in the art.

[0288] Another aspect of target sequence selection relates to homologous recombination events. Sequences sharing regions of homology can serve as focal points for homologous recombination events that result in deletion of intervening sequences. Such recombination events occur during the normal course of replication of chromosomes and other DNA sequences, and also at other times when DNA sequences are being synthesized, such as in the case of repairs of double-strand breaks (DSBs), which occur on a regular basis during the normal cell replication cycle but can also be enhanced by the occurrence of various events (such as UV light and other inducers of DNA breakage) or the presence of certain agents (such as various chemical inducers). Many such inducers cause DSBs to occur indiscriminately in the genome, and DSBs can be regularly induced and repaired in normal cells. During repair, the original sequence can be reconstructed with complete fidelity, however, in some cases, small insertions or deletions (referred to as “indels”) are introduced at the DSB site.

[0289] DSBs can also be specifically induced at particular locations, as in the case of the endonucleases systems described herein, which can be used to cause directed or preferential gene modification events at selected chromosomal locations. The tendency for homologous sequences to be subject to recombination in the context of DNA repair (as well as replication) can be taken advantage of in a number of circumstances, and is the basis for one application of gene editing systems, such as CRISPR, in which homology directed repair is used to insert a sequence of interest, provided through use of a “donor” polynucleotide, into a desired chromosomal location.

[0290] Regions of homology between particular sequences, which can be small regions of “microhomology” that can comprise as few as ten base pairs or less, can also be used to bring about desired deletions. For example, a single DSB can be introduced at a site that exhibits microhomology with a nearby sequence. During the normal course of repair of such DSB, a result that occurs with high frequency is the deletion of the intervening sequence as a result of recombination being facilitated by the DSB and concomitant cellular repair process.

[0291] In some circumstances, however, selecting target sequences within regions of homology can also give rise to much larger deletions, including gene fusions (when the deletions are in coding regions), which may or may not be desired given the particular circumstances.

[0292] The examples provided herein further illustrate the selection of various target regions for the creation of DSBs designed to induce replacements that result in restoration of COL7A1 protein activity, as well as the selection of specific target sequences within such regions that are designed to minimize off-target events relative to on-target events.

### Human Cells

[0293] For ameliorating Dystrophic Epidermolysis Bullosa or any disorder associated with COL7A1, as described and illustrated herein, the principal targets for gene editing are human cells. For example, in the ex vivo methods, the human cells can be somatic cells, which after being modified using the techniques as described, can give rise to differentiated cells, e.g., keratinocytes or fibroblasts which are then expanded into sheets of skin for grafting, or infused. For example, in the in vivo methods, the human cells may be keratinocytes, fibroblasts or cells from other affected organs.

[0294] By performing gene editing in autologous cells that are derived from and therefore already completely matched with the patient in need, it is possible to generate cells that can be safely re-introduced into the patient, and effectively give rise to a population of cells that will be effective in ameliorating one or more clinical conditions associated with the patient's disease.

[0295] Stem cells are capable of both proliferation and giving rise to more progenitor cells, these in turn having the ability to generate a large number of mother cells that can in turn give rise to differentiated or differentiable daughter cells. The daughter cells themselves can be induced to proliferate and produce progeny that subsequently differentiate into one or more mature cell types, while also retaining one or more cells with parental developmental potential. The term “stem cell” refers then, to a cell with the capacity or potential, under particular circumstances, to differentiate to a more specialized or differentiated phenotype, and which retains the capacity, under certain circumstances, to proliferate without substantially differentiating. In one aspect, the term progenitor or stem cell refers to a generalized mother cell whose descendants (progeny) specialize, often in different directions, by differentiation, e.g., by acquiring completely individual characters, as occurs in progressive diversification of embryonic cells and tissues. Cellular differentiation is a complex process typically occurring through many cell divisions. A differentiated cell may derive from a multipotent cell that itself is derived from a multipotent cell, and so on. While each of these multipotent cells may be considered stem cells, the range of cell types that each can give rise to may vary considerably. Some differentiated cells also have the capacity to give rise to cells of greater developmental potential. Such capacity may be natural or may be induced artificially upon treatment with various factors. In many biological instances, stem cells can also be “multipotent” because they can produce progeny of more than one distinct cell type, but this is not required for “stem-ness.”

[0296] Self-renewal can be another important aspect of the stem cell. In theory, self-renewal can occur by either of two major mechanisms. Stem cells can divide asymmetrically, with one daughter retaining the stem state and the other daughter expressing some distinct other specific function and phenotype. Alternatively, some of the stem cells in a population can divide symmetrically into two stems, thus maintaining some stem cells in the population as a whole, while other cells in the population give rise to differentiated progeny only. Generally, “progenitor cells” have a cellular phenotype that is more primitive (i.e., is at an earlier step along a developmental pathway or progression than is a fully differentiated cell). Often, progenitor cells also have significant or very high-proliferative potential. Progenitor cells can give rise to multiple distinct differentiated cell types or to a single differentiated cell type, depending on the developmental pathway and on the environment in which the cells develop and differentiate.

[0297] In the context of cell ontogeny, the adjective “differentiated,” or “differentiating” is a relative term. A “differentiated cell” is a cell that has progressed further down the developmental pathway than the cell to which it is being compared. Thus, stem cells can differentiate into lineage-restricted precursor cells, which in turn can differentiate into other types of precursor cells further down the pathway, and then to an end-stage differentiated cell, which plays a characteristic role in a certain tissue type, and may or may not retain the capacity to proliferate further.

### Induced Pluripotent Stem Cells

[0298] The genetically engineered human cells described herein can be induced pluripotent stem cells (iPSCs). An advantage of using iPSCs is that the cells can be derived from the same subject to which the progenitor cells are to be administered. That is, a somatic cell can be obtained from a subject, reprogrammed to an induced pluripotent stem cell, and then re-differentiated into a progenitor cell to be administered to the subject (e.g., autologous cells). Because the progenitors are essentially derived from an autologous source, the risk of engraftment rejection or allergic response can be reduced compared to the use of cells from another subject or group of subjects. In addition, the use of iPSCs negates the need for cells obtained from an embryonic source. Thus, in one aspect, the stem cells used in the disclosed methods are not embryonic stem cells.

[0299] Although differentiation is generally irreversible under physiological contexts, several methods have been recently developed to reprogram somatic cells to iPSCs. Exemplary methods are known to those of skill in the art and are described briefly herein below.

[0300] The term “reprogramming” refers to a process that alters or reverses the differentiation state of a differentiated cell (e.g., a somatic cell). Stated another way, reprogramming refers to a process of driving the differentiation of a cell backwards to a more undifferentiated or more primitive type of cell. It should be noted that placing many primary cells in culture can lead to some loss of fully differentiated characteristics. Thus, simply culturing such cells included in the term differentiated cells does not render these cells non-differentiated cells (e.g., undifferentiated cells) or pluripotent cells. The transition of a differentiated cell to pluripotency requires a reprogramming stimulus beyond the stimuli that lead to partial loss of differentiated character in culture. Reprogrammed cells also have the characteristic of the capacity of extended passaging without loss of growth potential, relative to primary cell parents, which generally have capacity for only a limited number of divisions in culture. [000293] The cell to be reprogrammed can be either partially or terminally differentiated prior to reprogramming. Reprogramming can encompass complete reversion of the differentiation state of a differentiated cell (e.g., a somatic cell) to a pluripotent state or a multipotent state. Reprogramming can encompass complete or partial reversion of the differentiation state of a differentiated cell (e.g., a somatic cell) to an undifferentiated cell (e.g., an embryonic-like cell). Reprogramming can result in expression of particular genes by the cells, the expression of which further contributes to reprogramming. In certain examples described herein, reprogramming of a differentiated cell (e.g., a somatic cell) can cause the differentiated cell to assume an undifferentiated state (e.g., is an undifferentiated cell). The resulting cells are referred to as “reprogrammed cells,” or “induced pluripotent stem cells (iPSCs or iPS cells).” [000294] Reprogramming can involve alteration, e.g., reversal, of at least some of the heritable patterns of nucleic acid modification (e.g., methylation), chromatin condensation, epigenetic changes, genomic imprinting, etc., that occur during cellular differentiation. Reprogramming is distinct from simply maintaining the existing undifferentiated state of a cell that is already pluripotent or maintaining the existing less than fully differentiated state of a cell that is already a multipotent cell (e.g., a myogenic stem cell). Reprogramming is also distinct from promoting the self-renewal or proliferation of cells that are already pluripotent or multipotent, although the compositions and methods described herein can also be of use for such purposes, in some examples.

[0301] Many methods are known in the art that can be used to generate pluripotent stem cells from somatic cells. Any such method that reprograms a somatic cell to the pluripotent phenotype would be appropriate for use in the methods described herein.

[0302] Reprogramming methodologies for generating pluripotent cells using defined combinations of transcription factors have been described. Mouse somatic cells can be converted to ES cell-like cells with expanded developmental potential by the direct transduction of Oct4, Sox2, Klf4, and c-Myc; see, e.g., Takahashi and Yamanaka, Cell 126(4): 663-76 (2006). iPSCs resemble ES cells, as they restore the pluripotency-associated transcriptional circuitry and much of the epigenetic landscape. In addition, mouse iPSCs satisfy all the standard assays for pluripotency: specifically, in vitro differentiation into cell types of the three germ layers, teratoma formation, contribution to chimeras, germline transmission [see, e.g., Maherali and Hochedlinger, Cell Stem Cell. 3(6):595-605 (2008)], and tetraploid complementation.

[0303] Human iPSCs can be obtained using similar transduction methods, and the transcription factor trio, OCT4, SOX2, and NANOG, has been established as the core set of transcription factors that govern pluripotency; see, e.g., Budniatzky and Gepstein, Stem Cells Transl Med. 3(4):448-57 (2014); Barrett et al., Stem Cells Trans Med 3:1-6 sctm.2014-0121 (2014); Focosi et al., Blood Cancer Journal 4: e211 (2014); and references cited therein. The production of iPSCs can be achieved by the introduction of nucleic acid sequences encoding stem cell-associated genes into an adult, somatic cell, historically using viral vectors.

[0304] iPSCs can be generated or derived from terminally differentiated somatic cells, as well as from adult stem cells, or somatic stem cells. That is, a non-pluripotent progenitor cell can be rendered pluripotent or multipotent by reprogramming. In such instances, it may not be necessary to include as many reprogramming factors as required to reprogram a terminally differentiated cell. Further, reprogramming can be induced by the non-viral introduction of reprogramming factors, e.g., by introducing the proteins themselves, or by introducing nucleic acids that encode the reprogramming factors, or by introducing messenger RNAs that upon translation produce the reprogramming factors (see e.g., Warren et al., Cell Stem Cell, 7(5):618-30 (2010). Reprogramming can be achieved by introducing a combination of nucleic acids encoding stem cell-associated genes, including, for example, Oct-4 (also known as Oct-3/4 or Pouf51), Sox1, Sox2, Sox3, Sox 15, Sox 18, NANOG, Klf1, Klf2, Klf4, Klf5, NR5A2, c-Myc, 1-Myc, n-Myc, Rem2, Tert, and LIN28. Reprogramming using the methods and compositions described herein can further comprise introducing one or more of Oct-3/4, a member of the Sox family, a member of the Klf family, and a member of the Myc family to a somatic cell. The methods and compositions described herein can further comprise introducing one or more of each of Oct-4, Sox2, Nanog, c-MYC and Klf4 for reprogramming. As noted above, the exact method used for reprogramming is not necessarily critical to the methods and compositions described herein. However, where cells differentiated from the reprogrammed cells are to be used in, e.g., human therapy, in one aspect the reprogramming is not effected by a method that alters the genome. Thus, in such examples, reprogramming can be achieved, e.g., without the use of viral or plasmid vectors.

[0305] The efficiency of reprogramming (i.e., the number of reprogrammed cells) derived from a population of starting cells can be enhanced by the addition of various agents, e.g., small molecules, as shown by Shi et al., Cell-Stem Cell 2:525-528 (2008); Huangfu et al., Nature Biotechnology 26(7):795-797 (2008) and Marson et al., Cell-Stem Cell 3: 132-135 (2008). Thus, an agent or combination of agents that enhance the efficiency or rate of induced pluripotent stem cell production can be used in the production of patient-specific or disease-specific iPSCs. Some non-limiting examples of agents that enhance reprogramming efficiency include soluble Wnt, Wnt conditioned media, BIX-01294 (a G9a histone methyltransferase), PD0325901 (a MEK inhibitor), DNA methyltransferase inhibitors, histone deacetylase (HDAC) inhibitors, valproic acid, 5′-azacytidine, dexamethasone, suberoylanilide, hydroxamic acid (SAHA), vitamin C, and trichostatin (TSA), among others.

[0306] Other non-limiting examples of reprogramming enhancing agents include: Suberoylanilide Hydroxamic Acid (SAHA (e.g., MK0683, vorinostat) and other hydroxamic acids), BML-210, Depudecin (e.g., (-)-Depudecin), HC Toxin, Nullscript (4-(1,3-Dioxo-1H,3H-benzo[de]isoquinolin-2-yl)-N-hydroxybutanamide), Phenylbutyrate (e.g., sodium phenylbutyrate) and Valproic Acid ((VP A) and other short chain fatty acids), Scriptaid, Suramin Sodium, Trichostatin A (TSA), APHA Compound 8, Apicidin, Sodium Butyrate, pivaloyloxymethyl butyrate (Pivanex, AN-9), Trapoxin B, Chlamydocin, Depsipeptide (also known as FR901228 or FK228), benzamides (e.g., CI-994 (e.g., N-acetyl dinaline) and MS-27-275), MGCD0103, NVP-LAQ-824, CBHA (m-carboxycinnaminic acid bishydroxamic acid), JNJ16241199, Tubacin, A-161906, proxamide, oxamflatin, 3-C1-UCHA (e.g., 6-(3-chlorophenylureido) caproic hydroxamic acid), AOE (2-amino-8-oxo-9, 10-epoxydecanoic acid), CHAP31 and CHAP 50. Other reprogramming enhancing agents include, for example, dominant negative forms of the HDACs (e.g., catalytically inactive forms), siRNA inhibitors of the HDACs, and antibodies that specifically bind to the HDACs. Such inhibitors are available, e.g., from BIOMOL International, Fukasawa, Merck Biosciences, Novartis, Gloucester Pharmaceuticals, Titan Pharmaceuticals, MethylGene, and Sigma Aldrich.

[0307] To confirm the induction of pluripotent stem cells for use with the methods described herein, isolated clones can be tested for the expression of a stem cell marker. Such expression in a cell derived from a somatic cell identifies the cells as induced pluripotent stem cells. Stem cell markers can be selected from the non-limiting group including SSEA3, SSEA4, CD9, Nanog, Fbx15, Ecatl, Esgl, Eras, Gdf3, Fgf4, Cripto, Daxl, Zpf296, S1c2a3, Rexl, Utfl, and Natl. In one case, for example, a cell that expresses Oct4 or Nanog is identified as pluripotent. Methods for detecting the expression of such markers can include, for example, RT-PCR and immunological methods that detect the presence of the encoded polypeptides, such as Western blots or flow cytometric analyses. Detection can involve not only RT-PCR, but can also include detection of protein markers. Intracellular markers may be best identified via RT-PCR, or protein detection methods such as immunocytochemistry, while cell surface markers are readily identified, e.g., by immunocytochemistry.

[0308] The pluripotent stem cell character of isolated cells can be confirmed by tests evaluating the ability of the iPSCs to differentiate into cells of each of the three germ layers. As one example, teratoma formation in nude mice can be used to evaluate the pluripotent character of the isolated clones. The cells can be introduced into nude mice and histology and/or immunohistochemistry can be performed on a tumor arising from the cells. The growth of a tumor comprising cells from all three germ layers, for example, further indicates that the cells are pluripotent stem cells.

### Keratinocytes and Fibroblasts

[0309] In some aspects, the genetically engineered human cells described herein are keratinocytes and fibroblasts. The outermost layer of the skin, known as the epidermis, is composed of keratinocytes. On the other hand, fibroblasts form a part of the dermis, which is the layer of the skin between the epidermis and subcutaneous tissue and is connected to the epidermis through a basement membrane.

CD34+ cells

[0310] In some aspects, the genetically engineered human cells described herein are CD34+ cells. The term “CD34+ cell” refers to any cell expressing the CD34 antigen on the cell membrane. CD34 is a general marker of progenitor cells in a variety of cell types. CD34+ cells are mainly found in the umbilical cord and bone marrow, but can also be found in many other tissues such as stromal, epithelial, and vascular tissues. Cells that are known to express CD34 include, but are not limited to, hematopoietic stem cells and progenitors, multipotent mesenchymal stromal cells, muscle satellite cells, keratocytes, interstitial cells, fibrocyte, epithelial progenitors, and endothelial cells. These cells have distinctive differentiation potentials. For example, hematopoietic stem cells and progenitors can differentiate into hematopoietic cells, cardiomyocytes, or hepatocytes. As another example, multipotent mesenchymal stromal cells can differentiate into adipogenic, osteogenic, chondrogenic, myogenic, or angiogenic cells. A comparison of differentiation potential and properties of these CD34+ cell types can be found in Sidney et al., Stem Cells 2014; 32:1380-1389.

[0311] Because CD34+ cells are generally multipotent, CD34+ cell based therapy has the advantage of providing durable therapeutic effects through the differentiation and/or migration of the therapeutic CD34+ cells. In fact, bone marrow-derived CD34+ cells have been used clinically to reconstitute the hematopoietic system after radiation or chemotherapy. CD34+ cells have also been shown to induce therapeutic angiogenesis in animal models of myocardial, peripheral, and cerebral ischemia (Mackie and Losordo, Tex Heart Inst J. 2011; 38(5): 474-485). In addition, intravitreally injected CD34+ cells can migrate into the retina and repair the damaged retinal vasculature or neuronal tissue (Park et al., Invest Ophthalmol Vis Sci. 2015; 56:81-89).

[0312] In some aspects, the methods of the present disclosure involve modifying the CD34+ cells by replacing the mutant gene with a wild-type or corrected gene or cDNA, or correcting one or more mutations in the target gene by genome editing. Both strategies can restore the correct levels of the COL7A1 protein. The genome edited CD34+ cells then serve as a pool of multilineage cells which can re-establish the correct COL7A1 level in various affected tissues.

[0313] In some aspects, the methods of the present disclosure involve correcting the COL7A1 gene in CD34+ cells in the context of an autologous hematopoietic stem cell transplantation (auto-HSCT).

### Hematopoietic Stem and Progenitor Cells

[0314] In some aspects, the CD34+ cells are hematopoietic stem and progenitor cells. Hematopoietic stem cells (HSCs) are an important target for gene therapy as they provide a prolonged source of the corrected cells. HSCs give rise to both the myeloid and lymphoid lineages of blood cells. Mature blood cells have a finite life-span and must be continuously replaced throughout life. Blood cells are continually produced by the proliferation and differentiation of a population of pluripotent HSCs that can replenished by self-renewal. Bone marrow (BM) is the major site of hematopoiesis in humans and a good source for hematopoietic stem and progenitor cells (HSPCs). HSPCs can be found in small numbers in the peripheral blood (PB). In some indications or treatments their numbers increase.

[0315] The term “hematopoietic progenitor cell” refers to cells of a stem cell lineage that give rise to all the blood cell types, including erythroid (erythrocytes or red blood cells (RBCs)), myeloid (monocytes and macrophages, neutrophils, basophils, eosinophils, megakaryocytes/platelets, and dendritic cells), and lymphoid (T-cells, B-cells, NK-cells).

[0316] A “cell of the erythroid lineage” indicates that the cell being contacted is a cell that undergoes erythropoiesis, such that upon final differentiation it forms an erythrocyte or red blood cell. Such cells originate from bone marrow hematopoietic progenitor cells. Upon exposure to specific growth factors and other components of the hematopoietic microenvironment, hematopoietic progenitor cells can mature through a series of intermediate differentiation cellular types, all intermediates of the erythroid lineage, into RBCs. Thus, cells of the “erythroid lineage” comprise hematopoietic progenitor cells, rubriblasts, prorubricytes, erythroblasts, metarubricytes, reticulocytes, and erythrocytes.

[0317] In some aspects, the hematopoietic progenitor cell expresses at least one of the following cell surface markers characteristic of hematopoietic progenitor cells: CD34+, CD59+, Thyl/CD90+, CD381o/−, and C-kit/CD117+. In some aspects, the hematopoietic progenitors are CD34+. CD34+ HSC are able to differentiate into all cells of the hematopoietic lineage and have a high proliferative capacity.

[0318] In some aspects, the hematopoietic progenitor cell is a peripheral blood stem cell obtained from the patient after the patient has been treated with one or more factors such as granulocyte colony stimulating factor (optionally in combination with Plerixaflor). In illustrative examples, CD34+ cells are enriched using CliniMACS® Cell Selection System (Miltenyi Biotec). In some aspects, CD34+ cells are stimulated in serum-free medium (e.g., CellGrow SCGM media, CellGenix) with cytokines (e.g., SCF, rhTPO, rhFLT3) before genome editing. In some aspects, addition of SR1 and dmPGE2 and/or other factors is contemplated to improve long-term engraftment.

[0319] In some aspects, the hematopoietic progenitor cells of the erythroid lineage have a cell surface marker characteristic of the erythroid lineage: such as CD71 and Terl 19.

Creating Patient Specific iPSCs

[0320] One step of the ex vivo methods of the present disclosure can involve creating a patient specific iPS cell, patient specific iPS cells, or a patient specific iPS cell line. There are many established methods in the art for creating patient specific iPS cells, as described in Takahashi and Yamanaka 2006; Takahashi, Tanabe et al. 2007. For example, the creating step can comprise: a) isolating a somatic cell, such as a skin cell or fibroblast, from the patient; and b) introducing a set of pluripotency-associated genes into the somatic cell in order to induce the cell to become a pluripotent stem cell. The set of pluripotency-associated genes can be one or more of the genes selected from the group consisting of OCT4, SOX1, SOX2, SOX3, SOX15, SOX18, NANOG, KLF1, KLF2, KLF4, KLF5, c-MYC, n-MYC, REM2, TERT and LIN28.

[0321] Performing a biopsy or aspirate of the patient's skin or bone marrow

[0322] A biopsy or aspirate is a sample of tissue or fluid taken from the body. There are many different kinds of biopsies or aspirates. Nearly all of them involve using a sharp tool to remove a small amount of tissue. If the biopsy will be on the skin or other sensitive area, numbing medicine can be applied first. A biopsy or aspirate may be performed according to any of the known methods in the art. For example, in a bone marrow aspirate, a large needle is used to enter the pelvis bone to collect bone marrow. For example, in a skin biopsy, a surgical knife, or a small sharp tool called a punch, is used to remove a piece of skin. Variety of methods are employed to perform a skin biopsy and include shave biopsy, punch biopsy, and excision. Isolating a keratinocyte or fibroblast

[0323] Keratinocytes and fibroblasts may be isolated according to any known method in the art. For example, the biopsied tissue is subjected to enzymatic digestion for 150 minutes at 37° C. wherein the enzymatic mixture consists of dispase and collagenase I. Following enzymatic treatment, the epidermis is mechanically separated from the dermis. In order to release keratinocytes, the epidermis is digested further with 0.25% trypsin/EDTA for 18 minutes at 37° C. The cell number and viability of the collected cells is determined with a hemocytometer using trypan blue staining. The keratinocytes are then expanded in monolayer culture and characterized for expression of cell specific markers (Heymer et al., Biochemica 2009). Dermal fibroblasts are collected from the de-epidermized dermis and are cultured in DMEM supplemented with 10% fetal calf serum (FCS).

Treating a Patient with GCSF

[0324] A patient can optionally be treated with granulocyte colony stimulating factor (GCSF) in accordance with any method known in the art. The GCSF can be administered in combination with Plerixaflor (also known as Mozobil®). Plerixaflor is an immunostimulant used to mobilize hematopoietic stem cells into the blood stream.

Isolating a CD34+ cell from a patient

[0325] A CD34+ cell can be isolated from a patient by any method known in the art. For example, CD34+ cells can be isolated from blood or bone marrow. CD34+ cells can be enriched using CliniMACS® Cell Selection System (Miltenyi Biotec). CD34+ cells can be weakly stimulated in serum-free medium (e.g., CellGrow SCGM media, CellGenix) with cytokines (e.g., SCF, rhTPO, rhFLT3) before genome editing.

### Isolating a Mesenchymal Stem Cell

[0326] Mesenchymal stem cells can be isolated according to any method known in the art, such as from a patient's bone marrow or peripheral blood. For example, marrow aspirate can be collected into a syringe with heparin. Cells can be washed and centrifuged on a Percoll. The cells can be cultured in Dulbecco's modified Eagle's medium (DMEM) (low glucose) containing 10% fetal bovine serum (FBS) (Pittinger MF, Mackay AM, Beck SC et al., Science 1999; 284:143-147).

### Genetically Modified Cells

[0327] The term “genetically modified cell” refers to a cell that comprises at least one genetic modification introduced by genome editing (e.g., using the CRISPR/Cas9 or CRISPR/Cpf1 system). In some ex vivo examples herein, the genetically modified cell can be genetically modified keratinocyte progenitor cell. In some in vivo examples herein, the genetically modified cell can be a genetically modified skin cell. A genetically modified cell comprising an exogenous genome-targeting nucleic acid and/or an exogenous nucleic acid encoding a genome-targeting nucleic acid is contemplated herein.

[0328] The term “control treated population” describes a population of cells that has been treated with identical media, viral induction, nucleic acid sequences, temperature, confluency, flask size, pH, etc., with the exception of the addition of the genome editing components. Any method known in the art can be used to measure restoration of COL7A1 gene or protein expression or activity, for example Western Blot analysis of the COL7A1 protein or real time PCR for quantifying COL7A1 mRNA.

[0329] The term “isolated cell” refers to a cell that has been removed from an organism in which it was originally found, or a descendant of such a cell. Optionally, the cell can be cultured in vitro, e.g., under defined conditions or in the presence of other cells. Optionally, the cell can be later introduced into a second organism or re-introduced into the organism from which it (or the cell from which it is descended) was isolated.

[0330] The term “isolated population” with respect to an isolated population of cells refers to a population of cells that has been removed and separated from a mixed or heterogeneous population of cells. In some cases, the isolated population can be a substantially pure population of cells, as compared to the heterogeneous population from which the cells were isolated or enriched. In some cases, the isolated population can be an isolated population of human progenitor cells, e.g., a substantially pure population of human progenitor cells, as compared to a heterogeneous population of cells comprising human progenitor cells and cells from which the human progenitor cells were derived.

[0331] The term “substantially enhanced,” with respect to a particular cell population, refers to a population of cells in which the occurrence of a particular type of cell is increased relative to pre-existing or reference levels, by at least 2-fold, at least 3-, at least 4-, at least 5-, at least 6-, at least 7-, at least 8-, at least 9, at least 10-, at least 20-, at least 50-, at least 100-, at least 400-, at least 1000-, at least 5000-, at least 20000-, at least 100000- or more fold depending, e.g., on the desired levels of such cells for ameliorating Dystrophic Epidermolysis Bullosa.

[0332] The term “substantially enriched” with respect to a particular cell population, refers to a population of cells that is at least about 10%, about 20%, about 30%, about 40%, about 50%, about 60%, about 70% or more with respect to the cells making up a total cell population.

[0333] The term “substantially pure” with respect to a particular cell population, refers to a population of cells that is at least about 75%, at least about 85%, at least about 90%, or at least about 95% pure, with respect to the cells making up a total cell population. That is, the terms “substantially pure” or “essentially purified,” with regard to a population of progenitor cells, refers to a population of cells that contain fewer than about 20%, about 15%, about 10%, about 9%, about 8%, about 7%, about 6%, about 5%, about 4%, about 3%, about 2%, about 1%, or less than 1%, of cells that are not progenitor cells as defined by the terms herein.

Differentiation of Genome-Edited iPSCs into Keratinocytes or Fibroblasts

[0334] Another step of the ex vivo methods of the present disclosure can comprise differentiating the genome-edited iPSCs into keratinocytes or fibroblasts. The differentiating step may be performed according to any method known in the art. For example, hiPSC are differentiated into keratinocytes by treating the iPSCs with retinoic acid and bone-morphogenetic protein-4, followed by growing of differentiated iPSCs on collagen type I- and collagen type IV-coated dishes (Kogut et al., Methods in Molecular Biology. 2014; 1195: 1-12).

Differentiation of Genome-Edited Mesenchymal Stem Cells into Keratinocytes or Fibroblasts

[0335] Another step of the ex vivo methods of the present disclosure can comprise differentiating the genome-edited mesenchymal stem cells into keratinocytes or fibroblasts. The differentiating step may be performed according to any method known in the art. For example, human mesenchymal stem cells are differentiated into keratinocytes using various treatments, including keratinocyte growth factor (Shokrgozar et al., Iran Biomed Journal. 2012; 16(2): 68-76).

Implanting Cells into Patients

[0336] Another step of the ex vivo methods of the present disclosure can comprise implanting the genetically modified cells into patients. This implanting step may be accomplished using any method of implantation known in the art. For example, the genetically modified keratinocytes or fibroblasts may be expanded into sheets of skin that are then grafted to replace the patient's damaged skin, or infused into the patient's blood. For example, the genetically modified CD34+ cells may be directly injected into the patient's blood or otherwise administered to the patient.

### III. FORMULATIONS AND DELIVERY

### Pharmaceutically Acceptable Carriers

[0337] The ex vivo methods of administering progenitor cells to a subject contemplated herein involve the use of therapeutic compositions comprising progenitor cells.

[0338] Therapeutic compositions can contain a physiologically tolerable carrier together with the cell composition, and optionally at least one additional bioactive agent as described herein, dissolved or dispersed therein as an active ingredient. In some cases, the therapeutic composition is not substantially immunogenic when administered to a mammal or human patient for therapeutic purposes, unless so desired.

[0339] In general, the progenitor cells described herein can be administered as a suspension with a pharmaceutically acceptable carrier. One of skill in the art will recognize that a pharmaceutically acceptable carrier to be used in a cell composition will not include buffers, compounds, cryopreservation agents, preservatives, or other agents in amounts that substantially interfere with the viability of the cells to be delivered to the subject. A formulation comprising cells can include e.g., osmotic buffers that permit cell membrane integrity to be maintained, and optionally, nutrients to maintain cell viability or enhance engraftment upon administration. Such formulations and suspensions are known to those of skill in the art and/or can be adapted for use with the progenitor cells, as described herein, using routine experimentation.

[0340] A cell composition can also be emulsified or presented as a liposome composition, provided that the emulsification procedure does not adversely affect cell viability. The cells and any other active ingredient can be mixed with excipients that are pharmaceutically acceptable and compatible with the active ingredient, and in amounts suitable for use in the therapeutic methods described herein.

[0341] Additional agents included in a cell composition can include pharmaceutically acceptable salts of the components therein. Pharmaceutically acceptable salts include the acid addition salts (formed with the free amino groups of the polypeptide) that are formed with inorganic acids, such as, for example, hydrochloric or phosphoric acids, or such organic acids as acetic, tartaric, mandelic and the like. Salts formed with the free carboxyl groups can also be derived from inorganic bases, such as, for example, sodium, potassium, ammonium, calcium or ferric hydroxides, and such organic bases as isopropylamine, trimethylamine, 2-ethylamino ethanol, histidine, procaine and the like.

[0342] Physiologically tolerable carriers are well known in the art. Exemplary liquid carriers are sterile aqueous solutions that contain no materials in addition to the active ingredients and water, or contain a buffer such as sodium phosphate at physiological pH value, physiological saline or both, such as phosphate-buffered saline. Still further, aqueous carriers can contain more than one buffer salt, as well as salts such as sodium and potassium chlorides, dextrose, polyethylene glycol and other solutes. Liquid compositions can also contain liquid phases in addition to and to the exclusion of water. Exemplary of such additional liquid phases are glycerin, vegetable oils such as cottonseed oil, and water-oil emulsions. The amount of an active compound used in the cell compositions that is effective in the treatment of a particular disorder or condition can depend on the nature of the disorder or condition, and can be determined by standard clinical techniques.

### Guide RNA Formulation

[0343] Guide RNAs of the present disclosure can be formulated with pharmaceutically acceptable excipients such as carriers, solvents, stabilizers, adjuvants, diluents, etc., depending upon the particular mode of administration and dosage form. Guide RNA compositions can be formulated to achieve a physiologically compatible pH, and range from a pH of about 3 to a pH of about 11, about pH 3 to about pH 7, depending on the formulation and route of administration. In some cases, the pH can be adjusted to a range from about pH 5.0 to about pH 8. In some cases, the compositions can comprise a therapeutically effective amount of at least one compound as described herein, together with one or more pharmaceutically acceptable excipients. Optionally, the compositions can comprise a combination of the compounds described herein, or can include a second active ingredient useful in the treatment or prevention of bacterial growth (for example and without limitation, anti-bacterial or anti-microbial agents), or can include a combination of reagents of the present disclosure.

[0344] Suitable excipients include, for example, carrier molecules that include large, slowly metabolized macromolecules such as proteins, polysaccharides, polylactic acids, polyglycolic acids, polymeric amino acids, amino acid copolymers, and inactive virus particles. Other exemplary excipients can include antioxidants (for example and without limitation, ascorbic acid), chelating agents (for example and without limitation, EDTA), carbohydrates (for example and without limitation, dextrin, hydroxyalkylcellulose, and hydroxyalkylmethylcellulose), stearic acid, liquids (for example and without limitation, oils, water, saline, glycerol and ethanol), wetting or emulsifying agents, pH buffering substances, and the like.

### Delivery

[0345] Guide RNA polynucleotides (RNA or DNA) and/or endonuclease polynucleotide(s) (RNA or DNA) can be delivered by viral or non-viral delivery vehicles known in the art. Alternatively, endonuclease polypeptide(s) can be delivered by viral or non-viral delivery vehicles known in the art, such as electroporation or lipid nanoparticles. In further alternative aspects, the DNA endonuclease can be delivered as one or more polypeptides, either alone or pre-complexed with one or more guide RNAs, or one or more crRNA together with a tracrRNA.

[0346] Polynucleotides can be delivered by non-viral delivery vehicles including, but not limited to, nanoparticles, liposomes, ribonucleoproteins, positively charged peptides, small molecule RNA-conjugates, aptamer-RNA chimeras, and RNA-fusion protein complexes. Some exemplary non-viral delivery vehicles are described in Peer and Lieberman, Gene Therapy, 18: 1127-1133 (2011) (which focuses on non-viral delivery vehicles for siRNA that are also useful for delivery of other polynucleotides).

[0347] For polynucleotides of the present disclosure, the formulation may be selected from any of those taught, for example, in International Application PCT/US2012/069610.

[0348] Polynucleotides, such as guide RNA, sgRNA, and mRNA encoding an endonuclease, may be delivered to a cell or a patient by a lipid nanoparticle (LNP).

[0349] A LNP refers to any particle having a diameter of less than 1000 nm, 500 nm, 250 nm, 200 nm, 150 nm, 100 nm, 75 nm, 50 nm, or 25 nm. Alternatively, a nanoparticle may range in size from 1-1000 nm, 1-500 nm, 1-250 nm, 25-200 nm, 25-100 nm, 35-75 nm, or 25-60 nm.

[0350] LNPs may be made from cationic, anionic, or neutral lipids. Neutral lipids, such as the fusogenic phospholipid DOPE or the membrane component cholesterol, may be included in LNPs as ‘helper lipids’ to enhance transfection activity and nanoparticle stability. Limitations of cationic lipids include low efficacy owing to poor stability and rapid clearance, as well as the generation of inflammatory or anti-inflammatory responses.

[0351] LNPs may also be comprised of hydrophobic lipids, hydrophilic lipids, or both hydrophobic and hydrophilic lipids.

[0352] Any lipid or combination of lipids that are known in the art can be used to produce a LNP. Examples of lipids used to produce LNPs are: DOTMA, DOSPA, DOTAP, DMRIE, DC-cholesterol, DOTAP-cholesterol, GAP-DMORIE-DPyPE, and GL67A-DOPE-DMPE-polyethylene glycol (PEG). Examples of cationic lipids are: 98N12-5, C12-200, DLin-KC2-DMA (KC2), DLin-MC3-DMA (MC3), XTC, MD1, and 7C1. Examples of neutral lipids are: DPSC, DPPC, POPC, DOPE, and SM. Examples of PEG-modified lipids are: PEG-DMG, PEG-CerC14, and PEG-CerC20.

[0353] The lipids can be combined in any number of molar ratios to produce a LNP. In addition, the polynucleotide(s) can be combined with lipid(s) in a wide range of molar ratios to produce a LNP.

[0354] As stated previously, the site-directed polypeptide and genome-targeting nucleic acid can each be administered separately to a cell or a patient. On the other hand, the site-directed polypeptide can be pre-complexed with one or more guide RNAs, or one or more crRNA together with a tracrRNA. The pre-complexed material can then be administered to a cell or a patient. Such pre-complexed material is known as a ribonucleoprotein particle (RNP).

[0355] RNA is capable of forming specific interactions with RNA or DNA. While this property is exploited in many biological processes, it also comes with the risk of promiscuous interactions in a nucleic acid-rich cellular environment. One solution to this problem is the formation of ribonucleoprotein particles (RNPs), in which the RNA is pre-complexed with an endonuclease. Another benefit of the RNP is protection of the RNA from degradation.

[0356] The endonuclease in the RNP can be modified or unmodified. Likewise, the gRNA, crRNA, tracrRNA, or sgRNA can be modified or unmodified. Numerous modifications are known in the art and can be used.

[0357] The endonuclease and sgRNA can be generally combined in a 1:1 molar ratio. Alternatively, the endonuclease, crRNA and tracrRNA can be generally combined in a 1:1:1 molar ratio. However, a wide range of molar ratios can be used to produce a RNP.

### AAV (Adeno Associated Virus)

[0358] A recombinant adeno-associated virus (AAV) vector can be used for delivery. Techniques to produce rAAV particles, in which an AAV genome to be packaged that includes the polynucleotide to be delivered, rep and cap genes, and helper virus functions are provided to a cell are standard in the art. Production of rAAV typically requires that the following components are present within a single cell (denoted herein as a packaging cell): a rAAV genome, AAV rep and cap genes separate from (i.e., not in) the rAAV genome, and helper virus functions. The AAV rep and cap genes may be from any AAV serotype for which recombinant virus can be derived, and may be from a different AAV serotype than the rAAV genome ITRs, including, but not limited to, AAV serotypes described herein. Production of pseudotyped rAAV is disclosed in, for example, international patent application publication number WO 01/83692.

### AAV Serotypes

[0359] AAV particles packaging polynucleotides encoding compositions of the present disclosure, e.g., endonucleases, donor sequences, or RNA guide molecules, of the present disclosure may comprise or be derived from any natural or recombinant AAV serotype. According to the present disclosure, the AAV particles may utilize or be based on a serotype selected from any of the following serotypes, and variants thereof including but not limited to AAV1, AAV10, AAV106.1/hu.37, AAV11, AAV114.3/hu.40, AAV12, AAV127.2/hu.41, AAV127.5/hu.42, AAV128.1/hu.43, AAV128.3/hu.44, AAV130.4/hu.48, AAV145.1/hu.53, AAV145.5/hu.54, AAV145.6/hu.55, AAV16.12/hu.11, AAV16.3, AAV16.8/hu.10, AAV161.10/hu.60, AAV161.6/hu.61, AAV1-7/rh.48, AAV1-8/rh.49, AAV2, AAV2.5T, AAV2-15/rh.62, AAV223.1, AAV223.2, AAV223.4, AAV223.5, AAV223.6, AAV223.7, AAV2-3/rh.61, AAV24.1, AAV2-4/rh.50, AAV2-5/rh.51, AAV27.3, AAV29.3/bb.1, AAV29.5/bb.2, AAV2G9, AAV-2-pre-miRNA-101, AAV3, AAV3.1/hu.6, AAV3.1/hu.9, AAV3-11/rh.53, AAV3-3, AAV33.12/hu.17, AAV33.4/hu.15, AAV33.8/hu.16, AAV3-9/rh.52, AAV3a, AAV3b, AAV4, AAV4-19/rh.55, AAV42.12, AAV42-10, AAV42-11, AAV42-12, AAV42-13, AAV42-15, AAV42-lb, AAV42-2, AAV42-3a, AAV42-3b, AAV42-4, AAV42-5a, AAV42-5b, AAV42-6b, AAV42-8, AAV42-aa, AAV43-1, AAV43-12, AAV43-20, AAV43-21, AAV43-23, AAV43-25, AAV43-5, AAV4-4, AAV44.1, AAV44.2, AAV44.5, AAV46.2/hu.28, AAV46.6/hu.29, AAV4-8/r11.64, AAV4-8/rh.64, AAV4-9/rh.54, AAV5, AAV52.1/hu.20, AAV52/hu.19, AAV5-22/rh.58, AAV5-3/rh.57, AAV54.1/hu.21, AAV54.2/hu.22, AAV54.4R/hu.27, AAV54.5/hu.23, AAV54.7/hu.24, AAV58.2/hu.25, AAV6, AAV6.1, AAV6.1.2, AAV6.2, AAV7, AAV7.2, AAV7.3/hu.7, AAV8, AAV-8b, AAV-8h, AAV9, AAV9.11, AAV9.13, AAV9.16, AAV9.24, AAV9.45, AAV9.47, AAV9.61, AAV9.68, AAV9.84, AAV9.9, AAVA3.3, AAVA3.4, AAVA3.5, AAVA3.7, AAV-b, AAVC1, AAVC2, AAVC5, AAVCh.5, AAVCh.5R1, AAVcy.2, AAVcy.3, AAVcy.4, AAVcy.5, AAVCy.5R1, AAVCy.5R2, AAVCy.5R3, AAVCy.5R4, AAVcy.6, AAV-DJ, AAV-DJ8, AAVF3, AAVFS, AAV-h, AAVH-1/hu.1, AAVH2, AAVH-5/hu.3, AAVH6, AAVhE1.1, AAVhER1.14, AAVhEr1.16, AAVhEr1.18, AAVhER1.23, AAVhEr1.35, AAVhEr1.36, AAVhEr1.5, AAVhEr1.7, AAVhEr1.8, AAVhEr2.16, AAVhEr2.29, AAVhEr2.30, AAVhEr2.31, AAVhEr2.36, AAVhEr2.4, AAVhEr3.1, AAVhu.1, AAVhu.10, AAVhu.11, AAVhu.11, AAVhu.12, AAVhu.13, AAVhu.14/9, AAVhu.15, AAVhu.16, AAVhu.17, AAVhu.18, AAVhu.19, AAVhu.2, AAVhu.20, AAVhu.21, AAVhu.22, AAVhu.23.2, AAVhu.24, AAVhu.25, AAVhu.27, AAVhu.28, AAVhu.29, AAVhu.29R, AAVhu.3, AAVhu.31, AAVhu.32, AAVhu.34, AAVhu.35, AAVhu.37, AAVhu.39, AAVhu.4, AAVhu.40, AAVhu.41, AAVhu.42, AAVhu.43, AAVhu.44, AAVhu.44R1, AAVhu.44R2, AAVhu.44R3, AAVhu.45, AAVhu.46, AAVhu.47, AAVhu.48, AAVhu.48R1, AAVhu.48R2, AAVhu.48R3, AAVhu.49, AAVhu.5, AAVhu.51, AAVhu.52, AAVhu.53, AAVhu.54, AAVhu.55, AAVhu.56, AAVhu.57, AAVhu.58, AAVhu.6, AAVhu.60, AAVhu.61, AAVhu.63, AAVhu.64, AAVhu.66, AAVhu.67, AAVhu.7, AAVhu.8, AAVhu.9, AAVhu.t 19, AAVLG-10/rh.40, AAVLG-4/rh.38, AAVLG-9/hu.39, AAVLG-9/hu.39, AAV-LK01, AAV-LK02, AAVLK03, AAV-LK03, AAV-LK04, AAV-LK05, AAV-LK06, AAV-LK07, AAV-LK08, AAV-LK09, AAV-LK10, AAV-LK11, AAV-LK12, AAV-LK13, AAV-LK14, AAV-LK15, AAV-LK17, AAV-LK18, AAV-LK19, AAVN721-8/rh.43, AAV-PAEC, AAV-PAEC11, AAV-PAEC12, AAV-PAEC2, AAV-PAEC4, AAV-PAEC6, AAV-PAEC7, AAV-PAEC8, AAVpi.1, AAVpi.2, AAVpi.3, AAVrh.10, AAVrh.12, AAVrh.13, AAVrh.13R, AAVrh.14, AAVrh.17, AAVrh.18, AAVrh.19, AAVrh.2, AAVrh.20, AAVrh.21, AAVrh.22, AAVrh.23, AAVrh.24, AAVrh.25, AAVrh.2R, AAVrh.31, AAVrh.32, AAVrh.33, AAVrh.34, AAVrh.35, AAVrh.36, AAVrh.37, AAVrh.37R2, AAVrh.38, AAVrh.39, AAVrh.40, AAVrh.43, AAVrh.44, AAVrh.45, AAVrh.46, AAVrh.47, AAVrh.48, AAVrh.48, AAVrh.48.1, AAVrh.48.1.2, AAVrh.48.2, AAVrh.49, AAVrh.50, AAVrh.51, AAVrh.52, AAVrh.53, AAVrh.54, AAVrh.55, AAVrh.56, AAVrh.57, AAVrh.58, AAVrh.59, AAVrh.60, AAVrh.61, AAVrh.62, AAVrh.64, AAVrh.64R1, AAVrh.64R2, AAVrh.65, AAVrh.67, AAVrh.68, AAVrh.69, AAVrh.70, AAVrh.72, AAVrh.73, AAVrh.74, AAVrh.8, AAVrh.8R, AAVrh8R, AAVrh8R A586R mutant, AAVrh8R R533A mutant, BAAV, BNP61 AAV, BNP62 AAV, BNP63 AAV, bovine AAV, caprine AAV, Japanese AAV 10, true type AAV (ttAAV), UPENN AAV 10, AAV-LK16, AAAV, AAV Shuffle 100-1, AAV Shuffle 100-2, AAV Shuffle 100-3, AAV Shuffle 100-7, AAV Shuffle 10-2, AAV Shuffle 10-6, AAV Shuffle 10-8, AAV SM 100-10, AAV SM 100-3, AAV SM 10-1, AAV SM 10-2, and/or AAV SM 10-8.

[0360] In some aspects, the AAV serotype may be, or have, a mutation in the AAV9 sequence as described by N Pulicherla et al. (Molecular Therapy 19(6):1070-1078 (2011)), such as but not limited to, AAV9.9, AAV9.11, AAV9.13, AAV9.16, AAV9.24, AAV9.45, AAV9.47, AAV9.61, AAV9.68, AAV9.84.

[0361] In some aspects, the AAV serotype may be, or have, a sequence as described in U.S. Pat. No. 6,156,303 such as, but not limited to, AAV3B (SEQ ID NO: 1 and 10 of U.S. Pat. No. 6,156,303), AAV6 (SEQ ID NO: 2, 7 and 11 of U.S. Pat. No. 6,156,303), AAV2 (SEQ ID NO: 3 and 8 of U.S. Pat. No. 6,156,303), AAV3A (SEQ ID NO: 4 and 9, of U.S. Pat. No. 6,156,303), or derivatives thereof.

[0362] In some aspects, the serotype may be AAVDJ or a variant thereof, such as AAVDJ8 (or AAV-DJ8), as described by Grimm et al. (Journal of Virology 82(12): 5887-5911 (2008)). The amino acid sequence of AAVDJ8 may comprise two or more mutations in order to remove the heparin binding domain (HBD). As a non-limiting example, the AAV-DJ sequence described as SEQ ID NO: 1 in U.S. Pat. No. 7,588,772, may comprise two mutations: (1) R587Q where arginine (R; Arg) at amino acid 587 is changed to glutamine (Q; Gln) and (2) R590T where arginine (R; Arg) at amino acid 590 is changed to threonine (T; Thr). As another non-limiting example, may comprise three mutations: (1) K406R where lysine (K; Lys) at amino acid 406 is changed to arginine (R; Arg), (2) R587Q where arginine (R; Arg) at amino acid 587 is changed to glutamine (Q; Gln) and (3) R590T where arginine (R; Arg) at amino acid 590 is changed to threonine (T; Thr).

[0363] In some aspects, the AAV serotype may be, or have, a sequence as described in International Publication No. WO 2015121501 such as, but not limited to, true type AAV (ttAAV) (SEQ ID NO: 2 of WO 2015121501), “UPenn AAV10” (SEQ ID NO: 8 of WO 2015121501), “Japanese AAV10” (SEQ ID NO: 9 of WO 2015121501), or variants thereof.

[0364] According to the present disclosure, AAV capsid serotype selection or use may be from a variety of species. In one example, the AAV may be an avian AAV (AAAV). The AAAV serotype may be, or have, a sequence as described in U.S. Pat. No. 9,238,800, such as, but not limited to, AAAV (SEQ ID NO: 1, 2, 4, 6, 8, 10, 12, and 14 of U.S. Pat. No. 9,238,800), or variants thereof.

[0365] In one example, the AAV may be a bovine AAV (BAAV). The BAAV serotype may be, or have, a sequence as described in U.S. Pat. No. 9,193,769, such as, but not limited to, BAAV (SEQ ID NO: 1 and 6 of U.S. Pat. No. 9,193,769), or variants thereof. The BAAV serotype may be or have a sequence as described in U.S. Pat. No. 7,427,396, such as, but not limited to, BAAV (SEQ ID NO: 5 and 6 of U.S. Pat. No. 7,427,396), or variants thereof.

[0366] In one example, the AAV may be a caprine AAV. The caprine AAV serotype may be, or have, a sequence as described in U.S. Pat. No. 7,427,396, such as, but not limited to, caprine AAV (SEQ ID NO: 3 of U.S. Pat. No. 7,427,396), or variants thereof.

[0367] In other examples, the AAV may be engineered as a hybrid AAV from two or more parental serotypes. In one example, the AAV may be AAV2G9 which comprises sequences from AAV2 and AAV9. The AAV2G9 AAV serotype may be, or have, a sequence as described in U.S. Patent Publication No. 20160017005.

[0368] In one example, the AAV may be a serotype generated by the AAV9 capsid library with mutations in amino acids 390-627 (VP1 numbering) as described by Pulicherla et al. (Molecular Therapy 19(6):1070-1078 (2011. The serotype and corresponding nucleotide and amino acid substitutions may be, but is not limited to, AAV9.1 (G1594C; D532H), AAV6.2 (T1418A and T1436X; V473D and I479K), AAV9.3 (T1238A; F413Y), AAV9.4 (T1250C and A1617T; F417S), AAV9.5 (A1235G, A1314T, A1642G, C1760T; Q412R, T548A, A587V), AAV9.6 (T1231A; F411I), AAV9.9 (G1203A, G1785T; W595C), AAV9.10 (A1500G, T1676C; M559T), AAV9.11 (A1425T, A1702C, A1769T; T568P, Q590L), AAV9.13 (A1369C, A1720T; N457H, T574S), AAV9.14 (T1340A, T1362C, T1560C, G1713A; L447H), AAV9.16 (A1775T; Q592L), AAV9.24 (T1507C, T1521G; W503R), AAV9.26 (A1337G, A1769C; Y446C, Q590P), AAV9.33 (A1667C; D556A), AAV9.34 (A1534G, C1794T; N512D), AAV9.35 (A1289T, T1450A, C1494T, A1515T, C1794A, G1816A; Q430L, Y484N, N98K, V6061), AAV9.40 (A1694T, E565V), AAV9.41 (A1348T, T1362C; T450S), AAV9.44 (A1684C, A1701T, A1737G; N562H, K567N), AAV9.45 (A1492T, C1804T; N498Y, L602F), AAV9.46 (G1441C, T1525C, T1549G; G481R, W509R, L517V), 9.47 (G1241A, G1358A, A1669G, C1745T; S414N, G453D, K557E, T582I), AAV9.48 (C1445T, A1736T; P482L, Q579L), AAV9.50 (A1638T, C1683T, T1805A; Q546H, L602H), AAV9.53 (G1301A, A1405C, C1664T, G1811T; R134Q, 5469R, A555V, G604V), AAV9.54 (C1531A, T1609A; L511I, L537M), AAV9.55 (T1605A; F535L), AAV9.58 (C1475T, C1579A; T492I, H527N), AAV.59 (T1336C; Y446H), AAV9.61 (A1493T; N498I), AAV9.64 (C1531A, A1617T; L511I), AAV9.65 (C1335T, T1530C, C1568A; A523D), AAV9.68 (C1510A; P504T), AAV9.80 (G1441A,G481R), AAV9.83 (C1402A, A1500T; P468T, E500D), AAV9.87 (T1464C, T1468C; S490P), AAV9.90 (A1196T; Y399F), AAV9.91 (T1316G, A1583T, C1782G, T1806C; L439R, K528I), AAV9.93 (A1273G, A1421G, A1638C, C1712T, G1732A, A1744T, A1832T; S425G, Q474R, Q546H, P571L, G578R, T582S, D611V), AAV9.94 (A1675T; M559L) and AAV9.95 (T1605A; F535L).

[0369] In one example, the AAV may be a serotype comprising at least one AAV capsid CD8+ T-cell epitope. As a non-limiting example, the serotype may be AAV1, AAV2 or AAV8.

[0370] In one example, the AAV may be a variant, such as PHP.A or PHP.B as described in Deverman. 2016. Nature Biotechnology. 34(2): 204-209.

[0371] In one example, the AAV may be a serotype selected from any of those sequences found in SEQ ID NOs: 4734-5302 and Table 2.

[0372] In one example, the AAV may be encoded by a sequence, fragment or variant as disclosed in SEQ ID NOs: 4734-5302 and Table 2.

[0373] General principles of rAAV production are reviewed in, for example, Carter, 1992, Current Opinions in Biotechnology, 1533-539; and Muzyczka, 1992, Curr. Topics in Microbial. and Immunol., 158:97-129). Various approaches are described in Ratschin et al., Mol. Cell. Biol. 4:2072 (1984); Hermonat et al., Proc. Natl. Acad. Sci. USA, 81:6466 (1984); Tratschin et al., Mol. Cell. Biol. 5:3251 (1985); McLaughlin et al., J. Virol., 62:1963 (1988); and Lebkowski et al., 1988 Mol. Cell. Biol., 7:349 (1988). Samulski et al. (1989, J. Virol., 63:3822-3828); U.S. Pat. No. 5,173,414; WO 95/13365 and corresponding U.S. Pat. No. 5,658,776; WO 95/13392; WO 96/17947; PCT/US98/18600; WO 97/09441 (PCT/US96/14423); WO 97/08298 (PCT/US96/13872); WO 97/21825 (PCT/US96/20777); WO 97/06243 (PCT/FR96/01064); WO 99/11764; Perrin et al. (1995) Vaccine 13:1244-1250; Paul et al. (1993) Human Gene Therapy 4:609-615; Clark et al. (1996) Gene Therapy 3:1124-1132; U.S. Pat. No. 5,786,211; U.S. Pat. No. 5,871,982; and U.S. Pat. No. 6,258,595.

[0374] AAV vector serotypes can be matched to target cell types. For example, the following exemplary cell types can be transduced by the indicated AAV serotypes among others.

TABLE 2
Tissue/Cell Types and Serotypes

| Tissue/Cell Type | Serotype |
|---|---|
| Liver | AAV3, AAV5, AAV8, AAV9 |
| Skeletal muscle | AAV1, AAV7, AAV6, AAV8, AAV9 |
| Central nervous system | AAV1, AAV4, AAV5, AAV8, AAV9 |
| RPE | AAV5, AAV4, AAV2, AAV8, AAV9, |
| | AAVrh8R |
| Photoreceptor cells | AAV5, AAV8, AAV9, AAVrh8R |
| Lung | AAV9, AAV5 |
| Heart | AAV8 |
| Pancreas | AAV8 |
| Kidney | AAV2, AAV8 |
| Hematopoietic stem cells | AAV6 |

[0375] In addition to adeno-associated viral vectors, other viral vectors can be used. Such viral vectors include, but are not limited to, lentivirus, alphavirus, enterovirus, pestivirus, baculovirus, herpesvirus, Epstein Barr virus, papovavirus, poxvirus, vaccinia virus, and herpes simplex virus.

[0376] In some aspects, Cas9 mRNA, sgRNA targeting one or two sites in COL7A1 gene, and donor DNA can each be separately formulated into lipid nanoparticles, or are all co-formulated into one lipid nanoparticle.

[0377] In some aspects, Cas9 mRNA can be formulated in a lipid nanoparticle, while sgRNA and donor DNA can be delivered in an AAV vector.

[0378] Options are available to deliver the Cas9 nuclease as a DNA plasmid, as mRNA or as a protein. The guide RNA can be expressed from the same DNA, or can also be delivered as an RNA. The RNA can be chemically modified to alter or improve its half-life, or decrease the likelihood or degree of immune response. The endonuclease protein can be complexed with the gRNA prior to delivery. Viral vectors allow efficient delivery; split versions of Cas9 and smaller orthologs of Cas9 can be packaged in AAV, as can donors for HDR. A range of non-viral delivery methods also exist that can deliver each of these components, or non-viral and viral methods can be employed in tandem. For example, nano-particles can be used to deliver the protein and guide RNA, while AAV can be used to deliver a donor DNA.

[0379] In some aspects of the in vivo based therapy described herein, the viral vectors encoding the endonuclease, the guide RNA(s) and/or the donor template may be delivered to the keratinocyte or fibroblast via intradermal injection.

### IV. DOSING AND ADMINISTRATION

[0380] The terms “administering,” “introducing” and “transplanting” are used interchangeably in the context of the placement of cells, e.g., progenitor cells, into a subject, by a method or route that results in at least partial localization of the introduced cells at a desired site, such as a site of injury or repair, such that a desired effect(s) is produced. The cells e.g., progenitor cells, or their differentiated progeny can be administered by any appropriate route that results in delivery to a desired location in the subject where at least a portion of the implanted cells or components of the cells remain viable. The period of viability of the cells after administration to a subject can be as short as a few hours, e.g., twenty-four hours, to a few days, to as long as several years, or even the life time of the patient, i.e., long-term engraftment. For example, in some aspects described herein, an effective amount of keratinocyte progenitor cells is administered via a systemic route of administration, such as an intraperitoneal or intravenous route.

[0381] The terms “individual,” “subject,” “host” and “patient” are used interchangeably herein and refer to any subject for whom diagnosis, treatment or therapy is desired. In some aspects, the subject is a mammal. In some aspects, the subject is a human being.

[0382] When provided prophylactically, progenitor cells described herein can be administered to a subject in advance of any symptom of Dystrophic Epidermolysis Bullosa. Accordingly, the prophylactic administration of a progenitor cell population serves to prevent Dystrophic Epidermolysis Bullosa.

[0383] A progenitor cell population being administered according to the methods described herein can comprise allogeneic progenitor cells obtained from one or more donors. Such progenitors may be of any cellular or tissue origin, e.g., liver, muscle, cardiac, etc. “Allogeneic” refers to a progenitor cell or biological samples comprising progenitor cells obtained from one or more different donors of the same species, where the genes at one or more loci are not identical. For example, a liver progenitor cell population being administered to a subject can be derived from one more unrelated donor subjects, or from one or more non-identical siblings. In some cases, syngeneic progenitor cell populations can be used, such as those obtained from genetically identical animals, or from identical twins. The progenitor cells can be autologous cells; that is, the progenitor cells are obtained or isolated from a subject and administered to the same subject, i.e., the donor and recipient are the same.

[0384] The term “effective amount” refers to the amount of a population of progenitor cells or their progeny needed to prevent or alleviate at least one or more signs or symptoms of Dystrophic Epidermolysis Bullosa, and relates to a sufficient amount of a composition to provide the desired effect, e.g., to treat a subject having Dystrophic Epidermolysis Bullosa. The term “therapeutically effective amount” therefore refers to an amount of progenitor cells or a composition comprising progenitor cells that is sufficient to promote a particular effect when administered to a typical subject, such as one who has or is at risk for Dystrophic Epidermolysis Bullosa. An effective amount would also include an amount sufficient to prevent or delay the development of a symptom of the disease, alter the course of a symptom of the disease (for example but not limited to, slow the progression of a symptom of the disease), or reverse a symptom of the disease. It is understood that for any given case, an appropriate “effective amount” can be determined by one of ordinary skill in the art using routine experimentation.

[0385] For use in the various aspects described herein, an effective amount of progenitor cells comprises at least 10² progenitor cells, at least 5×10² progenitor cells, at least 10³ progenitor cells, at least 5×10³ progenitor cells, at least 10⁴ progenitor cells, at least 5×10⁴ progenitor cells, at least 10⁵ progenitor cells, at least 2×10⁵ progenitor cells, at least 3×10⁵ progenitor cells, at least 4×10⁵ progenitor cells, at least 5×10⁵ progenitor cells, at least 6×10⁵ progenitor cells, at least 7×10⁵ progenitor cells, at least 8×10⁵ progenitor cells, at least 9×10⁵ progenitor cells, at least 1×10⁶ progenitor cells, at least 2×10⁶ progenitor cells, at least 3×10⁶ progenitor cells, at least 4×10⁶ progenitor cells, at least 5×10⁶ progenitor cells, at least 6×10⁶ progenitor cells, at least 7×10⁶ progenitor cells, at least 8×10⁶ progenitor cells, at least 9×10⁶ progenitor cells, or multiples thereof. The progenitor cells can be derived from one or more donors, or can be obtained from an autologous source. In some examples described herein, the progenitor cells can be expanded in culture prior to administration to a subject in need thereof.

[0386] Modest and incremental increases in the levels of functional COL7A1 expressed in cells of patients having Dystrophic Epidermolysis Bullosa can be beneficial for ameliorating one or more symptoms of the disease, for increasing long-term survival, and/or for reducing side effects associated with other treatments. Upon administration of such cells to human patients, the presence of progenitors that are producing increased levels of functional COL7A1 is beneficial. In some cases, effective treatment of a subject gives rise to at least about 3%, 5% or 7% functional COL7A1 relative to total COL7A1 in the treated subject. In some examples, functional COL7A1 will be at least about 10% of total COL7A1. In some examples, functional COL7A1 will be at least about 20% to 30% of total COL7A1. Similarly, the introduction of even relatively limited subpopulations of cells having significantly elevated levels of functional COL7A1 can be beneficial in various patients because in some situations normalized cells will have a selective advantage relative to diseased cells. However, even modest levels of progenitors with elevated levels of functional COL7A1 can be beneficial for ameliorating one or more aspects of Dystrophic Epidermolysis Bullosa in patients. In some examples, about 10%, about 20%, about 30%, about 40%, about 50%, about 60%, about 70%, about 80%, about 90% or more of the keratinocyte progenitors in patients to whom such cells are administered are producing increased levels of functional COL7A1.

[0387] “Administered” refers to the delivery of a progenitor cell composition into a subject by a method or route that results in at least partial localization of the cell composition at a desired site. A cell composition can be administered by any appropriate route that results in effective treatment in the subject, i.e. administration results in delivery to a desired location in the subject where at least a portion of the composition delivered, i.e. at least 1×10⁴ cells are delivered to the desired site for a period of time.

[0388] In one aspect of the method, the pharmaceutical composition may be administered via a route such as, but not limited to, enteral (into the intestine), gastroenteral, epidural (into the dura matter), oral (by way of the mouth), transdermal, peridural, intracerebral (into the cerebrum), intracerebroventricular (into the cerebral ventricles), epicutaneous (application onto the skin), intradermal, (into the skin itself), subcutaneous (under the skin), nasal administration (through the nose), intravenous (into a vein), intravenous bolus, intravenous drip, intraarterial (into an artery), intramuscular (into a muscle), intracardiac (into the heart), intraosseous infusion (into the bone marrow), intrathecal (into the spinal canal), intraperitoneal, (infusion or injection into the peritoneum), intravesical infusion, intravitreal, (through the eye), intracavernous injection (into a pathologic cavity) intracavitary (into the base of the penis), intravaginal administration, intrauterine, extra-amniotic administration, transdermal (diffusion through the intact skin for systemic distribution), transmucosal (diffusion through a mucous membrane), transvaginal, insufflation (snorting), sublingual, sublabial, enema, eye drops (onto the conjunctiva), in ear drops, auricular (in or by way of the ear), buccal (directed toward the cheek), conjunctival, cutaneous, dental (to a tooth or teeth), electro-osmosis, endocervical, endosinusial, endotracheal, extracorporeal, hemodialysis, infiltration, interstitial, intra-abdominal, intra-amniotic, amniotic, intra-articular, intrabiliary, intrabronchial, intrabursal, intracartilaginous (within a cartilage), intracaudal (within the cauda equine), intracisternal (within the cisterna magna cerebellomedularis), intracorneal (within the cornea), dental intracornal, intracoronary (within the coronary arteries), intracorporus cavernosum (within the dilatable spaces of the corporus cavernosa of the penis), intradiscal (within a disc), intraductal (within a duct of a gland), intraduodenal (within the duodenum), intradural (within or beneath the dura), intraepidermal (to the epidermis), intraesophageal (to the esophagus), intragastric (within the stomach), intragingival (within the gingivae), intraileal (within the distal portion of the small intestine), intralesional (within or introduced directly to a localized lesion), intraluminal (within a lumen of a tube), intralymphatic (within the lymph), intramedullary (within the marrow cavity of a bone), intrameningeal (within the meninges), intramyocardial (within the myocardium), intraocular (within the eye), intraovarian (within the ovary), intrapericardial (within the pericardium), intrapleural (within the pleura), intraprostatic (within the prostate gland), intrapulmonary (within the lungs or its bronchi), intrasinal (within the nasal or periorbital sinuses), intraspinal (within the vertebral column), intrasynovial (within the synovial cavity of a joint), intratendinous (within a tendon), intratesticular (within the testicle), intrathecal (within the cerebrospinal fluid at any level of the cerebrospinal axis), intrathoracic (within the thorax), intratubular (within the tubules of an organ), intratumor (within a tumor), intratympanic (within the aurus media), intravascular (within a vessel or vessels), intraventricular (within a ventricle), iontophoresis (by means of electric current where ions of soluble salts migrate into the tissues of the body), irrigation (to bathe or flush open wounds or body cavities), laryngeal (directly upon the larynx), nasogastric (through the nose and into the stomach), occlusive dressing technique (topical route administration, which is then covered by a dressing that occludes the area), ophthalmic (to the external eye), oropharyngeal (directly to the mouth and pharynx), parenteral, percutaneous, periarticular, peridural, perineural, periodontal, rectal, respiratory (within the respiratory tract by inhaling orally or nasally for local or systemic effect), retrobulbar (behind the pons or behind the eyeball), intramyocardial (entering the myocardium), soft tissue, subarachnoid, subconjunctival, submucosal, topical, transplacental (through or across the placenta), transtracheal (through the wall of the trachea), transtympanic (across or through the tympanic cavity), ureteral (to the ureter), urethral (to the urethra), vaginal, caudal block, diagnostic, nerve block, biliary perfusion, cardiac perfusion, photopheresis and spinal.

[0389] Modes of administration include injection, infusion, instillation, and/or ingestion. “Injection” includes, without limitation, intravenous, intramuscular, intra-arterial, intrathecal, intraventricular, intracapsular, intraorbital, intracardiac, intradermal, intraperitoneal, transtracheal, subcutaneous, subcuticular, intraarticular, sub capsular, subarachnoid, intraspinal, intracerebro spinal, and intrasternal injection and infusion. In some examples, the route is intravenous. For the delivery of cells, administration by injection or infusion can be made.

[0390] The cells can be administered systemically. The phrases “systemic administration,” “administered systemically”, “peripheral administration” and “administered peripherally” refer to the administration of a population of progenitor cells other than directly into a target site, tissue, or organ, such that it enters, instead, the subject's circulatory system and, thus, is subject to metabolism and other like processes.

[0391] The efficacy of a treatment comprising a composition for the treatment of Dystrophic Epidermolysis Bullosa can be determined by the skilled clinician. However, a treatment is considered “effective treatment,” if any one or all of the signs or symptoms of, as but one example, levels of functional COL7A1 are altered in a beneficial manner (e.g., increased by at least 10%), or other clinically accepted symptoms or markers of disease are improved or ameliorated. Efficacy can also be measured by failure of an individual to worsen as assessed by hospitalization or need for medical interventions (e.g., progression of the disease is halted or at least slowed). Methods of measuring these indicators are known to those of skill in the art and/or described herein. Treatment includes any treatment of a disease in an individual or an animal (some non-limiting examples include a human, or a mammal) and includes: (1) inhibiting the disease, e.g., arresting, or slowing the progression of symptoms; or (2) relieving the disease, e.g., causing regression of symptoms; and (3) preventing or reducing the likelihood of the development of symptoms.

[0392] The treatment according to the present disclosure can ameliorate one or more symptoms associated with Dystrophic Epidermolysis Bullosa by increasing, decreasing or altering the amount of functional COL7A1 in the individual.

### V. FEATURES AND PROPERTIES OF THE COLLAGEN, TYPE VII, ALPHA 1 (COL7A1) GENE

[0393] COL7A1 has been associated with diseases and disorders such as, but not limited to,

[0394] Malignant neoplasm of skin, Squamous cell carcinoma, Colorectal Neoplasms, Crohn Disease, Epidermolysis Bullosa, Indirect Inguinal Hernia, Pruritus, Schizophrenia, Dermatologic disorders, Genetic Skin Diseases, Teratoma, Cockayne-Touraine Disease, Epidermolysis Bullosa Acquisita, Epidermolysis Bullosa Dystrophica, Junctional Epidermolysis Bullosa, Hallopeau-Siemens Disease, Bullous Skin Diseases, Agenesis of corpus callosum, Dystrophia unguium, Vesicular Stomatitis, Epidermolysis Bullosa With Congenital Localized Absence Of Skin And Deformity Of Nails, Juvenile Myoclonic Epilepsy, Squamous cell carcinoma of esophagus, Poikiloderma of Kindler, pretibial Epidermolysis bullosa, Dominant dystrophic epidermolysis bullosa albopapular type (disorder), Localized recessive dystrophic epidermolysis bullosa, Generalized dystrophic epidermolysis bullosa, Squamous cell carcinoma of skin, Epidermolysis Bullosa Pruriginosa, Mammary Neoplasms, Epidermolysis Bullosa Simplex Superficialis, Isolated Toenail Dystrophy, Transient bullous dermolysis of the newborn, Autosomal Recessive Epidermolysis Bullosa Dystrophica Localisata Variant, and Autosomal Recessive Epidermolysis Bullosa Dystrophica Inversa. Editing the COL7A1 gene using any of the methods described herein may be used to treat, prevent and/or mitigate the symptoms of the diseases and disorders described herein.

[0395] The COL7A1 gene encodes the alpha-1 chain of type VII collagen, the major component of the anchoring fibrils in the skin. Genetic alterations in the COL7A1 gene have been found to cause dystrophic epidermolysis bullosa (DEB). DEB is an inherited skin disease with two major forms: dominant dystrophic epidermolysis bullosa and recessive dystrophic epidermolysis bullosa. The prevalence of all DEB cases is approximately 6.5 in a million newborns in the US. The signs and symptoms of DEB vary greatly, ranging from mild blistering in the hands, feet, knees, or elbows to widespread blistering that can lead to vision loss, dental caries, and other serious medical complications. DEB has no cure, and current treatment aims to alleviate the symptoms (such as infection and inflammation) and prevent pain and wounds. Surgery may be considered to correct deformities to help with mobility and eating.

[0396] In one example, the target tissue for the compositions and methods described herein is a tissue commonly used in skin grafts that includes cultured keratinocytes and fibroblasts.

[0397] [000389] In one example, the gene is Collagen, Type VII, Alpha 1 (COL7A1) which may also be referred to as LC Collagen, Long-Chain Collagen, Epidermolysis Bullosa, Collagen VII, Alpha-1 Polypeptide, NDNC8, EBDCT, EBD1, and EBR1. COL7A1 has a cytogenetic location of 3p21.31 and the genomic coordinate are on Chromosome 3 on the reverse strand at position 48,564,073-48,595,267. The nucleotide sequence of COL7A1 is shown as SEQ ID NO: 5303. UQCRC1 is the gene upstream of COL7A1 on the reverse strand and UCN2 is the gene downstream of COL7A1 on the reverse strand. MIR711 is a gene completely contained within the COL7A1 gene on the same strand. COL7A1 has a NCBI gene ID of 1294 Uniprot ID of Q02388 and Ensembl Gene ID of ENSG00000114270. COL7A1 has 4063 SNPs, 213 introns and 218 exons. The exon identifier from Ensembl and the start/stop sites of the introns and exons are shown in Table 3.

TABLE 3
Exons and Introns for COL7A1

| Exon | | | Intron | | |
|---|---|---|---|---|---|
| No. | Exon ID | Start/Stop | No. | Intron based on Exon ID | Start/Stop |
| EX1 | ENSE00001894534 | 48,595,267- | INT1 | Intron ENSE00001894534- | 48,595,074- |
| | | 48,595,075 | | ENSE00001063410 | 48,594,549 |
| EX2 | ENSE00001063410 | 48,594,548- | INT2 | Intron ENSE00001063410- | 48,594,367- |
| | | 48,594,368 | | ENSE00001063390 | 48,593,697 |
| EX3 | ENSE00001063390 | 48,593,696- | INT3 | Intron ENSE00001063390- | 48,593,536- |
| | | 48,593,537 | | ENSE00001063414 | 48,593,450 |
| EX4 | ENSE00001063414 | 48,593,449- | INT4 | Intron ENSE00001063414- | 48,593,355- |
| | | 48,593,356 | | ENSE00001063409 | 48,593,264 |
| EX5 | ENSE00001063409 | 48,593,263- | INT5 | Intron ENSE00001063409- | 48,593,101- |
| | | 48,593,102 | | ENSE00001063377 | 48,592,939 |
| EX6 | ENSE00001063377 | 48,592,938- | INT6 | Intron ENSE00001063377- | 48,592,774- |
| | | 48,592,775 | | ENSE00001063356 | 48,592,700 |
| EX7 | ENSE00001063356 | 48,592,699- | INT7 | Intron ENSE00001063356- | 48,592,569- |
| | | 48,592,570 | | ENSE00001063342 | 48,592,468 |
| EX8 | ENSE00001063342 | 48,592,467- | INT8 | Intron ENSE00001063342- | 48,592,350- |
| | | 48,592,351 | | ENSE00001063333 | 48,592,249 |
| EX9 | ENSE00001063333 | 48,592,248- | INT9 | Intron ENSE00001063333- | 48,592,101- |
| | | 48,592,102 | | ENSE00001063384 | 48,592,015 |
| EX10 | ENSE00001063384 | 48,592,014- | INT10 | Intron ENSE00001063384- | 48,591,897- |
| | | 48,591,898 | | ENSE00001063412 | 48,591,823 |
| EX11 | ENSE00001063412 | 48,591,822- | INT11 | Intron ENSE00001063412- | 48,591,672- |
| | | 48,591,673 | | ENSE00001063351 | 48,591,593 |
| EX12 | ENSE00001063351 | 48,591,592- | INT12 | Intron ENSE00001063351- | 48,591,463- |
| | | 48,591,464 | | ENSE00001063349 | 48,590,817 |
| EX13 | ENSE00001063349 | 48,590,816- | INT13 | Intron ENSE00001063349- | 48,590,672- |
| | | 48,590,673 | | ENSE00001063382 | 48,590,585 |
| EX14 | ENSE00001063382 | 48,590,584- | INT14 | Intron ENSE00001063382- | 48,590,458- |
| | | 48,590,459 | | ENSE00001063419 | 48,590,357 |
| EX15 | ENSE00001063419 | 48,590,356- | INT15 | Intron ENSE00001063419- | 48,590,212- |
| | | 48,590,213 | | ENSE00001063368 | 48,589,719 |
| EX16 | ENSE00001063368 | 48,589,718- | INT16 | Intron ENSE00001063368- | 48,589,598- |
| | | 48,589,599 | | ENSE00001063400 | 48,589,471 |
| EX17 | ENSE00001063400 | 48,589,470- | INT17 | Intron ENSE00001063400- | 48,589,326- |
| | | 48,589,327 | | ENSE00001063364 | 48,588,996 |
| EX18 | ENSE00001063364 | 48,588,995- | INT18 | Intron ENSE00001063364- | 48,588,869- |
| | | 48,588,870 | | ENSE00001063341 | 48,588,789 |
| EX19 | ENSE00001063341 | 48,588,788- | INT19 | Intron ENSE00001063341- | 48,588,641- |
| | | 48,588,642 | | ENSE00001302640 | 48,588,405 |
| EX20 | ENSE00001302640 | 48,588,404- | INT20 | Intron ENSE00001302640- | 48,588,281- |
| | | 48,588,282 | | ENSE00001321531 | 48,587,940 |
| EX21 | ENSE00001321531 | 48,587,939- | INT21 | Intron ENSE00001321531- | 48,587,792- |
| | | 48,587,793 | | ENSE00001304891 | 48,587,555 |
| EX22 | ENSE00001304891 | 48,587,554- | INT22 | Intron ENSE00001304891- | 48,587,419- |
| | | 48,587,420 | | ENSE00001292995 | 48,587,337 |
| EX23 | ENSE00001292995 | 48,587,336- | INT23 | Intron ENSE00001292995- | 48,587,189- |
| | | 48,587,190 | | ENSE00001306073 | 48,587,109 |
| EX24 | ENSE00001306073 | 48,587,108- | INT24 | Intron ENSE00001306073- | 48,586,971- |
| | | 48,586,972 | | ENSE00001294173 | 48,586,690 |
| EX25 | ENSE00001294173 | 48,586,689- | INT25 | Intron ENSE00001294173- | 48,586,562- |
| | | 48,586,563 | | ENSE00001328998 | 48,586,479 |
| EX26 | ENSE00001328998 | 48,586,478- | INT26 | Intron ENSE00001328998- | 48,586,331- |
| | | 48,586,332 | | ENSE00001306313 | 48,586,247 |
| EX27 | ENSE00001306313 | 48,586,246- | INT27 | Intron ENSE00001306313- | 48,586,073- |
| | | 48,586,074 | | ENSE00001330942 | 48,585,976 |
| EX28 | ENSE00001330942 | 48,585,975- | INT28 | Intron ENSE00001330942- | 48,585,939- |
| | | 48,585,940 | | ENSE00001311262 | 48,585,857 |
| EX29 | ENSE00001311262 | 48,585,856- | INT29 | Intron ENSE00001311262- | 48,585,829- |
| | | 48,585,830 | | ENSE00001294272 | 48,585,735 |
| EX30 | ENSE00001294272 | 48,585,734- | INT30 | Intron ENSE00001294272- | 48,585,689- |
| | | 48,585,690 | | ENSE00001318273 | 48,585,620 |
| EX31 | ENSE00001318273 | 48,585,619- | INT31 | Intron ENSE00001318273- | 48,585,556- |
| | | 48,585,557 | | ENSE00001290639 | 48,585,117 |
| EX32 | ENSE00001290639 | 48,585,116- | INT32 | Intron ENSE00001290639- | 48,585,035- |
| | | 48,585,036 | | ENSE00001313615 | 48,584,946 |
| EX33 | ENSE00001313615 | 48,584,945- | INT33 | Intron ENSE00001313615- | 48,584,909- |
| | | 48,584,910 | | ENSE00001327686 | 48,584,770 |
| EX34 | ENSE00001327686 | 48,584,769- | INT34 | Intron ENSE00001327686- | 48,584,733- |
| | | 48,584,734 | | ENSE00001309912 | 48,584,557 |
| EX35 | ENSE00001309912 | 48,584,556- | INT35 | Intron ENSE00001309912- | 48,584,484- |
| | | 48,584,485 | | ENSE00003548929 | 48,584,376 |
| EX36 | ENSE00003548929 | 48,584,375- | INT36 | Intron ENSE00001848406- | 48,584,484- |
| | | 48,584,298 | | ENSE00003506552 | 48,584,376 |
| EX37 | ENSE00003477534 | 48,584,061- | INT37 | Intron ENSE00003506552- | 48,584,297- |
| | | 48,584,035 | | ENSE00003563335 | 48,584,062 |
| EX38 | ENSE00003530083 | 48,583,953- | INT38 | Intron ENSE00003548929- | 48,584,297- |
| | | 48,583,900 | | ENSE00003477534 | 48,584,062 |
| EX39 | ENSE00003502309 | 48,583,780- | INT39 | Intron ENSE00003477534- | 48,584,034- |
| | | 48,583,718 | | ENSE00003530083 | 48,583,954 |
| EX40 | ENSE00003463580 | 48,583,615- | INT40 | Intron ENSE00003563335- | 48,584,034- |
| | | 48,583,556 | | ENSE00003626349 | 48,583,954 |
| EX41 | ENSE00003601819 | 48,583,428- | INT41 | Intron ENSE00003530083- | 48,583,899- |
| | | 48,583,393 | | ENSE00003502309 | 48,583,781 |
| EX42 | ENSE00003534902 | 48,583,171- | INT42 | Intron ENSE00003626349- | 48,583,899- |
| | | 48,583,127 | | ENSE00003578410 | 48,583,781 |
| EX43 | ENSE00003659806 | 48,583,048- | INT43 | Intron ENSE00003502309- | 48,583,717- |
| | | 48,583,013 | | ENSE00003463580 | 48,583,616 |
| EX44 | ENSE00003487389 | 48,582,653- | INT44 | Intron ENSE00003578410- | 48,583,717- |
| | | 48,582,609 | | ENSE00003541506 | 48,583,616 |
| EX45 | ENSE00003509404 | 48,582,513- | INT45 | Intron ENSE00003463580- | 48,583,555- |
| | | 48,582,478 | | ENSE00003601819 | 48,583,429 |
| EX46 | ENSE00003468380 | 48,582,358- | INT46 | Intron ENSE00003541506- | 48,583,555- |
| | | 48,582,323 | | ENSE00003494393 | 48,583,429 |
| EX47 | ENSE00003542849 | 48,581,943- | INT47 | Intron ENSE00003494393- | 48,583,392- |
| | | 48,581,911 | | ENSE00003649625 | 48,583,172 |
| EX48 | ENSE00003664148 | 48,581,759- | INT48 | Intron ENSE00003601819- | 48,583,392- |
| | | 48,581,706 | | ENSE00003534902 | 48,583,172 |
| EX49 | ENSE00003569071 | 48,581,632- | INT49 | Intron ENSE00003534902- | 48,583,126- |
| | | 48,581,573 | | ENSE00003659806 | 48,583,049 |
| EX50 | ENSE00003679676 | 48,581,483- | INT50 | Intron ENSE00003649625- | 48,583,126- |
| | | 48,581,448 | | ENSE00003678798 | 48,583,049 |
| EX51 | ENSE00003672586 | 48,581,340- | INT51 | Intron ENSE00003659806- | 48,583,012- |
| | | 48,581,260 | | ENSE00003487389 | 48,582,654 |
| EX52 | ENSE00003465671 | 48,581,157- | INT52 | Intron ENSE00003678798- | 48,583,012- |
| | | 48,581,122 | | ENSE00003624485 | 48,582,654 |
| EX53 | ENSE00003518671 | 48,580,926- | INT53 | Intron ENSE00003487389- | 48,582,608- |
| | | 48,580,882 | | ENSE00003509404 | 48,582,514 |
| EX54 | ENSE00003598438 | 48,580,652- | INT54 | Intron ENSE00003624485- | 48,582,608- |
| | | 48,580,581 | | ENSE00003602856 | 48,582,514 |
| EX55 | ENSE00003587795 | 48,580,344- | INT55 | Intron ENSE00003509404- | 48,582,477- |
| | | 48,580,300 | | ENSE00003468380 | 48,582,359 |
| EX56 | ENSE00003582660 | 48,580,057- | INT56 | Intron ENSE00003602856- | 48,582,477- |
| | | 48,580,031 | | ENSE00003587985 | 48,582,359 |
| EX57 | ENSE00003500554 | 48,579,814- | INT57 | Intron ENSE00003468380- | 48,582,322- |
| | | 48,579,785 | | ENSE00003542849 | 48,581,944 |
| EX58 | ENSE00003630374 | 48,579,668- | INT58 | Intron ENSE00003587985- | 48,582,322- |
| | | 48,579,588 | | ENSE00003544785 | 48,581,944 |
| EX59 | ENSE00003502693 | 48,579,515- | INT59 | Intron ENSE00003542849- | 48,581,910- |
| | | 48,579,480 | | ENSE00003664148 | 48,581,760 |
| EX60 | ENSE00003640495 | 48,579,404- | INT60 | Intron ENSE00003544785- | 48,581,910- |
| | | 48,579,369 | | ENSE00003630308 | 48,581,760 |
| EX61 | ENSE00003480810 | 48,579,277- | INT61 | Intron ENSE00003630308- | 48,581,705- |
| | | 48,579,197 | | ENSE00003663047 | 48,581,633 |
| EX62 | ENSE00003571394 | 48,578,954- | INT62 | Intron ENSE00003664148- | 48,581,705- |
| | | 48,578,919 | | ENSE00003569071 | 48,581,633 |
| EX63 | ENSE00003544427 | 48,578,515- | INT63 | Intron ENSE00003569071- | 48,581,572- |
| | | 48,578,453 | | ENSE00003679676 | 48,581,484 |
| EX64 | ENSE00003579428 | 48,578,365- | INT64 | Intron ENSE00003663047- | 48,581,572- |
| | | 48,578,321 | | ENSE00003524450 | 48,581,484 |
| EX65 | ENSE00003501008 | 48,577,027- | INT65 | Intron ENSE00003524450- | 48,581,447- |
| | | 48,576,992 | | ENSE00003464087 | 48,581,341 |
| EX66 | ENSE00003597793 | 48,576,919- | INT66 | Intron ENSE00003679676- | 48,581,447- |
| | | 48,576,884 | | ENSE00003672586 | 48,581,341 |
| EX67 | ENSE00003635481 | 48,576,771- | INT67 | Intron ENSE00003464087- | 48,581,259- |
| | | 48,576,676 | | ENSE00003479464 | 48,581,158 |
| EX68 | ENSE00003546877 | 48,576,557- | INT68 | Intron ENSE00003672586- | 48,581,259- |
| | | 48,576,522 | | ENSE00003465671 | 48,581,158 |
| EX69 | ENSE00003666487 | 48,576,435- | INT69 | Intron ENSE00003465671- | 48,581,121- |
| | | 48,576,400 | | ENSE00003518671 | 48,580,927 |
| EX70 | ENSE00003663754 | 48,576,296- | INT70 | Intron ENSE00003479464- | 48,581,121- |
| | | 48,576,249 | | ENSE00003553414 | 48,580,927 |
| EX71 | ENSE00003679735 | 48,575,902- | INT71 | Intron ENSE00003518671- | 48,580,881- |
| | | 48,575,867 | | ENSE00003598438 | 48,580,653 |
| EX72 | ENSE00003506938 | 48,575,748- | INT72 | Intron ENSE00003553414- | 48,580,881- |
| | | 48,575,626 | | ENSE00003464034 | 48,580,653 |
| EX73 | ENSE00003663041 | 48,575,539- | INT73 | Intron ENSE00003464034- | 48,580,580- |
| | | 48,575,339 | | ENSE00003548991 | 48,580,345 |
| EX74 | ENSE00003568673 | 48,575,242- | INT74 | Intron ENSE00003598438- | 48,580,580- |
| | | 48,575,207 | | ENSE00003587795 | 48,580,345 |
| EX75 | ENSE00003624209 | 48,575,126- | INT75 | Intron ENSE00003548991- | 48,580,299- |
| | | 48,575,064 | | ENSE00003685081 | 48,580,058 |
| EX76 | ENSE00003619310 | 48,574,865- | INT76 | Intron ENSE00003587795- | 48,580,299 |
| | | 48,574,797 | | ENSE00003582660 | 48,580,058 |
| EX77 | ENSE00003583589 | 48,574,721- | INT77 | Intron ENSE00003582660- | 48,580,030- |
| | | 48,574,677 | | ENSE00003500554 | 48,579,815 |
| EX78 | ENSE00003475893 | 48,574,550- | INT78 | Intron ENSE00003685081- | 48,580,030- |
| | | 48,574,488 | | ENSE00003492113 | 48,579,815 |
| EX79 | ENSE00003492735 | 48,574,306- | INT79 | Intron ENSE00003492113- | 48,579,784- |
| | | 48,574,262 | | ENSE00003542851 | 48,579,669 |
| EX80 | ENSE00003593060 | 48,573,890- | INT80 | Intron ENSE00003500554- | 48,579,784- |
| | | 48,573,855 | | ENSE00003630374 | 48,579,669 |
| EX81 | ENSE00003625405 | 48,573,725- | INT81 | Intron ENSE00003542851- | 48,579,587- |
| | | 48,573,690 | | ENSE00003516843 | 48,579,516 |
| EX82 | ENSE00003606530 | 48,573,557- | INT82 | Intron ENSE00003630374- | 48,579,587- |
| | | 48,573,513 | | ENSE00003502693 | 48,579,516 |
| EX83 | ENSE00003578737 | 48,573,348- | INT83 | Intron ENSE00003502693- | 48,579,479- |
| | | 48,573,316 | | ENSE00003640495 | 48,579,405 |
| EX84 | ENSE00003520660 | 48,573,236- | INT84 | Intron ENSE00003516843- | 48,579,479- |
| | | 48,573,174 | | ENSE00003686948 | 48,579,405 |
| EX85 | ENSE00003510603 | 48,573,056- | INT85 | Intron ENSE00003640495- | 48,579,368- |
| | | 48,573,021 | | ENSE00003480810 | 48,579,278 |
| EX86 | ENSE00003505003 | 48,572,942- | INT86 | Intron ENSE00003686948- | 48,579,368- |
| | | 48,572,862 | | ENSE00003631089 | 48,579,278 |
| EX87 | ENSE00003693777 | 48,572,739- | INT87 | Intron ENSE00003480810- | 48,579,196- |
| | | 48,572,671 | | ENSE00003571394 | 48,578,955 |
| EX88 | ENSE00003565183 | 48,572,538- | INT88 | Intron ENSE00003631089- | 48,579,196- |
| | | 48,572,503 | | ENSE00003512751 | 48,578,955 |
| EX89 | ENSE00003573289 | 48,572,421- | INT89 | Intron ENSE00003512751- | 48,578,918- |
| | | 48,572,380 | | ENSE00003471058 | 48,578,516 |
| EX90 | ENSE00003522363 | 48,572,171- | INT90 | Intron ENSE00003571394- | 48,578,918- |
| | | 48,572,127 | | ENSE00003544427 | 48,578,516 |
| EX91 | ENSE00001063401 | 48,572,045- | INT91 | Intron ENSE00003471058- | 48,578,452- |
| | | 48,572,001 | | ENSE00003578856 | 48,578,366 |
| EX92 | ENSE00001063365 | 48,571,278- | INT92 | Intron ENSE00003544427- | 48,578,452- |
| | | 48,571,243 | | ENSE00003579428 | 48,578,366 |
| EX93 | ENSE00003550102 | 48,571,160- | INT93 | Intron ENSE00003578856- | 48,578,320- |
| | | 48,571,101 | | ENSE00003554613 | 48,577,028 |
| EX94 | ENSE00003690203 | 48,570,968- | INT94 | Intron ENSE00003579428- | 48,578,320- |
| | | 48,570,861 | | ENSE00003501008 | 48,577,028 |
| EX95 | ENSE00003555529 | 48,570,710- | INT95 | Intron ENSE00003501008- | 48,576,991- |
| | | 48,570,639 | | ENSE00003597793 | 48,576,920 |
| EX96 | ENSE00003523424 | 48,570,500- | INT96 | Intron ENSE00003554613- | 48,576,991- |
| | | 48,570,465 | | ENSE00003687998 | 48,576,920 |
| EX97 | ENSE00003684788 | 48,570,334- | INT97 | Intron ENSE00003597793- | 48,576,883- |
| | | 48,570,275 | | ENSE00003635481 | 48,576,772 |
| EX98 | ENSE00003595907 | 48,570,178- | INT98 | Intron ENSE00003687998- | 48,576,883- |
| | | 48,570,134 | | ENSE00003559586 | 48,576,772 |
| EX99 | ENSE00003558468 | 48,569,915- | INT99 | Intron ENSE00003559586- | 48,576,675- |
| | | 48,569,880 | | ENSE00003619607 | 48,576,558 |
| EX100 | ENSE00003692225 | 48,569,760- | INT100 | Intron ENSE00003635481- | 48,576,675- |
| | | 48,569,725 | | ENSE00003546877 | 48,576,558 |
| EX101 | ENSE00003528589 | 48,569,648- | INT101 | Intron ENSE00003546877- | 48,576,521- |
| | | 48,569,592 | | ENSE00003666487 | 48,576,436 |
| EX102 | ENSE00003637554 | 48,569,446- | INT102 | Intron ENSE00003619607- | 48,576,521- |
| | | 48,569,375 | | ENSE00003523706 | 48,576,436 |
| EX103 | ENSE00003573784 | 48,568,855- | INT103 | Intron ENSE00003523706- | 48,576,399- |
| | | 48,568,784 | | ENSE00003562571 | 48,576,297 |
| EX104 | ENSE00003681716 | 48,568,534- | INT104 | Intron ENSE00003666487- | 48,576,399- |
| | | 48,568,499 | | ENSE00003663754 | 48,576,297 |
| EX105 | ENSE00003551619 | 48,568,170- | INT105 | Intron ENSE00003562571- | 48,576,248- |
| | | 48,568,090 | | ENSE00003603927 | 48,575,903 |
| EX106 | ENSE00003489710 | 48,567,891- | INT106 | Intron ENSE00003663754- | 48,576,248- |
| | | 48,567,838 | | ENSE00003679735 | 48,575,903 |
| EX107 | ENSE00003535852 | 48,567,763- | INT107 | Intron ENSE00003603927- | 48,575,866- |
| | | 48,567,710 | | ENSE00003582164 | 48,575,749 |
| EX108 | ENSE00003573824 | 48,567,636- | INT108 | Intron ENSE00003679735- | 48,575,866- |
| | | 48,567,574 | | ENSE00003506938 | 48,575,749 |
| EX109 | ENSE00003501656 | 48,567,190- | INT109 | Intron ENSE00003506938- | 48,575,625- |
| | | 48,567,128 | | ENSE00003663041 | 48,575,540 |
| EX110 | ENSE00003536911 | 48,567,023- | INT110 | Intron ENSE00003582164- | 48,575,625- |
| | | 48,566,907 | | ENSE00003541804 | 48,575,540 |
| EX111 | ENSE00003573881 | 48,566,737- | INT111 | Intron ENSE00003541804- | 48,575,338- |
| | | 48,566,660 | | ENSE00003656220 | 48,575,243 |
| EX112 | ENSE00003461176 | 48,566,563- | INT112 | Intron ENSE00003663041- | 48,575,338- |
| | | 48,566,510 | | ENSE00003568673 | 48,575,243 |
| EX113 | ENSE00003512462 | 48,566,315- | INT113 | Intron ENSE00003568673- | 48,575,206- |
| | | 48,566,267 | | ENSE00003624209 | 48,575,127 |
| EX114 | ENSE00003593366 | 48,565,668- | INT114 | Intron ENSE00003656220- | 48,575,206- |
| | | 48,565,636 | | ENSE00003630191 | 48,575,127 |
| EX115 | ENSE00003480673 | 48,565,496- | INT115 | Intron ENSE00003624209- | 48,575,063- |
| | | 48,565,410 | | ENSE00003619310 | 48,574,866 |
| EX116 | ENSE00003547577 | 48,565,201- | INT116 | Intron ENSE00003630191- | 48,575,063- |
| | | 48,565,109 | | ENSE00003568929 | 48,574,866 |
| EX117 | ENSE00003482916 | 48,564,980- | INT117 | Intron ENSE00003568929- | 48,574,796- |
| | | 48,564,783 | | ENSE00003644813 | 48,574,722 |
| EX118 | ENSE00003644607 | 48,564,422- | INT118 | Intron ENSE00003619310- | 48,574,796- |
| | | 48,564,073 | | ENSE00003583589 | 48,574,722 |
| EX119 | ENSE00001703127 | 48,571,626- | INT119 | Intron ENSE00003583589- | 48,574,676- |
| | | 48,571,486 | | ENSE00003475893 | 48,574,551 |
| EX120 | ENSE00001601384 | 48,569,760- | INT120 | Intron ENSE00003644813- | 48,574,676- |
| | | 48,569,758 | | ENSE00003560734 | 48,574,551 |
| EX121 | ENSE00001826556 | 48,564,992- | INT121 | Intron ENSE00003475893- | 48,574,487- |
| | | 48,564,783 | | ENSE00003492735 | 48,574,307 |
| EX122 | ENSE00001860953 | 48,564,513- | INT122 | Intron ENSE00003560734- | 48,574,487- |
| | | 48,564,073 | | ENSE00003683201 | 48,574,307 |
| EX123 | ENSE00001848406 | 48,584,520- | INT123 | Intron ENSE00003492735- | 48,574,261- |
| | | 48,584,485 | | ENSE00003593060 | 48,573,891 |
| EX124 | ENSE00003506552 | 48,584,375- | INT124 | Intron ENSE00003683201- | 48,574,261- |
| | | 48,584,298 | | ENSE00003573584 | 48,573,891 |
| EX125 | ENSE00003563335 | 48,584,061- | INT125 | Intron ENSE00003573584- | 48,573,854- |
| | | 48,584,035 | | ENSE00003520796 | 48,573,726 |
| EX126 | ENSE00003626349 | 48,583,953- | INT126 | Intron ENSE00003593060- | 48,573,854- |
| | | 48,583,900 | | ENSE00003625405 | 48,573,726 |
| EX127 | ENSE00003578410 | 48,583,780- | INT127 | Intron ENSE00003520796- | 48,573,689- |
| | | 48,583,718 | | ENSE00003676314 | 48,573,558 |
| EX128 | ENSE00003541506 | 48,583,615- | INT128 | Intron ENSE00003625405- | 48,573,689- |
| | | 48,583,556 | | ENSE00003606530 | 48,573,558 |
| EX129 | ENSE00003494393 | 48,583,428- | INT129 | Intron ENSE00003606530- | 48,573,512- |
| | | 48,583,393 | | ENSE00003578737 | 48,573,349 |
| EX130 | ENSE00003649625 | 48,583,171- | INT130 | Intron ENSE00003676314- | 48,573,512- |
| | | 48,583,127 | | ENSE00003523053 | 48,573,349 |
| EX131 | ENSE00003678798 | 48,583,048- | INT131 | Intron ENSE00003523053- | 48,573,315- |
| | | 48,583,013 | | ENSE00003484176 | 48,573,237 |
| EX132 | ENSE00003624485 | 48,582,653- | INT132 | Intron ENSE00003578737- | 48,573,315- |
| | | 48,582,609 | | ENSE00003520660 | 48,573,237 |
| EX133 | ENSE00003602856 | 48,582,513- | INT133 | Intron ENSE00003484176- | 48,573,173- |
| | | 48,582,478 | | ENSE00003629063 | 48,573,057 |
| EX134 | ENSE00003587985 | 48,582,358- | INT134 | Intron ENSE00003520660- | 48,573,173- |
| | | 48,582,323 | | ENSE00003510603 | 48,573,057 |
| EX135 | ENSE00003544785 | 48,581,943- | INT135 | Intron ENSE00003510603- | 48,573,020- |
| | | 48,581,911 | | ENSE00003505003 | 48,572,943 |
| EX136 | ENSE00003630308 | 48,581,759- | INT136 | Intron ENSE00003629063- | 48,573,020- |
| | | 48,581,706 | | ENSE00003487735 | 48,572,943 |
| EX137 | ENSE00003663047 | 48,581,632- | INT137 | Intron ENSE00003487735- | 48,572,861- |
| | | 48,581,573 | | ENSE00003692763 | 48,572,740 |
| EX138 | ENSE00003524450 | 48,581,483- | INT138 | Intron ENSE00003505003- | 48,572,861- |
| | | 48,581,448 | | ENSE00003693777 | 48,572,740 |
| EX139 | ENSE00003464087 | 48,581,340- | INT139 | Intron ENSE00003692763- | 48,572,670- |
| | | 48,581,260 | | ENSE00003640625 | 48,572,539 |
| EX140 | ENSE00003479464 | 48,581,157- | INT140 | Intron ENSE00003693777- | 48,572,670- |
| | | 48,581,122 | | ENSE00003565183 | 48,572,539 |
| EX141 | ENSE00003553414 | 48,580,926- | INT141 | Intron ENSE00003565183- | 48,572,502- |
| | | 48,580,882 | | ENSE00003573289 | 48,572,422 |
| EX142 | ENSE00003464034 | 48,580,652- | INT142 | Intron ENSE00003640625- | 48,572,502- |
| | | 48,580,581 | | ENSE00003633068 | 48,572,422 |
| EX143 | ENSE00003548991 | 48,580,344- | INT143 | Intron ENSE00003573289- | 48,572,379- |
| | | 48,580,300 | | ENSE00003522363 | 48,572,172 |
| EX144 | ENSE00003685081 | 48,580,057- | INT144 | Intron ENSE00003633068- | 48,572,379- |
| | | 48,580,031 | | ENSE00003491598 | 48,572,172 |
| EX145 | ENSE00003492113 | 48,579,814- | INT145 | Intron ENSE00003491598- | 48,572,126- |
| | | 48,579,785 | | ENSE00001874337 | 48,572,046 |
| EX146 | ENSE00003542851 | 48,579,668- | INT146 | Intron ENSE00003522363- | 48,572,126- |
| | | 48,579,588 | | ENSE00001063401 | 48,572,046 |
| EX147 | ENSE00003516843 | 48,579,515- | INT147 | Intron ENSE00001063401- | 48,572,000- |
| | | 48,579,480 | | ENSE00001063365 | 48,571,279 |
| EX148 | ENSE00003686948 | 48,579,404- | INT148 | Intron ENSE00001703127- | 48,571,485- |
| | | 48,579,369 | | ENSE00001063365 | 48,571,279 |
| EX149 | ENSE00003631089 | 48,579,277- | INT149 | Intron ENSE00001063365- | 48,571,242- |
| | | 48,579,197 | | ENSE00003550102 | 48,571,161 |
| EX150 | ENSE00003512751 | 48,578,954- | INT150 | Intron ENSE00001874337- | 48,571,242- |
| | | 48,578,919 | | ENSE00003597046 | 48,571,161 |
| EX151 | ENSE00003471058 | 48,578,515- | INT151 | Intron ENSE00001953693- | 48,571,100- |
| | | 48,578,453 | | ENSE00001853134 | 48,570,969 |
| EX152 | ENSE00003578856 | 48,578,365- | INT152 | Intron ENSE00003550102- | 48,571,100- |
| | | 48,578,321 | | ENSE00003690203 | 48,570,969 |
| EX153 | ENSE00003554613 | 48,577,027- | INT153 | Intron ENSE00003597046- | 48,571,100- |
| | | 48,576,992 | | ENSE00003593995 | 48,570,969 |
| EX154 | ENSE00003687998 | 48,576,919- | INT154 | Intron ENSE00001915432- | 48,570,860- |
| | | 48,576,884 | | ENSE00003599022 | 48,570,711 |
| EX155 | ENSE00003559586 | 48,576,771- | INT155 | Intron ENSE00003593995- | 48,570,860- |
| | | 48,576,676 | | ENSE00003599022 | 48,570,711 |
| EX156 | ENSE00003619607 | 48,576,557- | INT156 | Intron ENSE00003690203- | 48,570,860- |
| | | 48,576,522 | | ENSE00003555529 | 48,570,711 |
| EX157 | ENSE00003523706 | 48,576,435- | INT157 | Intron ENSE00003555529- | 48,570,638- |
| | | 48,576,400 | | ENSE00003523424 | 48,570,501 |
| EX158 | ENSE00003562571 | 48,576,296- | INT158 | Intron ENSE00003599022- | 48,570,638- |
| | | 48,576,249 | | ENSE00003561069 | 48,570,501 |
| EX159 | ENSE00003603927 | 48,575,902- | INT159 | Intron ENSE00003523424- | 48,570,464- |
| | | 48,575,867 | | ENSE00003684788 | 48,570,335 |
| EX160 | ENSE00003582164 | 48,575,748- | INT160 | Intron ENSE00003561069- | 48,570,464- |
| | | 48,575,626 | | ENSE00001887977 | 48,570,335 |
| EX161 | ENSE00003541804 | 48,575,539- | INT161 | Intron ENSE00003561069- | 48,570,464- |
| | | 48,575,339 | | ENSE00003581752 | 48,570,335 |
| EX162 | ENSE00003656220 | 48,575,242- | INT162 | Intron ENSE00003581752- | 48,570,274- |
| | | 48,575,207 | | ENSE00003493445 | 48,570,179 |
| EX163 | ENSE00003630191 | 48,575,126- | INT163 | Intron ENSE00003684788- | 48,570,274- |
| | | 48,575,064 | | ENSE00003595907 | 48,570,179 |
| EX164 | ENSE00003568929 | 48,574,865- | INT164 | Intron ENSE00001827612- | 48,570,133- |
| | | 48,574,797 | | ENSE00003470508 | 48,569,916 |
| EX165 | ENSE00003644813 | 48,574,721- | INT165 | Intron ENSE00001887977- | 48,570,133- |
| | | 48,574,677 | | ENSE00003470508 | 48,569,916 |
| EX166 | ENSE00003560734 | 48,574,550- | INT166 | Intron ENSE00003493445- | 48,570,133- |
| | | 48,574,488 | | ENSE00003470508 | 48,569,916 |
| EX167 | ENSE00003683201 | 48,574,306- | INT167 | Intron ENSE00003595907- | 48,570,133- |
| | | 48,574,262 | | ENSE00003558468 | 48,569,916 |
| EX168 | ENSE00003573584 | 48,573,890- | INT168 | Intron ENSE00003470508- | 48,569,879- |
| | | 48,573,855 | | ENSE00003684889 | 48,569,761 |
| EX169 | ENSE00003520796 | 48,573,725- | INT169 | Intron ENSE00003558468- | 48,569,879- |
| | | 48,573,690 | | ENSE00001601384 | 48,569,761 |
| EX170 | ENSE00003676314 | 48,573,557- | INT170 | Intron ENSE00003558468- | 48,569,879- |
| | | 48,573,513 | | ENSE00003692225 | 48,569,761 |
| EX171 | ENSE00003523053 | 48,573,348- | INT171 | Intron ENSE00003684889- | 48,569,724- |
| | | 48,573,316 | | ENSE00003576288 | 48,569,649 |
| EX172 | ENSE00003484176 | 48,573,236- | INT172 | Intron ENSE00003692225- | 48,569,724- |
| | | 48,573,174 | | ENSE00003528589 | 48,569,649 |
| EX173 | ENSE00003629063 | 48,573,056- | INT173 | Intron ENSE00003528589- | 48,569,591- |
| | | 48,573,021 | | ENSE00003637554 | 48,569,447 |
| EX174 | ENSE00003487735 | 48,572,942- | INT174 | Intron ENSE00003576288- | 48,569,591- |
| | | 48,572,862 | | ENSE00003524947 | 48,569,447 |
| EX175 | ENSE00003692763 | 48,572,739- | INT175 | Intron ENSE00003524947- | 48,569,374- |
| | | 48,572,671 | | ENSE00003529314 | 48,568,856 |
| EX176 | ENSE00003640625 | 48,572,538- | INT176 | Intron ENSE00003637554- | 48,569,374- |
| | | 48,572,503 | | ENSE00003573784 | 48,568,856 |
| EX177 | ENSE00003633068 | 48,572,421- | INT177 | Intron ENSE00003529314- | 48,568,783- |
| | | 48,572,380 | | ENSE00003593433 | 48,568,535 |
| EX178 | ENSE00003491598 | 48,572,171- | INT178 | Intron ENSE00003573784- | 48,568,783- |
| | | 48,572,127 | | ENSE00003681716 | 48,568,535 |
| EX179 | ENSE00001874337 | 48,572,045- | INT179 | Intron ENSE00003593433- | 48,568,498- |
| | | 48,571,243 | | ENSE00001950248 | 48,568,233 |
| EX180 | ENSE00003597046 | 48,571,160- | INT180 | Intron ENSE00003593433- | 48,568,498- |
| | | 48,571,101 | | ENSE00003547886 | 48,568,171 |
| EX181 | ENSE00003593995 | 48,570,968- | INT181 | Intron ENSE00003681716- | 48,568,498- |
| | | 48,570,861 | | ENSE00003551619 | 48,568,171 |
| EX182 | ENSE00003599022 | 48,570,710- | INT182 | Intron ENSE00003547886- | 48,568,089- |
| | | 48,570,639 | | ENSE00003548168 | 48,567,892 |
| EX183 | ENSE00003561069 | 48,570,500- | INT183 | Intron ENSE00003551619- | 48,568,089- |
| | | 48,570,465 | | ENSE00003489710 | 48,567,892 |
| EX184 | ENSE00003581752 | 48,570,334- | INT184 | Intron ENSE00003489710- | 48,567,837- |
| | | 48,570,275 | | ENSE00003535852 | 48,567,764 |
| EX185 | ENSE00003493445 | 48,570,178- | INT185 | Intron ENSE00003548168- | 48,567,837- |
| | | 48,570,134 | | ENSE00001939642 | 48,567,764 |
| EX186 | ENSE00003470508 | 48,569,915- | INT186 | Intron ENSE00003548168- | 48,567,837- |
| | | 48,569,880 | | ENSE00003525240 | 48,567,764 |
| EX187 | ENSE00003684889 | 48,569,760- | INT187 | Intron ENSE00003525240- | 48,567,709- |
| | | 48,569,725 | | ENSE00003621778 | 48,567,637 |
| EX188 | ENSE00003576288 | 48,569,648- | INT188 | Intron ENSE00003535852- | 48,567,709- |
| | | 48,569,592 | | ENSE00003573824 | 48,567,637 |
| EX189 | ENSE00003524947 | 48,569,446- | INT189 | Intron ENSE00003573824- | 48,567,573- |
| | | 48,569,375 | | ENSE00003501656 | 48,567,191 |
| EX190 | ENSE00003529314 | 48,568,855- | INT190 | Intron ENSE00003621778- | 48,567,573- |
| | | 48,568,784 | | ENSE00003537307 | 48,567,191 |
| EX191 | ENSE00003593433 | 48,568,534- | INT191 | Intron ENSE00003501656- | 48,567,127- |
| | | 48,568,499 | | ENSE00003536911 | 48,567,024 |
| EX192 | ENSE00003547886 | 48,568,170- | INT192 | Intron ENSE00003537307- | 48,567,127- |
| | | 48,568,090 | | ENSE00003677816 | 48,567,024 |
| EX193 | ENSE00003548168 | 48,567,891- | INT193 | Intron ENSE00003536911- | 48,566,906- |
| | | 48,567,838 | | ENSE00003573881 | 48,566,738 |
| EX194 | ENSE00003525240 | 48,567,763- | INT194 | Intron ENSE00003677816- | 48,566,906- |
| | | 48,567,710 | | ENSE00003462690 | 48,566,738 |
| EX195 | ENSE00003621778 | 48,567,636- | INT195 | Intron ENSE00001932907- | 48,566,659- |
| | | 48,567,574 | | ENSE00001816685 | 48,566,564 |
| EX196 | ENSE00003537307 | 48,567,190- | INT196 | Intron ENSE00003462690- | 48,566,659- |
| | | 48,567,128 | | ENSE00003617782 | 48,566,564 |
| EX197 | ENSE00003677816 | 48,567,023- | INT197 | Intron ENSE00003573881- | 48,566,659- |
| | | 48,566,907 | | ENSE00003461176 | 48,566,564 |
| EX198 | ENSE00003462690 | 48,566,737- | INT198 | Intron ENSE00003461176- | 48,566,509- |
| | | 48,566,660 | | ENSE00003512462 | 48,566,316 |
| EX199 | ENSE00003617782 | 48,566,563- | INT199 | Intron ENSE00003617782- | 48,566,509- |
| | | 48,566,510 | | ENSE00003478543 | 48,566,316 |
| EX200 | ENSE00003478543 | 48,566,315- | INT200 | Intron ENSE00003478543- | 48,566,266- |
| | | 48,566,267 | | ENSE00003467402 | 48,565,669 |
| EX201 | ENSE00003467402 | 48,565,668- | INT201 | Intron ENSE00003512462- | 48,566,266- |
| | | 48,565,636 | | ENSE00003593366 | 48,565,669 |
| EX202 | ENSE00003462809 | 48,565,496- | INT202 | Intron ENSE00003467402- | 48,565,635- |
| | | 48,565,410 | | ENSE00003462809 | 48,565,497 |
| EX203 | ENSE00003671416 | 48,565,201- | INT203 | Intron ENSE00003593366- | 48,565,635- |
| | | 48,565,109 | | ENSE00003480673 | 48,565,497 |
| EX204 | ENSE00003530203 | 48,564,980- | INT204 | Intron ENSE00003462809- | 48,565,409- |
| | | 48,564,783 | | ENSE00003671416 | 48,565,202 |
| EX205 | ENSE00003538748 | 48,564,422- | INT205 | Intron ENSE00003480673- | 48,565,409- |
| | | 48,564,073 | | ENSE00003547577 | 48,565,202 |
| EX206 | ENSE00001827612 | 48,570,441- | INT206 | Intron ENSE00001817895- | 48,565,108- |
| | | 48,570,134 | | ENSE00003530203 | 48,564,981 |
| EX207 | ENSE00001939642 | 48,567,763- | INT207 | Intron ENSE00003547577- | 48,565,108- |
| | | 48,567,698 | | ENSE00003482916 | 48,564,981 |
| EX208 | ENSE00001817895 | 48,565,339- | INT208 | Intron ENSE00003671416- | 48,565,108- |
| | | 48,565,109 | | ENSE00003530203 | 48,564,981 |
| EX209 | ENSE00001810784 | 48,564,422- | INT209 | Intron ENSE00001826556- | 48,564,782- |
| | | 48,564,074 | | ENSE00001860953 | 48,564,514 |
| EX210 | ENSE00001932907 | 48,567,363- | INT210 | Intron ENSE00001866812- | 48,564,782- |
| | | 48,566,660 | | ENSE00003538748 | 48,564,423 |
| EX211 | ENSE00001816685 | 48,566,563- | INT211 | Intron ENSE00003482916- | 48,564,782- |
| | | 48,566,540 | | ENSE00003644607 | 48,564,423 |
| EX212 | ENSE00001915432 | 48,570,882- | INT212 | Intron ENSE00003530203- | 48,564,782- |
| | | 48,570,861 | | ENSE00001810784 | 48,564,423 |
| EX213 | ENSE00001887977 | 48,570,334- | INT213 | Intron ENSE00003530203- | 48,564,782- |
| | | 48,570,134 | | ENSE00003538748 | 48,564,423 |
| EX214 | ENSE00001950248 | 48,568,232- | | | |
| | | 48,568,164 | | | |
| EX215 | ENSE00001866812 | 48,565,019- | | | |
| | | 48,564,783 | | | |
| EX216 | ENSE00001953693 | 48,571,330- | | | |
| | | 48,571,101 | | | |
| EX217 | ENSE00001853134 | 48,570,968- | | | |
| | | 48,570,894 | | | |
| EX218 | ENSE00001507628 | 48,578,977- | | | |
| | | 48,578,902 | | | |

[0398] Table 4 provides information on all of the transcripts for the COL7A1 gene based on the Ensembl database. Provided in Table 4 are the transcript ID from Ensembl and corresponding NCBI RefSeq ID for the transcript, the translation ID from Ensembl and the corresponding NCBI RefSeq ID for the protein, the biotype of the transcript sequence as classified by Ensembl and the exons and introns in the transcript based on the information in Table 3.

TABLE 4
Transcript Information for COL7A1

| | | | Protein | | | |
|---|---|---|---|---|---|---|
| | Transcript | | NCBI | | | |
| Transcript | NCBI | Translation | RefSeq | Sequence | Exon ID from | Intron ID from |
| ID | RefSeq ID | ID | ID | Biotype | Table 3 | Table 3 |
| ENST0000 | — | — | — | Processed | EX121, EX122 | INT209 |
| 0470076.1 | | | | transcript | | |
| ENST0000 | NM_00009 | ENSP00000 | NP_00008 | Protein | EX1, EX2, EX3, | INT1, INT2, INT3, |
| 0328333.12 | 4 | 332371 | 5 | coding | EX4, EX5, EX6, | INT4, INT5, INT6, |
| | | | | | EX7, EX8, EX9, | INT7, INT8, INT9, |
| | | | | | EX10, EX11, | INT10, INT11, |
| | | | | | EX12, EX13, | INT12, INT13, |
| | | | | | EX14, EX15, | INT14, INT15, |
| | | | | | EX16, EX17, | INT16, INT17, |
| | | | | | EX18, EX19, | INT18, INT19, |
| | | | | | EX20, EX21, | INT20, INT21, |
| | | | | | EX22, EX23, | INT22, INT23, |
| | | | | | EX24, EX25, | INT24, INT25, |
| | | | | | EX26, EX27, | INT26, INT27, |
| | | | | | EX28, EX29, | INT28, INT29, |
| | | | | | EX30, EX31, | INT30, INT31, |
| | | | | | EX32, EX33, | INT32, INT33, |
| | | | | | EX34, EX35, | INT34, INT35, |
| | | | | | EX36, EX37, | INT38, INT39, |
| | | | | | EX38, EX39, | INT41, INT43, |
| | | | | | EX40, EX41, | INT45, INT48, |
| | | | | | EX42, EX43, | INT49, INT51, |
| | | | | | EX44, EX45, | INT53, INT55, |
| | | | | | EX46, EX47, | INT57, INT59, |
| | | | | | EX48, EX49, | INT62, INT63, |
| | | | | | EX50, EX51, | INT66, INT68, |
| | | | | | EX52, EX53, | INT69, INT71, |
| | | | | | EX54, EX55, | INT74, INT76, |
| | | | | | EX56, EX57, | INT77, INT80, |
| | | | | | EX58, EX59, | INT82, INT83, |
| | | | | | EX60, EX61, | INT85, INT87, |
| | | | | | EX62, EX63, | INT90, INT92, |
| | | | | | EX64, EX65, | INT94, INT95, |
| | | | | | EX66, EX67, | INT97, INT100, |
| | | | | | EX68, EX69, | INT101, INT104, |
| | | | | | EX70, EX71, | INT106, INT108, |
| | | | | | EX72, EX73, | INT109, INT112, |
| | | | | | EX74, EX75, | INT113, INT115, |
| | | | | | EX76, EX77, | INT118, INT119, |
| | | | | | EX78, EX79, | INT121, INT123, |
| | | | | | EX80, EX81, | INT126, INT128, |
| | | | | | EX82, EX83, | INT129, INT132, |
| | | | | | EX84, EX85, | INT134, INT135, |
| | | | | | EX86, EX87, | INT138, INT140, |
| | | | | | EX88, EX89, | INT141, INT143, |
| | | | | | EX90, EX91, | INT146, INT147, |
| | | | | | EX92, EX93, | INT149, INT152, |
| | | | | | EX94, EX95, | INT156, INT157, |
| | | | | | EX96, EX97, | INT159, INT163, |
| | | | | | EX98, EX99, | INT167, INT170, |
| | | | | | EX100, EX101, | INT172, INT173, |
| | | | | | EX102, EX103, | INT176, INT178, |
| | | | | | EX104, EX105, | INT181, INT183, |
| | | | | | EX106, EX107, | INT184, INT188, |
| | | | | | EX108, EX109, | INT189, INT191, |
| | | | | | EX110, EX111, | INT193, INT197, |
| | | | | | EX112, EX113, | INT198, INT201, |
| | | | | | EX114, EX115, | INT203, INT205, |
| | | | | | EX116, EX117, | INT207, INT211 |
| | | | | | EX118 | |
| ENST0000 | — | ENSP00000 | — | Protein | EX92, EX93, | INT148, INT149, |
| 0422991.1 | | 391608 | | coding | EX94, EX95, | INT152, INT156, |
| | | | | | EX96, EX97, | INT157, INT159, |
| | | | | | EX98, EX99, | INT163, INT167, |
| | | | | | EX119, EX120 | INT169 |
| ENST0000 | — | — | — | Retained | EX123, EX124, | INT36, INT37, |
| 0487017.5 | | | | intron | EX125, EX126, | INT40, INT42, |
| | | | | | EX127, EX128, | INT44, INT46, |
| | | | | | EX129, EX130, | INT47, INT50, |
| | | | | | EX131, EX132, | INT52, INT54, |
| | | | | | EX133, EX134, | INT56, INT58, |
| | | | | | EX135, EX136, | INT60, INT61, |
| | | | | | EX137, EX138, | INT64, INT65, |
| | | | | | EX139, EX140, | INT67, INT70, |
| | | | | | EX141, EX142, | INT72, INT73, |
| | | | | | EX143, EX144, | INT75, INT78, |
| | | | | | EX145, EX146, | INT79, INT81, |
| | | | | | EX147, EX148, | INT84, INT86, |
| | | | | | EX149, EX150, | INT88, INT89, |
| | | | | | EX151, EX152, | INT91, INT93, |
| | | | | | EX153, EX154, | INT96, INT98, |
| | | | | | EX155, EX156, | INT99, INT102, |
| | | | | | EX157, EX158, | INT103, INT105, |
| | | | | | EX159, EX160, | INT107, INT110, |
| | | | | | EX161, EX162, | INT111, INT114, |
| | | | | | EX163, EX164, | INT116, INT117, |
| | | | | | EX165, EX166, | INT120, INT122, |
| | | | | | EX167, EX168, | INT124, INT125, |
| | | | | | EX169, EX170, | INT127, INT130, |
| | | | | | EX171, EX172, | INT131, INT133, |
| | | | | | EX173, EX174, | INT136, INT137, |
| | | | | | EX175, EX176, | INT139, INT142, |
| | | | | | EX177, EX178, | INT144, INT145, |
| | | | | | EX179, EX180, | INT150, INT153, |
| | | | | | EX181, EX182, | INT155, INT158, |
| | | | | | EX183, EX184, | INT161, INT162, |
| | | | | | EX185, EX186, | INT166, INT168, |
| | | | | | EX187, EX188, | INT171, INT174, |
| | | | | | EX189, EX190, | INT175, INT177, |
| | | | | | EX191, EX192, | INT180, INT182, |
| | | | | | EX193, EX194, | INT186, INT187, |
| | | | | | EX195, EX196, | INT190, INT192, |
| | | | | | EX197, EX198, | INT194, INT196, |
| | | | | | EX199, EX200, | INT199, INT200, |
| | | | | | EX201, EX202, | INT202, INT204, |
| | | | | | EX203, EX204, | INT208, INT213 |
| | | | | | EX205 | |
| ENST0000 | — | — | — | Retained | EX186, EX187, | INT164, INT168, |
| 0459756.5 | | | | intron | EX188, EX189, | INT171, INT174, |
| | | | | | EX190, EX191, | INT175, INT177, |
| | | | | | EX192, EX193, | INT180, INT182, |
| | | | | | EX206, EX207 | INT185 |
| ENST0000 | — | — | — | Retained | EX204, EX208, | INT206, INT212 |
| 0466591.1 | | | | intron | EX209 | |
| ENST0000 | — | — | — | Retained | EX210, EX211 | INT195 |
| 0474432.1 | | | | intron | | |
| ENST0000 | — | — | — | Retained | EX182, EX183, | INT154, INT158, |
| 0467985.1 | | | | intron | EX186, EX187, | INT160, INT165, |
| | | | | | EX188, EX189, | INT168, INT171, |
| | | | | | EX190, EX191, | INT174, INT175, |
| | | | | | EX212, EX213, | INT177, INT179 |
| | | | | | EX214 | |
| ENST0000 | — | — | — | Retained | EX205, EX215 | INT210 |
| 0465238.5 | | | | intron | | |
| ENST0000 | — | — | — | Retained | EX216, EX217 | INT151 |
| 0462475.1 | | | | intron | | |
| ENST0000 | NR_03175 | — | — | miRNA | EX218 | — |
| 0390201.1 | 6 | | | | | |

[0399] COL7A1 has 4063 SNPs and the NCBI rs number and/or UniProt VAR number for this COL7A1 gene are rs363919, rs427245, rs1003649, rs1264194, rs1800013, rs1894256, rs2228561, rs2228563, rs2229818, rs2229821, rs2229822, rs2229824, rs2229825, rs2255532, rs2532845, rs2532846, rs2532847, rs2532848, rs2532849, rs2532850, rs2532851, rs2532852, rs2532853, rs2532854, rs2532855, rs2532857, rs2532858, rs2532884, rs2532885, rs2532886, rs2532888, rs2532889, rs2532890, rs2532891, rs2633954, rs2633955, rs2633956, rs2633957, rs2633959, rs2633960, rs2633961, rs2633963, rs2633964, rs2854389, rs2854390, rs2854391, rs2854392, rs2854393, rs2854394, rs2854395, rs2854396, rs2854397, rs2854398, rs2854399, rs2854404, rs2854405, rs2854406, rs2854407, rs2854408, rs2854409, rs2854410, rs3832252, rs6766678, rs6768758, rs6781283, rs7432334, rs7637885, rs9814951, rs9871180, rs9878950, rs9881877, rs10452029, rs11715496, rs11919537, rs13060933, rs13091797, rs13325221, rs17080261, rs17256786, rs28581474, rs34040119, rs34107861, rs34111287, rs34164232, rs34360255, rs34568064, rs34630399, rs34665271, rs35005429, rs35168597, rs35178215, rs35187166, rs35446026, rs35502117, rs35562294, rs35565476, rs35595499, rs35623035, rs35643264, rs35761247, rs35834546, rs35899847, rs35904590, rs36087234, rs41290686, rs41290688, rs41290690, rs41290692, rs41290694, rs55776593, rs57591992, rs57777914, rs59076652, rs59789083, rs60280895, rs61701760, rs61729223, rs62261469, rs66737445, rs68111751, rs71324907, rs72925275, rs73831831, rs74390291, rs74453879, rs74668302, rs74773596, rs74861804, rs75111659, rs75167499, rs75551775, rs75693856, rs76008782, rs76061303, rs76140443, rs76187984, rs76350766, rs76410546, rs76662168, rs76683871, rs77050795, rs77295592, rs77629641, rs77793216, rs78149541, rs78407388, rs78606463, rs78875526, rs78877179, rs78922394, rs79378857, rs79803648, rs111439172, rs111460426, rs111582283, rs111661518, rs111775311, rs111801818, rs111929379, rs112176369, rs112242120, rs112310970, rs112328398, rs112424648, rs112479160, rs112544320, rs112546336, rs112611395, rs112805032, rs112922464, rs112974191, rs112974441, rs113041019, rs113068874, rs113151410, rs113167762, rs113297313, rs113340899, rs113350854, rs113378081, rs113483524, rs113508522, rs113597796, rs113750125, rs113763575, rs113813395, rs113845991, rs113871162, rs114500901, rs114506801, rs114519845, rs114970435, rs115003244, rs115128540, rs115504500, rs115568792, rs115627928, rs115744844, rs115796392, rs116005007, rs116109950, rs116512620, rs116675368, rs116765530, rs117723065, rs117857033, rs121912828, rs121912829, rs121912830, rs121912831, rs121912832, rs121912833, rs121912834, rs121912835, rs121912836, rs121912837, rs121912838, rs121912839, rs121912840, rs121912842, rs121912843, rs121912844, rs121912846, rs121912847, rs121912848, rs121912849, rs121912850, rs121912851, rs121912852, rs121912853, rs121912854, rs121912855, rs121912856, rs137942494, rs137992011, rs138190232, rs138206338, rs138208939, rs138222941, rs138263686, rs138319290, rs138330564, rs138548077, rs138605618, rs138626345, rs138770708, rs138772308, rs138791004, rs139092435, rs139141593, rs139318843, rs139371408, rs139416346, rs139434755, rs139461888, rs139521707, rs139545952, rs139564795, rs139566877, rs139622306, rs139759871, rs139766260, rs139789951, rs139875748, rs139920321, rs139935808, rs139979909, rs139995899, rs140114392, rs140182747, rs140193653, rs140317692, rs140403507, rs140543032, rs140978063, rs141002543, rs141018618, rs141055029, rs141063524, rs141068802, rs141170763, rs141176276, rs141182783, rs141244073, rs141290741, rs141478471, rs141512051, rs141566570, rs141649838, rs141720633, rs141787797, rs141801873, rs141825319, rs141873874, rs141883531, rs141949156, rs142059751, rs142066167, rs142103925, rs142108058, rs142298581, rs142318924, rs142405771, rs142476373, rs142535776, rs142560414, rs142566193, rs142568125, rs142614510, rs142651194, rs142651984, rs142681592, rs142686837, rs142720855, rs142907473, rs142948995, rs142959516, rs142991861, rs143040168, rs143095242, rs143126677, rs143142534, rs143202912, rs143221297, rs143245957, rs143270071, rs143283465, rs143307229, rs143352280, rs143368099, rs143372872, rs143391124, rs143458723, rs143589222, rs143593422, rs143843471, rs143975533, rs143979792, rs143984801, rs143991798, rs143991849, rs143994451, rs144023803, rs144057847, rs144208360, rs144270746, rs144307023, rs144483183, rs144557024, rs144714059, rs144756110, rs144775888, rs144788938, rs144825552, rs145048666, rs145068043, rs145200529, rs145236294, rs145308754, rs145343367, rs145428183, rs145497414, rs145560366, rs145560571, rs145606765, rs145623525, rs145729761, rs145729790, rs145738101, rs145782204, rs145812249, rs145928829, rs146041612, rs146234310, rs146250538, rs146289794, rs146407483, rs146415546, rs146418495, rs146512324, rs146532321, rs146659822, rs146686264, rs146783561, rs146901730, rs146903823, rs146913953, rs146930322, rs146933521, rs146934952, rs147017402, rs147040026, rs147089666, rs147112274, rs147121698, rs147177277, rs147288213, rs147304187, rs147356310, rs147391146, rs147462803, rs147470888, rs147516231, rs147546421, rs147549094, rs147553715, rs147600715, rs147633212, rs147643230, rs147924718, rs147925598, rs147947287, rs148061950, rs148291967, rs148341722, rs148357537, rs148411473, rs148464822, rs148625586, rs148638156, rs148797261, rs148836522, rs149011081, rs149065620, rs149075437, rs149154108, rs149267939, rs149317921, rs149361101, rs149559132, rs149574155, rs149684539, rs149711883, rs149869536, rs149881350, rs150103090, rs150164903, rs150193295, rs150226889, rs150249857, rs150259945, rs150332158, rs150337561, rs150513888, rs150566753, rs150603557, rs150755547, rs150776274, rs150873722, rs151032217, rs151055269, rs151111203, rs151133239, rs151181960, rs151186709, rs151246821, rs180683789, rs180914761, rs180937552, rs181247235, rs181362445, rs181430415, rs181486713, rs181589973, rs181590433, rs182043849, rs182110853, rs182447295, rs182460372, rs182669506, rs182917654, rs183300939, rs183304904, rs183310259, rs183542251, rs183546756, rs183566461, rs184093617, rs184141968, rs184188365, rs184412823, rs184628850, rs184692105, rs184732195, rs184756277, rs185142403, rs185429200, rs185435762, rs185464826, rs185558841, rs185689852, rs185999235, rs186196490, rs186298922, rs186652663, rs186811115, rs186847424, rs187094987, rs187312469, rs187476633, rs187679403, rs187784650, rs187974052, rs188051662, rs188315353, rs188323275, rs188578366, rs188592093, rs188823379, rs188850256, rs188978813, rs189206728, rs189436388, rs189714381, rs189838334, rs189842059, rs189921365, rs190445911, rs190526607, rs190749884, rs191043504, rs191184621, rs191235122, rs191559835, rs191603815, rs191866823, rs191878752, rs191995514, rs192158843, rs192612464, rs192754202, rs192945405, rs192984399, rs199515911, rs199533645, rs199556963, rs199603961, rs199607424, rs199612012, rs199645508, rs199647542, rs199679633, rs199679997, rs199694364, rs199742042, rs199792365, rs199805705, rs199807238, rs199819125, rs199843749, rs199848836, rs199871941, rs199907664, rs199914077, rs199924999, rs199936185, rs199967174, rs199967508, rs199974050, rs199983247, rs200022744, rs200051107, rs200059738, rs200077098, rs200079569, rs200080609, rs200086083, rs200115635, rs200138839, rs200150258, rs200159730, rs200159826, rs200166712, rs200166750, rs200169440, rs200172845, rs200187486, rs200193211, rs200193957, rs200198400, rs200199871, rs200207978, rs200211562, rs200235451, rs200237023, rs200238547, rs200240573, rs200268115, rs200290149, rs200292228, rs200309694, rs200313202, rs200316068, rs200321614, rs200336324, rs200345856, rs200355091, rs200360245, rs200365886, rs200377733, rs200381437, rs200382597, rs200396882, rs200424564, rs200429526, rs200440344, rs200473808, rs200484047, rs200505918, rs200514312, rs200521199, rs200523730, rs200551525, rs200558083, rs200562295, rs200570283, rs200598201, rs200629259, rs200654405, rs200667207, rs200674956, rs200684689, rs200688246, rs200710527, rs200741847, rs200762860, rs200769466, rs200797171, rs200802373, rs200820714, rs200821820, rs200826090, rs200826657, rs200827838, rs200841077, rs200854297, rs200855943, rs200864582, rs200868430, rs200882719, rs200890422, rs200892831, rs200938473, rs200972872, rs200981821, rs200991150, rs200998167, rs201010613, rs201011691, rs201049054, rs201073662, rs201093706, rs201123088, rs201127162, rs201140493, rs201142036, rs201150671, rs201152116, rs201185080, rs201188603, rs201196696, rs201230314, rs201237097, rs201242396, rs201243313, rs201264274, rs201299454, rs201327901, rs201389550, rs201392891, rs201407029, rs201412774, rs201424023, rs201432371, rs201432382, rs201433029, rs201433267, rs201437522, rs201480950, rs201481305, rs201488600, rs201492853, rs201531465, rs201533008, rs201553470, rs201557549, rs201566458, rs201581816, rs201597369, rs201605314, rs201623553, rs201632603, rs201633065, rs201633898, rs201645359, rs201656230, rs201697063, rs201701017, rs201719223, rs201722048, rs201728948, rs201734662, rs201784901, rs201800375, rs201807476, rs201814450, rs201825506, rs201837701, rs201839881, rs201847088, rs201850476, rs201851605, rs201852525, rs201871749, rs201877942, rs201897441, rs201916805, rs201951990, rs201968323, rs202012558, rs202014756, rs202016635, rs202072610, rs202076982, rs202077823, rs202093558, rs202104980, rs202113569, rs202126339, rs202152758, rs202160398, rs202165842, rs202192755, rs202222548, rs202223853, rs202225012, rs202237834, rs202239292, rs202242440, rs267599855, rs267599856, rs267599857, rs267599858, rs267599859, rs267599860, rs367545925, rs367583660, rs367585573, rs367590054, rs367597619, rs367607652, rs367618947, rs367620031, rs367631092, rs367797946, rs367958901, rs367967575, rs367995901, rs368007918, rs368011944, rs368033878, rs368034614, rs368091050, rs368098361, rs368123421, rs368141334, rs368155479, rs368170769, rs368174130, rs368184263, rs368185576, rs368187472, rs368195728, rs368197908, rs368225541, rs368227259, rs368234577, rs368238566, rs368260873, rs368411096, rs368458747, rs368469833, rs368495105, rs368495251, rs368529673, rs368583204, rs368606397, rs368634417, rs368642011, rs368642983, rs368661110, rs368662594, rs368664530, rs368669037, rs368675458, rs368741066, rs368807817, rs368816697, rs368852993, rs368872953, rs368903244, rs368916742, rs368943084, rs368955197, rs368959634, rs368960804, rs369002487, rs369025917, rs369040036, rs369070144, rs369087760, rs369097340, rs369136008, rs369157723, rs369164827, rs369186629, rs369204725, rs369221071, rs369227658, rs369256448, rs369277237, rs369279598, rs369285281, rs369313576, rs369331106, rs369349097, rs369383524, rs369451805, rs369453291, rs369457758, rs369461490, rs369481509, rs369494598, rs369517546, rs369591910, rs369633742, rs369635501, rs369637826, rs369641850, rs369674282, rs369682702, rs369707173, rs369757980, rs369814181, rs369829451, rs369838476, rs369839378, rs369847344, rs369853060, rs369861206, rs369871223, rs369877713, rs369881673, rs369883229, rs369891785, rs369898348, rs369941790, rs369945654, rs369960027, rs369972686, rs370024355, rs370033658, rs370085598, rs370122024, rs370282200, rs370302635, rs370306552, rs370323941, rs370327156, rs370329446, rs370331756, rs370335829, rs370378194, rs370390884, rs370394749, rs370403613, rs370421477, rs370428918, rs370483258, rs370500985, rs370515794, rs370517077, rs370519980, rs370531673, rs370534336, rs370622769, rs370625256, rs370647620, rs370681207, rs370698911, rs370710442, rs370716433, rs370740757, rs370744140, rs370840161, rs370844256, rs370889585, rs370933712, rs371000403, rs371009419, rs371053362, rs371076755, rs371099396, rs371102080, rs371113036, rs371117425, rs371141853, rs371145958, rs371154736, rs371200432, rs371266796, rs371269263, rs371272827, rs371301928, rs371387134, rs371403139, rs371404677, rs371418298, rs371461318, rs371461559, rs371470848, rs371480540, rs371506242, rs371525463, rs371527986, rs371555029, rs371558598, rs371560136, rs371568501, rs371660856, rs371666351, rs371676492, rs371699045, rs371731645, rs371738291, rs371740479, rs371757740, rs371822022, rs371908708, rs371927547, rs371939692, rs371941592, rs371977017, rs371991224, rs372073439, rs372102117, rs372129282, rs372132703, rs372138432, rs372150644, rs372158569, rs372162756, rs372197459, rs372245797, rs372309313, rs372331035, rs372346203, rs372389666, rs372458548, rs372495014, rs372501657, rs372533402, rs372543048, rs372550217, rs372564381, rs372565695, rs372585819, rs372587438, rs372590718, rs372604034, rs372608575, rs372655141, rs372662921, rs372678698, rs372679634, rs372680561, rs372697666, rs372721823, rs372725632, rs372750088, rs372767169, rs372786023, rs372793584, rs372838887, rs372918810, rs372925457, rs373021501, rs373028896, rs373053594, rs373069670, rs373084149, rs373096959, rs373100290, rs373105841, rs373135363, rs373137427, rs373138319, rs373161985, rs373217568, rs373230433, rs373249097, rs373252312, rs373252766, rs373267685, rs373269924, rs373279464, rs373291907, rs373295008, rs373316341, rs373341811, rs373348102, rs373351471, rs373400910, rs373442851, rs373460905, rs373470935, rs373564083, rs373567874, rs373580663, rs373583016, rs373589717, rs373590491, rs373591264, rs373659283, rs373682717, rs373686143, rs373711223, rs373718447, rs373718618, rs373720628, rs373742757, rs373745858, rs373757759, rs373768300, rs373777885, rs373808550, rs373817004, rs373852057, rs373917369, rs373923805, rs373935760, rs374009584, rs374082591, rs374097021, rs374177424, rs374179417, rs374218913, rs374220118, rs374230513, rs374243702, rs374261595, rs374283437, rs374283870, rs374295297, rs374323033, rs374325775, rs374365287, rs374596583, rs374610883, rs374621850, rs374698863, rs374704883, rs374705760, rs374720779, rs374721744, rs374723425, rs374728682, rs374751519, rs374756079, rs374775853, rs374778393, rs374780340, rs374782557, rs374790444, rs374833715, rs374840692, rs374863342, rs374882140, rs374889190, rs374906960, rs374916584, rs374921696, rs374975690, rs375003303, rs375020396, rs375047225, rs375074111, rs375130183, rs375152374, rs375161918, rs375166730, rs375167326, rs375198612, rs375202315, rs375356760, rs375363281, rs375385028, rs375437468, rs375442528, rs375449190, rs375498080, rs375511803, rs375539799, rs375548486, rs375549035, rs375555530, rs375583602, rs375604839, rs375609047, rs375642162, rs375653257, rs375663380, rs375665615, rs375680517, rs375692181, rs375732012, rs375795047, rs375848391, rs375863934, rs375909549, rs375915452, rs375923118, rs375952888, rs375975487, rs375977644, rs375982451, rs376041874, rs376086581, rs376090628, rs376102774, rs376116966, rs376121181, rs376192100, rs376223156, rs376232093, rs376248196, rs376268606, rs376270092, rs376273073, rs376296518, rs376299120, rs376496494, rs376502783, rs376542325, rs376547620, rs376551727, rs376555042, rs376588113, rs376620346, rs376627980, rs376718537, rs376765256, rs376783628, rs376808449, rs376832250, rs376909661, rs376917010, rs376924106, rs376929861, rs376938111, rs376952626, rs376966171, rs377013976, rs377015274, rs377056570, rs377059344, rs377067446, rs377071800, rs377072217, rs377080229, rs377112899, rs377114408, rs377119325, rs377140103, rs377154432, rs377175489, rs377182638, rs377224756, rs377293388, rs377311375, rs377320011, rs377321753, rs377327013, rs377330925, rs377362904, rs377368133, rs377375908, rs377407139, rs377418600, rs377422466, rs377424392, rs377478394, rs377520290, rs377591174, rs377604071, rs377606404, rs377732069, rs377759474, rs377763372, rs387906605, rs397758015, rs397989501, rs527327654, rs527416146, rs527586458, rs527807192, rs527852363, rs527944228, rs527974007, rs528186817, rs528197285, rs528257059, rs528281412, rs528441508, rs528727235, rs528740575, rs528810248, rs528874430, rs529108629, rs529120446, rs529176134, rs529307008, rs529321970, rs529386656, rs529405729, rs529529748, rs529853479, rs530033360, rs530083887, rs530273180, rs530287548, rs530291076, rs530325598, rs530442803, rs530472017, rs530519777, rs530633100, rs530814043, rs530984694, rs531049364, rs531066928, rs531381561, rs531448664, rs531715385, rs531778759, rs531791930, rs531892819, rs531893327, rs531909422, rs532090125, rs532235213, rs532318858, rs532595757, rs532598724, rs532624794, rs532656065, rs532656269, rs533045231, rs533072083, rs533178161, rs533297903, rs533435223, rs533452438, rs533456058, rs533466457, rs533523514, rs533528646, rs533779017, rs533840468, rs533907003, rs533991505, rs534077328, rs534233771, rs534242549, rs534308488, rs534348346, rs534386622, rs534503266, rs534667037, rs534943404, rs535006469, rs535396661, rs535497186, rs535560155, rs535641736, rs535877083, rs535879788, rs535938941, rs536030331, rs536138911, rs536139791, rs536561982, rs536685771, rs536772651, rs536775697, rs537152222, rs537188035, rs537263049, rs537298698, rs537416600, rs537533376, rs537588477, rs537748623, rs537763577, rs537763624, rs538157144, rs538212483, rs538295287, rs538326849, rs538356719, rs538364300, rs538387822, rs538476964, rs538533158, rs538538625, rs538769091, rs538848745, rs538877688, rs538959286, rs539187193, rs539291417, rs539310355, rs539552717, rs539565729, rs539663232, rs539692401, rs539761644, rs539857474, rs539930874, rs540116474, rs540178588, rs540205999, rs540223649, rs540313590, rs540385273, rs540498667, rs540516236, rs540936781, rs541097391, rs541134659, rs541195554, rs541300012, rs541309117, rs541445877, rs541753654, rs541910186, rs541920662, rs542035475, rs542074653, rs542156398, rs542298106, rs542311796, rs542322297, rs542324182, rs542347929, rs542348258, rs542385825, rs542835612, rs543017146, rs543567632, rs543646523, rs543956259, rs544267330, rs544844647, rs544920947, rs544930935, rs545205367, rs545436564, rs545682128, rs545691941, rs545769071, rs545831996, rs545889340, rs546051976, rs546054756, rs546082340, rs546132302, rs546243200, rs546244166, rs546501910, rs546502320, rs546505145, rs546653276, rs546702127, rs546776797, rs546812570, rs546934728, rs546949709, rs546980026, rs547104153, rs547507606, rs547564961, rs547674036, rs547892215, rs547936907, rs548018552, rs548053644, rs548139799, rs548322393, rs548337775, rs548504342, rs548737755, rs548915540, rs549271654, rs549323311, rs549486245, rs549712143, rs549872555, rs550048439, rs550092378, rs550107961, rs550283430, rs550293860, rs550304301, rs550333338, rs550516762, rs550674610, rs550700704, rs550743767, rs550824442, rs550833148, rs550905315, rs551255529, rs551365260, rs551563346, rs551951844, rs551952869, rs551971360, rs552110604, rs552129703, rs552219889, rs552472424, rs552510566, rs552818635, rs553392231, rs553468091, rs553529544, rs553685218, rs553944716, rs554095986, rs554214401, rs554551423, rs554750685, rs555015100, rs555133264, rs555330224, rs555611651, rs555643868, rs555744118, rs555805645, rs555947137, rs556084782, rs556116285, rs556363551, rs556498189, rs556523623, rs556896749, rs557077483, rs557265775, rs557458383, rs557504327, rs557508751, rs557521948, rs557566258, rs557593683, rs557671527, rs557707620, rs557729440, rs557797952, rs557834337, rs557951372, rs558087041, rs558148606, rs558405095, rs558413374, rs558424479, rs558659528, rs558868193, rs559095140, rs559296770, rs559661393, rs559721124, rs559776436, rs559989873, rs560159428, rs560498969, rs560756778, rs560815350, rs560853464, rs560927859, rs561191866, rs561232532, rs561262939, rs561271265, rs561295450, rs561570161, rs561657172, rs561664783, rs561709623, rs561772805, rs561787668, rs561973745, rs561997536, rs562155841, rs562413402, rs562465277, rs562521065, rs562548943, rs562634817, rs563053737, rs563301161, rs563314927, rs563343719, rs563358949, rs563372496, rs563474859, rs563535651, rs563960487, rs563975515, rs564080708, rs564282803, rs564293092, rs564327921, rs564364894, rs564491862, rs564692911, rs564953664, rs565134095, rs565211476, rs565238443, rs565269565, rs565315115, rs565472139, rs565591488, rs565651812, rs565759386, rs565997896, rs566201421, rs566261713, rs566468729, rs566647835, rs566930976, rs566970134, rs567022011, rs567123364, rs567159276, rs567166154, rs567462499, rs567715328, rs567730194, rs567732089, rs567806128, rs568093805, rs568096224, rs568158841, rs568212634, rs568314793, rs568402853, rs568498471, rs568589365, rs569065719, rs569167169, rs569303534, rs569306379, rs569317804, rs569344764, rs569532593, rs569641113, rs569644269, rs569933293, rs570044880, rs570060569, rs570171398, rs570353855, rs570498790, rs570706305, rs570707807, rs570837917, rs570915272, rs570959767, rs571125408, rs571749536, rs571758631, rs571762097, rs571809359, rs571820230, rs572123308, rs572242472, rs572310326, rs572504280, rs573229455, rs573371124, rs573432153, rs573516581, rs573530168, rs573594224, rs574043285, rs574113751, rs574182106, rs574446079, rs574558938, rs574592143, rs574740014, rs574790208, rs574802965, rs574853557, rs575007315, rs575225140, rs575419629, rs575575729, rs575637874, rs575699552, rs575701918, rs575722444, rs575787116, rs575815442, rs575966483, rs576085516, rs576167826, rs576204059, rs576214366, rs576306176, rs576406708, rs576424554, rs576939993, rs576955360, rs577001709, rs577224111, rs577279100, rs577451319, rs577463668, rs577505125, rs577552180, rs577629328, rs578025503, rs578219210, rs578228098, rs730880286, rs745318365, rs745319972, rs745345945, rs745372322, rs745390332, rs745399906, rs745416469, rs745428074, rs745435582, rs745448265, rs745456830, rs745490383, rs745495385, rs745528903, rs745553627, rs745560737, rs745571703, rs745574548, rs745591383, rs745593192, rs745604610, rs745613091, rs745615442, rs745627185, rs745642592, rs745674493, rs745686522, rs745691610, rs745693541, rs745699978, rs745733764, rs745751051, rs745766922, rs745814090, rs745826871, rs745840930, rs745849456, rs745851807, rs745856848, rs745864625, rs745874032, rs745901898, rs745932063, rs745939385, rs745975162, rs745976570, rs745980668, rs746034707, rs746038868, rs746056280, rs746061636, rs746062456, rs746073100, rs746075630, rs746089935, rs746091602, rs746104591, rs746137913, rs746149093, rs746155596, rs746177971, rs746192846, rs746200300, rs746208298, rs746268085, rs746270972, rs746278292, rs746302492, rs746305387, rs746320205, rs746352208, rs746359233, rs746360488, rs746381721, rs746386078, rs746399692, rs746412369, rs746419679, rs746440195, rs746447568, rs746448029, rs746453177, rs746461849, rs746482030, rs746482682, rs746489781, rs746499429, rs746537981, rs746543654, rs746545309, rs746563255, rs746623429, rs746639223, rs746657221, rs746667270, rs746672639, rs746709750, rs746730235, rs746732443, rs746753405, rs746772423, rs746802978, rs746814517, rs746820187, rs746824716, rs746862336, rs746866021, rs746880848, rs746880954, rs746891256, rs746912405, rs746930054, rs746957923, rs746958544, rs746960012, rs747000083, rs747008661, rs747035567, rs747058637, rs747066543, rs747067435, rs747075622, rs747081862, rs747087195, rs747089490, rs747089677, rs747124326, rs747147890, rs747165097, rs747167106, rs747199292, rs747209331, rs747223076, rs747295199, rs747300176, rs747313983, rs747317198, rs747333463, rs747336903, rs747337505, rs747345300, rs747362988, rs747379479, rs747409117, rs747443924, rs747447650, rs747509735, rs747514467, rs747522386, rs747537337, rs747561081, rs747563707, rs747563787, rs747564767, rs747583483, rs747599747, rs747604158, rs747612543, rs747663542, rs747683565, rs747689845, rs747699511, rs747720093, rs747726023, rs747736151, rs747743935, rs747745632, rs747756779, rs747769277, rs747786855, rs747805796, rs747814933, rs747844780, rs747893570, rs747912732, rs747913566, rs747916612, rs747928157, rs747932927, rs747975359, rs748001359, rs748019757, rs748037096, rs748066277, rs748075413, rs748084837, rs748086542, rs748087213, rs748132559, rs748136659, rs748171177, rs748188120, rs748197616, rs748240180, rs748250686, rs748253916, rs748272722, rs748294012, rs748294033, rs748299789, rs748310430, rs748311145, rs748312917, rs748314716, rs748342347, rs748368214, rs748394489, rs748398314, rs748414399, rs748425294, rs748436301, rs748438558, rs748439088, rs748453507, rs748466015, rs748469515, rs748470372, rs748471791, rs748477957, rs748485497, rs748496940, rs748562387, rs748563492, rs748573760, rs748579122, rs748584338, rs748631619, rs748661027, rs748661346, rs748676695, rs748681958, rs748683397, rs748696361, rs748715122, rs748723344, rs748726390, rs748736375, rs748742964, rs748745332, rs748746331, rs748788667, rs748808396, rs748824005, rs748842408, rs748846808, rs748854484, rs748895203, rs748897806, rs748904295, rs748914036, rs748940147, rs748944570, rs748960277, rs748986531, rs748987351, rs749004650, rs749029876, rs749044141, rs749044268, rs749065577, rs749077987, rs749099683, rs749145831, rs749165316, rs749206499, rs749211169, rs749211733, rs749222993, rs749224160, rs749235923, rs749245985, rs749256529, rs749264275, rs749283784, rs749295783, rs749328156, rs749339404, rs749361700, rs749365655, rs749388962, rs749410408, rs749425003, rs749426366, rs749439721, rs749457528, rs749458165, rs749491360, rs749512247, rs749546778, rs749549271, rs749549682, rs749559315, rs749564041, rs749575902, rs749579224, rs749586805, rs749588145, rs749607047, rs749628987, rs749632568, rs749652959, rs749666126, rs749720530, rs749722600, rs749738987, rs749754255, rs749758724, rs749774766, rs749788045, rs749808049, rs749812437, rs749814590, rs749819912, rs749854371, rs749868623, rs749870307, rs749871331, rs749880733, rs749897901, rs749906612, rs749913529, rs749916706, rs749919304, rs749961187, rs749973992, rs750030849, rs750041290, rs750062806, rs750065344, rs750087257, rs750087961, rs750094690, rs750102430, rs750105446, rs750113696, rs750118657, rs750126703, rs750136702, rs750153731, rs750158254, rs750167923, rs750194337, rs750197069, rs750247343, rs750254374, rs750262029, rs750288565, rs750322094, rs750327203, rs750336160, rs750336865, rs750342985, rs750365281, rs750379606, rs750401919, rs750411372, rs750427069, rs750445747, rs750459749, rs750491300, rs750493362, rs750602621, rs750612292, rs750637776, rs750638018, rs750649001, rs750652908, rs750662099, rs750672661, rs750673740, rs750690448, rs750718273, rs750746847, rs750754999, rs750758403, rs750768151, rs750773012, rs750798035, rs750831829, rs750832231, rs750841023, rs750850246, rs750891753, rs750898021, rs750903788, rs750925861, rs750930596, rs750956651, rs750984824, rs750996496, rs750999602, rs751029855, rs751041471, rs751049808, rs751051251, rs751052962, rs751107178, rs751139649, rs751144324, rs751158229, rs751159659, rs751163661, rs751171159, rs751176402, rs751212883, rs751220645, rs751234325, rs751237827, rs751242134, rs751258157, rs751266261, rs751278167, rs751325519, rs751327846, rs751368176, rs751405989, rs751406491, rs751443456, rs751465325, rs751473288, rs751484538, rs751496071, rs751509041, rs751523859, rs751525439, rs751535193, rs751543889, rs751555145, rs751562780, rs751568299, rs751571665, rs751585207, rs751599077, rs751624217, rs751656140, rs751663795, rs751691247, rs751729260, rs751738877, rs751750490, rs751754397, rs751775822, rs751795715, rs751800539, rs751809454, rs751815309, rs751818968, rs751875825, rs751883312, rs751885031, rs751902809, rs751904594, rs751909991, rs751947303, rs751956535, rs751962837, rs752005035, rs752010882, rs752013287, rs752023667, rs752040536, rs752042725, rs752044925, rs752048155, rs752070397, rs752094824, rs752095288, rs752095348, rs752101927, rs752128750, rs752135325, rs752151347, rs752194611, rs752204055, rs752218472, rs752256370, rs752276973, rs752277081, rs752279477, rs752294739, rs752294842, rs752298803, rs752325854, rs752339003, rs752366653, rs752373994, rs752375803, rs752380571, rs752390924, rs752434413, rs752440706, rs752445437, rs752451246, rs752468707, rs752495777, rs752531272, rs752533521, rs752539670, rs752558942, rs752562418, rs752563213, rs752605136, rs752610466, rs752617339, rs752668273, rs752677672, rs752688217, rs752705478, rs752751473, rs752776372, rs752779393, rs752791209, rs752837490, rs752848483, rs752855524, rs752868048, rs752875695, rs752877416, rs752896767, rs752938355, rs752959876, rs752967088, rs752967242, rs752997361, rs753001851, rs753011870, rs753022607, rs753031316, rs753038148, rs753055370, rs753058265, rs753090174, rs753127368, rs753133787, rs753145434, rs753169865, rs753173025, rs753185460, rs753190309, rs753192872, rs753237431, rs753252649, rs753283851, rs753300258, rs753303914, rs753326196, rs753326773, rs753346985, rs753350146, rs753359572, rs753368984, rs753377409, rs753380874, rs753398970, rs753403021, rs753421344, rs753428227, rs753439412, rs753441096, rs753443085, rs753514884, rs753520245, rs753523507, rs753531772, rs753560637, rs753607775, rs753618163, rs753632833, rs753671649, rs753671743, rs753675795, rs753697263, rs753699649, rs753702106, rs753705135, rs753757948, rs753759973, rs753761607, rs753788074, rs753789756, rs753791461, rs753797661, rs753817672, rs753819164, rs753832160, rs753853134, rs753859648, rs753864333, rs753878104, rs753913795, rs753927066, rs753969527, rs753980920, rs753989945, rs753996076, rs754008525, rs754017983, rs754025505, rs754074288, rs754075625, rs754089306, rs754090292, rs754097470, rs754100542, rs754105784, rs754120044, rs754126969, rs754171960, rs754182812, rs754184572, rs754214131, rs754241995, rs754248833, rs754251276, rs754253382, rs754267046, rs754280379, rs754296949, rs754311367, rs754315799, rs754341326, rs754404741, rs754432479, rs754469339, rs754474023, rs754477063, rs754496023, rs754523611, rs754534739, rs754548056, rs754559628, rs754566583, rs754578634, rs754593655, rs754600794, rs754601025, rs754613199, rs754627931, rs754648569, rs754689393, rs754705432, rs754721009, rs754738046, rs754746251, rs754747575, rs754770784, rs754785283, rs754791755, rs754801068, rs754808134, rs754825515, rs754832776, rs754833151, rs754863576, rs754865301, rs754878951, rs754908793, rs754928076, rs754952251, rs754957380, rs754979304, rs754999451, rs755015778, rs755030947, rs755038055, rs755042419, rs755047832, rs755049255, rs755055345, rs755074889, rs755081465, rs755105730, rs755141056, rs755178152, rs755216080, rs755219773, rs755230641, rs755260022, rs755278424, rs755293317, rs755299317, rs755300487, rs755301783, rs755340663, rs755361003, rs755422001, rs755422553, rs755452562, rs755454039, rs755460071, rs755466721, rs755495037, rs755521788, rs755523709, rs755524336, rs755526345, rs755544962, rs755546809, rs755574496, rs755580418, rs755613516, rs755625439, rs755638917, rs755640301, rs755647921, rs755662599, rs755669902, rs755721301, rs755746822, rs755752615, rs755764888, rs755769656, rs755840352, rs755848206, rs755851289, rs755862446, rs755870971, rs755879578, rs755912565, rs755922713, rs755925428, rs755943792, rs755947014, rs755952731, rs755954867, rs755961162, rs755997399, rs756005565, rs756037004, rs756069201, rs756083106, rs756083176, rs756107860, rs756112109, rs756112941, rs756134134, rs756137791, rs756141131, rs756151866, rs756152741, rs756157619, rs756173722, rs756182340, rs756201098, rs756212017, rs756217590, rs756244154, rs756245079, rs756257383, rs756261610, rs756289056, rs756320116, rs756323013, rs756349604, rs756368901, rs756371301, rs756379992, rs756403965, rs756411440, rs756417734, rs756421438, rs756435479, rs756448439, rs756448843, rs756451620, rs756466146, rs756470588, rs756501541, rs756547889, rs756592453, rs756652262, rs756658685, rs756660959, rs756684122, rs756689084, rs756690615, rs756695158, rs756697964, rs756703259, rs756726537, rs756726621, rs756731451, rs756732093, rs756771873, rs756779858, rs756785467, rs756803935, rs756807873, rs756820426, rs756850827, rs756865365, rs756875260, rs756897026, rs756905816, rs756911254, rs756921470, rs756933967, rs756995907, rs757005909, rs757016772, rs757040383, rs757063728, rs757080390, rs757102252, rs757109964, rs757123441, rs757132559, rs757165321, rs757170549, rs757189228, rs757192859, rs757193272, rs757249668, rs757265727, rs757267688, rs757308020, rs757338790, rs757338793, rs757349308, rs757361750, rs757397779, rs757406252, rs757415879, rs757416758, rs757417079, rs757434867, rs757457052, rs757457870, rs757498533, rs757528046, rs757573659, rs757578754, rs757590932, rs757592677, rs757599008, rs757600293, rs757643340, rs757650870, rs757662320, rs757688782, rs757691011, rs757715378, rs757717493, rs757723447, rs757733862, rs757739145, rs757747220, rs757772499, rs757807903, rs757816953, rs757837175, rs757846546, rs757858567, rs757869415, rs757874471, rs757882779, rs757895615, rs757911580, rs757929353, rs757941058, rs757958743, rs757972415, rs757972649, rs757974035, rs757976973, rs757993495, rs758039219, rs758045458, rs758056154, rs758069627, rs758085429, rs758108749, rs758155857, rs758161225, rs758165042, rs758174829, rs758184707, rs758217227, rs758218963, rs758221970, rs758243811, rs758256976, rs758267473, rs758306555, rs758316899, rs758321413, rs758345759, rs758373712, rs758378244, rs758379874, rs758407585, rs758433395, rs758459208, rs758487727, rs758488826, rs758497318, rs758497666, rs758503378, rs758512417, rs758600338, rs758603777, rs758623851, rs758667595, rs758672611, rs758686564, rs758686979, rs758715478, rs758736090, rs758764796, rs758768519, rs758777097, rs758781363, rs758814805, rs758824046, rs758840116, rs758878397, rs758886532, rs758900783, rs758925670, rs758940600, rs758941226, rs758943035, rs758943922, rs758959969, rs758985027, rs758993088, rs758994478, rs759035638, rs759039839, rs759047842, rs759063140, rs759096419, rs759107598, rs759118253, rs759123550, rs759136317, rs759148648, rs759156344, rs759163684, rs759182880, rs759186064, rs759200519, rs759204970, rs759227524, rs759246684, rs759248490, rs759275431, rs759277114, rs759284154, rs759297874, rs759318378, rs759324245, rs759325342, rs759349429, rs759356363, rs759377024, rs759445274, rs759455445, rs759462975, rs759474214, rs759475299, rs759485606, rs759485933, rs759491576, rs759505073, rs759534671, rs759543265, rs759579761, rs759601440, rs759634066, rs759638330, rs759644973, rs759656415, rs759673044, rs759684357, rs759689346, rs759690085, rs759691565, rs759691668, rs759722738, rs759793762, rs759811848, rs759813336, rs759830610, rs759843878, rs759858956, rs759864990, rs759875270, rs759938995, rs759949767, rs759964343, rs759986908, rs759990189, rs760027778, rs760029115, rs760029651, rs760072405, rs760093030, rs760096740, rs760133967, rs760209173, rs760213677, rs760218941, rs760220232, rs760234061, rs760252639, rs760262442, rs760308128, rs760318221, rs760362837, rs760365865, rs760366959, rs760369601, rs760384169, rs760414178, rs760423065, rs760429587, rs760438915, rs760445665, rs760460054, rs760483961, rs760501287, rs760512889, rs760539042, rs760539711, rs760586909, rs760595696, rs760626878, rs760633957, rs760698821, rs760732148, rs760735053, rs760755454, rs760755855, rs760758808, rs760759581, rs760773288, rs760834801, rs760840151, rs760854147, rs760854997, rs760890354, rs760891216, rs760942789, rs760943829, rs760945786, rs760949132, rs760968373, rs761015877, rs761029751, rs761042475, rs761046570, rs761060553, rs761077714, rs761119594, rs761128072, rs761145315, rs761155678, rs761159131, rs761163966, rs761171654, rs761182276, rs761224941, rs761234904, rs761239910, rs761264078, rs761310797, rs761318158, rs761335737, rs761348026, rs761348227, rs761361407, rs761377372, rs761393259, rs761422365, rs761431565, rs761504629, rs761514106, rs761532701, rs761546996, rs761557801, rs761576147, rs761592627, rs761593341, rs761604061, rs761630796, rs761631566, rs761683808, rs761731850, rs761770920, rs761791778, rs761803478, rs761810985, rs761833008, rs761859633, rs761871758, rs761872531, rs761908265, rs761910447, rs761927109, rs761936886, rs761970567, rs761983104, rs762006365, rs762008458, rs762020991, rs762030119, rs762039567, rs762065822, rs762084565, rs762087456, rs762098220, rs762103468, rs762118252, rs762162799, rs762167473, rs762179156, rs762189891, rs762193389, rs762232738, rs762235520, rs762251627, rs762257078, rs762266379, rs762303200, rs762379640, rs762394182, rs762416219, rs762440236, rs762444440, rs762459367, rs762460240, rs762466199, rs762467298, rs762471976, rs762488813, rs762495469, rs762497670, rs762517844, rs762544140, rs762568459, rs762590898, rs762604188, rs762609397, rs762641131, rs762647546, rs762650045, rs762651622, rs762652425, rs762661289, rs762668241, rs762676990, rs762685342, rs762720564, rs762720729, rs762727577, rs762739215, rs762746985, rs762823979, rs762828291, rs762840197, rs762858090, rs762888285, rs762904976, rs762951567, rs762954932, rs762979664, rs763000800, rs763013821, rs763046110, rs763052032, rs763064296, rs763064528, rs763087515, rs763118683, rs763147984, rs763148429, rs763152955, rs763157620, rs763163699, rs763189512, rs763196354, rs763211535, rs763213748, rs763230451, rs763239796, rs763272653, rs763298017, rs763319961, rs763328862, rs763329165, rs763339609, rs763341719, rs763386437, rs763402171, rs763409219, rs763418006, rs763456872, rs763457148, rs763486900, rs763488846, rs763515053, rs763547024, rs763602386, rs763652135, rs763677512, rs763681008, rs763699621, rs763712845, rs763713750, rs763724695, rs763745712, rs763751979, rs763764765, rs763775614, rs763778553, rs763779811, rs763793958, rs763805385, rs763814269, rs763836823, rs763839037, rs763849346, rs763852342, rs763870721, rs763878720, rs763879839, rs763883535, rs763909642, rs763913870, rs763925786, rs763932586, rs763942715, rs763966860, rs763990228, rs763992705, rs763996830, rs764004713, rs764015902, rs764022247, rs764023236, rs764049130, rs764104288, rs764114847, rs764145071, rs764172198, rs764185830, rs764192458, rs764200101, rs764237628, rs764257958, rs764284896, rs764297570, rs764332525, rs764335167, rs764349416, rs764349883, rs764353299, rs764369727, rs764403896, rs764408920, rs764413334, rs764418492, rs764424501, rs764425518, rs764468586, rs764504901, rs764505018, rs764513815, rs764520235, rs764521476, rs764592262, rs764600992, rs764605074, rs764672591, rs764677528, rs764706786, rs764729722, rs764744426, rs764761995, rs764789081, rs764797254, rs764805924, rs764808931, rs764816904, rs764831575, rs764849536, rs764852010, rs764853740, rs764866743, rs764884715, rs764887617, rs764898053, rs764909279, rs764914098, rs764992328, rs764993729, rs764994717, rs765027608, rs765033771, rs765034336, rs765071379, rs765082791, rs765110351, rs765113230, rs765119803, rs765127890, rs765130674, rs765144700, rs765158231, rs765171880, rs765174446, rs765176554, rs765243601, rs765253046, rs765277244, rs765289524, rs765309908, rs765321512, rs765324289, rs765336708, rs765353150, rs765378487, rs765400926, rs765472686, rs765478839, rs765488636, rs765497427, rs765509289, rs765527332, rs765529435, rs765536524, rs765607398, rs765644969, rs765649101, rs765657876, rs765663530, rs765667654, rs765699235, rs765755720, rs765799373, rs765844320, rs765868969, rs765883249, rs765926458, rs765935011, rs765967106, rs765974658, rs765987813, rs766004888, rs766033329, rs766048945, rs766058466, rs766092421, rs766132232, rs766134374, rs766139687, rs766144895, rs766164278, rs766168993, rs766173087, rs766197750, rs766218397, rs766220629, rs766254851, rs766272373, rs766282333, rs766294413, rs766298049, rs766316585, rs766367031, rs766402307, rs766407162, rs766437935, rs766453199, rs766457903, rs766469119, rs766470933, rs766489690, rs766515834, rs766534507, rs766547317, rs766549680, rs766562439, rs766562767, rs766577110, rs766585624, rs766627776, rs766633326, rs766634550, rs766639277, rs766650302, rs766657520, rs766659965, rs766686107, rs766714993, rs766728190, rs766740035, rs766782830, rs766797206, rs766824798, rs766852847, rs766863260, rs766867664, rs766891988, rs766893369, rs766902987, rs766906830, rs766920607, rs766931219, rs766931721, rs767030746, rs767030806, rs767036698, rs767040751, rs767108895, rs767119241, rs767122729, rs767147875, rs767174168, rs767182886, rs767190147, rs767198169, rs767210608, rs767218959, rs767241808, rs767267319, rs767279107, rs767282486, rs767287228, rs767296951, rs767309650, rs767314130, rs767319580, rs767322259, rs767379643, rs767379856, rs767387822, rs767414284, rs767429430, rs767452404, rs767460595, rs767464814, rs767539005, rs767575273, rs767581948, rs767643638, rs767647070, rs767653974, rs767702485, rs767728566, rs767751722, rs767752294, rs767778157, rs767779416, rs767803194, rs767805875, rs767808680, rs767837679, rs767851527, rs767856734, rs767865289, rs767866569, rs767875598, rs767902653, rs767909655, rs767945940, rs767964011, rs768006932, rs768013198, rs768014269, rs768028370, rs768045464, rs768096806, rs768117981, rs768128088, rs768138747, rs768148366, rs768157359, rs768168895, rs768172048, rs768176124, rs768191117, rs768193631, rs768202310, rs768239091, rs768247399, rs768256600, rs768270404, rs768325148, rs768326843, rs768328282, rs768328793, rs768362979, rs768391947, rs768397152, rs768464427, rs768486583, rs768493397, rs768522122, rs768549775, rs768562783, rs768567887, rs768570037, rs768574749, rs768585734, rs768588683, rs768589924, rs768597948, rs768604395, rs768651065, rs768669948, rs768672251, rs768678506, rs768709709, rs768747694, rs768747793, rs768771610, rs768807182, rs768809924, rs768816977, rs768818662, rs768819741, rs768825668, rs768834688, rs768838978, rs768861182, rs768883178, rs768886151, rs768904830, rs768912143, rs768964773, rs768967855, rs768981667, rs769000647, rs769023345, rs769046017, rs769049495, rs769050419, rs769051596, rs769053953, rs769054699, rs769057326, rs769083633, rs769086974, rs769125953, rs769146601, rs769163033, rs769163951, rs769176544, rs769188187, rs769229774, rs769232047, rs769232572, rs769238884, rs769244254, rs769294243, rs769297158, rs769300577, rs769310826, rs769328539, rs769381197, rs769394794, rs769398524, rs769451600, rs769467041, rs769470125, rs769488190, rs769517796, rs769549619, rs769613998, rs769652554, rs769709093, rs769718406, rs769727653, rs769745203, rs769750167, rs769775613, rs769792150, rs769794129, rs769795315, rs769808015, rs769808777, rs769815094, rs769833467, rs769861093, rs769870600, rs769875186, rs769882067, rs769929335, rs769933448, rs769936238, rs769937344, rs769954836, rs769962437, rs769972336, rs769976117, rs769990881, rs770021855, rs770039099, rs770048390, rs770049663, rs770062578, rs770097088, rs770114067, rs770127444, rs770132469, rs770135330, rs770143917, rs770150460, rs770153660, rs770180997, rs770216458, rs770219119, rs770222113, rs770229628, rs770244353, rs770291453, rs770291739, rs770335015, rs770343314, rs770343317, rs770356662, rs770362046, rs770370096, rs770377315, rs770385674, rs770386098, rs770409173, rs770413403, rs770420738, rs770425540, rs770437526, rs770439598, rs770442694, rs770443613, rs770500830, rs770527290, rs770572781, rs770615701, rs770638451, rs770645640, rs770650292, rs770664696, rs770684335, rs770684431, rs770709893, rs770733964, rs770753268, rs770755232, rs770758199, rs770769867, rs770802348, rs770851775, rs770876009, rs770882543, rs770902019, rs770912721, rs770921918, rs770928059, rs770945975, rs770947487, rs770956294, rs771007419, rs771041852, rs771066156, rs771080909, rs771101946, rs771119509, rs771137614, rs771171113, rs771171141, rs771182208, rs771196320, rs771271966, rs771323471, rs771346243, rs771354522, rs771360344, rs771382534, rs771394226, rs771442512, rs771494426, rs771498755, rs771499958, rs771506898, rs771508110, rs771509495, rs771549871, rs771569809, rs771587525, rs771599775, rs771619226, rs771635481, rs771660179, rs771669788, rs771692030, rs771717980, rs771744912, rs771747446, rs771747586, rs771793166, rs771823850, rs771825646, rs771865012, rs771892535, rs771915020, rs771933012, rs771935183, rs771968312, rs771981751, rs771985723, rs771985996, rs772006018, rs772008402, rs772025019, rs772038084, rs772058298, rs772063851, rs772089296, rs772093867, rs772113492, rs772142154, rs772151378, rs772173835, rs772221698, rs772240998, rs772249969, rs772285932, rs772294210, rs772309603, rs772320748, rs772340918, rs772343130, rs772381373, rs772410899, rs772457877, rs772466271, rs772467325, rs772473478, rs772474152, rs772497066, rs772510427, rs772548595, rs772554764, rs772557359, rs772573211, rs772587839, rs772646598, rs772662324, rs772739066, rs772745105, rs772752222, rs772756089, rs772768581, rs772787055, rs772797593, rs772829302, rs772857154, rs772868609, rs772881674, rs772888814, rs772900092, rs772921667, rs772964665, rs772966335, rs773013817, rs773024179, rs773034718, rs773044735, rs773052563, rs773063184, rs773083989, rs773084288, rs773111677, rs773128052, rs773131116, rs773146110, rs773180240, rs773198409, rs773201784, rs773211645, rs773229775, rs773262069, rs773263825, rs773265287, rs773272175, rs773283791, rs773290495, rs773316205, rs773337576, rs773358496, rs773361013, rs773363147, rs773379113, rs773394779, rs773400450, rs773412676, rs773414949, rs773478295, rs773489571, rs773509242, rs773516071, rs773546725, rs773559507, rs773612591, rs773655454, rs773678153, rs773764715, rs773765987, rs773776559, rs773781137, rs773792647, rs773815805, rs773820875, rs773824386, rs773844484, rs773855741, rs773875374, rs773878366, rs773897194, rs773906373, rs773906492, rs773908614, rs773929598, rs773938350, rs773951558, rs773990981, rs774072795, rs774085895, rs774109790, rs774120930, rs774138233, rs774152545, rs774158191, rs774162615, rs774177376, rs774179356, rs774196875, rs774234419, rs774237237, rs774268984, rs774290384, rs774310359, rs774311385, rs774332349, rs774337733, rs774344593, rs774354465, rs774359076, rs774363321, rs774364814, rs774375374, rs774397997, rs774414690, rs774418743, rs774422294, rs774423906, rs774430763, rs774431651, rs774433860, rs774436727, rs774452645, rs774470412, rs774486289, rs774502421, rs774502545, rs774513456, rs774514157, rs774535789, rs774540354, rs774563768, rs774591461, rs774633301, rs774664199, rs774695454, rs774788540, rs774810502, rs774827245, rs774849277, rs774850698, rs774851092, rs774880724, rs774890570, rs774897138, rs774912547, rs774927826, rs774931257, rs774937909, rs774978554, rs774985279, rs774988069, rs775012215, rs775015236, rs775028966, rs775041864, rs775060518, rs775081447, rs775105779, rs775105823, rs775107475, rs775125751, rs775127972, rs775160884, rs775195789, rs775223715, rs775247533, rs775270402, rs775274847, rs775287294, rs775288140, rs775311082, rs775327388, rs775360443, rs775369583, rs775397461, rs775400801, rs775433952, rs775437783, rs775457190, rs775477397, rs775483677, rs775496394, rs775503849, rs775565383, rs775573272, rs775583852, rs775603589, rs775612520, rs775619280, rs775631094, rs775631144, rs775677172, rs775695539, rs775698812, rs775700769, rs775708194, rs775718981, rs775734476, rs775756645, rs775810281, rs775817429, rs775822314, rs775826866, rs775842043, rs775852765, rs775869590, rs775946987, rs775953241, rs775960525, rs775970291, rs775971080, rs775985967, rs775987562, rs775989995, rs776003670, rs776005514, rs776014645, rs776025975, rs776048822, rs776084569, rs776093550, rs776130597, rs776134707, rs776158209, rs776176164, rs776181254, rs776204399, rs776206530, rs776209916, rs776229982, rs776234195, rs776255321, rs776261777, rs776269680, rs776270089, rs776289979, rs776295719, rs776296194, rs776342984, rs776344680, rs776346090, rs776367301, rs776372390, rs776377027, rs776389755, rs776397296, rs776433840, rs776439929, rs776448116, rs776459582, rs776493858, rs776525355, rs776540069, rs776554550, rs776560133, rs776594477, rs776609368, rs776617605, rs776655855, rs776664765, rs776737160, rs776740643, rs776754633, rs776766676, rs776770963, rs776805869, rs776817787, rs776821489, rs776832599, rs776841521, rs776845875, rs776880874, rs776881019, rs776926744, rs776932495, rs776935349, rs776954595, rs776970931, rs776999028, rs777003245, rs777005493, rs777041901, rs777042465, rs777070282, rs777096436, rs777097228, rs777100164, rs777110195, rs777116088, rs777140960, rs777149309, rs777157837, rs777190072, rs777198050, rs777199947, rs777207329, rs777216448, rs777227959, rs777235438, rs777260484, rs777265238, rs777328862, rs777371275, rs777372646, rs777387484, rs777395967, rs777401461, rs777404443, rs777404782, rs777405256, rs777424175, rs777427242, rs777470232, rs777472432, rs777496090, rs777497919, rs777499414, rs777514662, rs777515869, rs777547951, rs777586046, rs777594161, rs777607211, rs777629492, rs777639695, rs777669254, rs777677195, rs777688640, rs777688853, rs777706512, rs777769408, rs777787168, rs777799240, rs777808564, rs777837431, rs777855824, rs777855825, rs777865274, rs777867555, rs777908742, rs777945918, rs777946713, rs777964644, rs777970970, rs777981069, rs778002076, rs778007718, rs778073185, rs778085630, rs778098950, rs778102512, rs778104401, rs778107399, rs778113192, rs778127992, rs778139512, rs778142148, rs778146776, rs778152277, rs778165989, rs778166491, rs778167520, rs778171366, rs778191454, rs778202910, rs778203075, rs778203536, rs778205818, rs778250514, rs778253534, rs778333517, rs778344373, rs778344378, rs778360438, rs778362922, rs778366245, rs778442431, rs778443262, rs778458222, rs778509221, rs778520263, rs778560986, rs778581465, rs778622599, rs778628467, rs778646370, rs778647757, rs778670753, rs778689285, rs778725976, rs778731762, rs778732630, rs778736589, rs778750758, rs778758419, rs778767229, rs778769357, rs778777140, rs778791929, rs778826112, rs778830448, rs778830879, rs778832141, rs778839465, rs778845814, rs778855571, rs778896185, rs778899489, rs778923606, rs778942747, rs778958806, rs779008142, rs779034671, rs779037650, rs779045514, rs779045670, rs779060834, rs779072673, rs779103865, rs779113637, rs779114871, rs779142959, rs779146592, rs779183856, rs779187823, rs779217841, rs779218186, rs779236634, rs779237238, rs779284727, rs779293231, rs779298653, rs779304674, rs779308418, rs779313417, rs779318167, rs779338314, rs779364669, rs779386087, rs779401732, rs779416907, rs779447295, rs779483235, rs779488229, rs779489933, rs779525150, rs779538291, rs779542185, rs779587550, rs779608731, rs779671625, rs779676784, rs779687634, rs779726420, rs779727004, rs779740181, rs779759714, rs779763870, rs779764597, rs779766914, rs779790020, rs779790595, rs779794749, rs779808573, rs779814851, rs779828119, rs779854839, rs779875751, rs779877790, rs779883488, rs779889882, rs779898174, rs779942952, rs779970746, rs779971261, rs779987695, rs779995041, rs780019564, rs780036156, rs780045575, rs780052490, rs780055855, rs780113498, rs780130738, rs780133217, rs780148621, rs780153876, rs780155029, rs780170138, rs780216735, rs780245681, rs780249495, rs780258007, rs780260715, rs780261665, rs780265031, rs780281438, rs780289128, rs780304202, rs780319571, rs780343194, rs780361189, rs780377676, rs780392345, rs780404818, rs780413417, rs780434802, rs780439627, rs780452666, rs780454893, rs780461526, rs780472824, rs780488851, rs780527262, rs780602305, rs780603922, rs780608064, rs780623622, rs780633298, rs780651737, rs780659008, rs780659125, rs780661798, rs780694249, rs780696923, rs780701065, rs780704730, rs780710505, rs780714666, rs780724100, rs780729722, rs780748807, rs780772422, rs780780341, rs780806207, rs780815829, rs780821145, rs780821302, rs780822414, rs780823886, rs780841835, rs780853281, rs780864479, rs780868464, rs780897658, rs780909449, rs780970538, rs780996042, rs780999290, rs781025123, rs781038524, rs781055082, rs781071813, rs781094491, rs781101654, rs781105495, rs781120329, rs781144604, rs781170835, rs781189895, rs781213436, rs781220998, rs781248735, rs781251704, rs781259785, rs781260864, rs781281946, rs781282319, rs781308378, rs781342109, rs781357566, rs781358537, rs781364388, rs781385246, rs781393824, rs781411899, rs781424029, rs781460249, rs781469394, rs781478312, rs781492923, rs781515651, rs781520685, rs781524509, rs781537284, rs781567189, rs781574940, rs781589201, rs781598212, rs781606260, rs781609946, rs781613253, rs781625285, rs781666715, rs781667737, rs781670078, rs781689640, rs781705982, rs781720055, rs781739537, rs781765506, rs781780574, rs781780768, VAR_001809, VAR_001812, VAR_001813, VAR_001814, VAR_001815, VAR_001816, VAR_001817, VAR_001818, VAR_001818, VAR_001819, VAR_001820, VAR_001821, VAR_001822, VAR_001823, VAR_001825, VAR_001826, VAR_001827, VAR_001828, VAR_001830, VAR_001831, VAR_001832, VAR_001833, VAR_001834, VAR_001835, VAR_001837, VAR_011160, VAR_011161, VAR_011162, VAR_011163, VAR_011164, VAR_011165, VAR_011166, VAR_011167, VAR_011168, VAR_011169, VAR_011170, VAR_011171, VAR_011172, VAR_011173, VAR_011174, VAR_011175, VAR_011176, VAR_011176, VAR_011177, VAR_011178, VAR_011179, VAR_011180, VAR_011181, VAR_011182, VAR_011183, VAR_011184, VAR_011185, VAR_011186, VAR_011187, VAR_011188, VAR_011189, VAR_011190, VAR_011191, VAR_011192, VAR_011193, VAR_011194, VAR_011195, VAR_011196, VAR_011197, VAR_011198, VAR_011199, VAR_011200, VAR_015519, VAR_015520, VAR_035740, VAR_035741, VAR_035742, VAR_048765, VAR_064994, VAR_064995, VAR_064996, VAR_064997, VAR_064998, VAR_064999, VAR_065000, and VAR_065001.

[0400] In one example, the guide RNA used in the present disclosure may comprise at least one 20 nucleotide (nt) target nucleic acid sequence listed in Table 5. Provided in Table 5 are the gene symbol and the sequence identifier of the gene (Gene SEQ ID NO), the gene sequence including 1-5 kilobase pairs upstream and/or downstream of the target gene (Extended Gene SEQ ID NO), and the 20 nt target nucleic acid sequence (20 nt Target Sequence SEQ ID NO). In the sequence listing the respective target gene, the strand for targeting the gene (noted by a (+) strand or (−) strand in the sequence listing), the associated PAM type and the PAM sequence are described for each of the 20 nt target nucleic acid sequences (SEQ ID NO: 5305-33,088). It is understood in the art that the spacer sequence, where “T” is “U,” may be an RNA sequence corresponding to the 20 nt sequences listed in Table 5.

TABLE 5
Nucleic Acid Sequences

| | Gene SEQ | Extended Gene | 20 nt Target Sequence |
|---|---|---|---|
| Gene Symbol | ID NO | SEQ ID NO | SEQ ID NO |
| COL7A1 | 5303 | 5304 | 5305-33,088 |

[0401] In one example, the guide RNA used in the present disclosure may comprise at least one spacer sequence that, where “T” is “U”, may be an RNA sequence corresponding to a 20 nucleotide (nt) target sequence such as, but not limited to, any of SEQ ID NO: 5305-33,088.

[0402] In one example, the guide RNA used in the present disclosure may comprise at least one spacer sequence which, where “T” is “U,” is an RNA sequence corresponding to the 20 nt sequences such as, but not limited to, any of SEQ ID NO: 5305-33,088.

[0403] In one example, a guide RNA may comprise a 20 nucleotide (nt) target nucleic acid sequence associated with the PAM type such as, but not limited to, NAAAAC, NNAGAAW, NNGRRT, NNNNGHTT, NRG, or YTN. As a non-limiting example, the 20 nt target nucleic acid sequence for a specific target gene and a specific PAM type may be, where “T” is “U,” the RNA sequence corresponding to any one of the 20 nt nucleic acid sequences in Table 6.

TABLE 6
Nucleic Acid Sequences by PAM Type

| | PAM: | | PAM: | | | |
|---|---|---|---|---|---|---|
| | NAAAAC | PAM: | NNGRRT | PAM: | | |
| | 20 nt Target | NNAGAAW | 20 nt Target | NNNNGHTT | PAM: NRG | PAM: YTN |
| | Nucleic | 20 nt Target | Nucleic | 20 nt Target | 20 nt Target | 20 nt Target |
| Gene | Acid SEQ | Nucleic Acid | Acid SEQ | Nucleic Acid | Nucleic Acid | Nucleic Acid |
| Symbol | ID NO | SEQ ID NO | ID NO | SEQ ID NO | SEQ ID NO | SEQ ID NO |
| COL7A1 | 5305-5329 | 5330-5462 | 5463-6990 | 6991-7470 | 7471-23,594 | 23,595-33,088 |

[0404] In one example, a guide RNA may comprise a 20 nucleotide (nt) target nucleic acid sequence associated with the YTN PAM type. As a non-limiting example, the 20 nt target nucleic acid sequence for a specific target gene may comprise a 20 nt core sequence where the 20 nt core sequence, where “T” is “U,” may be the RNA sequence corresponding to SEQ ID NO: 23,595-33,088. As another non-limiting example, the 20 nt target nucleic acid sequence for a specific target gene may comprise a core sequence where the core sequence, where “T” is “U,” may be a fragment, segment or region of the RNA sequence corresponding to any of SEQ ID NO: 23,595-33,088.

### VI. OTHER THERAPEUTIC APPROACHES

[0405] Gene editing can be conducted using nucleases engineered to target specific sequences. To date there are four major types of nucleases: meganucleases and their derivatives, zinc finger nucleases (ZFNs), transcription activator like effector nucleases (TALENs), and CRISPR-Cas9 nuclease systems. The nuclease platforms vary in difficulty of design, targeting density and mode of action, particularly as the specificity of ZFNs and TALENs is through protein-DNA interactions, while RNA-DNA interactions primarily guide Cas9.

[0406] CRISPR endonucleases, such as Cas9, can be used in the methods of the present disclosure. However, the teachings described herein, such as therapeutic target sites, could be applied to other forms of endonucleases, such as ZFNs, TALENs, HEs, or MegaTALs, or using combinations of nucleases. However, in order to apply the teachings of the present disclosure to such endonucleases, one would need to, among other things, engineer proteins directed to the specific target sites.

[0407] Additional binding domains can be fused to the Cas9 protein to increase specificity. The target sites of these constructs would map to the identified gRNA specified site, but would require additional binding motifs, such as for a zinc finger domain. In the case of Mega-TAL, a meganuclease can be fused to a TALE DNA-binding domain. The meganuclease domain can increase specificity and provide the cleavage. Similarly, inactivated or dead Cas9 (dCas9) can be fused to a cleavage domain and require the sgRNA/Cas9 target site and adjacent binding site for the fused DNA-binding domain. This likely would require some protein engineering of the dCas9, in addition to the catalytic inactivation, to decrease binding without the additional binding site.

### Zinc Finger Nucleases

[0408] Zinc finger nucleases (ZFNs) are modular proteins comprised of an engineered zinc finger DNA binding domain linked to the catalytic domain of the type II endonuclease FokI. Because FokI functions only as a dimer, a pair of ZFNs must be engineered to bind to cognate target “half-site” sequences on opposite DNA strands and with precise spacing between them to enable the catalytically active FokI dimer to form. Upon dimerization of the FokI domain, which itself has no sequence specificity per se, a DNA double-strand break is generated between the ZFN half-sites as the initiating step in genome editing.

[0409] The DNA binding domain of each ZFN is typically comprised of 3-6 zinc fingers of the abundant Cys2-His2 architecture, with each finger primarily recognizing a triplet of nucleotides on one strand of the target DNA sequence, although cross-strand interaction with a fourth nucleotide also can be important. Alteration of the amino acids of a finger in positions that make key contacts with the DNA alters the sequence specificity of a given finger. Thus, a four-finger zinc finger protein will selectively recognize a 12 bp target sequence, where the target sequence is a composite of the triplet preferences contributed by each finger, although triplet preference can be influenced to varying degrees by neighboring fingers. An important aspect of ZFNs is that they can be readily re-targeted to almost any genomic address simply by modifying individual fingers, although considerable expertise is required to do this well. In most applications of ZFNs, proteins of 4-6 fingers are used, recognizing 12-18 bp respectively. Hence, a pair of ZFNs will typically recognize a combined target sequence of 24-36 bp, not including the typical 5-7 bp spacer between half-sites. The binding sites can be separated further with larger spacers, including 15-17 bp. A target sequence of this length is likely to be unique in the human genome, assuming repetitive sequences or gene homologs are excluded during the design process. Nevertheless, the ZFN protein-DNA interactions are not absolute in their specificity so off-target binding and cleavage events do occur, either as a heterodimer between the two ZFNs, or as a homodimer of one or the other of the ZFNs. The latter possibility has been effectively eliminated by engineering the dimerization interface of the FokI domain to create “plus” and “minus” variants, also known as obligate heterodimer variants, which can only dimerize with each other, and not with themselves. Forcing the obligate heterodimer prevents formation of the homodimer. This has greatly enhanced specificity of ZFNs, as well as any other nuclease that adopts these FokI variants.

[0410] A variety of ZFN-based systems have been described in the art, modifications thereof are regularly reported, and numerous references describe rules and parameters that are used to guide the design of ZFNs; see, e.g., Segal et al., Proc Natl Acad Sci USA 96(6):2758-63 (1999); Dreier B et al., J Mol Biol. 303(4):489-502 (2000); Liu Q et al., J Biol Chem. 277(6):3850-6 (2002); Dreier et al., J Biol Chem 280(42):35588-97 (2005); and Dreier et al., J Biol Chem. 276(31):29466-78 (2001).

### Transcription Activator-Like Effector Nucleases (TALENs)

[0411] TALENs represent another format of modular nucleases whereby, as with ZFNs, an engineered DNA binding domain is linked to the FokI nuclease domain, and a pair of TALENs operate in tandem to achieve targeted DNA cleavage. The major difference from ZFNs is the nature of the DNA binding domain and the associated target DNA sequence recognition properties. The TALEN DNA binding domain derives from TALE proteins, which were originally described in the plant bacterial pathogen Xanthomonas sp. TALEs are comprised of tandem arrays of 33-35 amino acid repeats, with each repeat recognizing a single base pair in the target DNA sequence that is typically up to 20 bp in length, giving a total target sequence length of up to 40 bp. Nucleotide specificity of each repeat is determined by the repeat variable diresidue (RVD), which includes just two amino acids at positions 12 and 13. The bases guanine, adenine, cytosine and thymine are predominantly recognized by the four RVDs: Asn-Asn, Asn-Ile, His-Asp and Asn-Gly, respectively. This constitutes a much simpler recognition code than for zinc fingers, and thus represents an advantage over the latter for nuclease design. Nevertheless, as with ZFNs, the protein-DNA interactions of TALENs are not absolute in their specificity, and TALENs have also benefitted from the use of obligate heterodimer variants of the FokI domain to reduce off-target activity.

[0412] Additional variants of the FokI domain have been created that are deactivated in their catalytic function. If one half of either a TALEN or a ZFN pair contains an inactive FokI domain, then only single-strand DNA cleavage (nicking) will occur at the target site, rather than a DSB. The outcome is comparable to the use of CRISPR/Cas9 or CRISPR/Cpf1 “nickase” mutants in which one of the Cas9 cleavage domains has been deactivated. DNA nicks can be used to drive genome editing by HDR, but at lower efficiency than with a DSB. The main benefit is that off-target nicks are quickly and accurately repaired, unlike the DSB, which is prone to NHEJ-mediated mis-repair.

[0413] A variety of TALEN-based systems have been described in the art, and modifications thereof are regularly reported; see, e.g., Boch, Science 326(5959):1509-12 (2009); Mak et al., Science 335(6069):716-9 (2012); and Moscou et al., Science 326(5959):1501 (2009). The use of TALENs based on the “Golden Gate” platform, or cloning scheme, has been described by multiple groups; see, e.g., Cermak et al., Nucleic Acids Res. 39(12):e82 (2011); Li et al.,

[0414] Nucleic Acids Res. 39(14):6315-25(2011); Weber et al., PLoS One. 6(2):e16765 (2011); Wang et al., J Genet Genomics 41(6):339-47, Epub 2014 May 17 (2014); and Cermak T et al., Methods Mol Biol. 1239:133-59 (2015).

### Homing Endonucleases

[0415] Homing endonucleases (HEs) are sequence-specific endonucleases that have long recognition sequences (14-44 base pairs) and cleave DNA with high specificity—often at sites unique in the genome. There are at least six known families of HEs as classified by their structure, including LAGLIDADG (SEQ ID NO: 33,123), GIY-YIG, His-Cis box, H-N-H, PD-(D/E)xK, and Vsr-like that are derived from a broad range of hosts, including eukarya, protists, bacteria, archaea, cyanobacteria and phage. As with ZFNs and TALENs, HEs can be used to create a DSB at a target locus as the initial step in genome editing. In addition, some natural and engineered HEs cut only a single strand of DNA, thereby functioning as site-specific nickases. The large target sequence of HEs and the specificity that they offer have made them attractive candidates to create site-specific DSBs.

[0416] A variety of HE-based systems have been described in the art, and modifications thereof are regularly reported; see, e.g., the reviews by Steentoft et al., Glycobiology 24(8):663-80 (2014); Belfort and Bonocora, Methods Mol Biol. 1123:1-26 (2014); Hafez and Hausner, Genome 55(8):553-69 (2012); and references cited therein.

### MegaTAL/Tev-mTALEN/MegaTev

[0417] As further examples of hybrid nucleases, the MegaTAL platform and Tev-mTALEN platform use a fusion of TALE DNA binding domains and catalytically active HEs, taking advantage of both the tunable DNA binding and specificity of the TALE, as well as the cleavage sequence specificity of the HE; see, e.g., Boissel et al., NAR 42: 2591-2601 (2014); Kleinstiver et al., G3 4:1155-65 (2014); and Boissel and Scharenberg, Methods Mol. Biol. 1239: 171-96 (2015).

[0418] In a further variation, the MegaTev architecture is the fusion of a meganuclease (Mega) with the nuclease domain derived from the GIY-YIG homing endonuclease I-Teel (Tev). The two active sites are positioned ˜30 bp apart on a DNA substrate and generate two DSBs with non-compatible cohesive ends; see, e.g., Wolfs et al., NAR 42, 8816-29 (2014). It is anticipated that other combinations of existing nuclease-based approaches will evolve and be useful in achieving the targeted genome modifications described herein.

dCas9-FokI or dCpf1-FokI and Other Nucleases

[0419] Combining the structural and functional properties of the nuclease platforms described above offers a further approach to genome editing that can potentially overcome some of the inherent deficiencies. As an example, the CRISPR genome editing system typically uses a single Cas9 endonuclease to create a DSB. The specificity of targeting is driven by a 20 or 24 nucleotide sequence in the guide RNA that undergoes Watson-Crick base-pairing with the target DNA (plus an additional 2 bases in the adjacent NAG or NGG PAM sequence in the case of Cas9 from S. pyogenes). Such a sequence is long enough to be unique in the human genome, however, the specificity of the RNA/DNA interaction is not absolute, with significant promiscuity sometimes tolerated, particularly in the 5′ half of the target sequence, effectively reducing the number of bases that drive specificity. One solution to this has been to completely deactivate the Cas9 or Cpf1 catalytic function—retaining only the RNA-guided DNA binding function—and instead fusing a FokI domain to the deactivated Cas9; see, e.g., Tsai et al., Nature Biotech 32: 569-76 (2014); and Guilinger et al., Nature Biotech. 32: 577-82 (2014). Because FokI must dimerize to become catalytically active, two guide RNAs are required to tether two FokI fusions in close proximity to form the dimer and cleave DNA. This essentially doubles the number of bases in the combined target sites, thereby increasing the stringency of targeting by CRISPR-based systems.

[0420] As further example, fusion of the TALE DNA binding domain to a catalytically active HE, such as I-TevI, takes advantage of both the tunable DNA binding and specificity of the TALE, as well as the cleavage sequence specificity of I-TevI, with the expectation that off-target cleavage can be further reduced.

### VII. KITS

[0421] The present disclosure provides kits for carrying out the methods described herein. A kit can include one or more of a genome-targeting nucleic acid, a polynucleotide encoding a genome-targeting nucleic acid, a site-directed polypeptide, a polynucleotide encoding a site-directed polypeptide, and/or any nucleic acid or proteinaceous molecule necessary to carry out the aspects of the methods described herein, or any combination thereof.

[0422] A kit can comprise: (1) a vector comprising a nucleotide sequence encoding a genome-targeting nucleic acid, (2) the site-directed polypeptide or a vector comprising a nucleotide sequence encoding the site-directed polypeptide, and (3) a reagent for reconstitution and/or dilution of the vector(s) and or polypeptide.

[0423] A kit can comprise: (1) a vector comprising (i) a nucleotide sequence encoding a genome-targeting nucleic acid, and (ii) a nucleotide sequence encoding the site-directed polypeptide; and (2) a reagent for reconstitution and/or dilution of the vector.

[0424] In any of the above kits, the kit can comprise a single-molecule guide genome-targeting nucleic acid. In any of the above kits, the kit can comprise a double-molecule genome-targeting nucleic acid. In any of the above kits, the kit can comprise two or more double-molecule guides or single-molecule guides. The kits can comprise a vector that encodes the nucleic acid targeting nucleic acid.

[0425] In any of the above kits, the kit can further comprise a polynucleotide to be inserted to effect the desired genetic modification.

[0426] Components of a kit can be in separate containers, or combined in a single container.

[0427] Any kit described above can further comprise one or more additional reagents, where such additional reagents are selected from a buffer, a buffer for introducing a polypeptide or polynucleotide into a cell, a wash buffer, a control reagent, a control vector, a control RNA polynucleotide, a reagent for in vitro production of the polypeptide from DNA, adaptors for sequencing and the like. A buffer can be a stabilization buffer, a reconstituting buffer, a diluting buffer, or the like. A kit can also comprise one or more components that can be used to facilitate or enhance the on-target binding or the cleavage of DNA by the endonuclease, or improve the specificity of targeting.

[0428] In addition to the above-mentioned components, a kit can further comprise instructions for using the components of the kit to practice the methods. The instructions for practicing the methods can be recorded on a suitable recording medium. For example, the instructions can be printed on a substrate, such as paper or plastic, etc. The instructions can be present in the kits as a package insert, in the labeling of the container of the kit or components thereof (i.e., associated with the packaging or subpackaging), etc. The instructions can be present as an electronic storage data file present on a suitable computer readable storage medium, e.g. CD-ROM, diskette, flash drive, etc. In some instances, the actual instructions are not present in the kit, but means for obtaining the instructions from a remote source (e.g. via the Internet), can be provided. An example of this case is a kit that comprises a web address where the instructions can be viewed and/or from which the instructions can be downloaded. As with the instructions, this means for obtaining the instructions can be recorded on a suitable substrate.

[0429] VIII. METHODS, COMPOSITIONS, AND THERAPEUTICS OF THE INVENTION

[0430] Accordingly, the following non-limiting methods, compositions, and therapeutics are provided according to the present disclosure:

[0431] In a first method, Method 1, the present disclosure provides a method for editing a COL7A1 gene in a cell by genome editing comprising: introducing into the cell one or more DNA endonucleases to effect one or more SSBs or DSBs within or near the COL7A1 gene or COL7A1 regulatory elements that results in a permanent correction of one or more mutations or replacement of one or more exons and/or introns within or near the COL7A1 gene, thereby restoring the COL7A1 protein activity.

[0432] In another method, Method 2, the present disclosure provides a method for editing a COL7A1 gene in a cell by genome editing comprising: introducing into the cell one or more DNA endonucleases to effect one or more SSBs or DSBs within or near the COL7A1 gene or COL7A1 regulatory elements that results in a permanent insertion of one or more exons and/or introns within or near the COL7A1 gene, wherein the one or more exons and/or introns comprise the corrected COL7A1 gene sequence, thereby restoring expression of the corrected COL7A1 transcript.

[0433] In another method, Method 3, the present disclosure provides an ex vivo method for treating a patient having a COL7A1 related condition or disorder comprising: editing a keratinocyte or fibroblast within or near a COL7A1 gene or other DNA sequences that encode regulatory elements of the COL7A1 gene; and implanting the edited keratinocyte or fibroblast into the patient.

[0434] In another method, Method 4, the present disclosure provides an ex vivo method for treating a patient having a COL7A1 related condition or disorder, as provided in Method 3, wherein the editing step comprises introducing into the keratinocyte or fibroblast one or more DNA endonucleases to effect one or more SSBs or DSBs within or near the COL7A1 gene or COL7A1 regulatory elements that results in a permanent correction of one or more mutations or replacement of one or more exons and/or introns within or near the COL7A1 gene, thereby restoring the COL7A1 protein activity.

[0435] In another method, Method 5, the present disclosure provides an ex vivo method for treating a patient having a COL7A1 related condition or disorder, as provided in Method 3, wherein the editing step comprises introducing into the keratinocyte or fibroblast one or more DNA endonucleases to effect one or more SSBs or DSBs within or near the COL7A1 gene or COL7A1 regulatory elements that results in a permanent insertion of one or more exons and/or introns within or near the COL7A1 gene, wherein the one or more exons and/or introns comprise the corrected COL7A1 gene sequence, thereby restoring expression of the corrected COL7A1 transcript.

[0436] In another method, Method 6, the present disclosure provides an ex vivo method for treating a patient having a COL7A1 related condition or disorder, as provided in any one of Methods 3-5, further comprising: isolating the keratinocyte or fibroblast from the patient.

[0437] In another method, Method 7, the present disclosure provides an ex vivo method for treating a patient having a COL7A1 related condition or disorder, as provided in any one of Methods 3-6, wherein the implanting comprises culturing the keratinocyte or fibroblast to form sheets of skin and implanting the skin grafts onto the patient's skin.

[0438] In another method, Method 8, the present disclosure provides an ex vivo method for treating a patient having a COL7A1 related condition or disorder comprising: editing a patient specific iPSC within or near a COL7A1 gene or other DNA sequences that encode regulatory elements of the COL7A1 gene; differentiating the edited iPSC into a keratinocyte or fibroblast; and implanting the keratinocyte or fibroblast into the patient.

[0439] In another method, Method 9, the present disclosure provides an ex vivo method for treating a patient having a COL7A1 related condition or disorder, as provided in Method 8, wherein the editing step comprises introducing into the iPSC one or more DNA endonucleases to effect one or more SSBs or DSBs within or near the COL7A1 gene or COL7A1 regulatory elements that results in a permanent correction of one or more mutations or replacement of one or more exons and/or introns within or near the COL7A1 gene, thereby restoring the COL7A1 protein activity.

[0440] In another method, Method 10, the present disclosure provides an ex vivo method for treating a patient having a COL7A1 related condition or disorder, as provided in Method 8, wherein the editing step comprises introducing into the iPSC one or more DNA endonucleases to effect one or more SSBs or DSBs within or near the COL7A1 gene or COL7A1 regulatory elements that results in a permanent insertion of one or more exons and/or introns within or near the COL7A1 gene, wherein the one or more exons and/or introns comprise the corrected COL7A1 gene sequence, thereby restoring expression of the corrected COL7A1 transcript.

[0441] In another method, Method 11, the present disclosure provides an ex vivo method for treating a patient having a COL7A1 related condition or disorder, as provided in any one of Methods 8-10, further comprising: creating the iPSC, wherein the creating step comprises: isolating a somatic cell from the patient; and introducing a set of pluripotency-associated genes into the somatic cell to induce the somatic cell to become the iPSC.

[0442] In another method, Method 12, the present disclosure provides an ex vivo method for treating a patient having a COL7A1 related condition or disorder, as provided in Method 11, wherein the somatic cell is a fibroblast.

[0443] In another method, Method 13, the present disclosure provides an ex vivo method for treating a patient having a COL7A1 related condition or disorder, as provided in Method 11, wherein the set of pluripotency-associated genes is one or more of the genes selected from the group consisting of: OCT4, SOX2, KLF4, Lin28, NANOG and cMYC.

[0444] In another method, Method 14, the present disclosure provides an ex vivo method for treating a patient having a COL7A1 related condition or disorder, as provided in any one of Methods 8-13, wherein the implanting comprises culturing the keratinocyte or fibroblast to form sheets of skin and implanting the skin grafts onto the patient's skin.

[0445] In another method, Method 15, the present disclosure provides an ex vivo method for treating a patient having a COL7A1 related condition or disorder comprising: editing a CD34+ cell within or near a Collagen Type VII Alpha 1 Chain (COL7A1) gene or other DNA sequences that encode regulatory elements of the COL7A1 gene; and implanting the edited CD34+ cell into the patient.

[0446] In another method, Method 16, the present disclosure provides an ex vivo method for treating a patient having a COL7A1 related condition or disorder, as provided in Method 15, wherein the editing step comprises introducing into the CD34+ cell one or more DNA endonucleases to effect one or more SSBs or DSBs within or near the COL7A1 gene or COL7A1 regulatory elements that results in a permanent correction of one or more mutations or replacement of one or more exons and/or introns within or near the COL7A1 gene, thereby restoring the COL7A1 protein activity.

[0447] In another method, Method 17, the present disclosure provides an ex vivo method for treating a patient having a COL7A1 related condition or disorder, as provided in Method 15, wherein the editing step comprises introducing into the CD34+ cell one or more DNA endonucleases to effect one or more SSBs or DSBs within or near the COL7A1 gene or COL7A1 regulatory elements that results in a permanent insertion of one or more exons and/or introns within or near the COL7A1 gene, wherein the one or more exons and/or introns comprise the corrected COL7A1 gene sequence, thereby restoring expression of the corrected COL7A1 transcript.

[0448] In another method, Method 18, the present disclosure provides an ex vivo method for treating a patient having a COL7A1 related condition or disorder, as provided in any one of Methods 15-17, wherein the CD34+ cell is a hematopoietic progenitor cell.

[0449] In another method, Method 19, the present disclosure provides an ex vivo method for treating a patient having a COL7A1 related condition or disorder, as provided in any one of Methods 15-18, further comprising: isolating a CD34+ cell from the patient.

[0450] In another method, Method 20, the present disclosure provides an ex vivo method for treating a patient having a COL7A1 related condition or disorder, as provided in any one of Methods 15-19, wherein the method further comprises treating the patient with GCSF prior to the isolating step.

[0451] In another method, Method 21, the present disclosure provides an ex vivo method for treating a patient having a COL7A1 related condition or disorder, as provided in Method 20, wherein the treating step is performed in combination with Plerixafor.

[0452] In another method, Method 22, the present disclosure provides an ex vivo method for treating a patient having a COL7A1 related condition or disorder comprising: editing a mesenchymal stem cell within or near a COL7A1 gene or other DNA sequences that encode regulatory elements of the COL7A1 gene; differentiating the edited mesenchymal stem cell into a keratinocyte or fibroblast; and implanting the keratinocyte or fibroblast into the patient.

[0453] In another method, Method 23, the present disclosure provides an ex vivo method for treating a patient with having a COL7A1 related condition or disorder, as provided in Method 22, wherein the editing step comprises introducing into the mesenchymal stem cell one or more DNA endonucleases to effect one or more SSBs or DSBs within or near the COL7A1 gene or COL7A1 regulatory elements that results in a permanent correction of one or more mutations or replacement of one or more exons and/or introns within or near the COL7A1 gene, thereby restoring the COL7A1 protein activity.

[0454] In another method, Method 24, the present disclosure provides an ex vivo method for treating a patient with having a COL7A1 related condition or disorder, as provided in Method 22, wherein the editing step comprises introducing into the mesenchymal stem cell one or more DNA endonucleases to effect one or more SSBs or DSBs within or near the COL7A1 gene or COL7A1 regulatory elements that results in a permanent insertion of one or more exons and/or introns within or near the COL7A1 gene, wherein the one or more exons and/or introns comprise the corrected COL7A1 gene sequence, thereby restoring expression of the corrected COL7A1 transcript.

[0455] In another method, Method 25, the present disclosure provides an ex vivo method for treating a patient with having a COL7A1 related condition or disorder, as provided in any one of Methods 22-24, further comprising: isolating the mesenchymal stem cell from the patient, wherein the mesenchymal stem cell is isolated from the patient's bone marrow or peripheral blood.

[0456] In another method, Method 26, the present disclosure provides an ex vivo method for treating a patient with having a COL7A1 related condition or disorder, as provided in Method 25, wherein the isolating step comprises: aspiration of bone marrow and isolation of mesenchymal cells using density gradient centrifugation media.

[0457] In another method, Method 27, the present disclosure provides an ex vivo method for treating a patient with having a COL7A1 related condition or disorder, as provided in any one of Methods 22-25, wherein the implanting step comprises culturing the keratinocyte or fibroblast to form sheets of skin and implanting the skin grafts onto the patient's skin.

[0458] In another method, Method 28, the present disclosure provides an in vivo method for treating a patient with a COL7A1 related disorder comprising: editing the COL7A1 gene in a cell of the patient.

[0459] In another method, Method 29, the present disclosure provides an in vivo method for treating a patient with a COL7A1 related disorder, as provided in Method 28, wherein the editing step comprises introducing into the cell one or more DNA endonucleases to effect one or more SSBs or DSBs within or near the COL7A1 gene or COL7A1 regulatory elements that results in a permanent correction of one or more mutations or replacement of one or more exons and/or introns within or near the COL7A1 gene, thereby restoring the COL7A1 protein activity.

[0460] In another method, Method 30, the present disclosure provides an in vivo method for treating a patient with a COL7A1 related disorder, as provided in Method 28, wherein the editing step comprises: introducing into the cell one or more DNA endonucleases to effect one or more SSBs or DSBs within or near the gene or COL7A1 regulatory elements that results in a permanent insertion of one or more exons and/or introns within or near the COL7A1 gene, wherein the one or more exons and/or introns comprise the corrected COL7A1 gene sequence, thereby restoring expression of the corrected COL7A1 transcript.

[0461] In another method, Method 31, the present disclosure provides an in vivo method for treating a patient with a COL7A1 related disorder, as provided in any one of Methods 28-30, wherein the cell is a keratinocyte or fibroblast.

[0462] In another method, Method 32, the present disclosure provides an in vivo method for treating a patient with a COL7A1 related disorder, as provided in Method 31, wherein the one or more DNA endonuclease is delivered to the keratinocyte or fibroblast by intradermal injection.

[0463] In another method, Method 33, the present disclosure provides a method for treating a patient having a COL7A1 related disorder, as provided in any one of Methods 3, 8, 15, 22, or 28 wherein the COL7A1 related condition or disorder is DEB.

[0464] In another method, Method 34, the present disclosure provides a method of altering the contiguous genomic sequence of a COL7A1 gene in a cell comprising: contacting the cell with one or more DNA endonuclease to effect one or more SSBs or DSBs.

[0465] In another method, Method 35, the present disclosure provides a method of altering the contiguous genomic sequence of a COL7A1 gene in a cell, as provided in Method 34, wherein the alteration of the contiguous genomic sequence occurs in exon 1, intron 1, exon 2, intron 2, exon 3, intron 3, exon 4, intron 4, exon 5, intron 5, exon 6, intron 6, exon 7, intron 7, exon 8, intron 8, exon 9, intron 9, exon 10, intron 10, exon 11, intron 11, exon 12, intron 12, exon 13, intron 13, exon 14, intron 14, exon 15, intron 15, exon 16, intron 16, exon 17, intron 17, exon 18, intron 18, exon 19, intron 19, exon 20, intron 20, exon 21, intron 21, exon 22, intron 22, exon 23, intron 23, exon 24, intron 24, exon 25, intron 25, exon 26, intron 26, exon 27, intron 27, exon 28, intron 28, exon 29, intron 29, exon 30, intron 30, exon 31, intron 31, exon 32, intron 32, exon 33, intron 33, exon 34, intron 34, exon 35, intron 35, exon 36, intron 36, exon 37, intron 37, exon 38, intron 38, exon 39, intron 39, exon 40, intron 40, exon 41, intron 41, exon 42, intron 42, exon 43, intron 43, exon 44, intron 44, exon 45, intron 45, exon 46, intron 46, exon 47, intron 47, exon 48, intron 48, exon 49, intron 49, exon 50, intron 50, exon 51, intron 51, exon 52, intron 52, exon 53, intron 53, exon 54, intron 54, exon 55, intron 55, exon 56, intron 56, exon 57, intron 57, exon 58, intron 58, exon 59, intron 59, exon 60, intron 60, exon 61, intron 61, exon 62, intron 62, exon 63, intron 63, exon 64, intron 64, exon 65, intron 65, exon 66, intron 66, exon 67, intron 67, exon 68, intron 68, exon 69, intron 69, exon 70, intron 70, exon 71, intron 71, exon 72, intron 72, exon 73, intron 73, exon 74, intron 74, exon 75, intron 75, exon 76, intron 76, exon 77, intron 77, exon 78, intron 78, exon 79, intron 79, exon 80, intron 80, exon 81, intron 81, exon 82, intron 82, exon 83, intron 83, exon 84, intron 84, exon 85, intron 85, exon 86, intron 86, exon 87, intron 87, exon 88, intron 88, exon 89, intron 89, exon 90, intron 90, exon 91, intron 91, exon 92, intron 92, exon 93, intron 93, exon 94, intron 94, exon 95, intron 95, exon 96, intron 96, exon 97, intron 97, exon 98, intron 98, exon 99, intron 99, exon 100, intron 100, exon 101, intron 101, exon 102, intron 102, exon 103, intron 103, exon 104, intron 104, exon 105, intron 105, exon 106, intron 106, exon 107, intron 107, exon 108, intron 108, exon 109, intron 109, exon 110, intron 110, exon 111, intron 111, exon 112, intron 112, exon 113, intron 113, exon 114, intron 114, exon 115, intron 115, exon 116, intron 116, exon 117, intron 117, exon 118, intron 118, exon 119, intron 119, exon 120, intron 120, exon 121, intron 121, exon 122, intron 122, exon 123, intron 123, exon 124, intron 124, exon 125, intron 125, exon 126, intron 126, exon 127, intron 127, exon 128, intron 128, exon 129, intron 129, exon 130, intron 130, exon 131, intron 131, exon 132, intron 132, exon 133, intron 133, exon 134, intron 134, exon 135, intron 135, exon 136, intron 136, exon 137, intron 137, exon 138, intron 138, exon 139, intron 139, exon 140, intron 140, exon 141, intron 141, exon 142, intron 142, exon 143, intron 143, exon 144, intron 144, exon 145, intron 145, exon 146, intron 146, exon 147, intron 147, exon 148, intron 148, exon 149, intron 149, exon 150, intron 150, exon 151, intron 151, exon 152, intron 152, exon 153, intron 153, exon 154, intron 154, exon 155, intron 155, exon 156, intron 156, exon 157, intron 157, exon 158, intron 158, exon 159, intron 159, exon 160, intron 160, exon 161, intron 161, exon 162, intron 162, exon 163, intron 163, exon 164, intron 164, exon 165, intron 165, exon 166, intron 166, exon 167, intron 167, exon 168, intron 168, exon 169, intron 169, exon 170, intron 170, exon 171, intron 171, exon 172, intron 172, exon 173, intron 173, exon 174, intron 174, exon 175, intron 175, exon 176, intron 176, exon 177, intron 177, exon 178, intron 178, exon 179, intron 179, exon 180, intron 180, exon 181, intron 181, exon 182, intron 182, exon 183, intron 183, exon 184, intron 184, exon 185, intron 185, exon 186, intron 186, exon 187, intron 187, exon 188, intron 188, exon 189, intron 189, exon 190, intron 190, exon 191, intron 191, exon 192, intron 192, exon 193, intron 193, exon 194, intron 194, exon 195, intron 195, exon 196, intron 196, exon 197, intron 197, exon 198, intron 198, exon 199, intron 199, exon 200, intron 200, exon 201, intron 201, exon 202, intron 202, exon 203, intron 203, exon 204, intron 204, exon 205, intron 205, exon 206, intron 206, exon 207, intron 207, exon 208, intron 208, exon 209, intron 209, exon 210, intron 210, exon 211, intron 211, exon 212, intron 212, exon 213, intron 213, exon 214, intron 214, exon 215, intron 215, exon 216, intron 216, exon 217, intron 217, or exon 218 of the COL7A1 gene.

[0466] In another method, Method 36, the present disclosure provides a method of altering the contiguous genomic sequence of a COL7A1 gene in a cell, as provided in Method 35, wherein the alteration results in a permanent correction of one or more mutations or replacement of one or more exons and/or introns within or near the COL7A1 gene, thereby restoring the COL7A1 protein activity.

[0467] In another method, Method 37, the present disclosure provides a method of altering the contiguous genomic sequence of a COL7A1 gene in a cell, as provided in Method 35, wherein the alteration results in a permanent insertion of one or more exons and/or introns of the COL7A1 gene, wherein the one or more exons and/or introns comprise the corrected COL7A1 gene sequence, thereby restoring expression of the corrected COL7A1 transcript.

[0468] In another method, Method 38, the present disclosure provides a method of altering the contiguous genomic sequence of a COL7A1 gene in a cell, as provided in Method 37, wherein the permanent insertion of one or more exons and/or introns of the COL7A1 gene, occurs in any one or more introns or exons selected from the group consisting of: intron 31, exon 32, intron 32, exon 33, intron 33, exon 34, intron 34, exon 35, intron 35, exon 36, intron 36, exon 37, intron 37, exon 38, intron 38, exon 39, intron 39, exon 40, intron 40, exon 41, intron 41, exon 42, intron 42, exon 43, intron 43, exon 44, intron 44, exon 45, intron 45, exon 46, and intron 46.

[0469] In another method, Method 39, the present disclosure provides a method, as provided in any one of Methods 1-38, wherein the one or more DNA endonuclease is selected from any of those sequences in SEQ ID NOs: 1-620 and variants having at least 90% homology to any of those sequences disclosed in SEQ ID NOs: 1-620.

[0470] In another method, Method 40, the present disclosure provides a method, as provided in Method 39, wherein the one or more DNA endonuclease is one or more proteins or polypeptides.

[0471] In another method, Method 41, the present disclosure provides a method, as provided in Method 40, wherein the one or more proteins or polypeptides is flanked at the N-terminus, the C-terminus, or both the N-terminus and C-terminus by one or more NLSs.

[0472] In another method, Method 42, the present disclosure provides a method, as provided in Method 41, wherein the one or more proteins or polypeptides is flanked by two NLSs, one NLS located at the N-terminus and the second NLS located at the C-terminus.

[0473] In another method, Method 43, the present disclosure provides a method, as provided in any one of Methods 41 or 42, wherein the one or more NLSs is a SV40 NLS.

[0474] In another method, Method 44, the present disclosure provides a method, as provided in Method 39, wherein the one or more DNA endonuclease is one or more polynucleotide encoding the one or more DNA endonuclease.

[0475] In another method, Method 45, the present disclosure provides a method, as provided in Method 44, wherein the one or more DNA endonuclease is one or more RNA encoding the one or more DNA endonuclease.

[0476] In another method, Method 46, the present disclosure provides a method, as provided in Method 45, wherein the one or more RNA is one or more chemically modified RNA.

[0477] In another method, Method 47, the present disclosure provides a method, as provided in Method 46, wherein the one or more RNA is chemically modified in the coding region.

[0478] In another method, Method 48, the present disclosure provides a method, as provided in any one of Methods 44-47, wherein the one or more polynucleotide or one or more RNA is codon optimized.

[0479] In another method, Method 49, the present disclosure provides a method, as provided in any one of Methods 1-48, wherein the method further comprises: introducing one or more gRNA or one or more sgRNA.

[0480] In another method, Method 50, the present disclosure provides a method, as provided in Method 49, wherein the one or more gRNA or one or more sgRNA is chemically modified.

[0481] In another method, Method 51, the present disclosure provides a method, as provided in Method 50, wherein the one or more modified sgRNAs comprises three 2′-O-methyl-phosphorothioate residues at or near each of its 5′ and 3′ ends.

[0482] In another method, Method 52, the present disclosure provides a method, as provided in any one of Methods 49-51, wherein the one or more gRNA or one or more sgRNA comprises a spacer sequence that is complementary to a DNA sequence within or near exon 1, intron 1, exon 2, intron 2, exon 3, intron 3, exon 4, intron 4, exon 5, intron 5, exon 6, intron 6, exon 7, intron 7, exon 8, intron 8, exon 9, intron 9, exon 10, intron 10, exon 11, intron 11, exon 12, intron 12, exon 13, intron 13, exon 14, intron 14, exon 15, intron 15, exon 16, intron 16, exon 17, intron 17, exon 18, intron 18, exon 19, intron 19, exon 20, intron 20, exon 21, intron 21, exon 22, intron 22, exon 23, intron 23, exon 24, intron 24, exon 25, intron 25, exon 26, intron 26, exon 27, intron 27, exon 28, intron 28, exon 29, intron 29, exon 30, intron 30, exon 31, intron 31, exon 32, intron 32, exon 33, intron 33, exon 34, intron 34, exon 35, intron 35, exon 36, intron 36, exon 37, intron 37, exon 38, intron 38, exon 39, intron 39, exon 40, intron 40, exon 41, intron 41, exon 42, intron 42, exon 43, intron 43, exon 44, intron 44, exon 45, intron 45, exon 46, intron 46, exon 47, intron 47, exon 48, intron 48, exon 49, intron 49, exon 50, intron 50, exon 51, intron 51, exon 52, intron 52, exon 53, intron 53, exon 54, intron 54, exon 55, intron 55, exon 56, intron 56, exon 57, intron 57, exon 58, intron 58, exon 59, intron 59, exon 60, intron 60, exon 61, intron 61, exon 62, intron 62, exon 63, intron 63, exon 64, intron 64, exon 65, intron 65, exon 66, intron 66, exon 67, intron 67, exon 68, intron 68, exon 69, intron 69, exon 70, intron 70, exon 71, intron 71, exon 72, intron 72, exon 73, intron 73, exon 74, intron 74, exon 75, intron 75, exon 76, intron 76, exon 77, intron 77, exon 78, intron 78, exon 79, intron 79, exon 80, intron 80, exon 81, intron 81, exon 82, intron 82, exon 83, intron 83, exon 84, intron 84, exon 85, intron 85, exon 86, intron 86, exon 87, intron 87, exon 88, intron 88, exon 89, intron 89, exon 90, intron 90, exon 91, intron 91, exon 92, intron 92, exon 93, intron 93, exon 94, intron 94, exon 95, intron 95, exon 96, intron 96, exon 97, intron 97, exon 98, intron 98, exon 99, intron 99, exon 100, intron 100, exon 101, intron 101, exon 102, intron 102, exon 103, intron 103, exon 104, intron 104, exon 105, intron 105, exon 106, intron 106, exon 107, intron 107, exon 108, intron 108, exon 109, intron 109, exon 110, intron 110, exon 111, intron 111, exon 112, intron 112, exon 113, intron 113, exon 114, intron 114, exon 115, intron 115, exon 116, intron 116, exon 117, intron 117, exon 118, intron 118, exon 119, intron 119, exon 120, intron 120, exon 121, intron 121, exon 122, intron 122, exon 123, intron 123, exon 124, intron 124, exon 125, intron 125, exon 126, intron 126, exon 127, intron 127, exon 128, intron 128, exon 129, intron 129, exon 130, intron 130, exon 131, intron 131, exon 132, intron 132, exon 133, intron 133, exon 134, intron 134, exon 135, intron 135, exon 136, intron 136, exon 137, intron 137, exon 138, intron 138, exon 139, intron 139, exon 140, intron 140, exon 141, intron 141, exon 142, intron 142, exon 143, intron 143, exon 144, intron 144, exon 145, intron 145, exon 146, intron 146, exon 147, intron 147, exon 148, intron 148, exon 149, intron 149, exon 150, intron 150, exon 151, intron 151, exon 152, intron 152, exon 153, intron 153, exon 154, intron 154, exon 155, intron 155, exon 156, intron 156, exon 157, intron 157, exon 158, intron 158, exon 159, intron 159, exon 160, intron 160, exon 161, intron 161, exon 162, intron 162, exon 163, intron 163, exon 164, intron 164, exon 165, intron 165, exon 166, intron 166, exon 167, intron 167, exon 168, intron 168, exon 169, intron 169, exon 170, intron 170, exon 171, intron 171, exon 172, intron 172, exon 173, intron 173, exon 174, intron 174, exon 175, intron 175, exon 176, intron 176, exon 177, intron 177, exon 178, intron 178, exon 179, intron 179, exon 180, intron 180, exon 181, intron 181, exon 182, intron 182, exon 183, intron 183, exon 184, intron 184, exon 185, intron 185, exon 186, intron 186, exon 187, intron 187, exon 188, intron 188, exon 189, intron 189, exon 190, intron 190, exon 191, intron 191, exon 192, intron 192, exon 193, intron 193, exon 194, intron 194, exon 195, intron 195, exon 196, intron 196, exon 197, intron 197, exon 198, intron 198, exon 199, intron 199, exon 200, intron 200, exon 201, intron 201, exon 202, intron 202, exon 203, intron 203, exon 204, intron 204, exon 205, intron 205, exon 206, intron 206, exon 207, intron 207, exon 208, intron 208, exon 209, intron 209, exon 210, intron 210, exon 211, intron 211, exon 212, intron 212, exon 213, intron 213, exon 214, intron 214, exon 215, intron 215, exon 216, intron 216, exon 217, intron 217, or exon 218 of the COL7A1 gene.

[0483] In another method, Method 53, the present disclosure provides a method, as provided in any one of Methods 49-51, wherein the one or more gRNA or one or more sgRNA comprises a spacer sequence that is complementary to a DNA sequence within or near any one or more introns or exons selected from the group consisting of: intron 31, exon 32, intron 32, exon 33, intron 33, exon 34, intron 34, exon 35, intron 35, exon 36, intron 36, exon 37, intron 37, exon 38, intron 38, exon 39, intron 39, exon 40, intron 40, exon 41, intron 41, exon 42, intron 42, exon 43, intron 43, exon 44, intron 44, exon 45, intron 45, exon 46, and intron 46.

[0484] In another method, Method 54, the present disclosure provides a method, as provided in any one of Methods 49-51, wherein the one or more gRNA or one or more sgRNA comprises a RNA sequence corresponding to a sequence selected from the group consisting of SEQ ID NOs: 20203, 12355, 12342, 20135, 20126, 12414, 20127, 20131, 12415, 20156, 12437, 20219, 20202, 12302, 12264, 20286, 12416, 20307, 20205, 12399, 20297, 20322, 20130, 12423, 12412, 20128, 12349, 20285, 12243, 20155, 12256, 20305, 20246, and 20223.

[0485] In another method, Method 55, the present disclosure provides a method, as provided in any one of Methods 49-52, wherein the one or more gRNA or one or more sgRNA is pre-complexing with the one or more DNA endonuclease to form one or more RNPs.

[0486] In another method, Method 56, the present disclosure provides a method, as provided in Method 55, wherein the pre-complexing involves a covalent attachment of the one or more gRNA or one or more sgRNA to the one or more DNA endonuclease.

[0487] In another method, Method 57, the present disclosure provides a method, as provided in any one of Methods 55 or 56, wherein the weight ratio of sgRNA to DNA endonuclease in the RNP is 1:1.

[0488] In another method, Method 58, the present disclosure provides a method, as provided in any one of Methods 39-57, wherein the one or more DNA endonuclease is formulated in a liposome or lipid nanoparticle.

[0489] In another method, Method 59, the present disclosure provides a method, as provided in any one of Methods 49-57, wherein the one or more deoxyribonucleic acid (DNA) endonuclease is formulated in a liposome or lipid nanoparticle which also comprises the one or more gRNA or one or more sgRNA.

[0490] In another method, Method 60, the present disclosure provides a method, as provided in any one of Methods 39 or 49-52, wherein the one or more DNA endonuclease is encoded in an AAV vector particle.

[0491] In another method, Method 61, the present disclosure provides a method, as provided in Method 49, wherein the one or more gRNA or one or more sgRNA is encoded in an AAV vector particle.

[0492] In another method, Method 62, the present disclosure provides a method, as provided in Method 61, wherein the one or more DNA endonuclease is encoded in an AAV vector particle which also encodes the one or more gRNA or one or more sgRNA.

[0493] In another method, Method 63, the present disclosure provides a method, as provided in any one of Methods 61 or 62, wherein the AAV vector particle is selected from the group consisting of any of those sequences disclosed in SEQ ID NOs: 4734-5302 and Table 2.

[0494] In another method, Method 64, the present disclosure provides a method, as provided in any one of Methods 1-63, wherein the method further comprises: introducing into the cell a donor template comprising at least a portion of the wild-type or corrected COL7A1 gene.

[0495] In another method, Method 65, the present disclosure provides a method, as provided in Method 64, wherein the at least a portion of the wild-type or corrected COL7A1 gene comprises one or more sequences selected from the group consisting of a COL7A1 exon, a COL7A1 intron, a sequence comprising an exon:intron junction of COL7A1.

[0496] In another method, Method 66, the present disclosure provides a method, as provided in any one of Methods 64 or 65, wherein the donor template comprises homologous arms to the genomic locus of the COL7A1 gene.

[0497] In another method, Method 67, the present disclosure provides a method, as provided in any one of Methods 64-66, wherein the donor template is either a single or double stranded polynucleotide.

[0498] In another method, Method 68, the present disclosure provides a method, as provided in any one of Methods 64-67, wherein the donor template is encoded in an AAV vector particle, wherein the AAV vector particle is selected from the group consisting of any of those sequences listed in SEQ ID NOs: 4734-5302 and Table 2.

[0499] In another method, Method 69, the present disclosure provides a method, as provided in any one of Methods 64-67, wherein the one or more polynucleotide encoding one or more DNA endonuclease is formulated into a lipid nanoparticle, and the one or more gRNA or one or more sgRNA is delivered to the cell ex vivo by electroporation and the donor template is delivered to the cell by an AAV vector.

[0500] In another method, Method 70, the present disclosure provides a method, as provided in any one of Methods 64-67, wherein the one or more polynucleotide encoding one or more DNA endonuclease is formulated into a liposome or lipid nanoparticle which also comprises the one or more gRNA or one or more sgRNA and the donor template.

[0501] In another method, Method 71, the present disclosure provides a method, as provided in any one of Methods 1-70, wherein the COL7A1 gene is located on Chromosome 3: 48,564,073 - 48,595,267 (Genome Reference Consortium—GRCh38).

[0502] In a first composition, Composition 1, the present disclosure provides a single-molecule guide RNA comprising at least a spacer sequence that is an RNA sequence corresponding to any one of SEQ ID NOs: 5305-33,088.

[0503] In another composition, Composition 2, the present disclosure provides the single-molecule guide RNA of Composition 1, wherein the single-molecule guide RNA further comprises a spacer extension region.

[0504] In another composition, Composition 3, the present disclosure provides the single-molecule guide RNA of Composition 1, wherein the single-molecule guide RNA further comprises a tracrRNA extension region.

[0505] In another composition, Composition 4, the present disclosure provides the single-molecule guide RNA of any one of Compositions 1-3, wherein the single-molecule guide RNA is chemically modified.

[0506] In another composition, Composition 5, the present disclosure provides the single-molecule guide RNA of any one of Compositions 1-4, wherein the single-molecule guide RNA is pre-complexed with a DNA endonuclease.

[0507] In another composition, Composition 6, the present disclosure provides the single-molecule guide RNA of Composition 5, wherein the DNA endonuclease is a Cas9 or Cpf1 endonuclease.

[0508] In another composition, Composition 7, the present disclosure provides the single-molecule guide RNA of Composition 6, wherein the Cas9 or Cpf1 endonuclease is selected from the group consisting of: S. pyogenes Cas9, S. aureus Cas9, N. meningitidis Cas9, S. thermophilus CRISPR1 Cas9, S. thermophilus CRISPR 3 Cas9, T denticola Cas9, L. bacterium ND2006 Cpf1 and Acidaminococcus sp. BV3L6 Cpf1, and variants having at least 90% homology to the endonucleases.

[0509] In another composition, Composition 8, the present disclosure provides the single-molecule guide RNA of Composition 7, wherein the Cas9 or Cpf1 endonuclease comprises one or more NLSs.

[0510] In another composition, Composition 9, the present disclosure provides the single-molecule guide RNA of Composition 8, wherein at least one NLS is at or within 50 amino acids of the amino-terminus of the Cas9 or Cpf1 endonuclease and/or at least one NLS is at or within 50 amino acids of the carboxy-terminus of the Cas9 or Cpf1 endonuclease.

[0511] In another composition, Composition 10, the present disclosure provides a DNA encoding the single-molecule guide RNA of any one of Compositions 1-4.

[0512] In a first therapeutic, Therapeutic 1, the present disclosure provides a therapeutic comprising at least one or more gRNAs for editing a COL7A1 gene in a cell from a patient with a COL7A1 related condition or disorder, the one or more gRNAs comprising a spacer sequence selected from the group consisting of nucleic acid sequences in any one of SEQ ID NOs: 5305-33,088 of the Sequence Listing.

[0513] In another therapeutic, Therapeutic 2, the present disclosure provides a therapeutic for treating a patient with a COL7A1 related condition or disorder formed by the method comprising: introducing one or more DNA endonucleases; introducing one or more gRNA or one or more sgRNA for editing a COL7A1 gene; wherein the one or more gRNAs or sgRNAs comprise a spacer sequence selected from the group consisting of nucleic acid sequences in SEQ ID NOs: 5305-33,088 of the Sequence Listing.

[0514] In another therapeutic, Therapeutic 3, the present disclosure provides the therapeutic of any one of Therapeutics 1 or 2, wherein the COL7A1 related condition or disorder is DEB.

### IX. DEFINITIONS

[0515] In addition to the definitions previously set forth herein, the following definitions are relevant to the present disclosure:

[0516] The term “comprising” or “comprises” is used in reference to compositions, methods, therapeutics and respective component(s) thereof, that are essential to the present disclosure, yet open to the inclusion of unspecified elements, whether essential or not.

[0517] The term “consisting essentially of” refers to those elements required for a given aspect. The term permits the presence of additional elements that do not materially affect the basic and novel or functional characteristic(s) of that aspect of the present disclosure.

[0518] The term “consisting of” refers to compositions, methods, therapeutics and respective components thereof as described herein, which are exclusive of any element not recited in that description of the aspect.

[0519] The singular forms “a,” “an,” and “the” include plural references, unless the context clearly dictates otherwise.

[0520] Any numerical range recited in this specification describes all sub-ranges of the same numerical precision (i.e., having the same number of specified digits) subsumed within the recited range. For example, a recited range of “1.0 to 10.0” describes all sub-ranges between (and including) the recited minimum value of 1.0 and the recited maximum value of 10.0, such as, for example, “2.4 to 7.6,” even if the range of “2.4 to 7.6” is not expressly recited in the text of the specification. Accordingly, the Applicant reserves the right to amend this specification, including the claims, to expressly recite any sub-range of the same numerical precision subsumed within the ranges expressly recited in this specification. All such ranges are inherently described in this specification such that amending to expressly recite any such sub-ranges will comply with written description, sufficiency of description, and added matter requirements, including the requirements under 35 U.S.C. § 112(a) and Article 123(2) EPC. Also, unless expressly specified or otherwise required by context, all numerical parameters described in this specification (such as those expressing values, ranges, amounts, percentages, and the like) may be read as if prefaced by the word “about,” even if the word “about” does not expressly appear before a number. Additionally, numerical parameters described in this specification should be construed in light of the number of reported significant digits, numerical precision, and by applying ordinary rounding techniques. It is also understood that numerical parameters described in this specification will necessarily possess the inherent variability characteristic of the underlying measurement techniques used to determine the numerical value of the parameter.

[0521] The details of one or more aspects of the present disclosure are set forth in the accompanying description below. Although any materials and methods similar or equivalent to those described herein can be used in the practice or testing of the present disclosure, the preferred materials and methods are now described. Other features, objects and advantages of the present disclosure will be apparent from the description. In the description, the singular forms also include the plural unless the context clearly dictates otherwise. Unless defined otherwise, all technical and scientific terms used herein have the same meaning as commonly understood by one of ordinary skill in the art to which this present disclosure belongs. In the case of conflict, the present description will control.

[0522] The present disclosure is further illustrated by the following non-limiting examples.

### X. EXAMPLES

[0523] The present disclosure will be more fully understood by reference to the following examples, which provide illustrative non-limiting aspects of the present disclosure.

[0524] The examples describe the use of the CRISPR system as an illustrative genome editing technique to create defined therapeutic genomic deletions, insertions, or replacements, termed “genomic modifications” herein, in the COL7A1 gene that lead to permanent correction of mutations in the genomic locus, or expression at a heterologous locus, that restore COL7A1 protein activity. Introduction of the defined therapeutic modifications represents a novel therapeutic strategy for the potential amelioration of Dystrophic Epidermolysis Bullosa, as described and illustrated herein.

### Example 1

### CRISPR/S. pvogenes(Sp)Cas9 Target Sites for the COL7A1 Gene

[0525] Regions of the COL7A1 gene were scanned for target sites. Each area was scanned for a protospacer adjacent motif (PAM) having the sequence NRG. gRNA 20 bp spacer sequences corresponding to the PAM were then identified, as shown in SEQ ID NOs: 7471-23,594 of the Sequence Listing.

### Example 2

### CRISPR/S. aureus(Sa)Cas9 Target Sites for the COL7A1 Gene

[0526] Regions of the COL7A1 gene were scanned for target sites. Each area was scanned for a protospacer adjacent motif (PAM) having the sequence NNGRRT. gRNA 20 bp spacer sequences corresponding to the PAM were then identified, as shown in SEQ ID NOs: 5463-6990 of the Sequence Listing.

### Example 3

### CRISPR/S. thermophilus(St)Cas9 Target Sites for the COL7A1 Gene

[0527] Regions of the COL7A1 gene were scanned for target sites. Each area was scanned for a protospacer adjacent motif (PAM) having the sequence NNAGAAW. gRNA 20 bp spacer sequences corresponding to the PAM were then identified, as shown in SEQ ID NOs: 5330-5462 of the Sequence Listing.

### Example 4

### CRISPR/T. denticola(Td)Cas9 Target Sites for the COL7A1 Gene

[0528] Regions of the COL7A1 gene were scanned for target sites. Each area was scanned for a protospacer adjacent motif (PAM) having the sequence NAAAAC. gRNA 20 bp spacer sequences corresponding to the PAM were then identified, as shown in SEQ ID NOs: 5305-5329 of the Sequence Listing.

### Example 5

### CRISPR/N. meningitidis(Nm)Cas9 Target Sites for the COL7A1 Gene

[0529] Regions of the COL7A1 gene were scanned for target sites. Each area was scanned for a protospacer adjacent motif (PAM) having the sequence NNNNGHTT. gRNA 20 bp spacer sequences corresponding to the PAM were then identified, as shown in SEQ ID NOs: 6991-7470 of the Sequence Listing.

### Example 6

### CRISPR/Cpf1 Target Sites for the COL7A1 Gene

[0530] Regions of the COL7A1 gene were scanned for target sites. Each area was scanned for a protospacer adjacent motif (PAM) having the sequence TTN or YTN. gRNA 20 bp spacer sequences corresponding to the PAM were then identified, as shown in SEQ ID NOs: 23,595-33,088 of the Sequence Listing.

### Example 7

### Bioinformatics Analysis of the Guide Strands

[0531] Candidate guides will then be screened and selected in a single process or multi-step process that involves both theoretical binding and experimentally assessed activity at both on-target and off-target sites. By way of illustration, candidate guides having sequences that match a particular on-target site, such as a site within the COL7A1 gene, with adjacent PAM can be assessed for their potential to cleave at off-target sites having similar sequences, using one or more of a variety of bioinformatics tools available for assessing off-target binding, as described and illustrated in more detail below, in order to assess the likelihood of effects at chromosomal positions other than those intended.

[0532] Candidates predicted to have relatively lower potential for off-target activity can then be assessed experimentally to measure their on-target activity, and then off-target activities at various sites. Preferred guides have sufficiently high on-target activity to achieve desired levels of gene editing at the selected locus, and relatively lower off-target activity to reduce the likelihood of alterations at other chromosomal loci. The ratio of on-target to off-target activity is often referred to as the “specificity” of a guide.

[0533] For initial screening of predicted off-target activities, there are a number of bioinformatics tools known and publicly available that can be used to predict the most likely off-target sites; and since binding to target sites in the CRISPR/Cas9 or CRISPR/Cpf1 nuclease system is driven by Watson-Crick base pairing between complementary sequences, the degree of dissimilarity (and therefore reduced potential for off-target binding) is essentially related to primary sequence differences: mismatches and bulges, i.e. bases that are changed to a non-complementary complementary base, and insertions or deletions of bases in the potential off-target site relative to the target site. An exemplary bioinformatics tool called COSMID (CRISPR Off-target Sites with Mismatches, Insertions and Deletions) (available on the web at crispr.bme.gatech.edu) compiles such similarities. Other bioinformatics tools include, but are not limited to, autoCOSMID, and CCtop.

[0534] Bioinformatics were used to minimize off-target cleavage in order to reduce the detrimental effects of mutations and chromosomal rearrangements. Studies on CRISPR/Cas9 systems suggested the possibility of off-target activity due to non-specific hybridization of the guide strand to DNA sequences with base pair mismatches and/or bulges, particularly at positions distal from the PAM region. Therefore, it is important to have a bioinformatics tool that can identify potential off-target sites that have insertions and/or deletions between the RNA guide strand and genomic sequences, in addition to base-pair mismatches. Bioinformatics tools based upon the off-target algorithm CCTop were used to search genomes for potential CRISPR off-target sites (CCTop is available on the web at crispr.cos.uni-heidelberg.de/). The output ranked lists of the potential off-target sites based on the number and location of mismatches, allowing more informed choice of target sites, and avoiding the use of sites with more likely off-target cleavage.

[0535] Additional bioinformatics pipelines were employed that weigh the estimated on-and/or off-target activity of gRNA targeting sites in a region. Other features that may be used to predict activity include information about the cell type in question, DNA accessibility, chromatin state, transcription factor binding sites, transcription factor binding data, and other CHIP-seq data. Additional factors are weighed that predict editing efficiency, such as relative positions and directions of pairs of gRNAs, local sequence features and micro-homologies.

[0536] Initial evaluation and screening of CRISPR/Cas9 target sites focused on the region from intron 36 through intron 41 of the COL7A1 gene. gRNAs targeting the COL7A1 gene from intron 36 through intron 41 can be used to insert one or more exons and introns within or near the COL7A1 gene and restore COL7A1 protein expression. This approach allows for the correction of multiple mutations in the 3′ half (or last 4KB) of the COL7A1 gene.

[0537] Initial bioinformatics analysis identified 16,123 gRNAs targeting the COL7A1 gene. Further analysis identified 276 gRNAs targeting the COL7A1 gene from intron 36 through intron 41. This subset of guides was further analyzed. Guides having predicted off-target sites (1 or 2 mismatches) were eliminated and guides that overlapped with a SNP having a minor allele frequency>0.0002 were also eliminated. This analysis left a pool of 38 gRNAs, of which 34 gRNAs were selected for screening. The prioritized list of 34 single gRNAs targeting the COL7A1 gene were tested for cutting efficiencies using SpCas9 (Table 7).

TABLE 7

| SEQ ID | | |
|---|---|---|
| NO. | Name | Sequence |
| 20203 | COL7A1Int36_Int41_T5 | ACACGGGTGGGAAGACCGAA |
| 12355 | COL7A1Int36_Int41_T34 | GTGCTGGGCTTCATAGTTCT |
| 12342 | COL7A1Int36_Int41_T94 | GTTGGCCCCCCTGGAAAGAA |
| 20135 | COL7A1Int36_Int41_T80 | CAGCCTCCCCTAACACCATG |
| 20126 | COL7A1Int36_Int41_T100 | GAACGTCAAACCCCAGACAA |
| 12414 | COL7A1Int36_Int41_T3 | GGGTGACAAAGGCGATCGTG |
| 20127 | COL7A1Int36_Int41_T125 | AACGTCAAACCCCAGACAAG |
| 20131 | COL7A1Int36_Int41_T102 | ACCACGACCTCTGACCTGGA |
| 12415 | COL7A1Int36_Int41-T2 | AGGGTGACAAAGGCGATCGT |
| 20156 | COL7A1Int36_Int41_T89 | GCCCTGGAAGGGATGAATTT |
| 12437 | COL7A1Int36_Int41_T75 | ATAACCCCTGCCAGTTACTC |
| 20219 | COL7A1Int36_Int41_T33 | TTTCTTTCCAGGGGGGCCAA |
| 20202 | COL7A1Int36_Int41_T25 | CACACGGGTGGGAAGACCGA |
| 12302 | COL7A1Int36_Int41_T61 | ACCTGGGTCTCCGGGTGAGC |
| 12264 | COL7A1Int36_Int41_T62 | GGTGTGAGGGGTGCTACTCT |
| 20286 | COL7A1Int36_Int41_T7 | GATGACGACCCCATGACCCT |
| 12416 | COL7A1Int36 Int41_T1 | TAGGGTGACAAAGGCGATCG |
| 20307 | COL7A1Int36_Int41_T31 | AGAACTGAGGCGTCATGGTG |
| 20205 | COL7A1Int36_Int41_T123 | CGGGTGGGAAGACCGAAGGG |
| 12399 | COL7A1Int36_Int41_T117 | AGGTTGTGCTAGGGGTGGCT |
| 20297 | COL7A1Int36_Int41_T30 | TGAGGGTCATGGGGTCCAAT |
| 20322 | COL7A1Int36_Int41_T66 | CAAGGGCCAGAGTAACTGGC |
| 20130 | COL7A1Int36_Int41_T71 | AACCACGACCTCTGACCTGG |
| 12423 | COL7A1Int36_Int41_T105 | GAGGTGTGGCCCAGGGTCAT |
| 12412 | COL7A1Int36_Int41_T22 | ACAAAGGCGATCGTGGGGAG |
| 20128 | COL7A1Int36_Int41_T10 | CAAAACCACGACCTCTGACC |
| 12349 | COL7A1Int36_Int41_T21 | TAGGGTCTTCCCGGAAGCCC |
| 20285 | COL7A1Int36_Int41_T41 | AGATGACGACCCCATGACCC |
| 12243 | COL7A1Int36_Int41_T13 | CAGGTCAGAGGTCGTGGTTT |
| 20155 | COL7A1Int36_Int41_T73 | GGCCCTGGAAGGGATGAATT |
| 12256 | COL7A1Int36_Int41_T108 | CCCATGGTGTTAGGGGAGGC |
| 20305 | COL7A1Int36_Int41_T49 | TTGGGAGAACTGAGGCGTCA |
| 20246 | COL7A1Int36_Int41_T111 | AGAGACCCACACCCCTGAGC |
| 20223 | COL7A1Int36_Int41_T18 | AGGGGGGCCAACGGGGCCTT |

[0538] Note that the SEQ ID NOs represent the DNA sequence of the genomic target, while the gRNA or sgRNA spacer sequence will be the RNA version of the DNA sequence.

### Example 8

### Testing of Preferred Guides in In vitro Transcribed (IVT) gRNA Screen

[0539] To identify a large spectrum of pairs of gRNAs able to edit the cognate DNA target region, an in vitro transcribed (IVT) gRNA screen was conducted. The relevant genomic sequence was submitted for analysis using a gRNA design software. The resulting list of gRNAs was narrowed to a select list of gRNAs as described above based on uniqueness of sequence (only gRNAs without a perfect match somewhere else in the genome were screened) and minimal predicted off targets. This set of gRNAs was in vitro transcribed, and transfected using Lipofectamine MessengerMAX into HEK293T cells that constitutively express Cas9. Cells were harvested 48 hours post transfection, the genomic DNA was isolated, and cutting efficiency was evaluated using TIDE analysis. (FIGS. 2-3).

[0540] The gRNA or pairs of gRNA with significant activity can then be followed up in cultured cells to measure correction of the COL7A1 mutation. Off-target events can be followed again. A variety of cells can be transfected and the level of gene correction and possible off-target events measured. These experiments allow optimization of nuclease and donor design and delivery.

### Example 9

### Testing of Preferred Guides in Cells for Off-Target Activity

[0541] The gRNAs having the best on-target activity from the IVT screen in the above example are tested for off-target activity using Hybrid capture assays, GUIDE Seq. and whole genome sequencing in addition to other methods.

### Example 10

### Testing Different Approaches for HDR Gene Editing

[0542] After testing the gRNAs for both on-target activity and off-target activity, mutational correction and whole gene correction strategies will be tested for HDR gene editing.

[0543] For the mutational correction approach, donor DNA template will be provided as a short single-stranded oligonucleotide, a short double-stranded oligonucleotide (PAM sequence intact/PAM sequence mutated), a long single-stranded DNA molecule (PAM sequence intact/PAM sequence mutated) or a long double-stranded DNA molecule (PAM sequence intact/PAM sequence mutated). In addition, the donor DNA template will be delivered by AAV or other viral vector.

[0544] For the whole gene correction approach, a single-stranded or double-stranded DNA having homologous arms to the COL7A1 chromosomal region may include more than 40 nt of the first exon of the COL7A1 gene, the complete CDS of the COL7A1 gene and 3′ UTR of the COL7A1 gene, and at least 40 nt of the following intron. The single-stranded or double-stranded DNA having homologous arms to the COL7A1 chromosomal region may include more than 80 nt of the first exon of the COL7A1 gene, the complete CDS of the COL7A1 gene and 3′ UTR of the COL7A1 gene, and at least 80 nt of the following intron. The single-stranded or double-stranded DNA having homologous arms to the COL7A1 chromosomal region may include more than 100 nt of the first exon of the COL7A1 gene, the complete CDS of the COL7A1 gene and 3′ UTR of the COL7A1 gene, and at least 100 nt of the following intron. The single-stranded or double-stranded DNA having homologous arms to the COL7A1 chromosomal region may include more than 150 nt of the first exon of the COL7A1 gene, the complete CDS of the COL7A1 gene and 3′ UTR of the COL7A1 gene, and at least 150 nt of the following intron. The single-stranded or double-stranded DNA having homologous arms to the COL7A1 chromosomal region may include more than 300 nt of the first exon of the COL7A1 gene, the complete CDS of the COL7A1 gene and 3′ UTR of the COL7A1 gene, and at least 300 nt of the following intron. The single-stranded or double-stranded DNA having homologous arms to the COL7A1 chromosomal region may include more than 400 nt of the first exon of the COL7A1 gene, the complete CDS of the COL7A1 gene and 3′ UTR of the COL7A1 gene, and at least 400 nt of the following intron.

[0545] For the second editing strategy, a single-stranded or double-stranded DNA having homologous arms to the COL7A1 chromosomal region may include more than 40 nt of any portion of the COL7A1 gene from intron 36 through intron 41, the mini gene containing the cDNA from exon 37 to the stop codon of the COL7A1 gene and 3′ UTR of the COL7A1 gene, and at least 40 nt of the 3′ UTR. The single-stranded or double-stranded DNA having homologous arms to the COL7A1 chromosomal region may include more than 80 nt of any portion of the COL7A1 gene from intron 36 through intron 41, the mini gene containing the cDNA from exon 37 to the stop codon of the COL7A1 gene and 3′ UTR of the COL7A1 gene, and at least 80 nt of the 3′ UTR. The single-stranded or double-stranded DNA having homologous arms to the COL7A1 chromosomal region may include more than 100 nt of any portion of the COL7A1 gene from intron 36 through intron 41, the mini gene containing the cDNA from exon 37 to the stop codon of the COL7A1 gene and 3′ UTR of the COL7A1 gene, and at least 100 nt of the 3′ UTR. The single-stranded or double-stranded DNA having homologous arms to the COL7A1 chromosomal region may include more than 150 nt of any portion of the COL7A1 gene from intron 36 through intron 41, the mini gene containing the cDNA from exon 37 to the stop codon of the COL7A1 gene and 3′ UTR of the COL7A1 gene, and at least 150 nt of the 3′ UTR. The single-stranded or double-stranded DNA having homologous arms to the COL7A1 chromosomal region may include more than 300 nt of any portion of the COL7A1 gene from intron 36 through intron 41, the mini gene containing the cDNA from exon 37 to the stop codon of the COL7A1 gene and 3′ UTR of the COL7A1 gene, and at least 300 nt of the 3′ UTR. The single-stranded or double-stranded DNA having homologous arms to the COL7A1 chromosomal region may include more than 400 nt of any portion of the COL7A1 gene from intron 36 through intron 41, the mini gene containing the cDNA from exon 37 to the stop codon of the COL7A1 gene and 3′ UTR of the COL7A1 gene, and at least 400 nt of the 3′ UTR.

[0546] In the instance where the guide used in the second editing strategy targets an exon 3′ of exon 37 (e.g.: any one of exons 38-41), then the minigene would contain a cDNA starting from the exon targeted by the guide (e.g.: any one of exons 38-41) to the stop codon of the COL7A1 gene and 3′ UTR of the COL7A1 gene.

[0547] Alternatively, the DNA template will be delivered by a recombinant AAV particle, or other viral vector, such as those taught herein.

[0548] An insertion of COL7A1 gene or cDNA can be performed into any selected chromosomal location or a safe harbor locus, e.g.: AAVS1 (intron 1 of PPP1R12C), HPRT, H11, hRosa26 and/or F-A region. Assessment of efficiency of HDR mediated knock-in of cDNA into the first exon can utilize cDNA knock-in into safe harbor sites such as: single-stranded or double-stranded DNA having homologous arms to one of the following regions, for example:

[0549] exon 1, intron 1, or exon 2 of PPP1R12C, exon 1, intron 1, or exon 2 of HPRT, and/or exon 1, intron 1, or exon 2 of hRosa26; 5′UTR correspondent to COL7A1 or alternative 5′ UTR, complete CDS of COL7A1 and 3′ UTR of COL7A1 or modified 3′ UTR and at least 80 nt of the first intron, alternatively the same DNA template sequence will be delivered by AAV, or other viral (or non-viral) delivery vector.

### Example 11

### Re-Assessment of Lead CRISPR-Cas9/DNA Donor Combinations

[0550] After testing the different strategies for gene editing, the lead CRISPR-Cas9/DNA donor combinations will be re-assessed in cells for efficiency of deletion, recombination, and off-target specificity. Cas9 mRNA or RNP will be formulated into lipid nanoparticles for delivery, sgRNAs will be formulated into nanoparticles or delivered as a recombinant AAV particle or other viral (or non-viral) delivery vector, and donor DNA will be formulated into nanoparticles or delivered as recombinant AAV particle.

### Example 12

### In vivo Testing in Relevant Animal Model

[0551] After the CRISPR-Cas9/DNA donor combinations have been re-assessed, the lead formulations will be tested in vivo in an animal model.

[0552] Culture in human cells allows direct testing on the human target and the background human genome, as described above.

[0553] Preclinical efficacy and safety evaluations can be observed through engraftment of modified mouse or human keratinocytes or fibroblasts in a mouse model. The modified cells can be observed in the months after engraftment.

### XI. Equivalents and Scope

[0554] Those skilled in the art will recognize, or be able to ascertain using no more than routine experimentation, many equivalents to the specific examples in accordance with the invention described herein. The scope of the present disclosure is not intended to be limited to the above Description, but rather is as set forth in the appended claims.

[0555] Claims or descriptions that include “or” between one or more members of a group are considered satisfied if one, more than one, or all of the group members are present in, employed in, or otherwise relevant to a given product or process unless indicated to the contrary or otherwise evident from the context. The present disclosure includes examples in which exactly one member of the group is present in, employed in, or otherwise relevant to a given product or process. The present disclosure includes examples in which more than one, or the entire group members are present in, employed in, or otherwise relevant to a given product or process.

[0556] In addition, it is to be understood that any particular example of the present disclosure that falls within the prior art may be explicitly excluded from any one or more of the claims. Since such examples are deemed to be known to one of ordinary skill in the art, they may be excluded even if the exclusion is not set forth explicitly herein. Any particular example of the compositions of the present disclosure (e.g., any antibiotic, therapeutic or active ingredient; any method of production; any method of use; etc.) can be excluded from any one or more claims, for any reason, whether or not related to the existence of prior art.

[0557] It is to be understood that the words which have been used are words of description rather than limitation, and that changes may be made within the purview of the appended claims without departing from the true scope and spirit of the present disclosure in its broader aspects.

[0558] While the present invention has been described at some length and with some particularity with respect to the several described examples, it is not intended that it should be limited to any such particulars or examples or any particular example, but it is to be construed with references to the appended claims so as to provide the broadest possible interpretation of such claims in view of the prior art and, therefore, to effectively encompass the intended scope of the invention.

### Note Regarding Illustrative Examples

[0559] While the present disclosure provides descriptions of various specific aspects for the purpose of illustrating various aspects of the present disclosure and/or its potential applications, it is understood that variations and modifications will occur to those skilled in the art. Accordingly, the invention or inventions described herein should be understood to be at least as broad as they are claimed, and not as more narrowly defined by particular illustrative aspects provided herein.

[0560] Any patent, publication, or other disclosure material identified herein is incorporated by reference into this specification in its entirety unless otherwise indicated, but only to the extent that the incorporated material does not conflict with existing descriptions, definitions, statements, or other disclosure material expressly set forth in this specification. As such, and to the extent necessary, the express disclosure as set forth in this specification supersedes any conflicting material incorporated by reference. Any material, or portion thereof, that is said to be incorporated by reference into this specification, but which conflicts with existing definitions, statements, or other disclosure material set forth herein, is only incorporated to the extent that no conflict arises between that incorporated material and the existing disclosure material. Applicants reserve the right to amend this specification to expressly recite any subject matter, or portion thereof, incorporated by reference herein.

The application's sequence listing, which the Patent Office published only in electronic form, follows.

SEQUENCE LISTING (33123 sequences)

SEQ ID NO: 1 - protein, 1368 aa, Streptococcus pyogenes [sequence omitted]

SEQ ID NO: 2 - DNA, 4107 bp, Streptococcus pyogenes
atggataagaaatactcaataggcttagatatcggcacaaatagcgtcggatgggcggtgatcactgatgaatataaggttccgtctaaaaagttcaaggttctgggaaatacagaccgccacagtatcaaaaaaaatcttataggggctcttttatttgacagtggagagacagcggaagcgactcgtctcaaacggacagctcgtagaaggtatacacgtcggaagaatcgtatttgttatctacaggagattttttcaaatgagatggcgaaagtagatgatagtttctttcatcgacttgaagagtcttttttggtggaagaagacaagaagcatgaacgtcatcctatttttggaaatatagtagatgaagttgcttatcatgagaaatatccaactatctatcatctgcgaaaaaaattggtagattctactgataaagcggatttgcgcttaatctatttggccttagcgcatatgattaagtttcgtggtcattttttgattgagggagatttaaatcctgataatagtgatgtggacaaactatttatccagttggtacaaacctacaatcaattatttgaagaaaaccctattaacgcaagtggagtagatgctaaagcgattctttctgcacgattgagtaaatcaagacgattagaaaatctcattgctcagctccccggtgagaagaaaaatggcttatttgggaatctcattgctttgtcattgggtttgacccctaattttaaatcaaattttgatttggcagaagatgctaaattacagctttcaaaagatacttacgatgatgatttagataatttattggcgcaaattggagatcaatatgctgatttgtttttggcagctaagaatttatcagatgctattttactttcagatatcctaagagtaaatactgaaataactaaggctcccctatcagcttcaatgattaaacgctacgatgaacatcatcaagacttgactcttttaaaagctttagttcgacaacaacttccagaaaagtataaagaaatcttttttgatcaatcaaaaaacggatatgcaggttatattgatgggggagctagccaagaagaattttataaatttatcaaaccaattttagaaaaaatggatggtactgaggaattattggtgaaactaaatcgtgaagatttgctgcgcaagcaacggacctttgacaacggctctattccccatcaaattcacttgggtgagctgcatgctattttgagaagacaagaagacttttatccatttttaaaagacaatcgtgagaagattgaaaaaatcttgacttttcgaattccttattatgttggtccattggcgcgtggcaatagtcgttttgcatggatgactcggaagtctgaagaaacaattaccccatggaattttgaagaagttgtcgataaaggtgcttcagctcaatcatttattgaacgcatgacaaactttgataaaaatcttccaaatgaaaaagtactaccaaaacatagtttgctttatgagtattttacggtttataacgaattgacaaaggtcaaatatgttactgaaggaatgcgaaaaccagcatttctttcaggtgaacagaagaaagccattgttgatttactcttcaaaacaaatcgaaaagtaaccgttaagcaattaaaagaagattatttcaaaaaaatagaatgttttgatagtgttgaaatttcaggagttgaagatagatttaatgcttcattaggtacctaccatgatttgctaaaaattattaaagataaagattttttggataatgaagaaaatgaagatatcttagaggatattgttttaacattgaccttatttgaagatagggagatgattgaggaaagacttaaaacatatgctcacctctttgatgataaggtgatgaaacagcttaaacgtcgccgttatactggttggggacgtttgtctcgaaaattgattaatggtattagggataagcaatctggcaaaacaatattagattttttgaaatcagatggttttgccaatcgcaattttatgcagctgatccatgatgatagtttgacatttaaagaagacattcaaaaagcacaagtgtctggacaaggcgatagtttacatgaacatattgcaaatttagctggtagccctgctattaaaaaaggtattttacagactgtaaaagttgttgatgaattggtcaaagtaatggggcggcataagccagaaaatatcgttattgaaatggcacgtgaaaatcagacaactcaaaagggccagaaaaattcgcgagagcgtatgaaacgaatcgaagaaggtatcaaagaattaggaagtcagattcttaaagagcatcctgttgaaaatactcaattgcaaaatgaaaagctctatctctattatctccaaaatggaagagacatgtatgtggaccaagaattagatattaatcgtttaagtgattatgatgtcgatcacattgttccacaaagtttccttaaagacgattcaatagacaataaggtcttaacgcgttctgataaaaatcgtggtaaatcggataacgttccaagtgaagaagtagtcaaaaagatgaaaaactattggagacaacttctaaacgccaagttaatcactcaacgtaagtttgataatttaacgaaagctgaacgtggaggtttgagtgaacttgataaagctggttttatcaaacgccaattggttgaaactcgccaaatcactaagcatgtggcacaaattttggatagtcgcatgaatactaaatacgatgaaaatgataaacttattcgagaggttaaagtgattaccttaaaatctaaattagtttctgacttccgaaaagatttccaattctataaagtacgtgagattaacaattaccatcatgcccatgatgcgtatctaaatgccgtcgttggaactgctttgattaagaaatatccaaaacttgaatcggagtttgtctatggtgattataaagtttatgatgttcgtaaaatgattgctaagtctgagcaagaaataggcaaagcaaccgcaaaatatttcttttactctaatatcatgaacttcttcaaaacagaaattacacttgcaaatggagagattcgcaaacgccctctaatcgaaactaatggggaaactggagaaattgtctgggataaagggcgagattttgccacagtgcgcaaagtattgtccatgccccaagtcaatattgtcaagaaaacagaagtacagacaggcggattctccaaggagtcaattttaccaaaaagaaattcggacaagcttattgctcgtaaaaaagactgggatccaaaaaaatatggtggttttgatagtccaacggtagcttattcagtcctagtggttgctaaggtggaaaaagggaaatcgaagaagttaaaatccgttaaagagttactagggatcacaattatggaaagaagttcctttgaaaaaaatccgattgactttttagaagctaaaggatataaggaagttaaaaaagacttaatcattaaactacctaaatatagtctttttgagttagaaaacggtcgtaaacggatgctggctagtgccggagaattacaaaaaggaaatgagctggctctgccaagcaaatatgtgaattttttatatttagctagtcattatgaaaagttgaagggtagtccagaagataacgaacaaaaacaattgtttgtggagcagcataagcattatttagatgagattattgagcaaatcagtgaattttctaagcgtgttattttagcagatgccaatttagataaagttcttagtgcatataacaaacatagagacaaaccaatacgtgaacaagcagaaaatattattcatttatttacgttgacgaatcttggagctcccgctgcttttaaatattttgatacaacaattgatcgtaaacgatatacgtctacaaaagaagttttagatgccactcttatccatcaatccatcactggtctttatgaaacacgcattgatttgagtcagctaggaggtgactga

SEQ ID NO: 3 - DNA, 4107 bp, Streptococcus pyogenes
atggacaagaagtactccattgggctcgctatcggcacaaacagcgtcggctgggccgtcattacggacgagtacaaggtgccgagcaaaaaattcaaagttctgggcaataccgatcgccacagcataaagaagaacctcattggcgccctcctgttcgactccggggagacggccgaagccacgcggctcaaaagaacagcacggcgcagatatacccgcagaaagaatcggatctgctacctgcaggagatctttagtaatgagatggctaaggtggatgactctttcttccataggctggaggagtcctttttggtggaggaggataaaaagcacgagcgccacccaatctttggcaatatcgtggacgaggtggcgtaccatgaaaagtacccaaccatatatcatctgaggaagaagcttgtagacagtactgataaggctgacttgcggttgatctatctcgcgctggcgcatatgatcaaatttcggggacacttcctcatcgagggggacctgaacccagacaacagcgatgtcgacaaactctttatccaactggttcagacttacaatcagcttttcgaagagaacccgatcaacgcatccggagttgacgccaaagcaatcctgagcgctaggctgtccaaatcccggcggctcgaaaacctcatcgcacagctccctggggagaagaagaacggcctgtttggtaatcttatcgccctgtcactcgggctgacccccaactttaaatctaacttcgacctggccgaagatgccaagcttcaactgagcaaagacacctacgatgatgatctcgacaatctgctggcccagatcggcgaccagtacgcagacctttttttggcggcaaagaacctgtcagacgccattctgctgagtgatattctgcgagtgaacacggagatcaccaaagctccgctgagcgctagtatgatcaagcgctatgatgagcaccaccaagacttgactttgctgaaggcccttgtcagacagcaactgcctgagaagtacaaggaaattttcttcgatcagtctaaaaatggctacgccggatacattgacggcggagcaagccaggaggaattttacaaatttattaagcccatcttggaaaaaatggacggcaccgaggagctgctggtaaagcttaacagagaagatctgttgcgcaaacagcgcactttcgacaatggaagcatcccccaccagattcacctgggcgaactgcacgctatcctcaggcggcaagaggatttctacccctttttgaaagataacagggaaaagattgagaaaatcctcacatttcggataccctactatgtaggccccctcgcccggggaaattccagattcgcgtggatgactcgcaaatcagaagagaccatcactccctggaacttcgaggaagtcgtggataagggggcctctgcccagtccttcatcgaaaggatgactaactttgataaaaatctgcctaacgaaaaggtgcttcctaaacactctctgctgtacgagtacttcacagtttataacgagctcaccaaggtcaaatacgtcacagaagggatgagaaagccagcattcctgtctggagagcagaagaaagctatcgtggacctcctcttcaagacgaaccggaaagttaccgtgaaacagctcaaagaagactatttcaaaaagattgaatgtttcgactctgttgaaatcagcggagtggaggatcgcttcaacgcatccctgggaacgtatcacgatctcctgaaaatcattaaagacaaggacttcctggacaatgaggagaacgaggacattcttgaggacattgtcctcacccttacgttgtttgaagatagggagatgattgaagaacgcttgaaaacttacgctcatctcttcgacgacaaagtcatgaaacagctcaagaggcgccgatatacaggatgggggcggctgtcaagaaaactgatcaatgggatccgagacaagcagagtggaaagacaatcctggattttcttaagtccgatggatttgccaaccggaacttcatgcagttgatccatgatgactctctcacctttaaggaggacatccagaaagcacaagtttctggccagggggacagtcttcacgagcacatcgctaatcttgcaggtagcccagctatcaaaaagggaatactgcagaccgttaaggtcgtggatgaactcgtcaaagtaatgggaaggcataagcccgagaatatcgttatcgagatggcccgagagaaccaaactacccagaagggacagaagaacagtagggaaaggatgaagaggattgaagagggtataaaagaactggggtcccaaatccttaaggaacacccagttgaaaacacccagcttcagaatgagaagctctacctgtactacctgcagaacggcagggacatgtacgtggatcaggaactggacatcaatcggctctccgactacgacgtggctgctatcgtgccccagtcttttctcaaagatgattctattgataataaagtgttgacaagatccgataaagctagagggaagagtgataacgtcccctcagaagaagttgtcaagaaaatgaaaaattattggcggcagctgctgaacgccaaactgatcacacaacggaagttcgataatctgactaaggctgaacgaggtggcctgtctgagttggataaagccggcttcatcaaaaggcagcttgttgagacacgccagatcaccaagcacgtggcccaaattctcgattcacgcatgaacaccaagtacgatgaaaatgacaaactgattcgagaggtgaaagttattactctgaagtctaagctggtctcagatttcagaaaggactttcagttttataaggtgagagagatcaacaattaccaccatgcgcatgatgcctacctgaatgcagtggtaggcactgcacttatcaaaaaatatcccaagcttgaatctgaatttgtttacggagactataaagtgtacgatgttaggaaaatgatcgcaaagtctgagcaggaaataggcaaggccaccgctaagtacttcttttacagcaatattatgaattttttcaagaccgagattacactggccaatggagagattcggaagcgaccacttatcgaaacaaacggagaaacaggagaaatcgtgtgggacaagggtagggatttcgcgacagtccggaaggtcctgtccatgccgcaggtgaacatcgttaaaaagaccgaagtacagaccggaggcttctccaaggaaagtatcctcccgaaaaggaacagcgacaagctgatcgcacgcaaaaaagattgggaccccaagaaatacggcggattcgattctcctacagtcgcttacagtgtactggttgtggccaaagtggagaaagggaagtctaaaaaactcaaaagcgtcaaggaactgctgggcatcacaatcatggagcgatcaagcttcgaaaaaaaccccatcgactttctcgaggcgaaaggatataaagaggtcaaaaaagacctcatcattaagcttcccaagtactctctctttgagcttgaaaacggccggaaacgaatgctcgctagtgcgggcgagctgcagaaaggtaacgagctggcactgccctctaaatacgttaatttcttgtatctggccagccactatgaaaagctcaaagggtctcccgaagataatgagcagaagcagctgttcgtggaacaacacaaacactaccttgatgagatcatcgagcaaataagcgaattctccaaaagagtgatcctcgccgacgctaacctcgataaggtgctttctgcttacaataagcacagggataagcccatcagggagcaggcagaaaacattatccacttgtttactctgaccaacttgggcgcgcctgcagccttcaagtacttcgacaccaccatagacagaaagcggtacacctctacaaaggaggtcctggacgccacactgattcatcagtcaattacggggctctatgaaacaagaatcgacctctctcagctcggtggagactaa

SEQ ID NO: 4 - DNA, 4140 bp, Streptococcus pyogenes
atggacaagaagtactccattgggctcgatatcggcacaaacagcgtcggctgggccgtcattacggacgagtacaaggtgccgagcaaaaaattcaaagttctgggcaataccgatcgccacagcataaagaagaacctcattggcgccctcctgttcgactccggggagacggccgaagccacgcggctcaaaagaacagcacggcgcagatatacccgcagaaagaatcggatctgctacctgcaggagatctttagtaatgagatggctaaggtggatgactctttcttccataggctggaggagtcctttttggtggaggaggataaaaagcacgagcgccacccaatctttggcaatatcgtggacgaggtggcgtaccatgaaaagtacccaaccatatatcatctgaggaagaagcttgtagacagtactgataaggctgacttgcggttgatctatctcgcgctggcgcatatgatcaaatttcggggacacttcctcatcgagggggacctgaacccagacaacagcgatgtcgacaaactctttatccaactggttcagacttacaatcagcttttcgaagagaacccgatcaacgcatccggagttgacgccaaagcaatcctgagcgctaggctgtccaaatcccggcggctcgaaaacctcatcgcacagctccctggggagaagaagaacggcctgtttggtaatcttatcgccctgtcactcgggctgacccccaactttaaatctaacttcgacctggccgaagatgccaagcttcaactgagcaaagacacctacgatgatgatctcgacaatctgctggcccagatcggcgaccagtacgcagacctttttttggcggcaaagaacctgtcagacgccattctgctgagtgatattctgcgagtgaacacggagatcaccaaagctccgctgagcgctagtatgatcaagcgctatgatgagcaccaccaagacttgactttgctgaaggcccttgtcagacagcaactgcctgagaagtacaaggaaattttcttcgatcagtctaaaaatggctacgccggatacattgacggcggagcaagccaggaggaattttacaaatttattaagcccatcttggaaaaaatggacggcaccgaggagctgctggtaaagcttaacagagaagatctgttgcgcaaacagcgcactttcgacaatggaagcatcccccaccagattcacctgggcgaactgcacgctatcctcaggcggcaagaggatttctacccctttttgaaagataacagggaaaagattgagaaaatcctcacatttcggataccctactatgtaggccccctcgcccggggaaattccagattcgcgtggatgactcgcaaatcagaagagaccatcactccctggaacttcgaggaagtcgtggataagggggcctctgcccagtccttcatcgaaaggatgactaactttgataaaaatctgcctaacgaaaaggtgcttcctaaacactctctgctgtacgagtacttcacagtttataacgagctcaccaaggtcaaatacgtcacagaagggatgagaaagccagcattcctgtctggagagcagaagaaagctatcgtggacctcctcttcaagacgaaccggaaagttaccgtgaaacagctcaaagaagactatttcaaaaagattgaatgtttcgactctgttgaaatcagcggagtggaggatcgcttcaacgcatccctgggaacgtatcacgatctcctgaaaatcattaaagacaaggacttcctggacaatgaggagaacgaggacattcttgaggacattgtcctcacccttacgttgtttgaagatagggagatgattgaagaacgcttgaaaacttacgctcatctcttcgacgacaaagtcatgaaacagctcaagaggcgccgatatacaggatgggggcggctgtcaagaaaactgatcaatgggatccgagacaagcagagtggaaagacaatcctggattttcttaagtccgatggatttgccaaccggaacttcatgcagttgatccatgatgactctctcacctttaaggaggacatccagaaagcacaagtttctggccagggggacagtcttcacgagcacatcgctaatcttgcaggtagcccagctatcaaaaagggaatactgcagaccgttaaggtcgtggatgaactcgtcaaagtaatgggaaggcataagcccgagaatatcgttatcgagatggcccgagagaaccaaactacccagaagggacagaagaacagtagggaaaggatgaagaggattgaagagggtataaaagaactggggtcccaaatccttaaggaacacccagttgaaaacacccagcttcagaatgagaagctctacctgtactacctgcagaacggcagggacatgtacgtggatcaggaactggacatcaatcggctctccgactacgacgtggatcatatcgtgccccagtcttttctcaaagatgattctattgataataaagtgttgacaagatccgataaaaatagagggaagagtgataacgtcccctcagaagaagttgtcaagaaaatgaaaaattattggcggcagctgctgaacgccaaactgatcacacaacggaagttcgataatctgactaaggctgaacgaggtggcctgtctgagttggataaagccggcttcatcaaaaggcagcttgttgagacacgccagatcaccaagcacgtggcccaaattctcgattcacgcatgaacaccaagtacgatgaaaatgacaaactgattcgagaggtgaaagttattactctgaagtctaagctggtctcagatttcagaaaggactttcagttttataaggtgagagagatcaacaattaccaccatgcgcatgatgcctacctgaatgcagtggtaggcactgcacttatcaaaaaatatcccaagcttgaatctgaatttgtttacggagactataaagtgtacgatgttaggaaaatgatcgcaaagtctgagcaggaaataggcaaggccaccgctaagtacttcttttacagcaatattatgaattttttcaagaccgagattacactggccaatggagagattcggaagcgaccacttatcgaaacaaacggagaaacaggagaaatcgtgtgggacaagggtagggatttcgcgacagtccggaaggtcctgtccatgccgcaggtgaacatcgttaaaaagaccgaagtacagaccggaggcttctccaaggaaagtatcctcccgaaaaggaacagcgacaagctgatcgcacgcaaaaaagattgggaccccaagaaatacggcggattcgattctcctacagtcgcttacagtgtactggttgtggccaaagtggagaaagggaagtctaaaaaactcaaaagcgtcaaggaactgctgggcatcacaatcatggagcgatcaagcttcgaaaaaaaccccatcgactttctcgaggcgaaaggatataaagaggtcaaaaaagacctcatcattaagcttcccaagtactctctctttgagcttgaaaacggccggaaacgaatgctcgctagtgcgggcgagctgcagaaaggtaacgagctggcactgccctctaaatacgttaatttcttgtatctggccagccactatgaaaagctcaaagggtctcccgaagataatgagcagaagcagctgttcgtggaacaacacaaacactaccttgatgagatcatcgagcaaataagcgaattctccaaaagagtgatcctcgccgacgctaacctcgataaggtgctttctgcttacaataagcacagggataagcccatcagggagcaggcagaaaacattatccacttgtttactctgaccaacttgggcgcgcctgcagccttcaagtacttcgacaccaccatagacagaaagcggtacacctctacaaaggaggtcctggacgccacactgattcatcagtcaattacggggctctatgaaacaagaatcgacctctctcagctcggtggagacagcagggctgaccccaagaagaagaggaaggtgtga

SEQ ID NO: 5 - DNA, 4200 bp, Streptococcus pyogenes
atggacaagaagtactccattgggctcgatatcggcacaaacagcgtcggctgggccgtcattacggacgagtacaaggtgccgagcaaaaaattcaaagttctgggcaataccgatcgccacagcataaagaagaacctcattggcgccctcctgttcgactccggggagacggccgaagccacgcggctcaaaagaacagcacggcgcagatatacccgcagaaagaatcggatctgctacctgcaggagatctttagtaatgagatggctaaggtggatgactctttcttccataggctggaggagtcctttttggtggaggaggataaaaagcacgagcgccacccaatctttggcaatatcgtggacgaggtggcgtaccatgaaaagtacccaaccatatatcatctgaggaagaagcttgtagacagtactgataaggctgacttgcggttgatctatctcgcgctggcgcatatgatcaaatttcggggacacttcctcatcgagggggacctgaacccagacaacagcgatgtcgacaaactctttatccaactggttcagacttacaatcagcttttcgaagagaacccgatcaacgcatccggagttgacgccaaagcaatcctgagcgctaggctgtccaaatcccggcggctcgaaaacctcatcgcacagctccctggggagaagaagaacggcctgtttggtaatcttatcgccctgtcactcgggctgacccccaactttaaatctaacttcgacctggccgaagatgccaagcttcaactgagcaaagacacctacgatgatgatctcgacaatctgctggcccagatcggcgaccagtacgcagacctttttttggcggcaaagaacctgtcagacgccattctgctgagtgatattctgcgagtgaacacggagatcaccaaagctccgctgagcgctagtatgatcaagcgctatgatgagcaccaccaagacttgactttgctgaaggcccttgtcagacagcaactgcctgagaagtacaaggaaattttcttcgatcagtctaaaaatggctacgccggatacattgacggcggagcaagccaggaggaattttacaaatttattaagcccatcttggaaaaaatggacggcaccgaggagctgctggtaaagcttaacagagaagatctgttgcgcaaacagcgcactttcgacaatggaagcatcccccaccagattcacctgggcgaactgcacgctatcctcaggcggcaagaggatttctacccctttttgaaagataacagggaaaagattgagaaaatcctcacatttcggataccctactatgtaggccccctcgcccggggaaattccagattcgcgtggatgactcgcaaatcagaagagaccatcactccctggaacttcgaggaagtcgtggataagggggcctctgcccagtccttcatcgaaaggatgactaactttgataaaaatctgcctaacgaaaaggtgcttcctaaacactctctgctgtacgagtacttcacagtttataacgagctcaccaaggtcaaatacgtcacagaagggatgagaaagccagcattcctgtctggagagcagaagaaagctatcgtggacctcctcttcaagacgaaccggaaagttaccgtgaaacagctcaaagaagactatttcaaaaagattgaatgtttcgactctgttgaaatcagcggagtggaggatcgcttcaacgcatccctgggaacgtatcacgatctcctgaaaatcattaaagacaaggacttcctggacaatgaggagaacgaggacattcttgaggacattgtcctcacccttacgttgtttgaagatagggagatgattgaagaacgcttgaaaacttacgctcatctcttcgacgacaaagtcatgaaacagctcaagaggcgccgatatacaggatgggggcggctgtcaagaaaactgatcaatgggatccgagacaagcagagtggaaagacaatcctggattttcttaagtccgatggatttgccaaccggaacttcatgcagttgatccatgatgactctctcacctttaaggaggacatccagaaagcacaagtttctggccagggggacagtcttcacgagcacatcgctaatcttgcaggtagcccagctatcaaaaagggaatactgcagaccgttaaggtcgtggatgaactcgtcaaagtaatgggaaggcataagcccgagaatatcgttatcgagatggcccgagagaaccaaactacccagaagggacagaagaacagtagggaaaggatgaagaggattgaagagggtataaaagaactggggtcccaaatccttaaggaacacccagttgaaaacacccagcttcagaatgagaagctctacctgtactacctgcagaacggcagggacatgtacgtggatcaggaactggacatcaatcggctctccgactacgacgtggatcatatcgtgccccagtcttttctcaaagatgattctattgataataaagtgttgacaagatccgataaaaatagagggaagagtgataacgtcccctcagaagaagttgtcaagaaaatgaaaaattattggcggcagctgctgaacgccaaactgatcacacaacggaagttcgataatctgactaaggctgaacgaggtggcctgtctgagttggataaagccggcttcatcaaaaggcagcttgttgagacacgccagatcaccaagcacgtggcccaaattctcgattcacgcatgaacaccaagtacgatgaaaatgacaaactgattcgagaggtgaaagttattactctgaagtctaagctggtctcagatttcagaaaggactttcagttttataaggtgagagagatcaacaattaccaccatgcgcatgatgcctacctgaatgcagtggtaggcactgcacttatcaaaaaatatcccaagcttgaatctgaatttgtttacggagactataaagtgtacgatgttaggaaaatgatcgcaaagtctgagcaggaaataggcaaggccaccgctaagtacttcttttacagcaatattatgaattttttcaagaccgagattacactggccaatggagagattcggaagcgaccacttatcgaaacaaacggagaaacaggagaaatcgtgtgggacaagggtagggatttcgcgacagtccggaaggtcctgtccatgccgcaggtgaacatcgttaaaaagaccgaagtacagaccggaggcttctccaaggaaagtatcctcccgaaaaggaacagcgacaagctgatcgcacgcaaaaaagattgggaccccaagaaatacggcggattcgattctcctacagtcgcttacagtgtactggttgtggccaaagtggagaaagggaagtctaaaaaactcaaaagcgtcaaggaactgctgggcatcacaatcatggagcgatcaagcttcgaaaaaaaccccatcgactttctcgaggcgaaaggatataaagaggtcaaaaaagacctcatcattaagcttcccaagtactctctctttgagcttgaaaacggccggaaacgaatgctcgctagtgcgggcgagctgcagaaaggtaacgagctggcactgccctctaaatacgttaatttcttgtatctggccagccactatgaaaagctcaaagggtctcccgaagataatgagcagaagcagctgttcgtggaacaacacaaacactaccttgatgagatcatcgagcaaataagcgaattctccaaaagagtgatcctcgccgacgctaacctcgataaggtgctttctgcttacaataagcacagggataagcccatcagggagcaggcagaaaacattatccacttgtttactctgaccaacttgggcgcgcctgcagccttcaagtacttcgacaccaccatagacagaaagcggtacacctctacaaaggaggtcctggacgccacactgattcatcagtcaattacggggctctatgaaacaagaatcgacctctctcagctcggtggagacgcggccgcagatccaaaaaagaagagaaaggtagatccaaaaaagaagagaaaggtagatccaaaaaagaagagaaaggtagatacggccgcatag

SEQ ID NO: 6 - DNA, 4326 bp, Streptococcus pyogenes
atggacaagaagtactccattgggctcgctatcggcacaaacagcgtcggctgggccgtcattacggacgagtacaaggtgccgagcaaaaaattcaaagttctgggcaataccgatcgccacagcataaagaagaacctcattggcgccctcctgttcgactccggggagacggccgaagccacgcggctcaaaagaacagcacggcgcagatatacccgcagaaagaatcggatctgctacctgcaggagatctttagtaatgagatggctaaggtggatgactctttcttccataggctggaggagtcctttttggtggaggaggataaaaagcacgagcgccacccaatctttggcaatatcgtggacgaggtggcgtaccatgaaaagtacccaaccatatatcatctgaggaagaagcttgtagacagtactgataaggctgacttgcggttgatctatctcgcgctggcgcatatgatcaaatttcggggacacttcctcatcgagggggacctgaacccagacaacagcgatgtcgacaaactctttatccaactggttcagacttacaatcagcttttcgaagagaacccgatcaacgcatccggagttgacgccaaagcaatcctgagcgctaggctgtccaaatcccggcggctcgaaaacctcatcgcacagctccctggggagaagaagaacggcctgtttggtaatcttatcgccctgtcactcgggctgacccccaactttaaatctaacttcgacctggccgaagatgccaagcttcaactgagcaaagacacctacgatgatgatctcgacaatctgctggcccagatcggcgaccagtacgcagacctttttttggcggcaaagaacctgtcagacgccattctgctgagtgatattctgcgagtgaacacggagatcaccaaagctccgctgagcgctagtatgatcaagcgctatgatgagcaccaccaagacttgactttgctgaaggcccttgtcagacagcaactgcctgagaagtacaaggaaattttcttcgatcagtctaaaaatggctacgccggatacattgacggcggagcaagccaggaggaattttacaaatttattaagcccatcttggaaaaaatggacggcaccgaggagctgctggtaaagcttaacagagaagatctgttgcgcaaacagcgcactttcgacaatggaagcatcccccaccagattcacctgggcgaactgcacgctatcctcaggcggcaagaggatttctacccctttttgaaagataacagggaaaagattgagaaaatcctcacatttcggataccctactatgtaggccccctcgcccggggaaattccagattcgcgtggatgactcgcaaatcagaagagaccatcactccctggaacttcgaggaagtcgtggataagggggcctctgcccagtccttcatcgaaaggatgactaactttgataaaaatctgcctaacgaaaaggtgcttcctaaacactctctgctgtacgagtacttcacagtttataacgagctcaccaaggtcaaatacgtcacagaagggatgagaaagccagcattcctgtctggagagcagaagaaagctatcgtggacctcctcttcaagacgaaccggaaagttaccgtgaaacagctcaaagaagactatttcaaaaagattgaatgtttcgactctgttgaaatcagcggagtggaggatcgcttcaacgcatccctgggaacgtatcacgatctcctgaaaatcattaaagacaaggacttcctggacaatgaggagaacgaggacattcttgaggacattgtcctcacccttacgttgtttgaagatagggagatgattgaagaacgcttgaaaacttacgctcatctcttcgacgacaaagtcatgaaacagctcaagaggcgccgatatacaggatgggggcggctgtcaagaaaactgatcaatgggatccgagacaagcagagtggaaagacaatcctggattttcttaagtccgatggatttgccaaccggaacttcatgcagttgatccatgatgactctctcacctttaaggaggacatccagaaagcacaagtttctggccagggggacagtcttcacgagcacatcgctaatcttgcaggtagcccagctatcaaaaagggaatactgcagaccgttaaggtcgtggatgaactcgtcaaagtaatgggaaggcataagcccgagaatatcgttatcgagatggcccgagagaaccaaactacccagaagggacagaagaacagtagggaaaggatgaagaggattgaagagggtataaaagaactggggtcccaaatccttaaggaacacccagttgaaaacacccagcttcagaatgagaagctctacctgtactacctgcagaacggcagggacatgtacgtggatcaggaactggacatcaatcggctctccgactacgacgtggctgctatcgtgccccagtcttttctcaaagatgattctattgataataaagtgttgacaagatccgataaagctagagggaagagtgataacgtcccctcagaagaagttgtcaagaaaatgaaaaattattggcggcagctgctgaacgccaaactgatcacacaacggaagttcgataatctgactaaggctgaacgaggtggcctgtctgagttggataaagccggcttcatcaaaaggcagcttgttgagacacgccagatcaccaagcacgtggcccaaattctcgattcacgcatgaacaccaagtacgatgaaaatgacaaactgattcgagaggtgaaagttattactctgaagtctaagctggtctcagatttcagaaaggactttcagttttataaggtgagagagatcaacaattaccaccatgcgcatgatgcctacctgaatgcagtggtaggcactgcacttatcaaaaaatatcccaagcttgaatctgaatttgtttacggagactataaagtgtacgatgttaggaaaatgatcgcaaagtctgagcaggaaataggcaaggccaccgctaagtacttcttttacagcaatattatgaattttttcaagaccgagattacactggccaatggagagattcggaagcgaccacttatcgaaacaaacggagaaacaggagaaatcgtgtgggacaagggtagggatttcgcgacagtccggaaggtcctgtccatgccgcaggtgaacatcgttaaaaagaccgaagtacagaccggaggcttctccaaggaaagtatcctcccgaaaaggaacagcgacaagctgatcgcacgcaaaaaagattgggaccccaagaaatacggcggattcgattctcctacagtcgcttacagtgtactggttgtggccaaagtggagaaagggaagtctaaaaaactcaaaagcgtcaaggaactgctgggcatcacaatcatggagcgatcaagcttcgaaaaaaaccccatcgactttctcgaggcgaaaggatataaagaggtcaaaaaagacctcatcattaagcttcccaagtactctctctttgagcttgaaaacggccggaaacgaatgctcgctagtgcgggcgagctgcagaaaggtaacgagctggcactgccctctaaatacgttaatttcttgtatctggccagccactatgaaaagctcaaagggtctcccgaagataatgagcagaagcagctgttcgtggaacaacacaaacactaccttgatgagatcatcgagcaaataagcgaattctccaaaagagtgatcctcgccgacgctaacctcgataaggtgctttctgcttacaataagcacagggataagcccatcagggagcaggcagaaaacattatccacttgtttactctgaccaacttgggcgcgcctgcagccttcaagtacttcgacaccaccatagacagaaagcggtacacctctacaaaggaggtcctggacgccacactgattcatcagtcaattacggggctctatgaaacaagaatcgacctctctcagctcggtggagacagcagggctgaccccaagaagaagaggaaggtggaggccagcggttccggacgggctgacgcattggacgattttgatctggatatgctgggaagtgacgccctcgatgattttgaccttgacatgcttggttcggatgcccttgatgactttgacctcgacatgctcggcagtgacgcccttgatgatttcgacctggacatgctgattaactctagatga

SEQ ID NO: 7 - DNA, 4359 bp, Streptococcus pyogenes
atgcccaagaagaagaggaaggtgggaagggggatggacaagaagtactccattgggctcgctatcggcacaaacagcgtcggctgggccgtcattacggacgagtacaaggtgccgagcaaaaaattcaaagttctgggcaataccgatcgccacagcataaagaagaacctcattggcgccctcctgttcgactccggggagacggccgaagccacgcggctcaaaagaacagcacggcgcagatatacccgcagaaagaatcggatctgctacctgcaggagatctttagtaatgagatggctaaggtggatgactctttcttccataggctggaggagtcctttttggtggaggaggataaaaagcacgagcgccacccaatctttggcaatatcgtggacgaggtggcgtaccatgaaaagtacccaaccatatatcatctgaggaagaagcttgtagacagtactgataaggctgacttgcggttgatctatctcgcgctggcgcatatgatcaaatttcggggacacttcctcatcgagggggacctgaacccagacaacagcgatgtcgacaaactctttatccaactggttcagacttacaatcagcttttcgaagagaacccgatcaacgcatccggagttgacgccaaagcaatcctgagcgctaggctgtccaaatcccggcggctcgaaaacctcatcgcacagctccctggggagaagaagaacggcctgtttggtaatcttatcgccctgtcactcgggctgacccccaactttaaatctaacttcgacctggccgaagatgccaagcttcaactgagcaaagacacctacgatgatgatctcgacaatctgctggcccagatcggcgaccagtacgcagacctttttttggcggcaaagaacctgtcagacgccattctgctgagtgatattctgcgagtgaacacggagatcaccaaagctccgctgagcgctagtatgatcaagcgctatgatgagcaccaccaagacttgactttgctgaaggcccttgtcagacagcaactgcctgagaagtacaaggaaattttcttcgatcagtctaaaaatggctacgccggatacattgacggcggagcaagccaggaggaattttacaaatttattaagcccatcttggaaaaaatggacggcaccgaggagctgctggtaaagcttaacagagaagatctgttgcgcaaacagcgcactttcgacaatggaagcatcccccaccagattcacctgggcgaactgcacgctatcctcaggcggcaagaggatttctacccctttttgaaagataacagggaaaagattgagaaaatcctcacatttcggataccctactatgtaggccccctcgcccggggaaattccagattcgcgtggatgactcgcaaatcagaagagaccatcactccctggaacttcgaggaagtcgtggataagggggcctctgcccagtccttcatcgaaaggatgactaactttgataaaaatctgcctaacgaaaaggtgcttcctaaacactctctgctgtacgagtacttcacagtttataacgagctcaccaaggtcaaatacgtcacagaagggatgagaaagccagcattcctgtctggagagcagaagaaagctatcgtggacctcctcttcaagacgaaccggaaagttaccgtgaaacagctcaaagaagactatttcaaaaagattgaatgtttcgactctgttgaaatcagcggagtggaggatcgcttcaacgcatccctgggaacgtatcacgatctcctgaaaatcattaaagacaaggacttcctggacaatgaggagaacgaggacattcttgaggacattgtcctcacccttacgttgtttgaagatagggagatgattgaagaacgcttgaaaacttacgctcatctcttcgacgacaaagtcatgaaacagctcaagaggcgccgatatacaggatgggggcggctgtcaagaaaactgatcaatgggatccgagacaagcagagtggaaagacaatcctggattttcttaagtccgatggatttgccaaccggaacttcatgcagttgatccatgatgactctctcacctttaaggaggacatccagaaagcacaagtttctggccagggggacagtcttcacgagcacatcgctaatcttgcaggtagcccagctatcaaaaagggaatactgcagaccgttaaggtcgtggatgaactcgtcaaagtaatgggaaggcataagcccgagaatatcgttatcgagatggcccgagagaaccaaactacccagaagggacagaagaacagtagggaaaggatgaagaggattgaagagggtataaaagaactggggtcccaaatccttaaggaacacccagttgaaaacacccagcttcagaatgagaagctctacctgtactacctgcagaacggcagggacatgtacgtggatcaggaactggacatcaatcggctctccgactacgacgtggctgctatcgtgccccagtcttttctcaaagatgattctattgataataaagtgttgacaagatccgataaagctagagggaagagtgataacgtcccctcagaagaagttgtcaagaaaatgaaaaattattggcggcagctgctgaacgccaaactgatcacacaacggaagttcgataatctgactaaggctgaacgaggtggcctgtctgagttggataaagccggcttcatcaaaaggcagcttgttgagacacgccagatcaccaagcacgtggcccaaattctcgattcacgcatgaacaccaagtacgatgaaaatgacaaactgattcgagaggtgaaagttattactctgaagtctaagctggtctcagatttcagaaaggactttcagttttataaggtgagagagatcaacaattaccaccatgcgcatgatgcctacctgaatgcagtggtaggcactgcacttatcaaaaaatatcccaagcttgaatctgaatttgtttacggagactataaagtgtacgatgttaggaaaatgatcgcaaagtctgagcaggaaataggcaaggccaccgctaagtacttcttttacagcaatattatgaattttttcaagaccgagattacactggccaatggagagattcggaagcgaccacttatcgaaacaaacggagaaacaggagaaatcgtgtgggacaagggtagggatttcgcgacagtccggaaggtcctgtccatgccgcaggtgaacatcgttaaaaagaccgaagtacagaccggaggcttctccaaggaaagtatcctcccgaaaaggaacagcgacaagctgatcgcacgcaaaaaagattgggaccccaagaaatacggcggattcgattctcctacagtcgcttacagtgtactggttgtggccaaagtggagaaagggaagtctaaaaaactcaaaagcgtcaaggaactgctgggcatcacaatcatggagcgatcaagcttcgaaaaaaaccccatcgactttctcgaggcgaaaggatataaagaggtcaaaaaagacctcatcattaagcttcccaagtactctctctttgagcttgaaaacggccggaaacgaatgctcgctagtgcgggcgagctgcagaaaggtaacgagctggcactgccctctaaatacgttaatttcttgtatctggccagccactatgaaaagctcaaagggtctcccgaagataatgagcagaagcagctgttcgtggaacaacacaaacactaccttgatgagatcatcgagcaaataagcgaattctccaaaagagtgatcctcgccgacgctaacctcgataaggtgctttctgcttacaataagcacagggataagcccatcagggagcaggcagaaaacattatccacttgtttactctgaccaacttgggcgcgcctgcagccttcaagtacttcgacaccaccatagacagaaagcggtacacctctacaaaggaggtcctggacgccacactgattcatcagtcaattacggggctctatgaaacaagaatcgacctctctcagctcggtggagacagcagggctgaccccaagaagaagaggaaggtggaggccagcggttccggacgggctgacgcattggacgattttgatctggatatgctgggaagtgacgccctcgatgattttgaccttgacatgcttggttcggatgcccttgatgactttgacctcgacatgctcggcagtgacgcccttgatgatttcgacctggacatgctgattaactctagatga

SEQ ID NO: 8 - protein, 1409 aa, Streptococcus thermophiles
MLFNKCIIISINLDFSNKEKCMTKPYSIGLDIGTNSVGWAVITDNYKVPSKKMKVLGNTSKKYIKKNLLGVLLFDSGITAEGRRLKRTARRRYTRRRNRILYLQEIFSTEMATLDDAFFQRLDDSFLVPDDKRDSKYPIFGNLVEEKVYHDEFPTIYHLRKYLADSTKKADLRLVYLALAHMIKYRGHFLIEGEFNSKNNDIQKNFQDFLDTYNAIFESDLSLENSKQLEEIVKDKISKLEKKDRILKLFPGEKNSGIFSEFLKLIVGNQADFRKCFNLDEKASLHFSKESYDEDLETLLGYIGDDYSDVFLKAKKLYDAILLSGFLTVTDNETEAPLSSAMIKRYNEHKEDLALLKEYIRNISLKTYNEVFKDDTKNGYAGYIDGKTNQEDFYVYLKNLLAEFEGADYFLEKIDREDFLRKQRTFDNGSIPYQIHLQEMRAILDKQAKFYPFLAKNKERIEKILTFRIPYYVGPLARGNSDFAWSIRKRNEKITPWNFEDVIDKESSAEAFINRMTSFDLYLPEEKVLPKHSLLYETFNVYNELTKVRFIAESMRDYQFLDSKQKKDIVRLYFKDKRKVTDKDIIEYLHAIYGYDGIELKGIEKQFNSSLSTYHDLLNIINDKEFLDDSSNEAIIEEIIHTLTIFEDREMIKQRLSKFENIFDKSVLKKLSRRHYTGWGKLSAKLINGIRDEKSGNTILDYLIDDGISNRNFMQLIHDDALSFKKKIQKAQIIGDEDKGNIKEVVKSLPGSPAIKKGILQSIKIVDELVKVMGGRKPESIVVEMARENQYTNQGKSNSQQRLKRLEKSLKELGSKILKENIPAKLSKIDNNALQNDRLYLYYLQNGKDMYTGDDLDIDRLSNYDIDHIIPQAFLKDNSIDNKVLVSSASNRGKSDDFPSLEVVKKRKTFWYQLLKSKLISQRKFDNLTKAERGGLLPEDKAGFIQRQLVETRQITKHVARLLDEKFNNKKDENNRAVRTVKIITLKSTLVSQFRKDFELYKVREINDFHHAHDAYLNAVIASALLKKYPKLEPEFVYGDYPKYNSFRERKSATEKVYFYSNIMNIFKKSISLADGRVIERPLIEVNEETGESVWNKESDLATVRRVLSYPQVNVVKKVEEQNHGLDRGKPKGLFNANLSSKPKPNSNENLVGAKEYLDPKKYGGYAGISNSFAVLVKGTIEKGAKKKITNVLEFQGISILDRINYRKDKLNFLLEKGYKDIELIIELPKYSLFELSDGSRRMLASILSTNNKRGEIHKGNQIFLSQKFVKLLYHAKRISNTINENHRKYVENHKKEFEELFYYILEFNENYVGAKKNGKLLNSAFQSWQNHSIDELCSSFIGPTGSERKGLFELTSRGSAADFEFLGVKIPRYRDYTPSSLLKDATLIHQSVTGLYETRIDLAKLGEG

SEQ ID NO: 9 - DNA, 4167 bp, Streptococcus thermophiles
atgactaagccatactcaattggacttgatattggaacgaatagtgttggatgggctgtaataactgataattacaaggttccgtctaaaaaaatgaaagtcttaggaaatacgagtaaaaagtatatcaaaaagaacctgttaggtgtattactctttgactctggaatcacagcagaaggaagaagattgaagcgtactgcaagaagacgttatactagacgccgtaatcgtatcctttatttgcaggaaatttttagcacggagatggctacattagatgatgctttctttcaaagacttgacgattcgtttttagttcctgatgataaacgtgatagtaagtatccgatatttggaaacttagtagaagaaaaagtctatcatgatgaatttccaactatctatcatttaaggaaatatttagcagatagtactaaaaaagcagatttgcgtctagtttatcttgcattggctcatatgattaaatatagaggtcacttcttaattgaaggagagtttaattcaaaaaataatgatattcagaagaattttcaagactttttggacacttataatgctatttttgaatcggatttatcacttgagaatagtaaacaacttgaggaaattgttaaagataagattagtaaattagaaaagaaagatcgtattttaaaactcttccctggggagaagaattcggggattttttcagagtttctaaagttgattgtaggaaatcaagctgattttaggaaatgttttaatttagacgaaaaagcctccttacatttttccaaagaaagctatgatgaagatttagagactttgttaggttatattggagatgattacagtgatgtctttctcaaagcaaagaaactttatgatgctattcttttatcgggttttctgactgtaactgataatgagacagaagcacctctctcttctgctatgataaagcgatataatgaacacaaagaagatttagcgttactaaaggaatatataagaaatatttcactaaaaacgtataatgaagtatttaaagatgacaccaaaaatggttatgctggttatattgatggaaaaacaaatcaggaagatttctacgtatatctaaaaaacctattggctgaatttgaaggtgcggattattttcttgaaaaaattgatcgagaagattttttgagaaagcaacgtacatttgacaatggttcgataccatatcagattcatcttcaagaaatgagagcaattcttgataagcaagctaaattttatcctttcttggctaaaaataaagaaagaatcgagaagattttaaccttccgaattccttattatgtaggtccacttgcgagagggaatagtgattttgcctggtcaataagaaaacgaaatgaaaaaattacaccttggaattttgaggacgttattgacaaagaatcttcggcagaggctttcattaatcgaatgactagttttgatttgtatttgccagaagagaaggtacttccaaagcatagtctcttatacgaaacttttaatgtatataatgaattaacaaaagttagatttattgccgaaagtatgagagattatcaatttttagatagtaagcagaagaaagatattgttagactttattttaaagataaaaggaaagttactgataaggatattattgaatatttacatgcaatttatgggtatgatggaattgaattaaaaggcatagagaaacagtttaattctagtttatctacttatcacgatcttttaaatattattaatgataaagagtttttggatgatagttcaaatgaagcgattatcgaagaaattatccatactttgacaatttttgaagatagagagatgataaaacaacgtctttcaaaatttgagaatatattcgataaatccgttttgaaaaagttatctcgtagacattacactggctggggtaagttatctgctaagcttattaatggtattcgagatgaaaaatctggtaatactattcttgattacttaattgatgatggtatttctaaccgtaatttcatgcaacttattcacgatgatgctctttcttttaaaaagaagatacagaaagcacaaattattggtgacgaagataaaggtaatattaaagaggtcgttaagtctttgccaggtagtcctgcgattaaaaaaggtattttacaaagcataaaaattgtagatgaattggtcaaagtaatgggaggaagaaaacccgagtcaattgttgttgagatggctcgtgaaaatcaatataccaatcaaggtaagtctaattcccaacaacgcttgaaacgtttagaaaaatctctcaaagagttaggtagtaagatacttaaggaaaatattcctgcaaaactttctaaaatagacaataacgcacttcaaaatgatcgactttacttatactatcttcaaaatggaaaagatatgtataccggagatgatttagatattgatagattaagtaattatgatattgatcatattattcctcaagcttttttgaaagataattctattgacaataaagtacttgtttcatctgctagtaaccgtggtaaatcagatgattttccaagtttagaggttgtcaaaaaaagaaagacattttggtatcaattattgaaatcaaaattaatttctcaacgaaaatttgataatctgacaaaagctgaacggggaggattgttacctgaggacaaagctggttttattcaacgccagttggttgaaacacgtcaaataacaaaacatgtagctcgtttacttgatgagaaatttaataataaaaaagatgaaaataatagagcggtacgaacagtaaaaattattaccttgaaatctaccttagtttctcaatttcgtaaggattttgaactttataaagttcgtgaaatcaatgattttcatcatgctcatgatgcttacttgaatgccgttatagcaagtgctttacttaagaaataccctaaactagagccagaatttgtgtacggtgattatccaaaatacaatagttttagagaaagaaagtccgctacagaaaaggtatatttctattcaaatatcatgaatatctttaaaaaatctatttctttagctgatggtagagttattgaaagaccacttattgaggtaaatgaggagaccggcgaatccgtttggaataaagaatctgatttagcaactgtaaggagagtactctcttatccgcaagtaaatgttgtgaaaaaagttgaggaacagaatcacggattggatagaggaaaaccaaagggattgtttaatgcaaatctttcctcaaagccaaaaccaaatagtaatgaaaatttagtaggtgctaaagagtatcttgaccccaaaaagtatggggggtatgctggaatttctaattcttttgctgttcttgttaaagggacaattgaaaaaggtgctaagaaaaaaataacaaatgtactagaatttcaaggtatttctattttagataggattaattatagaaaagataaacttaattttttacttgaaaaaggttataaagatattgagttaattattgaactacctaaatatagtttatttgaactttcagatggttcacgtcgtatgttggctagtattttgtcaacgaataataagaggggagagattcacaaaggaaatcagatttttctttcacagaagtttgtgaaattactttatcatgctaagagaataagtaacacaattaatgagaatcatagaaaatatgttgagaaccataaaaaagagtttgaagaattattttactacattcttgagtttaatgagaattatgttggagctaaaaagaatggtaaacttttaaactctgcctttcaatcttggcaaaatcatagtatagatgaactctgtagtagttttataggacctaccggaagtgaaagaaaggggctatttgaattaacctctcgtggaagtgctgctgattttgaatttttaggtgttaaaattccaaggtatagagactataccccatcatccctattaaaagatgccacacttattcatcaatctgttacaggcctctatgaaacacgaatagaccttgccaaactaggagagggttaa

SEQ ID NO: 10 - DNA, 3366 bp, Streptococcus thermophilus
atgagcgacctggtgctgggcctggacatcggcatcggcagcgtgggcgtgggcatcctgaacaaggtgaccggcgagatcatccacaagaacagtcgcatcttccctgctgctcaggctgagaacaacctggtgcgccgcaccaaccgccagggtcgccggcttgctcgccgcaagaagcaccggcgcgtgcgcctgaaccgcctgttcgaggagagcggcctgatcaccgacttcaccaagatcagcatcaacctgaacccctaccagctgcgcgtgaagggcctgaccgacgagctgagcaacgaggagctgttcatcgccctgaagaacatggtgaagcaccgcggcatcagctacctggacgacgccagcgacgacggcaacagcagcgtgggcgactacgcccagatcgtgaaggagaacagcaagcagctggagaccaagacccccggccagatccagctggagcgctaccagacctacggccagctgcgcggcgacttcaccgtggagaaggacggcaagaagcaccgcctgatcaacgtgttccccaccagcgcctaccgcagcgaggccctgcgcatcctgcagacccagcaggagttcaacccccagatcaccgacgagttcatcaaccgctacctggagatcctgaccggcaagcgcaagtactaccacggccccggcaacgagaagagccgcaccgactacggccgctaccgcaccagcggcgagaccctggacaacatcttcggcatcctgatcggcaagtgcaccttctaccccgacgagttccgcgccgccaaggccagctacaccgcccaggagttcaacctgctgaacgacctgaacaacctgaccgtgcccaccgagaccaagaagctgagcaaggagcagaagaaccagatcatcaactacgtgaagaacgagaaggccatgggccccgccaagctgttcaagtacatcgccaagctgctgagctgcgacgtggccgacatcaagggctaccgcatcgacaagagcggcaaggccgagatccacaccttcgaggcctaccgcaagatgaagaccctggagaccctggacatcgagcagatggaccgcgagaccctggacaagctggcctacgtgctgaccctgaacaccgagcgcgagggcatccaggaggccctggagcacgagttcgccgacggcagcttcagccagaagcaggtggacgagctggtgcagttccgcaaggccaacagcagcatcttcggcaagggctggcacaacttcagcgtgaagctgatgatggagctgatccccgagctgtacgagaccagcgaggagcagatgaccatcctgacccgcctgggcaagcagaagaccaccagcagcagcaacaagaccaagtacatcgacgagaagctgctgaccgaggagatctacaaccccgtggtggccaagagcgtgcgccaggccatcaagatcgtgaacgccgccatcaaggagtacggcgacttcgacaacatcgtgatcgagatggcccgcgagaccaacgaggacgacgagaagaaggccatccagaagatccagaaggccaacaaggacgagaaggacgccgccatgctgaaggccgccaaccagtacaacggcaaggccgagctgccccacagcgtgttccacggccacaagcagctggccaccaagatccgcctgtggcaccagcagggcgagcgctgcctgtacaccggcaagaccatcagcatccacgacctgatcaacaacagcaaccagttcgaggtggaccacatcctgcccctgagcatcaccttcgacgacagcctggccaacaaggtgctggtgtacgccaccgccaaccaggagaagggccagcgcaccccctaccaggccctggacagcatggacgacgcctggagcttccgcgagctgaaggccttcgtgcgcgagagcaagaccctgagcaacaagaagaaggagtacctgctgaccgaggaggacatcagcaagttcgacgtgcgcaagaagttcatcgagcgcaacctggtggacacccgctacgccagccgcgtggtgctgaacgccctgcaggagcacttccgcgcccacaagatcgacaccaaggtgagcgtggtgcgcggccagttcaccagccagctgcgccgccactggggcatcgagaagacccgcgacacctaccaccaccacgccgtggacgccctgatcattgcggcttctagccagctgaacctgtggaagaagcagaagaacaccctggtgagctacagcgaggaccagctgctggacatcgagaccggcgagctgatcagcgacgacgagtacaaggagagcgtgttcaaggccccctaccagcacttcgtggacaccctgaagagcaaggagttcgaggacagcatcctgttcagctaccaggtggacagcaagttcaaccgcaagatcagcgacgccaccatctacgccacccgccaggccaaggtgggcaaggacaaggccgacgagacctacgtgctgggcaagatcaaggacatctacacccaggacggctacgacgccttcatgaagatctacaagaaggacaagagcaagttcctgatgtaccgccacgacccccagaccttcgagaaggtgatcgagcccatcctggagaactaccccaacaagcagatcaacgataaaggcaaggaggtgccctgcaaccccttcctgaagtacaaggaggagcacggctacatccgcaagtacagcaagaagggcaacggccccgagatcaagagcctgaagtactacgacagcaagctgggcaaccacatcgacatcacccccaaggacagcaacaacaaggtggtgctgcagagcgtgagcccctggcgcgccgacgtgtacttcaacaagaccaccggcaagtacgagatcctgggcctgaagtacgccgacctgcagtttgataagggcaccggcacctacaagatcagccaggagaagtacaacgacatcaagaagaaggagggcgtggacagcgacagcgagttcaagttcaccctgtacaagaacgaccttctgctggtgaaggacaccgagaccaaggagcaacagctgttccgcttcctgagccgcaccatgcccaagcagaagcactacgtggagctgaagccctacgacaagcagaagttcgagggcggcgaggccctgatcaaggtgctgggcaacgtggccaacagcggccagtgcaagaagggcctgggcaagagcaacatcagcatctacaaggtgcgcaccgacgtgctgggcaaccagcacatcatcaagaacgagggcgacaagcccaagctggacttctaa

SEQ ID NO: 11 - DNA, 3366 bp, Streptococcus thermophilus
atgagcgacctggtgctgggcctggccatcggcatcggcagcgtgggcgtgggcatcctgaacaaggtgaccggcgagatcatccacaagaacagtcgcatcttccctgctgctcaggctgagaacaacctggtgcgccgcaccaaccgccagggtcgccggcttgctcgccgcaagaagcaccggcgcgtgcgcctgaaccgcctgttcgaggagagcggcctgatcaccgacttcaccaagatcagcatcaacctgaacccctaccagctgcgcgtgaagggcctgaccgacgagctgagcaacgaggagctgttcatcgccctgaagaacatggtgaagcaccgcggcatcagctacctggacgacgccagcgacgacggcaacagcagcgtgggcgactacgcccagatcgtgaaggagaacagcaagcagctggagaccaagacccccggccagatccagctggagcgctaccagacctacggccagctgcgcggcgacttcaccgtggagaaggacggcaagaagcaccgcctgatcaacgtgttccccaccagcgcctaccgcagcgaggccctgcgcatcctgcagacccagcaggagttcaacccccagatcaccgacgagttcatcaaccgctacctggagatcctgaccggcaagcgcaagtactaccacggccccggcaacgagaagagccgcaccgactacggccgctaccgcaccagcggcgagaccctggacaacatcttcggcatcctgatcggcaagtgcaccttctaccccgacgagttccgcgccgccaaggccagctacaccgcccaggagttcaacctgctgaacgacctgaacaacctgaccgtgcccaccgagaccaagaagctgagcaaggagcagaagaaccagatcatcaactacgtgaagaacgagaaggccatgggccccgccaagctgttcaagtacatcgccaagctgctgagctgcgacgtggccgacatcaagggctaccgcatcgacaagagcggcaaggccgagatccacaccttcgaggcctaccgcaagatgaagaccctggagaccctggacatcgagcagatggaccgcgagaccctggacaagctggcctacgtgctgaccctgaacaccgagcgcgagggcatccaggaggccctggagcacgagttcgccgacggcagcttcagccagaagcaggtggacgagctggtgcagttccgcaaggccaacagcagcatcttcggcaagggctggcacaacttcagcgtgaagctgatgatggagctgatccccgagctgtacgagaccagcgaggagcagatgaccatcctgacccgcctgggcaagcagaagaccaccagcagcagcaacaagaccaagtacatcgacgagaagctgctgaccgaggagatctacaaccccgtggtggccaagagcgtgcgccaggccatcaagatcgtgaacgccgccatcaaggagtacggcgacttcgacaacatcgtgatcgagatggcccgcgagaccaacgaggacgacgagaagaaggccatccagaagatccagaaggccaacaaggacgagaaggacgccgccatgctgaaggccgccaaccagtacaacggcaaggccgagctgccccacagcgtgttccacggccacaagcagctggccaccaagatccgcctgtggcaccagcagggcgagcgctgcctgtacaccggcaagaccatcagcatccacgacctgatcaacaacagcaaccagttcgaggtggctgccatcctgcccctgagcatcaccttcgacgacagcctggccaacaaggtgctggtgtacgccaccgccgctcaggagaagggccagcgcaccccctaccaggccctggacagcatggacgacgcctggagcttccgcgagctgaaggccttcgtgcgcgagagcaagaccctgagcaacaagaagaaggagtacctgctgaccgaggaggacatcagcaagttcgacgtgcgcaagaagttcatcgagcgcaacctggtggacacccgctacgccagccgcgtggtgctgaacgccctgcaggagcacttccgcgcccacaagatcgacaccaaggtgagcgtggtgcgcggccagttcaccagccagctgcgccgccactggggcatcgagaagacccgcgacacctaccaccaccacgccgtggacgccctgatcattgcggcttctagccagctgaacctgtggaagaagcagaagaacaccctggtgagctacagcgaggaccagctgctggacatcgagaccggcgagctgatcagcgacgacgagtacaaggagagcgtgttcaaggccccctaccagcacttcgtggacaccctgaagagcaaggagttcgaggacagcatcctgttcagctaccaggtggacagcaagttcaaccgcaagatcagcgacgccaccatctacgccacccgccaggccaaggtgggcaaggacaaggccgacgagacctacgtgctgggcaagatcaaggacatctacacccaggacggctacgacgccttcatgaagatctacaagaaggacaagagcaagttcctgatgtaccgccacgacccccagaccttcgagaaggtgatcgagcccatcctggagaactaccccaacaagcagatcaacgataaaggcaaggaggtgccctgcaaccccttcctgaagtacaaggaggagcacggctacatccgcaagtacagcaagaagggcaacggccccgagatcaagagcctgaagtactacgacagcaagctgggcaaccacatcgacatcacccccaaggacagcaacaacaaggtggtgctgcagagcgtgagcccctggcgcgccgacgtgtacttcaacaagaccaccggcaagtacgagatcctgggcctgaagtacgccgacctgcagtttgataagggcaccggcacctacaagatcagccaggagaagtacaacgacatcaagaagaaggagggcgtggacagcgacagcgagttcaagttcaccctgtacaagaacgaccttctgctggtgaaggacaccgagaccaaggagcaacagctgttccgcttcctgagccgcaccatgcccaagcagaagcactacgtggagctgaagccctacgacaagcagaagttcgagggcggcgaggccctgatcaaggtgctgggcaacgtggccaacagcggccagtgcaagaagggcctgggcaagagcaacatcagcatctacaaggtgcgcaccgacgtgctgggcaaccagcacatcatcaagaacgagggcgacaagcccaagctggacttctaa

SEQ ID NO: 12 - DNA, 3399 bp, Streptococcus thermophilus
atgagcgacctggtgctgggcctggacatcggcatcggcagcgtgggcgtgggcatcctgaacaaggtgaccggcgagatcatccacaagaacagtcgcatcttccctgctgctcaggctgagaacaacctggtgcgccgcaccaaccgccagggtcgccggcttgctcgccgcaagaagcaccggcgcgtgcgcctgaaccgcctgttcgaggagagcggcctgatcaccgacttcaccaagatcagcatcaacctgaacccctaccagctgcgcgtgaagggcctgaccgacgagctgagcaacgaggagctgttcatcgccctgaagaacatggtgaagcaccgcggcatcagctacctggacgacgccagcgacgacggcaacagcagcgtgggcgactacgcccagatcgtgaaggagaacagcaagcagctggagaccaagacccccggccagatccagctggagcgctaccagacctacggccagctgcgcggcgacttcaccgtggagaaggacggcaagaagcaccgcctgatcaacgtgttccccaccagcgcctaccgcagcgaggccctgcgcatcctgcagacccagcaggagttcaacccccagatcaccgacgagttcatcaaccgctacctggagatcctgaccggcaagcgcaagtactaccacggccccggcaacgagaagagccgcaccgactacggccgctaccgcaccagcggcgagaccctggacaacatcttcggcatcctgatcggcaagtgcaccttctaccccgacgagttccgcgccgccaaggccagctacaccgcccaggagttcaacctgctgaacgacctgaacaacctgaccgtgcccaccgagaccaagaagctgagcaaggagcagaagaaccagatcatcaactacgtgaagaacgagaaggccatgggccccgccaagctgttcaagtacatcgccaagctgctgagctgcgacgtggccgacatcaagggctaccgcatcgacaagagcggcaaggccgagatccacaccttcgaggcctaccgcaagatgaagaccctggagaccctggacatcgagcagatggaccgcgagaccctggacaagctggcctacgtgctgaccctgaacaccgagcgcgagggcatccaggaggccctggagcacgagttcgccgacggcagcttcagccagaagcaggtggacgagctggtgcagttccgcaaggccaacagcagcatcttcggcaagggctggcacaacttcagcgtgaagctgatgatggagctgatccccgagctgtacgagaccagcgaggagcagatgaccatcctgacccgcctgggcaagcagaagaccaccagcagcagcaacaagaccaagtacatcgacgagaagctgctgaccgaggagatctacaaccccgtggtggccaagagcgtgcgccaggccatcaagatcgtgaacgccgccatcaaggagtacggcgacttcgacaacatcgtgatcgagatggcccgcgagaccaacgaggacgacgagaagaaggccatccagaagatccagaaggccaacaaggacgagaaggacgccgccatgctgaaggccgccaaccagtacaacggcaaggccgagctgccccacagcgtgttccacggccacaagcagctggccaccaagatccgcctgtggcaccagcagggcgagcgctgcctgtacaccggcaagaccatcagcatccacgacctgatcaacaacagcaaccagttcgaggtggaccacatcctgcccctgagcatcaccttcgacgacagcctggccaacaaggtgctggtgtacgccaccgccaaccaggagaagggccagcgcaccccctaccaggccctggacagcatggacgacgcctggagcttccgcgagctgaaggccttcgtgcgcgagagcaagaccctgagcaacaagaagaaggagtacctgctgaccgaggaggacatcagcaagttcgacgtgcgcaagaagttcatcgagcgcaacctggtggacacccgctacgccagccgcgtggtgctgaacgccctgcaggagcacttccgcgcccacaagatcgacaccaaggtgagcgtggtgcgcggccagttcaccagccagctgcgccgccactggggcatcgagaagacccgcgacacctaccaccaccacgccgtggacgccctgatcattgcggcttctagccagctgaacctgtggaagaagcagaagaacaccctggtgagctacagcgaggaccagctgctggacatcgagaccggcgagctgatcagcgacgacgagtacaaggagagcgtgttcaaggccccctaccagcacttcgtggacaccctgaagagcaaggagttcgaggacagcatcctgttcagctaccaggtggacagcaagttcaaccgcaagatcagcgacgccaccatctacgccacccgccaggccaaggtgggcaaggacaaggccgacgagacctacgtgctgggcaagatcaaggacatctacacccaggacggctacgacgccttcatgaagatctacaagaaggacaagagcaagttcctgatgtaccgccacgacccccagaccttcgagaaggtgatcgagcccatcctggagaactaccccaacaagcagatcaacgataaaggcaaggaggtgccctgcaaccccttcctgaagtacaaggaggagcacggctacatccgcaagtacagcaagaagggcaacggccccgagatcaagagcctgaagtactacgacagcaagctgggcaaccacatcgacatcacccccaaggacagcaacaacaaggtggtgctgcagagcgtgagcccctggcgcgccgacgtgtacttcaacaagaccaccggcaagtacgagatcctgggcctgaagtacgccgacctgcagtttgataagggcaccggcacctacaagatcagccaggagaagtacaacgacatcaagaagaaggagggcgtggacagcgacagcgagttcaagttcaccctgtacaagaacgaccttctgctggtgaaggacaccgagaccaaggagcaacagctgttccgcttcctgagccgcaccatgcccaagcagaagcactacgtggagctgaagccctacgacaagcagaagttcgagggcggcgaggccctgatcaaggtgctgggcaacgtggccaacagcggccagtgcaagaagggcctgggcaagagcaacatcagcatctacaaggtgcgcaccgacgtgctgggcaaccagcacatcatcaagaacgagggcgacaagcccaagctggacttcagcagggctgaccccaagaagaagaggaaggtgtga

SEQ ID NO: 13 - DNA, 3459 bp, Streptococcus thermophilus
atgagcgacctggtgctgggcctggacatcggcatcggcagcgtgggcgtgggcatcctgaacaaggtgaccggcgagatcatccacaagaacagtcgcatcttccctgctgctcaggctgagaacaacctggtgcgccgcaccaaccgccagggtcgccggcttgctcgccgcaagaagcaccggcgcgtgcgcctgaaccgcctgttcgaggagagcggcctgatcaccgacttcaccaagatcagcatcaacctgaacccctaccagctgcgcgtgaagggcctgaccgacgagctgagcaacgaggagctgttcatcgccctgaagaacatggtgaagcaccgcggcatcagctacctggacgacgccagcgacgacggcaacagcagcgtgggcgactacgcccagatcgtgaaggagaacagcaagcagctggagaccaagacccccggccagatccagctggagcgctaccagacctacggccagctgcgcggcgacttcaccgtggagaaggacggcaagaagcaccgcctgatcaacgtgttccccaccagcgcctaccgcagcgaggccctgcgcatcctgcagacccagcaggagttcaacccccagatcaccgacgagttcatcaaccgctacctggagatcctgaccggcaagcgcaagtactaccacggccccggcaacgagaagagccgcaccgactacggccgctaccgcaccagcggcgagaccctggacaacatcttcggcatcctgatcggcaagtgcaccttctaccccgacgagttccgcgccgccaaggccagctacaccgcccaggagttcaacctgctgaacgacctgaacaacctgaccgtgcccaccgagaccaagaagctgagcaaggagcagaagaaccagatcatcaactacgtgaagaacgagaaggccatgggccccgccaagctgttcaagtacatcgccaagctgctgagctgcgacgtggccgacatcaagggctaccgcatcgacaagagcggcaaggccgagatccacaccttcgaggcctaccgcaagatgaagaccctggagaccctggacatcgagcagatggaccgcgagaccctggacaagctggcctacgtgctgaccctgaacaccgagcgcgagggcatccaggaggccctggagcacgagttcgccgacggcagcttcagccagaagcaggtggacgagctggtgcagttccgcaaggccaacagcagcatcttcggcaagggctggcacaacttcagcgtgaagctgatgatggagctgatccccgagctgtacgagaccagcgaggagcagatgaccatcctgacccgcctgggcaagcagaagaccaccagcagcagcaacaagaccaagtacatcgacgagaagctgctgaccgaggagatctacaaccccgtggtggccaagagcgtgcgccaggccatcaagatcgtgaacgccgccatcaaggagtacggcgacttcgacaacatcgtgatcgagatggcccgcgagaccaacgaggacgacgagaagaaggccatccagaagatccagaaggccaacaaggacgagaaggacgccgccatgctgaaggccgccaaccagtacaacggcaaggccgagctgccccacagcgtgttccacggccacaagcagctggccaccaagatccgcctgtggcaccagcagggcgagcgctgcctgtacaccggcaagaccatcagcatccacgacctgatcaacaacagcaaccagttcgaggtggaccacatcctgcccctgagcatcaccttcgacgacagcctggccaacaaggtgctggtgtacgccaccgccaaccaggagaagggccagcgcaccccctaccaggccctggacagcatggacgacgcctggagcttccgcgagctgaaggccttcgtgcgcgagagcaagaccctgagcaacaagaagaaggagtacctgctgaccgaggaggacatcagcaagttcgacgtgcgcaagaagttcatcgagcgcaacctggtggacacccgctacgccagccgcgtggtgctgaacgccctgcaggagcacttccgcgcccacaagatcgacaccaaggtgagcgtggtgcgcggccagttcaccagccagctgcgccgccactggggcatcgagaagacccgcgacacctaccaccaccacgccgtggacgccctgatcattgcggcttctagccagctgaacctgtggaagaagcagaagaacaccctggtgagctacagcgaggaccagctgctggacatcgagaccggcgagctgatcagcgacgacgagtacaaggagagcgtgttcaaggccccctaccagcacttcgtggacaccctgaagagcaaggagttcgaggacagcatcctgttcagctaccaggtggacagcaagttcaaccgcaagatcagcgacgccaccatctacgccacccgccaggccaaggtgggcaaggacaaggccgacgagacctacgtgctgggcaagatcaaggacatctacacccaggacggctacgacgccttcatgaagatctacaagaaggacaagagcaagttcctgatgtaccgccacgacccccagaccttcgagaaggtgatcgagcccatcctggagaactaccccaacaagcagatcaacgataaaggcaaggaggtgccctgcaaccccttcctgaagtacaaggaggagcacggctacatccgcaagtacagcaagaagggcaacggccccgagatcaagagcctgaagtactacgacagcaagctgggcaaccacatcgacatcacccccaaggacagcaacaacaaggtggtgctgcagagcgtgagcccctggcgcgccgacgtgtacttcaacaagaccaccggcaagtacgagatcctgggcctgaagtacgccgacctgcagtttgataagggcaccggcacctacaagatcagccaggagaagtacaacgacatcaagaagaaggagggcgtggacagcgacagcgagttcaagttcaccctgtacaagaacgaccttctgctggtgaaggacaccgagaccaaggagcaacagctgttccgcttcctgagccgcaccatgcccaagcagaagcactacgtggagctgaagccctacgacaagcagaagttcgagggcggcgaggccctgatcaaggtgctgggcaacgtggccaacagcggccagtgcaagaagggcctgggcaagagcaacatcagcatctacaaggtgcgcaccgacgtgctgggcaaccagcacatcatcaagaacgagggcgacaagcccaagctggacttcgcggccgcagatccaaaaaagaagagaaaggtagatccaaaaaagaagagaaaggtagatccaaaaaagaagagaaaggtagatacggccgcatag

SEQ ID NO: 14 - DNA, 3585 bp, Streptococcus thermophilus
atgagcgacctggtgctgggcctggccatcggcatcggcagcgtgggcgtgggcatcctgaacaaggtgaccggcgagatcatccacaagaacagtcgcatcttccctgctgctcaggctgagaacaacctggtgcgccgcaccaaccgccagggtcgccggcttgctcgccgcaagaagcaccggcgcgtgcgcctgaaccgcctgttcgaggagagcggcctgatcaccgacttcaccaagatcagcatcaacctgaacccctaccagctgcgcgtgaagggcctgaccgacgagctgagcaacgaggagctgttcatcgccctgaagaacatggtgaagcaccgcggcatcagctacctggacgacgccagcgacgacggcaacagcagcgtgggcgactacgcccagatcgtgaaggagaacagcaagcagctggagaccaagacccccggccagatccagctggagcgctaccagacctacggccagctgcgcggcgacttcaccgtggagaaggacggcaagaagcaccgcctgatcaacgtgttccccaccagcgcctaccgcagcgaggccctgcgcatcctgcagacccagcaggagttcaacccccagatcaccgacgagttcatcaaccgctacctggagatcctgaccggcaagcgcaagtactaccacggccccggcaacgagaagagccgcaccgactacggccgctaccgcaccagcggcgagaccctggacaacatcttcggcatcctgatcggcaagtgcaccttctaccccgacgagttccgcgccgccaaggccagctacaccgcccaggagttcaacctgctgaacgacctgaacaacctgaccgtgcccaccgagaccaagaagctgagcaaggagcagaagaaccagatcatcaactacgtgaagaacgagaaggccatgggccccgccaagctgttcaagtacatcgccaagctgctgagctgcgacgtggccgacatcaagggctaccgcatcgacaagagcggcaaggccgagatccacaccttcgaggcctaccgcaagatgaagaccctggagaccctggacatcgagcagatggaccgcgagaccctggacaagctggcctacgtgctgaccctgaacaccgagcgcgagggcatccaggaggccctggagcacgagttcgccgacggcagcttcagccagaagcaggtggacgagctggtgcagttccgcaaggccaacagcagcatcttcggcaagggctggcacaacttcagcgtgaagctgatgatggagctgatccccgagctgtacgagaccagcgaggagcagatgaccatcctgacccgcctgggcaagcagaagaccaccagcagcagcaacaagaccaagtacatcgacgagaagctgctgaccgaggagatctacaaccccgtggtggccaagagcgtgcgccaggccatcaagatcgtgaacgccgccatcaaggagtacggcgacttcgacaacatcgtgatcgagatggcccgcgagaccaacgaggacgacgagaagaaggccatccagaagatccagaaggccaacaaggacgagaaggacgccgccatgctgaaggccgccaaccagtacaacggcaaggccgagctgccccacagcgtgttccacggccacaagcagctggccaccaagatccgcctgtggcaccagcagggcgagcgctgcctgtacaccggcaagaccatcagcatccacgacctgatcaacaacagcaaccagttcgaggtggctgccatcctgcccctgagcatcaccttcgacgacagcctggccaacaaggtgctggtgtacgccaccgccgctcaggagaagggccagcgcaccccctaccaggccctggacagcatggacgacgcctggagcttccgcgagctgaaggccttcgtgcgcgagagcaagaccctgagcaacaagaagaaggagtacctgctgaccgaggaggacatcagcaagttcgacgtgcgcaagaagttcatcgagcgcaacctggtggacacccgctacgccagccgcgtggtgctgaacgccctgcaggagcacttccgcgcccacaagatcgacaccaaggtgagcgtggtgcgcggccagttcaccagccagctgcgccgccactggggcatcgagaagacccgcgacacctaccaccaccacgccgtggacgccctgatcattgcggcttctagccagctgaacctgtggaagaagcagaagaacaccctggtgagctacagcgaggaccagctgctggacatcgagaccggcgagctgatcagcgacgacgagtacaaggagagcgtgttcaaggccccctaccagcacttcgtggacaccctgaagagcaaggagttcgaggacagcatcctgttcagctaccaggtggacagcaagttcaaccgcaagatcagcgacgccaccatctacgccacccgccaggccaaggtgggcaaggacaaggccgacgagacctacgtgctgggcaagatcaaggacatctacacccaggacggctacgacgccttcatgaagatctacaagaaggacaagagcaagttcctgatgtaccgccacgacccccagaccttcgagaaggtgatcgagcccatcctggagaactaccccaacaagcagatcaacgataaaggcaaggaggtgccctgcaaccccttcctgaagtacaaggaggagcacggctacatccgcaagtacagcaagaagggcaacggccccgagatcaagagcctgaagtactacgacagcaagctgggcaaccacatcgacatcacccccaaggacagcaacaacaaggtggtgctgcagagcgtgagcccctggcgcgccgacgtgtacttcaacaagaccaccggcaagtacgagatcctgggcctgaagtacgccgacctgcagtttgataagggcaccggcacctacaagatcagccaggagaagtacaacgacatcaagaagaaggagggcgtggacagcgacagcgagttcaagttcaccctgtacaagaacgaccttctgctggtgaaggacaccgagaccaaggagcaacagctgttccgcttcctgagccgcaccatgcccaagcagaagcactacgtggagctgaagccctacgacaagcagaagttcgagggcggcgaggccctgatcaaggtgctgggcaacgtggccaacagcggccagtgcaagaagggcctgggcaagagcaacatcagcatctacaaggtgcgcaccgacgtgctgggcaaccagcacatcatcaagaacgagggcgacaagcccaagctggacttcagcagggctgaccccaagaagaagaggaaggtggaggccagcggttccggacgggctgacgcattggacgattttgatctggatatgctgggaagtgacgccctcgatgattttgaccttgacatgcttggttcggatgcccttgatgactttgacctcgacatgctcggcagtgacgcccttgatgatttcgacctggacatgctgattaactctagatga

SEQ ID NO: 15 - DNA, 3606 bp, Streptococcus thermophilus
atgcccaagaagaagaggaaggtgagcgacctggtgctgggcctggccatcggcatcggcagcgtgggcgtgggcatcctgaacaaggtgaccggcgagatcatccacaagaacagtcgcatcttccctgctgctcaggctgagaacaacctggtgcgccgcaccaaccgccagggtcgccggcttgctcgccgcaagaagcaccggcgcgtgcgcctgaaccgcctgttcgaggagagcggcctgatcaccgacttcaccaagatcagcatcaacctgaacccctaccagctgcgcgtgaagggcctgaccgacgagctgagcaacgaggagctgttcatcgccctgaagaacatggtgaagcaccgcggcatcagctacctggacgacgccagcgacgacggcaacagcagcgtgggcgactacgcccagatcgtgaaggagaacagcaagcagctggagaccaagacccccggccagatccagctggagcgctaccagacctacggccagctgcgcggcgacttcaccgtggagaaggacggcaagaagcaccgcctgatcaacgtgttccccaccagcgcctaccgcagcgaggccctgcgcatcctgcagacccagcaggagttcaacccccagatcaccgacgagttcatcaaccgctacctggagatcctgaccggcaagcgcaagtactaccacggccccggcaacgagaagagccgcaccgactacggccgctaccgcaccagcggcgagaccctggacaacatcttcggcatcctgatcggcaagtgcaccttctaccccgacgagttccgcgccgccaaggccagctacaccgcccaggagttcaacctgctgaacgacctgaacaacctgaccgtgcccaccgagaccaagaagctgagcaaggagcagaagaaccagatcatcaactacgtgaagaacgagaaggccatgggccccgccaagctgttcaagtacatcgccaagctgctgagctgcgacgtggccgacatcaagggctaccgcatcgacaagagcggcaaggccgagatccacaccttcgaggcctaccgcaagatgaagaccctggagaccctggacatcgagcagatggaccgcgagaccctggacaagctggcctacgtgctgaccctgaacaccgagcgcgagggcatccaggaggccctggagcacgagttcgccgacggcagcttcagccagaagcaggtggacgagctggtgcagttccgcaaggccaacagcagcatcttcggcaagggctggcacaacttcagcgtgaagctgatgatggagctgatccccgagctgtacgagaccagcgaggagcagatgaccatcctgacccgcctgggcaagcagaagaccaccagcagcagcaacaagaccaagtacatcgacgagaagctgctgaccgaggagatctacaaccccgtggtggccaagagcgtgcgccaggccatcaagatcgtgaacgccgccatcaaggagtacggcgacttcgacaacatcgtgatcgagatggcccgcgagaccaacgaggacgacgagaagaaggccatccagaagatccagaaggccaacaaggacgagaaggacgccgccatgctgaaggccgccaaccagtacaacggcaaggccgagctgccccacagcgtgttccacggccacaagcagctggccaccaagatccgcctgtggcaccagcagggcgagcgctgcctgtacaccggcaagaccatcagcatccacgacctgatcaacaacagcaaccagttcgaggtggctgccatcctgcccctgagcatcaccttcgacgacagcctggccaacaaggtgctggtgtacgccaccgccgctcaggagaagggccagcgcaccccctaccaggccctggacagcatggacgacgcctggagcttccgcgagctgaaggccttcgtgcgcgagagcaagaccctgagcaacaagaagaaggagtacctgctgaccgaggaggacatcagcaagttcgacgtgcgcaagaagttcatcgagcgcaacctggtggacacccgctacgccagccgcgtggtgctgaacgccctgcaggagcacttccgcgcccacaagatcgacaccaaggtgagcgtggtgcgcggccagttcaccagccagctgcgccgccactggggcatcgagaagacccgcgacacctaccaccaccacgccgtggacgccctgatcattgcggcttctagccagctgaacctgtggaagaagcagaagaacaccctggtgagctacagcgaggaccagctgctggacatcgagaccggcgagctgatcagcgacgacgagtacaaggagagcgtgttcaaggccccctaccagcacttcgtggacaccctgaagagcaaggagttcgaggacagcatcctgttcagctaccaggtggacagcaagttcaaccgcaagatcagcgacgccaccatctacgccacccgccaggccaaggtgggcaaggacaaggccgacgagacctacgtgctgggcaagatcaaggacatctacacccaggacggctacgacgccttcatgaagatctacaagaaggacaagagcaagttcctgatgtaccgccacgacccccagaccttcgagaaggtgatcgagcccatcctggagaactaccccaacaagcagatcaacgataaaggcaaggaggtgccctgcaaccccttcctgaagtacaaggaggagcacggctacatccgcaagtacagcaagaagggcaacggccccgagatcaagagcctgaagtactacgacagcaagctgggcaaccacatcgacatcacccccaaggacagcaacaacaaggtggtgctgcagagcgtgagcccctggcgcgccgacgtgtacttcaacaagaccaccggcaagtacgagatcctgggcctgaagtacgccgacctgcagtttgataagggcaccggcacctacaagatcagccaggagaagtacaacgacatcaagaagaaggagggcgtggacagcgacagcgagttcaagttcaccctgtacaagaacgaccttctgctggtgaaggacaccgagaccaaggagcaacagctgttccgcttcctgagccgcaccatgcccaagcagaagcactacgtggagctgaagccctacgacaagcagaagttcgagggcggcgaggccctgatcaaggtgctgggcaacgtggccaacagcggccagtgcaagaagggcctgggcaagagcaacatcagcatctacaaggtgcgcaccgacgtgctgggcaaccagcacatcatcaagaacgagggcgacaagcccaagctggacttcagcagggctgaccccaagaagaagaggaaggtggaggccagcggttccggacgggctgacgcattggacgattttgatctggatatgctgggaagtgacgccctcgatgattttgaccttgacatgcttggttcggatgcccttgatgactttgacctcgacatgctcggcagtgacgcccttgatgatttcgacctggacatgctgattaactctagatga

SEQ ID NO: 16 - DNA, 3366 bp, Streptococcus thermophilus
atgagtgacttagttttaggacttgatatcggtataggttctgttggtgtaggtatccttaacaaagtgacaggagaaattatccataaaaactcacgcatcttcccagcagctcaagcggaaaataacctagtacgtagaacgaatcgtcaaggaagacgcttgacacgacgtaaaaaacatcgtagagttcgtttaaatcgtctatttgaggaaagtggattaatcaccgattttacgaagatttcaattaatcttaacccatatcaattacgagttaagggcttgaccgatgaattgtctaatgaagaactgtttatcgctcttaaaaatatggtgaaacaccgtgggattagttacctcgatgatgctagtgatgacggaaattcatcaataggagactatgcacaaattgttaaggaaaatagtaaacaattagaaactaagacaccgggacagatacagttggaacgctaccaaacatatggtcaattacgtggtgattttactgttgagaaagatggcaaaaaacatcgcttgattaatgtctttccaacatcagcttatcgttcagaagccttaaggatactgcaaactcaacaagaatttaatccacagattacagatgaatttattaatcgttatctcgaaattttaactggaaaacggaaatattatcatggacccggaaatgaaaagtcacggactgattatggtcgttacagaacgagtggagaaactttagacaatatttttggaattctaattgggaaatgtacattttatccagacgagtttagagcagcaaaagcttcctacacggctcaagaattcaatttgctaaatgatttgaacaatctaacagttcctactgaaaccaaaaagttgagcaaagaacagaagaatcaaatcattaattatgtcaaaaatgaaaaggcaatggggccagcgaaactttttaaatatatcgctaagttactttcttgtgatgttgcagatatcaagggataccgtatcgacaaatcaggtaaggctgagattcatactttcgaagcctatcgaaaaatgaaaacgcttgaaaccttagatattgagcaaatggatagagaaacgcttgataaattagcctatgtcttaacattaaacactgagagggaaggtattcaagaagccttagaacatgaatttgctgatggtagctttagccagaagcaagttgacgaattggttcaattccgcaaagcaaatagttccatttttggaaaaggatggcataatttttctgtcaaactgatgatggagttaattccagaattgtatgagacgtcagaagagcaaatgactatcctaacacgacttggaaaacaaaaaacgacttcgtcttcaaataaaacaaaatatatagatgaaaaactattaactgaagaaatctataatcctgttgttgctaagtctgttcgccaggctataaaaatcgtaaatgcggcgattaaagaatacggagactttgacaatattgtcatcgaaatggctcgtgaaacaaatgaagatgatgaaaagaaagctattcaaaagattcaaaaagccaacaaagatgaaaaagatgcagcaatgcttaaggctgctaaccaatataatggaaaggctgaattaccacatagtgttttccacggtcataagcaattagcgactaaaatccgcctttggcatcagcaaggagaacgttgcctttatactggtaagacaatctcaatccatgatttgataaataattctaatcagtttgaagtagatcatattttacctctttctatcacattcgatgatagccttgcaaataaggttttggtttatgcaactgctaaccaagaaaaaggacaacgaacaccttatcaggctttagatagtatggatgatgcgtggtctttccgtgaattaaaagcttttgtacgtgagtcaaaaacactttcgaacaagaaaaaagaatacctccttacagaagaagatatttcaaagtttgatgttcgaaagaaatttattgaacgaaatcttgtagatacaagatacgcttcaagagttgtcctcaatgcccttcaagaacactttagagctcacaagattgatacaaaagtttccgtggttcgtggccaatttacatctcaattgagacgccattggggaattgagaagactcgtgatacttatcatcaccatgctgtcgatgcattgattattgccgcctcaagtcagttgaatttgtggaaaaaacaaaagaatacccttgtaagttattcagaagaccaactccttgatattgaaacaggtgaacttattagtgatgatgagtacaaggaatctgtgttcaaagccccttatcaacattttgttgatacattgaagagtaaagaatttgaagacagtatcttattctcttatcaagtggattctaagtttaatcgtaaaatatcagatgccactatttatgcgacaagacaggctaaagtaggaaaagataaggcggatgaaacttatgtcttagggaaaatcaaagatatttatactcaggatggttatgatgcctttatgaagatttataagaaggataagtcaaaattcctcatgtatcgtcacgacccacaaacctttgagaaagttatcgagccaattttagagaactatcctaataagcaaataaatgaaaaagggaaagaggtaccatgtaatcctttcctaaaatataaagaagaacatggctatattcgtaaatatagtaaaaaaggcaatggtcctgaaatcaagagtcttaaatactatgatagtaagctaggcaatcatattgatattactccgaaggatagtaacaataaagttgtcttacagtcagtttctccatggagagcggatgtctatttcaataagactactggaaaatacgaaatcctcggattgaaatatgctgatttacaatttgaaaaagggacaggaacatataagatttcccaggaaaaatacaatgacattaagaaaaaagagggtgtagattctgattcagaattcaagtttacactttataaaaatgatttgttactcgttaaagatacagaaacaaaagaacaacagcttttccgttttctttctcgaactatgcctaaacaaaagcattatgttgaattaaaaccttatgataaacagaaatttgaaggaggtgaggcgttaattaaagtgttgggtaacgttgctaatagtggtcaatgcaaaaaagggctaggaaaatcaaatatttctatttataaggtaagaacagatgtcctaggaaatcagcatatcatcaaaaatgagggtgataagcctaagctagatttttaa

SEQ ID NO: 17 - DNA, 4167 bp, Streptococcus thermophilus; identical to SEQ ID NO: 9

SEQ ID NO: 18 - DNA, 3249 bp, Neisseria meningitidis
atggccgccttcaagcccaaccccatcaactacatcctgggcctggacatcggcatcgccagcgtgggctgggccatggtggagatcgacgaggacgagaaccccatctgcctgatcgacctgggtgtgcgcgtgttcgagcgcgctgaggtgcccaagactggtgacagtctggctatggctcgccggcttgctcgctctgttcggcgccttactcgccggcgcgctcaccgccttctgcgcgctcgccgcctgctgaagcgcgagggtgtgctgcaggctgccgacttcgacgagaacggcctgatcaagagcctgcccaacactccttggcagctgcgcgctgccgctctggaccgcaagctgactcctctggagtggagcgccgtgctgctgcacctgatcaagcaccgcggctacctgagccagcgcaagaacgagggcgagaccgccgacaaggagctgggtgctctgctgaagggcgtggccgacaacgcccacgccctgcagactggtgacttccgcactcctgctgagctggccctgaacaagttcgagaaggagagcggccacatccgcaaccagcgcggcgactacagccacaccttcagccgcaaggacctgcaggccgagctgatcctgctgttcgagaagcagaaggagttcggcaacccccacgtgagcggcggcctgaaggagggcatcgagaccctgctgatgacccagcgccccgccctgagcggcgacgccgtgcagaagatgctgggccactgcaccttcgagccagccgagcccaaggccgccaagaacacctacaccgccgagcgcttcatctggctgaccaagctgaacaacctgcgcatcctggagcagggcagcgagcgccccctgaccgacaccgagcgcgccaccctgatggacgagccctaccgcaagagcaagctgacctacgcccaggcccgcaagctgctgggtctggaggacaccgccttcttcaagggcctgcgctacggcaaggacaacgccgaggccagcaccctgatggagatgaaggcctaccacgccatcagccgcgccctggagaaggagggcctgaaggacaagaagagtcctctgaacctgagccccgagctgcaggacgagatcggcaccgccttcagcctgttcaagaccgacgaggacatcaccggccgcctgaaggaccgcatccagcccgagatcctggaggccctgctgaagcacatcagcttcgacaagttcgtgcagatcagcctgaaggccctgcgccgcatcgtgcccctgatggagcagggcaagcgctacgacgaggcctgcgccgagatctacggcgaccactacggcaagaagaacaccgaggagaagatctacctgcctcctatccccgccgacgagatccgcaaccccgtggtgctgcgcgccctgagccaggcccgcaaggtgatcaacggcgtggtgcgccgctacggcagccccgcccgcatccacatcgagaccgcccgcgaggtgggcaagagcttcaaggaccgcaaggagatcgagaagcgccaggaggagaaccgcaaggaccgcgagaaggccgccgccaagttccgcgagtacttccccaacttcgtgggcgagcccaagagcaaggacatcctgaagctgcgcctgtacgagcagcagcacggcaagtgcctgtacagcggcaaggagatcaacctgggccgcctgaacgagaagggctacgtggagatcgaccacgccctgcccttcagccgcacctgggacgacagcttcaacaacaaggtgctggtgctgggcagcgagaaccagaacaagggcaaccagaccccctacgagtacttcaacggcaaggacaacagccgcgagtggcaggagttcaaggcccgcgtggagaccagccgcttcccccgcagcaagaagcagcgcatcctgctgcagaagttcgacgaggacggcttcaaggagcgcaacctgaacgacacccgctacgtgaaccgcttcctgtgccagttcgtggccgaccgcatgcgcctgaccggcaagggcaagaagcgcgtgttcgccagcaacggccagatcaccaacctgctgcgcggcttctggggcctgcgcaaggtgcgcgccgagaacgaccgccaccacgccctggacgccgtggtggtggcctgcagcaccgtggccatgcagcagaagatcacccgcttcgtgcgctacaaggagatgaacgccttcgacggtaaaaccatcgacaaggagaccggcgaggtgctgcaccagaagacccacttcccccagccctgggagttcttcgcccaggaggtgatgatccgcgtgttcggcaagcccgacggcaagcccgagttcgaggaggccgacacccccgagaagctgcgcaccctgctggccgagaagctgagcagccgccctgaggccgtgcacgagtacgtgactcctctgttcgtgagccgcgcccccaaccgcaagatgagcggtcagggtcacatggagaccgtgaagagcgccaagcgcctggacgagggcgtgagcgtgctgcgcgtgcccctgacccagctgaagctgaaggacctggagaagatggtgaaccgcgagcgcgagcccaagctgtacgaggccctgaaggcccgcctggaggcccacaaggacgaccccgccaaggccttcgccgagcccttctacaagtacgacaaggccggcaaccgcacccagcaggtgaaggccgtgcgcgtggagcaggtgcagaagaccggcgtgtgggtgcgcaaccacaacggcatcgccgacaacgccaccatggtgcgcgtggacgtgttcgagaagggcgacaagtactacctggtgcccatctacagctggcaggtggccaagggcatcctgcccgaccgcgccgtggtgcagggcaaggacgaggaggactggcagctgatcgacgacagcttcaacttcaagttcagcctgcaccccaacgacctggtggaggtgatcaccaagaaggcccgcatgttcggctacttcgccagctgccaccgcggcaccggcaacatcaacatccgcatccacgacctggaccacaagatcggcaagaacggcatcctggagggcatcggcgtgaagaccgccctgagcttccagaagtaccagatcgacgagctgggcaaggagatccgcccctgccgcctgaagaagcgccctcctgtgcgctaa

SEQ ID NO: 19 - DNA, 3249 bp, Neisseria meningitidis
atggccgccttcaagcccaaccccatcaactacatcctgggcctggccatcggcatcgccagcgtgggctgggccatggtggagatcgacgaggacgagaaccccatctgcctgatcgacctgggtgtgcgcgtgttcgagcgcgctgaggtgcccaagactggtgacagtctggctatggctcgccggcttgctcgctctgttcggcgccttactcgccggcgcgctcaccgccttctgcgcgctcgccgcctgctgaagcgcgagggtgtgctgcaggctgccgacttcgacgagaacggcctgatcaagagcctgcccaacactccttggcagctgcgcgctgccgctctggaccgcaagctgactcctctggagtggagcgccgtgctgctgcacctgatcaagcaccgcggctacctgagccagcgcaagaacgagggcgagaccgccgacaaggagctgggtgctctgctgaagggcgtggccgacaacgcccacgccctgcagactggtgacttccgcactcctgctgagctggccctgaacaagttcgagaaggagagcggccacatccgcaaccagcgcggcgactacagccacaccttcagccgcaaggacctgcaggccgagctgatcctgctgttcgagaagcagaaggagttcggcaacccccacgtgagcggcggcctgaaggagggcatcgagaccctgctgatgacccagcgccccgccctgagcggcgacgccgtgcagaagatgctgggccactgcaccttcgagccagccgagcccaaggccgccaagaacacctacaccgccgagcgcttcatctggctgaccaagctgaacaacctgcgcatcctggagcagggcagcgagcgccccctgaccgacaccgagcgcgccaccctgatggacgagccctaccgcaagagcaagctgacctacgcccaggcccgcaagctgctgggtctggaggacaccgccttcttcaagggcctgcgctacggcaaggacaacgccgaggccagcaccctgatggagatgaaggcctaccacgccatcagccgcgccctggagaaggagggcctgaaggacaagaagagtcctctgaacctgagccccgagctgcaggacgagatcggcaccgccttcagcctgttcaagaccgacgaggacatcaccggccgcctgaaggaccgcatccagcccgagatcctggaggccctgctgaagcacatcagcttcgacaagttcgtgcagatcagcctgaaggccctgcgccgcatcgtgcccctgatggagcagggcaagcgctacgacgaggcctgcgccgagatctacggcgaccactacggcaagaagaacaccgaggagaagatctacctgcctcctatccccgccgacgagatccgcaaccccgtggtgctgcgcgccctgagccaggcccgcaaggtgatcaacggcgtggtgcgccgctacggcagccccgcccgcatccacatcgagaccgcccgcgaggtgggcaagagcttcaaggaccgcaaggagatcgagaagcgccaggaggagaaccgcaaggaccgcgagaaggccgccgccaagttccgcgagtacttccccaacttcgtgggcgagcccaagagcaaggacatcctgaagctgcgcctgtacgagcagcagcacggcaagtgcctgtacagcggcaaggagatcaacctgggccgcctgaacgagaagggctacgtggagatcgccgctgccctgcccttcagccgcacctgggacgacagcttcaacaacaaggtgctggtgctgggcagcgaggctcagaacaagggcaaccagaccccctacgagtacttcaacggcaaggacaacagccgcgagtggcaggagttcaaggcccgcgtggagaccagccgcttcccccgcagcaagaagcagcgcatcctgctgcagaagttcgacgaggacggcttcaaggagcgcaacctgaacgacacccgctacgtgaaccgcttcctgtgccagttcgtggccgaccgcatgcgcctgaccggcaagggcaagaagcgcgtgttcgccagcaacggccagatcaccaacctgctgcgcggcttctggggcctgcgcaaggtgcgcgccgagaacgaccgccaccacgccctggacgccgtggtggtggcctgcagcaccgtggccatgcagcagaagatcacccgcttcgtgcgctacaaggagatgaacgccttcgacggtaaaaccatcgacaaggagaccggcgaggtgctgcaccagaagacccacttcccccagccctgggagttcttcgcccaggaggtgatgatccgcgtgttcggcaagcccgacggcaagcccgagttcgaggaggccgacacccccgagaagctgcgcaccctgctggccgagaagctgagcagccgccctgaggccgtgcacgagtacgtgactcctctgttcgtgagccgcgcccccaaccgcaagatgagcggtcagggtcacatggagaccgtgaagagcgccaagcgcctggacgagggcgtgagcgtgctgcgcgtgcccctgacccagctgaagctgaaggacctggagaagatggtgaaccgcgagcgcgagcccaagctgtacgaggccctgaaggcccgcctggaggcccacaaggacgaccccgccaaggccttcgccgagcccttctacaagtacgacaaggccggcaaccgcacccagcaggtgaaggccgtgcgcgtggagcaggtgcagaagaccggcgtgtgggtgcgcaaccacaacggcatcgccgacaacgccaccatggtgcgcgtggacgtgttcgagaagggcgacaagtactacctggtgcccatctacagctggcaggtggccaagggcatcctgcccgaccgcgccgtggtgcagggcaaggacgaggaggactggcagctgatcgacgacagcttcaacttcaagttcagcctgcaccccaacgacctggtggaggtgatcaccaagaaggcccgcatgttcggctacttcgccagctgccaccgcggcaccggcaacatcaacatccgcatccacgacctggaccacaagatcggcaagaacggcatcctggagggcatcggcgtgaagaccgccctgagcttccagaagtaccagatcgacgagctgggcaaggagatccgcccctgccgcctgaagaagcgccctcctgtgcgctaa

SEQ ID NO: 20 - DNA, 3282 bp, Neisseria meningitidis
atggccgccttcaagcccaaccccatcaactacatcctgggcctggacatcggcatcgccagcgtgggctgggccatggtggagatcgacgaggacgagaaccccatctgcctgatcgacctgggtgtgcgcgtgttcgagcgcgctgaggtgcccaagactggtgacagtctggctatggctcgccggcttgctcgctctgttcggcgccttactcgccggcgcgctcaccgccttctgcgcgctcgccgcctgctgaagcgcgagggtgtgctgcaggctgccgacttcgacgagaacggcctgatcaagagcctgcccaacactccttggcagctgcgcgctgccgctctggaccgcaagctgactcctctggagtggagcgccgtgctgctgcacctgatcaagcaccgcggctacctgagccagcgcaagaacgagggcgagaccgccgacaaggagctgggtgctctgctgaagggcgtggccgacaacgcccacgccctgcagactggtgacttccgcactcctgctgagctggccctgaacaagttcgagaaggagagcggccacatccgcaaccagcgcggcgactacagccacaccttcagccgcaaggacctgcaggccgagctgatcctgctgttcgagaagcagaaggagttcggcaacccccacgtgagcggcggcctgaaggagggcatcgagaccctgctgatgacccagcgccccgccctgagcggcgacgccgtgcagaagatgctgggccactgcaccttcgagccagccgagcccaaggccgccaagaacacctacaccgccgagcgcttcatctggctgaccaagctgaacaacctgcgcatcctggagcagggcagcgagcgccccctgaccgacaccgagcgcgccaccctgatggacgagccctaccgcaagagcaagctgacctacgcccaggcccgcaagctgctgggtctggaggacaccgccttcttcaagggcctgcgctacggcaaggacaacgccgaggccagcaccctgatggagatgaaggcctaccacgccatcagccgcgccctggagaaggagggcctgaaggacaagaagagtcctctgaacctgagccccgagctgcaggacgagatcggcaccgccttcagcctgttcaagaccgacgaggacatcaccggccgcctgaaggaccgcatccagcccgagatcctggaggccctgctgaagcacatcagcttcgacaagttcgtgcagatcagcctgaaggccctgcgccgcatcgtgcccctgatggagcagggcaagcgctacgacgaggcctgcgccgagatctacggcgaccactacggcaagaagaacaccgaggagaagatctacctgcctcctatccccgccgacgagatccgcaaccccgtggtgctgcgcgccctgagccaggcccgcaaggtgatcaacggcgtggtgcgccgctacggcagccccgcccgcatccacatcgagaccgcccgcgaggtgggcaagagcttcaaggaccgcaaggagatcgagaagcgccaggaggagaaccgcaaggaccgcgagaaggccgccgccaagttccgcgagtacttccccaacttcgtgggcgagcccaagagcaaggacatcctgaagctgcgcctgtacgagcagcagcacggcaagtgcctgtacagcggcaaggagatcaacctgggccgcctgaacgagaagggctacgtggagatcgaccacgccctgcccttcagccgcacctgggacgacagcttcaacaacaaggtgctggtgctgggcagcgagaaccagaacaagggcaaccagaccccctacgagtacttcaacggcaaggacaacagccgcgagtggcaggagttcaaggcccgcgtggagaccagccgcttcccccgcagcaagaagcagcgcatcctgctgcagaagttcgacgaggacggcttcaaggagcgcaacctgaacgacacccgctacgtgaaccgcttcctgtgccagttcgtggccgaccgcatgcgcctgaccggcaagggcaagaagcgcgtgttcgccagcaacggccagatcaccaacctgctgcgcggcttctggggcctgcgcaaggtgcgcgccgagaacgaccgccaccacgccctggacgccgtggtggtggcctgcagcaccgtggccatgcagcagaagatcacccgcttcgtgcgctacaaggagatgaacgccttcgacggtaaaaccatcgacaaggagaccggcgaggtgctgcaccagaagacccacttcccccagccctgggagttcttcgcccaggaggtgatgatccgcgtgttcggcaagcccgacggcaagcccgagttcgaggaggccgacacccccgagaagctgcgcaccctgctggccgagaagctgagcagccgccctgaggccgtgcacgagtacgtgactcctctgttcgtgagccgcgcccccaaccgcaagatgagcggtcagggtcacatggagaccgtgaagagcgccaagcgcctggacgagggcgtgagcgtgctgcgcgtgcccctgacccagctgaagctgaaggacctggagaagatggtgaaccgcgagcgcgagcccaagctgtacgaggccctgaaggcccgcctggaggcccacaaggacgaccccgccaaggccttcgccgagcccttctacaagtacgacaaggccggcaaccgcacccagcaggtgaaggccgtgcgcgtggagcaggtgcagaagaccggcgtgtgggtgcgcaaccacaacggcatcgccgacaacgccaccatggtgcgcgtggacgtgttcgagaagggcgacaagtactacctggtgcccatctacagctggcaggtggccaagggcatcctgcccgaccgcgccgtggtgcagggcaaggacgaggaggactggcagctgatcgacgacagcttcaacttcaagttcagcctgcaccccaacgacctggtggaggtgatcaccaagaaggcccgcatgttcggctacttcgccagctgccaccgcggcaccggcaacatcaacatccgcatccacgacctggaccacaagatcggcaagaacggcatcctggagggcatcggcgtgaagaccgccctgagcttccagaagtaccagatcgacgagctgggcaaggagatccgcccctgccgcctgaagaagcgccctcctgtgcgcagcagggctgaccccaagaagaagaggaaggtgtga

SEQ ID NO: 21 - DNA, 3342 bp, Neisseria meningitidis
atggccgccttcaagcccaaccccatcaactacatcctgggcctggacatcggcatcgccagcgtgggctgggccatggtggagatcgacgaggacgagaaccccatctgcctgatcgacctgggtgtgcgcgtgttcgagcgcgctgaggtgcccaagactggtgacagtctggctatggctcgccggcttgctcgctctgttcggcgccttactcgccggcgcgctcaccgccttctgcgcgctcgccgcctgctgaagcgcgagggtgtgctgcaggctgccgacttcgacgagaacggcctgatcaagagcctgcccaacactccttggcagctgcgcgctgccgctctggaccgcaagctgactcctctggagtggagcgccgtgctgctgcacctgatcaagcaccgcggctacctgagccagcgcaagaacgagggcgagaccgccgacaaggagctgggtgctctgctgaagggcgtggccgacaacgcccacgccctgcagactggtgacttccgcactcctgctgagctggccctgaacaagttcgagaaggagagcggccacatccgcaaccagcgcggcgactacagccacaccttcagccgcaaggacctgcaggccgagctgatcctgctgttcgagaagcagaaggagttcggcaacccccacgtgagcggcggcctgaaggagggcatcgagaccctgctgatgacccagcgccccgccctgagcggcgacgccgtgcagaagatgctgggccactgcaccttcgagccagccgagcccaaggccgccaagaacacctacaccgccgagcgcttcatctggctgaccaagctgaacaacctgcgcatcctggagcagggcagcgagcgccccctgaccgacaccgagcgcgccaccctgatggacgagccctaccgcaagagcaagctgacctacgcccaggcccgcaagctgctgggtctggaggacaccgccttcttcaagggcctgcgctacggcaaggacaacgccgaggccagcaccctgatggagatgaaggcctaccacgccatcagccgcgccctggagaaggagggcctgaaggacaagaagagtcctctgaacctgagccccgagctgcaggacgagatcggcaccgccttcagcctgttcaagaccgacgaggacatcaccggccgcctgaaggaccgcatccagcccgagatcctggaggccctgctgaagcacatcagcttcgacaagttcgtgcagatcagcctgaaggccctgcgccgcatcgtgcccctgatggagcagggcaagcgctacgacgaggcctgcgccgagatctacggcgaccactacggcaagaagaacaccgaggagaagatctacctgcctcctatccccgccgacgagatccgcaaccccgtggtgctgcgcgccctgagccaggcccgcaaggtgatcaacggcgtggtgcgccgctacggcagccccgcccgcatccacatcgagaccgcccgcgaggtgggcaagagcttcaaggaccgcaaggagatcgagaagcgccaggaggagaaccgcaaggaccgcgagaaggccgccgccaagttccgcgagtacttccccaacttcgtgggcgagcccaagagcaaggacatcctgaagctgcgcctgtacgagcagcagcacggcaagtgcctgtacagcggcaaggagatcaacctgggccgcctgaacgagaagggctacgtggagatcgaccacgccctgcccttcagccgcacctgggacgacagcttcaacaacaaggtgctggtgctgggcagcgagaaccagaacaagggcaaccagaccccctacgagtacttcaacggcaaggacaacagccgcgagtggcaggagttcaaggcccgcgtggagaccagccgcttcccccgcagcaagaagcagcgcatcctgctgcagaagttcgacgaggacggcttcaaggagcgcaacctgaacgacacccgctacgtgaaccgcttcctgtgccagttcgtggccgaccgcatgcgcctgaccggcaagggcaagaagcgcgtgttcgccagcaacggccagatcaccaacctgctgcgcggcttctggggcctgcgcaaggtgcgcgccgagaacgaccgccaccacgccctggacgccgtggtggtggcctgcagcaccgtggccatgcagcagaagatcacccgcttcgtgcgctacaaggagatgaacgccttcgacggtaaaaccatcgacaaggagaccggcgaggtgctgcaccagaagacccacttcccccagccctgggagttcttcgcccaggaggtgatgatccgcgtgttcggcaagcccgacggcaagcccgagttcgaggaggccgacacccccgagaagctgcgcaccctgctggccgagaagctgagcagccgccctgaggccgtgcacgagtacgtgactcctctgttcgtgagccgcgcccccaaccgcaagatgagcggtcagggtcacatggagaccgtgaagagcgccaagcgcctggacgagggcgtgagcgtgctgcgcgtgcccctgacccagctgaagctgaaggacctggagaagatggtgaaccgcgagcgcgagcccaagctgtacgaggccctgaaggcccgcctggaggcccacaaggacgaccccgccaaggccttcgccgagcccttctacaagtacgacaaggccggcaaccgcacccagcaggtgaaggccgtgcgcgtggagcaggtgcagaagaccggcgtgtgggtgcgcaaccacaacggcatcgccgacaacgccaccatggtgcgcgtggacgtgttcgagaagggcgacaagtactacctggtgcccatctacagctggcaggtggccaagggcatcctgcccgaccgcgccgtggtgcagggcaaggacgaggaggactggcagctgatcgacgacagcttcaacttcaagttcagcctgcaccccaacgacctggtggaggtgatcaccaagaaggcccgcatgttcggctacttcgccagctgccaccgcggcaccggcaacatcaacatccgcatccacgacctggaccacaagatcggcaagaacggcatcctggagggcatcggcgtgaagaccgccctgagcttccagaagtaccagatcgacgagctgggcaaggagatccgcccctgccgcctgaagaagcgccctcctgtgcgcgcggccgcagatccaaaaaagaagagaaaggtagatccaaaaaagaagagaaaggtagatccaaaaaagaagagaaaggtagatacggccgcatag

SEQ ID NO: 22 - DNA, 3468 bp, Neisseria meningitidis
atggccgccttcaagcccaaccccatcaactacatcctgggcctggccatcggcatcgccagcgtgggctgggccatggtggagatcgacgaggacgagaaccccatctgcctgatcgacctgggtgtgcgcgtgttcgagcgcgctgaggtgcccaagactggtgacagtctggctatggctcgccggcttgctcgctctgttcggcgccttactcgccggcgcgctcaccgccttctgcgcgctcgccgcctgctgaagcgcgagggtgtgctgcaggctgccgacttcgacgagaacggcctgatcaagagcctgcccaacactccttggcagctgcgcgctgccgctctggaccgcaagctgactcctctggagtggagcgccgtgctgctgcacctgatcaagcaccgcggctacctgagccagcgcaagaacgagggcgagaccgccgacaaggagctgggtgctctgctgaagggcgtggccgacaacgcccacgccctgcagactggtgacttccgcactcctgctgagctggccctgaacaagttcgagaaggagagcggccacatccgcaaccagcgcggcgactacagccacaccttcagccgcaaggacctgcaggccgagctgatcctgctgttcgagaagcagaaggagttcggcaacccccacgtgagcggcggcctgaaggagggcatcgagaccctgctgatgacccagcgccccgccctgagcggcgacgccgtgcagaagatgctgggccactgcaccttcgagccagccgagcccaaggccgccaagaacacctacaccgccgagcgcttcatctggctgaccaagctgaacaacctgcgcatcctggagcagggcagcgagcgccccctgaccgacaccgagcgcgccaccctgatggacgagccctaccgcaagagcaagctgacctacgcccaggcccgcaagctgctgggtctggaggacaccgccttcttcaagggcctgcgctacggcaaggacaacgccgaggccagcaccctgatggagatgaaggcctaccacgccatcagccgcgccctggagaaggagggcctgaaggacaagaagagtcctctgaacctgagccccgagctgcaggacgagatcggcaccgccttcagcctgttcaagaccgacgaggacatcaccggccgcctgaaggaccgcatccagcccgagatcctggaggccctgctgaagcacatcagcttcgacaagttcgtgcagatcagcctgaaggccctgcgccgcatcgtgcccctgatggagcagggcaagcgctacgacgaggcctgcgccgagatctacggcgaccactacggcaagaagaacaccgaggagaagatctacctgcctcctatccccgccgacgagatccgcaaccccgtggtgctgcgcgccctgagccaggcccgcaaggtgatcaacggcgtggtgcgccgctacggcagccccgcccgcatccacatcgagaccgcccgcgaggtgggcaagagcttcaaggaccgcaaggagatcgagaagcgccaggaggagaaccgcaaggaccgcgagaaggccgccgccaagttccgcgagtacttccccaacttcgtgggcgagcccaagagcaaggacatcctgaagctgcgcctgtacgagcagcagcacggcaagtgcctgtacagcggcaaggagatcaacctgggccgcctgaacgagaagggctacgtggagatcgccgctgccctgcccttcagccgcacctgggacgacagcttcaacaacaaggtgctggtgctgggcagcgaggctcagaacaagggcaaccagaccccctacgagtacttcaacggcaaggacaacagccgcgagtggcaggagttcaaggcccgcgtggagaccagccgcttcccccgcagcaagaagcagcgcatcctgctgcagaagttcgacgaggacggcttcaaggagcgcaacctgaacgacacccgctacgtgaaccgcttcctgtgccagttcgtggccgaccgcatgcgcctgaccggcaagggcaagaagcgcgtgttcgccagcaacggccagatcaccaacctgctgcgcggcttctggggcctgcgcaaggtgcgcgccgagaacgaccgccaccacgccctggacgccgtggtggtggcctgcagcaccgtggccatgcagcagaagatcacccgcttcgtgcgctacaaggagatgaacgccttcgacggtaaaaccatcgacaaggagaccggcgaggtgctgcaccagaagacccacttcccccagccctgggagttcttcgcccaggaggtgatgatccgcgtgttcggcaagcccgacggcaagcccgagttcgaggaggccgacacccccgagaagctgcgcaccctgctggccgagaagctgagcagccgccctgaggccgtgcacgagtacgtgactcctctgttcgtgagccgcgcccccaaccgcaagatgagcggtcagggtcacatggagaccgtgaagagcgccaagcgcctggacgagggcgtgagcgtgctgcgcgtgcccctgacccagctgaagctgaaggacctggagaagatggtgaaccgcgagcgcgagcccaagctgtacgaggccctgaaggcccgcctggaggcccacaaggacgaccccgccaaggccttcgccgagcccttctacaagtacgacaaggccggcaaccgcacccagcaggtgaaggccgtgcgcgtggagcaggtgcagaagaccggcgtgtgggtgcgcaaccacaacggcatcgccgacaacgccaccatggtgcgcgtggacgtgttcgagaagggcgacaagtactacctggtgcccatctacagctggcaggtggccaagggcatcctgcccgaccgcgccgtggtgcagggcaaggacgaggaggactggcagctgatcgacgacagcttcaacttcaagttcagcctgcaccccaacgacctggtggaggtgatcaccaagaaggcccgcatgttcggctacttcgccagctgccaccgcggcaccggcaacatcaacatccgcatccacgacctggaccacaagatcggcaagaacggcatcctggagggcatcggcgtgaagaccgccctgagcttccagaagtaccagatcgacgagctgggcaaggagatccgcccctgccgcctgaagaagcgccctcctgtgcgcagcagggctgaccccaagaagaagaggaaggtggaggccagcggttccggacgggctgacgcattggacgattttgatctggatatgctgggaagtgacgccctcgatgattttgaccttgacatgcttggttcggatgcccttgatgactttgacctcgacatgctcggcagtgacgcccttgatgatttcgacctggacatgctgattaactctagatga

SEQ ID NO: 23 - DNA, 3489 bp, Neisseria meningitidis
atgcccaagaagaagaggaaggtggccgccttcaagcccaaccccatcaactacatcctgggcctggccatcggcatcgccagcgtgggctgggccatggtggagatcgacgaggacgagaaccccatctgcctgatcgacctgggtgtgcgcgtgttcgagcgcgctgaggtgcccaagactggtgacagtctggctatggctcgccggcttgctcgctctgttcggcgccttactcgccggcgcgctcaccgccttctgcgcgctcgccgcctgctgaagcgcgagggtgtgctgcaggctgccgacttcgacgagaacggcctgatcaagagcctgcccaacactccttggcagctgcgcgctgccgctctggaccgcaagctgactcctctggagtggagcgccgtgctgctgcacctgatcaagcaccgcggctacctgagccagcgcaagaacgagggcgagaccgccgacaaggagctgggtgctctgctgaagggcgtggccgacaacgcccacgccctgcagactggtgacttccgcactcctgctgagctggccctgaacaagttcgagaaggagagcggccacatccgcaaccagcgcggcgactacagccacaccttcagccgcaaggacctgcaggccgagctgatcctgctgttcgagaagcagaaggagttcggcaacccccacgtgagcggcggcctgaaggagggcatcgagaccctgctgatgacccagcgccccgccctgagcggcgacgccgtgcagaagatgctgggccactgcaccttcgagccagccgagcccaaggccgccaagaacacctacaccgccgagcgcttcatctggctgaccaagctgaacaacctgcgcatcctggagcagggcagcgagcgccccctgaccgacaccgagcgcgccaccctgatggacgagccctaccgcaagagcaagctgacctacgcccaggcccgcaagctgctgggtctggaggacaccgccttcttcaagggcctgcgctacggcaaggacaacgccgaggccagcaccctgatggagatgaaggcctaccacgccatcagccgcgccctggagaaggagggcctgaaggacaagaagagtcctctgaacctgagccccgagctgcaggacgagatcggcaccgccttcagcctgttcaagaccgacgaggacatcaccggccgcctgaaggaccgcatccagcccgagatcctggaggccctgctgaagcacatcagcttcgacaagttcgtgcagatcagcctgaaggccctgcgccgcatcgtgcccctgatggagcagggcaagcgctacgacgaggcctgcgccgagatctacggcgaccactacggcaagaagaacaccgaggagaagatctacctgcctcctatccccgccgacgagatccgcaaccccgtggtgctgcgcgccctgagccaggcccgcaaggtgatcaacggcgtggtgcgccgctacggcagccccgcccgcatccacatcgagaccgcccgcgaggtgggcaagagcttcaaggaccgcaaggagatcgagaagcgccaggaggagaaccgcaaggaccgcgagaaggccgccgccaagttccgcgagtacttccccaacttcgtgggcgagcccaagagcaaggacatcctgaagctgcgcctgtacgagcagcagcacggcaagtgcctgtacagcggcaaggagatcaacctgggccgcctgaacgagaagggctacgtggagatcgccgctgccctgcccttcagccgcacctgggacgacagcttcaacaacaaggtgctggtgctgggcagcgaggctcagaacaagggcaaccagaccccctacgagtacttcaacggcaaggacaacagccgcgagtggcaggagttcaaggcccgcgtggagaccagccgcttcccccgcagcaagaagcagcgcatcctgctgcagaagttcgacgaggacggcttcaaggagcgcaacctgaacgacacccgctacgtgaaccgcttcctgtgccagttcgtggccgaccgcatgcgcctgaccggcaagggcaagaagcgcgtgttcgccagcaacggccagatcaccaacctgctgcgcggcttctggggcctgcgcaaggtgcgcgccgagaacgaccgccaccacgccctggacgccgtggtggtggcctgcagcaccgtggccatgcagcagaagatcacccgcttcgtgcgctacaaggagatgaacgccttcgacggtaaaaccatcgacaaggagaccggcgaggtgctgcaccagaagacccacttcccccagccctgggagttcttcgcccaggaggtgatgatccgcgtgttcggcaagcccgacggcaagcccgagttcgaggaggccgacacccccgagaagctgcgcaccctgctggccgagaagctgagcagccgccctgaggccgtgcacgagtacgtgactcctctgttcgtgagccgcgcccccaaccgcaagatgagcggtcagggtcacatggagaccgtgaagagcgccaagcgcctggacgagggcgtgagcgtgctgcgcgtgcccctgacccagctgaagctgaaggacctggagaagatggtgaaccgcgagcgcgagcccaagctgtacgaggccctgaaggcccgcctggaggcccacaaggacgaccccgccaaggccttcgccgagcccttctacaagtacgacaaggccggcaaccgcacccagcaggtgaaggccgtgcgcgtggagcaggtgcagaagaccggcgtgtgggtgcgcaaccacaacggcatcgccgacaacgccaccatggtgcgcgtggacgtgttcgagaagggcgacaagtactacctggtgcccatctacagctggcaggtggccaagggcatcctgcccgaccgcgccgtggtgcagggcaaggacgaggaggactggcagctgatcgacgacagcttcaacttcaagttcagcctgcaccccaacgacctggtggaggtgatcaccaagaaggcccgcatgttcggctacttcgccagctgccaccgcggcaccggcaacatcaacatccgcatccacgacctggaccacaagatcggcaagaacggcatcctggagggcatcggcgtgaagaccgccctgagcttccagaagtaccagatcgacgagctgggcaaggagatccgcccctgccgcctgaagaagcgccctcctgtgcgcagcagggctgaccccaagaagaagaggaaggtggaggccagcggttccggacgggctgacgcattggacgattttgatctggatatgctgggaagtgacgccctcgatgattttgaccttgacatgcttggttcggatgcccttgatgactttgacctcgacatgctcggcagtgacgcccttgatgatttcgacctggacatgctgattaactctagatga

SEQ ID NO: 24 - DNA, 3249 bp, Neisseria meningitidis
atggctgccttcaaacctaattcaatcaactacatcctcggcctcgatatcggcatcgcatccgtcggctgggcgatggtagaaattgacgaagaagaaaaccccatccgcctgattgatttgggcgtgcgcgtatttgagcgtgccgaagtaccgaaaacaggcgactcccttgccatggcaaggcgtttggcgcgcagtgttcgccgcctgacccgccgtcgcgcccaccgcctgcttcggacccgccgcctattgaaacgcgaaggcgtattacaagccgccaattttgacgaaaacggcttgattaaatccttaccgaatacaccatggcaacttcgcgcagccgcattagaccgcaaactgacgcctttagagtggtcggcagtcttgttgcatttaatcaaacatcgcggctatttatcgcaacggaaaaacgagggcgaaactgccgataaggagcttggcgctttgcttaaaggcgtagccggcaatgcccatgccttacagacaggcgatttccgcacaccggccgaattggctttaaataaatttgagaaagaaagcggccatatccgcaatcagcgcagcgattattcgcatacgttcagccgcaaagatttacaggcggagctgattttgctgtttgaaaaacaaaaagaatttggcaatccgcatgtttcaggcggccttaaagaaggtattgaaaccctactgatgacgcaacgccctgccctgtccggcgatgccgttcaaaaaatgttggggcattgcaccttcgaaccggcagagccgaaagccgctaaaaacacctacacagccgaacgtttcatctggctgaccaagctgaacaacctgcgtattttagagcaaggcagcgagcggccattgaccgataccgaacgcgccacgcttatggacgagccatacagaaaatccaaactgacttacgcacaagcccgtaagctgctgggtttagaagataccgcctttttcaaaggcttgcgctatggtaaagacaatgccgaagcctcaacattgatggaaatgaaggcctaccatgccatcagccgtgcactggaaaaagaaggattgaaagacaaaaaatccccattaaacctttctcccgaattacaagacgaaatcggcacggcattctccctgttcaaaaccgatgaagacattacaggccgtctgaaagaccgtatacagcccgaaatcttagaagcgctgttgaaacacatcagcttcgataagttcgtccaaatttccttgaaagcattgcgccgaattgtgcctctaatggaacaaggcaaacgttacgatgaagcctgcgccgaaatctacggagaccattacggcaagaagaatacggaagaaaagatttatctgccgccgattcccgccgacgaaatccgcaaccccgtcgtcttgcgcgccttatctcaagcacgtaaggtcattaacggcgtggtacgccgttacggctccccagctcgtatccatattgaaactgcaagggaagtaggtaaatcgtttaaagaccgcaaagaaattgagaaacgccaagaagaaaaccgcaaagaccgggaaaaagccgccgccaaattccgagagtatttccccaattttgtcggagaacccaaatccaaagatattctgaaactgcgcctgtacgagcaacaacacggcaaatgcctgtattcgggcaaagaaatcaacttaggccgtctgaacgaaaaaggctatgtcgaaatcgaccatgccctgccgttctcgcgcacatgggacgacagtttcaacaataaagtactggtattgggcagcgaaaaccaaaacaaaggcaatcaaaccccttacgaatacttcaacggcaaagacaacagccgcgaatggcaggaatttaaagcgcgtgtcgaaaccagccgtttcccgcgcagtaaaaaacaacggattctgctgcaaaaattcgatgaagacggctttaaagaacgcaatctgaacgacacgcgctacgtcaaccgtttcctgtgtcaatttgttgccgaccgtatgcggctgacaggtaaaggcaagaaacgtgtctttgcatccaacggacaaattaccaatctgttgcgcggcttttggggattgcgcaaagtgcgtgcggaaaacgaccgccatcacgccttggacgccgtcgtcgttgcctgctcgaccgttgccatgcagcagaaaattacccgttttgtacgctataaagagatgaacgcgtttgacggtaaaaccatagacaaagaaacaggagaagtgctgcatcaaaaaacacacttcccacaaccttgggaatttttcgcacaagaagtcatgattcgcgtcttcggcaaaccggacggcaaacccgaattcgaagaagccgataccctagaaaaactgcgcacgttgcttgccgaaaaattatcatctcgccccgaagccgtacacgaatacgttacgccactgtttgtttcacgcgcgcccaatcggaagatgagcgggcaagggcatatggagaccgtcaaatccgccaaacgactggacgaaggcgtcagcgtgttgcgcgtaccgctgacacagttaaaactgaaagacttggaaaaaatggtcaatcgggagcgcgaacctaagctatacgaagcactgaaagcacggctggaagcacataaagacgatcctgccaaagcctttgccgagccgttttacaaatacgataaagcaggcaaccgcacccaacaggtaaaagccgtacgcgtagagcaagtacagaaaaccggcgtatgggtgcgcaaccataacggtattgccgacaacgcaaccatggtgcgcgtagatgtgtttgagaaaggcgacaagtattatctggtaccgatttacagttggcaggtagcgaaagggattttgccggatagggctgttgtacaaggaaaagatgaagaagattggcaacttattgatgatagtttcaactttaaattctcattacaccctaatgatttagtcgaggttataacaaaaaaagctagaatgtttggttactttgccagctgccatcgaggcacaggtaatatcaatatacgcattcatgatcttgatcataaaattggcaaaaatggaatactggaaggtatcggcgtcaaaaccgccctttcattccaaaaataccaaattgacgaactgggcaaagaaatcagaccatgccgtctgaaaaaacgcccgcctgtccgttaa

SEQ ID NO: 25 - DNA, 4188 bp, Treponema denticola
atgaaaaaggaaattaaggattattttctcggattggatgtaggaaccggatcggttggttgggcagttactgatactgactataaactcttaaaggctaatcgtaaagacctttggggaatgaggtgttttgagacggcggaaactgcggaagtgagaaggcttcacaggggggctaggcgccgtattgagagaagaaaaaaaagaataaagctgcttcaagagcttttttcccaagaaattgcaaaaacagatgagggatttttccaaagaatgaaggaaagccctttctatgcagaagacaagactatattacaggaaaacactctttttaatgataaagattttgccgataagacctaccataaagcctatcctaccataaaccatctgataaaggcttggattgaaaacaaggtaaagccggatccaaggttattatacttagcctgtcataatattataaaaaaaagaggtcattttttattcgagggcgatttcgattcagaaaatcagtttgatacttctatacaagccctttttgaatatctgcgtgaagatatggaagtcgatattgatgccgatagccaaaaagtaaaagagattttaaaggatagctctttaaaaaattccgaaaaacaaagccgcctaaataagattttaggactgaaaccctccgacaaacaaaaaaaagctattactaatttaatatcaggcaacaaaataaactttgccgatctttatgataatccggatttaaaggatgcggagaaaaatagtatatctttttcgaaagatgattttgatgctttgagtgatgatcttgcttccattctaggagattcttttgagcttttattaaaagcaaaggctgtatataactgctcggttctttccaaggtaataggcgatgaacagtatctttcttttgcaaaggtaaaaatatatgaaaagcataaaaccgatttgactaaattaaaaaatgttataaaaaagcatttcccaaaagattataaaaaagtattcggatacaataaaaacgaaaaaaataacaacaattactccggatatgtaggcgtatgtaaaaccaagagtaaaaaactaattataaacaattctgtaaatcaagaagatttttacaaatttttaaaaactatcctttcagcaaaatccgagataaaggaagtaaatgatatattgaccgaaattgaaacagggacttttttacctaaacagatatctaaaagcaatgcggagattccttatcaattacgcaagatggagctggaaaaaatattatcaaacgcagaaaaacatttttcctttttaaaacaaaaagatgaaaaaggtttatctcacagtgaaaagattataatgcttttaacatttaagattccttattatattggacctataaacgataaccataaaaaattttttcccgatagatgctgggtagtaaaaaaagaaaaatcgccttccggtaaaactactccatggaacttttttgatcatatcgataaagaaaaaacagctgaagcatttattacaagcagaaccaatttttgcacatatttagtaggggaatccgttttaccaaaaagttctcttttatattccgagtataccgttttaaatgaaatcaacaatttacagattatcattgacggaaaaaatatctgcgatattaaactaaaacaaaaaatatacgaagatttatttaaaaaatataaaaagattacacaaaaacaaatttcaacttttatcaaacacgaaggtatttgcaataaaactgatgaagtaattattctaggtatcgataaagaatgtacatcttcgttaaaatcatatatagaacttaaaaacatattcggaaagcaagtagatgaaatttctacaaagaatatgcttgaagaaattatacgatgggctactatctatgatgaaggagaaggcaaaacaatacttaaaacaaaaataaaagccgaatatggaaaatattgttctgatgaacagatcaaaaaaattctaaatcttaaattttcaggttggggccgcttgtcacgcaaattccttgaaaccgtcacatcagaaatgccgggttttagcgaaccggtaaatataataactgcaatgcgggaaactcaaaataatttaatggagttgcttagcagtgaatttacatttactgaaaatattaaaaagataaattcgggatttgaagatgctgaaaagcaattttcatatgacggtttggttaagcctctgtttttatcaccatcggtaaaaaaaatgttgtggcagactctaaagcttgtaaaagaaatatcgcatattacccaagcccctcctaaaaaaatatttatagaaatggcaaagggtgcagagcttgaacctgcgaggactaagacaagattaaaaattttacaagacttatacaataactgtaaaaatgatgcggatgcttttagttccgagataaaagacctttcaggtaaaatagaaaatgaagataatttaaggcttcgaagcgacaaactttatctttattacacgcagcttggaaagtgcatgtattgcggtaaaccgattgaaataggccatgtatttgatacaagcaactatgatatagatcatatttatccccaatccaagattaaagatgacagtataagtaatcgggttttagtatgcagcagctgcaataaaaataaggaagataaatatcctttgaagtctgaaattcaatcaaagcaaaggggcttttggaattttttacaacgaaataactttataagccttgaaaaattgaataggttaacaagggccactccaatctcggatgacgaaacggcaaaattcattgccagacagcttgtagaaacaagacaggcgacaaaagtagctgcaaaagtattagaaaaaatgtttcccgaaactaagattgtttattctaaagctgaaaccgtatcaatgtttagaaataaattcgatattgtaaaatgcagagaaataaacgattttcatcatgctcatgatgcatatttaaatattgttgtcggaaatgtatataatacaaaatttacaaataatccttggaactttataaaggagaaacgggataatccaaagattgccgatacttacaattattataaagtttttgattatgatgtaaaaagaaataatattacggcatgggaaaaaggaaaaacaattatcactgtgaaggatatgcttaaaagaaatacccctatttatacacgccaagccgcctgcaaaaaaggagaactctttaaccaaaccattatgaaaaaaggattgggccagcatcctctaaaaaaagaaggtcctttttctaatatttcaaaatatgggggctataataaagtctctgctgcatattatactcttatagaatacgaagaaaaagggaataaaatacgaagcttagaaaccatccctctatatttggtaaaagacattcaaaaagatcaagatgtattaaagagttacttaacagatctgctagggaaaaaagaatttaagattttggttcctaaaataaaaatcaactccctcttaaaaattaacggtttcccttgtcatataacagggaaaaccaatgattctttcttactgcgtccggctgttcagttttgctgttcaaataatgaagttctttattttaaaaaaattataagattcagtgaaataagaagtcaaagagaaaagataggaaaaacaatttctccttatgaagacttatcctttagatcttatatcaaagaaaatttatggaaaaagacaaaaaatgatgaaataggagaaaaggagttttatgaccttcttcaaaagaagaatttggaaatctatgatatgcttttaacaaaacataaggatactatttataaaaaaagacctaactctgcaactattgatatcttagtcaaaggaaaagaaaagtttaaatctttaataatcgaaaatcagtttgaagttattttagagattttaaaactgttttctgccactagaaatgtatcagacttacaacatataggcggaagcaaatattcaggagttgcaaagataggaaataaaatatctagtcttgataactgtattttaatttaccaatcaataacaggtatttttgaaaaaaggattgatttgttaaaggtatga

SEQ ID NO: 26 - DNA, 4188 bp, Treponema denticola
atgaagaaggagatcaaggactacttcctgggcctggacgtgggcaccggcagcgtgggctgggccgtgaccgacaccgactacaagctgctgaaggccaaccgcaaggacctgtggggcatgcgctgcttcgagactgctgagaccgccgaggtgcgccggctgcaccgcggtgctcgccggcgcatcgagcgccgcaagaagcgcatcaagctgctgcaggagctgttcagccaggagatcgccaagaccgacgagggcttcttccagcgcatgaaggagagccccttctacgccgaggacaagaccatcctgcaggagaacaccctgttcaacgacaaggacttcgccgacaagacctaccacaaggcctaccccaccatcaaccacctgatcaaggcctggatcgagaacaaggtgaagcccgaccctcgcctgctgtacctggcctgccacaacatcatcaagaagcgcggccacttcctgttcgagggcgacttcgacagcgagaaccagttcgacaccagcatccaggccctgttcgagtacctgcgcgaggacatggaggtggacatcgacgccgacagccagaaggtgaaggagatcctgaaggacagcagcctgaagaacagcgagaagcagagccgcctgaacaagatcctgggcctgaagcccagcgacaagcagaagaaggccatcaccaacctgatcagcggcaacaagatcaacttcgccgacctgtacgacaaccccgacctgaaggacgccgagaagaacagcatcagcttcagcaaggacgacttcgacgccctgagcgacgacctggccagcatcctgggcgacagcttcgagctgctgctgaaggccaaggccgtgtacaactgcagcgtgctgagcaaggtgatcggcgacgagcagtacctgagcttcgccaaggtgaagatctacgagaagcacaagaccgaccttaccaagctgaagaacgtgatcaagaagcacttccccaaggactacaagaaggtgttcggctacaacaagaacgagaagaacaacaacaactacagcggctacgtgggcgtgtgcaagaccaagagcaagaagctgatcatcaacaacagcgtgaaccaggaggacttctacaagttcctgaagaccatcctgagcgccaagagcgagatcaaggaggtgaacgacatcctgaccgagatcgagaccggcaccttcctgcccaagcagatcagcaagagcaacgccgagatcccctaccagctgcgcaagatggagctggagaagatcctgagcaacgccgagaagcacttcagcttcctgaagcagaaggacgagaagggcctgagccacagcgagaagatcatcatgctgctgaccttcaagatcccctactacatcggccccatcaacgacaaccacaagaagttcttccccgaccgctgctgggtggtgaagaaggagaagagccccagcggcaagaccaccccctggaacttcttcgaccacatcgacaaggagaagaccgccgaggccttcatcaccagccgcaccaacttctgcacatacctggtgggcgagagcgtgctgcccaagagcagcctgctgtacagcgagtacaccgtgctgaacgagatcaacaacctgcagatcatcatcgacggcaagaacatctgcgacatcaagctgaagcagaagatctacgaggacctgttcaagaagtacaagaagatcacccagaagcagatcagcaccttcatcaagcacgagggcatctgcaacaagaccgacgaggtgatcatcctgggcatcgacaaggagtgcaccagcagcctgaagagctacatcgagctgaagaacatcttcggcaagcaggtggacgagatcagcaccaagaacatgctggaggagatcatccgctgggccaccatctacgacgagggcgagggcaagaccatcctgaagaccaagatcaaggccgagtacggcaagtactgcagcgacgagcagatcaagaagatcctgaacctgaagttcagcggctggggccgcctgagccgcaagttcctggagaccgtgaccagcgagatgcccggcttcagcgagcccgtgaacatcatcaccgccatgcgcgagacccagaacaacctgatggagctgctgagcagcgagttcaccttcaccgagaacatcaagaagatcaacagcggcttcgaggacgccgagaagcagttcagctacgacggcctggtgaagcccctgttcctgagccccagcgtgaagaagatgctgtggcagaccctgaagctggtgaaggagatcagccacatcacccaggctcctcctaagaagatcttcatcgagatggccaagggcgccgagctggagcctgctcgcaccaagacccgcctgaagatcctgcaggacctgtacaacaactgcaagaacgacgccgacgcattcagcagcgagatcaaggacctgagcggcaagatcgagaacgaggacaacctgcgcctgcgcagcgacaagctgtacctgtactacacccagctgggcaagtgcatgtactgcggcaagcccatcgagatcggccacgtgttcgacaccagcaactacgacatcgaccacatctacccccagagcaagatcaaggacgacagcatcagcaaccgcgtgctggtgtgcagcagctgcaacaagaacaaggaggacaagtaccctctgaagagcgagatccagagcaagcagcgcggcttctggaacttcctgcagcgcaacaacttcatcagcctggagaagctgaaccgcctgacccgcgccacccccatcagcgacgacgagaccgccaagttcatcgcccgccagctggtggagactcgccaagctaccaaggtggccgccaaggtgctggagaagatgttccccgagaccaagatcgtgtacagcaaggccgagaccgtgagcatgttccgcaacaagttcgacatcgtgaagtgccgcgagatcaacgacttccaccacgcccacgacgcctacctgaacatcgtggtgggcaacgtgtacaacaccaagttcaccaacaacccctggaatttcattaaggagaagcgcgacaaccccaagatcgccgacacctacaactactacaaggtgttcgactacgacgtgaagcgcaacaacatcaccgcctgggagaagggcaagaccatcatcaccgtgaaggacatgctgaagcgcaacacccccatctacacccgccaggccgcctgcaagaagggcgagctgttcaaccagaccatcatgaagaagggcctgggccagcaccccctgaagaaggagggccccttcagcaacatcagcaagtacggcggctacaacaaggtgagcgccgcctactacaccctgatcgagtacgaggagaagggcaacaagatccgcagcctggagaccatccccctgtacctggtgaaggacatccagaaggaccaggacgtgctgaagagctacctgaccgacctgctgggcaagaaggagttcaagatcctggtgcccaagatcaagatcaacagcctgctgaagatcaacggcttcccctgccacatcaccggcaagaccaacgacagcttcctgctgcgccccgccgtgcagttctgctgcagcaacaacgaggtgctgtacttcaagaagatcatccgcttcagcgagatccgcagccagcgcgagaagatcggcaagaccatcagcccctacgaggacctgagcttccgcagctacatcaaggagaacctgtggaagaagaccaagaacgacgagatcggcgagaaggagttctacgacctgctgcagaagaagaacctggagatctacgacatgctgctgaccaagcacaaggacaccatctacaagaagcgccccaacagcgccaccatcgacatcctggtgaagggcaaggagaagttcaagagcctgatcatcgagaaccagttcgaggtgatcctggagatcctgaagctgttcagcgccacccgcaacgtgagcgacctgcagcacatcggcggcagcaagtacagcggcgtggccaagatcggcaacaagatcagcagcctggacaactgcatcctgatctaccagagcatcaccggcatcttcgagaagcgcatcgacctgctgaaggtgtaa

SEQ ID NO: 27 - DNA, 4188 bp, Treponema denticola
atgaagaaggagatcaaggactacttcctgggcctggccgtgggcaccggcagcgtgggctgggccgtgaccgacaccgactacaagctgctgaaggccaaccgcaaggacctgtggggcatgcgctgcttcgagactgctgagaccgccgaggtgcgccggctgcaccgcggtgctcgccggcgcatcgagcgccgcaagaagcgcatcaagctgctgcaggagctgttcagccaggagatcgccaagaccgacgagggcttcttccagcgcatgaaggagagccccttctacgccgaggacaagaccatcctgcaggagaacaccctgttcaacgacaaggacttcgccgacaagacctaccacaaggcctaccccaccatcaaccacctgatcaaggcctggatcgagaacaaggtgaagcccgaccctcgcctgctgtacctggcctgccacaacatcatcaagaagcgcggccacttcctgttcgagggcgacttcgacagcgagaaccagttcgacaccagcatccaggccctgttcgagtacctgcgcgaggacatggaggtggacatcgacgccgacagccagaaggtgaaggagatcctgaaggacagcagcctgaagaacagcgagaagcagagccgcctgaacaagatcctgggcctgaagcccagcgacaagcagaagaaggccatcaccaacctgatcagcggcaacaagatcaacttcgccgacctgtacgacaaccccgacctgaaggacgccgagaagaacagcatcagcttcagcaaggacgacttcgacgccctgagcgacgacctggccagcatcctgggcgacagcttcgagctgctgctgaaggccaaggccgtgtacaactgcagcgtgctgagcaaggtgatcggcgacgagcagtacctgagcttcgccaaggtgaagatctacgagaagcacaagaccgaccttaccaagctgaagaacgtgatcaagaagcacttccccaaggactacaagaaggtgttcggctacaacaagaacgagaagaacaacaacaactacagcggctacgtgggcgtgtgcaagaccaagagcaagaagctgatcatcaacaacagcgtgaaccaggaggacttctacaagttcctgaagaccatcctgagcgccaagagcgagatcaaggaggtgaacgacatcctgaccgagatcgagaccggcaccttcctgcccaagcagatcagcaagagcaacgccgagatcccctaccagctgcgcaagatggagctggagaagatcctgagcaacgccgagaagcacttcagcttcctgaagcagaaggacgagaagggcctgagccacagcgagaagatcatcatgctgctgaccttcaagatcccctactacatcggccccatcaacgacaaccacaagaagttcttccccgaccgctgctgggtggtgaagaaggagaagagccccagcggcaagaccaccccctggaacttcttcgaccacatcgacaaggagaagaccgccgaggccttcatcaccagccgcaccaacttctgcacatacctggtgggcgagagcgtgctgcccaagagcagcctgctgtacagcgagtacaccgtgctgaacgagatcaacaacctgcagatcatcatcgacggcaagaacatctgcgacatcaagctgaagcagaagatctacgaggacctgttcaagaagtacaagaagatcacccagaagcagatcagcaccttcatcaagcacgagggcatctgcaacaagaccgacgaggtgatcatcctgggcatcgacaaggagtgcaccagcagcctgaagagctacatcgagctgaagaacatcttcggcaagcaggtggacgagatcagcaccaagaacatgctggaggagatcatccgctgggccaccatctacgacgagggcgagggcaagaccatcctgaagaccaagatcaaggccgagtacggcaagtactgcagcgacgagcagatcaagaagatcctgaacctgaagttcagcggctggggccgcctgagccgcaagttcctggagaccgtgaccagcgagatgcccggcttcagcgagcccgtgaacatcatcaccgccatgcgcgagacccagaacaacctgatggagctgctgagcagcgagttcaccttcaccgagaacatcaagaagatcaacagcggcttcgaggacgccgagaagcagttcagctacgacggcctggtgaagcccctgttcctgagccccagcgtgaagaagatgctgtggcagaccctgaagctggtgaaggagatcagccacatcacccaggctcctcctaagaagatcttcatcgagatggccaagggcgccgagctggagcctgctcgcaccaagacccgcctgaagatcctgcaggacctgtacaacaactgcaagaacgacgccgacgcattcagcagcgagatcaaggacctgagcggcaagatcgagaacgaggacaacctgcgcctgcgcagcgacaagctgtacctgtactacacccagctgggcaagtgcatgtactgcggcaagcccatcgagatcggccacgtgttcgacaccagcaactacgacatcgctgctatctacccccagagcaagatcaaggacgacagcatcagcaaccgcgtgctggtgtgcagcagctgcgccaagaacaaggaggacaagtaccctctgaagagcgagatccagagcaagcagcgcggcttctggaacttcctgcagcgcaacaacttcatcagcctggagaagctgaaccgcctgacccgcgccacccccatcagcgacgacgagaccgccaagttcatcgcccgccagctggtggagactcgccaagctaccaaggtggccgccaaggtgctggagaagatgttccccgagaccaagatcgtgtacagcaaggccgagaccgtgagcatgttccgcaacaagttcgacatcgtgaagtgccgcgagatcaacgacttccaccacgcccacgacgcctacctgaacatcgtggtgggcaacgtgtacaacaccaagttcaccaacaacccctggaatttcattaaggagaagcgcgacaaccccaagatcgccgacacctacaactactacaaggtgttcgactacgacgtgaagcgcaacaacatcaccgcctgggagaagggcaagaccatcatcaccgtgaaggacatgctgaagcgcaacacccccatctacacccgccaggccgcctgcaagaagggcgagctgttcaaccagaccatcatgaagaagggcctgggccagcaccccctgaagaaggagggccccttcagcaacatcagcaagtacggcggctacaacaaggtgagcgccgcctactacaccctgatcgagtacgaggagaagggcaacaagatccgcagcctggagaccatccccctgtacctggtgaaggacatccagaaggaccaggacgtgctgaagagctacctgaccgacctgctgggcaagaaggagttcaagatcctggtgcccaagatcaagatcaacagcctgctgaagatcaacggcttcccctgccacatcaccggcaagaccaacgacagcttcctgctgcgccccgccgtgcagttctgctgcagcaacaacgaggtgctgtacttcaagaagatcatccgcttcagcgagatccgcagccagcgcgagaagatcggcaagaccatcagcccctacgaggacctgagcttccgcagctacatcaaggagaacctgtggaagaagaccaagaacgacgagatcggcgagaaggagttctacgacctgctgcagaagaagaacctggagatctacgacatgctgctgaccaagcacaaggacaccatctacaagaagcgccccaacagcgccaccatcgacatcctggtgaagggcaaggagaagttcaagagcctgatcatcgagaaccagttcgaggtgatcctggagatcctgaagctgttcagcgccacccgcaacgtgagcgacctgcagcacatcggcggcagcaagtacagcggcgtggccaagatcggcaacaagatcagcagcctggacaactgcatcctgatctaccagagcatcaccggcatcttcgagaagcgcatcgacctgctgaaggtgtaa

SEQ ID NO: 28 - protein, 1053 aa, Streptococcus aureas
MKRNYILGLDIGITSVGYGIIDYETRDVIDAGVRLFKEANVENNEGRRSKRGARRLKRRRRHRIQRVKKLLFDYNLLTDHSELSGINPYEARVKGLSQKLSEEEFSAALLHLAKRRGVHNVNEVEEDTGNELSTKEQISRNSKALEEKYVAELQLERLKKDGEVRGSINRFKTSDYVKEAKQLLKVQKAYHQLDQSFIDTYIDLLETRRTYYEGPGEGSPFGWKDIKEWYEMLMGHCTYFPEELRSVKYAYNADLYNALNDLNNLVITRDENEKLEYYEKFQIIENVFKQKKKPTLKQIAKEILVNEEDIKGYRVTSTGKPEFTNLKVYHDIKDITARKEIIENAELLDQIAKILTIYQSSEDIQEELTNLNSELTQEEIEQISNLKGYTGTHNLSLKAINLILDELWHTNDNQIAIFNRLKLVPKKVDLSQQKEIPTTLVDDFILSPVVKRSFIQSIKVINAIIKKYGLPNDIIIELAREKNSKDAQKMINEMQKRNRQTNERIEEIIRTTGKENAKYLIEKIKLHDMQEGKCLYSLEAIPLEDLLNNPFNYEVDHIIPRSVSFDNSFNNKVLVKQEENSKKGNRTPFQYLSSSDSKISYETFKKHILNLAKGKGRISKTKKEYLLEERDINRFSVQKDFINRNLVDTRYATRGLMNLLRSYFRVNNLDVKVKSINGGFTSFLRRKWKFKKERNKGYKHHAEDALIIANADFIFKEWKKLDKAKKVMENQMFEEKQAESMPEIETEQEYKEIFITPHQIKHIKDFKDYKYSHRVDKKPNRELINDTLYSTRKDDKGNTLIVNNLNGLYDKDNDKLKKLINKSPEKLLMYHHDPQTYQKLKLIMEQYGDEKNPLYKYYEETGNYLTKYSKKDNGPVIKKIKYYGNKLNAHLDITDDYPNSRNKVVKLSLKPYRFDVYLDNGVYKFVTVKNLDVIKKENYYEVNSKCYEEAKKLKKISNQAEFIASFYNNDLIKINGELYRVIGVNNDLLNRIEVNMIDITYREYLENMNDKRPPRIIKTIASKTQSIKKYSTDILGNLYEVKSKKHPQIIKKG

SEQ ID NO: 29 - DNA, 3162 bp, Streptococcus aureas
atgaaaaggaattatatcttaggattagatatcggaattacatcagtgggttatggaattattgattatgaaactagagatgtcatagatgcgggcgtacgtttatttaaagaggctaatgttgaaaataatgaaggacgacgatcaaaaagaggtgccagaaggcttaagaggcgtcgtagacatagaatacaaagagtaaagaaacttttatttgattacaatttgttgacagatcatagtgagctaagtggaatcaatccttacgaggcgcgcgtaaagggattaagtcaaaaattaagtgaagaggaattttctgcggcattgctacatttagcaaagcgtagaggtgtacataatgttaatgaagtggaagaagatacaggtaatgaattatccactaaagaacaaatttcaagaaatagtaaagcgttagaagagaagtatgttgcagaattacagttggaacgtttgaaaaaagacggtgaagtgagaggttcgattaaccgtttcaaaacatctgactatgtaaaagaagcaaagcagttattaaaagtacaaaaagcatatcatcaacttgatcaatcatttatagacacttatattgatttattggaaacaagaagaacatattatgagggaccaggtgaaggtagcccatttggatggaaagatattaaagaatggtatgaaatgttaatgggacattgtacgtatttcccagaagaattacgtagtgtgaaatatgcctataatgctgatttatataatgcgctgaatgatttgaacaacttggttattacacgagatgagaatgagaagctagagtattatgaaaaattccaaattatcgagaatgtctttaaacaaaagaaaaagccgacgcttaaacaaattgcgaaggaaatcttggtgaatgaagaagacatcaaaggctatcgtgtcacaagtacaggtaaaccagaatttacaaacttgaaagtttatcacgatatcaaagatattacagcaagaaaagaaattatcgagaatgcagagctactcgatcaaatagctaaaatattaactatttaccagtcatcagaagatatacaagaagaattaacaaacctaaattcagaattgacacaagaagagattgaacaaatttcaaacttgaaaggttatacaggaactcataacctttcactaaaggcaataaatttaatattagacgaattgtggcatacgaacgataatcaaatagctattttcaatcgtttgaaacttgtacctaaaaaggtagatttaagccaacaaaaagaaattcctactactttagttgatgattttatactgtctccagtagtgaaacgttcatttatacaatctattaaagttattaacgctattattaaaaaatacggtttgccaaatgatattattattgaacttgcgagagaaaagaattctaaagatgcacaaaaaatgattaatgaaatgcagaagagaaatcgtcaaacgaatgaacgtattgaggaaattataagaacgacaggtaaagaaaatgctaaatatttaattgaaaaaattaagctgcacgatatgcaagaagggaaatgtttatactcgttagaagcaatccctctagaagatttacttaataatccattcaattacgaagtagaccatatcattccacgttctgtttctttcgataactctttcaataataaagtgttggtgaaacaagaagaaaatagtaaaaaaggtaatagaacgccatttcaatatttaagttcttcagattctaaaataagttatgagacattcaaaaagcatattttaaatcttgctaaaggcaaaggtagaatctctaagacgaaaaaagaatatttgttagaagaacgagatatcaatcgcttcagtgtccaaaaagattttattaaccgtaacttagtagatacacgctatgcgacaagagggttaatgaacttattaagatcttattttagagtgaataacttagatgtcaaagtgaaatcgattaatggcggattcacaagtttcttaagaaggaaatggaagttcaaaaaagaaagaaataagggctacaaacaccatgctgaagatgcactgattattgcgaacgctgattttattttcaaagaatggaaaaaactagataaagctaaaaaagtgatggaaaatcaaatgtttgaagaaaagcaagctgaaagtatgcctgaaattgagactgagcaagagtataaagaaatttttataacgcctcatcaaattaaacatattaaggattttaaagattataaatattcacatagagttgataaaaagccgaatagagagttaataaatgatacattatattctacgagaaaagatgacaagggtaatacattaatcgttaataacttaaatggtttatacgataaagataatgataaattgaaaaaattaattaataaatcacctgaaaaattattgatgtatcatcatgatccacaaacatatcaaaaattaaaattgatcatggaacaatatggcgatgagaaaaatccgctttataaatattatgaagaaacaggcaattacttaacaaaatatagtaaaaaagataacggaccagtcatcaaaaaaattaaatattatggtaacaagctaaatgcgcatttagatattacggatgattatccaaatagcagaaataaagtagtaaaactttcattaaaaccatatcgctttgatgtttatttagataatggggtatataaatttgtgacagttaaaaatttagatgttatcaaaaaagaaaactactatgaagttaattcaaagtgttatgaagaagcaaaaaaactgaagaaaattagtaatcaagcagaatttatcgcaagtttttacaataatgacttgattaagattaacggagaattatatagagtcataggtgtaaataatgatctacttaacagaattgaagtaaatatgatagacatcacatatagagaatatttagagaacatgaatgataaaagaccacctagaataattaaaacaatagcaagcaaaacacaatctattaaaaagtattctacagatattctaggcaatctttatgaagtgaagagtaaaaagcatcctcaaatcataaagaaaggatga

SEQ ID NO: 30 - protein, 1629 aa, Francisella tularensis
MNFKILPIAIDLGVKNTGVFSAFYQKGTSLERLDNKNGKVYELSKDSYTLLMNNRTARRHQRRGIDRKQLVKRLFKLIWTEQLNLEWDKDTQQAISFLFNRRGFSFITDGYSPEYLNIVPEQVKAILMDIFDDYNGEDDLDSYLKLATEQESKISEIYNKLMQKILEFKLMKLCTDIKDDKVSTKTLKEITSYEFELLADYLANYSESLKTQKFSYTDKQGNLKELSYYHHDKYNIQEFLKRHATINDRILDTLLTDDLDIWNFNFEKFDFDKNEEKLQNQEDKDHIQAHLHHFVFAVNKIKSEMASGGRHRSQYFQEITNVLDENNHQEGYLKNFCENLHNKKYSNLSVKNLVNLIGNLSNLELKPLRKYFNDKIHAKADHWDEQKFTETYCHWILGEWRVGVKDQDKKDGAKYSYKDLCNELKQKVTKAGLVDFLLELDPCRTIPPYLDNNNRKPPKCQSLILNPKFLDNQYPNWQQYLQELKKLQSIQNYLDSFETDLKVLKSSKDQPYFVEYKSSNQQIASGQRDYKDLDARILQFIFDRVKASDELLLNEIYFQAKKLKQKASSELEKLESSKKLDEVIANSQLSQILKSQHTNGIFEQGTFLHLVCKYYKQRQRARDSRLYIMPEYRYDKKLHKYNNTGRFDDDNQLLTYCNHKPRQKRYQLLNDLAGVLQVSPNFLKDKIGSDDDLFISKWLVEHIRGFKKACEDSLKIQKDNRGLLNHKINIARNTKGKCEKEIFNLICKIEGSEDKKGNYKHGLAYELGVLLFGEPNEASKPEFDRKIKKFNSIYSFAQIQQIAFAERKGNANTCAVCSADNAHRMQQIKITEPVEDNKDKIILSAKAQRLPAIPTRIVDGAVKKMATILAKNIVDDNWQNIKQVLSAKHQLHIPIITESNAFEFEPALADVKGKSLKDRRKKALERISPENIFKDKNNRIKEFAKGISAYSGANLTDGDFDGAKEELDHIIPRSHKKYGTLNDEANLICVTRGDNKNKGNRIFCLRDLADNYKLKQFETTDDLEIEKKIADTIWDANKKDFKFGNYRSFINLTPQEQKAFRHALFLADENPIKQAVIRAINNRNRTFVNGTQRYFAEVLANNIYLRAKKENLNTDKISFDYFGIPTIGNGRGIAEIRQLYEKVDSDIQAYAKGDKPQASYSHLIDAMLAFCIAADEHRNDGSIGLEIDKNYSLYPLDKNTGEVFTKDIFSQIKITDNEFSDKKLVRKKAIEGFNTHRQMTRDGIYAENYLPILIHKELNEVRKGYTWKNSEEIKIFKGKKYDIQQLNNLVYCLKFVDKPISIDIQISTLEELRNILTTNNIAATAEYYYINLKTQKLHEYYIENYNTALGYKKYSKEMEFLRSLAYRSERVKIKSIDDVKQVLDKDSNFIIGKITLPFKKEWQRLYREWQNTTIKDDYEFLKSFFNVKSITKLHKKVRKDFSLPISTNEGKFLVKRKTWDNNFIYQILNDSDSRADGTKPFIPAFDISKNEIVEAIIDSFTSKNIFWLPKNIELQKVDNKNIFAIDTSKWFEVETPSDLRDIGIATIQYKIDNNSRPKVRVKLDYVIDDDSKINYFMNHSLLKSRYPDKVLEILKQSTIIEFESSGFNKTIKEMLGMKLAGIYNETSNN

SEQ ID NO: 31 - DNA, 4890 bp, Francisella tularensis
atgaatttcaaaatattgccaatagcaatagatttaggtgttaaaaatactggtgtctttagcgcattttatcaaaaaggaacttctcttgagagattggataataaaaatggcaaagtatatgaactatcaaaagattcttatactttattgatgaataatagaacagcaagaagacatcaaagaagagggatagatagaaagcagctagtcaaaaggctctttaagcttatttggacagagcagctaaatttagagtgggataaagacactcaacaagcaattagctttttatttaatcgtagaggttttagttttattactgatggttattcgcctgaatatttaaatattgttccagagcaagtaaaagcgatacttatggatatatttgatgattacaacggtgaagatgatttagacagttatttaaaattagctactgagcaagaaagcaaaatttctgaaatttataacaagctaatgcaaaaaatattagagtttaaattaatgaaattatgtactgatattaaggatgataaagtaagtactaaaacgcttaaagaaatcacaagctatgaatttgagttattagctgattatttagcaaactatagcgagagtttaaaaacacaaaaatttagttatacagataaacaaggtaatttaaaagagctaagctactatcatcatgataaatataatattcaagaatttctaaagcgacatgctactataaatgatcgaattttagatactcttttaactgatgatttagatatttggaattttaattttgagaaatttgattttgataagaatgaagaaaagcttcagaatcaggaagataaagatcatatacaagcgcatttacatcattttgtttttgcagtaaataaaataaaaagtgaaatggcaagtggtggtcgtcatcgtagccaatattttcaagagataacaaatgtgctagatgaaaataatcatcaagagggatatctcaagaatttctgtgaaaatttgcataataaaaaatattcaaatttaagtgttaaaaatttagttaatctaattggtaacctaagtaatttagagctaaaaccgctaagaaaatattttaatgacaaaattcacgcaaaagctgatcattgggatgagcaaaagtttacagaaacttattgccactggatattaggagagtggcgagtaggtgtcaaagatcaagataagaaagatggcgctaaatatagttataaagatctgtgtaatgaattaaaacaaaaagttactaaggctggtttggtagattttttattagagttagatccatgtagaactataccaccatatctggataacaataaccgtaaaccaccaaaatgtcaaagtttgattttaaatccgaagtttttagataatcaatatccaaactggcaacaatatttacaagaattaaagaaactacaaagtattcaaaattatttagacagttttgaaactgatttaaaagtcttaaagtcaagtaaagatcaaccatattttgttgaatacaagagttcaaatcagcaaatagcaagtggtcaaagagattataaagatttagatgctcgaatattacagtttatatttgatagggtaaaagctagtgatgagttgcttttgaatgagatttattttcaggctaaaaaacttaaacaaaaagctagctctgagttagaaaaactcgagtcgagcaaaaagctagatgaagttatagcaaatagtcaactatcacagatactaaagtctcaacatacaaatggtatttttgaacagggtacttttttgcatttggtttgtaaatattataaacaaagacaaagagcgagagactctaggctatatattatgcctgaatatcgttatgataaaaaactacataaatataacaatacaggcaggtttgatgatgataatcagctgctaacatattgtaatcataagccaagacaaaaaagataccaattgttaaatgatttagctggggtgttgcaggtatcacctaattttttgaaagataaaattggttctgatgatgatctatttattagcaaatggttggtagagcatattagaggatttaaaaaagcttgtgaagatagtttaaaaatacaaaaagacaatagaggattattaaatcataaaataaatatagctaggaatacaaaaggcaaatgtgaaaaagaaatatttaatttaatatgtaaaatagaaggttcagaagataaaaaaggtaattacaagcatggtttagcttacgaattaggagtacttttatttggtgaacctaatgaagctagtaaacctgagttcgatagaaaaattaaaaaatttaactcaatatacagttttgcacagattcaacaaattgcttttgcagagcgtaaaggcaatgctaacacttgtgcagtttgtagtgctgataatgctcatagaatgcaacaaattaagatcactgagcctgtagaggacaataaagataagataatcttaagtgccaaagctcagagactaccagcgattccaactagaatagttgacggtgcggttaagaaaatggcaactatattagctaaaaatatagttgatgataattggcagaatatcaaacaagttttatcagcaaaacatcagttacatatacctattatcacagaatcaaatgcttttgagtttgaaccagcattagctgatgtaaaaggtaagagcctaaaagataggagaaaaaaagcattagagagaataagtcctgaaaatatattcaaggataaaaacaatagaataaaagaatttgctaaaggtatatcagcatatagtggtgctaatttaactgatggcgattttgatggtgcaaaagaagaattagatcatataatacctcgttcacataaaaaatacggtactctaaatgatgaagcaaatctaatttgtgtaactcgtggtgataataaaaataaaggtaatagaattttctgcctacgtgatcttgcagataactataaactaaaacagtttgagacaactgatgatttagaaattgaaaagaagatagctgatacaatctgggatgctaacaagaaagattttaaatttggtaattatcgtagttttattaacctaacaccacaagagcagaaagcatttcgtcacgcgctatttctggctgatgaaaatcctatcaaacaagcagtcataagagcgataaataatcgtaatcgtacatttgtaaatggcactcaacgctattttgcagaagtactggcaaacaatatctatctaagggctaaaaaagaaaatctaaatacagataaaatttcatttgattattttggtattccaactataggtaatggtagaggtattgctgaaatccgtcaactttatgaaaaagttgatagtgatatacaagcttatgcaaaaggtgataaacctcaagctagctactctcacctaatagatgcgatgctggctttttgtattgctgctgatgaacacagaaatgatggaagtataggtctagaaatcgataaaaattatagtttatatccattagataaaaatacaggagaagtctttaccaaagatatttttagtcaaattaaaattactgataatgagtttagcgataaaaaattagtaagaaaaaaagctatagagggctttaacacgcatagacaaatgactagagatggcatttatgcagaaaattacctaccaatactaatccataaagaactaaatgaagttagaaaaggctatacttggaaaaatagtgaagaaataaaaatattcaaaggtaaaaagtacgatatacaacaattgaataaccttgtgtattgtctaaaatttgtagataaacctatatctatagatatacaaattagtaccttagaagagttaagaaatatattaacaacaaataatatagctgctacagcagaatactattatataaatctaaaaacccaaaaattacatgagtattatatcgaaaactataatactgccttaggttataaaaaatacagtaaagaaatggagtttttgagaagcttagcttatcgtagcgaaagggtaaaaattaaatcaatagatgatgtaaagcaggttttggataaggatagtaactttatcatcggtaagattactttaccatttaaaaaagagtggcaaagactatatcgtgagtggcaaaatacaactatcaaagatgattatgagtttttaaaatcattctttaatgttaaaagtattactaagttgcataaaaaagttagaaaagatttctctttacctatttctacaaatgaaggtaaattcctggtcaaaagaaaaacatgggataacaattttatctatcagatattaaatgattctgattctagagcagacggaacaaagccatttattccagcttttgacatttctaaaaatgaaatagtcgaagccataattgattcatttacatcaaaaaatattttttggctgcctaaaaatatagaattacaaaaggtggataataaaaacatttttgctatagatactagtaaatggttcgaagtagaaacacctagtgatcttagagacattggaatagcaacaattcaatacaagatagataataattctcgccctaaagtcagagttaaacttgattatgttatcgatgatgatagtaagataaattattttatgaatcattctttattaaaatcaagatatcctgacaaagttttagaaattttaaaacaatcaactattatagaatttgaaagttcaggttttaataaaactatcaaagaaatgcttggtatgaaattagcaggtatttataatgaaacatctaataattag

SEQ ID NO: 32 - DNA, 3903 bp, Francisella tularensis
  Francisella tularensis subsp. novicida (strain U112)
atgtcaatttatcaagaatttgttaataaatatagtttaagtaaaactctaagatttgagttaatcccacagggtaaaacacttgaaaacataaaagcaagaggtttgattttagatgatgagaaaagagctaaagactacaaaaaggctaaacaaataattgataaatatcatcagttttttatagaggagatattaagttcggtttgtattagcgaagatttattacaaaactattctgatgtttattttaaacttaaaaagagtgatgatgataatctacaaaaagattttaaaagtgcaaaagatacgataaagaaacaaatatctgaatatataaaggactcagagaaatttaagaatttgtttaatcaaaaccttatcgatgctaaaaaagggcaagagtcagatttaattctatggctaaagcaatctaaggataatggtatagaactatttaaagccaatagtgatatcacagatatagatgaggcgttagaaataatcaaatcttttaaaggttggacaacttattttaagggttttcatgaaaatagaaaaaatgtttatagtagcaatgatattcctacatctattatttataggatagtagatgataatttgcctaaatttctagaaaataaagctaagtatgagagtttaaaagacaaagctccagaagctataaactatgaacaaattaaaaaagatttggcagaagagctaacctttgatattgactacaaaacatctgaagttaatcaaagagttttttcacttgatgaagtttttgagatagcaaactttaataattatctaaatcaaagtggtattactaaatttaatactattattggtggtaaatttgtaaatggtgaaaatacaaagagaaaaggtataaatgaatatataaatctatactcacagcaaataaatgataaaacactcaaaaaatataaaatgagtgttttatttaagcaaattttaagtgatacagaatctaaatcttttgtaattgataagttagaagatgatagtgatgtagttacaacgatgcaaagtttttatgagcaaatagcagcttttaaaacagtagaagaaaaatctattaaagaaacactatctttattatttgatgatttaaaagctcaaaaacttgatttgagtaaaatttattttaaaaatgataaatctcttactgatctatcacaacaagtttttgatgattatagtgttattggtacagcggtactagaatatataactcaacaaatagcacctaaaaatcttgataaccctagtaagaaagagcaagaattaatagccaaaaaaactgaaaaagcaaaatacttatctctagaaactataaagcttgccttagaagaatttaataagcatagagatatagataaacagtgtaggtttgaagaaatacttgcaaactttgcggctattccgatgatatttgatgaaatagctcaaaacaaagacaatttggcacagatatctatcaaatatcaaaatcaaggtaaaaaagacctacttcaagctagtgcggaagatgatgttaaagctatcaaggatcttttagatcaaactaataatctcttacataaactaaaaatatttcatattagtcagtcagaagataaggcaaatattttagacaaggatgagcatttttatctagtatttgaggagtgctactttgagctagcgaatatagtgcctctttataacaaaattagaaactatataactcaaaagccatatagtgatgagaaatttaagctcaattttgagaactcgactttggctaatggttgggataaaaataaagagcctgacaatacggcaattttatttatcaaagatgataaatattatctgggtgtgatgaataagaaaaataacaaaatatttgatgataaagctatcaaagaaaataaaggcgagggttataaaaaaattgtttataaacttttacctggcgcaaataaaatgttacctaaggttttcttttctgctaaatctataaaattttataatcctagtgaagatatacttagaataagaaatcattccacacatacaaaaaatggtagtcctcaaaaaggatatgaaaaatttgagtttaatattgaagattgccgaaaatttatagatttttataaacagtctataagtaagcatccggagtggaaagattttggatttagattttctgatactcaaagatataattctatagatgaattttatagagaagttgaaaatcaaggctacaaactaacttttgaaaatatatcagagagctatattgatagcgtagttaatcagggtaaattgtacctattccaaatctataataaagatttttcagcttatagcaaagggcgaccaaatctacatactttatattggaaagcgctgtttgatgagagaaatcttcaagatgtggtttataagctaaatggtgaggcagagcttttttatcgtaaacaatcaatacctaaaaaaatcactcacccagctaaagaggcaatagctaataaaaacaaagataatcctaaaaaagagagtgtttttgaatatgatttaatcaaagataaacgctttactgaagataagtttttctttcactgtcctattacaatcaattttaaatctagtggagctaataagtttaatgatgaaatcaatttattgctaaaagaaaaagcaaatgatgttcatatattaagtatagatagaggtgaaagacatttagcttactatactttggtagatggtaaaggcaatatcatcaaacaagatactttcaacatcattggtaatgatagaatgaaaacaaactaccatgataagcttgctgcaatagagaaagatagggattcagctaggaaagactggaaaaagataaataacatcaaagagatgaaagagggctatctatctcaggtagttcatgaaatagctaagctagttatagagtataatgctattgtggtttttgaggatttaaattttggatttaaaagagggcgtttcaaggtagagaagcaggtctatcaaaagttagaaaaaatgctaattgagaaactaaactatctagttttcaaagataatgagtttgataaaactgggggagtgcttagagcttatcagctaacagcaccttttgagacttttaaaaagatgggtaaacaaacaggtattatctactatgtaccagctggttttacttcaaaaatttgtcctgtaactggttttgtaaatcagttatatcctaagtatgaaagtgtcagcaaatctcaagagttctttagtaagtttgacaagatttgttataaccttgataagggctattttgagtttagttttgattataaaaactttggtgacaaggctgccaaaggcaagtggactatagctagctttgggagtagattgattaactttagaaattcagataaaaatcataattgggatactcgagaagtttatccaactaaagagttggagaaattgctaaaagattattctatcgaatatgggcatggcgaatgtatcaaagcagctatttgcggtgagagcgacaaaaagttttttgctaagctaactagtgtcctaaatactatcttacaaatgcgtaactcaaaaacaggtactgagttagattatctaatttcaccagtagcagatgtaaatggcaatttctttgattcgcgacaggcgccaaaaaatatgcctcaagatgctgatgccaatggtgcttatcatattgggctaaaaggtctgatgctactaggtaggatcaaaaataatcaagagggcaaaaaactcaatttggttatcaaaaatgaagagtattttgagttcgtgcagaataggaataactaa

SEQ ID NO: 33 - protein, 1300 aa, Francisella tularensis
  Francisella tularensis subsp. novicida (strain U112)
MSIYQEFVNKYSLSKTLRFELIPQGKTLENIKARGLILDDEKRAKDYKKAKQIIDKYHQFFIEEILSSVCISEDLLQNYSDVYFKLKKSDDDNLQKDFKSAKDTIKKQISEYIKDSEKFKNLFNQNLIDAKKGQESDLILWLKQSKDNGIELFKANSDITDIDEALEIIKSFKGWTTYFKGFHENRKNVYSSNDIPTSIIYRIVDDNLPKFLENKAKYESLKDKAPEAINYEQIKKDLAEELTFDIDYKTSEVNQRVFSLDEVFEIANFNNYLNQSGITKFNTIIGGKFVNGENTKRKGINEYINLYSQQINDKTLKKYKMSVLFKQILSDTESKSFVIDKLEDDSDVVTTMQSFYEQIAAFKTVEEKSIKETLSLLFDDLKAQKLDLSKIYFKNDKSLTDLSQQVFDDYSVIGTAVLEYITQQIAPKNLDNPSKKEQELIAKKTEKAKYLSLETIKLALEEFNKHRDIDKQCRFEEILANFAAIPMIFDEIAQNKDNLAQISIKYQNQGKKDLLQASAEDDVKAIKDLLDQTNNLLHKLKIFHISQSEDKANILDKDEHFYLVFEECYFELANIVPLYNKIRNYITQKPYSDEKFKLNFENSTLANGWDKNKEPDNTAILFIKDDKYYLGVMNKKNNKIFDDKAIKENKGEGYKKIVYKLLPGANKMLPKVFFSAKSIKFYNPSEDILRIRNHSTHTKNGSPQKGYEKFEFNIEDCRKFIDFYKQSISKHPEWKDFGFRFSDTQRYNSIDEFYREVENQGYKLTFENISESYIDSVVNQGKLYLFQIYNKDFSAYSKGRPNLHTLYWKALFDERNLQDVVYKLNGEAELFYRKQSIPKKITHPAKEAIANKNKDNPKKESVFEYDLIKDKRFTEDKFFFHCPITINFKSSGANKFNDEINLLLKEKANDVHILSIDRGERHLAYYTLVDGKGNIIKQDTFNIIGNDRMKTNYHDKLAAIEKDRDSARKDWKKINNIKEMKEGYLSQVVHEIAKLVIEYNAIVVFEDLNFGFKRGRFKVEKQVYQKLEKMLIEKLNYLVFKDNEFDKTGGVLRAYQLTAPFETFKKMGKQTGIIYYVPAGFTSKICPVTGFVNQLYPKYESVSKSQEFFSKFDKICYNLDKGYFEFSFDYKNFGDKAAKGKWTIASFGSRLINFRNSDKNHNWDTREVYPTKELEKLLKDYSIEYGHGECIKAAICGESDKKFFAKLTSVLNTILQMRNSKTGTELDYLISPVADVNGNFFDSRQAPKNMPQDADANGAYHIGLKGLMLLGRIKNNQEGKKLNLVIKNEEYFEFVQNRNN

SEQ ID NO: 34 - DNA, 3924 bp, Acidaminococcus sp.
  Acidaminococcus sp. (strain BV3L6)
atgacccaatttgaaggttttaccaatttataccaagtttcgaagacccttcgttttgaactgattccccaaggaaaaacactcaaacatatccaggagcaagggttcattgaggaggataaagctcgcaatgaccattacaaagagttaaaaccaatcattgaccgcatctataagacttatgctgatcaatgtctccaactggtacagcttgactgggagaatctatctgcagccatagactcctatcgtaaggaaaaaaccgaagaaacacgaaatgcgctgattgaggagcaagcaacatatagaaatgcgattcatgactactttataggtcggacggataatctgacagatgccataaataagcgccatgctgaaatctataaaggactttttaaagctgaacttttcaatggaaaagttttaaagcaattagggaccgtaaccacgacagaacatgaaaatgctctactccgttcgtttgacaaatttacgacctatttttccggcttttatgaaaaccgaaaaaatgtctttagcgctgaagatatcagcacggcaattccccatcgaatcgtccaggacaatttccctaaatttaaggaaaactgccatatttttacaagattgataaccgcagttccttctttgcgggagcattttgaaaatgtcaaaaaggccattggaatctttgttagtacgtctattgaagaagtcttttcctttcccttttataatcaacttctaacccaaacgcaaattgatctttataatcaacttctcggcggcatatctagggaagcaggcacagaaaaaatcaagggacttaatgaagttctcaatctggctatccaaaaaaatgatgaaacagcccatataatcgcgtccctgccgcatcgttttattcctctttttaaacaaattctttccgatcgaaatacgttatcctttattttggaagaattcaaaagcgatgaggaagtcatccaatccttctgcaaatataaaaccctcttgagaaacgaaaatgtactggagactgcagaagcccttttcaatgaattaaattccattgatttgactcatatctttatttcccataaaaagttagaaaccatctcttcagcgctttgtgaccattgggataccttgcgcaatgcactttacgaaagacggatttctgaactcactggcaaaataacaaaaagtgccaaagaaaaagttcaaaggtcattaaaacatgaggatataaatctccaagaaattatttctgctgcaggaaaagaactatcagaagcattcaaacaaaaaacaagtgaaattctttcccatgcccatgctgcacttgaccagcctcttcccacaacattaaaaaaacaggaagaaaaagaaatcctcaaatcacagctcgattcgcttttaggcctttatcatcttcttgattggtttgctgtcgatgaaagcaatgaagtcgacccagaattctcagcacggctgacaggcattaaactagaaatggaaccaagcctttcgttttataataaagcaagaaattatgcgacaaaaaagccctattcggtggaaaaatttaaattgaattttcaaatgccaacccttgcctctggttgggatgtcaataaagaaaaaaataatggagctattttattcgtaaaaaatggtctctattaccttggtatcatgcctaaacagaaggggcgctataaagccctgtcttttgagccgacagaaaaaacatcagaaggattcgataagatgtactatgactacttcccagatgccgcaaaaatgattcctaagtgttccactcagctaaaggctgtaaccgctcattttcaaactcataccacccccattcttctctcaaataatttcattgaacctcttgaaatcacaaaagaaatttatgacctgaacaatcctgaaaaggagcctaaaaagtttcaaacggcttatgcaaagaagacaggcgatcaaaaaggctatagagaagcgctttgcaaatggattgactttacgcgggattttctctctaaatatacgaaaacaacttcaatcgatttatcttcactccgcccttcttcgcaatataaagatttaggggaatattacgccgaactgaatccgcttctctatcatatctccttccaacgaattgctgaaaaggaaatcatggatgctgtagaaacgggaaaattgtatctgttccaaatctacaataaggattttgcgaagggccatcacgggaaaccaaatctccacaccctgtattggacaggtctcttcagtcctgaaaaccttgcgaaaaccagcatcaaacttaatggtcaagcagaattgttctatcgacctaaaagccgcatgaagcggatggcccatcgtcttggggaaaaaatgctgaacaaaaaactaaaggaccagaagacaccgattccagataccctctaccaagaactgtacgattatgtcaaccaccggctaagccatgatctttccgatgaagcaagggccctgcttccaaatgttatcaccaaagaagtctcccatgaaattataaaggatcggcggtttacttccgataaatttttcttccatgttcccattacactgaattatcaagcagccaatagtcccagtaaattcaaccagcgtgtcaatgcctaccttaaggagcatccggaaacgcccatcattggtatcgatcgtggagaacgcaatctaatctatattaccgtcattgacagtactgggaaaattttggagcagcgttccctgaataccatccagcaatttgactaccaaaaaaaattggacaacagggaaaaagagcgtgttgccgcccgtcaagcctggtccgtcgtcggaacgatcaaagaccttaaacaaggctacttgtcacaggtcatccatgaaattgtagacctgatgattcattaccaagctgttgtcgtccttgaaaacctcaacttcggatttaaatcaaaacggacaggcattgccgaaaaagcagtctaccaacaatttgaaaagatgctaatagataaactcaactgtttggttctcaaagattatcctgctgagaaagtgggaggcgtcttaaacccgtatcaacttacagatcagttcacgagctttgcaaaaatgggcacgcaaagcggcttccttttctatgtaccggccccttatacctcaaagattgatcccctgactggttttgtcgatccctttgtatggaagaccattaaaaatcatgaaagtcggaagcatttcctagaaggatttgatttcctgcattatgatgtcaaaacaggtgattttatcctccattttaaaatgaatcggaatctctctttccagagagggcttcctggcttcatgccagcttgggatattgttttcgaaaagaatgaaacccaatttgatgcaaaagggacgcccttcattgcaggaaaacgaattgttcctgtaatcgaaaatcatcgttttacgggtcgttacagagacctctatcccgctaatgaactcattgcccttctggaagaaaaaggcattgtctttagagacggaagtaatatattacccaaacttttagaaaatgatgattctcatgcaattgatacgatggtcgccttgattcgcagtgtactccaaatgagaaacagcaatgccgcaacgggggaagactacatcaactctcccgttagggatctgaacggggtgtgtttcgacagtcgattccaaaatccagaatggccaatggatgcggatgccaacggagcttatcatattgccttaaaagggcagcttcttctgaaccacctcaaagaaagcaaagatctgaaattacaaaacggcatcagcaaccaagattggctggcctacattcaggaactgagaaactga

SEQ ID NO: 35 - protein, 1307 aa, Acidaminococcus sp.
  Acidaminococcus sp. (strain BV3L6)
MTQFEGFTNLYQVSKTLRFELIPQGKTLKHIQEQGFIEEDKARNDHYKELKPIIDRIYKTYADQCLQLVQLDWENLSAAIDSYRKEKTEETRNALIEEQATYRNAIHDYFIGRTDNLTDAINKRHAEIYKGLFKAELFNGKVLKQLGTVTTTEHENALLRSFDKFTTYFSGFYENRKNVFSAEDISTAIPHRIVQDNFPKFKENCHIFTRLITAVPSLREHFENVKKAIGIFVSTSIEEVFSFPFYNQLLTQTQIDLYNQLLGGISREAGTEKIKGLNEVLNLAIQKNDETAHIIASLPHRFIPLFKQILSDRNTLSFILEEFKSDEEVIQSFCKYKTLLRNENVLETAEALFNELNSIDLTHIFISHKKLETISSALCDHWDTLRNALYERRISELTGKITKSAKEKVQRSLKHEDINLQEIISAAGKELSEAFKQKTSEILSHAHAALDQPLPTTLKKQEEKEILKSQLDSLLGLYHLLDWFAVDESNEVDPEFSARLTGIKLEMEPSLSFYNKARNYATKKPYSVEKFKLNFQMPTLASGWDVNKEKNNGAILFVKNGLYYLGIMPKQKGRYKALSFEPTEKTSEGFDKMYYDYFPDAAKMIPKCSTQLKAVTAHFQTHTTPILLSNNFIEPLEITKEIYDLNNPEKEPKKFQTAYAKKTGDQKGYREALCKWIDFTRDFLSKYTKTTSIDLSSLRPSSQYKDLGEYYAELNPLLYHISFQRIAEKEIMDAVETGKLYLFQIYNKDFAKGHHGKPNLHTLYWTGLFSPENLAKTSIKLNGQAELFYRPKSRMKRMAHRLGEKMLNKKLKDQKTPIPDTLYQELYDYVNHRLSHDLSDEARALLPNVITKEVSHEIIKDRRFTSDKFFFHVPITLNYQAANSPSKFNQRVNAYLKEHPETPIIGIDRGERNLIYITVIDSTGKILEQRSLNTIQQFDYQKKLDNREKERVAARQAWSVVGTIKDLKQGYLSQVIHEIVDLMIHYQAVVVLENLNFGFKSKRTGIAEKAVYQQFEKMLIDKLNCLVLKDYPAEKVGGVLNPYQLTDQFTSFAKMGTQSGFLFYVPAPYTSKIDPLTGFVDPFVWKTIKNHESRKHFLEGFDFLHYDVKTGDFILHFKMNRNLSFQRGLPGFMPAWDIVFEKNETQFDAKGTPFIAGKRIVPVIENHRFTGRYRDLYPANELIALLEEKGIVFRDGSNILPKLLENDDSHAIDTMVALIRSVLQMRNSNAATGEDYINSPVRDLNGVCFDSRFQNPEWPMDADANGAYHIALKGQLLLNHLKESKDLKLQNGISNQDWLAYIQELRN

SEQ ID NO: 36 - DNA, 3741 bp, Lachnospiraceae bacterium
  Lachnospiraceae bacterium (strain ND2006)
atgcttaagaatgttggaattgataggttagatgttgaaaaagggagaaaaaatatgtctaaattagagaagtttacaaattgttactctttgtcaaaaacacttcgttttaaggcgattcctgttggaaaaacccaagaaaatattgataataaaagattgcttgtcgaggatgaaaaacgtgcagaagattataagggggttaaaaaattacttgataggtattatttatcatttattaatgatgttcttcattccattaaactaaagaatttaaataattatatttcgttgtttagaaagaaaactcggacggaaaaagaaaacaaagaattagaaaatttagagataaatttacgtaaagaaatcgctaaggcttttaagggtaatgaaggttataaatctttatttaagaaggatattatcgagacgatattgcctgaatttcttgatgataaagatgaaattgctttggttaattcatttaatggatttacaacggcatttaccggtttttttgataatagggaaaatatgttttcggaagaagctaaatcaacctcaattgcttttcgttgtattaatgagaatttaacaagatatatatcaaatatggatatatttgaaaaagttgatgcaattttcgataagcatgaagtacaggaaataaaagaaaaaattctaaacagtgattatgatgttgaagatttcttcgaaggagaattttttaattttgttcttacgcaagaaggtatcgatgtttataacgctataattggtggctttgtgacagaatccggagaaaaaataaaaggattaaatgaatatattaatttatataatcagaaaactaagcaaaaattaccgaagtttaagcctttatataaacaggttttatcagatagagagtcactttctttttatggcgaaggttatacatctgatgaggaagttttagaagtatttagaaatactcttaataagaattcagaaatattttcttcaattaagaaattggaaaagttatttaaaaacttcgatgaatattcaagtgcaggaattttcgtaaaaaatggaccggctatttctacaatttctaaggatatatttggagagtggaatgtaattagagacaaatggaatgcggagtacgatgatatacatttaaaaaagaaggctgtagtaacagaaaaatatgaagatgacaggcgtaaatcattcaaaaaaataggaagtttttcattggagcagttgcaagaatacgctgatgctgatctatctgtggtagagaagttaaaagaaatcattatccaaaaagtggatgagatatataaagtttatggctcgtcagaaaaattgttcgatgctgattttgtactagaaaaatcgttaaaaaagaatgatgcagttgtagcaataatgaaagatttactagattctgtgaagtcttttgaaaattatataaaagccttttttggagagggaaaagaaacaaatcgagatgaatcattttatggtgattttgttttggcatatgacattcttttgaaagtggatcatatttatgatgcaatacgaaattatgtgacacaaaaaccgtattcgaaagataagtttaaattatattttcaaaacccgcaatttatggggggctgggataaggataaagagacagactatagggcaactatacttagatatggctcaaagtattacttggcgattatggataaaaaatatgctaagtgcttgcaaaaaatagataaggatgatgtaaatggaaactatgaaaaaataaattataagttgcttccaggacctaataagatgcttccaaaggtgttttttagtaagaagtggatggcttattataatccgtcggaagatattcaaaaaatatataaaaatggaacatttaaaaaaggagatatgtttaatttaaatgattgtcataaattaattgatttctttaaggattcaatcagtcggtatccgaaatggagtaacgcatatgattttaacttttctgagaccgagaaatataaggatatagcaggtttttacagagaggttgaagaacaaggatataaagtatcatttgaaagtgcgtctaaaaaagaagttgataaattggtagaagaaggaaaattatacatgttccaaatttataataaagacttttcggataaaagtcatggaacgccaaatcttcatacaatgtattttaagttgctgtttgatgaaaataatcatggtcaaattaggctttctggtggtgctgagctattcatgcgacgtgcaagtttgaaaaaggaagaattagttgtgcatcctgccaatagcccgatagcgaataaaaacccggataatccaaagaaaacgactacgttgtcatatgatgtatacaaggacaaaagattttcggaagatcagtatgagttgcatatacctattgcaataaataaatgccctaaaaatatatttaagataaatacagaggttagagtgctgctgaagcatgatgataatccttatgttataggaattgataggggggagagaaatttactttacattgtggtggttgatggtaagggtaatattgtggagcaatattcgctgaatgaaataattaataattttaatggaattagaattaagacggattaccattcacttttggataaaaaggagaaggaaagatttgaagctcgtcaaaattggacgtctatagaaaacattaaagaactaaaagccggatatattagtcaggttgttcataagatatgtgagttggtagaaaaatatgatgcggtaattgcacttgaagatttgaattctggttttaagaatagtcgagttaaagttgaaaagcaagtatatcagaaatttgaaaaaatgctgattgataaacttaactatatggtagataagaaatctaatccttgcgctacgggtggtgctctgaaaggctatcaaattactaacaagtttgagagttttaagtcgatgagtacacaaaatggttttattttttatattccggcgtggttgactagcaaaattgatccgtcaacaggatttgtaaatttgttgaaaacaaagtatacgagcattgcagattcaaagaaatttataagttcttttgacagaattatgtatgtacctgaagaagatttattcgagtttgcattagattataagaatttttctcggacagacgcggattatataaaaaaatggaaactctatagctatggtaacaggattagaatatttagaaatcctaaaaaaaataatgtatttgattgggaagaggtatgtcttacatcagcctataaggaactttttaataaatatgggattaattatcagcaaggagatatacgagctctcttatgtgaacagagtgataaggcattctatagctcttttatggcattaatgtcactcatgctgcaaatgagaaatagtataacaggtaggacggatgtagattttttgatttcaccagtaaaaaattctgacggtattttttatgattccagaaattatgaagctcaggaaaatgcaatattaccgaaaaatgcagatgctaatggggcttataatatcgcaagaaaagttttgtgggctataggtcagtttaaaaaggctgaagatgaaaaacttgataaggttaaaattgcaatatcaaataaggaatggctcgaatatgcgcaaacaagtgttaagcattga

SEQ ID NO: 37 - protein, 1228 aa, Lachnospiraceae bacterium
  Lachnospiraceae bacterium (strain ND2006)
MSKLEKFTNCYSLSKTLRFKAIPVGKTQENIDNKRLLVEDEKRAEDYKGVKKLLDRYYLSFINDVLHSIKLKNLNNYISLFRKKTRTEKENKELENLEINLRKEIAKAFKGNEGYKSLFKKDIIETILPEFLDDKDEIALVNSFNGFTTAFTGFFDNRENMFSEEAKSTSIAFRCINENLTRYISNMDIFEKVDAIFDKHEVQEIKEKILNSDYDVEDFFEGEFFNFVLTQEGIDVYNAIIGGFVTESGEKIKGLNEYINLYNQKTKQKLPKFKPLYKQVLSDRESLSFYGEGYTSDEEVLEVFRNTLNKNSEIFSSIKKLEKLFKNFDEYSSAGIFVKNGPAISTISKDIFGEWNVIRDKWNAEYDDIHLKKKAVVTEKYEDDRRKSFKKIGSFSLEQLQEYADADLSVVEKLKEIIIQKVDEIYKVYGSSEKLFDADFVLEKSLKKNDAVVAIMKDLLDSVKSFENYIKAFFGEGKETNRDESFYGDFVLAYDILLKVDHIYDAIRNYVTQKPYSKDKFKLYFQNPQFMGGWDKDKETDYRATILRYGSKYYLAIMDKKYAKCLQKIDKDDVNGNYEKINYKLLPGPNKMLPKVFFSKKWMAYYNPSEDIQKIYKNGTFKKGDMFNLNDCHKLIDFFKDSISRYPKWSNAYDFNFSETEKYKDIAGFYREVEEQGYKVSFESASKKEVDKLVEEGKLYMFQIYNKDFSDKSHGTPNLHTMYFKLLFDENNHGQIRLSGGAELFMRRASLKKEELVVHPANSPIANKNPDNPKKTTTLSYDVYKDKRFSEDQYELHIPIAINKCPKNIFKINTEVRVLLKHDDNPYVIGIDRGERNLLYIVVVDGKGNIVEQYSLNEIINNFNGIRIKTDYHSLLDKKEKERFEARQNWTSIENIKELKAGYISQVVHKICELVEKYDAVIALEDLNSGFKNSRVKVEKQVYQKFEKMLIDKLNYMVDKKSNPCATGGALKGYQITNKFESFKSMSTQNGFIFYIPAWLTSKIDPSTGFVNLLKTKYTSIADSKKFISSFDRIMYVPEEDLFEFALDYKNFSRTDADYIKKWKLYSYGNRIRIFRNPKKNNVFDWEEVCLTSAYKELFNKYGINYQQGDIRALLCEQSDKAFYSSFMALMSLMLQMRNSITGRTDVDFLISPVKNSDGIFYDSRNYEAQENAILPKNADANGAYNIARKVLWAIGQFKKAEDEKLDKVKIAISNKEWLEYAQTSVKH

SEQ ID NO: 38 - protein, 1064 aa, Bradyrhizobium sp.
  Bradyrhizobium sp. BTAi1
MKRTSLRAYRLGVDLGANSLGWFVVWLDDHGQPEGLGPGGVRIFPDGRNPQSKQSNAAGRRLARSARRRRDRYLQRRGKLMGLLVKHGLMPADEPARKRLECLDPYGLRAKALDEVLPLHHVGRALFHLNQRRGLFANRAIEQGDKDASAIKAAAGRLQTSMQACGARTLGEFLNRRHQLRATVRARSPVGGDVQARYEFYPTRAMVDAEFEAIWAAQAPHHPTMTAEAHDTIREAIFSQRAMKRPSIGKCSLDPATSQDDVDGFRCAWSHPLAQRFRIWQDVRNLAVVETGPTSSRLGKEDQDKVARALLQTDQLSFDEIRGLLGLPSDARFNLESDRRDHLKGDATGAILSARRHFGPAWHDRSLDRQIDIVALLESALDEAAIIASLGTTHSLDEAAAQRALSALLPDGYCRLGLRAIKRVLPLMEAGRTYAEAASAAGYDHALLPGGKLSPTGYLPYYGQWLQNDVVGSDDERDTNERRWGRLPNPTVHIGIGQLRRVVNELIRWHGPPAEITVELTRDLKLSPRRLAELEREQAENQRKNDKRTSLLRKLGLPASTHNLLKLRLWDEQGDVASECPYTGEAIGLERLVSDDVDIDHLIPFSISWDDSAANKVVCMRYANREKGNRTPFEAFGHRQGRPYDWADIAERAARLPRGKRWRFGPGARAQFEELGDFQARLLNETSWLARVAKQYLAAVTHPHRIHVLPGRLTALLRATWELNDLLPGSDDRAAKSRKDHRHHAIDALVAALTDQALLRRMANAHDDTRRKIEVLLPWPTFRIDLETRLKAMLVSHKPDHGLQARLHEDTAYGTVEHPETEDGANLVYRKTFVDISEKEIDRIRDRRLRDLVRAHVAGERQQGKTLKAAVLSFAQRRDIAGHPNGIRHVRLTKSIKPDYLVPIRDKAGRIYKSYNAGENAFVDILQAESGRWIARATTVFQANQANESHDAPAAQPIMRVFKGDMLRIDHAGAEKFVKIVRLSPSNNLLYLVEHHQAGVFQTRHDDPEDSFRWLFASFDKLREWNAELVRIDTLGQPWRRKRGLETGSEDATRIGWTRPKKWP

SEQ ID NO: 39 - protein, 1035 aa, Candidatus Puniceispirillum marinum
MRRLGLDLGTNSIGWCLLDLGDDGEPVSIFRTGARIFSDGRDPKSLGSLKATRREARLTRRRRDRFIQRQKNLINALVKYGLMPADEIQRQALAYKDPYPIRKKALDEAIDPYEMGRAIFHINQRRGFKSNRKSADNEAGVVKQSIADLEMKLGEAGARTIGEFLADRQATNDTVRARRLSGTNALYEFYPDRYMLEQEFDTLWAKQAAFNPSLYIEAARERLKEIVFFQRKLKPQEVGRCIFLSDEDRISKALPSFQRFRIYQELSNLAWIDHDGVAHRITASLALRDHLFDELEHKKKLTFKAMRAILRKQGVVDYPVGFNLESDNRDHLIGNLTSCIMRDAKKMIGSAWDRLDEEEQDSFILMLQDDQKGDDEVRSILTQQYGLSDDVAEDCLDVRLPDGHGSLSKKAIDRILPVLRDQGLIYYDAVKEAGLGEANLYDPYAALSDKLDYYGKALAGHVMGASGKFEDSDEKRYGTISNPTVHIALNQVRAVVNELIRLHGKPDEVVIEIGRDLPMGADGKRELERFQKEGRAKNERARDELKKLGHIDSRESRQKFQLWEQLAKEPVDRCCPFTGKMMSISDLFSDKVEIEHLLPFSLTLDDSMANKTVCFRQANRDKGNRAPFDAFGNSPAGYDWQEILGRSQNLPYAKRWRFLPDAMKRFEADGGFLERQLNDTRYISRYTTEYISTIIPKNKIWVVTGRLTSLLRGFWGLNSILRGHNTDDGTPAKKSRDDHRHHAIDAIVVGMTSRGLLQKVSKAARRSEDLDLTRLFEGRIDPWDGFRDEVKKHIDAIIVSHRPRKKSQGALHNDTAYGIVEHAENGASTVVHRVPITSLGKQSDIEKVRDPLIKSALLNETAGLSGKSFENAVQKWCADNSIKSLRIVETVSIIPITDKEGVAYKGYKGDGNAYMDIYQDPTSSKWKGEIVSRFDANQKGFIPSWQSQFPTARLIMRLRINDLLKLQDGEIEEIYRVQRLSGSKILMAPHTEANVDARDRDKNDTFKLTSKSPGKLQSASARKVHISPTGLIREG

SEQ ID NO: 40 - protein, 1358 aa, Acidaminococcus sp.
MGKMYYLGLDIGTNSVGYAVTDPSYHLLKFKGEPMWGAHVFAAGNQSAERRSFRTSRRRLDRRQQRVKLVQEIFAPVISPIDPRFFIRLHESALWRDDVAETDKHIFFNDPTYTDKEYYSDYPTIHHLIVDLMESSEKHDPRLVYLAVAWLVAHRGHFLNEVDKDNIGDVLSFDAFYPEFLAFLSDNGVSPWVCESKALQATLLSRNSVNDKYKALKSLIFGSQKPEDNFDANISEDGLIQLLAGKKVKVNKLFPQESNDASFTLNDKEDAIEEILGTLTPDECEWIAHIRRLFDWAIMKHALKDGRTISESKVKLYEQHHHDLTQLKYFVKTYLAKEYDDIFRNVDSETTKNYVAYSYHVKEVKGTLPKNKATQEEFCKYVLGKVKNIECSEADKVDFDEMIQRLTDNSFMPKQVSGENRVIPYQLYYYELKTILNKAASYLPFLTQCGKDAISNQDKLLSIMTFRIPYFVGPLRKDNSEHAWLERKAGKIYPWNFNDKVDLDKSEEAFIRRMTNTCTYYPGEDVLPLDSLIYEKFMILNEINNIRIDGYPISVDVKQQVFGLFEKKRRVTVKDIQNLLLSLGALDKHGKLTGIDTTIHSNYNTYHHFKSLMERGVLTRDDVERIVERMTYSDDTKRVRLWLNNNYGTLTADDVKHISRLRKHDFGRLSKMFLTGLKGVHKETGERASILDFMWNTNDNLMQLLSECYTFSDEITKLQEAYYAKAQLSLNDFLDSMYISNAVKRPIYRTLAVVNDIRKACGTAPKRIFIEMARDGESKKKRSVTRREQIKNLYRSIRKDFQQEVDFLEKILENKSDGQLQSDALYLYFAQLGRDMYTGDPIKLEHIKDQSFYNIDHIYPQSMVKDDSLDNKVLVQSEINGEKSSRYPLDAAIRNKMKPLWDAYYNHGLISLKKYQRLTRSTPFTDDEKWDFINRQLVETRQSTKALAILLKRKFPDTEIVYSKAGLSSDFRHEFGLVKSRNINDLHHAKDAFLAIVTGNVYHERFNRRWFMVNQPYSVKTKTLFTHSIKNGNFVAWNGEEDLGRIVKMLKQNKNTIHFTRFSFDRKEGLFDIQPLKASTGLVPRKAGLDVVKYGGYDKSTAAYYLLVRFTLEDKKTQHKLMMIPVEGLYKARIDHDKEFLTDYAQTTISEILQKDKQKVINIMFPMGTRHIKLNSMISIDGFYLSIGGKSSKGKSVLCHAMVPLIVPHKIECYIKAMESFARKFKENNKLRIVEKFDKITVEDNLNLYELFLQKLQHNPYNKFFSTQFDVLTNGRSTFTKLSPEEQVQTLLNILSIFKTCRSSGCDLKSINGSAQAARIMISADLTGLSKKYSDIRLVEQSASGLFVSKSQNLLEYL

SEQ ID NO: 41 - protein, 1358 aa, Acidaminococcus sp.; identical to SEQ ID NO: 40
  Acidaminococcus sp. D21

SEQ ID NO: 42 - protein, 1138 aa, Acidothermus cellulolyticus
MGGSEVGTVPVTWRLGVDVGERSIGLAAVSYEEDKPKEILAAVSWIHDGGVGDERSGASRLALRGMARRARRLRRFRRARLRDLDMLLSELGWTPLPDKNVSPVDAWLARKRLAEEYVVDETERRRLLGYAVSHMARHRGWRNPWTTIKDLKNLPQPSDSWERTRESLEARYSVSLEPGTVGQWAGYLLQRAPGIRLNPTQQSAGRRAELSNATAFETRLRQEDVLWELRCIADVQGLPEDVVSNVIDAVFCQKRPSVPAERIGRDPLDPSQLRASRACLEFQEYRIVAAVANLRIRDGSGSRPLSLEERNAVIEALLAQTERSLTWSDIALEILKLPNESDLTSVPEEDGPSSLAYSQFAPFDETSARIAEFIAKNRRKIPTFAQWWQEQDRTSRSDLVAALADNSIAGEEEQELLVHLPDAELEALEGLALPSGRVAYSRLTLSGLTRVMRDDGVDVHNARKTCFGVDDNWRPPLPALHEATGHPVVDRNLAILRKFLSSATMRWGPPQSIVVELARGASESRERQAEEEAARRAHRKANDRIRAELRASGLSDPSPADLVRARLLELYDCHCMYCGAPISWENSELDHIVPRTDGGSNRHENLAITCGACNKEKGRRPFASWAETSNRVQLRDVIDRVQKLKYSGNMYWTRDEFSRYKKSVVARLKRRTSDPEVIQSIESTGYAAVALRDRLLSYGEKNGVAQVAVFRGGVTAEARRWLDISIERLFSRVAIFAQSTSTKRLDRRHHAVDAVVLTTLTPGVAKTLADARSRRVSAEFWRRPSDVNRHSTEEPQSPAYRQWKESCSGLGDLLISTAARDSIAVAAPLRLRPTGALHEETLRAFSEHTVGAAWKGAELRRIVEPEVYAAFLALTDPGGRFLKVSPSEDVLPADENRHIVLSDRVLGPRDRVKLFPDDRGSIRVRGGAAYIASFHHARVFRWGSSHSPSFALLRVSLADLAVAGLLRDGVDVFTAELPPWTPAWRYASIALVKAVESGDAKQVGWLVPGDELDFGPEGVTTAAGDLSMFLKYFPERHWVVTGFEDDKRINLKPAFLSAEQAEVLRTERSDRPDTLTEAGEILAQFFPRCWRATVAKVLCHPGLTVIRRTALGQPRWRRGHLPYSWRPWSADPWSGGTP

SEQ ID NO: 43 - protein, 1045 aa, Acidovorax avenae
MQKEKPLAYRLALDLGSTSLGWAVLRLSAPGEPSAVIRAGSRIFSDGRNPKDGSSLAVTRRAARAMRRRRDRLLKRKARMLAALERHGFFPQDEAARKALEKLNPYGLRARGLESALKPEEFGRALFHLNQRRGFQSNRKTDRKDSDSGALKQAIGTLRAQMHESGCRTVGEWFWKVRMERKPEGVKGQGVRARYRETPFTTDEGKKRIDKRYDLYVDRAMVAQEFDALWAAQATFAPALFNEAARAELRDILLHQRKLRPVQPGRCTLVPEEPRALLALPSTQRFRIYQEVNHLRVLHDELREEALTLAQRDQIVALLERQAKVTFTAMRKALGFSALFNLEDAKRDGLKGNATTAALGKKDLFGPLWAGFDTALQDEIVTQLMTEESEPRLIAWLQEHTGVDEARAQAIANAGLPEGYGSLGRTALARIVPELQRDVITYDKAVQAAGFAHHSDLGFSFEHDADEVERIGERTIASTGEIKPVFAFKQLPYYGRALQRHVAFAKENPRNDEERYGKIANPTVHIGLNQVRVVVNALMCRYGRPTEVVIELARDLKQSREQKLEAQQRQADNQKRNARIRRSIAEVLGISEERVRTLDIQKWILWEELSHDAADRRCPYSGVQISASMLLGERVEIEHILPFSMTLDDSLNNRTVALREANRIKRNRTPWDARTDFEAHGWSYDGILQRAERMPQRKRHRFAPDGYERWLGEDKDFLARALNDTRYLSRVAAEYLRLVCPGSATRVIPGQMTALLRGKFGLNDVLGLDGEKNRNDHRHHAVDACVIGVTDQRMMQRFAQANAQAREDGLTRLVEDMPLPWPTYRAHVERAVRHIWVSHKPDHGFEGAMMEETSYGILRDGTIKQRRKADGSAGREISRLIRITEPSQPQRHGVDAEGRPLPYKGYVGGSNYCLEITVNDKGKWEGQVISTFDAYRIVREGGLRQLRHSTQGQNGQALAMRLVIGDSVRLEVDEQERVMRIVKINGNNGQVFMAPVHEANVDARNSDKNEAFAYTSKIAGSFQKTKARQVTISPIGELRDPGFKG

SEQ ID NO: 44 - protein, 1131 aa, Acidovorax ebreus
MAQHVFGLDIGIASVGWAILGEQRIIDLGVRCFDKAETAKEGDPLNLTRRQARLLRRRLYRRAWRLTQLSRLLKRKGLIADAKLFAKAPSYGDSAWELRRQGLDRLLTPLEWARVIYHQCKHRGFHWTSKAEEAKADSDAEGGRVKQGLAHTKALMQAKNYRSAAEMVLAEFPDAQRNKRGQYDKALSRVLLGEELALLFATQRRLGNPHASDFFEKLILGDGDRKSGLFWQQKPALSGADLLKMLGKCTFEKGEYRAPKASFSVERHVWLTRLNNLRIVVDGRSRPLNEAERQAALLLPYQTETSKYKTLKNAFIKAGLWGDGVRFGGLAYPSQAQIDAEKTKDPEDQFLVKLPAWHELRKAFKAAGHEALWQQISTPALDGDPTLLDQIATVLSVYKDGAEVVQQLRQLALPEPAASIAVLEKISFDKFSSLSLKALRRIVPLMQSGLRYDEAVAQIPEYGHHSQRIEPGAAKHLYLPPFYEAQRKYAGKGDHIGSMQFRDDADIPRNPVVLRALNQARKVVNALIREYGSPIAVNIEMARDLSRPLDERNKVKRAQEEFRDRNDRARSEFERDFGYKPKAAAFEKWMLYREQLGQCAYSQQPLDIQRVLDDHNYAQVDHALPYSRSYDDSKNNKVLVLTHENQNKGNRTAFEYLTSFPDGEDGERWRTFVAWVQGNKAYRMAKRNRLLRKNYGVDESKGFIDRNLNDTRYICKFFKNYVEEHLQLAARADGDTARRCVVVNGQLTAFLRARWGLTKVRGDSDRHHALDAAVVAACTHGMVKALADYSRRKEISFLQEGFPDPETGEILNPAAFDRARQHFPEPWTHFAHELKARLFTDDLAALREDMQRLGSYTTEDLGRLRTLFVSRAPQRRSGGAVHKETIYAQPESLKQQGGVIEKILLTSLKLQDFDKLLNPESNDHFVEPHRNERLYAAIRQRLEQFGGRADKAFGPDNLFHKPDKNNQPTGPVVRSIKLVRGKQTGIPIRGGLAKNDSMLRVDIFTKAGKFHLVPVYVHHRVTGLPNRAIVAFKDEDEWTLIDESFAFLFSVYPNDYVKVTLKKEQQSGYYSGADRSTGAMNLWAHDRAASVGKDGLIRGIGVKTALSVEKFNVDVLGRIYLAPPETRSGLA

SEQ ID NO: 45 - protein, 1056 aa, Actinobacillus minor
  Actinobacillus minor NM305
MKALNYILGLDLGIASVGWAVVEIDQNELPIRLIDLGVRTFERAEVPKTGDSLALARRLARSSRRLVRRRAVRLLKAKRLLKQEGILQADDFHSSHLKPLPNNPWELRVKGLNHLLDRKEWAAVLLHLLKHRGYLSQRKNESKTDNKELGALLKGVSENRQLLQAQAFSTPAEIAIKKFQQEEGHIRNQRGAYSHTFDRNDLLAELRLLFQKQREFNNPYTSQSLEQAIAELLMWQKPALSGEAILKMLGKCTFEPSEYKAPKNSYSAEYFVWLTKLNNLRILENGADRGLTAEERQLLINQPFEKAKFTYAQARKLLELSDLAIFKGVRYGKDNAESATLMEMKAWHAIRKALESNGLKTEWNGLKTKPELLDKIGTAFSIYKTDEDISQYLNGELSPAVLNALLENLSFDKFIRLSLQSLAKILPLMEQGLRYDEACKQVYGDHYGKKEQLELRFLPKIPVEDIRNPVVLRTLSQARKVINGVVRLYGSPARIHIETGREVGKSFSERRDISKRQEENRNERQRAVEKFKEFFPHFVGEPKAKDILKMRLYEQQHGKCLYSGKELDLNRLLEKGYVEIDHALPFSRTWDDSFNNKVLVLASENQNKGNQTPYEWLNGKENAERWKLFQALVNGSRFPYSKKQRILTKYLDEDGFRERNLNDTRYVARFLCNFIEDNMQLVGQGKKRVFASNGQITALLRRSWGIQKVREDNDRHHAVDAVVVACSTRALQKKITDYVRYKEMNVFTGEKIDQETGEIIKFHFPEPWKFFRQEVEIRVFSETPAEDVVIALPDRPQANHEFIQPLFVSRAPTRKMTGQGHMETIKSAKRLAEGLSVSRVPLTQLKLKDLENMVNREREKALYEALKVRLEKFNNDPAKAFADPFYKKGGQQVKAVRVEQVQKSGVLVRQENGVADNASMVRVDVFIKGGKYFLVPIYTWQVAKGILPNRAATQGKEEEYWDIMDETAIFQFSLYQNDLIKLVTKKKTIFGYFNGLNRATSNINIKEHDLDKSKGKDGIYLEVGVKLALSLEKYQVDELGKNIQPCRSMKKRPPVR

SEQ ID NO: 46 - protein, 1054 aa, Actinobacillus pleuropneumoniae
  Actinobacillus pleuropneumoniae serovar 10 str. D13039
MKLTPLNYILGLDLGIASVGWAVVEIDEQENPLGLIDVGVRTFDRAEVAKTGESLALARRLARSSRRLVKRRADRIKKVKRLLKSENILLSADEQLPNDVWQLRVKGLDQKLERQEWAAVLLHLLKHRGYLSQRKNESKSENKELGALRSGVAANHQILQSAEYRTPAEIAVKKFHVEEGHIRNQRGAYTHTFSRLDLLAEIELLFTRQTELGNPHTSAKLLENLTALLMWQKPALAGEAILKMLGKCTFEPTEYKAAKNSYSAERFVWLTKLNNLRILEQGAERALTDNERFALLDQPYEKAKFTYAQARTMLALPDEAIFKGVRYQGEDKKAVETKTILMEMKAYHQIRKALENADLKAEWNELKNNSELLDDIGTAFSLHKTDEDICRYLDGKLSESILNALLENLNFDKFIQLSLKALQQILPLMLQGQRYDEAVSAIYGDHYGKKSAEINRLLPTIPADEIRNPVVLRTLTQARKVINAVVRLYGSPARIHIETGREVGKSYQDRKKLEKQQEDNRKHRESAVQKFKEYFPNFVGEPKGKDILKMRLYELQQAKCLYSGKSLELHRLLEKGYVEVDHALPFSRTWDDSFNNKVLVLANENQNKGNLTPYEWLDGKNNSEPWQNFVARVQTSGFSHTKKQRILSHKLDEKGFIERNLNDTRYVVRFLCNFIADNMLLTGKGKRKVFASNGQITALLRGRWGLQKVRDDNDRHHALDAVVVACSTVAMQQKITRFVRYEEGNVFSGERIDRETGEIIPLHFPSPWAFFRENVEIRIFSENPKLELENRLPDYPQYNHEFVQPLFVSRMPTRKMTGQGHMETVKSAKRLDEGLSVLKVPLTQLKLNDLERMVNREREMALYESLKVRLEQFDNDPAKAFAEPFYKKGGALVKAVRVEQTQKSGVLVRDGNGVADNASMVRVDVFTKAGKYFLVPIYTWQVAKGILPNKAVTANVDEIDWLEMDESYQFIFTMYPNDLVKVKLKKEEFFGYYGGLDRATGAIVIKEHDLEKSKGRQGIYRIGVKLALSFEKYQVDELGKNIRPCRPTKRQHVR

SEQ ID NO: 47 - protein, 1062 aa, Actinobacillus succinogenes
MNLNYILGLDLGIASVGWAVVEIDEQENPQRLIDVGVRTFDRAEVLKTGESLALARRLARSSRRLVKRRAERIKKAKRLLKAENLLLSADEILPNEAWQLRVKGLDQKLERQEWAAVLLHLLKHRGYLSQRKNESKSENKELGALLSGVAINHQILQSAEYRTPAEIAVNKFQAEEGHIRNQRGAYTHTFSRLDLLAEMELLFQRQATLGNPHTSTKLLENLTALLMWQKPALAGEAILKMLGKCTFEPTEYKAAKNSYSAERFVWLTKLNNLRILEQGAERALTDNERFALLDQPYEKAKLTYAQVRTLLGLSDEAIFKGLRYQGEDKKAVETKTTLMEVKAYHQIRKALEGLDLKAEWNELKNNPALLDEIGTAFSLYKTDDDIHRYLDGKLSESVLNALLENLNFDKFIQLSLKALQQILPLMLQGQRYDEAVSAIYGDHYGKKSDEIDRLLPNIPTDEIRNPVVLRTLTQARKVINAVVRLYGSPARIHIETGREVGKSYQDRKKLEKQQEENRKQRENAVKKFKEYFPNFVGEPKGKDILKMRLYELQQAKCLYSGKSLELYRLLEKGYVEVDHALPFSRTWDDSFNNKVLVLANENQNKGNATPYEWLDGKNNSEGWQHFVARVQTSGFSYAKKQRVLIQELDEKSFIERNLNDTRYVARFLCNHIADNMLLTGKGKRKVFASNGQITALLRGCWGLQKVRENNDRHHALDAVVVACSTKSMQDKITKFVKYKEGRLFKDKKDGVYKGERINRETGEIISLHFPTPWKFFKENVEIRIFSENPKLELENRLPDYPQYNHEFVQPLFVSRMPTRKMTGQGHMETVKSAKRLDKGLSVLKVPLTQLKLSDLERMVNREREMALYEALKECLEQFGNDPAKAFAEPFYKKGGALVKAVRVEQTQKSGVLVRNGNGVADNATGSIVRVDVFTKGGKYFLVPIYTWQVAKGILPNKAVIQGKDESEWEEMDENAVFQFSMHKNDLIKVKTKKGEIFGYFNGLDRATGSIEIEEHDLEKSKGKNGSHRGLGVKTAFFLEKYQVDELGKNIRPCRPTKRQHVR

SEQ ID NO: 48 - protein, 1054 aa, Actinobacillus suis
MKLTPLNYILGLDLGIASVGWAVVEIDEQENPLGLIDVGVRTFDRAEVPKTGESLALARRLARSARRLVKRRADRIKKAKRLLKAENILLSADEHLPNDVWQLRVKGLDQKLERQEWAAVLLHLLKHRGYLSQRKNESKSENKELGALLSGVETNHQILQSAEYRTPAEIAVKKFHVEDGHIRNQRGAYTHTFSRLDLLAEMELLFQRQTDLGNPHTSAKLLENLTALLMWQKPALAGEAILKMLGKCTFEPTEYKAAKNSYSAERFVWLTKLNNLRILEQGAERALTDNERFALLDQPYEKAKFTYAQARTMLALPDEAIFKGVRYQGEDKKAVETKTILMEMKAYHQIRKALENADLKAEWNELKNNSELLDDIGTAFSLHKTDEDICRYLDGKLSESILNALLENLNFDKFIQLSLKALQQILPLMLQGQRYDEAVSAIYGDHYGKKSAEINRLLPTIPADEIRNPVVLRTLTQARKVINAVVRLYGSPARIHIETGREVGKSYQDRKKLEKQQEDNRKQRESAVKKFKEYFPNFVGEPKGKDILKMRLYELQQAKCLYSGKSLELHRLLEKGYVEVDHALPFSRTWDDSFNNKVLVLANENQNKGNLTPYEWLDGKNNSEHWQNFVARVQTSGFSHTKKQRILSHKLDEKGFIERNLNDTRYVARFLCNFIADNMLLTGKGKRKVFASNGQITALLRGRWGLQKVRDDNDRHHALDAVVVACSTVVMQQKITRFVRYEEGNVFSGERIDRETGEIIPLHFPSPWAFFRENVEIRIFSENPKLELENRLPDYPQYNHEFVQPLFVSRMPTRKMTGQGHMETVKSAKRLDEGLSVLKVPLTQLKLSDLERMVNREREVTLYESLKARLEQFGNDPAKAFAEPFHKKGGAVVKAVRVEQTQKSGVLVRDGNGVADNASMVRVDVFTKGGKYFLVPIYTWQVAKGILPNKAVTANVDEIDWLEMDESYQFIFTMYPNDLVKVKLKKEEFFGYYGGLDRATGAIVIKEHDLEKSKGKQGIYRIGVKLALSFEKYQVDELGKNIRPCRPTKRQHVR

SEQ ID NO: 49 - protein, 1105 aa, Actinomyces coleocanis
  Actinomyces coleocanis DSM 15436
MDNKNYRIGIDVGLNSIGFCAVEVDQHDTPLGFLNLSVYRHDAGIDPNGKKTNTTRLAMSGVARRTRRLFRKRKRRLAALDRFIEAQGWTLPDHADYKDPYTPWLVRAELAQTPIRDENDLHEKLAIAVRHIARHRGWRSPWVPVRSLHVEQPPSDQYLALKERVEAKTLLQMPEGATPAEMVVALDLSVDVNLRPKNREKTDTRPENKKPGFLGGKLMQSDNANELRKIAKIQGLDDALLRELIELVFAADSPKGASGELVGYDVLPGQHGKRRAEKAHPAFQRYRIASIVSNLRIRHLGSGADERLDVETQKRVFEYLLNAKPTADITWSDVAEEIGVERNLLMGTATQTADGERASAKPPVDVTNVAFATCKIKPLKEWWLNADYEARCVMVSALSHAEKLTEGTAAEVEVAEFLQNLSDEDNEKLDSFSLPIGRAAYSVDSLERLTKRMIENGEDLFEARVNEFGVSEDWRPPAEPIGARVGNPAVDRVLKAVNRYLMAAEAEWGAPLSVNIEHVREGFISKRQAVEIDRENQKRYQRNQAVRSQIADHINATSGVRGSDVTRYLAIQRQNGECLYCGTAITFVNSEMDHIVPRAGLGSTNTRDNLVATCERCNKSKSNKPFAVWAAECGIPGVSVAEALKRVDFWIADGFASSKEHRELQKGVKDRLKRKVSDPEIDNRSMESVAWMARELAHRVQYYFDEKHTGTKVRVFRGSLTSAARKASGFESRVNFIGGNGKTRLDRRHHAMDAATVAMLRNSVAKTLVLRGNIRASERAIGAAETWKSFRGENVADRQIFESWSENMRVLVEKFNLALYNDEVSIFSSLRLQLGNGKAHDDTITKLQMHKVGDAWSLTEIDRASTPALWCALTRQPDFTWKDGLPANEDRTIIVNGTHYGPLDKVGIFGKAAASLLVRGGSVDIGSAIHHARIYRIAGKKPTYGMVRVFAPDLLRYRNEDLFNVELPPQSVSMRYAEPKVREAIREGKAEYLGWLVVGDELLLDLSSETSGQIAELQQDFPGTTHWTVAGFFSPSRLRLRPVYLAQEGLGEDVSEGSKSIIAGQGWRPAVNKVFGSAMPEVIRRDGLGRKRRFSYSGLPVSWQG

SEQ ID NO: 50 - protein, 1113 aa, Actinomyces georgiae
  Actinomyces georgiae F0490
MSASSQNVERIRYKVGIDVGLRSIGFCAVQVDADDRPVKLLNTVVHVHDAGVSPADAKKADTRKLVSGVARRTRRLYRTRKRRLVDLDRQLDGLGWPLVDPARFADPREPWFAREKLVSGRVDDADERKELLSVALRHIAHHRGWRNPYSTVESLQADAPPSEFLQGLNQRVSEKLGTELDPGLTQGQLVAKLLHRFPNAKIRGPEGILRGKLHQSDNAGELRLICRTQGLDCHITEELVRLVFQAKSPKANKEMRKRIGRDQLPGQGAHIRAEKAHPVFQRFRIVAVLANLRIREAHVDRRLTAEEMRTLTDFLLGLAGSEQPTWEELADNLNIERHQLRGTAKASVDGAPALRFPPIDATTDRIYASKLKWLAEWWRQADEERRGYMVDALSNSGGSEDEPYLDDEIAEMLEQASEEDQAKLDSLHLPGGRASYCLDTLRRLTDAMLGGGLDLFEARKAVFHVDDDWAPPTDPIGAPVGNPPVDRVLKHVARWLEAATGRWGAPQTINIEHVREGLGSEKAARELTRMNDRRRRNNQKLVEEMGEKLGMSGRIRRSDRMRYEAIRRQNCECLYCGQPITYQTMEMDHIVPRAGAASTNSRSNLAAVCRRCNHQKGKLPFAVWAESQDSPAEVRLQDAVQRVRHWLRDAGMGQKELQALRVQVIARLKSKRPDEEFDGRSMESIAWMANELRARVEAQYRGSGTTVRVYRGALTAEARKASGFEGRVNLIGGRGKDRFDRRHHAMDALVIALMNQSVAQTLALRLNMRDSQWLTQSEQTWRQFHGAPGEAARKWEAWDRDMRDASDLFNLALDGGRIPITENVRLRVGNGRVHEDGVIRFKPEYEVKGKTIKGGEARLLGDSLPSEQIDRAETPALWTALTRLPEYDRKSGLPENPDRVIRVNGAVVQATDRIRFFGTPASVAVRGGYAKLGESIHHARIYRINGKTPKYAMIRVYTIDLMRLNHEDIFTAVLKPSTISMRCAEKKLKYAIAEGNAEQIGWLVEGDQLELDAAAYAKGVGADLMREYPMATCWRVAGFPDEAKLRLRPVLLAAEGMGEDAPKFMREVLENQGWRPAVNALLSPGSVRVVRRNVLGEPRFKSSGHLPTTVDLV

SEQ ID NO: 51 - protein, 1101 aa, Actinomyces naeslundii
  Actinomyces naeslundii str. Howell 279
MWYASLMSAHHLRVGIDVGTHSVGLATLRVDDHGTPIELLSALSHIHDSGVGKEGKKDHDTRKKLSGIARRARRLLHHRRTQLQQLDEVLRDLGFPIPTPGEFLDLNEQTDPYRVWRVRARLVEEKLPEELRGPAISMAVRHIARHRGWRNPYSKVESLLSPAEESPFMKALRERILATTGEVLDDGITPGQAMAQVALTHNISMRGPEGILGKLHQSDNANEIRKICARQGVSPDVCKQLLRAVFKADSPRGSAVSRVAPDPLPGQGSFRRAPKCDPEFQRFRIISIVANLRISETKGENRPLTADERRHVVTFLTEDSQADLTWVDVAEKLGVHRRDLRGTAVHTDDGERSAARPPIDATDRIMRQTKISSLKTWWEEADSEQRGAMIRYLYEDPTDSECAEIIAELPEEDQAKLDSLHLPAGRAAYSRESLTALSDHMLATTDDLHEARKRLFGVDDSWAPPAEAINAPVGNPSVDRTLKIVGRYLSAVESMWGTPEVIHVEHVRDGFTSERMADERDKANRRRYNDNQEAMKKIQRDYGKEGYISRGDIVRLDALELQGCACLYCGTTIGYHTCQLDHIVPQAGPGSNNRRGNLVAVCERCNRSKSNTPFAVWAQKCGIPHVGVKEAIGRVRGWRKQTPNTSSEDLTRLKKEVIARLRRTQEDPEIDERSMESVAWMANELHHRIAAAYPETTVMVYRGSITAAARKAAGIDSRINLIGEKGRKDRIDRRHHAVDASVVALMEASVAKTLAERSSLRGEQRLTGKEQTWKQYTGSTVGAREHFEMWRGHMLHLTELFNERLAEDKVYVTQNIRLRLSDGNAHTVNPSKLVSHRLGDGLTVQQIDRACTPALWCALTREKDFDEKNGLPAREDRAIRVHGHEIKSSDYIQVFSKRKKTDSDRDETPFGAIAVRGGFVEIGPSIHHARIYRVEGKKPVYAMLRVFTHDLLSQRHGDLFSAVIPPQSISMRCAEPKLRKAITTGNATYLGWVVVGDELEINVDSFTKYAIGRFLEDFPNTTRWRICGYDTNSKLTLKPIVLAAEGLENPSSAVNEIVELKGWRVAINVLTKVHPTVVRRDALGRPRYSSRSNLPTSWTIE

SEQ ID NO: 52 - protein, 1144 aa, Actinomyces sp.
  Actinomyces sp. ICM47
MSMIDSSENVPGIRYRVGIDVGLKSIGFCAVEVDRNDQPVRMLNSMVFIHDAGVDPNENKAAKSRKLTAGVARRTRRLYRTRHQRLVNLDRVLSKEFGWPLPDLTSFKDPREPWHVRAGLLEGYIADDEKRKEALSIALRHIARHRGWRNPYAKVETLLQPSEPSDFLKGLNDRISEELGRAFPADATPGQLVDTYLAHPDYVGRAGTPKLRGPQGILAGKLHQSDNAQEIRGICDVQRIEPAERDRLIRVVFEAKSPKGSAKERGLVGYDELPGQGRHVRAEKAHPAFQLFRMVSVLANLRIREGREERPLTPDELEDLVDFINQVSLKQEVTWQDLADKLRIERADLRGTAKASFDGSPVLRNPPTDVTTEKIMACKVKWLKEWWKEADDEQRGYMVDAFSNSGGSEDGTDVNDEVAELLEQATEDDQLEFEKISLPQGRAAYSLDSLRRLTDRMLRDGVDLHTARRLEFNVGDDWKPAVEPIGAPTGNPAVDRVLKQVSRWLHAATERWGEPTVINIEHARDGLGSERVARELMRENEKRRKANASAVAEMAAKLKLSGKVHRSDQIRYFALQRQNCQCLYCGAPITYTTAEMDHIVPRADGSSTNDRSNLAAVCRTCNHMKGKIPFAVWASSDKANQGVSLTGALERVNMWQRDSGMSPRQLKQLQREVCARLKSKKPDQEFDGRSMESVAWMAVELRTRIEGFYRSRDEESVPSVGVYRGQLTAEARRASGFESRVNLIGGRGKTRFDRRHHAMDALVIALMNPSVSRTLALRLNMRDAQRLTGVEETWKHFYGKPGEASKRFESWRESMLRGVELFNIALSDNAIPFVENIRLRVGSSVIHDATVHSFCPPKTPDGKQIITKGYGEQHSLGSAMPVELIDRAETPALWTALTRCPDFDPKKGLPENPQRTISVNGTRVGPTELVNFFEFSKSGPKACLKVRGGYVDLSGAIHHARIYRIAGKKTAYAMIRVFQVDLLRLKDHDVFTTPLKPSTISMRTAEPKIREALANGTATQIGWLVEGDELVIDTSKYSGGFIGEVLARYPEATSWRVAGFMTPAKLRIKPILLSKEGFVDETQAALLGVEVTSEAIQKTVDRPGWLPAVNVLFGAGGVRVIRRNCLGEERYHSSASLPVSMTLE

SEQ ID NO: 53 - protein, 1095 aa, Actinomyces sp.
  Actinomyces sp. oral taxon 175 str. F0384
MPAHHLRVGIDVGTHSVGLATLRVDDQGTPIELLSALSHIHDSGIGKEGQKDHDTRKKLSGVARRTRHLLRNRRERLQQLDKVLVDLGFPIPKPEEYPDLSERTDPYRVWRVRARLVEETLPEELRGPAISMAVRHIARHRGWRNPYSKVESLLSPAEESSFMKALRKRIMTKTGEVLDDDITPGQAMAQVALTHKIYMRGPEGILGKLHQSDNANEIRKICARQGISSDVCKQLLRAVFKAESPRGSAVSRVAPDPLPGQGSFRRAPKCDPEFQRFRIISIVANLRISETKGENRPLTVDERRQVVAFLMEDSQADLTWVDVAEKLRVSRQALRGTAMLTADGERSAAQPPIDVTDQIMRKTKISALKTWWDKADAERRGAMVRYLYEGLEDSECAEVIAKLPEKDHAKLDSLHLPAGRAAYSRESLTALSDHMLETTNDLHEARKRLFGVDDSWAPPAEPVGAPVGNPSVDRTLKIVARYLSAVESIWGTPEVIHVEHVRDGFTSERTAEERDKANRSRHNDNQKAIEKIQHDYGKEGYISRGDIVRFHALKLQGSACLYCGTTIGYHTCQLDHIVPQAGPGSNNRRGNLVAVCERCNHSKSNTPFAVWAQKCGIPHVGVKEAISRVNGWVEHNHSTSSGDLTRLKKEVIARLRRTQKDPEIDERSMESVAWMANELHHRIAAAYPETTVMVYRGSITAAARKAASIESRINLIGEKGRKDRLDRRHHAVDASVVALMEPSVAKTLAERSSLRGEQRLTGQEQTWKQYTGLTVGARERFEAWRGHMHRLTELFNESLAADEVYVTQNIRLRLSDGSAHTVKASKLVSHRLGDGLTVQQIDRACTPALWCALTREIDFDEKNGLPAREDRVIRVHGQEISSADCIQVFSKRKKTKSDRDEAPFGAIAVRGGFVEIGSSIHHARIYRIEGEKPAYAMLRVFTHDLLSQRHGDLFSAVIPPQSISMRCAATELRQAISEGRATYLGWIVSGDELHIPVETFTTHKIGSFLKDYPNTTRWRICGYDSETMLILKPRILSAEGLNNSSDIAEYVIKNKGWRVAINKLAKVHPTVVRRDALGRPRHSSRSNLPVTWSIE

SEQ ID NO: 54 - protein, 1181 aa, Actinomyces sp.
  Actinomyces sp. oral taxon 180 str. F0310
MLHCIAVIRVPPSEEPGFFETHADSCALCHHGCMTYAANDKAIRYRVGIDVGLRSIGFCAVEVDDEDHPIRILNSVVHVHDAGTGGPGETESLRKRSGVAARARRRGRAEKQRLKKLDVLLEELGWGVSSNELLDSHAPWHIRKRLVSEYIEDETERRQCLSVAMAHIARHRGWRNSFSKVDTLLLEQAPSDRMQGLKERVEDRTGLQFSEEVTQGELVATLLEHDGDVTIRGFVRKGGKATKVHGVLEGKYMQSDLVAELRQICRTQRVSETTFEKLVLSIFHSKEPAPSAARQRERVGLDELQLALDPAAKQPRAERAHPAFQKFKVVATLANMRIREQSAGERSLTSEELNRVARYLLNHTESESPTWDDVARKLEVPRHRLRGSSRASLETGGGLTYPPVDDTTVRVMSAEVDWLADWWDCANDESRGHMIDAISNGCGSEPDDVEDEEVNELISSATAEDMLKLELLAKKLPSGRVAYSLKTLREVTAAILETGDDLSQAITRLYGVDPGWVPTPAPIEAPVGNPSVDRVLKQVARWLKFASKRWGVPQTVNIEHTREGLKSASLLEEERERWERFEARREIRQKEMYKRLGISGPFRRSDQVRYEILDLQDCACLYCGNEINFQTFEVDHIIPRVDASSDSRRTNLAAVCHSCNSAKGGLAFGQWVKRGDCPSGVSLENAIKRVRSWSKDRLGLTEKAMGKRKSEVISRLKTEMPYEEFDGRSMESVAWMAIELKKRIEGYFNSDRPEGCAAVQVNAYSGRLTACARRAAHVDKRVRLIRLKGDDGHHKNRFDRRNHAMDALVIALMTPAIARTIAVREDRREAQQLTRAFESWKNFLGSEERMQDRWESWIGDVEYACDRLNELIDADKIPVTENLRLRNSGKLHADQPESLKKARRGSKRPRPQRYVLGDALPADVINRVTDPGLWTALVRAPGFDSQLGLPADLNRGLKLRGKRISADFPIDYFPTDSPALAVQGGYVGLEFHHARLYRIIGPKEKVKYALLRVCAIDLCGIDCDDLFEVELKPSSISMRTADAKLKEAMGNGSAKQIGWLVLGDEIQIDPTKFPKQSIGKFLKECGPVSSWRVSALDTPSKITLKPRLLSNEPLLKTSRVGGHESDLVVAECVEKIMKKTGWVVEINALCQSGLIRVIRRNALGEVRTSPKSGLPISLNLR

SEQ ID NO: 55 - protein, 1103 aa, Actinomyces sp.
  Actinomyces sp. oral taxon 181 str. F0379
MTKINDDLRYRVGIDVGLKSIGFCAVEVDENDQPLRLLNSMVFVHDAGVDPNENKAAKSRKLTAGVARRTQRGTAQNRRRLAELDRALSEELNWPLPNLEDFEDSYEPWHTRAELVEHYIKDDAERAEALAIAIRHIARHRGWRNPYLSVDSLLTPQEPSKFLRGLNERVTQALGREFPADATPGQLICAYIDSPKYAETQGIRGDSGILSGKLHQFDNVGEIRKICEVQRLDHDVFKLLVRKVFFAKSPRGSAAGLVGHDQIPGQGKYIRAEKAHPDFQLFRIVAVLTNLRIREGKAERCLTPDELRGLVDYILEVQLKQQVTWADLADNLGIERTDLRGTARASFDGSPALRFPPTDVTAEKIMASKVKWLKDWWDKADSERRGFMVDALSNSGGSTGDNDIDDEVAALLEAATEDEQAELEKIQLPQGRAAYSLDSLRRLTKRMLEEGVDLHTARKEEFNVDDDWRPEPEPIEAPVGNPAVDRVLKQVARWLNMATDRWGVPDVINIEHTRDGLGSEKVARELLRESQKRQDLNQKDMDKMIRELGISGKARRSSLIKYQAIQRQNSMCLYCGTEIGFETAEMDHIVPRALSGSTNDRSNLAAVCRACNHQKGAVPFAVWATSGEAHAGVSLEDAIKRVRLWQKGPGMSPKQHKAFQNEVISRLKSRKPDEEFDGRSMESVAWMAVELRTRIDGYYRKVNSDSVPKVGIYRGQLTAEARKASGFENRVNLIGGKGKTRFDRRHHAMDALVIAMMNQSVSQTLALRVNMRESQRITGQEETWKNFYGKPGQASERFEKWREGMLRAVELFNIELAKNAIPFHENVRLRVGSSKVHDDTVRKFIHAKLGEALSVAMIDCAETPALWTALTRLPDFDPKDGLPEDLSREIYIHSRKITADEQLNFFNSPSACLKVRGGYVEIGSSIHHARVYRIDGKKTTYSMVRVFATDLVKMTHEDVFTTPLKPSTISMRTADPKIRKALADGTATQIGWLVEGDELQLETDKYSGGLIGEVLAEYPQLTSWRVAGFYGVTQLRLRPYMLAAEGIPSDASESLRKVIEGKGWLPAINALLSSGCVKVVRRNCLGEPRFNAKSSLPVSQLLR

SEQ ID NO: 56 - protein, 1120 aa, Actinomyces sp.
  Actinomyces sp. oral taxon 848 str. F0332
MNAMKQYNAGIDVGINSVGFAAIEVDSKGLPLNILNNMVVLHDSGVDPGTAKTGATRLANSGTARRTRKLIARRRKRLQKLDRYIEVQGWPLVDFSSLPDPYTPWKIRAKLTQDRLEGEEQGRGLSIALRHMARHRGWRNPYEGVESLHSPKEASKQFKDLKDRVTKVSGVIFDEDATPAEVVCDIGLSPKQRLRSAPSAKYKEGATLADEPVGGKSKEGLLGGKLMQSDNANELRKIGIVQGLSNEKVNEIIDQVFASESPKGQAGKRAKKDELPGQEQYVRALRAHLAFQRFRIVAAVANLRILEAEPKHERLLSQSEKDKVIEFLMSADGDDGVTWSDVAEELGIERECLSGTAKRGADGERPSSFPPTNSTNISIVRSKVKPLIEWWRKASDDEQATLVTALSNADELTDDQPSAETVRQFLSSPDEQSQEKIDKISLPKGRAAYSVNSLERLTRRMLKDSVDLFEARKREFGVDNNWTPTPDSIGEPVGNPAVDRVLKIVNRWLLAVTRKWGPPKVVNIEHVRVGFTSAAQTRKYEEENKTNRERNLAILEELRDKFGTSGKIRREDITRFAALRRQNCQCAYCGEAITFFDCEMDHIVPRKGPGSTNTRNNLVAICERCNKSKSNMPFSLWAQNCDIPGVSVEAVIDRVRTWIKDPELNPKQYNNFKKDVIERLRKTVDDDAIDNRSIESVAWMATELADRIGSHFRTAGANTKVRVYRGWLTSEARKASGFEGKINLIGGRGKTRLDRRHHAMDAATIALMRQSVAQTLVERASIRESDRLRRVVSSSWKDYRGADRDKQFSYGSWLNSMNALAELFNRAIDADGIPVTQNLRLRLGNGEAHDATIRSLEKKRVGASWTIGEIDRASTPQLWLALTRQEDFDQNDGLPANASRELRVKNHWFHAEENVTLFPTKSAAIAVRGGYAEIGNTIHHARLYKLPGKKLTYGMIRVFAIDLLCAWHTDLFSSPLLPESISLRTAETKVRRAVEDGAAMYIGWLVDGDEIVLDPETKAFKSNKIGEYLCEFPGTKRWKVDGFPDKEKLRLRPLQLAGEGLPEDVSAGTEEILGPKGNGWRVAINALFKSSQLVVVRRTALGMVRKLSRRHLPLTTRLRG

SEQ ID NO: 57 - protein, 1114 aa, Actinomyces turicensis
  Actinomyces turicensis ACS-279-V-Col4
MQFHFYMVYVTMKGMNDKDASQQLRYRVGIDVGTHSIGFCAVEVDESGMPIQLLNSMVHKHDSGIDPGGNDTATTRLAEAGVARRTRRLIRRRKKRLQELDAFIEECGWPLVDLATITDARSPWRIRAHLATEHIDDEAEQGKLLSIALRHMARHRGWRSPYARISSLHIQADPSEQLKALAQRVSEKTGISLTADQTPAQLISVYLDVFETGKLRGPEGILGGKLMQSDNANELRRIATVQGLDNDLLKKIIGFVFAAESPKGSAAKRVGKDVLPGAHGLRAEKAHPAFQQFRIVSIVQNLRIKEGTGLRALTSEETEIVVDFLNQAGLTEAPTWEEVADNLEIPRSHLKGTATEGFDGIAPSTRPPFDVTSQKILNGKLKKLSAWWKDADYDHRCAMVNALSNVGSDDEGSLADDDVREFLSDFTDEELEALDKVELPGGRAAYSVDSLEKLTNTMLSEGCDLHSARKIAFGVDDSWTPPAEPIGQPVGNPAVDRVLKQVARWISAATNQWGTPESVNIEHVRDALGSEKASREYQRSLQTRRIRNEKLFAEMRERLDIGGKPRRSELTRYLALQRQNCQCLYCGMPITYTDAEMDHIVPRKGAASTNTRENFAAVCRACNHQKSNLPFAVWAEKTERPGVSVKEAYKRVSDMRIEPGMNGRQMNEFRKAIRLRLTTKHADAEIDGRSLESVAWMANELRHRIEGFYRSAENDVTVRVFRGAVTAEGRRASGFESRVNLIGGKGKTRLDRRHHAMDALTIALMEPGIAQTIALRMNMRESQRVLGEQETWKSFTGGSDTARKRWEHWCEEMLRASELFNVFLAEDRIPICQNKRLRLGSSAVHKAIVQPFEASDKRIVSDAMPVELIDRASTPALWTALTRDPDFDPKEGLPANPSRTIRLHDKRLGPNETVEFFPTAAACLAIRGGYCEIGAGIHHARIFRISGKKTTYAMLRVYQCDLVRFQKENLLTVELPANTISVRTAVPKLREALAHGTAEQIGWLVVGDELKIDLSGFTTGQIETFNETYPQATRWEVTGFPTKTQLRLKPLLIASEGLADDVPDDIVKIVKGPGWWPAIDKLLKIGNVVLYRRDTHGKPRVVSHRSLPLSSKLQ

SEQ ID NO: 58 - protein, 1101 aa, Akkermansia muciniphila
MSRSLTFSFDIGYASIGWAVIASASHDDADPSVCGCGTVLFPKDDCQAFKRREYRRLRRNIRSRRVRIERIGRLLVQAQIITPEMKETSGHPAPFYLASEALKGHRTLAPIELWHVLRWYAHNRGYDNNASWSNSLSEDGGNGEDTERVKHAQDLMDKHGTATMAETICRELKLEEGKADAPMEVSTPAYKNLNTAFPRLIVEKEVRRILELSAPLIPGLTAEIIELIAQHHPLTTEQRGVLLQHGIKLARRYRGSLLFGQLIPRFDNRIISRCPVTWAQVYEAELKKGNSEQSARERAEKLSKVPTANCPEFYEYRMARILCNIRADGEPLSAEIRRELMNQARQEGKLTKASLEKAISSRLGKETETNVSNYFTLHPDSEEALYLNPAVEVLQRSGIGQILSPSVYRIAANRLRRGKSVTPNYLLNLLKSRGESGEALEKKIEKESKKKEADYADTPLKPKYATGRAPYARTVLKKVVEEILDGEDPTRPARGEAHPDGELKAHDGCLYCLLDTDSSVNQHQKERRLDTMTNNHLVRHRMLILDRLLKDLIQDFADGQKDRISRVCVEVGKELTTFSAMDSKKIQRELTLRQKSHTDAVNRLKRKLPGKALSANLIRKCRIAMDMNWTCPFTGATYGDHELENLELEHIVPHSFRQSNALSSLVLTWPGVNRMKGQRTGYDFVEQEQENPVPDKPNLHICSLNNYRELVEKLDDKKGHEDDRRRKKKRKALLMVRGLSHKHQSQNHEAMKEIGMTEGMMTQSSHLMKLACKSIKTSLPDAHIDMIPGAVTAEVRKAWDVFGVFKELCPEAADPDSGKILKENLRSLTHLHHALDACVLGLIPYIIPAHHNGLLRRVLAMRRIPEKLIPQVRPVANQRHYVLNDDGRMMLRDLSASLKENIREQLMEQRVIQHVPADMGGALLKETMQRVLSVDGSGEDAMVSLSKKKDGKKEKNQVKASKLVGVFPEGPSKLKALKAAIEIDGNYGVALDPKPVVIRHIKVFKRIMALKEQNGGKPVRILKKGMLIHLTSSKDPKHAGVWRIESIQDSKGGVKLDLQRAHCAVPKNKTHECNWREVDLISLLKKYQMKRYPTSYTGTPR

SEQ ID NO: 59 - protein, 1113 aa, Alcanivorax pacificus
  Alcanivorax pacificus W11-5
MRYRVGLDLGTASVGAAVFSMDEQGNPMELIWHYERLFSEPLVPDMGQLKPKKAARRLARQQRRQIDRRASRLRRIAIVSRRLGIAPGRNDSGVHGNDVPTLRAMAVNERIELGQLRAVLLRMGKKRGYGGTFKAVRKVGEAGEVASGASRLEEEMVALASVQNKDSVTVGEYLAARVEHGLPSKLKVAANNEYYAPEYALFRQYLGLPAIKGRPDCLPNMYALRHQIEHEFERIWATQSQFHDVMKDHGVKEEIRNAIFFQRPLKSPADKVGRCSLQTNLPRAPRAQIAAQNFRIEKQMADLRWGMGRRAEMLNDHQKAVIRELLNQQKELSFRKIYKELERAGCPGPEGKGLNMDRAALGGRDDLSGNTTLAAWRKLGLEDRWQELDEVTQIQVINFLADLGSPEQLDTDDWSCRFMGKNGRPRNFSDEFVAFMNELRMTDGFDRLSKMGFEGGRSSYSIKALKALTEWMIAPHWRETPETHRVDEEAAIRECYPESLATPAQGGRQSKLEPPPLTGNEVVDVALRQVRHTINMMIDDLGSVPAQIVVEMAREMKGGVTRRNDIEKQNKRFASERKKAAQSIEENGKTPTPARILRYQLWIEQGHQCPYCESNISLEQALSGAYTNFEHILPRTLTQIGRKRSELVLAHRECNDEKGNRTPYQAFGHDDRRWRIVEQRANALPKKSSRKTRLLLLKDFEGEALTDESIDEFADRQLHESSWLAKVTTQWLSSLGSDVYVSRGSLTAELRRRWGLDTVIPQVRFESGMPVVDEEGAEITPEEFEKFRLQWEGHRVTREMRTDRRPDKRIDHRHHLVDAIVTALTSRSLYQQYAKAWKVADEKQRHGRVDVKVELPMPILTIRDIALEAVRSVRISHKPDRYPDGRFFEATAYGIAQRLDERSGEKVDWLVSRKSLTDLAPEKKSIDVDKVRANISRIVGEAIRLHISNIFEKRVSKGMTPQQALREPIEFQGNILRKVRCFYSKADDCVRIEHSSRRGHHYKMLLNDGFAYMEVPCKEGILYGVPNLVRPSEAVGIKRAPESGDFIRFYKGDTVKNIKTGRVYTIKQILGDGGGKLILTPVTETKPADLLSAKWGRLKVGGRNIHLLRLCAE

SEQ ID NO: 60 - protein, 1029 aa, Alicycliphilus denitrificans
  Alicycliphilus denitrificans BC
MRSLRYRLALDLGSTSLGWALFRLDACNRPTAVIKAGVRIFSDGRNPKDGSSLAVTRRAARAMRRRRDRLLKRKTRMQAKLVEHGFFPADAGKRKALEQLNPYALRAKGLQEALLPGEFARALFHINQRRGFKSNRKTDKKDNDSGVLKKAIGQLRQQMAEQGSRTVGEYLWTRLQQGQGVRARYREKPYTTEEGKKRIDKSYDLYIDRAMIEQEFDALWAAQAAFNPTLFHEAARADLKDTLLHQRPLRPVKPGRCTLLPEEERAPLALPSTQRFRIHQEVNHLRLLDENLREVALTLAQRDAVVTALETKAKLSFEQIRKLLKLSGSVQFNLEDAKRTELKGNATSAALARKELFGAAWSGFDEALQDEIVWQLVTEEGEGALIAWLQTHTGVDEARAQAIVDVSLPEGYGNLSRKALARIVPALRAAVITYDKAVQAAGFDHHSQLGFEYDASEVEDLVHPETGEIRSVFKQLPYYGKALQRHVAFGSGKPEDPDEKRYGKIANPTVHIGLNQVRMVVNALIRRYGRPTEVVIELARDLKQSREQKVEAQRRQADNQRRNARIRRSIAEVLGIGEERVRGSDIQKWICWEELSFDAADRRCPYSGVQISAAMLLSDEVEVEHILPFSKTLDDSLNNRTVAMRQANRIKRNRTPWDARAEFEAQGWSYEDILQRAERMPLRKRYRFAPDGYERWLGDDKDFLARALNDTRYLSRVAAEYLRLVCPGTRVIPGQLTALLRGKFGLNDVLGLDGEKNRNDHRHHAVDACVIGVTDQGLMQRFATASAQARGDGLTRLVDGMPMPWPTYRDHVERAVRHIWVSHRPDHGFEGAMMEETSYGIRKDGSIKQRRKADGSAGREISNLIRIHEATQPLRHGVSADGQPLAYKGYVGGSNYCIEITVNDKGKWEGEVISTFRAYGVVRAGGMGRLRNPHEGQNGRKLIMRLVIGDSVRLEVDGAERTMRIVKISGSNGQIFMAPIHEANVDARNTDKQDAFTYTSKYAGSLQKAKTRRVTISPIGEVRDPGFKG

SEQ ID NO: 61 - protein, 1029 aa, Alicycliphilus sp.; identical to SEQ ID NO: 60

SEQ ID NO: 62 - protein, 1146 aa, Alicyclobacillus hesperidum
  Alicyclobacillus hesperidum URH17-3-68
MAYRLGLDIGITSVGWAVVALEKDESGLKPVRIQDLGVRIFDKAEDSKTGASLALPRREARSARRRTRRRRHRLWRVKRLLEQHGILSMEQIEALYAQRTSSPDVYALRVAGLDRCLIAEEIARVLIHIAHRRGFQSNRKSEIKDSDAGKLLKAVQENENLMQSKGYRTVAEMLVSEATKTDAEGKLVHGKKHGYVSNVRNKAGEYRHTVSRQAIVDEVRKIFAAQRALGNDVMSEELEDSYLKILCSQRNFDDGPGGDSPYGHGSVSPDGVRQSIYERMVGSCTFETGEKRAPRSSYSFERFQLLTKVVNLRIYRQQEDGGRYPCELTQTERARVIDCAYEQTKITYGKLRKLLDMKDTESFAGLTYGLNRSRNKTEDTVFVEMKFYHEVRKALQRAGVFIQDLSIETLDQIGWILSVWKSDDNRRKKLSTLGLSDNVIEELLPLNGSKFGHLSLKAIRKILPFLEDGYSYDVACELAGYQFQGKTEYVKQRLLPPLGEGEVTNPVVRRALSQAIKVVNAVIRKHGSPESIHIELARELSKNLDERRKIEKAQKENQKNNEQIKDEIREILGSAHVTGRDIVKYKLFKQQQEFCMYSGEKLDVTRLFEPGYAEVDHIIPYGISFDDSYDNKVLVKTEQNRQKGNRTPLEYLRDKPEQKAKFIALVESIPLSQKKKNHLLMDKRAIDLEQEGFRERNLSDTRYITRALMNHIQAWLLFDETASTRSKRVVCVNGAVTAYMRARWGLTKDRDAGDKHHAADAVVVACIGDSLIQRVTKYDKFKRNALADRNRYVQQVSKSEGITQYVDKETGEVFTWESFDERKFLPNEPLEPWPFFRDELLARLSDDPSKNIRAIGLLTYSETEQIDPIFVSRMPTRKVTGAAHKETIRSPRIVKVDDNKGTEIQVVVSKVALTELKLTKDGEIKDYFRPEDDPRLYNTLRERLVQFGGDAKAAFKEPVYKISKDGSVRTPVRKVKIQEKLTLGVPVHGGRGIAENGGMVRIDVFAKGGKYYFVPIYVADVLKRELPNRLATAHKPYSEWRVVDDSYQFKFSLYPNDAVMIKPSREVDITYKDRKEPVGCRIMYFVSANIASASISLRTHDNSGELEGLGIQGLEVFEKYVVGPLGDTHPVYKERRMPFRVERKMN

SEQ ID NO: 63 - protein, 1052 aa, Aminomonas paucivorans
  Aminomonas paucivorans DSM 12260
MIGEHVRGGCLFDDHWTPNWGAFRLPNTVRTFTKAENPKDGSSLAEPRRQARGLRRRLRRKTQRLEDLRRLLAKEGVLSLSDLETLFRETPAKDPYQLRAEGLDRPLSFPEWVRVLYHITKHRGFQSNRRNPVEDGQERSRQEEEGKLLSGVGENERLLREGGYRTAGEMLARDPKFQDHRRNRAGDYSHTLSRSLLLEEARRLFQSQRTLGNPHASSNLEEAFLHLVAFQNPFASGEDIRNKAGHCSLEPDQIRAPRRSASAETFMLLQKTGNLRLIHRRTGEERPLTDKEREQIHLLAWKQEKVTHKTLRRHLEIPEEWLFTGLPYHRSGDKAEEKLFVHLAGIHEIRKALDKGPDPAVWDTLRSRRDLLDSIADTLTFYKNEDEILPRLESLGLSPENARALAPLSFSGTAHLSLSALGKLLPHLEEGKSYTQARADAGYAAPPPDRHPKLPPLEEADWRNPVVFRALTQTRKVVNALVRRYGPPWCIHLETARELSQPAKVRRRIETEQQANEKKKQQAEREFLDIVGTAPGPGDLLKMRLWREQGGFCPYCEEYLNPTRLAEPGYAEMDHILPYSRSLDNGWHNRVLVHGKDNRDKGNRTPFEAFGGDTARWDRLVAWVQASHLSAPKKRNLLREDFGEEAERELKDRNLTDTRFITKTAATLLRDRLTFHPEAPKDPVMTLNGRLTAFLRKQWGLHKNRKNGDLHHALDAAVLAVASRSFVYRLSSHNAAWGELPRGREAENGFSLPYPAFRSEVLARLCPTREEILLRLDQGGVGYDEAFRNGLRPVFVSRAPSRRLRGKAHMETLRSPKWKDHPEGPRTASRIPLKDLNLEKLERMVGKDRDRKLYEALRERLAAFGGNGKKAFVAPFRKPCRSGEGPLVRSLRIFDSGYSGVELRDGGEVYAVADHESMVRVDVYAKKNRFYLVPVYVADVARGIVKNRAIVAHKSEEEWDLVDGSFDFRFSLFPGDLVEIEKKDGAYLGYYKSCHRGDGRLLLDRHDRMPRESDCGTFYVSTRKDVLSMSKYQVDPLGEIRLVGSEKPPFVL

SEQ ID NO: 64 - protein, 1361 aa, Anaerococcus tetradius
  Anaerococcus tetradius ATCC 35098
MGNYYLGLDIGTNSVGWAVTDENYNIERFKKKNMWGIRLFDEAKTAESRRIHRQARRMRQRKIQRLNLLMELFDVEISKVDESFFIRKKESDLHYEDKSQDSRYALFNDKEFNDKDYHNKYPTIFHLIMDLIENDEKKDIRLLYLACHYLIKNRGHFIFEGQKFDVNSSLNNNINKLKSHLDQFYNICLDFDNDKLIEILVNQNLNISEKSKKIKELLRKTNLEVGIANLIAGGSIKLSNMFDDDELKNLDYNSLSFKNSNFDEGRELFEEVLEDRFELVEILKDIHDASVLETMLSSASISPDGGKYISSSMINSYNKHKRDLKLLKKIIKKYKKSEYDNIFRDENIKNNYLSYTRTGINKNKKVQAEDNTDSDGFYKYIVKILKDIKENDSDEDIKYILSEIDKKNFVPKQRTKENSVIPYQLREIELRKIIDNQSKYHKFLNEVDEKGISVKEKIISLLTFRIPYYIGPLNPSYNEEKNFTTSWVKRLAKGKVTPWNFEDMVDIDASREAFIENKLNKCSFLLDETVLPKDSLLYQEYMVLNELNNLKINGQSINTDLKKSIYEELFKKYKKVTRKRLISYIKEKENMSGDIVITGIDGDFKQGLKSYIAFKDIIGEKIDDDIYRKEVEKIIRDISLYGDDKSFIQKKIKNENKLDLSDDQISKIAKLKFKDWGRFSKKLLVGIKASDKNTGEIDNIIGFMRNYNYNIMQLMANVFTFKDEIEKLNSKYYTDEKINIDYLDDLYLSSPAKRMLWQSFQIVDEIKNIKNSDPKKIFIEMARSKEDKPTRKMSRKSRLEKLYTDSKKQFIKLFGPDEYDKLNNEIKNKSESDFRWDNLYLYYTQFGRCMYSLDPIDLEELSNKNLYDQDHIYPKSKIYDDSIENRVLVKKQLNLDKSNEYPIPDRVLNKDKNKLLAFWKMLNEKELIGDKKYARLIRKSPFTDEELGDFIARQLVETRQATKETANMLKRLCPDSKIVYVKAKNVSDFRRKFDILKCRSINDLHHAHDAYLNIVVGNVFDTKFTSNPLNFIKNNSKNRSYNLEKIYDYDVIRNEKIAWLAERKEENQDGSIATVLKNLSKNDIRVTRRTYIKCEDLFDENIVRKGNGKFPIKENNNKSDTNKYGGYSGIKNAYFVLLEDEKHNRILEAIPSFIYKKEKNGEKGSVINYLQNILGIKSAKILRDKIKIGSLLKIDKFPYNLAGKSGNGILISGGVQLILDKNTSKYIKKIENYKYKLDENKDYQINIFDKLSKEENIKLFDLFVDKFENSIYKNRVNIKLKEIKLARPKFEHLSIEEQIKTLTQMLILFGRENNAVNLEYIGLPKNTGKTKINKKINNKDIKIINQSITGLYETEEDLANI

SEQ ID NO: 65 - protein, 1552 aa, Anaerophaga sp.
  Anaerophaga sp. HS1
MFSQRNNPYCELLQNVKQLYKEKFGKTNQVDNSIIYGFMKRILGLDLGTNSIGWALVENDENDRKGKIIGMGSRIIPMDMSELDNFNKGASISKTAERTRLRMTRRLRERHLLRRARLHRILNIMGFLPEHYRNSIDFIDKKGCFFEGQEPKIAYKPDKNSEQFCFLFTSSFHEMLEDFRKFQPELIQNRKKVPYDWTIYYLRKKALTQKISKEELAWIILNFNTKRGYYHLRGEDEDNQDNKKIKEFRALKVVNVTEREGANSSGKKWYDMELENGWVYSRQSNLPPNLEGKTIELIVSYTLDNNGNIKKDKNGKEKYSLSMPGEEDWNLVKIKTENDLKTSKKSVGEYIYDHLLKNPDQKIRGKLISTIERKFYKEELSRILKTQMNFYEELKNRELYQKCVEELYPNNKSHQQTLLQKDFIHLIVEDIIFYQRPLKSKRAFVNNCPLEYRVYVDKKSGELIKSGVKCIPKSHPLFQEFRLWQYVRNLRIYERERMVNGRLMVNVDVTNELLPDEEHIVRLFDLLNDRKSFKQDDVLRFVGIKSPKDRKRYSWNYPEDKELPGNETRHLILAWLKKVDGVPEDWLDPEKLKALWHLLYSVTDREEIIKGLHSFAKKYELPDTFVEHFKKIPRLEREYGSFSEKAIKKLLPLMRMGKYWKAEEIPADLLEKAQKIIDAEADDRISDEVREKLLHLKDISQLKGLPLWQASYLVYGRHSETGEVVKWRTSEDLEKYILQFKQHSLRNPVVEQVILEALRVVKDIWEHYGEGKEGFFNEIHVEIGRELKNPADKRKKITSQIQENENTNLRIKALLEELFNDPSVKNVRPYSPAQQEILRIYEDGVLNGQKEIPDDILKISKMARPSKSQLVKYKLWLEQKYRSPYTGEIIPLSQLFTSAYEIEHIIPQARYFDDSFSNKVICEAEVNREKGHQLAFEFITKRGGDEIELNFGKKVTILNVEEYQKFVKDHYGRSLRSLSKMRKLLMEDIPDDFIDRQLNDSRYISKVVRNLLSNIVRAEDENSLVSKHLITCTGGVTTRLKHEWGLNDVWNELITPRFVRLNKMGKEKFGEWINKKGKQVFQIQMPLELQKGFNKKRIDHRHHALDALVVACASRSHVNYLNNDSARANASETRYDLRNKLCYKDKTDSNGNYRWKFYKPWESFTEEAKNRLAGTVVSFKSNRRIMTRSSNRYFKWVDTSEGKKKKLVRQIKGDNQAIRKPLHKDTVLGKVSLRKEKKVSLSKAIDLWESIVDKPLKKRIQSLREQGYDKKLLLKYFKDRNNQFNGQDISRVNIYFFDNNLAARRVTLDASFNSEKRIDGITDSGIKKILYAHLQNEKYHGKKDEKGNEISPYELAFSPEGLEEMNANIKKLNGGKPHCPIYKVRLAETIGEKFKLGEKGNKNKKYVEAAKGTNLFFAVYVDEKGVRSFETIPFSVALERRKQKLAVVPEENENKEKLLFYLSPNDLVYVPDEDEKLIDYRQLSINPTRIYKMVSSSGTQCFFIPHFVASPIVQTMELGPNNKSERAWDGQMIKNVCYKLSVDRLGNVKIEK

SEQ ID NO: 66 - protein, 1515 aa, Anaerophaga thermohalophila
  Anaerophaga thermohalophila DSM 12881
MKRILGLDLGTNSIGWALVESDEEQKSGKIQGIGSRIIPMDQNELDNFNKGNTVSQTAERTRLRMVRRLRERHLLRRERLHRVLKEIGFLPEHYLEQIDFTEKPGGFLPGKEPKIAYKPDNFKDKYDFLFQDSYHEMLSDFQDKNPEFIQKRKKVPQDWTIYYLRKKALTAKITKEELAWIILNFNQKRGYYQLRGEDEDVAKNTKKEEFHALKVVKVKEREDSEGASGKWYDIELENGWVYPRQSNIRPDWEGKILELIVTYNLDKDGNIKTDKEGNEKRSFRMPNKDDWTLRKKRTENEIEKSGKTVGEYIYDNLLDAPDLKIRGKLVSTIERKYYRSELEQILTAQKKYHPELSNSELFNKCISNLYPNNDIHRKALLSKDFVHLIINDIIFYQRPLKSKRSTVSNCPLEYRVYVDKVTGEKKKVPLKCIPKSHPLYQEFRLWQYVKNLRLFEKERFENGRLLTNVDVTEQFLPDEDKYVELFEFLNGRKTFKQDDILKFAGIKSAKDRVKYYWNYPQEKEYPGNETRYLIESRLKKIENVPDEWLNYEKIEELWHLLYSVTDKVEIEKGLQSFAAKYQLPDLFVEVFKGFPRMEREYGAFSKKAIKKLLPLMRMGKYWKLENINPDLIEKVQKIIDGEADDNINDGIRERFSEINEMSDLRGMPLWKASYLVYGRHSEAAEVIRWRTSADLDQYIKDFKQHALRNPIVEQVVLEALRVVKDVWNYFGEGREKFFDEIHVEIGRDLKNPADKRQKIANQIQENENTNLRIKALLVELFNDPEVQNVRPYSPVQQQLLKIYEDGVLNAERDIPDDIQKISRMANPTRNQLIRYKLWLEQKYRSPYTGEIIPLNKLFTSEYEVEHIIPRARYFDDSFSNKIISEAEVNRKKDRMLAFEFIKKLGGSTIDLNYGKKVSVLTVEEYQQFVKDHYGINPHSRLKMQKLLMDEIPESFIERQLNDSRYISKMVRNLLSNIVREENENSPVAKQLITCSGSITNTLKQEWGLNDVWNTIITPRFERLNKMGEQKYGEWVNKEGKPVFQIQMPLELQKGFNKKRIDHRHHALDALIVASATRSHVNYLSNEAAKTNAKDTRFDLRNRLCYKEKRGQNRNFTWRFYKPWNTFTEDAKNALNDIVVSFKSNHRVINKSTNRYFKWENLPGGMKKKRLVRQEKGDNWAIRQSLHKDTVLGKVSLRKVKPVSLSVALDSWNNIVDKALKKKIRSLKDQGYDKKLMLKYFKDRRNEYNGENISRVNVYYFDEEMAARRVDLDTSFNSEKRIEGITDSGIKKIIYAHLKNEKYHGQKDDKGKDISPYELAFSPEGIAEMNANIKQLNGGKPHCPIYKVRLAEPVGEKFQLGETGNKTEKLVEVAKGTNLFFGVYANDEGVRSFATVPFYLAVEREKQGLPAVPQENENGDQLLFWLSPNDLVYVPSEEDAHFANPKQIELDNSRIYKMVSSTGTQCFFIPHFVATPIVQTIELGPNNKSERAWDGQMIKKVCYKLSVDRLGNVEIE

SEQ ID NO: 67 - protein, 1168 aa, Azospirillum lipoferum
MARPAFRAPRREHVNGWTPDPHRISKPFFILVSWHLLSRVVIDSSSGCFPGTSRDHTDKFAEWECAVQPYRLSFDLGTNSIGWGLLNLDRQGKPREIRALGSRIFSDGRDPQDKASLAVARRLARQMRRRRDRYLTRRTRLMGALVRFGLMPADPAARKRLEVAVDPYLARERATRERLEPFEIGRALFHLNQRRGYKPVRTATKPDEEAGKVKEAVERLEAAIAAAGAPTLGAWFAWRKTRGETLRARLAGKGKEAAYPFYPARRMLEAEFDTLWAEQARHHPDLLTAEAREILRHRIFHQRPLKPPPVGRCTLYPDDGRAPRALPSAQRLRLFQELASLRVIHLDLSERPLTPAERDRIVAFVQGRPPKAGRKPGKVQKSVPFEKLRGLLELPPGTGFSLESDKRPELLGDETGARIAPAFGPGWTALPLEEQDALVELLLTEAEPERAIAALTARWALDEATAAKLAGATLPDFHGRYGRRAVAELLPVLERETRGDPDGRVRPIRLDEAVKLLRGGKDHSDFSREGALLDALPYYGAVLERHVAFGTGNPADPEEKRVGRVANPTVHIALNQLRHLVNAILARHGRPEEIVIELARDLKRSAEDRRREDKRQADNQKRNEERKRLILSLGERPTPRNLLKLRLWEEQGPVENRRCPYSGETISMRMLLSEQVDIDHILPFSVSLDDSAANKVVCLREANRIKRNRSPWEAFGHDSERWAGILARAEALPKNKRWRFAPDALEKLEGEGGLRARHLNDTRHLSRLAVEYLRCVCPKVRVSPGRLTALLRRRWGIDAILAEADGPPPEVPAETLDPSPAEKNRADHRHHALDAVVIGCIDRSMVQRVQLAAASAEREAAAREDNIRRVLEGFKEEPWDGFRAELERRARTIVVSHRPEHGIGGALHKETAYGPVDPPEEGFNLVVRKPIDGLSKDEINSVRDPRLRRALIDRLAIRRRDANDPATALAKAAEDLAAQPASRGIRRVRVLKKESNPIRVEHGGNPSGPRSGGPFHKLLLAGEVHHVDVALRADGRRWVGHWVTLFEAHGGRGADGAAAPPRLGDGERFLMRLHKGDCLKLEHKGRVRVMQVVKLEPSSNSVVVVEPHQVKTDRSKHVKISCDQLRARGARRVTVDPLGRVRVHAPGARVGIGGDAGRTAMEPAEDIS

SEQ ID NO: 68 - protein, 1068 aa, Bacillus cereus
  Bacillus cereus BAG4X12-1
MRYVLGLDIGIASCGWAVINQEKERIEDLGVRIFDKAENPKDGKSLAAPRRDARSTRRTLRRKKHRMQRIKILLVKQGLLFKTELNHLYESATEFDVWNLRLDALERKLHPKEFARVLIHLAKRRGFKSNRKETTLSENGQILESISENQQIMEQQNYRTVGEMILKDKKFENHKRNKDGTYIGTVTRQQLQDEIQMIFHTQRLYKNDYATEEFESSYLEIWASQRPYASKDQIEKMIGYCTLEPKEKRTPKASWSFQYFVALQTINNLRLISKDKIEELSFEEKKQIMNLALEKPIVKYIDIRKLLSIPNDFQFNSLSYSADTVDTTLENKRCIELKEYHSINKVYKQVYGKNTPNLLPIDYDTIAYGLTIFKDDKDILEYLQNKYVNAKGKPIKNLAKKTYDDTFIQALLNLNFTKMGHLSFKALKNIIPFLEEGLSYDKACEKAGYNFKGTSYTERTKYLPVIPQNTNPVVHRALSQTRKVINAIIKKYGSPNAIHIETARELSKTFQERKEIDSRYQDNSKKNEHAIHKLKELGNINPSGINIVKFKLWSEQDGRCMYSGKYIEPHRLFEEGYTEVDHILPYSRSLDDSYNNKILTLGTENQRKGNKTPYEYMGNTSIWDEFETRVQSNKKINFKKQQKLLLQNFSYAREQEFIERNLNDTRYATIYLTSLIQQHLIFSESSSKKKVRTVSGIITSHLRSRWGFNKDRKEGHIHHALDAVIVAVTSNHMIQRVTKYYKLKELNKNLQAKQLPFPEPWEGFRLELEARISPNTQQYLKGIHFKNYADVNLSDIKPIFVSRMPKRSITGELHQETIRKFLGYNEKGKVLTAIKTKLEDIPFDANGDFPMYGKETDLYTYNAIKERYLSHEKDKRKSFQEPLYKPTKSGEIGPLIKSIKIMDTRTIVNPVNQGKGVVYNSKIARTDVFKKEDKYYLIPIYTIDLLKNILPHKAITAGKGYEDWTTIDSSFTFLFSLFPNDLIQIVPSKNKTIKARTTVSKKEILLPSLTGYFKGVHSGTAGITVETHDGSVIANVGSKQLLLFEKYQVDVLGHYTKIKEEKRMGMAI

SEQ ID NO: 69 - protein, 1078 aa, Bacillus cereus
  Bacillus cereus BAG4X2-1
MRYVLGLDIGIASCGWAVINQEKERIEDLGVRIFDKAENPKDGKSLAAPRRDARSTRRTLRRKKHRMQRIKVLLVKHGLLSKTELDHLYESATEVDVWNLRLDALERKLYPKEFARILIHLAKRRGFKSNRKETTLSENGQILESISENQQIMEKQNYRTVGEMILKDKKFENHKRNKNGTYVGTVTRQQLQDEIQMIFHAQRLYKNDYATEEFESSYLEIWASQRPYASKDQIEKMIGYCTLEPKEKRAPKASWSFQYFVALQTINNLRLISKDRIEELSFEEKKQIMNLALEKSIVKYIDIRKLLSVPNEFQFNSLSYSADTVDTAVESRKCIELKEYHSINKVYKQIYGENALNLLPKYYDTIAYGLTIFKDDKDILEYLQNKYVNAKGKPISNFANKTYDDTFIQALLNLNFTKMGHLSFKALKNIIPFLEEGLSYDKACEKAGYNFKGTSYTEQTKYLPVIPQNTNPVVHRALSQTRKVINAIIKKYGSPNAIHIETARELSKTFQERKEIDSMYQDNSKKNEHAIHKLKELGNINPSGINIVKFKLWNEQDGRCMYSGKYIEPHRLFEEGYTEVDHILPYSRSLDDSYNNKTLTLGTENQRKGNKIPYEYMGNTSIWNDFETRVQSNKKINKKKQQKLLLQHFSYAREQEFIERNLNDTRYATIYLSSLIQQHLIFSESSRKKKVHTVSGIITSHLRSRWGFNKDRKEGHIHHALDAVIVAVTSDHMIQRVTKYYKLKELNRNLQAKRMPFPEPWEGFRLELEARISPNTQQYLKGLRFKNYADVNLSEIKSIFVSRMPKHSITGELHQETIRKFIGYNEKGKVLTAIKTKLEDIPFDANGDFPMYGKESDLYTYNAIKERYLSHKKDKRKSFQEPLYKPTKSGGIGPLIKSIKIMDTRTIVNPVNQGKGVVYNSKIARTDVFKKEEKYYLIPIYTIDLMKNILPQKAITAGKGYEDWTTIDPSFTFLFSLFPNDLIQIVPSKNKTIKARTTVSKKEVLLPSLTGYFKGVHSGTAGITVETHDGSVIANVGSKQLLLIEKYQVDVLGNYTKIKEEKRIGLTTYNDNKKIAAC

SEQ ID NO: 70 - protein, 1069 aa, Bacillus cereus
  Bacillus cereus Rock1-15
MNYDIGLRIGITSCGWSIINKDLERIEDLGVRVFEKAENPDGTASAAPRREARKSRRKHRRKKHRIERIKRLIVQHDLLSKKELDSLYLSPFNIDVWNLQVEALERKLDNREFARVLIHLVQRRGFQTIRKSVEIQEEGKLLENVSENERIMKVNGYKTVGEMFSKHEKFTHHKRNKDGSYTSVVTRSLLLKEIKTIFNSQRILGNVFSTQKLESDYLYIWGSQRPTLTYEQLMSMVGNCIYEKKEKRAPKTSWAFQYFSLLQKINKLKVSDDNTLRKLSKEERDIVIELAFKKKNVSFVDIRKALKLNDNTKFNHLTYSHVVETKKVEKATFIELKGYHLIKKQLKDRNVELTQELQPKDYDAIAAASTFFKNDIEFRDYLRNQYLDSNGKRKSNIANKVFEDKVIAAVFELNFSKVCHLSFKSLYKLIPHLEKGLDYKEAILCAGYNFRDENKRDKKLFLPVIQQETNPVVHRALTQARKVINAIIREYGSPNTIRFVVANDLAKTYKQRKELESTLKKNRAENEKIKTKLLSMGIINPTGMDIVKYKLWYEQSGICLYTGRQMELSSLFKPGYSIVNHIIPYNRSFDDTYHNRVLTLTETKYEKGNKIPFEYFGAEETCWNEYEKRVSTSKKIHDKKREKLLIRNFDIEYENEMISNNVFDTHYIGSYFEKYIDEHLQFKKSTKKQKVFSIHGNMVAHLHSRWGFNKNSREIYLNHAVDAAIVAVLTDQLIRNIADYYRRDNILEQKGSLKFPEPWKSFSIELEARISPQVRDLIKKLNLDSYLDVDILHIKPVFISKKPRRKVNGEAHKSTIRSLIGINEIGKTVTCIKTRLEDIPFDENGDFPMYGKDTDKYTYTAIKERYLEFNKDKEKAFSTPLYKLKRNGEPGNQIKSVKIIDTRNIVNKVNQGKGIAYNSNIIRVDVFSRDQKYYVVPIYLRDFIKGSLPNKIITAAKGFMQWPETDNSYTFLFSIFPNDLIKVVPKEGKFIKAKNENKENINLTEILGYFKGLDSSTGAFTLESHDGSLLARGIGTKNLLLIEKYQVDVLGRYNKVGNEERQDIKIQQN

SEQ ID NO: 71 - protein, 1088 aa, Bacillus smithii
  Bacillus smithii 7_3_47FAA
MNYKMGLDIGIASVGWAVINLDLKRIEDLGVRIFDKAEHPQNGESLALPRRIARSARRRLRRRKHRLERIRRLLVSENVLTKEEMNLLFKQKKQIDVWQLRVDALERKLNNDELARVLLHLAKRRGFKSNRKSERNSKESSEFLKNIEENQSILAQYRSVGEMIVKDSKFAYHKRNKLDSYSNMIARDDLEREIKLIFEKQREFNNPVCTERLEEKYLNIWSSQRPFASKEDIEKKVGFCTFEPKEKRAPKATYTFQSFIVWEHINKLRLVSPDETRALTEIERNLLYKQAFSKNKMTYYDIRKLLNLSDDIHFKGLLYDPKSSLKQIENIRFLELDSYHKIRKCIENVYGKDGIRMFNETDIDTFGYALTIFKDDEDIVAYLQNEYITKNGKRVSNLANKVYDKSLIDELLNLSFSKFAHLSMKAIRNILPYMEQGEIYSKACELAGYNFTGPKKKEKALLLPVIPNIANPVVMRALTQSRKVVNAIIKKYGSPVSIHIELARDLSHSFDERKKIQKDQTENRKKNETAIKQLIEYELTKNPTGLDIVKFKLWSEQQGRCMYSLKPIELERLLEPGYVEVDHILPYSRSLDDSYANKVLVLTKENREKGNHTPVEYLGLGSERWKKFEKFVLANKQFSKKKKQNLLRLRYEETEEKEFKERNLNDTRYISKFFANFIKEHLKFADGDGGQKVYTINGKITAHLRSRWDFNKNREESDLHHAVDAVIVACATQGMIKKITEFYKAREQNKESAKKKEPIFPQPWPHFADELKARLSKFPQESIEAFALGNYDRKKLESLRPVFVSRMPKRSVTGAAHQETLRRCVGIDEQSGKIQTAVKTKLSDIKLDKDGHFPMYQKESDPRTYEAIRQRLLEHNNDPKKAFQEPLYKPKKNGEPGPVIRTVKIIDTKNKVVHLDGSKTVAYNSNIVRTDVFEKDGKYYCVPVYTMDIMKGTLPNKAIEANKPYSEWKEMTEEYTFQFSLFPNDLVRIVLPREKTIKTSTNEEIIIKDIFAYYKTIDSATGGLELISHDRNFSLRGVGSKTLKRFEKYQVDVLGNIHKVKGEKRVGLAAPTNQKKGKTVDSLQSVSD

SEQ ID NO: 72 - protein, 1069 aa, Bacillus thuringiensis
MNYDIGLRIGITSCGWSIINKDLERIEDLGVRVFEKAENPDGTASAAPRREARKSRRKHRRKKHRIERIKRLIVQHDLLSKKELDSLYLSPFNIDVWNLRVEALERKLDNREFARVLIHLVQRRGFQTIRKSVEIQEEGKLLENVSENERIMKVNGYKTVGEMFSKHEKFTHHKRNKDGSYTSVVTRSLLLKEIKTIFNSQRILGNVFSTQKLESDYLYIWGSQRPTLTYEQLMSMVGNCIYEKKEKRAPKTSWAFQYFSLLQKINKLKVSDDNTLRKLSKEERDIVIELAFKKKNVSFVDIRKALKLNDNTKFNHLTYSHVVETKKVEKATFIELKGYHLIKKQLKDRNVELTQELQPKDYDAIAAASTFFKNDIEFRDYLRNQYLDSNGKRKSNIANKVFEDKVIAAVFELNFSKVCHLSFKSLYKLIPHLEKGLDYKEAILCAGYNFRDENKRDKKLFLPVIQQETNPVVHRALTQARKVINAIIREYGSPNTIRFVVANDLAKTYKQRKELESTLKKNRAENEKIKTKLLSMGIINPTGMDIVKYKLWYEQSGICLYTGRQMELSSLFKPGYSIVNHIIPYNRSFDDTYHNRVLTLTETKYEKGNKIPFEYFGAEETCWNEYEKRVSTSKKIHDKKREKLLIRNFDIEYENEMISNNVFDTHYIGSYFEKYIDEHLQFKKSTKKQKVFSIHGNMVAHLHSRWGFNKNSREIYLNHAVDAAIVAVLTDQLIRNIADYYRRDNILEQKGSLKFPEPWKSFSIELEARISPQVRDLIKKLNLDSYLDVDILHIKPVFISKKPRRKVNGEAHKSTIRSLIGINEIGKTVTCIKTRLEDIPFDENGDFPMYGKDTDKYTYTAIKERYLEFNKDKEKAFSTPLYKLKRNGEPGNQIKSVKIIDTRNIVNKVNQGKGIAYNSNIIRVDVFSRDQKYYVVPIYLRDFIKGSLPNKIITAAKGFMQWPETDNSYTFLFSIFPNDLIKVVPKEGKFIKAKNENKENINLTEILGYFKGLDSSTGAFTLESHDGSLLARGIGTKNLLLIEKYQVDVLGRYNKVGNEERQDIKIQQN

SEQ ID NO: 73 - protein, 1509 aa, Bacteroides coprophilus
  Bacteroides coprophilus DSM 18228
MKKTLGLDLGTNSIGWAVINSNIDSEGKEKLVGISSCGSRIIPMDATTLGDFGKGNTKSPVAERTRLRGIRRLLERSLLRRERLHRVLSVMGFLPEHYASQLDRYGKFLPETEPKLAWYKDDSGRYQFLFQKSFHEMLEDFRQHQPELVAGEKKIPYDWTIYYLRKKALSQEITKEELAWILLNFNQKRGYYQLRGEEEQEENNKSVEYHALKVVSVEDSGERKGKDIWYNVTLENGWVYRRASNIPLDWTGKVKEFVVTTELDDAGNPKKDKEGNVKRSFRAPKEDDWGLLKTRTQAQIDESGKTVGTYIYESLLCMPNQKIRGKLVRTIERKYYKDELRQILVKQSEFHAALQDHNLLLSCIEELYPNNEAHRRLLSASSFIYFLIEDILFYQRPLKSQKGLIDNCPYESHIYKDKKDGSLHHVPLKCVSKSHPLFQEFRLWQFLSNLRIYQRERMMDGSLKLDVDVTREFLPSEEDYVKLFDWLNERKEISQKFLLAYKPFGLKKNEQANYRWNYVEDKSYPCNETRAEIKSRLSKAGVPEEFLTEEKEEALWHILYSISDKKELTKALGTFAAKNCLNESFVEVFAKIPPFESNYAAYSLKAIRKLLALMRMGKYWNEQAIDRQTRDRIEKILTGEYDETIRSRVREKAMLLTDISSFRGLPLWLACYIVYDRHSESKELVKWETPADIDHFLSKFKQNSLRNPIVEQVITESLRTVRDIWKQEGKIDEIHVELGREMKNPAKERARITAQVQENENTNLRIKALLAEFMNPEFEIENVHPYSPGQQEILRIYEDGVLSGIAEKDLPDDITAILKKFRENDVKKRPTTSEVLRYKLWLEQRYRSPYTGRVIPLGKLFTPAYEIEHVIPQSRYFDDSISNKVICESAVNKLKDNCLGYEFIKKHSGEMVELGNGETVPVFSVEEYERFVKESYFGNSKKMKKLLLEDIPDSFIERQLNDSRYISRVVTSLLSNLVCEEGEQDGLSKNVIVCTGGITDRLKKDWGVQEVWNRIILPRFLRLNEITGRTDFTSTSVNGHLLPALPLYLQKGFNKKRIDHRHHAMDAIVIACANRNIVNYLNNSSARKNSEISRYDLQRLLCEKVKTDANGNYKWILRKPWETFTQDVYAALTNIVVSFKQNLRVINRTTNYYQHYNEAGEKRMIPQTKGDRWAIRKPMHKDTVYGEVNLRKEKTLPLRDVVKNPSIVVDKSLKNKLYELLKSQYDLKAIAKYFETHQDVWADVNLKKIKVYYFTKETNERFFATRKSLDPSFDQKKIEEEVTDTGVQKILLHHLQQNNNDPDMAFSPDGIDRMNQNMTILNDGKWHQPIYKVRTYEKADKFAVGESGNKAKKFVEAAKGTNLFFAVYESVQEDEAIGKQVCKRTFATIPLNEVIKRKKQGLPAAPEDLNGNLPKFVLSPNDLVYLPTEEERNSSRIIQPLDRERIYKMVSSSGSQCFFIKVFVANSIWDKNEYSSLNKMERAITNEMIKEICVPIKIDRLGNVSLIQI

SEQ ID NO: 74 - protein, 1504 aa, Bacteroides coprosuis
  Bacteroides coprosuis DSM 18011
MKKVLGLDIGTNSVGWAVVNQNDKGEFLSIEKIGSRIIPMSQDVMDKFGAGQTESSTAQRTQYRGVRRLRERSLLRRERLHRVLHILHFLPQHYDAAIGWNKKENKTYGKFLPGVEVNIPWVATDQGHQFIFMDSYAEMLKDLKQHQPHLFEKSSTPVPLDWTIYYLRKKALTQAISKEELAWILLNFNQKRGYYQLRGEEVEDNTKREEFYALKVVKVELDKDNTSAKTWYKVHLENGFIYPCPSDTPIDSWVGMVKDFIVTTTLEKDGSEKRTADGEIKRSFRAPKEDDWTLLKKKTESELEKSGKQVGAFIYDTLLSNPDQKIIGGLIKTIERKYYKKELEQILETQQKFIAELSDKKLFQACAEELYPLNDSHRENLLERDFKHLFVQDIIFYHRPLKTKKSLISNCTYEYRTFYKNGEKQISPIKCIAKSNPLFQEFRVWQFVQNLRILQRQRSEGDSIKYNVDVTAEFLKDENDIANLFTWLNERKVIKQDQLLKSYFKLKVNKETKELDYRWNYVDDKNKEYPCNATRTHILSFLEKCKEEKRIEDDRFVYSLWHLLYSVVEPIELRGALAKFAEREHLHPSFVDVFAQFPPLEKEYGSYSEKAIKRLLPLMRMGDYWHEDKIDVKTKQRIQRIIDGEADDDITHRSREKVENLRSITDFKGLPLWKAGYVVYNRHSESGELTKWKTPHELSNYIQNEFKQYSLRNPIVEQIVLETLRVVHDLWVKHGDFSEIHLELGRDIKNSSDKRKRMAERQQENENSRQRVLEMLIDLKKEAAFADLNPYSPSQQEKLRIVEDGVLRSNIEIPKDIEKITKSAKPTSRELTKYRLWLDQKYRSPYTGQPISLAQLFTSKYEIEHVIPQAKYFDDSFTNKVICESEVNKEKGSMLAHEFILKNGGSTVNVGGRQVQVLKNDAYVELINRLYGKNNPVKAKKLLAEDIDEVVGDFSERQLNDTRYISRVVQKLLSNIVREEDEQESTSKHVIGCSGQVTTALKKDWGLNDIWNKIIQPRFERLNEMTATEDYGVWQSPNHFQIRVPEEIQKGFTKKRIDHRHHAMDALVIACATRSHINYISNRSGQDRNAKFETTRTDLRSKLCYKENSSGNNYNYIFNKPWDTFTQDAHRALENIVVSHKQNLRVLTKTNNYTQFINKDGKKDLQKQVKGDHFAVRKPMHQETIYGRVSIRSIKEVALKKALENWKQIVDRTLKDKIRELIGAYGKYDAQTILKYFKDRDYKFNNLKINRVEVYEYDHNCAAVRKSIGDDLTIKQIERITDESIRKILMNHLSNYDDNLKEAFSPEGLMEMNKNIKELNGGKNHQPIYKVRLFEDLGSKFPLGVSHNNPDKYAIAAKGTNLFFGIYEDQEGKRMFDSIPLNIVIDRLKEKKSPVPETYNESKLKFHLSPNDLVYVPTDEEQKQPELVDVDHLSDEQKGRVYKAVSFTGNRAFFVNHRVSKVIHDYVEFGTKNKIENDDDKRSLKHICWKLKVNRLGEITDVKR

SEQ ID NO: 75 - protein, 1504 aa, Bacteroides dorei
  Bacteroides dorei DSM 17855
MKNIVGLDLGTNSIGWAVVNGSVNDDGSEQLVKIQASGSRIIPMDAAMIGDFNKGNSISQTAERTRLRGVRRLSERYLLRRERLHRILDILGFLPFHFAQDLDRHGKIVKGKEPKLAWRKNEAGQFEFIFQDSFKEMLEDFKLNYPNLITDDKKVPYDWTIYYLRKKGLTSKISKEELAWILLNFNQKRGYYQLRGEEEEENKDKLVEFYALKVVAVEDSGEKKGKDIWYNVHLENGWVYRRTSNMSLDWVGKTKEFIVTTDLEKDGTPKKDKEGNVKRSFRAPKEDDWSLVKKKTEADIDQTHKTVGAYIYDTLLGNPSQKIRGRLVRTIERKYYKEELKLILEKQKEFHLELQDRALYAACIEELYPINEAHRNNVGNRDFTYLFLEDILFYQRPLKSKKSLIDNCPYEENQGLDKETGEIKSFPVKCIAKSHPLFQEFRLWQFIINLRIYRKDLAQDVDVTNELLKTEEDYVALFDWLNGKKEIDQKAFLKYPVFGLKKEIENYRWNYVQDKPYPCNETRSLMLARLEKCDISIEFLTKENEEALWHILYSVEDKNEIVKALQKFADKHDLNASFVDVFQKFPPFKKEYGSYSAKAIKKLLPLMRMGKYWSENSIDKGTRERIDKIITGEYDEKIENRVREKAIHLADVSDFKGLPLWLVCYIVYGRHSEAKEIIQWKSPADIDSYLRSFKQHSLRNPIVEQIIIETLRVVRDIWKQVGNIDEIHVELGREMKNPADKRKKMTQQMSENENTNLRIKYLLTEFLNPEYEVENVRPYSPSQQDILRIYEEGVLNSVSDLPEEISDILKKFTETDLKKRPSRSEVLRYKLWLEQKYRSPYTGEVIPLGKLFTPAYEIEHVIPQSYYFDDSFSNKVICEAEVNKLKSNLLGHEFIVKHHGEIVELPFGKKVRIFTVDEYEQFVKDNYSRTRSKMKKLLMDDIPEEFVTRQLNDSRYISKVVKSLLSNIVREKGEEEAISKNVIPCTGGVTDRLKKDWGINEVWNKIILPRFQRLNELTGTNKFTTKNVGIQEIPTMPLELQKGFNKKRIDHRHHAMDAIIIACANRNIINYLNNKSATAKAELSRYDLQKMLCDKAKTDNNGNYKWVIRKPWASFTQDTYLALENIIVSFKQNLRVINKATNRFLHYNEEGKKIFVKQGKGDNWAIRKSMHKDTVFGEVNLRRIKTVALNEAMKNPQSIVVKDFKRKLLELWNLGFDAKRIKKYFEDNRETWSDINLSKIEVYYFSKDTKDRFFATRKPLDTSFDRKKIENNITDTGIQKILLRHLELKDNNPDIAFSPDGIDEMNRNIIQLNNGKYHQPIIKIRWYEQADKFAVGQTGNKSSKFVEAAKGTNLFFAVYESNILDKKTNTIIKKRNYATIPLNVAIERQKQGLPVAPEDENGNDPIFVLSPNDLVYLPTDDELANGIIAQPLDRGRIYKMVSSSGEQCFFIKHIVANVLVDKFEFSPLNKMERALTGEMIKMICIPIKVDRLGNVLESSSSYKK

SEQ ID NO: 76 - protein, 1509 aa, Bacteroides eggerthii
  Bacteroides eggerthii 1_2_48FAA
MKTILGLDLGTNSVGWAVINSVIKEQAERIWIEMAGSRIIPMDAAVLGDFDKGNSISQTSERTRLRGARRLRERQLLRRERLHKVLNILGFLPNHYLEYIDFEKHPGKFLADAEPKLAWVKDEQGKYTFLFQAAFDEMLADFAIHQPSLVSGDKKIPYDWTIYYLRKKALTEMISKEELAWILLNFNQKRGYYQLRGEEEEDNAGKSVEFYALKVLTVEATDEKKGRDVWYNVHLENGWIYRRSSSVPLDWEGQVKEFIVTTDLNPDGTPKLDKYGEVKRSFRAPKEDDWMLIKKRTEADIANTHKTVGAYIYDTLLQKPQQKIIGKLVKTVERKLYRDELSLILQKQCAFHAELQDRALYARCVEALYPSNEVRRKNIANRDFVYLLMDDILFYQRPLKTKKSLIANCPYEENEYVDRETGEIKKTPLKCIAKSHPLFQEFRLWNFLSNIRIYQKEKEINGTLHLDVDVTAEFLKTEDDYVALFDWLNSRKEIEQKTFLKYPKFGLKKEISNYRWNYVEDKQYPCNETRHAILSSLEKANVCIDFLSNEKEVALWHILYSVSDKQEIEKALRTFAAKNGLDESFVEAFKKFPPFKSEYGAYSAKAIKKMLPLMRCGKYWDVSSIDDTTKERIKKIVTGEYDERISVKVRDKVMNLSDISCFRRLPLWLACYIVYNRHSEDKEAVKWESPADIDAYLASFKQHSLRNPIVEQVITETLRVVRDIWKQVGRIDEIHIELGREMKNPADKRKRMTAQILENENANLRIKALLAEFMNPEYEIENVRPYSPSQQEILRIYEDTVLHAEDQLPEEIDAILKKFNSSKVPTKSEFLRYKLWLEQKYRSPYTGELIPLGKLFTAAYEIEHVIPQSRYFDDSFSNKVICESAVNKLKDNQLGYEFIKNHHGQKVEVGFGKSVEIFSVDSYERFVKEQYAKSAVKMKKLLMDDIPEQFIERQLNDSRYISKVIKGLLSNIVREKNDSGEYEPEAVSKNIVVCTGSVTDRLKRDWGMNDVWNSIVYPRFERLNSLTDTQSFGHWENKSGKKVFQTELPLEYQKGFSKKRIDHRHHAMDAIVIACATRNHVNYLSNESASRNAKISRYDLQRLLCDKNRTDDNGNYKWVIKKPWDTFTQDAREVLSKIVVSLKQNLRIINKTTNVYRHLDATGNRVYEKQKTGDSWAIRKPMHKDTVFGAVNLRKVKVVRLSVALDTPAMIVDKRVKNKVFELLSYKYDKKRIEKYFKENAFLWKELDLAKVAVYYFTEATTEPLVAVRKPLDSTFNEKKIKESVTDTGIQKILLNHLCTKEGKPDLAFSAEGIEEMNRNLLQLNNGKSHQPIYKVRVYEPRGNKFSVGVLGNKGTKWVEAAKGTNLFFAIYITEDGKRTYETIPLNVVIEREKQGLVPVPDRNKKGDKLLFWLSPNDLVYLPTEEEREFGRINEPIDRGRIYKMVSCTGNEGHFIPANVANPIVPVIELGSNNKAQRAWTNEMIKDICIPIKVDRLGHIIEVKYRIDE

SEQ ID NO: 77 - protein, 1526 aa, Bacteroides faecis
  Bacteroides faecis MAJ27
MKKILGLDLGTNSIGWAVLNAADDNSLKYIEAAGSRIIPMDAAILGDFDRGNSISQTAERTRIRGMRHLRERYLLRRARLHRILNLLGFLPFHYAQDIDRYGNFSADMEPKIAWCKNLEGELEFIFIESFNEMLEDFRKNQPELVADNKKVPYDWVIYYLRKKALEKKISKEELAWILLNFNQKRGYYQLRGEDDDESMKTAKTRQYFDKQIIKNIIDTNQTYKGQRILIVELQNGDKGKIFKKEIPDWIGQEKNIIVTVDIDKDGNDKYEESGSLSCRFKIPTDAEWESEWKLIKMKTQKDLDESNKTVGTYIYDSILQNPTQKVRGKLVRTIERKYYKAELKQILEKQTEFHSELQDKDLYIECLNELYSNNDTHRNAITDRDFVYLFMNDILFYQRPLKSKKSLIDNCPYERNIYIDKETGEIKYSPIKCIAKSHPLFQEFRLWKFISSIRIYQRESVVEVVDKQLDLFSSQSTSVQKLVTDVDVTDKFLTCENDYVALFEWLNKKKIIDQKEFLKYRPFGLKGDIDNYRWNYVEDKSYPCNETHAMILTYFAKAGISEDILTKEMEEALWHILYSVEDRQEITKALRTFASKYHLSDSFVKVFSNIPPFKKEYGSYSAKAIKKLLSLMRMGKYWSEDAIDVNTRERIDKIVTGEYDEKIRDRVREKTIRLNDIRHFRALPDWLACYVVYDRHSETREITEWKSPEEIDEYIRNFKQHSLRNPIVEQVITETLRTVRDIWKQVGCIDEIHVELGREMKNPADKRKRITSQIIENENANLRVKALLTEFVNSEFEIENVRPYSLSQQDILRIYEDGVLNSVAEVPGDIAGILKKFNENDAKKRPTTSEILRYKLWLEQKYRSPYTGEMIPLSKLFTSAYEIEHVIPQSRYFDDSFSNKVICEAEVNKLKDNALGYEFIKKHHGEKVELGFGKIVEIFSVSVYEQFVKDNYSRNRGKMKKLLMDEIPEQFIERQLNDSRYISKVVKTLLSNVVREKAEQEAVSKNVIVCTGGVTDRLKKDWGINDVWNKIVLPRFLRLNELTNSTNFTAKNAAGNEIPAMPLELQKGFNKKRIDHRHHAMDAIVIACANRNIVNYLNNESASRKAKISRHDLQAILCDKVRTDDKGNYQWRVKKPWDTFTQDVYVALENIIVSFKQNLRVINKTSNYYWHYENGKKVLVKQVKGDSWAIRKPMHKDTVFGEVNLRKVKSVSLNEALKNPQFIVEKDLKRQLLSLLQQNFDIKKIKKYFEEHKDIWSDISLSKMNIYYFTKETKDRYFATRKPLDASFDKKKIESCITDTGIQQILLRHLELKENDPERAFSPDGIDEMNRNIIQLNKGKGHHPIAKVRVYEKADKFEVGQRGNKSSKFVEAAKGTNLFFAVYETEYPDEKTNSIVRKRNYATIPLNIAIERQKRGLSTAPEDEKGNVPSFVLSPNDLVYLPTSEDIVNGHITQPIDKSRIYKMVSSSGSQCFFIKHNIANIIVDKYEFSPLNKMERAISNEMIKEICIPVKVDRLGNIVKLGKSE

SEQ ID NO: 78 - protein, 1509 aa, Bacteroides fluxus
  Bacteroides fluxus YIT 12057
MKTILGLDLGTNSVGWAVINSVIKEQAERIWIEMAGSRIIPMDAAVLGDFDKGNSISQTSERTRLRGVRRLRERQLLRRERLHKVLNILGFLPNHYLEYIDFEKHPGKFLSDAEPKLPWVKDEQGKYTFLFQAAFDEMLADFAIHQPSLVSGDKKIPYDWTIYYLRKKALTEMISKEELAWILLNFNQKRGYYQLRGEEEEDNAGKSVEFYALKVLTVEATDEKKGRDVWYNVHLENGWIYRRSSSVPLDWEGQIKEFIVTTDLNPDSTPKLDKYGEVKRSFRAPKEDDWMLIKKRTEADIANTHKTVGAYIYDTLLQKPQQKIIGKLVKTVERKLYRDELSLILQKQCAFHAELQDRTLYARCVEALYPNNEVQRRNIANRDFVYLLMDDVLFYQRPLKTKKSLIANCPYEENEYVDRETGEIKKAPLKCIAKSHPLFQEFRLWNFLSNIRIYQKEKEINGTLHLDVDVTAEFLKTEDDYVALFDWLNSRKEIEQKTFLKYPKFGLKKEISNYRWNYVEDKQYPCNETRHAILSRLEKANVCIDFLSNEKEVALWHILYSVSDKQEIEKALRTFAAKNGLDESFVEAFKKFPPFKSEYGAYSAKAIKKLLPLMRCGKYWDVSSIDDTTKERIKKIVAGEYDERIAVKVRDKVMNLSDISCFKRLPLWLACYIVYNRHSEDKEAVKWESPADIDAYLASFKQHSLRNPIVEQVITETLRVVRDIWKQVGRIDEIHIELGREMKNPADKRKRMTAQILENENANLRIKALLAEFMNPEYEIENVRPYSPSQQEILRIYEDMVLHAEDQLPEEIDAILKKFNSSKVPTKSEFLRYKLWLEQKYRSPYTGELIPLGKLFTAAYEIEHVIPQSRYFDDSFSNKVICESAVNKLKDNQLGYEFIKNHHGQKVEVGFGKSVEIFSVDSYERFVKEQYAKSAVKMKKMLMDDIPEQFIERQLNDSRYISKVIKGLLSNIVREKNDSGEYEPEAVSKNIVVCTGSVTDRLKRDWGMNDVWNSIVYPRFERLNSLTDTQSFGHWENKSGKKVFQTELPLEYQKGFSKKRIDHRHHAMDAIVIACATRNHVNYLSNESASRNAKISRYDLQRLLCDKSRTDDNGNYKWVIKKPWDTFTQDAREVLSKIVVSLKQNLRIINKTTNVYRHLDATGNRVYEKQKTGDSWAIRKPMHKDTVFGAVNLRKVKVVRLSVALDAPTMIVDKRVKNKVFELLSYKYDKKRIEKYFKENAVLWKELDLARVAVYYFTEATTEPLVAVRKPLDSTFNEKKIKESVTDTGIQKILLNHLCTKEGKPDLAFSAEGIEEMNRNLLQLNNGKRHQPIYKVRVYEPRGNKFSVGVLGNKGTKWVEAAKGTNLFFAIYITEDGKRTYETIPLNMVIEREKQGLAPVPDKNEKGDKLLFWLSPNDLVYLPTEEELEFGRINEPIDRGRIYKMVSSSGNQCFFIPQSISNAIIPTKELGANNKAERSWDGAMIKNICIPVKVDRLGRIIEVKYRINE

SEQ ID NO: 79 - protein, 1436 aa, Bacteroides fragilis
MKRILGLDLGTNSIGWALVNEAENKDERSSIVKLGVRVNPLTVDELTNFEKGKSITTNADRTLKRGMRRNLQRYKLRRETLTEVLKEHKLITEDTILSENGNRTTFETYRLRAKAVTEEISLEEFARVLLMINKKRGYKSSRKAKGVEEGTLIDGMDIARELYNNNLTPGELCLQLLDAGKKFLPDFYRSDLQNELDRIWEKQKEYYPEILTDVLKEELRGKKRDAVWAICAKYFVWKENYTEWNKEKGKTEQQEREHKLEGIYSKRKRDEAKRENLQWRVNGLKEKLSLEQLVIVFQEMNTQINNSSGYLGAISDRSKELYFNKQTVGQYQMEMLDKNPNASLRNMVFYRQDYLDEFNMLWEKQAVYHKELTEELKKEIRDIIIFYQRRLKSQKGLIGFCEFESRQIEVDIDGKKKIKTVGNRVISRSSPLFQEFKIWQILNNIEVTVVGKKRKRRKLKENYSALFEELNDAEQLELNGSRRLCQEEKELLAQELFIRDKMTKSEVLKLLFDNPQELDLNFKTIDGNKTGYALFQAYSKMIEMSGHEPVDFKKPVEKVVEYIKAVFDLLNWNTDILGFNSNEELDNQSYYKLWHLLYSFEGDNTPTGNGRLIQKMTELYGFEKEYATILANVSFQDDYGSLSAKAIHKILPHLKEGNRYDVACVYAGYRHSESSLTREEIANKVLKDRLMLLPKNSLHNPVVEKILNQMVNVINVIIDIYGKPDEIRVELARELKKNAKEREELTKSIAQTTKAHEEYKTLLQTEFGLTNVSRTDILRYKLYKELESCGYKTLYSNTYISREKLFSKEFDIEHIIPQARLFDDSFSNKTLEARSVNIEKGNKTAYDFVKEKFGESGADNSLEHYLNNIEDLFKSGKISKTKYNKLKMAEQDIPDGFIERDLRNTQYIAKKALSMLNEISHRVVATSGSVTDKLREDWQLIDVMKELNWEKYKALGLVEYFEDRDGRQIGRIKDWTKRNDHRHHAMDALTVAFTKDVFIQYFNNKNASLDPNANEHAIKNKYFQNGRAIAPMPLREFRAEAKKHLENTLISIKAKNKVITGNINKTRKKGGVNKNMQQTPRGQLHLETIYGSGKQYLTKEEKVNASFDMRKIGTVSKLAYRDALLKRLYENDNDPKKAFAGKNSLDKQPIWLDKEQMRKVPEKVKIVTLEAIYTIRKEISPDLKVDKVIDVGVRKILIDRLNEYGNDAKKAFSNLDENPIWLNKEKGISIKRVTISGISNAQSLHVKKDKDGKPILDENGRNIPVDFVNTGNNHHVAVYYRPVIDKRGQLVVDEAGNPKYELEEVVVSFFEAVTRANLGQPIIDKDYKTTEGWQFLFSMKQNEYFVFPNEKTGFNPKEIDLLDVENYGLISPNLFRVQKFSLKNYVFRHHLETTIKDTSSILRGITWIDFRSSKGLDTIVKVRVNHIGQIVSVGEY

SEQ ID NO: 80 - protein, 1436 aa, Bacteroides sp.
MKRILGLDLGTNSIGWALVNEAENKDERSSIVKLGVRVNPLTVDELTNFEKGKSITTNADRTLKRGMRRNLQRYKLRRETLTEVLKEHKLITEDTILSENGNRTTFETYRLRAKAVTEEISLEEFARVLLMINKKRGYKSSRKAKGVEEGTLIDGMDIARELYNNNLTPGELCLQLLDAGKKFLPDFYRSDLQNELDRIWEKQKEYYPEILTDVLKEELRGKKRDAVWAICAKYFVWKENYTEWNKEKGKTEQQEREHKLEGIYSKRKRDEAKRENLQWRVNGLKEKLSLEQLVIVFQEMNTQINNSSGYLGAISDRSKELYFNKQTVGQYQMEMLDKNPNASLRNMVFYRQDYLDEFNMLWEKQAVYHKELTEELKKEIRDIIIFYQRRLKSQKGLIGFCEFESRQIEVDIDGKKKIKTVGNRVISRSSPLFQEFKIWQILNNIEVTVVGKKRKRRKLKENYSALFEELNDAEQLELNGSRRLCQEEKELLAQELFIRDKMTKSEVLKLLFDNPQELDLNFKTIDGNKTGYALFQAYSKMIEMSGHEPVDFKKPVEKVVEYIKAVFDLLNWNTDILGFNSNEELDNQPYYKLWHLLYSFEGDNTPTGNGRLIQKMTELYGFEKEYATILANVSFQDDYGSLSAKAIHKILPHLKEGNRYDVACVYAGYRHSESSLTREEIANKVLKDRLMLLPKNSLHNPVVEKILNQMVNVINVIIDIYGKPDEIRVELARELKKNAKEREELTKSIAQTTKAHEEYKTLLQTEFGLTNVSRTDILRYKLYKELESCGYKTLYSNTYISREKLFSKEFDIEHIIPQARLFDDSFSNKTLEARSVNIEKGNKTAYDFVKEKFGESGADNSLEHYLNNIEDLFKSGKISKTKYNKLKMAEQDIPDGFIERDLRNTQYIAKKALSMLNEISHRVVATSGSVTDKLREDWQLIDVMKELNWEKYKALGLVEYFEDRDGRQIGRIKDWTKRNDHRHHAMDALTVAFTKDVFIQYFNNKNASLDPNANEHAIKNKYFQNGRAIAPMPLREFRAEAKKHLENTLISIKAKNKVITGNINKTRKKGGVNKNMQQTPRGQLHLETIYGSGKQYLTKEEKVNASFDMRKIGTVSKSAYRDALLKRLYENDNDPKKAFAGKNSLDKQPIWLDKEQMRKVPEKVKIVTLEAIYTIRKEISPDLKVDKVIDVGVRKILIDRLNEYGNDAKKAFSNLDKNPIWLNKEKGISIKRVTISGISNAQSLHVKKDKDGKPILDENGRNIPVDFVNTGNNHHVAVYYRPVIDKRGQLVVDEAGNPKYELEEVVVSFFEAVTRANLGLPIIDKDYKTTEGWQFLFSMKQNEYFVFPNEKTGFNPKEIDLLDVENYGLISPNLFRVQKFSLKNYVFRHHLETTIKDTSSILRGITWIDFRSSKGLDTIVKVRVNHIGQIVSVGEY

SEQ ID NO: 81 - protein, 1512 aa, Bacteroides nordii
  Bacteroides nordii CL02T12C05
MKNILGLDLGTNSIGWAVINSEEDGPIVKKRIELAGSRIIPMDAAVLGNFDSGVTKSQTAERTSFRSIRRLRERQLLRRERLHKVLQILGFLPEHYVNDIDFENHPGKIKRNTEPKLPWRKNSMGQFEFIFQDSFEAMLTDFATHQPVFVSEGKKVPYDWTLYYLRKKALTEGISKEELAWLILNFNQKRGYYQLRGEEEEEQSNKLVEFYALRVVKVEATDDKKGKDTWYNVHLENGWIYRRTSNIPLDWEGKVKEFIVTTDLNEDGTPKLDKYGEVKRSFRAPKEDDWTLIKKKTESDIANSHKTVGCYIYDALLQNPHQKIKGRLVRTVERKFYKEELRLILEKQLSFHPELQDRDLYRACIDALYVSNEAHKNNISGRDFVYLFIDDIIFYQRPLKTKKSLIDNCPYEENQYMDRETGEVKQAPIKCIAKSHPLFQEFRLWQFISNIRIYQRERVLDDGKLETDVDVTPDFLKTEDDYTTLFEWFNDRKEVDQKAFLKNPQFGLKKTFTEYRWNYVEDKSYPCNETRNAILNGLQKAGVSADFLSREVEEALWHILYSVEDKIEIESALRKFASKHDLDDRFADVFKKLPPFKKEYGAYSAKAIKKLLPLMRIGKYWELSNIDDKTKERIDKIITGEWDENIHDRVREKAIKLSDITDFKGLPLWLSCYVVYNRHSEARAIAKWESPEDIDSYLRLFRQHSLRNPIVEQVITETLRTVRDIWKRVGQIDEIHVELGREIKNPADKRAKMTAQIVENENTNLRIKALLAEFINSEYEIENVRPYSSNQQEKLKIYEDTVLNGVKEIPEDINTILKKFRESDLKKRPTKSDFLHYKLWLEQKYCSPYTGRIIPLGKLFTSAYEIEHIIPQAHYFDDSFSNKVICEAEVNGLKDKKLGYEFIKHNPGKMVEIGFGKPPVRIFSVEEYERFVKENYSGIKNKMNKLLMDDIPETFIERQLNDSRYISKVVKSLLSNIVREKDSNGEYEPEAISKNVIVCTGSVTDRLKRDWGVNDVWNSIIYPRFERLNELTGSQQFGCWENKEGKRVFQTAVPLEMQKGFSKKRIDHRHHAMDAIVIACATRNHINYLSNESASKKAKISRTDLQRLLCTKCRTDDNGNYKWIVKKPWPAFTQDIRKALENITVSFKQNLRVINKTTNYYVHFDESGKKVLEKQINGDSWAIRKPMHKDTVFGKVNLQKVKEVRLSLALDTPKMIVDKKLKEKVLQLYSYKYDKKRIDKYFKENASLWKDLNLSKVAVYYFTNDSTEPLVAVRKPLDTSFNAKKIKESVTDTGIQKILLNHLSNNQDDPNLAFSPDGIDKMNKNLTALNDGKYHQPIYKVRVCEPQGNKFSVGTSGNKTSKYVEAAKGTNLFFAVYQTEDGKRSYETIPLNVVIEREKLGWTPVPENNNNGDKLLFWLSPNDLVYVPTADELNNGMRLDNMDKGRIYKMISCSGPQCFFIPQNVSNAIIPVIELGANNKAEKSWNNEMIKVVCVPIRVDRLGCITQINNQK

SEQ ID NO: 82 - protein, 1436 aa, Bacteroides sp.
  Bacteroides sp. 2_1_16
MKRILGLDLGTNSIGWALVNEAENKDERSSIVKLGVRVNPLTVDELTNFEKGKSITTNADRTLKRGMRRNLQRYKLRRETLTEVLKEHKLITEDTILSENGNRTTFETYRLRAKAVTEEISLEEFARVLLMINKKRGYKSSRKAKGVEEGTLIDGMDIARELYNNNLTPGELCLQLLDAGKKFLPDFYRSDLQNELDRIWEKQKEYYPEILTDVLKEELRGKKRDAVWAICAKYFVWKETYTEWNKEKGKTEQQEREHKLEGIYSKRKRDEAKRENLQWRVNGLKEKLSLEQLVIVFQEMNTQINNSSGYLGAISDRSKELYFNKQTVGQYQMEMLDKNPNASLRNMVFYRQDYLDEFNMLWEKQAVYHKELTEELKKEIRDIIIFYQRRLKSQKGLIGFCEFESRQIEVDIDGKKKIKTVGNRVISRSSPLFQEFKIWQILNNIEVTVVGKKRKRRKLKENYSAIFEELNDAEQLELNGSRRLCQEEKELLAQELFVRDKMTKSEVLKLLFDNPQELDLNFKTIDGNKTGYALFQAYSKMIEMSGHEPVDFKKPVEKVVEYIKAVFDLLNWNTDILGFNSNEELDNQSYYKLWHLLYSFEGDNTPTGNGRLIQKMTELYGFEKEYATILANVSFQDDYGSLSAKAIHKILPHLKEGNRYDVACVYAGYRHSESSLTREEIANKVLKDRLMLLPKNSLHNPVVEKILNQMVNVINVIIDIYGKPDEIRVELARELKKNAKEREELTKSIAQTTKANEEYKTLLQTEFGLTNVSRTDILRYKLYKELESCGYKTLYSNTYISREKLFSKEFDIEHIIPQARLFDDSFSNKTLEARSVNIEKGNKTAYDFVKEKFGESGADNSLEHYLNNIEDLFKSGKISKTKYNKLKMAEQDIPDGFIERDLRNTQYIAKKALSMLNEISHRVVATSGSVTDKLREDWQLIDVMKELNWEKYKALGLVEYFEDRDGRQIGRIKDWTKRNDHRHHAMDALTVAFTKDVFIQYFNNKNASLDPNANEHAIKNKYFQNGRAIAPMPLREFRAEAKKHLENTLISIKAKNKVITGNINKTRKKGGVNKNMQQTPRGQLHLETIYGSGKQYLTKEEKVNASFDMRKIETVSKSAYRDALLKRLYENDNDPKKAFAGKNSLDKQPIWLDKEQMRKVPEKVKIVTLEAIYTIRKEISPDLKVDKVIDVGVRKILIDRLNEYGNDAKKAFSNLDKNPIWLNKEKGISIKRVTISGISNAQSLHVKKDKDGKPILDENGRNIPVDFVNTGNNHHVAVYYRPVIDKRGQLVVDEAGNPKYELEEVVVSFFEAVTRANLGLPIIDKDYKTTEGWQFLFSMKQNEYFVFPNEKIGFNPKEIDLLDVENYGLISPNLFRVQKFSLKNYVFRHHLETTIKDTSSILRGITWIDFRSSKGLDTIVKVRVNHIGQIVSVGEY

SEQ ID NO: 83 - protein, 1517 aa, Bacteroides sp.
  Bacteroides sp. 20_3
MKKIVGLDLGTNSIGWALINAYINKEHLYGIEACGSRIIPMDAAILGNFDKGNSISQTADRTSYRGIRRLRERHLLRRERLHRILDLLGFLPKHYSDSLNRYGKFLNDIECKLPWVKDETGSYKFIFQESFKEMLANFTEHHPILIANNKKVPYDWTIYYLRKKALTQKISKEELAWILLNFNQKRGYYQLRGEEEETPNKLVEYYSLKVEKVEDSGERKGKDTWYNVHLENGMIYRRTSNIPLDWEGKTKEFIVTTDLEADGSPKKDKEGNIKRSFRAPKDDDWTLIKKKTEADIDKIKMTVGAYIYDTLLQKPDQKIRGKLVRTIERKYYKNELYQILKTQSEFHEELRDKQLYIACLNELYPNNEPRRNSISTRDFCHLFIEDIIFYQRPLKSKKSLIDNCPYEENRYIDKESGEIKHASIKCIAKSHPLYQEFRLWQFIVNLRIYRKETDVDVTQELLPTEADYVTLFEWLNEKKEIDQKAFFKYPPFGFKKTTSNYRWNYVEDKPYPCNETHAQIIARLGKAHIPKAFLSKEKEETLWHILYSIEDKQEIEKALHSFANKNNLSEEFIEQFKNFPPFKKEYGSYSAKAIKKLLPLMRMGKYWSIENIDNGTRIRINKIIDGEYDENIRERVRQKAINLTDITHFRALPLWLACYLVYDRHSEVKDIVKWKTPKDIDLYLKSFKQHSLRNPIVEQVITETLRTVRDIWQQVGHIDEIHIELGREMKNPADKRARMSQQMIKNENTNLRIKALLTEFLNPEFGIENVRPYSPSQQDLLRIYEEGVLNSILELPEDIGIILGKFNQTDTLKRPTRSEILRYKLWLEQKYRSPYTGEMIPLSKLFTPAYEIEHIIPQSRYFDDSLSNKVICESEINKLKDRSLGYEFIKNHHGEKVELAFDKPVEVLSVEAYEKLVHESYSHNRSKMKKLLMEDIPDQFIERQLNDSRYISKVVKSLLSNIVREENEQEAISKNVIPCTGGITDRLKKDWGINDVWNKIVLPRFIRLNELTESTRFTSINTNNTMIPSMPLELQKGFNKKRIDHRHHAMDAIIIACANRNIVNYLNNVSASKNTKITRRDLQTLLCHKDKTDNNGNYKWVIDKPWETFTQDTLTALQKITVSFKQNLRVINKTTNHYQHYENGKKIVSNQSKGDSWAIRKSMHKETVHGEVNLRMIKTVSFNEALKKPQAIVEMDLKKKILAMLELGYDTKRIKNYFEENKDTWQDINPSKIKVYYFTKETKDRYFAVRKPIDTSFDKKKIKESITDTGIQQIMLRHLETKDNDPTLAFSPDGIDEMNRNILILNKGKKHQPIYKVRVYEKAEKFTVGQKGNKRTKFVEAAKGTNLFFAIYETEEIDKDTKKVIRKRSYSTIPLNVVIERQKQGLSSAPEDENGNLPKYILSPNDLVYVPTQEEINKGEVVMPIDRDRIYKMVDSSGITANFIPASTANLIFALPKATAEIYCNGENCIQNEYGIGSPQSKNQKAITGEMVKEICFPIKVDRLGNIIQVGSCILTN

SEQ ID NO: 84 - protein, 1424 aa, Bacteroides sp.
  Bacteroides sp. 3_1_19
MKRILGLDLGTNSIGWALVNEAETDEEVSSIIRLGVRVNPLTVDETQNFEKGKSITTNAERTLKRSMRRNLQRYKLRRDALVEFLKELGFITDETILSEQGNRTTFETCRLRAKAAEEEISLEELSRVLLMINKKRGYKSSRKVKKEEDGVLIDGMEIAKKLYEEDLTPGQLCSQLLESGKKVLPDFYHSDLQEELDRIWSVQKQFHPDVFCDAAKEEIKGKNRSQTWAILANYFVWKEEVVGWNDREAKNETIEKECKLVGLKRTTKGYELKKENYRWRAQALTEQLGLEEIAVVLQEINGQINASSGYLGAISDRSKVLYFNHQTVGQYQMAELDKNPHASLRNMVFYRQDYLDEFDRIWEKQAEFHKELTAELKKEIRDMIIFYQRRLKSQKGLISFCEFERLEIVVEKDGKKQTKVIGCKVIPRSHPLFQEFKVWQTLNDIKVLGREKKRNALSASESRALYPEEKEILARELAIKENMKKADVLKLLFENPQELDLNFKQIDGNRTGFSLFSAYSKMIEKYGYEPLDFKKPADEIIGQLRTIFTDLGWNTNLFTIDLTKEGKELEMQPYFRLWHLLYSFEGDNTSTGNGKLIEKIMQLCGVEKEYAVELASLSFQDDYGSLSAKAIKRILPYLKEGNLYDVACEYAGYRHSKSSLTKEEIENKVLKGKLEVLPKNSLRNPVVEKILSQMVNVINTIIDTYGKPDEIRVELARELKKSAKEREELTKAIAKSTREHEEIRKLLQDEFGMMNVSRNDIIRYKLYEELKDNGYKTLYSNQYIPKEKIFSKEIDIEHIIPQSRLFDDSLSNKTLEYKAINIEKGNKTAYDFVKEKYGEEGLQQYINRCESLFNDKKAKLRKLKMEQKDIPDGFIDRDLRNTQYIAKKALAMLNEICRRVVATTGSITDQLREDWQLVDVMKELNLPKYEALGFVETYEDKDGRKIKRIKDWTKRNDHRHHAMDALTVAFTKDAFIQYFNNKNAAQDSGNRNHTNIIGIKTRYFDKGRALPPIPLEQFRIEAKQHLEKLLVSIKAKNKVVTVNVNRTKKRKGENTKIQQTPRGQLHLETVYGSHKQYVTKIEKVNASFDAAKIATVSKRAYRNALLKRLETFGNDPKKAFTGKNALEKNPLYADKYQTIRVPEKVQTVEFETIYTIRKPVDPALNVDKVVDVKVRAILERRLKEYGGDPKKAFVNFWENPIWLNKEKGISIKRVSIRGINNAQSIHVKKDKNGNPIWDENGKQIPVDFVNTGNNHHVAIYRKPVLDKKGQVTFDEDGNLMYELDEVVVPFFEAVTRANLGLPIIDKDYRKSEGWQFLFSMKQNEYFVFPNEKTGFNPKEVDLLNPDNYAMISPNLFRVQTMSKVMYGNNVVRDYKFRHHLETTVKDMKELKDIAYKQYKTLSFGNSVVKIRINHIGQIVSVGEY

SEQ ID NO: 85 - protein, 1510 aa, Bacteroides sp.
  Bacteroides sp. D2
MKRILGLDLGTNSIGWALVDSEEQRILGMGSRIIPMDQGVLDTFSGGNPVETQTAARTAYRGTRRLRERALLRRERLIRVLNMMKFLPEHYASQIDFEKRLGQFFDEKEPKLAWKQNDEGRFEFIFQQSFNEMIEEFKNKGVVREDKKIPYDWTIYYLRKKALSQEIEKEELAWILLNFNQKRGYYQLRGEEEEENPNKLVEYYSLKIVDVIADEKPNSKGDIWYSLHLENGWIYRRSSKIPLFGWKDKTRDFIVTTDLNDDGTVKKDKEGIEKRSFRAPSENDWVLLKKKTESDIEKSHKTVGAYVYETLLQNPMQKVRGKLVRTIERKFYKDELKQILEKQREFHPELRDEDLYNDCVRELYRSNETYQFILSKRDFVHLFLDDILFYQRPLRSQKSAIGDCILEFKTYKDKDGNNIKEYLKVISKSNPLYQEFRIWQWLYNLKIYRKEDDEDVTLQFIANIEDKEQLFDFLSNRKSIEQKPLLEYLIKAKGLKKQVKTEAYRWNYVEDKIYPCSETKTMISTRLAKVENIPDNFFTKEIEQKLWHIIYSVTDKNEFEKALRTFAKKYDLDIASFVDNFKKIPPFKNEYGSFSEKAIKKLLPLMRLGKYWKWNDIDNNTQNRISKIITGEYDEEIKDIVREKSIALTNENDFQGLQLWLAQYLVYGRHSEADIAGKWHSVADLEKYLNEFKQHSLRNPIVEQIITETLRVVRDIWRKYGQGAENFFSEIHVELGRDMKNTADERKKIVNVVTENENTNLRIKALLMELKNNSDGKLEVENVRPYSPTQQDILKIYEEYAISTGLDNEKDEKVKEDIKKISRVAQPTTTELQRYKLWLEQKYCSPYTGKVIPLGKLFTEEYQIEHIIPKSRYYDDSFSNKVICEAAVNKLKDKCLGLEFIKNYHGQIVETGFGQKVTIFDEEAYQNFVKQHYAYNRSKRTKLLLEEIPEKMIERQMNDTRYISKFVLPLLSNLVRAEENDNGVNSKNVLPVNGKITTMLKQDWGLNDVWNDLILPRFVRMNELAKTIAFTSWNEQHQKYLPTVPLELSKGFQKKRIDHRHHAMDALVIACATRDHVNLLNNKHANTDTIRYDLQRKLRLFERVTYIDPQTKNNVTKDIPKEFKKPWDNFTVDARNELEKIIVSFKQNLRIINKATNIYTKYENGKKIKVGQKGLNWAIRKPLHKETVFAKVSLRKRKTVRLSEALKDWKKIVDKKLKQEIKRLTCQYGKFDVDTILRYFKDRKYQFGEVDVSKVKMYYFDEENAAVRKNVDTSFTEKFIQGSVTDTGIQKILLNHLEAKGNKVEIAFSPEGIEEMNKNIIQLNEGKLHLPIFKVRVYETIGNKFSVGVKGNKKDKYVEAAKGTNLFFAIYVDENGIRSYETIPLNIVIERLKQGLSVVPEKNRKEHSLLFYLSPNDLVYVPIEDERENIHAVNLDQLNNEQRKRIYKMVSCTGSECHFVPYYVASPIVNKVEYSSLNKIGRSLTGEMIKDVCIKLKVDRLGNVKGISGL

SEQ ID NO: 86 - protein, 1436 aa, Bacteroides sp.
  Bacteroides sp. D2
MKRILGLDLGTNSIGWALVDEAENKDERSSIVKLGVRVNPLTVDELTNFEKGKSITTNADRTLKRGMRRNLQRYKLRRETLMEVLKEHKLITEDTILSENGNRTTFETYRLRAKAATEKISLEEFARVLLMINKKRGYKSCRKAKGAEEGTLIDGMDIARELYNNNLTPGELCLQLLDAGKKYLPDFYRSDLQNELDRIWEKQKEYYPEILTEVLKEELRGKKRDAVWAICAKSFVWEEYYTEWNKEKGKTEQQEREHKLEGIYSKRKRDEAKRENLQWRVNGLKEKLSLEQLVIVLQEMNIQINNSSGYLGAISDRSKELYFNKQTVGQYQMEMLDKNPNASLRNMVFYRQDYLDEFNTLWEKQAEYHKELTGELKKEIRDIVIFYQRRLKSQKGLVGFCEFESRQIEVEIDGKKKIKTVGNRVIPRSSPLFQEFKIWQILNNIEVTVVGKKGKRRKQKDNSPTLFDGLDDTEQLELNGSRYLYQEEKELLAQELFVRDKMTKSDVLKLLFDNPQELDLNFKTIDGNKTGYTLFQAYSKMIEMSGHEPVDFKKTVEKVVEHVKAVFDLLNWNTDILGFNSNEELDNQSYYKLWHLLYSFEGDNTPTGNARLVQKITELYGFEKEYAIILANVTFQDDYGSLSAKAIHKILPHLKEGNRYDVACAYAGYKHSESSLTKEEIANKALKDRLTLLPKNNLRNPVVEKILNQMVNVINAIIDTYGKPDEIRVELARELKKNAKEREELTKFIAETTRKHEEFKILLQSEFGLTNVSRTDILRYKLYKELESCGYKTLYSNTYIPREKLFSKEFDIEHIIPQARLFDDSFSNKTLEARSINLEKGNKTAYDFVKEKFGESGADNSLDHYLNNIEDLFKSGKISKTKYNKLKMAEQDIPDGFINRDLRNTQYIAKKALSMLNEISRRVVATSGTITDKLRQDWQLVDVMKELNWEKYKALGLVEYFEDKDGRQIGRIKDWTKRNDHRHHAMDALTVAFTKDIFIQYFNNKNASLNSNTNEYAIKNKYFQNGRAIAPIPLREFRVEAKKHLENTLISIKAKNKVVTGNINKTKKRGGVNKYLQQTPRGQLHLETIYGSGKQYLTKEEKVNASFDMKKIATVSKSAYRDVLLKRLHENDNDPKKAFTGKNSLDKQPIWLDKEQTRKVPEKVKTVTLETIYTVRKEISPDLKVDKVIDAGVRKILTGRLNEYGNDAKKAFSNLDENPIWLNKEKGISIKRVTISGISNAQSLHVKKDKDGKPILDEDSRNIPVDFVNTGNNHHVAVYRRPVIDKRGQLVIDEAGNPKYELEEVVVSFFEAVTRANLGQPIIDKDYKTSEGWQFLFSMKQNEYFVFPNEKTGFNPKEIDLLDAENYGVISPNLFRVQKFAHKNYVFRHHLETTIKDTSSILKGITWIDFRSSKGLDAIVKVRVNHIGQIVSVGEY

SEQ ID NO: 87 - protein, 1508 aa, Bacteroides uniformis
  Bacteroides uniformis CL03T00C23
MRTILGLDLGTNSIGWAVINSVIKEQTERIWIEMAGSRIIPMDAAILGDFDKGNSISQTAERTRFRGVRRLRERQLLRRERLHKVLKILGFLPEHYLKGIDFEKHTGKFLSGSEPKLPWVKDRWGKYSFLFQTAFNEMLADFAKHQPSLVFDGKKIPYDWTVYYLRKKALTEMISKEELAWILLNFNQKRGYYQLRGEEEEDNAGKSVEFYALKVLSVEATDEKKGRDIWYNVHLENGWVYRRSSNVPLDWEGRVKEFIVTTDLNPDGTPKLDKYGEVKRSFRAPKEDDWMLIKKRTEADITGTHKTIGSYIYDALLQEPQQKIIGKLVKTVERKFYKEELNFILQKQCAFHAELQDRDLYMRCIEALYPGNEVQRRNIANRDFIYLLIDDVLFYQRPLKTKKSLIANCPYEENEYVNRKTGEIKTAPLKCIAKSHPLFQEFRLWYFLSNIRVYQKEREVNGTLHLDVDVTTEFLKTEDDYVALFDWLNSRKEIDQKAFLRYPAFGLKKEINNYRWNYVEDKFYPCNETRHAILSRLEKAGIGIDFLSDEKETALWHILYSVSDKQEIEKALATFAVKNGLNESFVEVFKKFPPFKSEYGAYSAKAIKKLLPLMRCGKYWDMSLIDGTTKERIERIIAGECDESIGAKVREKAMNLSDISCFKRLPLWLACYVVYNRHSEDKEITKWETPADIDAYLAAFKQHSLRNPIVEQVITETLRVVRDIWKQVGKIDEIRIELGREMKNPADKRKRMTTQILENENANLRIKALLAEFVNPEYGVENVRPYSPSQQEILRIYEDAVLKGEEQIPEDIDVILKKFNTSKLPTKSEFLRYKLWLEQKYRSPYTGELIPLAKLFTAAYEIEHVIPQSRYFDDSFSNKVICESAVNKLKDNQLGYEFIKNHHGQKVEVGFGKTVEIFSVDSYERFVKEQYAKSGIKMKKLLMDDIPEQFIERQLNDSRYISKVVKGLLSNIVREKNDSGEYEPEAVSKNILVCTGSVTDRLKKDWGMNDVWNSIVSPRFERLNALTETQCFGHWENKDGKKVFQTAVPLEYQKGFSKKRIDHRHHAMDAIVIACATRNHVNYLNNESASRNAKISRYDLQRLLCDKSRGDGNGNYRWIIKKPWTTFTQDAREALSGIIVSLKQNLRIINKTTNIYQHFDANGTRVYEKQKIGDSWAIRKPMHKDTVFGAVNLRKVKVVRLSVALDTPSMIVNKRVKNKVLELLSYKYDKKKIEKYFKENAFLWKELDIAKVAVYYFTENTTEPLVAVRKSLDSTFNEKKIASVTDTGIQKILLNHLKSKEGKAELAFSAEGIEEMNRNLLQLNDGKGHQPIYKVRVYEPRGNKFKVGVLGNKGAKWVEAAKGTNLFFAIYITEDGNRTYETIPLNWVIEREKQGLVPVPDRNEKGDKLLFWLSPNDLVYLPTEEERDFGRINEPIDRGRIYKMVSSSGNQCFFIPQSISNAIISTKELGSNNKAEKSWDGEMIKNICIPVKVDRLGRIIEVKYRVNE

SEQ ID NO: 88 - protein, 1504 aa, Bacteroides vulgatus
  Bacteroides vulgatus CL09T03C04
MKNIVGLDLGTNSIGWAVVNGSVNDDGSEQLVKIQASGSRIIPMDAAMIGDFNKGNSISQTAERTRLRGVRRLSERYLLRRERLHRILDILGFLPFHFAQDLDRHGKIVKGKEPKLAWRKNEAGQFEFIFQDSFKEMLEDFKLNHPNLITDDKKVPYDWTIYYLRKKGLTSKISKEELAWILLNFNQKRGYYQLRGEEEEENKNKLVEFYALKVVAVEDSGEKKGKDIWYNVHLENGWVYRRTSNMPLDWVGKTKEFIVTTDLEKDGTPKKDKEGNVKRSFRAPKEDDWSLLKKKTEADIDQTHKTVGVYIYDTLLGNPSQKIRGRLVRTIERKYYKEELKQILEKQKEFHLELQDRALYAACIEELYPINEAHRNNVGNRDFTYLFLEDILFYQRPLKSKKSLIDNCPYEENQGLDKETGEIKSFPVKCIAKSHPLFQEFRLWQFIVNLRIYRKDLAQDVDVTNELLKTEEDYVALFDWLNGKKEIDQKAFLKYPVFGLKKEIENYRWNYVQDKPYPCNETRSLMLARLEKCDISIEFLTKENEEALWHILYSVEDKNEIVKALQKFADKHDLNASFVDVFQKFPPFKKEYGSYSAKAIKKLLPLMRMGKYWSENSIDKGTRERIDKIITGEYDEKIENRVREKAIHLADVSDFKGLPLWLVCYIVYGRHSEAKEITQWKSPADIDSYLRSFKQHSLRNPIVEQIIIETLRVVRDIWKQVGNIDEIHVELGREMKNPADKRKKMTQQMSENENTNLRIKYLLTEFLNPEYEVENVRPYSPSQQDILRIYEEGVLNSVSDLPEEISDILKKFTETDLKKRPSRSEILRYKLWLEQKYRSPYTGEVIPLGKLFTPAYEIEHVIPQSCYFDDSFSNKVICEAEVNKLKSNLLGHEFIVKHHGEIVELPFGKKVRIFTVDEYEQFVKDNYSRTRSKMKKLLMDDIPEEFVTRQLNDSRYISKVVKSLLSNIVREKGEEEAISKNVIPCTGGVTDRLKKDWGINEVWNKIILPRFQRLNELTGTNKFTTKNVGIQEIPTMPLELQKGFNKKRIDHRHHAMDAIIIACANRNIINYLNNESATAKAELSRYDLQKMLCDKAKTDNNGNYKWVIRKPWASFTQDTYLALENIIVSFKQNLRVINKATNRFLHYNEEGKKIFVKQGKGDNWAIRKSMHKDTVFGEVNLRRIKTVALNEAMKNPQSIVVKDFKRKLLELWNLGFDAKRIKKYFEDNRETWSDINLSKIEVYYFSKDTKDRFFATRKPLDTSFDRKKIENNITDTGIQKILLRHLELKDNNPDIAFSPDGIDEMNRNIIQLNNGKYHQPIIKIRWYEQADKFAVGQTGNKFSKFVEAAKGTNLFFAVYESNILDKKTNTIIKKRNYATIPLNVAIERQKQGLPVAPEDENGNDPIFVLSPNDLVYLPTDDELANGIIAQPLDRGRIYKMVSCTGNEGHFIPARIANPILQTIELGSNNKAQKAWTDEMIKEICMPIKVDRLGNVLESSSSYKK

SEQ ID NO: 89 - protein, 1434 aa, Unknown
  Description of Unknown: Bacteroidetes oral taxon 274 str. F0058 polypeptide
MKNILGLDLGTNSIGWAYVKQAQNDSEKSEIAELGVRVNPLTVDEKTNFEKGKPISTNADRTLKRGARRNLQRYKLRRQELIELLKDYQVISDKTILAEDGKETTFETLRLRVKSAKEQVSLEELARILLMINKKRGYKSSRKAKNEDEGQLIDGMEIARRLYDENLTTGQLSLQLLKEGKKSLPDYYRSDLQHELDKVWNFQKQFHPDILTDEFYTSIQGKGQKATRESFSSKYGIDTAENKGSREEKKLQAYQWRADATHKELTKEELAFVITEINNNINNSSGYLGAISDRSKELIFANETVGEYLWKQIQNDPHTSLKNQVFYRQDYFDEFERIWETQSGFYPQILTESLKNELRDILIFYQRKLKSQKALVSICEFESKEIPLKDKQGNPISKNGIPVTKLVGPKVAPKSSPLFQEFKIWQNLNNVLVRPKGSRKRKVTTNQQSTLLEGQEPVFELNLEQKELLFEELNLKGNLKTDYCLELIGYSAKEWEMNYPTLEGNKTNKALYEAYLKIIDSEGYDAKKLLKVKTDKDDINLDDIKVSASEIKTMISDIFNELGINTKILDFDAELERKQFEAQASYRLWHLLYSYEGDDSKSGNELLYRLLEDKFGFKREHSKTLANVSLLSDYGNLSTKAIRTIYPYIKENKFSTACELAGYRHSKLSISKEENENRTLKDTLDVLKKNSLRQPVVEKILNQMINLINELIEKHSEKDEKGNIVKYFKFDEIHIELARELKKNAEERRELDSKVREGKDRNEKIITILKSEFGLPYPTKNDITRYRLYEELKDNGYKDLYTNTYIPREKLFSKEIDIEHIIPKSRLFNDSFSNKTICYRQDNLNKGERTAYDYIEGLGKTQLDEYLNRVENLYTNKFITKAKYRNLLKKESEIGDGFIERDLRETQYIAKKAKEMLLQITRHVVSTTGSITDRLRDDWELVNVMRELNLPKYKVLGLTEIQERKNGQTVEVITDWTKRNDHRHHAMDALTVAFTKHSHIQYLNFLNARKDEKHKEYSNIMGIQQLETEKTTDKDGKDRRVFKTPIPNFRQVAKEHLESILISHKTKNKVVTRATNKIAGSKKQQETLSPRGQLHKETVYGKYRRYVQKEEKIGSKFDLQTIERVANPLYKRLLTKRLEENGGDPKKAFTGKNALAKSPIYLDETQTQQLPEKVKLVWLETDFSIRKDITPDNFKDEKSIDKVLDEGIKRILKDRLKSFDGDAKRAFTDLEQNPIWLNKEKGIAIKRVTISGVSNAEPLHTKKDHLGNEIFDDTGKPIPVDYVSTGNNHHIAIYRDENGNLQEKAVSFFEAVTRANQGLPTVDKTYNQHLGWQFLFTMKQNEMFVFPNKETGFDPQEIDLLDPKNKKLISPNLFRVQKISTKNYFFRHHLETSVETHNALNGVTYKSQLGLNGITDIIKVRINHLGDIVHIGEY

SEQ ID NO: 90 - protein, 1153 aa, Barnesiella intestinihominis
  Barnesiella intestinihominis YIT 11860
MKNILGLDLGLSSIGWSVIRENSEEQELVAMGSRVVSLTAAELSSFTQGNGVSINSQRTQKRTQRKGYDRYQLRRTLLRNKLDTLGMLPDDSLSYLPKLQLWGLRAKAVTQRIELNELGRVLLHLNQKRGYKSIKSDFSGDKKITDYVKTVKTRYDELKEMRLTIGELFFRRLTENAFFRCKEQVYPRQAYVEEFDCIMNCQRKFYPDILTDETIRCIRDEIIYYQRPLKSCKYLVSRCEFEKRFYLNAAGKKTEAGPKVSPRTSPLFQVCRLWESINNIVVKDRRNEIVFISAEQRAALFDFLNTHEKLKGSDLLKLLGLSKTYGYRLGEQFKTGIQGNKTRVEIERALGNYPDKKRLLQFNLQEESSSMVNTETGEIIPMISLSFEQEPLYRLWHVLYSIDDREQLQSVLRQKFGIDDDEVLERLSAIDLVKAGFGNKSSKAIRRILPFLQLGMNYAEACEAAGYNHSNNYTKAENEARALLDRLPAIKKNELRQPVVEKILNQMVNVVNALMEKYGRFDEIRVELARELKQSKEERSNTYKSINKNQRENEQIAKRIVEYGVPTRSRIQKYKMWEESKHCCIYCGQPVDVGDFLRGFDVEVEHIIPKSLYFDDSFANKVCSCRSCNKEKNNRTAYDYMKSKGEKALSDYVERVNTMYTNNQISKTKWQNLLTPVDKISIDFIDRQLRESQYIARKAKEILTSICYNVTATSGSVTSFLRHVWGWDTVLHDLNFDRYKKVGLTEVIEVNHRGSVIRREQIKDWSKRFDHRHHAIDALTIACTKQAYIQRLNNLRAEEGPDFNKMSLERYIQSQPHFSVAQVREAVDRILVSFRAGKRAVTPGKRYIRKNRKRISVQSVLIPRGALSEESVYGVIHVWEKDEQGHVIQKQRAVMKYPITSINREMLDKEKVVDKRIHRILSGRLAQYNDNPKEAFAKPVYIDKECRIPIRTVRCFAKPAINTLVPLKKDDKGNPVAWVNPGNNHHVAIYRDEDGKYKERTVTFWEAVDRCRVGIPAIVTQPDTIWDNILQRNDISENVLESLPDVKWQFVLSLQQNEMFILGMNEEDYRYAMDQQDYALLNKYLYRVQKLSKSDYSFRYHTETSVEDKYDGKPNLKLSMQMGKLKRVSIKSLLGLNPHKVHISVLGEIKEIS

SEQ ID NO: 91 - protein, 1352 aa, Belliella baltica
MKKILGLDLGTTSIGWAFIKEPEKDVVGSEIVDMGVRIVPLSSDEENDFAKGNTISINADRTLKRGARRNLQRFKQRRNALLEIFKEKKLISTNFKYAEDGPSSTFSTLNLRAKAAKEKIELQDLVKVLLQINKKRGYKSSRKAKSEEDDGSAIDSMGIAKELYENDLTPGQWVYEALQKGRKNVPDFYRSDLQEEFKKIVNYQSEFFPDIFNASFVEDWMGKASTPTKQYFNKKGVQLAENKGKREERRLQEYKWRAEAVNFKIDLSEIALILSQINSQISNSSGYLGAISDRSKELYFKNLTVGQYLYQQIKKNPHTRLKGQVFYRQDYLDEFERIWSVQSSFYPQLNDALKREVRDITIFFQRRLKSQKHLISNCEFEDHHKVVPKSHPVFQEFRIWQNLNNLLLIKKDNLNEKFDLELESKIALANELAFKRELNVKDALKILGLKPNEWEFNFTKIEGNRTNQAFFDAFAKIIELEDGEPIDLGDLKADDILDQFSEAFLRIGIDTELLQVNSDIEGAEYEKQSYIQFWHLLYSSEDDQKLKLNLIRKFGFKPEHAKILASISLQDDHASLSSRAIKKILPHLQSGLIYDKACTYAGYNHSSSFTKDENEKRELRAELELLKKNSLRNPVVEKILNQMINVVNAILKDPELGRPDEIRVEMARELKANAEQRKNMTSNIASATRDHDKYREILKSEFGLKRVTKNDLLRYKLWLETDGISLYTGKPIEASKLFSKEYDIEHIIPKARLFDDSFSNKTICERQLNIDKANVTAFSFLQNKLSADEFEQYQSRVKSLYGKLSKAKIQKLLMANDKIPEDFIARQLQETRYISKKAKEILFEISRRVSVTTGTITDKLREDWGLVEIMKELNWEKYDKLGLTYTIEGKHGERLNKIKDWSKRNDHRHHAMDALTVALTKPAYIQYLNNLNAKGLNNKKGTEVFAIEQKYLKRENGKLCFIPPIENIRSEAKKHLSRILVSYKAKNKVVTINKNKTKSKAGLNEQIALTPRGQLHKETVYGKSFHYSTKFEKIGASFNVQKINTVAKKEEREALLKRLAENGNDPKKAFTGKNTLNKMPIYLDLGKNIKLSEKVKTVVLEQNYTIRKNIDPDLKVDKVIDVGIKRILESRLEEFGGNAKLAFSNLEENPIWLNKEKGISIKRVKISGVSNVESLHVKKDHFGEPILDQEGNEIPVDFVSTGNNHHVAIYEDENGNLQEEVVSFFEAVVRQNQGLPIIKKNHTLGWKFLFTLKQNEYFVFPSDDFVPADVDLMDEQNYHLISPNLFRVQKIARKNYVFNNHLETKAVDNDLLKSKKELSKITYHFYQTPEHLRGIIKIRINHLGKIIQIGEY

SEQ ID NO: 92 - protein, 1415 aa, Bergeyella zoohelcum
  Bergeyella zoohelcum ATCC 43767
MKHILGLDLGTNSIGWALIERNIEEKYGKIIGMGSRIVPMGAELSKFEQGQAQTKNADRRTNRGARRLNKRYKQRRNKLIYILQKLDMLPSQIKLKEDFSDPNKIDKITILPISKKQEQLTAFDLVSLRVKALTEKVGLEDLGKIIYKYNQLRGYAGGSLEPEKEDIFDEEQSKDKKNKSFIAFSKIVFLGEPQEEIFKNKKLNRRAIIVETEEGNFEGSTFLENIKVGDSLELLINISASKSGDTITIKLPNKTNWRKKMENIENQLKEKSKEMGREFYISEFLLELLKENRWAKIRNNTILRARYESEFEAIWNEQVKHYPFLENLDKKTLIEIVSFIFPGEKESQKKYRELGLEKGLKYIIKNQVVFYQRELKDQSHLISDCRYEPNEKAIAKSHPVFQEYKVWEQINKLIVNTKIEAGTNRKGEKKYKYIDRPIPTALKEWIFEELQNKKEITFSAIFKKLKAEFDLREGIDFLNGMSPKDKLKGNETKLQLQKSLGELWDVLGLDSINRQIELWNILYNEKGNEYDLTSDRTSKVLEFINKYGNNIVDDNAEETAIRISKIKFARAYSSLSLKAVERILPLVRAGKYFNNDFSQQLQSKILKLLNENVEDPFAKAAQTYLDNNQSVLSEGGVGNSIATILVYDKHTAKEYSHDELYKSYKEINLLKQGDLRNPLVEQIINEALVLIRDIWKNYGIKPNEIRVELARDLKNSAKERATIHKRNKDNQTINNKIKETLVKNKKELSLANIEKVKLWEAQRHLSPYTGQPIPLSDLFDKEKYDVDHIIPISRYFDDSFTNKVISEKSVNQEKANRTAMEYFEVGSLKYSIFTKEQFIAHVNEYFSGVKRKNLLATSIPEDPVQRQIKDTQYIAIRVKEELNKIVGNENVKTTTGSITDYLRNHWGLTDKFKLLLKERYEALLESEKFLEAEYDNYKKDFDSRKKEYEEKEVLFEEQELTREEFIKEYKENYIRYKKNKLIIKGWSKRIDHRHHAIDALIVACTEPAHIKRLNDLNKVLQDWLVEHKSEFMPNFEGSNSELLEEILSLPENERTEIFTQIEKFRAIEMPWKGFPEQVEQKLKEIIISHKPKDKLLLQYNKAGDRQIKLRGQLHEGTLYGISQGKEAYRIPLTKFGGSKFATEKNIQKIVSPFLSGFIANHLKEYNNKKEEAFSAEGIMDLNNKLAQYRNEKGELKPHTPISTVKIYYKDPSKNKKKKDEEDLSLQKLDREKAFNEKLYVKTGDNYLFAVLEGEIKTKKTSQIKRLYDIISFFDATNFLKEEFRNAPDKKTFDKDLLFRQYFEERNKAKLLFTLKQGDFVYLPNENEEVILDKESPLYNQYWGDLKERGKNIYVVQKFSKKQIYFIKHTIADIIKKDVEFGSQNCYETVEGRSIKENCFKLEIDRLGNIVKVIKR

SEQ ID NO: 93 - protein, 1430 aa, Bergeyella zoohelcum
  Bergeyella zoohelcum CCUG 30536
MKHILGLDLGTNSIGWAVVKEAQNDNEQSEIVDVGVRVNPLTTDEKTNFEKGKPISTNADRTLKRSARRNLQRYKLRRKELIELLKEHQLISTDTILTENGKGTTFQTLELRAKSAKEKISLEELARVFLTINKKRGYKSSRKAKNEDEGQLIDGMEIAKRLYEENLTTGQLSLQLLKEGKKSLPDYYRSDLQFELDKVWNFQKQFHSDILTDEFYAQLKGKGQRATSALFLAKYQIYTAENKGSREDKKLQAYQWRVDALSKELTREQLAFVITEINNNLNNSSGYLGAISDRSKELYFNNETVGEYLWKQIAANPHTSLKNQVFYRQDYLDEFEQIWKTQSAFYPEILTDELKKELRDVVIFYQRKLKSQKSLVSFCEFENKEIEIKKEDGTSTKKVIGLKVAPKSSPLFQEFKIWQNLNNVLIRKKGSKTKKVAKNQQAVLFEEEKTISELDLEAKQALFNELNLKGNLKADYCLEILGYSPKEWEMNYSVLEGNRTNKALYEAYLKITDLEGYDAKNHLKVKLNKDEVELDDLKVPASEIKDMVQAIFKEAGINTDILHFNAELDGKDFENQASYQLWHLLYSYEGDDSKSGNELLYKLLETKFGFKKEYAQILANVSLSDDYGSLSTKAMRKIHPYIKENKFSTACELAGYRHSKHSLTKEENDNRVLKDSLEVLKKNSLRQPVVEKILNQMINLVNALLKKYRTENPNFKFDEIRIELARELKKNAEERANMTANINKAKTEHEKIIKILKNEFGLPNPTRNDIIRYRLYEELKANGYKDLYTNIKIPQEKLFTKEIDIEHIIPKSRVFDDSFSNKTLSFRKTNLDKGERTAFDYMESKFGADKLEEYVARVEDLYKNNIISKAKYQKLLKKESEIGDGFVERDLRETQYIAKKAKEILLQITPNVLSTSGGITDRLREDWDLINVMKELNLPKYRALGLTQMEDRKYGQQVEVITDWTKRNDHRHHAMDALTVAFTKHNHIQYLNYLNARKNEKHKEHSNIMGIQQLETIKVTDKNGNEKRVFKAPMPNFRQVTKAFLENILISHKAKNKVVTKNKNKVAGSNKVQEVLTPRGQLHKETVYGKYQYYVQKEEKIGAKFDLETIKKVANPLYQSLLKKRLEENGGDPKKAFTGKNSLAKNPIYLDDTQTEQLPEKVKLVWLENSFSIRKDITPENFKDEKLIDKILDEGVKRILKERLQSFGNDAKKAFSDLDKNPIWLNKEKGITIKRVTISGVANAEPLHTKKDHLGKEILDKEGKPIPVDFISTGSNHHVAVYRDEKGNLQEKVVSVFEAVVRANQGLPIIDKTYNQHLGWEFLFTMKQNEMFVFPNESTGFNPNDIDLLDPKNKRIISPNLFRVQKFSKLQYGNSFVREFVFRHHLETTVEDRKELQGITYKQMKNSTFFNDIIKVRINHLGDIVSIGEY

SEQ ID NO: 94 - protein, 1420 aa, Bifidobacterium bifidum
MSRKNYVDDYAISLDIGNASVGWSAFTPNYRLVRAKGHELIGVRLFDPADTAESRRMARTTRRRYSRRRWRLRLLDALFDQALSEIDPSFLARRKYSWVHPDDENNADCWYGSVLFDSNEQDKRFYEKYPTIYHLRKALMEDDSQHDIREIYLAIHHMVKYRGNFLVEGTLESSNAFKEDELLKLLGRITRYEMSEGEQNSDIEQDDENKLVAPANGQLADALCATRGSRSMRVDNALEALSAVNDLSREQRAIVKAIFAGLEGNKLDLAKIFVSKEFSSENKKILGIYFNKSDYEEKCVQIVDSGLLDDEEREFLDRMQGQYNAIALKQLLGRSTSVSDSKCASYDAHRANWNLIKLQLRTKENEKDINENYGILVGWKIDSGQRKSVRGESAYENMRKKANVFFKKMIETSDLSETDKNRLIHDIEEDKLFPIQRDSDNGVIPHQLHQNELKQIIKKQGKYYPFLLDAFEKDGKQINKIEGLLTFRVPYFVGPLVVPEDLQKSDNSENHWMVRKKKGEITPWNFDEMVDKDASGRKFIERLVGTDSYLLGEPTLPKNSLLYQEYEVLNELNNVRLSVRTGNHWNDKRRMRLGREEKTLLCQRLFMKGQTVTKRTAENLLRKEYGRTYELSGLSDESKFTSSLSTYGKMCRIFGEKYVNEHRDLMEKIVELQTVFEDKETLLHQLRQLEGISEADCALLVNTHYTGWGRLSRKLLTTKAGECKISDDFAPRKHSIIEIMRAEDRNLMEIITDKQLGFSDWIEQENLGAENGSSLMEVVDDLRVSPKVKRGIIQSIRLIDDISKAVGKRPSRIFLELADDIQPSGRTISRKSRLQDLYRNANLGKEFKGIADELNACSDKDLQDDRLFLYYTQLGKDMYTGEELDLDRLSSAYDIDHIIPQAVTQNDSIDNRVLVARAENARKTDSFTYMPQIADRMRNFWQILLDNGLISRVKFERLTRQNEFSEREKERFVQRSLVETRQIMKNVATLMRQRYGNSAAVIGLNAELTKEMHRYLGFSHKNRDINDYHHAQDALCVGIAGQFAANRGFFADGEVSDGAQNSYNQYLRDYLRGYREKLSAEDRKQGRAFGFIVGSMRSQDEQKRVNPRTGEVVWSEEDKDYLRKVMNYRKMLVTQKVGDDFGALYDETRYAATDPKGIKGIPFDGAKQDTSLYGGFSSAKPAYAVLIESKGKTRLVNVTMQEYSLLGDRPSDDELRKVLAKKKSEYAKANILLRHVPKMQLIRYGGGLMVIKSAGELNNAQQLWLPYEEYCYFDDLSQGKGSLEKDDLKKLLDSILGSVQCLYPWHRFTEEELADLHVAFDKLPEDEKKNVITGIVSALHADAKTANLSIVGMTGSWRRMNNKSGYTFSDEDEFIFQSPSGLFEKRVTVGELKRKAKKEVNSKYRTNEKRLPTLSGASQP

SEQ ID NO: 95 - protein, 1138 aa, Bifidobacterium dentium
MLCRCHRRYRIGIDVGLMSVGLAAIEVDETGFPIRILNIQSVIHDGGIDPQLGKKKSISRKAISGVARRTRRMRRRKVVRLRQLDATLESLGFPIVEPDSLDTWEIWLTRAKLASSYIQDDETRKEDVSIALRHIARHRGWRNPYSNVESLFVDVAPSEQYEELRRKAEEKLGTSLSGNPTSAEIVECILKRQVGEVQLRTRSRKGVNGNAVEKEGLLPTKLMQSDNAAEIRRIFKVQRIDDETGRKLLRAVFKACSPKGSVERRVGRDALAPGLPRALKASLAFQEYRIANVLTNLVISEDGTKRKLTIAEKQRVFGFLSSNETDDITWIDVAEKLGLERRQIQGVGCLTADGEERISSTPPRNITALHIHSAKPVIREKLVAWWKAASPTVRETMVELLSNTVDIDRVREDMDYSSAVAFIDSLGDEELTALDSVDLLSGRAAYSRQTLKQLTERMLNTDDDLHEARKAVFGVDDNWKPPVDAISTSVGNPAVDRVLKIVNRYLLACQKRWRNPQSVQIEHVRESFSSVAKAKETERVQGERARYRNDLRRELCEQEGLNKIRESDIRRWESVQRQNGTCLYCGSPITFRTCEMDHIVPRKGVGSTNTRVNLAAACAACNKLKSNTAFSVWARTEGAANRKVSQRDAIERVKTFIFNKSVPPREQRAFKQAVISRLRQAESDPAIDNRSIESVAWMADELHRRIEAYFNQDADVSGNTPATQVWVFQGRVTALARKASGIEGRIHFAGEWKKTRLDRRHHAVDAAVIAMMNHSAAQTLVERDSLRLSQWITRKPETWKNYPFSEGQKKTRFKEWLDCMNALLDLLNDALDSDRVPVTRCQRMSLGNSQAHAATIRKMKRVELFSPMDADLIRRASTPALYCALTRLPEYSPEKGLPENRGREIVLNGRHIRSTETVDFFASGAAQLMVRNGSAEIGDSIHHMRIYRYRKTGAKSQEYVYGMIRVFQIDLLHASSENLFAVQLPSQSVSVRYGDKNVVQAIQEGRAEYLGHIVPNDEILISYEGVRMKDSEKIGAYANDFSGTASELAQRRHWVVVGSDVSKLALRPSYLSEEGLENSGSESERLSKQTRKVIEGKGWVVAVNILAKYHPVVIRRNALGEPRFRTNSGMPVSWRWDR

SEQ ID NO: 96 - protein, 1187 aa, Bifidobacterium longum
MLSRQLLGASHLARPVSYSYNVQDNDVHCSYGERCFMRGKRYRIGIDVGLNSVGLAAVEVSDENSPVRLLNAQSVIHDGGVDPQKNKEAITRKNMSGVARRTRRMRRRKRERLHKLDMLLGKFGYPVIEPESLDKPFEEWHVRAELATRYIEDDELRRESISIALRHMARHRGWRNPYRQVDSLISDNPYSKQYGELKEKAKAYNDDATAAEEESTPAQLVVAMLDAGYAEAPRLRWRTGSKKPDAEGYLPVRLMQEDNANELKQIFRVQRVPADEWKPLFRSVFYAVSPKGSAEQRVGQDPLAPEQARALKASLAFQEYRIANVITNLRIKDASAELRKLTVDEKQSIYDQLVSPSSEDITWSDLCDFLGFKRSQLKGVGSLTEDGEERISSRPPRLTSVQRIYESDNKIRKPLVAWWKSASDNEHEAMIRLLSNTVDIDKVREDVAYASAIEFIDGLDDDALTKLDSVDLPSGRAAYSVETLQKLTRQMLTTDDDLHEARKTLFNVTDSWRPPADPIGEPLGNPSVDRVLKNVNRYLMNCQQRWGNPVSVNIEHVRSSFSSVAFARKDKREYEKNNEKRSIFRSSLSEQLRADEQMEKVRESDLRRLEAIQRQNGQCLYCGRTITFRTCEMDHIVPRKGVGSTNTRTNFAAVCAECNRMKSNTPFAIWARSEDAQTRGVSLAEAKKRVTMFTFNPKSYAPREVKAFKQAVIARLQQTEDDAAIDNRSIESVAWMADELHRRIDWYFNAKQYVNSASIDDAEAETMKTTVSVFQGRVTASARRAAGIEGKIHFIGQQSKTRLDRRHHAVDASVIAMMNTAAAQTLMERESLRESQRLIGLMPGERSWKEYPYEGTSRYESFHLWLDNMDVLLELLNDALDNDRIAVMQSQRYVLGNSIAHDATIHPLEKVPLGSAMSADLIRRASTPALWCALTRLPDYDEKEGLPEDSHREIRVHDTRYSADDEMGFFASQAAQIAVQEGSADIGSAIHHARVYRCWKTNAKGVRKYFYGMIRVFQTDLLRACHDDLFTVPLPPQSISMRYGEPRVVQALQSGNAQYLGSLVVGDEIEMDFSSLDVDGQIGEYLQFFSQFSGGNLAWKHWVVDGFFNQTQLRIRPRYLAAEGLAKAFSDDVVPDGVQKIVTKQGWLPPVNTASKTAVRIVRRNAFGEPRLSSAHHMPCSWQWRHE

SEQ ID NO: 97 - protein, 1124 aa, Bifidobacterium longum
  Bifidobacterium longum subsp. longum 2-2B
LTGHSGHTFWPTSSSPPIQLEQEKRPLPQRNTSQNGHTFWPITRERCFMRGKRYRIGIDVGLNSVGLAAVEVSDENSPVRLLNAQSVIHDGGVDPQKNKEAITRKNMSGVARRTRRMRRRKRERLHKLDMLLGKFGYPVIEPESLDKPFEEWHVRAELATRYIEDDELRRESISIALRHMARHRGWRNPYRQVDSLISDNPYSKQYGELKEKAKAYNDDATAAEEESTPAQLVVAMLDAGYAEAPRLRWRTGSKKPDAEGYLPVRLMQEDNANELKQIFRVQRVPADEWKPLFRSVFYAVSPKGSAEQRVGQDPLAPEQARALKASLAFQEYRIANVITNLRIKDASAELRKLTVDEKQSIYDQLVSPSSEDITWSDLCDFLGFKRSQLKGVGSLTEDGEERISSRPPRLTSVQRIYESDNKIRKPLVAWWKSASDNEHEAMIRLLSNTVDIDKVREDVAYASAIEFIDGLDDDALTKLDSVDLPSGRAAYSVETLQKLTRQMLTTDDDLHEARKTLFNVTDSWRPPADPIGEPLGNPSVDRVLKNVNRYLMNCQQRWGNPVSVNIEHVRSSFSSVAFARKDKREYEKNNEKRSIFRSSLSEQLRADEQMEKVRESDLRRLEAIQRQNGQCLYCGRTITFRTCEMDHIVPRKGVGSTNTRTNFAAVCAECNRMKSNTPFAIWARSEDAQTRGVSLAEAKKRVTMFTFNPKSYAPREVKAFKQAVIARLQQTEDDAAIDNRSIESVAWMADELHRRIDWYFNAKQYVNSASIDDAEAETMKTTVSVFQGRVTASARRAAGIEGKIHFIGQQSKTRLDRRHHAVDASVIAMMNTAAAQTLMERESLRESQRLIGLMPGERSWKEYPYEGTSRYESFHLWLDNMDVLLELLNDALDNDRIAVMQSQRYVLGNSIAHDATIHPLEKVPLGSAMSADLIRRASTPALWCALTRLPDYDEKEGLPEDSHREIRVHDTRYSADDEMGFFASQAAQIAVQEGSADIGSAIHHARVYRCWKTNAKGVRKYFYGMIRVFQTDLLRACHDDLFTVPLPPQSISMRYGEPRVVQALQSGNAQYLGSLVVGDEIEMDFPVSMLMVRLASIYNSSRSLVEGTLHGNIGLLMDSLTRRS

SEQ ID NO: 98 - protein, 1138 aa, Bifidobacterium sp.
MNSVGLAAVEVSDENSPVRLLNAQSVIHDGGVDPQKNKEAITRKNMSGVARRTRRMRRRKRERLHKLDMLLGKFGYPVIEPESLDKPFEEWHVRAELATRYIEDDELRRESISIALRHMARHRGWRNPYRQVDSLISDNPYSKQYGELKEKAKAYNDDATAAEEESTPAQLVVAMLDAGYAEAPRLRWRTGSKKPDAEGYLPVRLMQEDNANELKQIFRVQRVPADEWKPLFRSVFYAVSPKGSAEQRVGQDPLAPEQARALKASLAFQEYRIANVITNLRIKDASAELRKLTVDEKQSIYDQLVSPSSEDITWSDLCDFLGFKRSQLKGVGSLTEDGEERISSRPPRLTSVQRIYESDNKIRKPLVAWWKSASDNEHEAMIRLLSNTVDIDKVREDVAYASAIEFIDGLDDDALTKLDSVDLPSGRAAYSVETLQKLTRQMLTTDDDLHEARKTLFNVTDSWRPPADPIGEPLGNPSVDRVLKNVNRYLMNCQQRWGNPVSVNIEHVRSSFSSVAFARKDKREYEKNNEKRSIFRSSLSEQLRADEQMEKVRESDLRRLEAIQRQNGQCLYCGRTITFRTCEMDHIVPRKGVGSTNTRTNFAAVCAECNRMKSNTPFAIWARSEDAQTRGVSLAEAKKRVTMFTFNPKSYAPREVKAFKQAVIARLQQTEDDAAIDNRSIESVAWMADELHRRIDWYFNAKQYVNSASIDDAEAETMKTTVSVFQGRVTASARRAAGIEGKIHFIGQQSKTRLDRRHHAVDASVIAMMNTAAAQTLMERESLRESQRLIGLMPGERSWKEYPYEGTSRYESFHLWLDNMDVLLELLNDALDNDRIAVMQSQRYVLGNSIAHDATIHPLEKVPLGSAMSADLIRRASTPALWCALTRLPDYDEKEGLPEDSHREIRVHDTRYSADDEMGFFASQAAQIAVQEGSADIGSAIHHARVYRCWKTNAKGVRKYFYGMIRVFQTDLLRACHDDLFTVPLPPQSISMRYGEPRVVQALQSGNAQYLGSLVVGDEIEMDFSSLDVDGQIGEYLQFFSQFSGGNLAWKHWVVDGFFNQTQLRIRPRYLAAEGLAKAFSDDVVPDGVQKIVTKQGWLPPVNTASKTAVRIVRRNAFGEPRLSSAHHMPCSWQWRHE

SEQ ID NO: 99 - protein, 1151 aa, Bifidobacterium sp.
  Bifidobacterium sp. 12_1_47BFAA
MRGKRYRIGIDVGLNSVGLAAVEVSDENSPVRLLNAQSVIHDGGVDPQKNKEAITRKNMSGVARRTRRMRRRKRERLHKLDMLLGKFGYPVIEPESLDKPFEEWHVRAELATRYIEDDELRRESISIALRHMARHRGWRNPYRQVDSLISDNPYSKQYGELKEKAKAYNDDATAAEEESTPAQLVVAMLDAGYAEAPRLRWRTGSKKPDAEGYLPVRLMQEDNANELKQIFRVQRVPADEWKPLFRSVFYAVSPKGSAEQRVGQDPLAPEQARALKASLAFQEYRIANVITNLRIKDASAELRKLTVDEKQSIYDQLVSPSSEDITWSDLCDFLGFKRSQLKGVGSLTEDGEERISSRPPRLTSVQRIYESDNKIRKPLVAWWKSASDNEHEAMIRLLSNTVDIDKVREDVAYASAIEFIDGLDDDALTKLDSVDLPSGRAAYSVETLQKLTRQMLTTDDDLHEARKTLFNVTDSWRPPADPIGEPLGNPSVDRVLKNVNRYLMNCQQRWGNPVSVNIEHVRSSFSSVAFARKDKREYEKNNEKRSIFRSSLSEQLRADEQMEKVRESDLRRLEAIQRQNGQCLYCGRTITFRTCEMDHIVPRKGVGSTNTRTNFAAVCAECNRMKSNTPFAIWARSEDAQTRGVSLAEAKKRVTMFTFNPKSYAPREVKAFKQAVIARLQQTEDDAAIDNRSIESVAWMADELHRRIDWYFNAKQYVNSASIDDAEAETMKTTVSVFQGRVTASARRAAGIEGKIHFIGQQSKTRLDRRHHAVDASVIAMMNTAAAQTLMERESLRESQRLIGLMPGERSWKEYPYEGTSRYESFHLWLDNMDVLLELLNDALDNDRIAVMQSQRYVLGNSIAHDATIHPLEKVPLGSAMSADLIRRASTPALWCALTRLPDYDEKEGLPEDSHREIRVHDTRYSADDEMGFFASQAAQIAVQEGSADIGSAIHHARVYRCWKTNAKGVRKYFYGMIRVFQTDLLRACHDDLFTVPLPPQSISMRYGEPRVVQALQSGNAQYLGSLVVGDEIEMDFSSLDVDGQIGEYLQFFSQFSGGNLAWKHWVVDGFFNQTQLRIRPRYLAAEGLAKAFSDDVVPDGVQKIVTKQGWLPPVNTASKTAVRIVRRNAFGEPRLSSAHHMPCSWQWRHE

SEQ ID NO: 100 - protein, 1092 aa, Brevibacillus laterosporus
  Brevibacillus laterosporus GI-9
MAYTMGIDVGIASCGWAIVDLERQRIIDIGVRTFEKAENPKNGEALAVPRREARSSRRRLRRKKHRIERLKYMFVRNGLAVDIQHLEQTLRSQNEIDVWQLRVDGLDRMLTQKEWLRVLIHLAQRRGFQSNRKTDGSSEDGQVLVNVTENDRLMEEKDYRTVAEMMVKDEKFSDHKRNKNGNYHGVVSRASLLVEIHTLFESQRQHHNFLASKDFELEYINIWSSQRPVATKDQIEKMIGTCTFLPKEKRAPKASWHFQYFMLLQTINHIRITNAQGTRPLNKEEIEQVVNMALTKSKVSYHDIRKVLDLSEEYQFVGLDYGKEDEKKKVESKETIIKLDDYHKLNKIFNEVELAKGETWEAVDYDTVAYALTFFKDDEDIRDYLQNKYKDSKNRLVKNVANKEYTNELIEKVSTLSFRKVGHLSLKALRKIIPFLEQGMTYDKACQAAGFNFQGISKKKRSVVLPVIDQISNPVVNRALTQTRKVINALIKKYGSPETIHIETARELSKRFDERKNITKDYKENRDKNERAKKHLSELGIINPTGLDIVKYKLWCEQQGRCMYSNQPISFERLRESGYTEVDHIIPYSRSMNDSYNNRVLVMTRENREKSNQTPYEYMGNDTQRWDEFEQRVTTNPQIKKEKRQNLLLKGFTNRRELEMLERNLNDTRHITKYLSHFISTNLEFSPSDKKKKVVNTSGRITSHLRSRWGLEKNREQNDLHHAMDAVVIAVTSDSFIQQVTNYYKRKERRELNGDDKFPLPWKFFREEVIARLSPNPKEQIEALPNHFYSEDELADLQPIFVSRMPKRSITGEAHQAQFRRVVGKTKEGKNITAKKTALVDISYDKNGDFNMYGRETDPATYEAIKERYLEFGGNAKKAFSTDLHKPKKDGTKGPLIKSVRIMENKTLVHPVNKGKGVVYNSSIVRTDVFQRKEKYYLLPVYVTDVTKGKLPNKVIAAKKGYDDWIEVDDSFTFLYSLYPNDLIFIRQNPKKKISLKKRIESHSISDSKEVQEILTYYKGVDSSTAAIEFITHDGSYYAKGVGVQNLDCFEKYQVDILGNYSKVKGEKRLELETSDNNHKGKDVNSIKSTSR

SEQ ID NO: 101 - protein, 1428 aa, Burkholderiales bacterium
  Burkholderiales bacterium 1_1_47
MGKTHIIGVGLDLGGTYTGTFITSHPSDEAEHRDHSSAFTVVNSEKLSFSSKSRTAVRHRVRSYKGFDLRRRLLLLVAEYQLLQKKQTLAPEERENLRIALSGYLKRKGYARTEAETDTSVLESLDPSVFSSAPSFTNFFNDSEPLNIQWEAIANSPETTKALNKELSGQKEADFKKYIKTSFPEYSAKEILANYVEGRRAILDASKYIANLQSLGHKHRSKYLSDILQDMKRDSRITRLSEAFGSTDNLWRIIGNISNLQERAVRWYFNDAKFEQGQEQLDAVKLKNVLVRALKYLRSDDKEWSASQKQIIQSLEQSGDVLDVLAGLDPDRTIPPYEDQNNRRPPEDQTLYLNPKALSSEYGEKWKSWANKFAGAYPLLTEDLTEILKNTDRKSRIKIRSDVLPDSDYRLAYILQRAFDRSIALDECSIRRTAEDFENGVVIKNEKLEDVLSGHQLEEFLEFANRYYQETAKAKNGLWFPENALLERADLHPPMKNKILNVIVGQALGVSPAEGTDFIEEIWNSKVKGRSTVHSICNAIENERKTYGPYFSEDYKFVKTALKEGKTEKELSKKFAAVIKVLKMVSEVVPFIGKELRLSDEAQSKFDNPYSLAQLYNLIETERNGFSKVSLAAHLENAWRMTMTDGSAQCCRLPADCVRPFDGFIRKAIDRNSWEVAKRIAEEVKKSVDFTNGTVKIPVAIEANSFNFTASLTDLKYIQLKEQKLKKKLEDIQRNEENQEKRWLSKEERIRADSHGICAYTGRPLDDVGEIDHIIPRSLTLKKSESIYNSEVNLIFVSAQGNQEKKNNIYLLSNLAKNYLAAVFGASDLSQITNEIESTVLQLKAAGRLGYFDLLSEKERACARHALFLNSDSEARRAVIDVLGSRRKASVNGTQAWFVRSIFSKVRQALAAWTQETGNELIFDAISVPAADSSEMRKRFAEYRPEFRKPKVQPVASHSIDAMCIYLAACSDPFKTKRMGSQLAIYEPINFDNLFTGSCQVIQNTPRNFSDKTNIANSPIFKETIYAERFLDIIVSRGEIFIGYPSNMPFEEKPNRISIGGKDPFSILSVLGAYLDKAPSSEKEKLTIYRVVKNKAFELFSKVAGSKFTAEEDKAAKILEALHFVTVKQDVAATVSDLIKSKKELSKDSIENLAKQKGCLKKVEYSSKEFKFKGSLIIPAAVEWGKVLWNVFKENTAEELKDENALRKALEAAWPSSFGTRNLHSKAKRVFSLPVVATQSGAVRIRRKTAFGDFVYQSQDTNNLYSSFPVKNGKLDWSSPIIHPALQNRNLTAYGYRFVDHDRSISMSEFREVYNKDDLMRIELAQGTSSRRYLRVEMPGEKFLAWFGENSISLGSSFKFSVSEVFDNKIYTENAEFTKFLPKPREDNKHNGTIFFELVGPRVIFNYIVGGAASSLKEIFSEAGKERS

SEQ ID NO: 102 - protein, 1442 aa, Caenispirillum salinarum
  Caenispirillum salinarum AK4
MPVLSPLSPNAAQGRRRWSLALDIGEGSIGWAVAEVDAEGRVLQLTGTGVTLFPSAWSNENGTYVAHGAADRAVRGQQQRHDSRRRRLAGLARLCAPVLERSPEDLKDLTRTPPKADPRAIFFLRADAARRPLDGPELFRVLHHMAAHRGIRLAELQEVDPPPESDADDAAPAATEDEDGTRRAAADERAFRRLMAEHMHRHGTQPTCGEIMAGRLRETPAGAQPVTRARDGLRVGGGVAVPTRALIEQEFDAIRAIQAPRHPDLPWDSLRRLVLDQAPIAVPPATPCLFLEELRRRGETFQGRTITREAIDRGLTVDPLIQALRIRETVGNLRLHERITEPDGRQRYVPRAMPELGLSHGELTAPERDTLVRALMHDPDGLAAKDGRIPYTRLRKLIGYDNSPVCFAQERDTSGGGITVNPTDPLMARWIDGWVDLPLKARSLYVRDVVARGADSAALARLLAEGAHGVPPVAAAAVPAATAAILESDIMQPGRYSVCPWAAEAILDAWANAPTEGFYDVTRGLFGFAPGEIVLEDLRRARGALLAHLPRTMAAARTPNRAAQQRGPLPAYESVIPSQLITSLRRAHKGRAADWSAADPEERNPFLRTWTGNAATDHILNQVRKTANEVITKYGNRRGWDPLPSRITVELAREAKHGVIRRNEIAKENRENEGRRKKESAALDTFCQDNTVSWQAGGLPKERAALRLRLAQRQEFFCPYCAERPKLRATDLFSPAETEIDHVIERRMGGDGPDNLVLAHKDCNNAKGKKTPHEHAGDLLDSPALAALWQGWRKENADRLKGKGHKARTPREDKDFMDRVGWRFEEDARAKAEENQERRGRRMLHDTARATRLARLYLAAAVMPEDPAEIGAPPVETPPSPEDPTGYTAIYRTISRVQPVNGSVTHMLRQRLLQRDKNRDYQTHHAEDACLLLLAGPAVVQAFNTEAAQHGADAPDDRPVDLMPTSDAYHQQRRARALGRVPLATVDAALADIVMPESDRQDPETGRVHWRLTRAGRGLKRRIDDLTRNCVILSRPRRPSETGTPGALHNATHYGRREITVDGRTDTVVTQRMNARDLVALLDNAKIVPAARLDAAAPGDTILKEICTEIADRHDRVVDPEGTHARRWISARLAALVPAHAEAVARDIAELADLDALADADRTPEQEARRSALRQSPYLGRAISAKKADGRARAREQEILTRALLDPHWGPRGLRHLIMREARAPSLVRIRANKTDAFGRPVPDAAVWVKTDGNAVSQLWRLTSVVTDDGRRIPLPKPIEKRIEISNLEYARLNGLDEGAGVTGNNAPPRPLRQDIDRLTPLWRDHGTAPGGYLGTAVGELEDKARSALRGKAMRQTLTDAGITAEAGWRLDSEGAVCDLEVAKGDTVKKDGKTYKVGVITQGIFGMPVDAAGSAPRTPEDCEKFEEQYGIKPWKAKGIPLA

SEQ ID NO: 103 - protein, 984 aa, Campylobacter coli
  Campylobacter coli 1098
MARILAFDIGISSIGWAFSENDELKDCGVRIFTKAENPKTGESLALPRRLARSARKRLARRKARLNHLKHLIANEFKLNYEDYQSFDESLAKAYKGSLISPYELRFRALNELLSKQDFARVILHIAKRRGYDDIKNNGDEEKSEILKAIKQNEEKLVNYQSVGEYLYKEYFQKFKENSKEFINVRNKKESYERCIAQSFLKDELKLIFQKQREFGFSFSKKFEEEVLSVAFYKRALKDFSHLVGNCSFFTDEKRAPKNSPLAFMFVALTRIINLLNNLKNTEGILYTKDDLNALLNEVLKNGTLTYKQTKKLLGLSDDYEFKGEKGTYFIEFKKYKEFIKALGEHNLSQDDLNEIAKDITLIKDEIKLKKALAKYDLNQNQIDSLSKLEFKDHLNISFKALKLITPLMLEGKKYDEACNELNLKVAINEDKKDFLPAFNETYYKDEVTNPVVLRAIKEYRKVLNALLKKYGKVHKINIELAREVGKNYSQRAKIEKEQNENYKAKKDAELECEKLGLKINSKNILKLRLFKEQKEFCAYSGEKIKISDLQDEKMLEIDHIYPYSRSFDDSYMNKVLVFTKQNQEKLNQTPFEAFGNDSAKWQKIEVLAKNLPTKKQKRILDKNYKDKEQKNFKDRNLNDTRYIARLVLNYTKDYLDFLPLSDDENTKLNDTQKGSKVHVEAKSGMLTSALRHTWGFSAKDRNNHLHHAIDAVIIAYANNSIVKAFSDFKKEQESNSAELYAKKISELDYKNKRKFFEPFSGFRQKVLDKIDEIFVSKPERKKPSGALHEETFRKEEEFYQSYGGKEGVLKALELGKIRKVNGKIVKNGDMFRVDIFKHKKTNKFYAVPIYTMDFALKVLPNKAVARSKKGEIKDWILMDENYEFCFSLYKDSLILIQTKDMQEPEFVYYNAFTSSTVSLIVSKHDNKFETLSKNQKILFKNANEKEVIAKSIGIQNLKVFEKYIVSALGEVTKAEFRQREDFKK

SEQ ID NO: 104 - protein, 984 aa, Campylobacter coli
  Campylobacter coli 111-3
MARILAFDIGISSIGWAFSENDELKDCGVRIFTKAENPKTGESLALPRRLARSARKRLARRKARLNHLKHLIANEFKLNYEDYQSFDESLAKAYKGSLISPYELRFRALNELLSKQDFARVILHIAKRRGYDDIKNNGDEEKSEILKAIKQNEEKLVNYQSVGEYLYKEYFQKFKENSKEFINVRNKKESYERCIAQSFLKDELKLIFQKQREFGFSFSKKFEEEVLSVAFYKRALKDFSHLVGNCSFFTDEKRAPKNSPLAFMFVALTRIINLLNNLKNTEGILYTKDDLNTLLNEVLKNGTLTYKQTKKLLGLSDDYEFKGEKGTYFIEFKKYKEFIKALGEHNLSQDNLNEIAKDITLIKDEIKLKKALAKYDLNQNQIDSLSKLEFKDHLNISFKALKLITPLMLEGKKYDEAYNELNLKVAINEDKKDFLPAFNETYYKDEVTNPVVLRAIKEYRKVLNALLKKYGKVHKINIELAREVGKNHSQRAKIEKEQNENYKAKKDAELECEKLGLKINSKNILKLRLFKEQKEFCAYSGEKIKISDLQDEKMLEIDHIYPYSRSFDDSYMNKVLVFTKQNQEKLNQTPFEAFGNDSAKWQKIEVLAKNLPTKKQKRILDKNYKDKEQKDFKDRNLNDTRYIARLVLNYTKDYLDFLPLSDDENTKLNDTQKGSKVHVEAKSGMLTSALRHTWGFSAKDRNNHLHHAIDAVIIAYANNSIVKAFSDFKKEQESNSAELYAKKISELDYKNKRKFFEPFSGFRQKVLDKIDEIFVSKPERKKPSGALHEETFRKEEEFYQSYGGKEGVLKALELGKIRKVNGKIVKNGDMFRVDIFKHKKTNKFYAVPIYTMDFALKVLPNKAVARSKKGEIKDWILMDENYEFCFSLYKDSLILIQTKDMQEPELVYFNAFTSSTVSLIVSKHDNKFETLSKNQKILFKNANEKEVIAKSIGIQNLKVFEKYIVSALGEVTKAEFRQREDFKK

SEQ ID NO: 105 - protein, 987 aa, Campylobacter coli
  Campylobacter coli 132-6
MARILAFDIGISSIGWAFSENDELKDCGVRIFTKAENPKTGESLALPRRLARSARKRLARRKARLNHLKHLIANEFKLNYEDYQSFDESLAKAYKGSLISPYELRFRALNELLSKQDFARVILHIAKRRGYDDIKNNGDEEKSEILKAIKQNEEKLVNYQSVGEYLYKEYFQKFKENSKEFINVRNKKESYERCIAQSFLKDELKLIFQKQREFGFSFSKKFEEEVLSVAFYKRALKDFSHLVGNCSFFTDEKRAPKNSPLAFMFVALTRIINLLNNLKNTEGILYTKDDLNTLLNEVLKNGTLTYKQTKKLLGLSDDYEFKGEKGTYFIEFKKYKEFIKALGEHNLSQDNLNEIAKDITLIKDEIKLKKALAKYDLNQNQIDSLSKLEFKDHLNISFKALKLITPLMLEGKKYDEAYNELNLKVAINEDKKDFLPAFNETYYKDEVTNPVVLRAIKEYRKVLNALLKKYGKVHKINIELAREVGKNHSQRAKIEKEQNENYKAKKDAELECEKLGLKINSKNILKLRLFKEQKEFCAYSGEKIKISDLQDEKMLEIDHIYPYSRSFDDSYMNKVLVFTKQNQEKLNQTPFEAFGNDSAKWQKIEVLAKNLPTKKQKRILDKNYKDKEQKDFKDRNLNDTRYIARLVLNYTKDYLDFLPLSDDENTKLNDTQKGSKVHVEAKSGMLTSALRHTWGFSAKDRNNHLHHAIDAVIIAYANNSIVKAFSDFKKEQESNSAELYAKKISELDYKNKRKFFEPFSGFRQKVLDKIDEIFVSKPERKKPSGALHEETFRKEEEFYQSYGGKEGVLKALELGKIRKVNGKIVKNGDMFRVDIFKHKKTNKFYAVPIYTMDFALKVLPNKAVARSKKGEIKDWILMDENYEFCFSLYKDSLILIQTKDMQEPELVYFNAFTSSTVSLIVSKHDNKFETLSKNQKILFKNANEKEVIAKSIGIQNLKVFEKYIVSALGEVTKAEFRQREDFKNELR

SEQ ID NO: 106 - protein, 984 aa, Campylobacter coli
  Campylobacter coli 151-9
MARILAFDIGISSIGWAFSENDELKDCGVRIFTKAENPKTGESLALPRRLARSARKRLARRKARLNHLKHLIANEFKLNYEDYQSFDESLAKAYKGSLISPYELRFRALNELLSKQDFARVILHIAKRRGYDDIKNNGDEEKSEILKAIKQNEEKLVNYQSVGEYLYKEYFQKFKENSKEFINVRNKKESYERCIAQSFLKDELKLIFQKQREFGFSFSKKFEEEVLSVAFYKRALKDFSHLVGNCSFFTDEKRAPKNSPLAFMFVALTRIINLLNNLKNTEGILYTKDDLNTLLNEVLKNGTLTYKQTKKLLGLSDDYEFKGEKGTYFIEFKKYKEFIKALGEHNLSQDNLNEIAKDITLIKDEIKLKKALAKYDLNQNQIDSLSKLEFKDHLNISFKALKLITPLMLEGKKYDEAYNELNLKVAINEDKKDFLPAFNETYYKDEVTNPVVLRAIKEYRKVLNALLKKYGKVHKINIELAREVGKNHSQRAKIEKEQNENYKAKKDAELECEKLGLKINSKNILKLRLFKEQKEFCAYSGEKIKISDLQDEKMLEIDHIYPYSRSFDDSYMNKVLVFTKQNQEKLNQTPFEAFGNDSAKWQKIEVLAKNLPTKKQKRILDKNYKDKEQKDFKDRNLNDTRYIARLVLNYTKDYLDFLPLSNDENTKLNDTQKGSKVHVEAKSGMLTSALRHTWGFSAKDRNNHLHHAIDAVIIAYANNSIVKAFSDFKKEQESNSAELYAKKISELDYKNKRKFFEPFSGFRQKVLDKIDEIFVSKPERKKPSGALHEETFRKEEEFYQSYGGKEGVLKALELGKIRKVNGKIVKNGDMFRVDIFKHKKTNKFYAVPIYTMDFALKVLPNKAVARSKKGEIKDWILMDENYEFCFSLYKDSLILIQTKDMQEPELVYFNAFTSSTVSLIVSKHDNKFETLSKNQKILFKNANEKEVIAKSIGIQNLKVFEKYIVSALGEVTKAEFRQREDFKK

SEQ ID NO: 107 - protein, 984 aa, Campylobacter coli
  Campylobacter coli 1909
MARILAFDIGISSIGWAFSENDELKDCGVRIFTKAENPKTGESLALPRRLARSARKCLARRKARLNHLKHLIANEFKLNYEDYQSFDESLAKAYKGSLISPYELRFRALNELLSKQDFARVILHIAKRRGYDDIKNNGDEEKSEILKAIKQNEEKLVNYQSVGEYLYKEYFQKFKENSKEFINVRNKKESYERCIAQSFLKDELKLIFQKQREFGFSFSKKFEEEVLSVAFYKRALKDFSHLVGNCSFFTDEKRAPKNSPLAFMFVALTRIINLLNNLKNTEGILYTKDDLNALLNEVLKNGTLTYKQTKKLLGLSDDYEFKGEKGTYFIEFKKYKEFIKALGEHNLSQDDLNEIAKDITLIKDEIKLKKALAKYDLNQNQIDSLSKLEFKDHLNISFKALKLITPLMLEGKKYDEACNELNLKVAINEDKKDFLPAFNETYYKDEVTNPVVLRAIKEYRKVLNALLKKYGKVHKINIELAREVGKNHSQRAKIEKEQNENYKAKKDAELECEKLGLKINSKNILKLRLFKEQKEFCAYSGEKIKISDLQDEKMLEIDHIYPYSRSFDDSYMNKVLVFTKQNQEKLNQTPFEAFGNDSAKWQKIEVLAKNLPTKKQKRILDKNYKDKEQKNFKDRNLNDTRYIARLVLNYTKDYLDFLPLSDDENTKLNDTQKGSKVHVEAKSGMLTSALRHTWGFSAKDRNNHLHHAIDAVIIAYANNSIVKAFSDFKKEQESNSAELYAKKISELDYKNKRKFFEPFSGFRQKVLDKIDEIFVSKPERKKPSGALHEETFRKEEEFYQSYGGKEGVLKALELGKIRKVNGKIVKNGDMFRVDIFKHKKTNKFYAVPIYTMDFALKVLPNKAVARSKKGEIKDWILMDENYEFCFSLYKDSLILIQTKDMQEPEFVYYNAFTSSTVSLIVSKHDNKFETLSKNQKILFKNANEKEVIAKSIGIQNLKVFEKYIVSALGEVTKAEFRQREDFKK

SEQ ID NO: 108 - protein, 965 aa, Campylobacter coli
  Campylobacter coli 1957
MKIIGFNLGIANIGWALRENDEIIDCGVRVFDIPENPKNGNSLALERRENKARMKIVKRKKARMLATKTFLKKELNVDLSKLFLIGSTQSIYELRTKALSSLISKEELSAIILHIAKHRGYDDSALKNENGTIIEALNKNKEAMLKFKSVGEYFYKNFVQNKEVKKIRNTTEDYSNSVPRSLLKQELDLILDKQKELGLIKNADFKEKLFEIIFFKRPLKDFSNKIGNCIFFENEKRAAKNTISACEFVALGKVVNLLKSIEKDIGIVYEKDSINEIMSIILDKTSISYKKIRDILNLPQDINFKGLDYSKNNAENSKLVDLKKLNEFKKALGDGFANLDKDILDSIATDITLTKDTATLKEKLKNYNVLNAEQIEKLSELVFNDHINLSLKALKQIIPLMYEGKRYDEACELCNFTIAKNQEKNEYLPLFEKTRFAKDISSPVVIRAICEFRKLLNDIIRRYGSVHKIHLELTRDFGISFNDRKKIIKEIEQNEQSRIKALETIKELKLEETSKNIQIVRLFEDQKGICPYSGLKMDLKCLDELVIDYIRPYNRSLDDSYSNKILTFKKLNDLKQGKTPFEAFGEDEKLWAEINERIKEYNGKKRFKIFDKFFKDKKPFDFTEQTLQDTRWLTKLVASYLNEYLLFLPINEDENTALGYGEKGSKQHVVLSSGMITQMLRNFWYLGFKNHKDYKNNAMDAIIVAFTTNSIIFAFNNFKKELDLAKAEFYANKISESDYLLKRKFLPPFSGFKEQALEKVKNIFVSHSLKIKNKGTLHELTPLKIKELKNTYGDLDLAVKLGKIRKYNDKYYANAKGSLVRTDLFADKENKFHAVSIYKADFSTKKLPNKTPATTSNGETKEGIEMNENYNFCMSLYKNTPISVKIKGMKEPIICYYHGFNTSGSKITYKKHDNNYHNLSEDEMVVFRKNDKESIVVGKILEIKKYSISPSGELSLIENEERKWF

SEQ ID NO: 109 - protein, 984 aa, Campylobacter coli
  Campylobacter coli 2692
MARILAFDIGISSIGWAFSENDELKDCGVRIFTKAENPKTGESLALPRRLARSARKRLARRKARLNHLKHLIANEFKLNYEDYQSFDESLAKAYKGSLISPYELRFRALNELLSKQDFARVILHIAKRRGYDDIKNSDDKEKGAILKAIKQNEEKLTNYQSVGEYLYKEYFQKFKENSKEFTNVRNKKESYERCIAQSFLKDELKLIFKKQREFGFSFSKKFEEEVLSVAFYKRALKDFSHLVGNCSFFTDEKRAPKNSPLAFMFVALTRIINLLNNLKNTEGILYTKDDLNALLNEVLKNGTLTYKQTKKLLGLSDDYEFKGEKGTYFIEFKKYKEFIKALGDHSLSQDDLNEIAKDITLIKDEIKLKKALAKYDLNQNQIDSLSKLEFKDHLNISFKALKLITPLMLEGKKYDEACNELNLKVAINEDKKDFLPAFNETYYKDEVTNPVVLRAIKEYRKVLNALLKKYGKVHKINIELAREVGKNYSQRAKIEKEQNENYKAKKDAELECEKLGLKINSKNILKLRLFKEQKEFCAYSGEKIKISDLQDEKMLEIDHIYPYSRSFDDSYMNKVLVFTKQNQEKLNQTPFEAFGNDSAKWQKIEVLAKNLPTKKQKRILDKNYKDKEQKDFKDRNLNDTRYIARLVLNYTKDYLDFLPLSDDENTKLNDTQKGSKVHVEAKSGMLTSALRHTWGFSAKDRNNHLHHAIDAVIIAYANNSIVKAFSDFKKEQESNSAELYAKKISELDYKNKRKFFEPFSGFRQKVLDKIDEIFVSKPERKKPSGALHEETFRKEEEFYQSYGGKEGVLKALELGKIRKVNGKIVKNGDMFRVDIFKHKKTNKFYAVPIYTMDFALKVLPNKAVARSKKGEIKDWILMDENYEFCFSLYKDSLILIQTKDMQEPEFVYYNAFTSSTVSLIVSKHDNKFETLSKNQKILFKNANEKEVIAKSIGIQNLKVFEKYIVSALGEVTKAEFRQREDFKK

SEQ ID NO: 110 - protein, 984 aa, Campylobacter coli
  Campylobacter coli 59-2
MARILAFDIGISSIGWAFSENDELKDCGVRIFTKAENPKTGESLALPRRLARSARKRLARRKARLNHLKHLIANEFKLNYEDYQSFDESLAKAYKGSLISPYELRFRALNELLSKQDFARVILHIAKRRGYDDIKNNGDEEKGKILKAIKQNEEKLVNYQSVGEYLYKEYFQKFKENSKEFINVRNKKESYERCITQSFLKYELKLIFQKQREFGFSFSKKFEEEVLSVAFYKRALKDFSHLVGNCSFFSDEKRAPKNSPLAFMFVALTRIINLLNNLKNTEGILYTKDDLNALLNEVLKNGTLTYKQTKKLLGLSDDYEFKGEKGTYFIEFKKYKEFIKALGEHNLSQDDLNEIAKDITLIKDEIKLKKALAKYDLNQNQIDSLSKLEFKDHLNISFKALKLITPLMLEGKKYDEACNELNLKVAINEDKKDFLPAFNETYYKDEVTNPVVLRAIKEYRKVLNALLKKYGKVHKINIELAREVGKNYSQRAKIEKEQNENYKAKKDAELECEKLGLKINSKNILKLRLFKEQKEFCAYSGEKIKISDLQDEKMLEIDHIYPYSRSFDDSYMNKVLVFTKQNQEKLNQTPFEAFGNDSAKWQKIEVLAKNLPTKKQKRILDKNYKDKEQKNFKDRNLNDTRYIARLVLNYTKDYLDFLPLSDDENTKLNDTQKGSKVHVEAKSGMLTSALRHTWGFSAKDRNNHLHHAIDAVIIAYANNSIVKAFSDFKKEQESNSAELYAKKISELDYKNKRKFFEPFSGFRQKVLDKIDEIFVSKPERKKPSGALHEETFRKEEEFYQSYGGKEGVLKALELGKIRKVNGKIVKNGDMFRVDIFKHKKTNKFYAVPIYTMDFALKVLPNKAVARSKKGEIKDWILMDENYEFCFSLYKDSLILIQTKDMQEPEFVYYNAFTSSTVSLIVSKHDNKFETLSKNQKILFKNANEKEVIAKSIGIQNLKVFEKYIVSALGEVTKAEFRQREDFKK

SEQ ID NO: 111 - protein, 965 aa, Campylobacter coli
  Campylobacter coli 67-8
MKIIGFNLGIANIGWALRENDEIIDCGVRVFDIPENPKNGNSLALERRENKARMKIVKRKKARMLATKTFLKKELNVDLSKLFLIGSTQSIYELRTKALSSLISKEELSAIILHIAKHRGYDDSALKNENGTIIEALNKNKEAMLKFKSVGEYFYKNFVQNKEVKKIRNTTEDYSNSVPRSLLKQELDLILDKQKELGLIKNADFKAKLFEIIFFKRPLKDFSNKIGNCIFFENEKRAAKNTISACEFVALGKVVNLLKSIEKDIGIVYEKDSINEIMSIILDKTSISYKKIRDILNLPQDINFKGLDYSKNNAENSKLVDLKKLNEFKKALGDGFANLDKDILDSIATDITLTKDTATLKEKLKNYNVLNAEQIEKLSELVFNDHINLSLKALKQIIPLMYEGKRYDEACELCNFTIAKNQEKNEYLPLFEKTRFAKDISSPVVIRAICEFRKLLNDIIRRYGSVHKIHLELTRDFGISFNDRKKIIKEIEQNEQSRIKALETIKELKLEETSKNIQIVRLFEDQKGICPYSGLKMDLKCLDELVIDYIRPYNRSLDDSYSNKVLTFKKLNDLKQGKTPFEAFGEDEKLWAEINERIKEYNGKKRFKIFDKFFKDKKPFDFTEQTLQDTRWLTKLVASYLNEYLSFLPISEDENTALGYGEKGSKQHVVLSSGMITQMLRNFWYLGFKNHKNYKNNAMDAIIVAFTTNSIIFAFNNFKKELDLAKAEFYANKISESDYLLKRKFLPPFSGFKEQALEKVKNIFVSHSLKIKNKGTLHELTPLKIKELKNTYGDLDLAVKLGKIRKYNDKYYANTKGSLVRTDLFVDKENKFHAVSIYKADFSTKKLPNKTPATTSNGETKEGIEMNENYNFCMSLYKNTPVSVKIKGMKEPIICYYHGFNTSGSKITYKKHDNNYHNLSEDEMVVFRKNDKESIVVGKILEIKKYSISPSGELSLIENEKRKWF

SEQ ID NO: 112 - protein, 965 aa, Campylobacter coli
  Campylobacter coli 80352
MKIIGFNLGIANIGWALRENDEIIDCGVRVFDIPENPKNGNSLALERRENKARMKIVKRKKARMLATKTFLKKELNVDLSKLFLIGSTQSIYELRTKALSSLISKEELSAIILHIAKHRGYDDSALKNENGTIIEALNKNKEAMLKFKSVGEYFYKNFVQNKEVKKIRNTTEDYSNSVPRSLLKQELDLILDKQKELGLIKNADFKAKLFEIIFFKRPLKDFSNKIGNCIFFENEKRAAKNTISACEFVALGKVVNLLKSIEKDIGIVYEKDSINEIMSIILDKTSISYKKIRDILNLPQDINFKGLDYSKNNVENSKLVDLKKLNEFKKALGDGFTNLDKDILDSIATDITLTKDTATLKEKLKNYNVLNAEQIEKLSELVFNDHINLSLKALKQIIPLMYEGKRYDEACELCNFTIAKNQEKNEYLPLFEKTRFAKDISSPVVIRAICEFRKLLNDIIRRYGSVHKIHLELTRDFGISFNDRKKIIKEIEQNEQSRIKALETIKELKLEETSKNIQIVRLFEDQKGICPYSGLKMDLKCLDELVIDYIRPYNRSLDDSYSNKVLTFKKLNDLKQGKTPFEAFGEDEKLWAEINERIKEYNGKKRFKIFDKFFKDKKPFDFTEQTLQDTRWLTKLVASYLNEYLSFLPISEDENTALGYGEKGSKQHVILSSGMITQMLRNFWYLGFKNHKDYKNNAMDAIIVAFTTNSIIFTFNNFKKELDLAKAEFYANKISESDYLLKRKFLPPFSGFKEQALEKVKNIFVSHSLKIKNKGTLHELTPLKIKELKNTYGDLDLAVKLGKIRKYNDKYYANAKGSLVRTDLFADKENKFHAVSIYKADFSTKKLPNKTPATTSNGETKEGIEMNENYNFCMSLYKNTPISVKIKGMKEPIICYYHGFNTSGSKITYKKHDNNYHNLSEDEMVVFRKNDKESIVVGKILEIKKYSISPSGELSLIENEERKWF

SEQ ID NO: 113 - protein, 987 aa, Campylobacter coli
  Campylobacter coli 80352
MARILAFDIGISSIGWAFSENDELKDCGVRIFTKAENPKTGESLALPRRLARSARKRLARRKARLNHLKHLIANEFKLNYEDYQSFDESLAKAYKGSLISPYELRFRALNELLSKQDFARVILHIAKRRGYDDIKNSDDKEKGAILKAIKQNEEKLANYQSVGEYLYKEYFQKFKENSKEFTNVRNKKESYERCIAQSFLKDELKLIFKKQREFGFSFSKKFEEEVLSVAFYKRALKDFSHLVGNCSFFTDEKRAPKNSPLAFMFVALTRIINLLNNLKNTEGILYTKDDLNALLNEVLKNGTLTYKQTKKLLGLSDDYEFKGEKGTYFIEFKKYKEFIKALGDHSLSQDDLNEIAKDITLIKDEIKLKKALAKYDLNQNQIDSLSKLEFKDHLNISFKALKLITPLMLEGKKYDEACNELNLKVAINEDKKDFLPAFNETYYKDEVTNPVVLRAIKEYRKVLNALLKKYGKVHKINIELAREVGKNYSQRAKIEKEQNENYKAKKDAELECEKLGLKINSKNILKLRLFKEQKEFCAYSGEKIKISDLQDEKMLEIDHIYPYSRSFDDSYMNKVLVFTKQNQEKLNKTPFEAFGNDSTKWQKIEVLAKNLPEKKQKRILDKNYKDKEQKDFKDRNLNDTRYIARLVLNYTKDYLDFLPLSDDENTKLNDTQKGSKVHVEAKSGMLTSALRHTWGFSTKDRNNHLHHAIDAVIIAYANNSIVKAFSDFKKEQESNSAELYAKKISELDYKNKRKFFEPFSGFRQKVLDKIDEIFVSKPERKKPSGALHEETFRKEEEFYQSYGGKEGVLKALELGKIRKVNGKIVKNGDMFRVDIFKHKKTNKFYAVPIYTMDFALKVLPNKAVARSKKGEIKDWILMDENYEFCFSLYKDSLILIQTKDMQEPEFVYYNAFTSSTVSLIVSKHDNKFETLSKNQKILFKNANEKEVIAKSIGIQNLKVFEKYIVSALGEVTKAEFRQREDFKNELR

SEQ ID NO: 114 - protein, 984 aa, Campylobacter jejuni
MAKILAFDIGISSIGWAFSENDELKDCGVRIFTKAENPKTGESLALPRRIARSARKRLARRKARLNHLKHLIANEFKLNYEDYQSFDEILAKAYKGSLISPYELRFRALNELLSKQDFARVILHIAKRRGYDDIKNNGDEEKGKILKAIKQNEEKLANYQSVGEYLYKEYFQKFKENSKEFINVRNKKESYERCIAQSFLKDELKLIFKKQREFGFSFSKKFEEEVLSVAFYKRALKDFSHLVGNCSFFTDEKRAPKNSPLAFMFVALTRIINLLNNLKNTLYTKDDLNALLNEVLKNGTLTYKQTKKLLGLSDDYEFKGEKGNYFIEFKKYKEFIKALGEHSLSQDDLNEIAKDITLIKDEIKLKKALAKYDLNENQIDNLSKLEFKDHLNISFKALKLITPLMLEGKKYDEACNELTLKVAINEDKKDFLPAFNETYYKDEVTNPVVLRAIKEYRKVLNALLKKYGKVHKINIELAREVGKNHSQRAKIEKEQNENYKAKKDAELECEKLGLKINSKNILKLRLFKEQKEFCVYSGEKIKLSDLQDEKMLEIDHIYPYSRSFDDSYMNKVLVFTKQNQEKLNQTPFEAFGNDSAKWQKIEVLAKNLPTKKQKRILDKNYKDKEQKDFKDRNLNDTRYIARLVLNYTKDYLDFLPLSDDENTKLNDTQKGSKVHVEAKSGMLTSALRHTWGFSTKDRNNHLHHAIDAVIIAYANNSIVKAFSDFKKEQESNTAELYAKKISELDYKNKRKFFEPFSGFRQKVLDKIDEIFVSKPERKKPSGALHEETFRKEEEFYQSYGGKEGVLKALELGKIRKVNGKIVKNGDMFRVDIFKHKKTNKFYAVPIYTMDFALKVLPNKAVARSKKGEIKDWILMDENYEFCFSLYKDSLILIQTKDMQEPEFVYYNAFTSSTVSLIVSKHDNKFETLSKNQKILFKNANEKEVIAKSIGIQNLKVFEKYIVSALGEVTKAEFRQREEFKNELR

SEQ ID NO: 115 - protein, 987 aa, Campylobacter jejuni
  Campylobacter jejuni subsp. jejuni 110-21
MARILAFDIGISSIGWAFSENDELKDCGVRIFTKAENPKTGESLALPRRLARSARKRLARRKARLNHLKHLIANEFKLNYEDYQSFDESLAKAYKGSLISPYELRFRALNELLSKQDFARVILHIAKRRGYDNIKNSDNEEKSEILKAIKQNEEKLVNYQSVGEYLYKEYFQKFKENSKEFINVRNKKESYERCIAQSFLKDELKLIFQKQREFGLSFSKKFEEEVLSVAFYKRALKDFSHLVGNCSFFTDEKRAPKNSPLAFMFVALTRIINLLNNLKNTEGILYTKDDLNTLLNEVLKNGTLTYKQTKKLLGLSDDYEFKGEKGTYFIEFKKYKEFIKALGDHSLSQDDLNEIAKDITLIKDEIKLKKALAKYDLNQNQIDSLSKLEFKDHLNISFKALKLITPLMLEGKKYDEACNELNLKVVINEDKKDFLPAFNETYYKDEVTNPVVLRAIKEYRKVLNALLKKYGKVHKINIELAREVGKNHSQRAKIEKEQNENYKAKKDAELECEKLGLKINNKNILKLRLFKEQKEFCAYSGEKIKLSDLQDEKMLEIDHIYPYSRSFDDSYMNKVLVFTKQNQEKLNKTPFEAFGNDSTKWQKIEVLAKNLPTKKQKRILDKNYKDKEQKDFKDRNLNDTRYIARLVLNYTKDYLDFLPLSDDENTKLNDIQKGSKVHVEAKSGMLTSALRHTWGFSTKDRNNHLHHAIDAVIIAYANNSIVKAFSDFKKEQESNSAELYAKKISELDYKNKRKFFEPFSGFRQKVLDKIDEIFVSKPERKKPSGALHEETFRKEEEFYQSYGGKEGVLKALELGKIRKVNGKIVKNGDMFRVDIFKHKKTNKFYAVPIYTMDFALKVLPNKAVVQGKDKKSGLIKDWILMDENYEFCFSLYKDSLILIQTKDMQEPEFVYYNAFTSSTVSLIVSKHDNKFETLSKNQKILFKNANEKEVIAKSIGIQNLKVFEKYIVSALGEVTKAEFRQREDFKK

SEQ ID NO: 116 - protein, 987 aa, Campylobacter jejuni
  Campylobacter jejuni subsp. jejuni 129-258
MARILAFDIGISSIGWAFSENDELKDCGVRIFTKAENPKTGESLALPRRLARSARKRLARRKARLNHLKHLIANEFKLNYEDYQSFNESLAKAYKGSLISPYELRFRALNELLSKQDFARVILHIAKRRGYDDIKNSDDKEKGAILKVIKQNEEKLANYQSVGEYLYKEYFQKFKENSKEFTNVRNKKESYERCIAQSFLKDELKLIFQKQREFGFSFSKKFEEEVLSVAFYKRALKDFSHLVGNCSFFTDEKRAPKNSPLAFMFVALTRIINLLNNLKNTEGILYTKDDLNALLNEVLKNGTLTYKQTKKLLGLSDDYEFKGEKGTYFIEFKKYKEFIKALGDHSLSQDDLNEIAKDITLIKDEIKLKKALAKYDLNQNQIDSLSKLEFKDHLNISFKALKLITPLMLEGKKYDEACNELNLKVAINEDKKDFLPAFNETYYKDEVTNPVVLRAIKEYRKVLNALLKKYGKVHKINIELAREVGKNYSQRAKIEKEQNENYKAKKDAELECEKLGLKINSKNILKLRLFKEQKEFCAYSGEKIKISDLQDEKMLEIDHIYPYSRSFDDSYMNKVLVFTKQNQEKLNQTPFEAFGNDSAKWQKIEVLAKNLPTKKQKRILDKNYKDKEQKDFKDRNLNDTRYIARLVLNYTKDYLDFLPLSDDENTKLNDTQKGSKVHVEAKSGMLTSALRHTWGFSAKDRNNHLHHAIDAVIIAYANNSIVKAFSDFKKEQESNSAELYAKKISELDYKNKRKFFEPFSGFRQKVLDKIDEIFVSKPERKKPSGALHEETFRKEEEFYQSYGGKEGVLKALELGKIRKVNGKIVKNGDMFRVDIFKHKKTNKFYAVPIYTMDFALKVLPNKAVARSKKGEIKDWILMDENYEFCFSLYKDSLILIQTKDMQEPELVYFNAFTSSTVSLIVSKHDNKFETLSKNQKILFKNANEKEVIAKSIGIQNLKVFEKYIVSALGEVTKAEFRQREDFKNELR

SEQ ID NO: 117 - protein, 987 aa, Campylobacter jejuni
  Campylobacter jejuni subsp. jejuni 1336
MARILAFDIGISSIGWAFSENDELKDCGVRIFTKAENPKTGESLALPRRLARSARKRLARRKARLNHLKHLIANEFKLNYEDYQSFDESLAKAYKGSLISPYELRFRALNELLSKQDFARVILHIAKRRGYDDIKNNGDEEKGKILKAIKQNEEKLVSYQSVGEYLYKEYFQKFKENSKEFINVRNKKESYERCIAQSFLKDELKLIFQKQREFGFSFSKKFEEEVLSVAFYKRALKDFSHLVGNCSFLLMKKERQKNSPLAFMFVALTRIINLLNNLKNTEGILYTKDDLNTLLNEALKNGTLTYKQTKKLLGLSNDYEFKGEKGTYFIEFQKYKEFVKALGEHNLSQDDLNEIAKDITLIKDEIKLKKALAKYDLNQNQIDSLSKLEFKDHLNISFKALKLITPLMLEGKKYDEACNELNLKVAINEDKKDFLPAFNETYYKDEVTNPVVLRAIKEYRKVLNALLKKYGKVHKINIELAREVGKNHSQRAKIEKEQNENYKAKKDAELECEKLGLKINSKNILKLRLFKEQKEFCVYSGEKIKISDLQDEKMLEIDHIYPYSRSFDDSYMNKVLVFTKQNQEKLNKTPFETFGNDRVKWQKIEVLAKNLPTKKQKRILDKNYKDKEQKDFKDRNLNDTRYIARLVLNYTKDYLDFLPLSDDENTKLNDTQKGSKVHVEAKSGMLTSTLRHTWGFSTKDRNNHLHHAIDAAIIAYANNSIVKAFSDFKKEQESNTAELYAKKISELDYKNKRKFFEPFSGFRQKLLDKIDEIFVSKPERKKPSGALHEETFRKEEEFYQSYGGKEGVLKALELGKIRKVNGKMVKNGDMFRVDIFKHKKTNKFYAVPIYTMDFALKVLPNKAVVQGKDKKSGLIKDWILMDENYEFCFSLYKDSLILIQTKDMQEPELVYYERLDSSNASLTVSKHDNKFETLSKNQKILFKNANEKEVIAKSIGIQNLKVFEKYIVSALGEVTKAEFRQREDFKK

SEQ ID NO: 118 - protein, 984 aa, Campylobacter jejuni
  Campylobacter jejuni subsp. jejuni 140-16
MARILAFDIGISSIGWAFSENDELKDCGVRIFTKVENPKTGESLALPRRLARSARKRLARRKARLNHLKHLIANEFKLNYEDYQSFDESLAKAYKGSLISPYELRFRALNELLSKQDFARVILHIAKRRGYDDIKNSDDKEKGAILKAIKQNEEKLANYQSVGEYLYKEYFQKFKENSKEFTNVRNKKESYERCIAQSFLKDELKLIFKKQREFGFSFSKKFEEEVLSVAFYKRALKDFSHLVGNCSFFTDEKRAPKNSPLAFMFVALTRIINLLNNLKNTEGILYTKDDLNALLNEVLKNGTLTYKQTKKLLGLSDDYEFKGEKGTYFIEFKKYKEFIKALGEHNLSQDDLNEIAKDITLIKDEIKLKKALAKYDLNQNQIDSLSKLEFKDHLNISFKALKLITPLMLEGKKYDEACNELNLKVAINEDKKDFLPAFNETYYKDEVTNPVVLRAIKEYRKVLNALLKKYGKVHKINIELAREVGKNHSQRAKIEKEQNENYKAKKDAELECEKLGLKINSKNILKLRLFKEQKEFCAYSGEKIKISDLQDEKMLEIDHIYPYSRSFDDSYMNKVLVFTKQNQEKLNKTPFEAFGNDSAKWQKIEVLAKNLPTKKQKRILDKNYKDKEQKDFKDRNLNDTRYIARLVLNYTKDYLDFLPLSDDENTKLNDTQKGSKVHVEAKSGMLTSALRHTWGFSTKDRNNHLHHAIDAVIIAYANNSIVKAFSDFKKEQESNSAELYAKKISELDYKNKRKFFEPFSGFRQKVLDKIDEIFVSKPERKKPSGALHEETFRKEEEFYQSYGGKEGVLKALELGKIRKVNGKIVKNGDMFRVDIFKHKKTNKFYAVPIYTMDFALKVLPNKAVARSKKGEIKDWILMDENYEFCFSLYKDSLILIQTKDMQEPEFVYYNAFTSSTVSLIVSKHDNKFETLSKNQKILFKNANEKEVIAKSIGIQNLKVFEKYIVSALGEVTKAEFIQREDFKK

SEQ ID NO: 119 - protein, 984 aa, Campylobacter jejuni
  Campylobacter jejuni subsp. jejuni 1577
MARILAFDIGISSIGWAFSENDELKDCGVRIFTKVENPKTGESLALPRRLARSARKRLARRKVRLNHLKHLIANEFKLNYEDYQSFDESLAKAYKGSLISPYELRFRALNELLSKQDFARVILHIAKRRGYDDIKNSDDKEKGAILKAIKQNEEKLANYQSVGEYLYKEYFQKFKENSKEFTNVRNKKESYERCIAQSFLKDELKLIFKKQREFGFSFSKKFEEEVLSVAFYKRALKDFSHLVGNCSFFTDEKRAPKNSPLAFMFVALTRIINLLNNLKNTEGILYTKDDLNALLNEVLKNGTLTYKQTKKLLGLSDDYEFKGEKGTYFIEFKKYKEFIKALGEHNLSQDDLNEIAKDITLIKDEIKLKKALAKYDLNQNQIDSLSKLEFKDHLNISFKALKLITPLMLEGKKYDEACNELNLKVAINEDKKDFLPAFNETYYKDEVTNPVVLRAIKEYRKVLNALLKKYGKVHKINIELAREVGKNHSQRAKIEKEQNENYKAKKDAELECEKLGLKINSKNILKLRLFKEQKEFCAYSGEKIKISDLQDEKMLEIDHIYPYSRSFDDSYMNKVLVFTKQNQEKLNKTPFEAFGNDSAKWQKIEVLAKNLPTKKQKRILDKNYKDKEQKDFKDRNLNDTRYIARLVLNYTKDYLDFLPLSDDENTKLNDTQKGSKVHVEAKSGMLTSALRHTWGFSTKDRNNHLHHAIDAVIIAYANNSIVKAFSDFKKEQESNSAELYAKKISELDYKNKRKFFEPFSGFRQKVLDKIDEIFVSKPERKKPSGALHEETFRKEEEFYQSYGGKEGVLKALELGKIRKVNGKIVKNGDMFRVDIFKHKKTNKFYAVPIYTMDFALKVLPNKAVARSKKGEIKDWILMDENYEFCFSLYKDSLILIQTKDMQEPEFVYYNAFTSSTVSLIVSKHDNKFETLSKNQKILFKNANEKEVIAKSIGIQNLKVFEKYIVSALGEVTKAEFRQREDFKK

SEQ ID NO: 120 - protein, 987 aa, Campylobacter jejuni
  Campylobacter jejuni subsp. jejuni 1854
MARILAFDIGISSIGWAFSENDELKDCGVRIFTKAENPKTGESLALPRRLARSARKRLARRKARLNHLKHLIANEFKLNYEDYQSFDESLAKAYKGSLISPYELRFRALNELLSKQDFARVILHIAKRRGYDDIKNSDDKEKGAILKAIKQNEEKLANYQSVGEYLYKEYFQKFKENSKEFTNVRNKKESYERCIAQSFLKDELKLIFKKQREFGFSFSKKFEEEVLSVAFYKRALKDFSHLVGNCSFFTDEKRAPKNSPLAFMFVALTRIINLLNNLKNTEGILYTKDDLNTLLNEVLKNGTLTYKQTKKLLGLSDDYEFKGEKGTYFIEFKKYKEFIKSLGDHSLSQDDLNEIAKDITLIKDEIKLKKALAKYDLNQNQIDSLSKLEFKDHLNISFKALKLITPLMLEGKKYDEACNELNLKVAINEDKKDFLPAFNETYYKDEVTNPVVLRAIKEYRKVLNALLKKYGKVHKINIELAREVGKNHSQRAKIEKEQNENYKAKKDAELECEKLGLKINSKNILKLRLFKEQKEFCAYSGEKIKISDLQDEKMLEIDHIYPYSRSFDDSYMNKVLVFTKQNQEKLNQTPFEAFGNDSAKWQKIEVLAKNLPTKKQKRILDKNYKDKEQKNFKDRNLNDTRYIARLVLNYTKDYLDFLPLSDDENTKLNDTQKGSKVHVEAKSGMLTSALRHTWGFSAKDRNNHLHHAIDAVIIAYANNSIVKAFSDFKKEQESNSAELYAKKISELDYKNKRKFFEPFSGFRQKVLDKIDEIFVSKPERKKPSGALHEETFRKEEEFYQSYGGKEGVLKALELGKIRKVNGKIVKNGDMFRVDIFKHKKTNKFYAVPIYTMDFALKVLPNKAVARSKKGEIKDWILMDENYEFCFSLYKDSLILIQTKDMQEPEFVYYNAFTSSTVSLIVSKHDNKFETLSKNQKILFKNANEKEVIAKSIGIQNLKVFEKYIVSALGEVTKAEFRQREDFKNELR

SEQ ID NO: 121 - protein, 984 aa, Campylobacter jejuni
  Campylobacter jejuni subsp. jejuni 1997-10
MARILAFDIGISSIGWAFSENDELKDCGVRIFTKAENPKTGESLALPRRLARSARKRLARRKARLNRLKHLIANEFKLNYEDYQSFDESLAKAYKGSLISPYELRFRALNELLSKQDFARVILHIAKRRGYDDIKNSDDKEKGAILKAIKQNEEKLANYQSVGEYLYKEYFQKFKENSKEFTNVRNKKESYERCIAQSFLKDELKLIFKKQREFGFSFSKKFEEEVLSVAFYKRALKDFSHLVGNCSFFTDEKRAPKNSPLAFMFVALTRIINLLNNLKNTEGILYTKDDLNALLNEVLKNGTLTYKQTKKLLGLSDDYEFKGEKGTYFIEFKKYKEFIKALGDHSLNQDDLNEIAKDITLIKDEIKLKKALAKYDLNQNQIDSLSKLEFKDHLNISFKALKLITPLMLEGKKYDEACNELNLKVAINEDKKDFLPAFNETYYKDEVTNPVVLRAIKEYRKVLNALLKKYGKVHKINIELAREVGKNYSQRAKIEKEQNENYKAKKDAELECEKLGLKINSKNILKLRLFKEQKEFCVYSGEKIKISDLQDEKMLEIDHIYPYSRSFDDSYMNKVLVFTKQNQEKLNQTPFEAFGNDSAKWQKIEVLAKNLPTKKQKRILDKNYKDKEQKDFKDRNLNDTRYIARLVLNYTKDYLDFLPLSDDENTKLNDTQKGSKVYVEAKSGMLTSALRHTWGFSTKDRNNHLHHAIDAVIIAYANNSIVKAFSDFKKEQESNSAELYAKKISELDYKNKRKFFEPFSGFRQKVLDKIDEIFVSKPERKKPSGALHEETFRKEEEFYQSYGGKEGVLKALELGKIRKVNGKIVKNGDMFRVDIFKHKKTNKFYAVPIYTMDFALKVLPNKAVARSKKGEIKDWILMDENYEFCFSLYKDSLILIQTKDMQEPEFVYYNAFTSSTVSLIVSKHDNKFETLSKNQKILFKNANEKEVIAKSIGIQNLKVFEKYIVSALGEVTKAEFRQREDFKK

SEQ ID NO: 122 - protein, 987 aa, Campylobacter jejuni
  Campylobacter jejuni subsp. jejuni 2008-1025
MARILAFDIGISSIGWAFSENDELKDCGVRIFTKAENPKTGESLALPRRLARSARKRLARRKARLNHLKHLIANEFKLNYEDYQSFDESLAKAYKGSLISPYELRFRALNELLSKQDFARVILHIAKRRGYDDIKNNGDEEKSEILKAIKQNEEKLVNYQSVGEYLYKEYFQKFKENSKEFINVRNKKESYERCIAQSFLKDELKLIFQKQREFGFSFSKKFEEEVLSVAFYKRALKDFSHLVGNCSFFTDEKRAPKNSPLAFMFVALTRIINLLNNLKNTEGILYTKDDLNTLLNEVLKNGTLTYKQTKKLLGLSDDYEFKGEKGTYFIEFKKYKEFIKALGEHNLSQDNLNEIAKDITLIKDEIKLKKALAKYDLNQNQIDSLSKLEFKDHLNISFKALKLITPLMLEGKKYDEAYNELNLKVAINEDKKDFLPAFNETYYKDEVTNPVVLRAIKEYRKVLNALLKKYGKVHKINIELAREVGKNHSQRAKIEKEQNENYKAKKDAELECEKLGLKINSKNILKLRLFKEQKEFCAYSGEKIKISDLQDEKMLEIDHIYPYSRSFDDSYMNKVLVFTKQNQEKLNQTPFEAFGNDSAKWQKIEVLAKNLPTKKQKRILDKNYKDKEQKDFKDRNLNDTRYIARLVLNYTKDYLDFLPLSDDENTKLNDTQKGSKVHVEAKSGMLTSALRHTWGFSAKDRNNHLHHAIDAVIIAYANNSIVKAFSDFKKEQESNSAELYAKKISELDYKNKRKFFEPFSGFRQKVLDKIDEIFVSKPERKKPSGALHEETFRKEEEFYQSYGGKEGVLKALELGKIRKVNGKIVKNGDMFRVDIFKHKKTNKFYAVPIYTMDFALKVLPNKAVVQGKDKKSGLIKDWILMDENYEFCFSLYKDSLILIQTKDMQEPELVYFNAFTSSTVSLIVSKHDNKFETLSKNQKILFKNANEKEVIAKSIGIQNLKVFEKYIVSALGEVTKAEFRQREDFKK

SEQ ID NO: 123 - protein, 984 aa, Campylobacter jejuni
  Campylobacter jejuni subsp. jejuni 2008-872
MARILAFDIGISSIGWAFSENDELKDCGVRIFTKVENPKTGESLALPRRLARSARKRLARRKARLNHLKHLIANEFKLNYEDYQSFDESLAKAYKGSLISPYELRFRALNELLSKQDFARVILHIAKRRGYDDIKNSDDKEKGAILKAIKQNEEKLANYQSVGEYLYKEYFQKFKENSKEFTNVRNKKESYERCIAQSFLKDELKLIFKKQREFGFSFSKKFEEEVLSVAFYKRALKDFSHLVGNCSFFTDEKRAPKNSPLAFMFVALTRIINLLNNLKNTEGILYTKDDLNALLNEVLKNGTLTYKQTKKLLGLSDDYEFKGEKGTYFIEFKKYKEFIKALGEHNLSQDDLNEIAKDITLIKDEIKLKKALAKYDLNQNQIDSLSKLEFKDHLNISFKALKLITPLMLEGKKYDEACNELNLKVAINEDKKDFLPAFNETYYKDEVTNPVVLRAIKEYRKVLNALLKKYGKVHKINIELAREVGKNHSQRAKIEKEQNENYKAKKDAELECEKLGLKINSKNILKLRLFKEQKEFCAYSGEKIKISDLQDEKMLEIDHIYPYSRSFDDSYMNKVLVFTKQNQEKLNKTPFEAFGNDSAKWQKIEVLAKNLPTKKQKRILDKNYKDKEQKDFKDRNLNDTRYIARLVLNYTKDYLDFLPLSDDENTKLNDTQKGSKVHVEAKSGMLTSALRHTWGFSTKDRNNHLHHAIDAVIIAYANNSIVKAFSDFKKEQESNSAELYAKKISELDYKNKRKFFEPFSGFRQKVLDKIDEIFVSKPERKKPSGALHEETFRKEEEFYQSYGGKEGVLKALELGKIRKVNGKIVKNGDMFRVDIFKHKKTNKFYAVPIYTMDFALKVLPNKAVARSKKGEIKDWILMDENYEFCFSLYKDSLILIQTKDMQEPEFVYYNAFTSSTVSLIVSKHDNKFETLSKNQKILFKNANEKEVIAKSIGIQNLKVFEKYIVSALGEVTKAEFRQREDFKK

SEQ ID NO: 124 - protein, 987 aa, Campylobacter jejuni
  Campylobacter jejuni subsp. jejuni 2008-979
MARILAFDIGISSIGWAFSENDELKDCGVRIFTKAENPKTGESLALPRRLARSARKRLARRKARLNHLKHLIANEFKLNYEDYQSFDESLAKAYKGSLISPYELRFRALNELLSKQDFARVILHIAKRRGYDDIKNSDDKEKGAILKAIKQNEEKLVNYQSVGEYLYKEYFQKFKENSKEFTNVRNKKESYERCIAQSFLKDELKLIFKKQREFGFSFSKKFEEEVLSVAFYKRALKDFSHLVGNCSFFTDEKRAPKNSPLAFMFVALTRIINLLNNLKNTEGILYTKDDLNALLNEVLKNGTLTYKQTKKLLGLSDDYEFKGEKGTYFIEFKKYKEFIKALGDHSLSQDDLNEIAKDITLIKDEIKLKKALAKYDLNQNQIDSLSKLEFKDHLNISFKALKLITPLMLEGKKYDEACNELNLKVAINEDKKDFLPAFNETYYKDEVTNPVVLRAIKEYRKVLNALLKKYGKVHKINIELAREVGKNYSQRAKIEKEQNENYKAKKDAELECEKLGLKINSKNILKLRLFKEQKEFCAYSGEKIKISDLQDEKMLEIDHIYPYSRSFDDSYMNKVLVFTKQNQEKLNQTPFEAFGNDSAKWQKIEVLAKNLPTKKQKRILDKNYKDKEQKDFKDRNLNDTRYIARLVLNYTKDYLDFLPLSDDENTKLNDTQKGSKVHVEAKSGMLTSALRHTWGFSAKDRNNHLHHAIDAVIIAYANNSIVKAFSDFKKEQESNSAELYAKKISELDYKNKRKFFEPFSGFRQKVLDKIDEIFVSKPERKKPSGALHEETFRKEEEFYQSYGGKEGVLKALELGKIRKVNGKIVKNGDMFRVDIFKHKKTNKFYAVPIYTMDFALKVLPNKAVARSEKGEIKDWILMDENYEFCFSLYKDSLILIQTKDMQEPELVYFNAFTSSTVSLIVSKHDNKFETLSKNQKILFKNANEKEVIAKSIGIQNLKVFEKYIVSALGEVTKAEFRQREDFKNELR

SEQ ID NO: 125 - protein, 965 aa, Campylobacter jejuni
  Campylobacter jejuni subsp. jejuni 2008-988
MKIIGFNLGIANIGWALRENDEIIDCGVRVFDIPENPKNGNSLALERRENKARMKIVKRKKARMLATKTFLKKELNVDLSKLFLIGSTQSIYELRAKALSSLISKEELSAIILHIAKHRGYDDSALKNENGTIIEALNKNKETMLKFKSVGEYFYKNFVQNKEVKKIRNTTEDYSNSVPRSLLKQELDLILDKQKELGLIKNADFKEKLFEIIFFKRPLKDFSNKIGNCIFFENEKRAAKNTISACEFVALGKVVNLLKSIEKDIGIVYEKDSINEIMSIILDKTSISYKKIRDILNLPQEINFKGLDYSKNNVENSKLVDLKKLNEFKKALGDGFANLDKDILDSIATDITLTKDTATLKEKLKNYNVLNAEQIEKLSELVFNDHINLSLKALKQIIPLMYEGKRYDEACELCNFTIAKNQEKSEYLPLFEKTRFAKDISSPVVIRAICEFRKLLNDIIRRYGSVHKIHLELTRDFGISFSDRKKIIKEIEQNEQSRIKALETIKELKLEETSKNIQIVRLFEDQKGICPYSGLKMDLNRLDELVIDYIRPYNRSLDDSYSNKVLTFKKLSDLKQGKTPFEAFGEDEKLWAEINERIKEYNGKKRFKIFDKFFKDKKPFDFTEQTLQDTRWLTKLVASYLNEYLSFLPISEDENTALGYGEKGSKQHVILSSGMITQMLRNFWYLGFKNHKDYKNNAMDAIIVAFTTNSIIFAFNNFKKELDLAKAEFYANKISESDYLLKRKFLPPFSGFKEQALEKVKNIFVSHSLKIKNKGTLHDLTPLKIKELKNTYGDLDLAVKLGKIRKYNDKYYANANGSLVRADLFVDKKNKFHAVSIYKADFSTKKLPNKTPATTSNGETKEGIEMNENYNFCMSLYKNTPISVKIKGMKEPIICYYHGFNTSGSKITYKKHDNNYHNLSEDEMVVFRKNDKESIAVGKILEIKKYSISPSGELSLIENEERKWF

SEQ ID NO: 126 - protein, 984 aa, Campylobacter jejuni
  Campylobacter jejuni subsp. jejuni 2008-988
MARILAFDIGISSIGWAFSENDELKDCGVRIFTKVENPKTGESLALPRRLARSARKRLARRKARLNHLKHLIANEFKLNYEDYQSFDESLAKAYKGSLISPYELRFRALNELLSKQDFARVILHIAKRRGYDDIKNSDDKEKGAILKAIKQNEEKLANYQSVGEYLYKEYFQKFKENSKEFTNVRNKKESYERCIAQSFLKDELKLIFKKQREFGFSFSKKFEEEVLSVAFYKRALKDFSHLVGNCSFFTDEKRAPKNSPLAFMFVTLTRIINLLNNLKNTEGILYTKDDLNALLNEVLKNGTLTYKQTKKLLGLSDDYEFKGEKGTYFIEFKKYKEFIKALGEHNLSQDDLNEIAKDITLIKDEIKLKKALAKYDLNQNQIDSLSKLEFKDHLNISFKALKLITPLMLEGKKYDEACNELNLKVAINEDKKDFLPAFNETYYKDEVTNPVVLRAIKEYRKVLNALLKKYGKVHKINIELAREVGKNHSQRAKIEKEQNENYKAKKDAELECEKLGLKINSKNILKLRLFKEQKEFCAYSGEKIKISDLQDEKMLEIDHIYPYSRSFDDSYMNKVLVFTKQNQEKLNKTPFEAFGNDSAKWQKIEVLAKNLPTKKQKRILDKNYKDKEQKDFKDRNLNDTRYIARLVLNYTKDYLDFLPLSDDENTKLNDTQKGSKVHVEAKSGMLTSALRHTWGFSTKDRNNHLHHAIDAVIIAYANNSIVKAFSDFKKEQESNSAELYAKKISELDYKNKRKFFEPFSGFRQKVLDKIDEIFVSKPERKKPSGALHEETFRKEEEFYQSYGGKEGVLKALELGKIRKVNGKIVKNGDMFRVDIFKHKKTNKFYAVPIYTMDFALKVLPNKAVARSKKGEIKDWILMDENYEFCFSLYKDSLILIQTKDMQEPEFVYYNAFTSSTVSLIVSKHDNKFETLSKNQKILFKNANEKEVIAKSIGIQNLKVFEKYIVSALGEVTKAEFRQREDFKK

SEQ ID NO: 127 - protein, 961 aa, Campylobacter jejuni
  Campylobacter jejuni subsp. jejuni 260.94
MARILAFDIGISSIGWAFSENDELKDCGVRIFTKAENPKTGESLALPRRLARSARKRLARRKARLNHLKHLIANEFKLNYEDYQSFDESLAKAYKGSLISPYELRFRALNELLSKQDFARVILHIAKRRGYDDIKNNGDEEKGKILKAIKQNEEKLVNYQSVGEYLYKEYFQKFKENSKEFINVRNKKESYERCITQSFLKYELKLIFQKQREFGFSFSKKFEEEVLSVAFYKRALKDFSHLVGNCSFFSDEKRAPKNSPLAFMFVALTRIINLLNNLKNTEGILYTKDDLNALLNEVLKNGTLTYKQTKKLLGLSDDYEFKGEKGTYFIEFKKYKEFIKALGEHNLSQDDLNEIAKDITLIKDEIKLKKALAKYDLNQNQIDSLSKLEFKDHLNIGFKALKLITPLMLEGKKYDEACNELNLKVAINEDKKDFLPAFNETYYKDEVTNPVVLRAIKEYRKVLNALLKKYGKVHKINIELAREVGKNHSQRAKIEKEQNENYKAKKDAELECEKLGLKINSKNILKLRLFKEQKEFCAYSGEKIKLSDLQDEKMLEIDHIYPYSRSFDDSYMNKVLVFTKQNQEKLNKTPFEAFGNDNVKWQKIEVLAKNLPEKKQKRILDKNYKDKEQKDFKDRNLNDTRYIARLVLNYTKDYLDFLPLSDDENTKLKGSKVHVEAKSGMLTSALRHTWGFSTKDRNNHLHHAIDAAIIAYANNSIVKDFSDFKKEQESNSAELYAKKISELDYKNKRKFFEPFSGFRQKVLDKIDEIFVSKPERKKPSGALHEETFRKEEEFYQSYGGKEGVLKALELGKIRKVNGKIVKNGDMFRVDIFKHKKTNKFYAVPIYTMDFALKVLPNKAVARSKKGEIKDWILMDENYEFCFSLYKDSLILIQTKDMQEPELVYFNAFTSSTVSLIVSKHDNKFETLSKNLKVFEKYIVSALGEVTKAEFRQREDFKNELR

SEQ ID NO: 128 - protein, 985 aa, Campylobacter jejuni
  Campylobacter jejuni subsp. jejuni 414
MAKILAFDIGISSIGWAFVENDELKDCGVRIFTKAENPKTGESLALPRRLARSARKRLARRKARLNHLKHLIANEFKLNYEDYQSFDESLAKAYKGTLISPYELRFKALNELLSKQDLARVILHIAKRRGYDNIKNSDDKEKGAILKAVKENEEKLANYKSVGEYLYKEYFQKFKENSKEFINVRNKKESYERCIAQSFLKDELKLIFQKQREFGFNFSKKFEEEVLSVAFYKRALKDFSHLVGNCSFFVDEKRAPKNSPLAFEFVALTRIVNLLNNLNKNNSYIKDDLNALLSEVLKNGTLTYKQTKKILGLSDDYEFKGQKGNYFIEFKKYKEFIKALCEHNLNQDDLNEIAKDITLVKDETKLKKALAKYDLNQNQIENLSKIEFKDHLNISFKALKLIVPLMREGKKYDEVCNELNLKTAINEDKKEFLPAFNETYYKDEVNNPVVLRAIKEYRKVLNSLLKKYGKVHKINIELAREVGKNHRERSKIEKEQNENFKAKKDAELECEKLGLKINSKNILKLRLFKEQKEFCVYSGEKIKISDLQDEKMLEIDHIYPYSRSFDDSYMNKVLVFTKQNQEKLNKTPFEAFGKDDVKWQKIETLAKNLPAKKQKRILDKNYKDKEQKDFKDRNLNDTRYIARLVLNYTKDYLEFLPLSDDENIKLNDTQKGSKVHVEAKSGMLTSVLRHTWGFSTKDRNNHLHHAIDAVIIAYANASVVKAFSDFKKEQENYTAELYAKKINELDFKNKRKFFEPFSNFRQKVLEKIDEIFVSKPERKKPSGALHEETFYKEEEFYKEYGGKEGVLKALELGKIRKVNGKIVSNANMFRVDIFKYKKTNKFYAVPIYTMDFALGILPNKAVVGGKDKQGIIKDWLLMDENYEFCFSLYKDSLILLQTKDMQEPELVYFKSFKSSTAGLVVSKHDNKFENLNENQKKLFKSANEKKVVAEGIGIQNLKVFEKYIVSALGEITKAEIKERENFKKK

SEQ ID NO: 129 - protein, 984 aa, Campylobacter jejuni
  Campylobacter jejuni subsp. jejuni 51037
MARILAFDIGISSIGWAFSENDELKDCGVRIFTKAENPKTGESLALPRRLARSARKRLARRKARLNHLKHLIANEFKLNYEDYQSFDESLAKAYKGSLISPYELRFRALNELLSKQDFARVILHIVKRRGYDDIKNSDDKEKGTILKAIKQNEEKLANYQSVGEYLYKEYFQKFKENSKEFTNVRNKKESYERCIAQSFLKDELKLIFKKQREFGFSFSKKFEEEVLSVAFYKRALKDFSHLVGNCSFFTDEKRAPKNSPLAFMFVALTRIINLLNNLKNTEGILYTKDDLNTLLNEVLKNGTLTYKQTKKLLGLSDDYEFKGEKGTYFIEFKKYKEFIKALGEHNLSQDDLNEIAKDITLIKDEIKLKKALAKYDLNQNQIDSLSKLEFKDHLNISFKALKLITPLMLEGKKYDEACNELNLKVAINEDKKDFLPAFNETYYKDEVTNPVVLRAIKEYRKVLNALLKKYGKVHKINIELAREVGKNYSQRAKIEKEQNENYKAKKDAELECEKLGLKINSKNILKLRLFKEQKEFCAYSGEKIKISDLQDEKMLEIDHIYPYSRSFDDSYMNKVLVFTKQNQEKLNQTPFEAFGNDSAKWQKIEVLAKNLPTKKQKRILDKNYKDKEQKDFKDRNLNDTRYIARLVLNYTKDYLDFLPLSDDENTKLNDTQKGSKVHVEAKSGMLTSALRHTWGFSAKDRNNHLHHAIDAVIIAYANNSIVKAFSDFKKEQESNSAELYAKKISELDYKNKRKFFEPFSGFRQKVLDKIDEIFVSKPERKKPSGALHEETFRKEEEFYQSYGGKEGVLKALELGKIRKVNGKIVKNGDMFRVDIFKHKKTNKFYAVPIYTMDFALKVLPNKAVARSKKGEIKDWILMDENYEFCFSLYKDSLILIQTKDMQEPEFVYYNAFTSSTVSLIVSKHDNKFETLSKNQKILFKNANEKEVIAKSIGIQNLKVFEKYIVSALGEVTKAEFRQREDFKK

SEQ ID NO: 130 - protein, 984 aa, Campylobacter jejuni
  Campylobacter jejuni subsp. jejuni 51494
MARILAFDIGISSIGWAFSENDELKDCGVRIFTKAENPKTGESLALPRRLARSARKRLARRKARLNHLKHLIANEFKLNYEDYQSFDESLAKAYKGSLISPYELRFRALNELLSKQDFARVILHIAKRRGYDDIKNSDDKEKGAILKAIKQNEEKLANYQSVGEYLYKEYFQKFKENSKEFTNVRNKKESYERCIAQSFLKDELKLIFKKQREFGFSFSKKFEEEVLSVAFYKRALKDFSHLVGNCSFFTDEKRAPKNSPLAFMFVALTRIINLLNNLKNTEGILYTKDDLNTLLNEVLKNGTLTYKQTKKLLGLSDDYEFKGEKGTYFIEFKKYKEFIKALGEHNLSQDDLNEIAKDITLIKDEIKLKKALAKYDLNQNQIDSLSKLEFKDHLNISFKALKLITPLMLEGKKYDEACNELNLKVAINEDKKDFLPAFNETYYKDEVTNPVVLRAIKEYRKVLNALLKKYGKVHKINIELAREVGKNYSQRAKIEKEQNENYKAKKDAELECEKLGLKINSKNILKLRLFKEQKEFCAYSGEKIKISDLQDEKMLEIDHIYPYSRSFDDSYMNKVLVFTKQNQEKLNKTPFEAFGNDSTKWQKIEVLAKNLPEKKQKRILDKNYKDKEQKDFKDRNLNDTRYIARLVLNYTKDYLDFLPLSDDENTKLNDTQKGLKVHVEAKSGMLTSALRHTWGFSAKDRNNHLHHAIDAVIIAYANNSIVKAFSDFKKEQESNSAELYAKKISELDYKNKRKFFEPFSGFRQKVLDKIDEIFVSKPERKKPSGALHEETFRKEEEFYQSYGGKEGVLKALELGKIRKVNGKIVKNGDMFRVDIFKHKKTNKFYAVPIYTMDFALKVLPNKAVARSKKGEIKDWILMDENYEFCFSLYKDSLILIQTKDMQEPEFVYYNAFTSSTVSLIVSKHDNKFETLSKNQKILFKNANEKEVIAKSIGIQNLKVFEKYIVSALGEVTKAEFRQREDFKK

SEQ ID NO: 131 - protein, 987 aa, Campylobacter jejuni
  Campylobacter jejuni subsp. jejuni 53161
MARILAFDIGISSIGWAFSENDELKDCGVRIFTKAENPKTGESLALPRRLARSARKRLARRKARLNHLKHLIANEFKLNYEDYQSFDEGLAKAYKGSLISPYELRFRALNELLSKQDFARVILHIAKRRGYDDIKNNGDEEKSEILKAIKQNEEKLVNYQSVGEYLYKEYFQKFKENSKEFINVRNKKESYERCIAQSFLKDELKLIFQKQREFGFSFSKKFEEEVLSVAFYKRALKDFSHLVGNCSFFTDEKRAPKNSPLAFMFVALTRIINLLNNLKNTEGILYTKDDLNTLLNEVLKNGTLTYKQTKKLLGLSDDYEFKGEKGTYFIEFKKYKEFIKALGEHNLSQDNLNEIAKDITLIKDEIKLKKALAKYDLNQNQIDSLSKLEFKDHLNISFKALKLITPLMLEGKKYDEAYNELNLKVAINEDKKDFLPAFNETYYKDEVTNPVVLRAIKEYRKVLNALLKKYGKVHKINIELAREVGKNHSQRAKIEKEQNENYKAKKDAELECEKLGLKINSKNILKLRLFKEQKEFCAYSGEKIKISDLQDEKMLEIDHIYPYSRSFDDSYMNKVLVFTKQNQEKLNQTPFEAFGNDSAKWQKIEVLAKNLPTKKQKRILDKNYKDKEQKDFKDRNLNDTRYIARLVLNYTKDYLDFLPLSDDENTKLNDTQKGSKVHVEAKSGMLTSALRHTWGFSAKDRNNHLHHAIDAVIIAYANNSIVKAFSDFKKEQESNSAELYAKKISELDYKNKRKFFEPFSGFRQKVLDKIDEIFVSKPERKKPSGALHEETFRKEEEFYQSYGGKEGVLKALELGKIRKVNGKIVKNGDMFRVDIFKHKKTNKFYAVPIYTMDFALKVLPNKAVVQGKDKKSGLIKDWILMDENYEFCFSLYKDSLILIQTKDMQEPELVYFNAFTSSTVSLIVSKHDNKFETLSKNQKILFKNANEKEVIAKSIGIQNLKVFEKYIVSALGEVTKAEFRQREDFKK

SEQ ID NO: 132 - protein, 984 aa, Campylobacter jejuni
  Campylobacter jejuni subsp. jejuni 60004
MARILAFDIGISSIGWAFSENDELKDCGVRIFTKAENPKTGESLALPRRLARSARKRLARRKARLNHLKHLIANEFKLNYEDYQSFDESLAKAYKGSLISPYELRFRALNELLSKQDFARVILHIAKRRGYDDIKNNGDEEKGKILKAIKQNEEKLVNYQSVGEYLYKEYFQKFKENSKEFINVRNKKESYERCITQSFLKYELKLIFQKQREFGFSFSKKFEEEVLSVAFYKRALKDFSHLVGNCSFFTDEKRAPKNSPLAFMFVALTRIINILNNLKNTEGILYTKDDLNALLNEVLKNGTLTYKQTKKLLGLSDDYEFKGEKGTYFIEFKKYKEFIKALGEHNLSQDDLNEIAKDITLIKDEIKLKKALAKYDLNQNQIDSLSKLEFKDHLNISFKALKLITPLMLEGKKYDEACNELNLKVAINEDKKDFLPAFNETYYKDEVTNPVVLRAIKEYRKILNALLKKYGKVHKINIELAREVGKNHSQRAKIEKEQNENYKAKKDAEIECEKLGLKINSKNILKLRLFKEQKEFCAYSGEKIKISDLQDEKMLEIDHIYPYSRSFDDSYMNKVLVFTKQNQEKLNQTPFEAFGNDSAKWQKIEVLAKNLPTKKQKRILDKNYKDKEQKDFKDRNLNDTRYIARLVLNYTKDYLDFLPLSDDENTKLNDTQKGSKVHVEAKSGMLTSALRHTWGFSAKDRNNHLHHAIDAVIIAYANNSIVKAFSDFKKEQESNSAELYAKKISELDYKNKRKFFEPFSGFRQKVLDKIDEIFVSKPERKKPSGALHEETFRKEEEFYQSYGGKEGVLKALELGKIRKVNGKIVKNGDMFRVDIFKHKKTNKFYAVPIYTMDFALKVLPNKAVARSKKGEIKDWILMDENYEFCFSLYKDSLILIQTKDMQEPEFVYYNAFTSSTVSLIVSKHDNKFETLSKNQKILFKNANEKEVIAKSIGIQNLKVFEKYIVSALGEVTKAEFRQREDFKK

SEQ ID NO: 133 - protein, 984 aa, Campylobacter jejuni
MARILAFDIGISSIGWAFSENDELKDCGVRIFTKAENPKTGESLALPRRLARSARKRLARRKARLNHLKHLIANEFKLNYEDYQSFDESLAKAYKGSLISPYELRFRALNELLSKQDFARVILHIAKRRGYDDIKNNGDEEKSEILKAIKQNEEKLVNYQSVGEYLYKEYFQKFKENSKEFINVRNKKESYERCITQSFLKDELKLIFQKQREFGFSFSKKFEEEVLSVAFYKRALKDFSHLVGNCSFFTDEKRAPKNSPLAFMFVALTRIINILNNLKNTEGILYTKDDLNALLNEVLKNGTLTYKQTKKLLGLSDDYEFKGEKGTYFIEFKKYKEFIKALGEHNLSQDDLNEIAKDITLIKDEIKLKKALAKYDLNQNQIDSLSKLEFKDHLNISFKALKLITPLMLEGKKYDEACNELNLKVAINEDKKDFLPAFNETYYKDEVTNPVVLRAIKEYRKILNALLKKYGKVHKINIELAREVGKNHSQRAKIEKEQNENYKAKKDAEIECEKLGLKINSKNILKLRLFKEQKEFCAYSGEKIKLSDLQDEKMLEIDHIYPYSRSFDDSYMNKVLVFTKQNQEKLNKTPFEAFGNDSTKWQKIEVLAKNLPEKKQKRILDKNYKDKEQKDFKDRNLNDTRYIARLVLNYTKDYLDFLPLSDDENTKLNDTQKGSKVHVEAKSGMLTSALRHTWGFSAKDRNNHLHHAIDAAIIAYANNSIVKAFSDFKKEQESNSVELYAKKISELDYKNKRKFFEPFSGFRQKVLDKIDEIFVSKPERKKPSGALHEETFRKEEEFYQSYGGKEGVLKALELGKIRKVNGKIVKNGDMFRVDIFKHKKTNKFYAVPIYTMDFALKVLPNKAVARSKKGEIKDWILMDENYEFCFSLYKDSLILIQTKDMQEPELVYFNAFTSSTVSLIVSKHDNKFETLSKNQKILFKNANEKEVIAKSIGIQNLKVFEKYIVSALGEVTKAEFRQREDFKK

SEQ ID NO: 134 - protein, 984 aa, Campylobacter jejuni
  Campylobacter jejuni subsp. jejuni 84-25
MVRILAFDIGISSIGWAFSENDELKDCGVRIFTKVENPKTGESLALPRRLARSARKRLARRKARLNHLKHLIANEFKLNYEDYQSFDESLAKAYKGSLISPYELRFRALNELLSKQDFARVILHIAKRRGYDDIKNSDDKEKGAILKAIKQNEEKLANYQSVGEYLYKEYFQKFKENSKEFTNVRNKKESYERCIAQSFLKDELKLIFKKQREFGFSFSKKFEEEVLSVAFYKRALKDFSHLVGNCSFFTDEKRAPKNSPLAFMFVALTRIINLLNNLKNTEGILYTKDDLNALLNEVLKNGTLTYKQTKKLLGLSDDYEFKGEKGTYFIEFKKYKEFIKALGEHNLSQDDLNEIAKDITLIKDEIKLKKALAKYDLNQNQIDSLSKLEFKDHLNISFKALKLITPLMLEGKKYDEACNELNLKVAINEDKKDFLPAFNETYYKDEVTNPVVLRAIKEYRKVLNALLKKYGKVHKINIELAREVGKNHSQRAKIEKEQNENYKAKKDAELECEKLGLKINSKNILKLRLFKEQKEFCAYSGEKIKISDLQDEKMLEIDHIYPYSRSFDDSYMNKVLVFTKQNQEKLNKTPFEAFGNDSAKWQKIEVLAKNLPTKKQKRILDKNYKDKEQKDFKDRNLNDTRYIARLVLNYTKDYLDFLPLSDDENTKLNDTQKGSKVHVEAKSGMLTSALRHTWGFSTKDRNNHLHHAIDAVIIAYANNSIVKAFSDFKKEQESNSAELYAKKISELDYKNKRKFFEPFSGFRQKVLDKIDEIFVSKPERKKPSGALHEETFRKEEEFYQSYGGKEGVLKALELGKIRKVNGKIVKNGDMFRVDIFKHKKTNKFYAVPIYTMDFALKVLPNKAVARSKKGEIKDWILMDENYEFCFSLYKDSLILIQTKDMQEPEFVYYNAFTSSTVSLIVSKHDNKFETLSKNQKILFKNANEKEVIAKSIGIQNLKVFEKYIVSALGEVTKAEFRQREDFKK

SEQ ID NO: 135 - protein, 984 aa, Campylobacter jejuni
  Campylobacter jejuni subsp. jejuni 87459
MARILAFDIGISSIGWAFSENDELKDCGVRIFTKAENPKTGESLALPRRLARSARKRLARRKARLNHLKHLIANEFKLNYEDYQSFDESLAKAYKGSLISPYELRFRALNELLSKQDFARVILHIAKRRGYDDIKNSDDKEKGAILKAIKQNEEKLANYQSVGEYLYKEYFQKFKENSKEFTNVRNKKESYERCIAQSFLKDELKLIFKKQREFGFSFSKKFEEEVLSVAFYKRALKDFSHLVGNCSFFTDEKRAPKNSPLAFMFVALTRIINLLNNLKNTEGILYTKDDLNTFLNEVLKNGTLTYKQTKKLLGLSDDYEFKGEKGTYFIEFKKYKEFIKALGDHNLSQDDLNEIAKDITLIKDEIKLKKALAKYDLNQNQIDSLSKLEFKDHLNISFKALKLITPLMLEGKKYDEACNELNLKVAINEDKKDFLPAFNETYYKDEVTNPVVLRAIKEYRKVLNALLKKYGKVHKINIELAREVGKNHSQRAKIEKEQNENYKAKKDAELECEKLGLKINSKNILKLRLFKEQKEFCAYSGEKIKISDLQDEKMLEIDHIYPYSRSFDDSYMNKVLVFTKQNQEKLNKTPFEAFGNDSAKWQKIEVLAKNLPTKKQKRILDKNYKDKEQKDFKDRNLNDTRYIARLVLNYTKDYLDFLPLSDDENTKLNDTQKGSKVHVEAKSGMLTSALRHTWGFSTKDRNNHLHHAIDAVIIAYANNSIVKAFSDFKKEQESNSAELYAKKISELDYKNKRKFFEPFSGFRQKVLDKIDEIFVSKPERKKPSGALHEETFRKEEEFYQSYGGKEGVLKALELGKIRKVNGKIVKNGDMFRVDIFKHKKTNKFYAVPIYTMDFALKVLPNKAVARSKKGEIKDWILMDENYEFCFSLYKDSLILIQTKDMQEPEFVYYNAFTSSTVSLIVSKHDNKFETLSKNQKILFKNANEKEVIAKSIGIQNLKVFEKYIVSALGEVTKAEFRQREDFKK

SEQ ID NO: 136 - protein, 984 aa, Campylobacter jejuni
  Campylobacter jejuni subsp. jejuni ATCC 33560
MARILAFDIGISSIGWAFSENDELKDCGVRIFTKAENPKTGESLALPRRLARSARKRLARRKARLNHLKHLIANEFKLNYEDYQSFDESLAKAYKGSLISPYELRFRALNELLSKQDFARVILHIAKRRGYDDIKNSDDKEKGAILKAIKQNEEKLANYQSVGEYLYKEYFQKFKENSKEFTNVRNKKESYERCIAQSFLKDELKLIFKKQREFGFSFSKKFEEEVLSVAFYKRALKDFSHLVGNCSFFTDEKRAPKNSPLAFMFVALTRIINLLNNLKNTEGILYTKDDLNALLNEVLKNGTLTYKQTKKLLGLSDDYEFKGEKGTYFIEFKKYKEFIKALGDHSLSQDDLNEIAKDITLIKDEIKLKKALAKYDLNQNQIDSLSKLEFKDHLNISFKALKLITPLMLEGKKYDEACNELNLKVAINEDKKDFLPAFNETYYKDEVTNPVVLRAIKEYRKVLNALLKKYGKVHKINIELAREVGKNYSQRAKIEKEQNENYKAKKDAELECEKLGLKINSKNILKLRLFKEQKEFCAYSGEKIKISDLQDEKMLEIDHIYPYSRSFDDSYMNKVLVFTKQNQEKLNQTPFEAFGNDSAKWQKIEVLAKNLPTKKQKRILDKNYKDKEQKNFKDRNLNDTRYIARLVLNYTKDYLDFLPLSDDENTKLNDTQKGSKVHVEAKSGMLTSALRHTWGFSAKDRNNHLHHTIDAVIIAYANNSIVKAFSDFKKEQESNSAELYAKKISELDYKNKRKFFEPFSGFRQKVLDKIDEIFVSKPERKKPSGALHEETFRKEEEFYQSYGGKEGVLKALELGKIRKVNGKIVKNGDMFRVDIFKHKKTNKFYAVPIYTMDFALKVLPNKAVARSKKGEIKDWILMDENYEFCFSLYKDSLILIQTKDMQEPEFVYYNAFTSSTVSLIVSKHDNKFETLSKNQKILFKNANEKEVIAKSIGIQNLKVFEKYIVSALGEVTKAEFRQREDFKK

SEQ ID NO: 137 - protein, 987 aa, Campylobacter jejuni
  Campylobacter jejuni subsp. jejuni CF93-6
MARILAFDIGISSIGWAFSENDELKDCGVRIFTKVENPKTGESLALPRRLARSARKRLARRKARLNHLKHLIANEFKLNYEDYQSFDESLAKAYKGSLISPYELRFRALNELLSKQDFARVILHIAKRRGYDDIKNSDDKEKGAILKAIKQNEEKLANYQSVGEYLYKEYFQKFKENSKEFTNVRNKKESYERCIAQSFLKDELKLIFKKQREFGFSFSKKFEEEVLSVAFYKRALKDFSHLVGNCSFFTDEKRVPKNSPLAFMFVALTRIINLLNNLKNTEGILYTKDDLNALLNEVLKNGTLTYKQTKKLLGLSDDYEFKGEKGTYFIEFKKYKEFIKALGEHNLSQDDLNEIAKDITLIKDEIKLKKALAKYDLNQNQIDSLSKLEFKDHLNISFKALKLITPLMLEGKKYDEACNELNLKVAINEDKKDFLPAFNETYYKDEVTNPVVLRAIKEYRKVLNALLKKYGKVHKINIELAREVGKNHSQRAKIEKEQNENYKAKKDAELECEKLGLKINSKNILKLRLFKEQKEFCAYSGEKIKISDLQDEKMLEIDHIYPYSRSFDDSYMNKVLVFTKQNQEKLNQTPFEAFGNDSAKWQKIEVLAKNLPTKKQKRILDKNYKDKEQKNFKDRNLNDTRYIARLVLNYTKDYLDFLPLSDDENTKLNDTQKGSKVHVEAKSGMLTSALRHTWGFSAKDRNNHLHHAIDAVIIAYANNSIVKAFSDFKKEQESNSAELYAKKISELDYKNKRKFFEPFSGFRQKVLDKIDEIFVSKPERKKPSGALHEETFRKEEEFYQSYGGKEGVLKALELGKIRKVNGKIVKNGDMFRVDIFKHKKTNKFYGVPIYTMDFALKVLPNKAVARSKKGEIKDWILMDENYEFCFSLYKDSLILIQTKDMQEPEFVYYNAFTSSTVSLIVSKHDNKFETLSKNQKILFKNANEKEVIAKSIGIQNLKVFEKYIVSALGEVTKAEFRQREDFKNELR

SEQ ID NO: 138 - protein, 984 aa, Campylobacter jejuni
  Campylobacter jejuni subsp. jejuni CG8486
MARILAFDIGISSIGWAFSENDELKDCGVRIFTKAENPKTGESLALPRRLARSARKRLARRKARLNHLKHLIANEFKLNYEDYQSFDESLAKAYKGSLISPYELRFRALNELLSKQDFARVILHIAKRRGYDDIKNSDDKEKGAILKAIKQNEEKLANYQSVGEYLYKEYFQKFKENSKEFTNVRNKKESYERCIAQSFLKDELKLIFKKQREFGFSFSKKFEEEVLSVAFYKRALKDFSHLVGNCSFFTDEKRAPKNSPLAFMFVALTRIINLLNNLKNTEGILYTKDDLNALLNEVLKNGTLTYKQTKKLLGLSDDYEFKGEKGTYFIEFKKYKEFIKALGDHSLSQDDLNEIAKDITLIKDEIKLKKALAKYDLNQNQIDSLSKLEFKDHLNISFKALKLITPLMLEGKKYDEACNELNLKVAINEDKKDFLPAFNETYYKDEVTNPVVLRAIKEYRKVLNALLKKYGKVHKINIELAREVGKNYSQRAKIEKEQNENYKAKKDAELECEKLGLKINSKNILKLRLFKEQKEFCAYSGEKIKISDLQDEKMLEIDHIYPYSRSFDDSYMNKVLVFTKQNQEKLNQTPFEAFGNDSAKWQKIEVLAKNLPTKKQKRILDKNYKDKEQKDFKDRNLNDTRYIARLVLNYTKDYLDFLPLSDDENTKLNDTQKGSKVHVEAKSGMLTSALRHTWGFSAKDRNNHLHHAIDAVIIAYANNSIVKAFSDFKKEQESNSAELYAKKISELDYKNKRKFFEPFSGFRQKVLDKIDEIFVSKPERKKPSGALHEETFRKEEEFYQSYGGKEGVLKALELGKIRKVNGKIVKNGDMFRVDIFKHKKTNKFYAVPIYTMDFALKVLPNKAVARSKKGEIKDWILMDENYEFCFSLYKDSLILIQTKDMQEPEFVYYNAFTSSTVSLIVSKHDNKFETLSKNQKILFKNANEKEVIAKSIGIQNLKVFEKYIVSALGEVTKAEFRQREDFKK

SEQ ID NO: 139 - protein, 984 aa, Campylobacter jejuni
  Campylobacter jejuni subsp. jejuni HB93-13
MARILAFDIGISSIGWAFSENDELKDCGVRIFTKVENPKTGESLALPRRLARSARKRLARRKARLNHLKHLIANEFKLNYEDYQSFDESLAKAYKGSLISPYELRFRALNELLSKQDFARVILHIAKRRGYDDIKNSDDKEKGAILKAIKQNEEKLANYQSVGEYLYKEYFQKFKENSKEFTNVRNKKESYERCIAQSFLKDELKLIFKKQREFGFSFLKKFEEEVLSVAFYKRALKDFSHLVGNCSFFTDEKRAPKNSPLAFMFVALTRIINLLNNLKNTEGILYTKDDLNALLNEVLKNGTLTYKQTKKLLGLSDDYEFKGEKGTYFIEFKKYKEFIKALGEHNLSQDDLNEIAKDITLIKDEIKLKKALAKYDLNQNQIDSLSKLEFKDHLNISFKALKLITPLMLEGKKYDEAYNELNLKVAINEDKKDFLPAFNETYYKDEVTNPVVLRAIKEYRKVLNALLKKYGKVHKINIELAREVGKNHSQRAKIEKEQNENYKAKKDAELECEKLGLKINSKNILKLRLFKEQKEFCAYSGEKIKISDLQDEKMLEIDHIYPYSRSFDDSYMNKVLVFTKQNQEKLNQTPFEAFGNDSAKWQKIEVLAKNLPTKKQKRILDKNYKDKEQKDFKDRNLNDTRYIARLVLNYTKDYLDFLPLSDDENTKLNDTQKGSKVHVEAKSGMLTSALRHTWGFSAKDRNNHLHHAIDAVIIAYANNSIVKAFSDFKKEQESNSAELYAKKISELDYKNKRKFFEPFSGFRQKVLDKIDEIFVSKPERKKPSGALHEETFRKEEEFYQSYGGKEGVLKALELGKIRKVNGKIVKNGDMFRVDIFKHKKTNKFYAVPIYTMDFALKVLPNKAVARSKKGEIKDWILMDENYEFCFSLYKDSLILIQTKDMQEPELVYFNAFTSSTVSLIVSKHDNKFETLSKNQKILFKNANEKEVIAKSIGIQNLKVFEKYIVSALGEVTKAEFRQREDFKK

SEQ ID NO: 140 - protein, 987 aa, Campylobacter jejuni
  Campylobacter jejuni subsp. jejuni LMG 23210
MARILAFDIGISSIGWAFSENDELKDCGVRIFTKAENPKTGESLALPRRLARSARKRLARRKARLNHLKHLIANEFKLNYEDYQSFDESLAKAYKGSLISPYELRFRALNELLSKQDFARVILHIAKRRGYDDIKNSDDKEKGAILKAIKQNEEKLANYQSVGEYLYKEYFQKFKENSKEFTNVRNKKESYERCIAQSFLKDELKLIFKKQREFGFSFSKKFEEEVLSVAFYKRALKDFSHLVGNCSFFTDEKRAPKNSPLAFMFVALTRIINLLNNLKNTEGILYTKDDLNALLNEVLKNGTLTYKQTKKLLGLSDDYEFKGEKGTYFIEFKKYKEFIKALGDHSLSQDDLNEIAKDITLIKDEIKLKKALVKYDLNQNQIDSLSKLEFKDHLNISFKALKLITPLMLEGKKYDEACNELNLKVAINEDKKDFLPAFNETYYKDEVTNPVVLRAIKEYRKVLNALLKKYGKVHKINIELAREVGKNYSQRAKIEKEQNENYKAKKDAELECEKLGLKINSKNILKLRLFKEQKEFCAYSGEKIKISDLQDEKMLEIDHIYPYSRSFDDSYMNKVLVFTKQNQEKLNQTPFEAFGNDSAKWQKIEVLAKNLPTKKQKRILDKNYKDKEQKDFKDRNLNDTRYIARLVLNYTKDYLDFLPLSDDENTKLNDTQKGSKVHVEAKSGMLTSALRHTWGFSAKDRNNHLHHAIDAVIIAYANNSIVKAFSDFKKEQESNSAELYAKKISELDYKNKRKFFEPFSGFRQKVLDKIDEIFVSKPERKKPSGALHEETFRKEEEFYQSYGGKEGVLKALELGKIRKVNGKIVKNGDMFRVDIFKHKKTNKFYAVPIYTMDFALKVLPNKAVARSKKGEIKDWILMDENYEFCFSLYKDSLILIQTKDMQEPELVYFNAFTSSTVSLIVSKHDNKFETLSKNQKILFKNANEKEVIAKSIGIQNLKVFEKYIVSALGEVTKAEFRQREDFKNELR

SEQ ID NO: 141 - protein, 984 aa, Campylobacter jejuni
  Campylobacter jejuni subsp. jejuni LMG 23211
MARILAFDIGISSIGWAFSENDELKDCGVRIFTKAENPKTGESLALPRRLARSARKRLARRKARLNHLKHLIANEFKLNYEDYQSFDESLAKAYKGSLISPYELRFRALNELLSKQDFARVILHIAKRRGYDDIKNNGDEEKSEILKAIKQNEEKLVNYQSVGEYLYKEYFQKFKENSKEFINVRNKKESYERCITQSFLKDELKLIFQKQREFGFSFSKKFEEEVLSVAFYKRALKDFSHLVGNCSFFTDEKRAPKNSPLAFMFVALTRIINLLNNLKNTEGILYTKDDLNALLNEVLKNGTLTYKQTKKLLGLSDDYEFKGEKGTYFIEFKKYKEFIKALDEHSLSQDDLNEIAKDITLIKDEIKLKKALAKYDLNQNQIDSLSKLEFKDHLNISFKALKLITPLMLEGKKYDEACNELNLKVAINEDKKDFLPAFNETYYKDEVTNPVVLRAIKEYRKILNALLKKYGKVHKINIELAREVGKNHSQRAKIEKEQNENYKAKKDAEIECEKLGLKINSKNILKLRLFKEQKEFCAYSGEKIKISDLQDEKMLEIDHIYPYSRSFDDSYMNKVLVFTKQNQEKLNKTPFEAFGNDGVKWQKIEVLAKNLPEKKQKRILDKNYKDKEQKDFKDRNLNDTRYIARLVLNYTKDYLDFLPLSDDENTKLNDTQKGSKVHVEAKSGMLTSALRHTWGFSTKDRNNHLHHAIDAAIIAYANNSIVKAFSDFKKEQESNSAELYAKKISELDYKNKRKFFEPFSGFRQKVLDKIDEIFVSKPERKKPSGALHEETFRKEEEFYQSYGGKEGVLKALELGKIRKVNGKIVKNGDMFRVDIFKHKKTNKFYAVPIYTMDFALKVLPNKAVARSKKGEIKDWILMDENYEFCFSLYKDSLILIQTKDMQEPELVYFNAFTSSTVSLVVSKHDNKFETLSKNQKILFKNANEKEVIAKSIGIQNLKVFEKYIVSALGEVTKAEFRQREDFKK

SEQ ID NO: 142 - protein, 984 aa, Campylobacter jejuni
  Campylobacter jejuni subsp. jejuni LMG 23263
MARILAFDIGISSIGWAFSENDELKDCGVRIFTKAENPKTGESLALPRRLARSARKRLARRKARLNHLKHLIANEFKLNYEDYQSFDESLAKAYKGSLISPYELRFRALNELLSKQDFARVILHIVKRRGYDDIKNSDDKEKGAILKAIKQNEEKLANYQSVGEYLYKEYFQKFKENSKEFTNVRNKKESYERCIAQSFLKDELKLIFKKQREFGFSFSKKFEEEVLSVAFYKRALKDFSHLVGNCSFFTDEKRAPKNSPLAFMFVALTRIINLLNNLKNTEGILYTKDDLNTLLNEVLKNGTLTYKQTKKLLGLSDDYEFKGEKGTYFIEFKKYKEFIKALGDHSLSQDDLNEIAKDITLIKDEIKLKKALAKYDLNQNQIDSLSKLEFKDHLNISFKALKLITPLMLEGKKYDEACNELNLKVAINEDKKDFLPAFNETYYKDEVTNPVVLRAIKEYRKVLNALLKKYGKVHKINIELAREVGKNHSQRAKIEKEQNENYKAKKDAEFECEKLGLKINSKNILKLRLFKEQKEFCAYSGEKIKISDLQDEKMLEIDHIYPYSRSFDDSYMNKVLVFTKQNQEKLNKTPFEAFGNDSAKWQKIEVLAKNLPTKKQKRILDKNYKDKEQKDFKDRNLNDTRYIARLVLNYTKDYLDFLPLSDDENTKLNDTQKGSKVHVEAKSGMLTSALRHTWGFSTKDRNNHLHHAIDAVIIAYANNSIVKAFSDFKKEQESNSAELYAKKISELDYKNKRKFFEPFSGFRQKVLDKIDEIFVSKPERKKPSGALHEETFRKEEEFYQSYGGKEGVLKALELGKIRKVNGKIVKNGDMFRVDIFKHKKTNKFYAVPIYTMDFALKVLPNKAVARSKKGEIKDWILMDENYEFCFSLYKDSLILIQTKDMQEPEFVYYNAFTSSTVSLIVSKHDNKFETLSKNQKILFKNANEKEVIAKSIGIQNLKVFEKYIVSALGEVTKAEFRQREDFKK

SEQ ID NO: 143 - protein, 984 aa, Campylobacter jejuni
  Campylobacter jejuni subsp. jejuni LMG 23264
MARILAFDIGISSIGWAFSENDELKDCGVRIFTKVENPKTGESLALPRRLARSARKRLARRKARLNHLKHLIANEFKLNYEDYQSFDESLAKAYKGSLISPYELRFRALNELLSKQDFARVILHIAKRRGYDDIKNSDDKEKGAILKAIKQNEEKLANYQSVGEYLYKEYFQKFKENSKEFTNVRNKKESYERCIAQSFLKDELKLIFKKQREFGFSFSKKFEEEVLSVAFYKRALKDFSHLVGNCSFFTDEKRAPKNSPLAFMFVALTRIINLLNNLKNTEGILYTKDDLNALLNEVLKNGTLTYKQTKKLLGLSDDYEFKGEKGTYFIEFKKYKEFIKALGEHNLSQDDLNEIAKDITLIKDEIKLKKALAKYDLNQNQIDSLSKLEFKDHLNISFKALKLITPLMLEGKKYDEACNELNLKVAINEDKKDFLPAFNETYYKDEVTNPVVLRAIKEYRKVLNALLKKYGKVHKINIELAREVGKNHSQRAKIEKEQNENYKAKKDAELECEKLGLKINSKNILKLRLFKEQKEFCAYSGEKIKISDLQDEKMLEIDHIYPYSRSFDDSYMNKVLVFTKQNQEKLNKTPFEAFGNDSAKWQKIEVLAKNLPTKKQKRILDKNYKDKEQKDFKDRNLNDTRYIARLVLNYTKDYLDFLPLSNDENTKLNDTQKGSKVHVEAKSGMLTSALRHTWGFSTKDRNNHLHHAIDAVIIAYANNSIVKAFSDFKKEQESNSAELYAKKISELDYKNKRKFFEPFSGFRQKVLDKIDEIFVSKPERKKPSGALHEETFRKEEEFYQSYGGKEGVLKALELGKIRKVNGKIVKNGDMFRVDIFKHKKTNKFYAVPIYTMDFALKVLPNKAVARSKKGEIKDWILMDENYEFCFSLYKDSLILIQTKDMQEPEFVYYNAFTSSTVSLIVSKHDNKFETLSKNQKILFKNANEKEVIAKSIGIQNLKVFEKYIVSALGEVTKAEFRQREDFKK

SEQ ID NO: 144 - protein, 987 aa, Campylobacter jejuni
  Campylobacter jejuni subsp. jejuni LMG 23269
MARILAFDIGISSIGWAFSENDELKDCGVRIFTKAENPKTGESLALPRRLARSARKRLARRKARLNHLKHLIANEFKLNYEDYQSFDESLAKAYKGSLISPYELRFRALNELLSKQDFARVILHIAKRRGYDDIKNNGDEEKSEILKAIKQNEEKLVNYQSVGEYLYKEYFQKFKENSKEFINVRNKKESYERCIAQSFLKDELKLIFQKQREFGFSFSKKFEEEVLSVAFYKRALKDFSHLVGNCSFFTDEKRAPKNSPLAFMFVALTRIINLLNNLKNTEGILYTKDDLNTLLNEVLKNGTLTYKQTKKLLGLSDDYEFKGEKGTYFIEFKKYKEFIKALGEHNLSQDNLNEIAKDITLIKDEIKLKKALAKYDLNQNQIDSLSKLEFKDHLNISFKALKLITPLMLEGKKYDEAYNELNLKVAINEDKKDFLPAFNETYYKDEVTNPVVLRAIKEYRKVLNALLKKYGKVHKINIELAREVGKNHSQRAKIEKEQNENYKAKKDAELECEKLGLKINSKNILKLRLFKEQKEFCAYSGEKIKISDLQDEKMLEIDHIYPYSRSFDDSYMNKVLVFTKQNQEKLNQTPFEAFGNDSAKWQKIEVLAKNLPTKKQKRILDKNYKDKEQKDFKDRNLNDTRYIARLVLNYTKDYLDFLPLSDDENTKLNDTQKGSKVHVEAKSGMLTSALRHTWGFSAKDRNNHLHHAIDAVIIAYANNSIVKAFSDFKKEQESNSAELYAKKISELDYKNKRKFFEPFSGFRQKVLDKIDEIFVSKPERKKPSGALHEETFRKEEEFHQSYGGKEGVLKALELGKIRKVNGKIVKNGDMFRVDIFKHKKTNKFYAVPIYTMDFALKVLPNKAVVQGKDKKSGLIKDWILMDENYEFCFSLYKDSLILIQTKDMQEPELVYFNAFTSSTVSLIVSKHDNKFETLSKNQKILFKNANEKEVIAKSIGIQNLKVFEKYIVSALGEVTKAEFRQREDFKK

SEQ ID NO: 145 - protein, 987 aa, Campylobacter jejuni
  Campylobacter jejuni subsp. jejuni LMG 23357
MARILAFDIGISSIGWAFSENDELKDCGVRIFTKAENPKTGESLALPRCLARSARKRLARRKARLNHLKHLIANEFKLNYEDYQSFDESLAKAYKGSLISPYELRFRALNELLSKQDFARVILHIAKRRGYDDIKNNGDEEKGEILKAIKQNEEKLVSYQSVGEYLYKEYFQKFKENSKEFINVRNKKESYERCIAQSFLKDELKLIFQKQRKFGFSFSKKFEEEVLSVAFYKRALKDFSHLVGNCSFFTDEKRAPKNSPLAFMFVALTRIINLLNNLKNTEGILYTKDDLNTLLNEVLKNGTLTYKQTKKLLGLSNDYEFKGEKGTYFIEFQKYKEFVKALGEHNLSQDDLNEIAKDITLIKDEIKLKKALAKYDLNQNQIDSLSKLEFKDHLNISFKALKLITPLMLEGKKYDEACNELNLKVAINEDKKDFLPAFNETYYKDEVTNPVVLRAIKEYRKVLNALLKKYGKVHKINIELAREVGKNHSQRAKIEKEQNENYKAKKDAELECEKLGLKINSKNILKLRLFKEQKEFCVYSGEKIKISDLQDEKMLEIDHIYPYSRSFDDSYMNKVLVFTKQNQEKLNKTPFETFGNDRVKWQKIEVLAKNLPTKKQKRILDKNYKDKEQKDFKDRNLNDTRYIARLVLNYTKDYLDFLPLSDDENTKLNDTQKGSKVHVEAKSGMLTSTLRHTWGFSTKDRNNHLHHAIDAAIIAYANNSIVKAFSDFKKEQESNTAELYAKKISELDYKNKRKFFEPFSGFRQKLLDKIDEIFVSKPERKKPSGALHEETFRKEEEFYQSYGGKEGVLKALELGKIRKVNGKIVSNGDMFRVDIFKHKKTNKFYAVPIYTMDFALKVLPNKAVVQGKDKKSGLIKDWILMDENYEFCFSLYKDSLILIQTKDMQEPELVYYERLDSSNASLTVSKHDNKFETLSKNQKILFKNANEKEVIAKSIGIQNLKVFEKYIVSALGEVTKAEFRQREDFKK

SEQ ID NO: 146 - protein, 984 aa, Campylobacter jejuni
  Campylobacter jejuni subsp. jejuni NCTC 11168 = ATCC 700819
MARILAFDIGISSIGWAFSENDELKDCGVRIFTKVENPKTGESLALPRRLARSARKRLARRKARLNHLKHLIANEFKLNYEDYQSFDESLAKAYKGSLISPYELRFRALNELLSKQDFARVILHIAKRRGYDDIKNSDDKEKGAILKAIKQNEEKLANYQSVGEYLYKEYFQKFKENSKEFTNVRNKKESYERCIAQSFLKDELKLIFKKQREFGFSFSKKFEEEVLSVAFYKRALKDFSHLVGNCSFFTDEKRAPKNSPLAFMFVALTRIINLLNNLKNTEGILYTKDDLNALLNEVLKNGTLTYKQTKKLLGLSDDYEFKGEKGTYFIEFKKYKEFIKALGEHNLSQDDLNEIAKDITLIKDEIKLKKALAKYDLNQNQIDSLSKLEFKDHLNISFKALKLVTPLMLEGKKYDEACNELNLKVAINEDKKDFLPAFNETYYKDEVTNPVVLRAIKEYRKVLNALLKKYGKVHKINIELAREVGKNHSQRAKIEKEQNENYKAKKDAELECEKLGLKINSKNILKLRLFKEQKEFCAYSGEKIKISDLQDEKMLEIDHIYPYSRSFDDSYMNKVLVFTKQNQEKLNQTPFEAFGNDSAKWQKIEVLAKNLPTKKQKRILDKNYKDKEQKNFKDRNLNDTRYIARLVLNYTKDYLDFLPLSDDENTKLNDTQKGSKVHVEAKSGMLTSALRHTWGFSAKDRNNHLHHAIDAVIIAYANNSIVKAFSDFKKEQESNSAELYAKKISELDYKNKRKFFEPFSGFRQKVLDKIDEIFVSKPERKKPSGALHEETFRKEEEFYQSYGGKEGVLKALELGKIRKVNGKIVKNGDMFRVDIFKHKKTNKFYAVPIYTMDFALKVLPNKAVARSKKGEIKDWILMDENYEFCFSLYKDSLILIQTKDMQEPEFVYYNAFTSSTVSLIVSKHDNKFETLSKNQKILFKNANEKEVIAKSIGIQNLKVFEKYIVSALGEVTKAEFRQREDFKK

SEQ ID NO: 147 - protein, 983 aa, Campylobacter jejuni
  Campylobacter jejuni subsp. jejuni NW
MARILAFDIGISSIGWAFSENDELKDCGVRIFTKAENPKTGESLALPRRLARSARKRLARRKARLNHLKHLIANEFKLNYEDYQSFDESLAKAYKGSLISPYELRFRALNELLSKQDFARVILHIAKRRGYDDIKNSDDKEKGAILKAIKQNEEKLANYQSVGEYLYKEYFQKFKENSKEFTNVRNKKESYERCIAQSFLKDELKLIFKKQREFGFSFSKKFEEEVLSVAFYKRALKDFSHLVGNCSFFTDEKRAPKNSPLAFMFVALTRIINLLNNLKNTEGILYTKDDLNALLNEVLKNGTLTYKQTKKLLGLSDDYEFKGEKGTYFIEFKKYKEFIKALGEHNLSQDDLNEIAKDITLIKDEIKLKKALAKYDLNQNQIDSLSKLEFKDHLNISFKALKLVTPLMLEGKKYDEACNELNLKVAINEDKKDFLPAFNETYYKDEVTNPVVLRAIKEYRKVLNALLKKYGKVHKINIELAREVGKNHSQRAKIEKEQNENYKAKKDAELECEKLGLKINSKNILKLRLFKEQKEFCAYSGEKIKISDLQDEKMLEIDHIYPYSRSFDDSYMNKVLVFTKQNQEKLNQTPFEAFGNDSAKWQKIEVLAKNLPTKKQKRILDKNYKDKEQKNFKDRNLNDTRYIARLVLNYTKDYLDFLPLSDDENTKLNDTQKGSKVHVEAKSGMLTSALRHTWGFSAKDRNNHLHHAIDAVIIAYANNSIVKAFSDFKKEQESNSAELYAKKISELDYKNKRKFFEPFSGFRQKVLDKIDEIFVSKPERKKPSGALHEETFRKEEFYQSYGGKEGVLKALELGKIRKVNGKIVKNGDMFRVDIFKHKKTNKFYAVPIYTMDFALKVLPNKAVARSKKGEIKDWILMDENYEFCFSLYKDSLILIQTKDMQEPEFVYYNAFTSSTVSLIVSKHDNKFETLSKNQKILFKNANEKEVIAKSIGIQNLKVFEKYIVSALGEVTKAEFRQREDFKK

SEQ ID NO: 148 - protein, 987 aa, Campylobacter jejuni
MARILAFDIGISSIGWAFSENDELKDCGVRIFTKAENPKTGESLALPRRLARSARKRLARRKARLNHLKHLIANEFKLNYEDYQSFDESLAKAYKGSLISPYELRFRALNELLSKQDFARVILHIAKRRGYDDIKNNGDEEKSEILKAIKQNEEKLVNYQSVGEYLYKEYFQKFKENSKEFINVRNKKESYERCIAQSFLKDELKLIFQKQREFGFSFSKKFEEEVLSVAFYKRALKDFSHLVGNCSFFTDEKRAPKNSPLAFMFVALTRIINLLNNLKNTEGILYTKDDLNTLLNEVLKNGTLTYKQTKKLLGLSDDYEFKGEKGTYFIEFKKYKEFIKALGEHNLSQDNLNEIAKDITLIKDEIKLKKALAKYDLNQNQIDSLSKLEFKDHLNISFKALKLITPLMLEGKKYDEAYNELNLKVAINEDKKDFLPAFNETYYKDEVTNPVVLRAIKEYRKVLNALLKKYGKVHKINIELAREVGKNHSQRAKIEKEQNENYKAKKDAELECEKLGLKINSKNILKLRLFKEQKEFCAYSGEKIKISDLQDEKMLEIDHIYPYSRSFDDSYMNKVLVFTKQNQEKLNQTPFEAFGNDSAKWQKIEVLAKNLPTKKQKRILDKNYKDKEQKDFKDRNLNDTRYIARLVLNYTKDYLDFLPLSDDENTKLNDTQKGSKVHVEAKSGMLTSALRHTWGFSAKDRNNHLHHAIDAVIIAYANNSIVKAFSDFKKEQESNSAELYAKKISELDYKNKRKFFEPFSGFRQKVLDKIDEIFVSKPERKKPSGALHEETFRKEEEFYQSYGGKEGVLKALELGKIRKVNGKIVKNGDMFRVDIFKHKKTNKFYPVPIYTMDFALKVLPNKAVVQGKDKKSGLIKDWILMDENYEFCFSLYKDSLILIQTKDMQEPELVYFNAFTSSTVSLIVSKHDNKFETLSKNQKILFKNANEKEVIAKSIGIQNLKVFEKYIVSALGEVTKAEFRQREDFKK

SEQ ID NO: 149 - protein, 1003 aa, Campylobacter lari
MRILGFDIGINSIGWAFVENDELKDCGVRIFTKAENPKNKESLALPRRNARSSRRRLKRRKARLIAIKRILAKELKLNYKDYVAADGELPKAYEGSLASVYELRYKALTQNLETKDLARVILHIAKHRGYMNKNEKKSNDAKKGKILSALKNNALKLENYQSVGEYFYKEFFQKYKKNTKNFIKIRNTKDNYNNCVLSSDLEKELKLILEKQKEFGYNYSEDFINEILKVAFFQRPLKDFSHLVGACTFFEEEKRACKNSYSAWEFVALTKIINEIKSLEKISGEIVPTQTINEVLNLILDKGSITYKKFRSCINLHESISFKSLKYDKENAENAKLIDFRKLVEFKKALGVHSLSRQELDQISTHITLIKDNVKLKTVLEKYNLSNEQINNLLEIEFNDYINLSFKALGMILPLMREGKRYDEACEIANLKPKTVDEKKDFLPAFCDSIFAHELSNPVVNRAISEYRKVLNALLKKYGKVHKIHLELARDVGLSKKAREKIEKEQKENQAVNAWALKECENIGLKASAKNILKLKLWKEQKEICIYSGNKISIEHLKDEKALEVDHIYPYSRSFDDSFINKVLVFTKENQEKLNKTPFEAFGKNIEKWSKIQTLAQNLPYKKKNKILDENFKDKQQEDFISRNLNDTRYIATLIAKYTKEYLNFLLLSENENANLKSGEKGSKIHVQTISGMLTSVLRHTWGFDKKDRNNHLHHALDAIIVAYSTNSIIKAFSDFRKNQELLKARFYAKELTSDNYKHQVKFFEPFKSFREKILSKIDEIFVSKPPRKRARRALHKDTFHSENKIIDKCSYNSKEGLQIALSCGRVRKIGTKYVENDTIVRVDIFKKQNKFYAIPIYAMDFALGILPNKIVITGKDKNNNPKQWQTIDESYEFCFSLYKNDLILLQKKNMQEPEFAYYNDFSISTSSICVEKHDNKFENLTSNQKLLFSNAKEGSVKVESLGIQNLKVFEKYIITPLGDKIKADFQPRENISLKTSKKYGLR

SEQ ID NO: 150 - protein, 1430 aa, Capnocytophaga canimorsus
MKHILGLDLGTNSIGWAVVKEAQNDNEQSEIVDVGVRVNPLTTDEKTNFEKGKPISTNADRTLKRSARRNLQRYKLRRKELIELLKEHQLISTDTILTENGKGTTFQTLELRAKSAKEKISLEELARVFLTINKKRGYKSSRKAKNEDEGQLIDGMEIAKRLYEENLTTGQLSLQLLKEGKKSLPDYYRSDLQFELDKVWNFQKQFHSHILTDEFYAQLKGKGQRATSALFLAKYQIYTAENKGSREDKKLQAYQWRVDALSKELTREQLAFVITEINNNLNNSSGYLGAISDRSKELYFNNETVGEYLWKQIAANPHTSLKNQVFYRQDYLDEFEQIWKTQSAFYPEILTDELKKELRDVVIFYQRKLKSQKSLVSFCEFENKEIEIKKEDGTSTKKVIGLKVAPKSSPLFQEFKIWQNLNNVLIRKKGSKTKKVDKNQQAVLFEEEKTIFELDLEAKQALFNELNLKGNLKAYYCLEILGYSPKEWEMNYSVLEGNRTNKALYEAYLKITDLEGYDAKNHLKVKLNKDEVELDDLKVPASEIKDMVQAIFKEAGINTDILHFNAELDGKDFENQASYQLWHLLYSYEGDDSKSGNELLYKLLETKFGFKKEYAQILANVSLSDDYGSLSTKAMRKIHPYIKENKFSTACELAGYRHSKHSLTKEENDNRVLKDSLEVLKKNSLRQPVVEKILNQMINLVNALLKKYRTENPNFKFDEIRIELARELKKNAEERANMTVNINKAKTEHEKIIKILKNEFGLPNPTRNDIIRYRLYEELKANGYKDLYTNEYIEKQDLFTKNIDIEHIIPKSRVFDDSFSNKTLSFRKTNLDKGERTAFDYIESKFGADKLEEYVARVEDLYKNNIISKAKYQKLLKKESEIGDGFVERDLRETQYIAKKAKEILLQITPNVLSTSGGITDRLREDWDLINVMKELNLPKYRALGLTQMEDRKYGQQVEVIIDWTKRNDHRHHAMDALTVAFTKHNHIQYLNYLNARKNEKHREHSNIMGIQQLETIKVTDKNGNEKRVFKAPMPNFRQVTKAFLENVLISHKAKNKVVTKNKNKVAGSNKVQEVLTPRGQLHKETVYGKYQYYVQKEEKIGGKFDLETIKKVANPLYQSLLKKRLEENGGDPKKAFTGKNSLAKNPIYLDDAQTEQLPEKVKLVWLENSFSIRKDITPENFKDEKLIDKILDEGVKRILKERLQSFGNDAKKAFSDLDKNPIWLNKEKGIAIKRVAISGVANAEPLHTKKDHLGKEILDKEGKSIPVDFISTGNNHHVAVYRDEKGNLQEKVVSVFEAVVRANQGLPIIDKTYNQHLGWEFLFTMKQNEMFVFSNESTGFNPNDIDLLDPKNKKIISPNLFRVQKFSKLQYGNSFVREFVFRHHLETTVEDRKELQGITYKQMKNSAFFNDIIKVRINHLGGIVSVGEY

SEQ ID NO: 151 - protein, 1436 aa, Capnocytophaga gingivalis
  Capnocytophaga gingivalis ATCC 33624
MKYIKYILGLDIGSNSIGWALIQLDLLQKTKRIIAAGSRIIPMDQKVLSDFGKGITISPTAQRTSYRNARHCRERHLLRRERLHRVLHILGFLPTHYDKQIDFSKRYGKFVDNTEPKIAYNEGKFLFMDSFQEMLSDFKSHQPDLFYTKKNGEESKIPYDWTIYYLRKKALSQKISKEELAWIILNFNQKRGYYQLREEEGNKENDFEIISSKIISVIKKDKDKKYNKYWYDIILENGLVYQAAFYNDFVYNWINQDREFIIERTSLKNGAEKVKLSYLPTFDEIDKMDKKEQDKYYKKIKIKTENSIGNKTVGCYIYDHILQNPNEKIKGKLVRTIERKYYKEELKAILEKQIALQPELFTDQLLADCIRELYSKNEAQQRNLAARDFVHLLVEDIIFYQRPLRRQKSTLANCSLESRSYIDKDSHTRKEAPLKVCPKSNPYYQEFRVLQWLQNLKIYEIDSDQEVTHQFIKTLEDKQQLFEFLMAQKEIDCEELLKYFLNQTYPNAKEKALKSELKKWKDTYRWNYVYDIGEKSSKKYPMNETRYELKRHLEKVANLPDDFLSSEVEYLLWHLIYSVKDKVAYEKGLKKFAQKHHLDKDSFVESFKKFNPYPSEYGSFSEKAIRKLLPLMRFGAHWDFNHIDKNTQKRIEDLITGVENEEIRTILREKAEKYQLEKETDFQDLPLWLAQYIVYNRHAEASSLEKWTSVNDLETYLNEFKQHSLRNPIVEQVVMETLRVVRDIWQQYGQGQASFFNEIHIELGRELKKTAKEREKLSKQNQKNEDINLSIKEKLKELEKYNTRAYSITHQEKYKLWLEQKHISPYTGQIISPENLFTDNYEIEHIIPQSRFFDDSLSNKVVCESIVNKAPYKDRQLGLEFIKNQGGRIVKELSKENKTIKIFTEEQYRTFIKEHYSNNPEKTKKLLLEEIPEKMVARQMNDTCYISKFISEILSKIVRSDEQDEGVHSKNVILCTGKITSILRQDWGLNDIWDNLILPRFERMNNLLQKEKFTIYSIEKQKKIPVVPINDQFKSFQKKRIDHRHHAMDAIIIACTTREHINYINNQHALEKEKDKKEKQEERDKLREKLCIKKYNNRSEGNYSWIFKKPWDTFTQEVRVALEDIVVSFKQNLRVINKATNYYERWVEENGKYIKKMVKQEGTNWAIRKPLHEETISGKIYLDREKITKNDILTATRKTVDSSFDDKRIKKITDTGIQKILLNYLKYKGSPEIAFSPEGLEELNKNLSIYNDGKPHKPIYKVRIYEKGSGRFALGEKGRKYKKYVQGASNLYFGIYQGAKRSFATIPLNEVIERQKQGLPSVPEYNEKGDLLLFSLSPNDLVYVPIEGEIIENIDFRNLSKEQKERIYNVNDFSSTCYFTPNRIAKAIFPKEVDLQRKGDKLSGSYDTKTASLEGIQIKEVCIKLKVDRLGNISKA

SEQ ID NO: 152 - protein, 1426 aa, Capnocytophaga ochracea
MKNILGLDLGTTSIGFAHIVEDENKEKSEIKELGVRIVSLTTDEQSDFEKGKSITTNANRTLKHGARLNLDRYQQRRKYLIDLLQKANLITPSSILAENGKNTTHSTWQLRAKAVTERIEKEEFARILLAINKKRGYKSSRKAKTEDEGQAIDGMAIAKRLYDENLTPGQLSLQLLQQNKKLLPDFYRSDLQKEFDLVWNFQKQFYPDILTDIFYKELQGKGKDATSKAFSKRYHFDTTENKGSKESVRLQAYQWRAEAISKQLSKEEVAYVLTEINNNLNNASGYLGAISDRSKELYFNRQTVGQYLYAKLQENRHNSLKNKVFYRQDYLDEFERIWETQASFHKELTDELKKQIRDVVIFYQRKPKSQKGLISFCEFESKEIEIEKDGKTITKNIGARVVPKSSPLFQEFKIWQILNNVICKRKGIRKKKISAKTTQLDLLNESSQTIFSLDMECKQLLFDELNLKGDLKSDKVLKLLGYSPQEWEINYNQLEGNRTQKALYEAYLKIVEMEAHDVKDILQIKSAKDDWSLDESPLSASEIREKVKAIFQTLGICTKILYFDPLLPVKEFEEQDSYQLWHLLYSYESDDSTSGNETLYRILEKKYAFKREHARILANVALQDDYGSLSTKAIRKIYPNIKENQYSTACEKAGYKHSKLSLTTEELEARELKNIIPLLKKNALRNPVVEKILNQMINVVNALIEKNSERDAEGKITKYFHFDEIRIELARELKKNAQKRYEMTQNINKAKLEHQKISEILQKEFGIKNPTKSDIIRYRLYQELEHNGYKELYTNAPIARDMLFSKNIEIEHIVPKARVFDDSFSNKTLTFHRINSDKGEYTAFDYITSLNSEEELNQYLTRVENAYKTKSISPTKYKNLLKKASEIGDDFINRDLRDTQYIAKKAKEILFQVTKNVLSTSGSITDRLREDWGLVDVMKELNMPKYQSLGLTEVEERKDGNKVTVIKNWTKRNDHRHHAMDALTVAFTKPSYIQYLNHLNARKDENNKNYSVILAIEEKETIKVPTNNGKNKRVFIEPIPNFRQVAKKHLEEIFISHKAKNKVVTKNTNKPAGTDKQQITLTPRGQLHKETIYGKYQYYINKEEKIGVKFDERTIAKVSNPVYREALLKRLQANDNDPKKAFAGKNALSKNPIYLDESKTKTLPEKVNLTYLEEDFSIRKDISPDNFKDLKSIEKVIDQGVKRILIKRLQAYDNDPKKAFVDLEKNPIWLNKEKGIAIKRVTISGVNNAQPLHIGKDHLGKTTLNKEGKEIPVDYVSTGNNHHVAIYRDKEGNLQEQIVSFFDAVVRAQQGIPIIDKTYKQAEGWQFLFTMKQNEMFVFPNATTGFNPAEIDLLDPKNKKLISPNLFRVQKIATKDYFFRHHLETNVETDNILKNVTWKREGLSGLKDIVKVRINHLGDIVSIGEY

SEQ ID NO: 153 - protein, 1437 aa, Capnocytophaga sp.
  Capnocytophaga sp. CM59
MKYIKYILGLDIGSNSIGWALIQLDLLQKTKRIIATGSRIIPMDQKVLSDFGKGITISPTAQRTSYRNARHCRERHLLRRERLHRVLHILGFLPTHYDKQIDFSKRYGKFVDNTEPKIAYNERKFLFMDSFQEMLADFKIHQPDLFYTKKNGEESKIPYDWTIYYLRKKALSRKISKEELAWIILNFNQKRGYYQLREEEEENKENDFEIISSKIISVIKKDKDKKYNKYWYDIILENGLVYQAAFYNDFVYNWINQDREFIIERISLKNGTEKVKLSYLPTFDEIDKMDKKEQDKYYKKIKIKTENSIGNKTVGCYIYDHILQNPNEKIKGKLVRTIERKYYKEELKAILEKQVALQPELFTDQLFADCIRELYSKNEAQQRNLAARDFVHLFVEDIIFYQRSLRRQKSTLANCSLESRSYIDKDSHTRKEAPLKVCPKSNPYYQEFRVLQWLQNLKIYEIDTDQEVTHEFIKTLEDKQQFFDFLMNQKEIDCEELLKYFLNQTYPNAREKALKSELKKWKDTYRWNYVYDIGEKSSKKYPMNETRYELKRHLEKVANLPDDFLSSEVEYLLWHLIYSVKDKVAYEKGLKTFAQKHHLDKDSFVESFKKFKPYPSEYGSFSEKAIRKLLPLMRFGSYWDFNHIDKNTQKRIEDLITGVENEEIRTILREKAEKYQLEKETDFQDLPLWLAQYIVYNRHAEASSLEKWTSVNDLETYLNEFKQYSLRNPIVEQVVMETLRVVRDIWQQYGQGQASFFDEIHIELGRELKKTAKEREKLSKQNQKNEDINLSIKEKLKELEKYNTRAYSITHQEKYKLWLEQKHISPYTGQIISPENLFTDNYEIEHIIPQSRFFDDSLSNKVVCESIVNKAPYKDRQLGLEFIKNQGGRIVKELSTENKTIKIFTEEQYRTFIKEHYSNNPEKTKKLLLEEIPEKMVARQMNDTCYISKFISEILSKIVRSDEQDEGVHSKNVILCTGKITSALKQDWGVNDVWNDLILPRFERMNDLTQSTLFTTYNEKYQKYLPTVPMEYSNGFQKKRIDHRHHAMDAIIIACATREHINYINNQHALEKGKDKKEKQKEHDKLREKLCIKKDNKGSEENYSWIFKKPWDTFTQEVQAALEGIVVSFKQNLRVINKATNYYERWVEENGKYIKKMVKQEGTNWAIRKPLHEETISGKIYLDREEITKNDILTATRKTVDSSFDEKRIKKITDTGIQKILLNYLKYKGSPEIAFSPEGLEELNKNLSIYNDGKPHKPIYKVRIYEKGSGRFALGEKGRKYKKYVQGAPNLYFGIYQGANKRSFATIPLNEVIERQKQGRPSIPEYNEKGDPLLFSLSPNDLVYVPVEGEIIEDIDFQNLSKEQKERIYNVNDFSSTCYFTPNRIAKAIFPKEVDLQRKGDKLPGSYDTKTASLEGIQIKEVCIKLKIDRLGNISKA

SEQ ID NO: 154 - protein, 1471 aa, Capnocytophaga sp.
  Capnocytophaga sp. oral taxon 324 str. F0483
MCKYFYIKNFITFVLSKSIIPMKHILGLDLGSNSIGWAFVQQDFENKQGKIIATGSRIIPMDQGILGDFERGNTVSQTAERTTYRSTRRLRERHLLRRERLHRVLHILGFLPPHYDAQIDFTKRYGKFIDNAEPKIAYNNGNFIFMNSFNEMIEDFKKHQPQLFYKKSNGEESKIPYDWTIYYLRKKALSQKITQQELAWLILHFNQKRGYYQLRGEEETENPNKEVAFHSLKVVDVEAEAPNKKGEIWYTIRLENGWIYRRTSKIPLDDWKGKTRDFIVTTDLNDDGTIKVDKEGKEKRSFRAPDENDWNLLKKKTEHDIDFSGKTVGAYIYDHLLQNPNQKIKGKLVRTIERKYYKDELKAILAKQIALQPELFTETLLADCIRELYRKNETQQQNLLSKDFLHLFVEDIIFYQRPLRSKKSTIANCTLEKRSYIDKETNERKDAPIKVCAKSNPYYQEFRVLQWLQNLRIYEIETDREVTAEFIETPQDCEALFNFLMSQKEIDNKGLLKYFLFAKNPQIKDKAAKSELKKWLTTYRWNYVYDAADNSSKKYPMNETGYELQRYLQKVEGLPANFLTFDITYQLWHLLYSVKDKVEFEKALKKFAKKKQLDKTSFVDSFKNFKPYPNEYGSFSEKAIKKLLPLMRFGNHWDFNRIDVSTQKRIDDLINGVANEDIRTIIREKAEKYQLNSETCFQDLPLWLAQYVVYNRHAEATDIEKWTSVSDLEAYLEDFKQHSLRNPIVEQVVTETLRVVRDIWQQYGGGQANFFDEIHIELGRELKKTAEERKQLSDKNQENESTNLRIKKLLAELKEDASIQNVRPYSLVQQELLKIYEEGVFSATDEVEEDIQKIRKKAEPSKADLQRYKLWLEQKYKSPYTGEVISLTKLFTEEYEIEHIIPQSRYYDDSLSNKVICESAVNKLKTNQLGLEFIQNHHGEKVRITANKEVTIFTEEQYKEFVKKHYANNSAKQQKLLLNEIPEKMVARQLNDTRYISKYISEILSKIVRSDEKDEGVNSKNIIPCTGKITTALKQDWGLNDVWNKLILPRFERMNQLTQTQLFTSYNDRLQKNLPTVPIEYSQGFQKKRIDHRHHAMDALVIACATREHINYMNNQHALDKSKDKKEKQQSRIDLRTILCEKKNNNWQFKKPWSTFTQEAKEALEHIVVSFKQNLRVINKATNYYEKWEEKNGVLVKKKVKQEGTNWAIRKPLHKETVSGKIVLDRKIGKDKILTATRKAVDITFTEKIISSITDTGIQKILLNYLKYKGSPEVAFSTEGLEELNKNIAQYNNGKKHQPIYKVRIFEEGSKFPLGETGAKATKYVEAAKGTNLFFGVYQGKGKRTYATIPLNEVIERQKQGLPSVPERNEKGEPLLFSLSPNDLVYVPMEGEIAETIDFNNLSKEQKERIYKTVSFTGNQCFFVQEAVATPIVNKMEYSPLNKMERDILGTMIKEVCIKLKVDRLGNITKA

SEQ ID NO: 155 - protein, 1450 aa, Capnocytophaga sp.
  Capnocytophaga sp. oral taxon 326 str. F0382
MKRILGLDLGSNSIGWAFVEQDFENKQGKIIATGSRIIPMDQGILGDFEKGNTVSQTAERTTYRSMRRLRERHLLRRERLHRVLHILGFLPPHYDAQIDFTKRYGKFIDNAEPKIAYNNGNFIFMNSFNEMIEDFKKYQPQLFYKKSNGEESKIPYDWTIYYLRKKVLSQKITQQELAWLILHFNQKRGYYQLRGEEETENPNKEVAFHSLKVVDVEAEAPNKKGEIWYTIRLENGWIYRRTSKIPLDDWKGKTRDFIVTTDLNDDGTIKVDKEGKEKRSFRAPDENDWNLLKKKTEHDIDFSGKTVGAYIYDHLLQNPNQKIKGKLVRTIERKYYKDELKAILAKQIALQPELFTETLLADCIRELYRKNETQQQNLLSKDFLHLFVEDIIFYQRPLRSKKSTIANCTLEKRSYIDKETNERKDTFIKVCAKSNPYYQEFRVLQWLQNLRIYEIETDREVTAEFIETAEDYEALFNFLMSQKEIDNEGLLKYFLFAKNPQIKDKVAKSELKKWLTTYRWNYVYDAADNSSKKYPMNETGYDLQRYLQKVEGLPANFLTFDITYRLWHLLYSVKDKVEFEKALKKFAQEYQLDEASFVDSFKNFKPYPNEYGSFSEKAIKKLLPLMRFGNHWDFNRIDVSTQKRIDDLINGVANDEIRTIIREKAEKYQLNSESCFQGLPLWLAQYVVYNRHAEATDIEKWTSVSDLETYLEDFKQHSLRNPIVEQVVTETLRVVRDIWQQYGGGQANFFDEIHIELGRELKKTAEERKQLSNRNQENENTNLRIKKLLAELKEDASIQNVRPYSPVQQELLKIYEEGVFSSTDQVEEDIQKIRKKAEPTTPEIQRYKLWLEQKYKSPYTGEVISLTKLFTEEYEIEHIIPQSRYYDDSLSNKVICESAVNKLKTNQLGLEFIQNHHGEKVRITGNKEVTIFTEEQYKEFVKKHYANNSAKQQKLLLNEIPEKMVARQLNDTRYISKYISEILSKIVRSDEKDEGVNSKNVIPCTGKITTALKQDWGLNDVWNELILPRFERMNQLTQTQLFTSYNDRFQKNLPTVPIEYSQGFQKKRIDHRHHAMDALVIACATREHINYMNNQHALDKNKDKKEKQQSRIDLRTILCEKKNNNWQFKKPWSTFTQETKEALEHIVVSFKQNLRVINKATNYYEKWEEKNGVLVKKKVKQEGTNWAIRKPLHKETVSGKIVLDRKIGKDKILTATRKEVDITFTEKIISSITDTGIQKILLNYLNYKGSPEVAFSAEGLEELNKNIAQYNDGKKHQPIYKVRIFEEGSKFPLGETGAKATKFVEAAKGTNLFFGVYQGKEKRSYATIPLNEVIERQKQGLPSVPERNEKGEPLLFSLSPNDLVYVPMEGEIAETIDFNNLSKEQKERIYKTVSFTGNQCFFVQEAVATPIVNKMEYSPLNKMERDILGTMIKEVCIKLKVDRLGNITKA

SEQ ID NO: 156 - protein, 1435 aa, Capnocytophaga sp.
  Capnocytophaga sp. oral taxon 329 str. F0087
MKNILGLDLGTTSIGFAHIVEDENKEKSEIKELGVRIVSLATDEQSDFEKGKSISTNANRTLKHGARLNLDRYQQRRKFLIDLLQKANLITSASILAENGKNTTHSTWQLRAKAVTERIEKEEFARVLLAINKKRGYKNSRKTKTEDEGQAIDGMAIAKCLYDENLTPGQLSLQLLQQNKKLLPDFYRSDLQKEFDLVWNLQKQFYPDILTDSFYKELQGKGKDATSKAFSKRYHFDTAENKGSKESVRLQAYQWRAEAISKQLSKEEVAYVLTEINNNLNNSSGYLGAISDRSKELYFNRQTVGQYLYAQLQENRHNSLKNKVFYRQDYLDEFERIWETQASFHKELTDELKKQIRDVVIFYQRKLKSQKGLVSFCEFESKEIEIEKDGKAITKSIGARVVPKSSPLFQEFKIWQILNNVTCKRKGIRKKKSSAKSTELDLFNEPSQSIFSLDMECKQLLFDELNLKGDLKSDKVLKLLGYSPQEWEINYNQLEGNRTQKSLYEAYLKIIEIEGYEVKDILQIKSTKDDWSLDESPLSASEIRERVKVIFQTLGICTKILYFDPLLPVKEFEQQYSYQLWHLLYSYESDDSTSGNETLYRILEKKYAFKREHATILANVALQDDYGSLSTKAIRKIYPYIKENQYSTACELAGYKHSKLSLTTEELEARELKNIIPLLKKNALRNPVVEKILNQMINVVNALIEKNSERDAEGKITKYFHFDEIRIELARELKKNAQERYEMTQNINKAKLEHQKISEKLQKQFGIKNPTKSDIIRYRLYQELEHNGYKELYTNTYIAPDVLFSKNIDIEHIVPKARVFDDSFSNKTLAFKEFNIKKGESTAFDYITSLNCEGELNQYLTRVENAYKTKSISLTKYKNLLKKASEIGDGFINRDLRDTQYIAKKAKEILFQVTKNVLSTSGSITDRLREDWGLVDVMKELNMPKYQSLGLTEVEERKDGNKVTVIKDWTKRNDHRHHAMDALTVAFTKPSYIQYLNHLNARKDENNKNYSVILAIEKKETIKVPINNGKNKRVFIEPILNFRQVAKKHLEEIFISHKAKNKVVTKNINKPAGTDKQQITLTPRGQLHKETIYGKYQYYVNKEEKVGVKFDERTITKVSNPLYREALLKRLQANDNDPKKAFAGKNALSKNPIYLDEAKTKTLPEKVNLTYLEEDFSIRKDISPDNFKDLKSIEKVIDQGVKRILIKRLQAYDNDPKKAFVDLEKNPIWLNKEKGIAIKRVTISGVSNAQPLHIGKDHLGKTTLNKEGKEVPVDYVSTGNNHHVAIYRDKEGNLQEQIVSFFEAVVRAQQGLPIIDKNYKQAEGWQFMFTMKQNEMFVFPNEATGFNPAEIDLLDPKNKKLISPNLFRVQTISIVKYGNSVVRDFKFRHHLETTLQDDKILQGITFQQIKSLEPLRNIVKVRINHLGDIVNIGEY

SEQ ID NO: 157 - protein, 1426 aa, Capnocytophaga sp.
  Capnocytophaga sp. oral taxon 335 str. F0486
MKNILGLDLGTTSIGFTHIVEDENKEKSEIKELGVRIVSLTTDEQSDFEKGKSISTNANRTLKHGARLNLDRYQQRRKFLIDLLQKANLITSSSILAENGKNTTHSTWQLRAKAVTERIEKEEFARVLLAINKKRGYKSSRKAKTEDEGQAIDGMAIAKRLYDENLTPGQLSLQLLQQNKKLLPDFYRSDLQKEFDLVWNFQKQFYPDILTDSFYKELQGKGKDATSKAFSKRYHFDTAENKGSRESVRLQAYQWRAEAISKQLSKEEVAYVLTEINNNLNNASGYLGAISDRSKELYFNRQTVGQYLYAQLQENKHNSLKNKVFYRQDYLDEFERIWETQASFHKELTEELKKQIRDVVIFYQRKLKSQKGLISFCEFESKEIEIEKDGKTITKSIGARVVPKSSPLFQEFKIWQILNNVTCKRKGIRKKKSSAKSTELDLFNEPSQTIFSLDMECKQLLFEELNLKGDLKSDKVLKLLGYSPQEWEINYNQLEGNRTQKALYEAYLKIVEMEAHDVKDILQIKSTKDDWALEESPLSASEIRERVKAIFQTLGICTKILYFDPLLPVKEFEEQDSYQLWHLLYSYESDDSTSGNETLYRILEKKYAFKREHATILANVTLQDDYGSLSTKAIRKIYPYIKENQYSTACEKAGYKHSKLSLTTEELEARELKNIIPLLKKNALRNPVVEKILNQMINVVNALIEKNSERDAEGKITKYFHFDEIRIELARELKKNAQERYEMTQNINKAKLEHQKISGILQKEFGIKNPTKSDITRYRLYQELAHNGYNDLYTNTYIPKELLFSKNIDIEHIVSKARVFDDSFSNKTLAFREFNIKKGESTAFDYITSLNNEEELNQYLNRVENAYKTKNISPAKYKNLLKKASEIGDGFINRDLRDTQYIAKKAKEILFQVTKNVLSTSGSITDRLREDWGLVDVMKELNMPKYQSLGLTEVEERKEGNKVTVIKNWTKRNDHRHHAMDALTVAFTKPSYIQYLNHLNARKDKNNKNYSVILAIEEKETIKVPTNNGKNKRVFIEPIPNFRQVAKKHLEEIFISHKAKNKVVTKNTNKPAGTDKQQITLTPRGQLHKETVYGKYQYYVNKEEKIGVKFDKETIAKVSNPVYREALLKRLQANDNDPKKAFAGKNALSKNPIYLDEAKTKTLTEKVNLTYLEEDFSIRKDISPDNFKDLKSIEKVIDQGVKRILIKRLQDYDNDPKKAFVDLEKNPIWLNKEKGIAIKRVTISGVNNAQPLHIGKDHLGKTTLNKEGKEIPVDYVSTGNNHHVAIYRDKEGNLQEQIVSFFEAVVGAQQGLPIVDKTYKQAEGWQFLFTMKQNEMFVFPNEATGFNPAEIDLLDPKNKKQISPNLFRVQKIATKDYFFRHHLETNVDTDNVLKNTTWKREGLSGLKDIVKVRINHLGDIVSIGEY

SEQ ID NO: 158 - protein, 1432 aa, Capnocytophaga sp.
  Capnocytophaga sp. oral taxon 380 str. F0488
MKNILGLDLGTTSIGFAHIVEDENKEKSEIKELGVRIVSLTTDEQSDFEKGKSITTNANRTLKHGARLNLDRYQQRRKYLIDLLHKANLITPSSILAENGKNTTHSTWQLRAKAVTERIEKEEFARILLAINKKRGYKSSRKAKTEDEGQAIDGMAIAKRLYDENLTPGQLSLQLLQQNKKLLPDFYRSDLQKEFDLVWNFQKQFYPDILTDIFYKELQGKGKDATSKAFSKRYHFDTAENKGSKESVRLQAYQWRAEAVSKQLSKEEVAYVLTEINNNLNNASGYLGAISDRSKELYFNRQTVGQYLYAQLQENRHNSLKNKVFYRQDYLDEFERIWETQALFHKELTDELKKQIRDVVIFYQRKPKSQKGLISFCEFESKEIEIEKDGKTITKNIGARVVPKSSPLFQEFKIWQILNNVICKRKGIRKKKISAKTTQLDLLNESSQTIFSLDMECKQLLFDELNLKGDLKSDKVLKLLGYSPQEWEINYNQLEGNRTQKALYEAYLKIVEMEAHDVKDILQIKSTKDDWSLDESPLSASEIRESVKAIFQALGICTKILYFDPLLPVKDFEEQDSYQLWHLLYSYESDDSTSGNETLYRILEKKYAFKREHARILANVALQDDYGSLSTKAIRKIYPNIKENQYSTACEMAGYKHSKLSLTTEELEARELKNIIPLLKKNALRNPVVEKILNQMINVVNALIEKNSERDAEGKITKYFHFDEIRIELARELKKNAQKRYEMTQNINKAKSEHQKISEILQKEFGIKNPTKSDIIRYRLYKELEHNGYKELYTNTYIAPDVLFSKNIDIEHIVPKARVFDDSFSNKTLAFKDFNIKKGESTAFDYITSLKNEEKLNQYLARVENAYKTKNISPAKYKNLLKKASEIGDGFINRDLRDTQYIAKKAKEILFQVTKNVLSTSGSITDRLREDWSLVDVMKELNMPKYQSLGLTEVEERKDGNKVTVIKDWTKRNDHRHHAMDALTVAFTKPSYIQYLNHLNARKDENNKNYSVILAIEKKETIKVPTNNGKNKRVFIEPIPNFRQVAKKHLEEIFISHKAKNKVVTKNTNKPAGTNKQQITLTPRGQLHKETIYGKYQYYVNKEEKVGVKFDKETIAKVSNPLYREALLKRLQANDNDPKKAFTGKNALSKNPIYLDEAKTKTLPEKVNLTYLEEDFSVRKKIVPKNPTSKEFVPNLKSIEKVVDEGVRNILIERLRVYNNDPEKAFVDLEKNPIWLNKEKGIAIKRVTISGVNNAQPLHIGKDHLGKTTLNKEGKEIPVDYVSTGNNHHVAIYRDKEGNLQEQIVSFFEAVVRTQQGLPIIDKTYKQEEGWQFLFTMKQNEMFVFPNEATGFNPAEIDLLDPKNKKQISPNLFRVQKIATKDYFFRHHLETNVETDNVLKNTTWKREGLSGLKDIVKVRINHLGDIVSIGEY

SEQ ID NO: 159 - protein, 1450 aa, Capnocytophaga sp.
  Capnocytophaga sp. oral taxon 412 str. F0487
MKHILGLDLGSNSIGWAFVQQDFENKQGKIIATGSRIIPMDQGILGDFERGNTVSQTAERTTYRNTRRLRERHLLRRERLHRVLHILGFLPPHYDSQIDFTKRYGKFIDNAEPKIAYNNGNFIFMNSFNEMIEDFKKYQPQLFYKKSNGEESKIPYDWTIYYLRKKALSQKITQQELAWLILHFNQKRGYYQLRGEEETENPNKEVAFHSLEVVDVEAEAPNKKGEIWYTIRLENGWIYRRTSKIPLDDWKGKTRDFIVTTDLNDDGTIKLDKEGKEKRSFRAPDENDWNLLKKKTEHDIDFSGKTVGAYIYDHLLQNPNQKIKGKLVRTIERKYYKDELKAILAKQIALQPELFTETLLADCIRELYRKNETQQQNLLSKDFLHLFVEDIIFYQRPLRSKKSTIANCTLEKRSYIDKETNERKDTPIKVCAKSNPYYQEFRVLQWLQNLRIYEIETDREVTAEFIETAQDNEALFNFLMSQKEIDNESLLKYFLFAKNPQIKDKVAKSELKKWLTTYRWNYVYDAADNSSKKYPMNETGYELQQYLQKVEGLPANFLTFDITYRLWHLLYSVKDKVEFEKALKKFAQEYQLDEASFVDSFKNFKPYPNEYGSFSEKAIKKLLPLMRFGNHWDFNRIDVSTQKRIDDLINGVANDEIRTIIREKAEKYQLNSETCFQGLPLWLAQYVVYNRHAEAADIEKWTSVNDLEAYLEDFKQHSLRNPIVEQVITETLRVVRDIWQRYGGGQANFFDEIHIELGRELKKTAEERKQLSNRNQENENTNLRIKKLLAELKEDASIQNVRPYSPVQQELLKIYEEGVFSATDEVEEDIQKIRKKAEPTTPEIQRYKLWLEQKYKSPYTGEVISLTKLFTEEYEIEHIIPQSRYYDDSLSNKVICESAVNKLKTNQLGLEFIQNHHGEKVRITANKEVTIFTEEQYKEFVKKHYANNSAKQQKLLLNEIPEKMVARQLNDTRYISKYISEILSKIVRSDEKDEGVNSKNIIPCTGKITTALKQDWGLNDVWNELILPRFERMNQLTQTQLFTSYNDRFQKNLPTVPIEYSQGFQKKRIDHRHHAMDALVIACATREHINYMNNQHALDKSKDKKEKQQSRIDLRTILCEKKNNNWQFKKPWSTFTQEAQEALEHIVVSFKQNLRVINKATNYYEKWEEKNGVLVKKKVKQEGTNWAIRKPLHKETVSGKIVLDRKIGKDKILTATRKSVDITFTEKIISSITDTGIQKILLNYLKYKGSPEVAFSAEGLEELNKNIAQYNDGKKHQPIYKVRIFEEGSKFPLGETGAKATKYVEAAKGTNLFFGVYQGKGKRTYATIPLNEVIERQKQGLPSVPERNEKGEPLLFSLSPNDLVYVPMEGEIAETIDFNNLSKEQKERIYKTVSFTGNQCFFVQEAVATPIVNKIEYSPLNKMERDILGTMIKEVCIKLKVDRLGNITKA

SEQ ID NO: 160 - protein, 1426 aa, Capnocytophaga sputigena
  Capnocytophaga sputigena ATCC 33612
MKNILGLDLGITSISFAHIVEDENKEKSEIKELGVRIVSLTTDEQSDFEKGKSITTNANRTLKHGARLNLDRYQQRRKYLIDLLQKANLITSSSILAENGKNTTHSTWQLRAKAVTERIEKEEFARVLLAINKKRGYKSSRKAKTEDEGQAIDGMAIAKRLYDENLTPGQLSLQLLQQNKKLLPDFYRSDLQREFDLVWNFQKQFYPDILTDSFYKELQGKGKDATSKAFSKRYHFDTAENKGSKESVRLQAYQWRAEAISKQLSKEEVAYVLTEINNNLNNASGYLGAISDRSKELYFNRQTVGQYLYAQLQENRHNSLKNKVFYRQDYLDEFERIWETQASFHKELTDELKKQIRDVVIFYQRKLKSQKGLISFCEFESKEIEIEKDGKTITKTIGARVVPKSSPLFQEFKIWQILNNVTCKRKGIRKKKSSAKSTELDLFNEPSQTIFSLDMECKQLLFDELNLKGDLKSDKVLKLLGYSPQEWEINYNQLEGNRTQKALYEAYLKIVEMEAHDVKDILQIKSAKDDWSLDESPLSASEIKEKVKDIFQALGICTKILYFDPLLPVKEFEKQDSYQLWHLLYSYESDDSTSGNETLYRILEKKYAFKREHARILANVALQDDYGSLSTKAIRKIYPNIKENQYSKACELAGYKHSKLSLTTEELEARELKNIIPLLKKNALRNPVVEKILNQMINVVNALIEKNSERDAEGKITKYFHFDEIRIELARELKKNAQKRYEMTQNINKAKLEHQKISEILQKKFGIKNPTKSDIIRYRLYQELEHNGYKELYTNAPIARDMLFSKNIEIEHIVPKARVFDDSFSNKTLTFHRINSNKGEYTAFDYITSLNSEEELNQYLTRVENAYKTKSISLTKYKNLLKKASEIGDGFINRDLRDTQYIAKKAKEILFQVTKNVLSTSGSITDRLREDWGLVDVMKELNMPKYQSLGLTEVEERKEGNKVTVIKNWTKRNDHRHHAMDALTVAFTKPSYIQYLNHLNARKDENNKNYSVILAIEEKETIKVPTNNGKNKRVFIEPIPNFRQVAKKHLEEIFISHKAKNKVVTKNVNKPAGTDKQQITLTPRGQLHKETIYGKYQYYVNKEEKVGVKFDERTITKVSNPLYREALLKRLQANDNDPKKAFTGKNALSKNPIYLDETKTKTLPEKVNLTYLEEDFSIRKDISPDNFKDLKSIEKVIDQGVKRILIKRLQDYDNDPKKAFVDLEKNPIWLNKEKGIAIKRVTISGVSNAQPLHIGKDHLGKTTLNKEGNEIPVDYVSTGNNHHVAIYRDKEGNLQEQIVSFFEAVVRTQQGLPIIDKTYKQEEGWQFLFTMKQNEMFVFPNATTGFNPAEIDLLDPKNKKLISPNLFRVQKIATKDYFFRHHLETNVETDNVLKNTTWKREGLSGLKDIVKVRINHLGDIVSIGEY

SEQ ID NO: 161 - protein, 1140 aa, Catellicoccus marimammalium
  Catellicoccus marimammalium M35/04/3
MKNMTKVNVGLDVGISSAGWSVINAETNQILESGVRLFSGSDADENVNRRNQRQGRRLFRRRKLRIQEAKKYLENVFQLKDIEPKDEWNPYEIRVRALNEKVSKEELSIALLNIVKHRGISYELEDVTDEEGTNTQSFQSGLDYNRRLLKTKTVGEIQYDRLQKYGQVRGQIQTEDGLLINIFPTKNYVEEVERILETQKKYHPEIDDVFIEKIISFVTRKREYFVGPGNEKSRTDYGIYRENGETLDNLFEILIGKDKFYPEEYRAAGSSYTAQIFNLLNDLNNLRIPTTEDHHLTKAQKEEIITELKNTSRLSGGMLKLISKVTKAPKEEISGYRKDEKDKPDLHSLAYYRKQKNMLEKEGIQIADFSEELLDELATMMTLNTEPGEIRKQLNKITNQYDILTPEVIEVLVKNHTAFVATSNHKWHRFSLKLMKEFIPELLETSKEQSTILCERGFIQNRASYLDENHHFNYAELRENLYNPVVRKSTCEMLKVFTAIQEKYPNIQNVIVELPRETNEDEQKRKIKKINDNNAKRKKEILKEAQAQSGLSEEALEEKLLKTKGLYLKLMLWYEQEGKCVYSGQEIPLSDLLQNKGGYEVDHIIPISISFDDRLCNKVLVRQQLNSQKSNQTPFEYMTTHTDGHLSFHELKELVGKNKRFSKEKRELLLAEIYSNDIETRKRFINRNLVDTSYTARIVLNALQQYKKENQLSMNVSVVRGAMTNILRKKVKLDKTRETFHHHAIDASLMAVIPNIEFFKERKEWLPKSANEEVVEVEVSEEETMPEKEFKVKMRLPESFIQDVQILQRNSFAKEEVSGPQTRERNLKIKFSHQVDQKMNRKVADDTIYGTRQAQLGKDKKEETYVIGKIKDIYNYDEYVRFKKRYDKNKESFLMYHHDPQTFEKLEEILAQYPEYIEDEKGKKKKVSPFALYREENGPVTKYAKKNNGPVIKQLKYYDSKLNRKIDISHKYSTKNRQVVLQSLKPYRTDVYRNQDTGEYTLVGIDQNDGKFVNGHYGIPKSRYEEIKANNKLSEHDEFVFSLYKNSMVKVIDENGESIVVRYLSRSMPNRKNNAEIKPVEKYQFEDGEVVPVYGKCRKQMQTVFVKKGWTLLKGNTDILGNTYFVEKESENPKKMIDDK

SEQ ID NO: 162 - protein, 1329 aa, Catenibacterium mitsuokai
  Catenibacterium mitsuokai DSM 15897
IVDYCIGLDLGTGSVGWAVVDMNHRLMKRNGKHLWGSRLFSNAETAANRRASRSIRRRYNKRRERIRLLRAILQDMVLEKDPTFFIRLEHTSFLDEEDKAKYLGTDYKDNYNLFIDEDFNDYTYYHKYPTIYHLRKALCESTEKADPRLIYLALHHIVKYRGNFLYEGQKFNMDASNIEDKLSDIFTQFTSFNNIPYEDDEKKNLEILEILKKPLSKKAKVDEVMTLIAPEKDYKSAFKELVTGIAGNKMNVTKMILCEPIKQGDSEIKLKFSDSNYDDQFSEVEKDLGEYVEFVDALHNVYSWVELQTIMGATHTDNASISEAMVSRYNKHHDDLKLLKDCIKNNVPNKYFDMFRNDSEKSKGYYNYINRPSKAPVDEFYKYVKKCIEKVDTPEAKQILNDIELENFLLKQNSRTNGSVPYQMQLDEMIKIIDNQAEYYPILKEKREQLLSILTFRIPYYFGPLNETSEHAWIKRLEGKENQRILPWNYQDIVDVDATAEGFIKRMRSYCTYFPDEEVLPKNSLIVSKYEVYNELNKIRVDDKLLEVDVKNDIYNELFMKNKTVTEKKLKNWLVNNQCCSKDAEIKGFQKENQFSTSLTPWIDFTNIFGKIDQSNFDLIENIIYDLTVFEDKKIMKRRLKKKYALPDDKVKQILKLKYKDWSRLSKKLLDGIVADNRFGSSVTVLDVLEMSRLNLMEIINDKDLGYAQMIEEATSCPEDGKFTYEEVERLAGSPALKRGIWQSLQIVEEITKVMKCRPKYIYIEFERSEEAKERTESKIKKLENVYKDLDEQTKKEYKSVLEELKGFDNTKKISSDSLFLYFTQLGKCMYSGKKLDIDSLDKYQIDHIVPQSLVKDDSFDNRVLVVPSENQRKLDDLVVPFDIRDKMYRFWKLLFDHELISPKKFYSLIKTEYTERDEERFINRQLVETRQITKNVTQIIEDHYSTTKVAAIRANLSHEFRVKNHIYKNRDINDYHHAHDAYIVALIGGFMRDRYPNMHDSKAVYSEYMKMFRKNKNDQKRWKDGFVINSMNYPYEVDGKLIWNPDLINEIKKCFYYKDCYCTTKLDQKSGQLFNLTVLSNDAHADKGVTKAVVPVNKNRSDVHKYGGFSGLQYTIVAIEGQKKKGKKTELVKKISGVPLHLKAASINEKINYIEEKEGLSDVRIIKDNIPVNQMIEMDGGEYLLTSPTEYVNARQLVLNEKQCALIADIYNAIYKQDYDNLDDILMIQLYIELTNKMKVLYPAYRGIAEKFESMNENYVVISKEEKANIIKQMLIVMHRGPQNGNIVYDDFKISDRIGRLKTKNHNLNNIVFISQSPTGIYTKKYKL

SEQ ID NO: 163 - protein, 1419 aa, Chryseobacterium sp.
  Chryseobacterium sp. CF314
MMIKNILGLDLGTNSIGWALIKQNFENKYGEILGMGSRIIPMSQDVLGEFGKGNSVSQTAARTGYRGVRRLRERFLLRRERLHRVLNVLNFLPEHYASQIDFEKRFGKFKYETEPKLAYNNDGFFFKNSFDEMLGDFKDHQFHLLENGRKVPYDWTIYYLRKKALSQKIEKEELAWILLNFNQKRGYYQLRGEDFEEEKDRVFVRLKVDRVVDSGENIKGKILYDVYFENGWKYEKQIVKTEDWIGRTKEFIVTESILKNGDTKRTFKAVDSEKDWIAIKTKTEQEIDKSHKTVGAYIYEALLQNPKQKIKGKLVRTIERKFYREELKKILERQKEFHPELQSDDLYNDCIRELYRNNEAHQITLSKKDFVHLLLNDLIFYQRPLRSQKSSVSNCTLEFRKYKDENGVEHAQYLKTIPKSNPYYQEFRVWQWMFNLNIYRKDDDTNVTKEFLSSTEDYETLFEFLNNRKEVDQKALLRHFKLNEKTHRWNYVEDKKYPCNETKTMISTRLEKVENYPSDFLTREMEQNIWHIIYSVNDKIEYEKALKSFAHKNNLDENSFFEAFKKFPPFKSEYGSFSEKAIKKLLPLLRLGKYWNWESIDRKSQGRIEKIITGEFDGNIKDKVREKAIHLTAENDFQGLQLWLAQYIVYGRHSEASMIGKWNSADDLEEFLKGFKQHSLRNPIVEQVITETLRVVKDIWLKYGNGAKDFFSEIHIELGREMKQTKDERVDATKRITENENTNLRIKALLAEMMNDNSVENIRPYSPMQQEILKIYEDGILKSDIEIDDDILKISKTAQPSSSDLKRYKLWLEQRYKSPYTGQIIPLNKLFTSEYEIEHIIPQSRYFDDSFSNKIICESAVNKLKDNYIGLGFIKQFGGMIVECGFGKSVEIFKAEEYEDFVKKHYANNRSKRNKLLLEEIPEKMIDRQLNDTRHISKYISGVLSNIVRQEDGTDEGVNSKNIVPGNGKITTQLKQDWGLNDVWNELILPRFERMNQLTNSTDFTSWNKNHQKFLPTVPIEFSKGFSKKRIDHRHHAMDALVIACATKDHINLLNNQSAKSDTKRYDLKRKLMKFERVVYSHSKTGEKIEKEVPKQFLKPWDNFTVDAKNKMETIIVSFKQNLRVINKATNHYEKWIEKDGIKRKELIKQEGTNWAIRKPMHKETVSGKVDLPGIKIPKGKILTATRKSLDTSFDLKTINSITDTGIQKILKNYLEFKGSSELAFSPEGIEDMNKNIEKFNDGKPHQSINKVRIFELGSKFSVGQTGNKKDKYVEAAKGTNLFFAVYEDKNGKRSYETIPLNEVIERQKQGLDSVSFKNKEDFLLCPNDLVYVPSEDELENIYNIDFKNLTTEKTGNIYKVVSFSGNQIFFIRQDIAISIVNKAEFSTLNKMERAIDGSMIKENCIKLKIDRLGNIAKI

SEQ ID NO: 164 - protein, 1021 aa, Clostridium cellulolyticum
MKYTLGLDVGIASVGWAVIDKDNNKIIDLGVRCFDKAEESKTGESLATARRIARGMRRRISRRSQRLRLVKKLFVQYEIIKDSSEFNRIFDTSRDGWKDPWELRYNALSRILKPYELVQVLTHITKRRGFKSNRKEDLSTTKEGVVITSIKNNSEMLRTKNYRTIGEMIFMETPENSNKRNKVDEYIHTIAREDLLNEIKYIFSIQRKLGSPFVTEKLEHDFLNIWEFQRPFASGDSILSKVGKCTLLKEELRAPTSCYTSEYFGLLQSINNLVLVEDNNTLTLNNDQRAKIIEYAHFKNEIKYSEIRKLLDIEPEILFKAHNLTHKNPSGNNESKKFYEMKSYHKLKSTLPTDIWGKLHSNKESLDNLFYCLTVYKNDNEIKDYLQANNLDYLIEYIAKLPTFNKFKHLSLVAMKRIIPFMEKGYKYSDACNMAELDFTGSSKLEKCNKLTVEPIIENVTNPVVIRALTQARKVINAIIQKYGLPYMVNIELAREAGMTRQDRDNLKKEHENNRKAREKISDLIRQNGRVASGLDILKWRLWEDQGGRCAYSGKPIPVCDLLNDSLTQIDHIYPYSRSMDDSYMNKVLVLTDENQNKRSYTPYEVWGSTEKWEDFEARIYSMHLPQSKEKRLLNRNFITKDLDSFISRNLNDTRYISRFLKNYIESYLQFSNDSPKSCVVCVNGQCTAQLRSRWGLNKNREESDLHHALDAAVIACADRKIIKEITNYYNERENHNYKVKYPLPWHSFRQDLMETLAGVFISRAPRRKITGPAHDETIRSPKHFNKGLTSVKIPLTTVTLEKLETMVKNTKGGISDKAVYNVLKNRLIEHNNKPLKAFAEKIYKPLKNGTNGAIIRSIRVETPSYTGVFRNEGKGISDNSLMVRVDVFKKKDKYYLVPIYVAHMIKKELPSKAIVPLKPESQWELIDSTHEFLFSLYQNDYLVIKTKKGITEGYYRSCHRGTGSLSLMPHFANNKNVKIDIGVRTAISIEKYNVDILGNKSIVKGEPRRGMEKYNSFKSN

SEQ ID NO: 165 - protein, 1065 aa, Clostridium perfringens
  Clostridium perfringens C str. JGS1495
MNKDINYALGLDIGITSVGWAVINLDLNRIEDLGVRIFNAAENPKDGSSLALPRRLARGRRRLLRRKAYRVERVRKLIVKNNILTKEELEGLFKNKEVIDVWEARVKGLDYKLSREEWAKILINFCKRRGFKSNRKNETKDKEAGQILSSISYNIEKMKETNSRTIGEYIYNEVKNSDDSYAPLRNKFGEYKMCVSRDVLREEIHTLFEKQRELGNNFASDEIEDKYFEIFNSQRPFSNFEDLEKLVGFCTFERKKHKRAPKHCISSEEFTLYEGINKLSIIKDGEKRKLSEEERTLVVNEAFNKKEIKYTTLRKLLGLSEDELFSTLTYSIDKDISKTENTKFVSLKGYHEIKRAIEKGVSKKAWQDIENNRNLLNDIAYVLTLGKTDDEIEKQLRLRNVPEELFESLLDMSFSKFNNLSIYALEKILPFMKEGYQYNEACEKAGYNFKAIYEGVRTKKLPVIEIDEIVNPVVNRALAQTRKVINSVIDKYGSPVRINIELARDLAKNFKDRKLIEKEQKENRANLDKIRENLRELMDKEPTAVEVLKYRLWEQQRGECAYTQSQIALERLFSPGYCEIDHIIPFSRSFDDSLSNKILVLGSENQRKGNKIPYEYFGEDSERWNSFEIWVKGSYLNYKKKANLLKKKFTEEEQRDWKARNLQDTKYICRYISNFVNNRLEFKESENKQKVITVNGRATAYLRSRWGLNKVREDGDKHHALDAAVVGVTTQGMVQKISKYSKAHELYTVRKNDEFVDVETGECVDVDEYKEIRKDILPRPWRGFSEELKLRLSDNPLEELKKLPIETYNEEFIKENVKPIFVSRVPFRKISGKLFKETIYSERAFKDGYFVSKKSLVDLKRGDLDNFYNYECDKKLYDAISERMKEFNYNGKKAFESPFRKPTKSGKEGPVVRSVKIKSAAPFKDGIPMNEGLVAKEGMVRIDIYEKEGKYFVVPVYRYQLAKGIVPKRAAIAGKSELKWPIMDQTYNFKFSIFKNDLIEIKYAKKDGYFGYYDGFDRHTASLVIENHDNSDRYRGIGVKTGVVEFNKYEVDVLGNYHKVNLGGN

SEQ ID NO: 166 - protein, 1065 aa, Clostridium perfringens
  Clostridium perfringens D str. JGS1721
MNKDINYALGLDIGITSVGWAVINLDLNRIEDLGVRIFNAAENLKDGSSLALPRRLARGRRRLLRRKAYRVERVRKLILKNNILTKEELEGLFKNKEVIDVWEARVKGLDYKLSREEWAKILINFCKRRGFKSNRKNEAKDKEAGQILSSISYNIEKMKETNSRTIGEYIYNEVKNSEDSYAPLRNKFGEYKMCVSRDVIREEIHTLFEKQRELGNNFASDEIEDKYFEIFNSQRPFSNFEDLEKLVGFCTFERKKHKRAPKHCISSEEFTLYEGINKLSIIKDGEKRKLSEEERTLVVNEAFNKKEIKYTTLRKLLGLSEEELFSTLTYSIDKDISKTENTKFVSLKGYHEIKRAIEKGVSKKAWQDIENNRNLLNDIAYVLTLGKTDDEIEKQLRLRNVPEELFESLLDMSFNKFNNLSIYALEKILPFMKEGYQYNEACEKAGYNFKAIYEGVRTKKLPVIEIDEIVNPVVNRALAQTRKVINSVIDKYGSPVRINIELARDLAKNFKDRKLIEKEQKENRANLDKIRENLRELMDKEPTVVEVLKYRLWEQQRGECAYTQSQIPLERLFSPGYCEIDHIIPFSRSFDDSLSNKILVLGSENQRKGNRTPYEYFGEDSERWNSFEIWVKGSYLNYKKKANLLKKKFSEEEQRDWKARNLQDTKYICRYISNFVNNRLEFKESENKQKVITVNGRATAYLRSRWGLNKVREDGDKHHALDAAVVGVTTQGMVQKISKYSKAHELYTVRKNDEFVDVETGECVDVDEYKEIRKDILPRPWRGFSEELKLRLSDNPLEELKKSPIETYNEEFIKENVKPIFVSRVPFRKISGKLFKETIYSERAFKDGYFVSKKSLVDLKRGDLDNFYNYECDKKLYDAISERMKEFNYNGKKAFESPFRKPTKSGKEGPVVRSVKIKSAVPFKDGIPMNEGLVAKEGMVRIDIYEKEGKYFVVPVYRYQLAKGIVPKRAAIAKKDELKWPIMDQTYNFKFSIYKNDLIEVKYDKKGVYFGYYDGFDRNSASLTIEKHDNSERYRSIGLKVGVLEINKYEVDVLGNYHKVKLGGN

SEQ ID NO: 167 - protein, 1116 aa, Clostridium spiroforme
  Clostridium spiroforme DSM 1552
MVEFLLKEMKIMGRLVLGLDIGITSVGYGVIDIDKNEFVDYGVRLFKEGTAINNEERRSKRGARRLKRRKTNRIADMKKLLERNGLIDEQYTALNNPYEIRKKGLKNKLSNYELATAILHITKNRGTCLESNADETQDEESTKNILSKNALELKDKYICEIQLARLEESGKIRGINNNFKTEDYLKELSKILENQDLEKETIDKIKEIVARRRRYDQGPGSEKSPTPYGSYRMENGELVHVNLIDMMRGKCSVFPDQLRAPQQSYSAELFNLLNDLNNLKINGEKLSSTEKQKIIDFVNEKGGITVKQLLKLIDVGITEISGFRIDKNEKPLITEFKGYKKVLKVFKNYNQESLLNDKSIVDTIMDINTKIKSIDERSDQLKQVLPSLDTSIINDLASIKGVSGYHSLSLKALNLINNEMLKTEMNQMQVLHQLDIFDKNRVSLKGQRQIYADDNAILSPVAKRAHRETFKVINKLRSIYGEFDSIVIETTRDKNTQDQKKRIKNNQKNYEERNTEVNNFLKEAGYNPENINAKTKMKIRLYIEQDAKSAYTLQDINLKELIEDEKAYEIDHIIPISISLDDSFNNKVLTTHDENQEKGNLTPISAFLKGKFHNGNLNTYKVFIQNNKNLNRKKKEYLLCEDDITRYEVVQNFINRNLVDTSYACRTVMNTLVHYFKDNEINTKVHTIKGQATSTFRKRIGLIKDREEDYFHHAIDALIVASLKKMNLINSYLMKVDFNEMYDEETGEIFNVLPDNSYLDEKYISFVSNLKNIYEESNKYIRGVMIKEKMTYPLIKVSHKIDTKPNRKISDDTIYSTRNVDNQDMLVERIKNIYDPKENAANTLINDIINDNTDKYIMYHKDPQTFDKIKAIVLNHFNEFKTDKNCYIVTKEGLYKLKGTSPLALYYEEFGPITKYAKKNNGPTIHSMKFYSEKLGNHLSITHKYSTVNKKVITKQISPYRTDFYQSPEGKYKFVTVRYKDVAYNAKKDKYIIDHSWYREQKKLKKIADEWIFVCSVHRDELIGIMKADGQKRIFDSSTESDGETLYHDAKTYEILKFTATNNDITGRFEVKPIYCYCKKQLMVSIGTCRKIQKFATDVLGNLYIVKDNVLKLEFK

SEQ ID NO: 168 - protein, 1338 aa, Coprococcus catus
  Coprococcus catus GD/7
MKQEYFLGLDMGTGSLGWAVTDSTYQVMRKHGKALWGTRLFESASTAEERRMFRTARRRLDRRNWRIQVLQEIFSEEISKVDPGFFLRMKESKYYPEDKRDAEGNCPELPYALFVDDNYTDKNYHKDYPTIYHLRKMLMETTEIPDIRLVYLVLHHMMKHRGHFLLSGDISQIKEFKSTFEQLIQNIQDEELEWHISLDDAAIQFVEHVLKDRNLTRSTKKSRLIKQLNAKSACEKAILNLLSGGTVKLSDIFNNKELDESERPKVSFADSGYDDYIGIVEAELAEQYYIIASAKAVYDWSVLVEILGNSVSISEAKIKVYQKHQADLKTLKKIVRQYMTKEDYKRVFVDTEEKLNNYSAYIGMTKKNGKKVDLKSKQCTQADFYDFLKKNVIKVIDHKEITQEIESEIEKENFLPKQVTKDNGVIPYQVHDYELKKILDNLGTRMPFIKENAEKIQQLFEFRIPYYVGPLNRVDDGKDGKFTWSVRKSDARIYPWNFTEVIDVEASAEKFIRRMTNKCTYLVGEDVLPKDSLVYSKFMVLNELNNLRLNGEKISVELKQRIYEELFCKYRKVTRKKLERYLVIEGIAKKGVEITGIDGDFKASLTAYHDFKERLTDVQLSQRAKEAIVLNVVLFGDDKKLLKQRLSKMYPNLTTGQLKGICSLSYQGWGRLSKTFLEEITVPAPGTGEVWNIMTALWQTNDNLMQLLSRNYGFTNEVEEFNTLKKETDLSYKTVDELYVSPAVKRQIWQTLKVVKEIQKVMGNAPKRVFVEMAREKQEGKRSDSRKKQLVELYRACKNEERDWITELNAQSDQQLRSDKLFLYYIQKGRCMYSGETIQLDELWDNTKYDIDHIYPQSKTMDDSLNNRVLVKKNYNAIKSDTYPLSLDIQKKMMSFWKMLQQQGFITKEKYVRLVRSDELSADELAGFIERQIVETRQSTKAVATILKEALPDTEIVYVKAGNVSNFRQTYELLKVREMNDLHHAKDAYLNIVVGNAYFVKFTKNAAWFIRNNPGRSYNLKRMFEFDIERSGEIAWKAGNKGSIVTVKKVMQKNNILVTRKAYEVKGGLFDQQIMKKGKGQVPIKGNDERLADIEKYGGYNKAAGTYFMLVKSLDKKGKEIRTIEFVPLYLKNQIEINHESAIQYLAQERGLNSPEILLSKIKIDTLFKVDGFKMWLSGRTGNQLIFKGANQLILSHQEAAILKGVVKYVNRKNENKDAKLSERDGMTEEKLLQLYDTFLDKLSNTVYSIRLSAQIKTLTEKRAKFIGLSNEDQCIVLNEILHMFQCQSGSANLKLIGGPGSAGILVMNNNITACKQISVINQSPTGIYEKEIDLIKL

SEQ ID NO: 169 - protein, 1384 aa, Coriobacterium glomerans
MKLRGIEDDYSIGLDMGTSSVGWAVTDERGTLAHFKRKPTWGSRLFREAQTAAVARMPRGQRRRYVRRRWRLDLLQKLFEQQMEQADPDFFIRLRQSRLLRDDRAEEHADYRWPLFNDCKFTERDYYQRFPTIYHVRSWLMETDEQADIRLIYLALHNIVKHRGNFLREGQSLSAKSARPDEALNHLRETLRVWSSERGFECSIADNGSILAMLTHPDLSPSDRRKKIAPLFDVKSDDAAADKKLGIALAGAVIGLKTEFKNIFGDFPCEDSSIYLSNDEAVDAVRSACPDDCAELFDRLCEVYSAYVLQGLLSYAPGQTISANMVEKYRRYGEDLALLKKLVKIYAPDQYRMFFSGATYPGTGIYDAAQARGYTKYNLGPKKSEYKPSESMQYDDFRKAVEKLFAKTDARADERYRMMMDRFDKQQFLRRLKTSDNGSIYHQLHLEELKAIVENQGRFYPFLKRDADKLVSLVSFRIPYYVGPLSTRNARTDQHGENRFAWSERKPGMQDEPIFPWNWESIIDRSKSAEKFILRMTGMCTYLQQEPVLPKSSLLYEEFCVLNELNGAHWSIDGDDEHRFDAADREGIIEELFRRKRTVSYGDVAGWMERERNQIGAHVCGGQGEKGFESKLGSYIFFCKDVFKVERLEQSDYPMIERIILWNTLFEDRKILSQRLKEEYGSRLSAEQIKTICKKRFTGWGRLSEKFLTGITVQVDEDSVSIMDVLREGCPVSGKRGRAMVMMEILRDEELGFQKKVDDFNRAFFAENAQALGVNELPGSPAVRRSLNQSIRIVDEIASIAGKAPANIFIEVTRDEDPKKKGRRTKRRYNDLKDALEAFKKEDPELWRELCETAPNDMDERLSLYFMQRGKCLYSGRAIDIHQLSNAGIYEVDHIIPRTYVKDDSLENKALVYREENQRKTDMLLIDPEIRRRMSGYWRMLHEAKLIGDKKFRNLLRSRIDDKALKGFIARQLVETGQMVKLVRSLLEARYPETNIISVKASISHDLRTAAELVKCREANDFHHAHDAFLACRVGLFIQKRHPCVYENPIGLSQVVRNYVRQQADIFKRCRTIPGSSGFIVNSFMTSGFDKETGEIFKDDWDAEAEVEGIRRSLNFRQCFISRMPFEDHGVFWDATIYSPRAKKTAALPLKQGLNPSRYGSFSREQFAYFFIYKARNPRKEQTLFEFAQVPVRLSAQIRQDENALERYARELAKDQGLEFIRIERSKILKNQLIEIDGDRLCITGKEEVRNACELAFAQDEMRVIRMLVSEKPVSRECVISLFNRILLHGDQASRRLSKQLKLALLSEAFSEASDNVQRNVVLGLIAIFNGSTNMVNLSDIGGSKFAGNVRIKYKKELASPKVNVHLIDQSVTGMFERRTKIGL

SEQ ID NO: 170 - protein, 1099 aa, Corynebacterium accolens
  Corynebacterium accolens ATCC 49725
MSLSYRVGIDVGTYSLGCTAIEVDDNDQPVNILSSVSLIHDSGLDPDQQKRAVTRLASSGVARRTRRLYRRRRRRMINLEKFLTSQGWETRPFEHYSDPYLPWNARVALVNGYISDDAQRGMYLSIAFRHIANHRGWRNPYWKVSSLYSPDKPSDAFEQIRKELEESTGHKIPETVTVGQLISFAQFGKDRLRGGGKKKDEKKPQEQVNQAVISARLHQIDHAREINEICRVQKIDDALRKQILDLVFAAESPKGAQIGRVGKDPLQPKLPRALKASDAFQQYRIVALAGNLRIYRDGVSTPLDRDEKLIVFNYLINLSHKEEPSWLKVAEVLNIDRGQLHGTATMTDDGERAGAAPPVHDTNRTILGCKIKPLVHWWEGANDDERAAMLKALSNSEVEDFDSPAGAQTQAFFANLDESEQEKLDSLHLPIGRAAYSEDTLMRLTSRMLDENLDLYEARLAEFDIPKDWAPPAPRIGEPVGNPAVDRVLKGVARWLEAAADEWGAPKSVVIEHVRDGFISKSKANEIDRANNARHKRNRELFKQMQENLGIDGKLRSSDLWRYQSVQRQNCQCAYCGSPITYTTCEMDHIVPRAGEGSTNTRDNLVATCHRCNLAKKNIPFAVWAAQTNIPGVSVKEALDRTRHWSEDSGMTSKDFKKFRKNVCDRLKRTVVDEPLDARSMESVAWMANELRGRVAQRFQEENTVVNVYRGELTAEARRAAGISDKLRFIDGTGKSRLDRRHHAVDAAVVAFTQNYVAETLAIRSNKKREAQLLQAAEQWKEFTGSDAEHRAAWNAWLPKMQKLAVLLQKALDEDRIAVTSNLRLRLGNGRAHEDSIGELKTIRVGDAISVTDIDRASSEALWCALTREPDFDENNGLPENPDRRIRIHGTWYDAEDDIEVFPVGAGAIKVRGGYAELSRFHHARIYKIPGKKAPVYCMLRVYNADLIRHRHEDLFSVEIKPQTMSVRQAEPKLRKALAENTAEYLGWLVTDDELVIDTSNFNTGQIAEMQSELGQVRRWRLDGFYSPSTLRLRPLQMSAEGLREDTSIGAKKIIDRPGWLPAINKLFGEGHVTVVRRDALGRARLTSNAHLPISWKAE

SEQ ID NO: 171 - protein, 1099 aa, Corynebacterium accolens
  Corynebacterium accolens ATCC 49726
MSLLYRVGIDVGTYSLGCTAIEVDDNDQPVSILSSVSLIHDSGLDPDQQKRAVTRLASSGVARRTRRLYRRRRRRMVKLENFLTAQGWETLPFERYSDPYLPWHARVALVNGYISDDTQRGQYLSIAFRHIANHRGWRNPYWKVSSLYSPDKPSDAFEQIRKELEASTGRQIPETATVGQLISFAQFGKDRLRGGGKQKDKKKPQEQVNQAVISARLHQIDHAREINEICRVQKIDDTLRKQILDLVFAAESPKGAQKGRVGKDPLQPKLFRALKASDAFQQYRIAALTGNLRIYRNGVTVPLDRDEKLIVFNYLVNLPKKEEPSWLKIAEILNIDRGQLRGTATMTDDGERAGATPPVHDTNRTILDSKVKPLAHWWENASDDERAAMLKSLSNSEVEDFDSPAGAQVQAFFADLDETEQEKLDSLHLPMGRAAYSEDTLMRLTNRMLDENLDLYEARLAEFGIPKDWAPPAPRIGEPVGNPAVDRVLKGVARWLEAAADEWGAPKSVVIEHVRDGFVSKSKAIEIDRANNNRHKRNRELFQKMQENLGIEGKVRSSDLWRYQSVQRQNCQCAYCGSPITYTTCEMDHIVPRAGEGSTNTRDNLVATCHRCNLAKKNIPFAVWAEKSTIPGVSVKEALDRTRHWSEDSGMSKKDFQKFRKNVCERLNRTVVDEPLDARSMESVAWMANELRGRVAQRFQEENTTVNVYRGALTAEARRAAGITDKLRFIDGTGKSRLDRRHHAVDAAVVAFIHNYVAETLAIRSNKKREAQLLQGTSQWKEFTGSDDKHRAVWNAWIPKMQKLAVLLQIALDEDRIVVTSNLRLRLGNGRAHEDTISELKTIRVGDAISVTDIDRASSEALWCALTREPDFDEKDGLPENPNRRIRVHGTWYDAEDEIEVFPVGAGAIKVRGGYAKLSRFHHARVYKIPGKKAPIYCMLRVYNTDLVQHRHEDLFSVELKPQTMSVRQAEPKLRKALAENTAEYLGWLVTDDELIIDTSTFRTGLIEEMQSEFGLVRRWRLDGFDSPSLLTLRPLHMSAEGLPDDCALGSRKIIDTKGWRVSINKVFNAGNTTVVRRDALGRARLTSNAHLPISWKEE

SEQ ID NO: 172 - protein, 1084 aa, Corynebacterium diphtheriae
MKYHVGIDVGTFSVGLAAIEVDDAGMPIKTLSLVSHIHDSGLDPDKIKSAVTRLASSGIARRTRRLYRRKRRRLQQLDKFIQRQGWPVIELEDYSDPLYPWKVRAELAASYIADEKERGEKLSVALRHIARHRGWRNPYAKVSSLYLPDEPSDAFKAIREEIKRASGQPVPETATVGQMVTLCELGTLKLRGEGGVLSARLQQSDHAREIQEICRMQEIGQELYRKIIDVVFAAESPKGSASSRVGKDPLQPGKNRALKASDAFQRYRIAALIGNLRVRVDGEKRILSVEEKNLVFDHLVNLAPKKEPEWVTIAEILGIDRGQLIGTATMTDDGERAGARPPTHDTNRSIVNSRIAPLVDWWKTASALEQHAMVKALSNAEVDDFDSPEGAKVQAFFADLDDDVHAKLDSLHLPVGRAAYSEDTLVRLTRRMLADGVDLYTARLQEFGIEPSWTPPAPRIGEPVGNPAVDRVLKTVSRWLKSATKTWGAPERVIIEHVREGFVTEKRAREMDGDMRRRAARNAKLFQEMQEKLNVQGKPSRADLWRYQSVQRQNCQCAYCGSPITFSNSEMDHIVPRAGQGSTNTRENLVAVCHRCNQSKGNTPFAIWAKNTSIEGVSVKEAVERTRHWVTDTGMRSTDFKKFTKAVVERFQRATMDEEIDARSMESVAWMANELRSRVAQHFASHGTTVRVYRGSLTAEARRASGISGKLEFLDGVGKSRLDRRHHAIDAAVIAFTSDYVAETLAVRSNLKQSQAHRQEAPQWREFTGKDAEHRAAWRVWCQKMEKLSALLTEDLRDDRVVVMSNVRLRLGNGSAHEETIGKLSKVKLGSQLSVSDIDKASSEALWCALTREPDFDPKDGLPANPERHIRVNGTHVYAGDNIGLFPVSAGSIALRGGYAELGSSFHHARVYKITSGKKPAFAMLRVYTIDLLPYRNQDLFSVELKPQTMSMRQAEKKLRDALATGNAEYLGWLVVDDELVVDTSKIATDQVKAVEAELGTIRRWRVDGFFGDTRLRLRPLQMSKEGIKKESAPELSKIIDRPGWLPAVNKLFSEGNVTVVRRDSLGRVRLESTAHLPVTWKVQ

SEQ ID NO: 173 - protein, 1084 aa, Corynebacterium diphtheriae
MKYHVGIDVGTFSVGLAAIEVDDAGMPIKTLSLVSHIHDSGLDPDKMKSAVTRLASSGIARRTRRLYRRKRRRLQQLDKFIQRQGWPVIELEDYSDPLYPWKVRAELAASYIADEKERGEKLSVALRHIARHRGWRNPYAKVSSLYLPDEPSDAFKSIREEIKRASGQPVPETATVGQMVTLCELGTLKLRGEGGVLSARLQQSDHAREIQEICRMQEIGQELYRKIIDVVFAAESPKGSASSRVGKDPLQPGKNRALKASDAFQRYRIAALIGNLRVRVDGEKRILSVEEKNLVFDHLVNLAPKKEPEWVTIAEILGIDRGQLIGTATMTDDGERAGARPPTHDTNRSIVNSRIAPLVDWWKTASALEQHAMVKALSNAEVDDFDSPEGAKVQAFFADLDDDVHAKLDSLHLPVGRAAYSEDTLVRLTRRMLADGVDLYTARLQEFGIEPSWTPPAPRIGEPVGNPAVDRVLKTVSRWLESATKTWGAPERVIIEHVREGFVTEKRAREMDGDMRRRAARNAKLFQEMQEKLNVQGKPSRADLWRYQSVQRQNCQCAYCGSPITFSNSEMDHIVPRAGQGSTNTRENLVAVCHRCNQSKGNTPFAIWAKNTSIEGVSVKEAVERTRHWVTDTGMRSTDFKKFTKAVVERFQRATMDEEIDARSMESVAWMANELRSRVAQHFASHGTTVRVYRGSLTAEARRASGISGKLEFLDGVGKSRLDRRHHAIDAAVIAFTSDYVAETLAVRSNLKQSQAHRQEAPQWREFTGKDAEHRAAWRVWCQKMEKLSALLTEDLRDDRVVVMSNVRLRLGNGSAHEETIGKLSKVKLGSQLSVSDIDKASSEALWCALTREPDFDPKDGLPANPERHIRVNGTHVYAGDNIGLFPVSAGSIALRGGYAELGSSFHHARVYKITSGKKPAFAMLRVYTIDLLPYRNQDLFSVELKPQTMSMRQAEKKLRDALATGNAEYLGWLVVDDELVVDTSKIATDQVKAVEAELGTIRRWRVDGFFGDTRLRLRPLQMSKEGIKKESAPELSKIIDRPGWLPAVNKLFSEGNVTVVRRDSLGRVRLESTAHLPVTWKVQ

SEQ ID NO: 174 - protein, 1084 aa, Corynebacterium diphtheriae
MKYHVGIDVGTFSVGLAAIEVDDAGMPIKTLSLVSHIHDSRLDPDKIKSAVTRLASSGIARRTRRLYRRKRRRLQQLDKFIQRQGWPVIELEDYSDPLYPWKVRAELAASYIADEKERGEKLSVALRHIARHRGWRNPYAKVSSLYLPDEPSDAFKAIREEIKRASGQPVPETATVGQMVTLCELGTLKLRGEGGVLSARLQQSDHAREIQEICRMQEIGQELYRKIIDVVFAAESPKGSASSRVGKDPLQPGKNRALKASDAFQRYRIAALIGNLRVRVDGEKRILSVEEKNLVFDHLVNLAPKKEPEWVTIAEILGIDRGQLIGTATMTDDGERAGARPPTHDTNRSIVNSRIAPLVDWWKTASALEQHAMVKALSNAEVDDFDSPEGAKVQAFFADLDDDVHAKLDSLHLPVGRAAYSEDTLVRLTRRMLADGVDLYTARLQEFGIEPSWTPPAPRIGEPVGNPAVDRVLKTVSRWLESATKTWGAPERVIIEHVREGFVTEKRAREMDGDMRRRAARNAKLFQEMQEKLNIQGKPSRADLWRYQSVQRQNCQCAYCGSPITFSNSEMDHIVPRAGQGSTNTRENLVAVCHRCNQSKGNTPFAIWAKNTSIEGVSVKEAVERTRHWVTDTGMRSTDFKKFTKAVVERFQRVTMDEEIDARSMESVAWMANELRSRVAQHFASRGTTVRVYRGSLTAEARRASGISGKLEFLDGVGKSRLDRRHHAIDAAVIAFTSDYVAETLAVRSNLKQSQAHRQEAPQWREFTGKDAEHRAAWRVWCQKMEKLSALLTEDLRDDRVVVMSNVRLRLGNGSAHEETIGKLSKVKLGSQLSVSDIDKASSEALWCALTREPDFDPKDGLPANPERHIRVNGTHVYAGDNIGLFPVSAGSIALRGGYAELGSSFHHARVYKITSGKKPAFAMLRVYTIDLLPYRNQDLFSVELKPQTMSMRQAEKKLRDALATGNAEYLGWLVVDDELVVDTSKIATDQVKAVEAELGTIRRWRVDGFFGDTRLRLRPLQMSKEGIKKESAPELSKIIDRPGWLPAVNKLFSEGNVTVVRRDSLGRVRLESTAHLPVTWKVQ

SEQ ID NO: 175 - protein, 1084 aa, Corynebacterium diphtheriae
  Corynebacterium diphtheriae bv. intermedius str. NCTC 5011
MKYHVGIDVGTFSVGLAAIEVDDAGMPIKTLSLVSHIHDSGLDPDEIKSAVTRLASSGIARRTRRLYRRKRRRLQQLDKFIQRQGWPVIELEDYSDPLYPWKVRAELAASYIADEKERGEKLSVALRHIARHRGWRNPYAKVSSLYLPDGPSDAFKAIREEIKRASGQPVPETATVGQMVTLCELGTLKLRGEGGVLSARLQQSDHAREIQEICRMQEIGQELYRKIIDVVFAAESPKGSASSRVGKDPLQPGKNRALKASDAFQRYRIAALIGNLRVRVDGEKRILSVEEKNLVFDHLVNLAPKKEPEWVTIAEILGIDRGQLIGTATMTDDGERAGARPPTHDTNRSIVNSRIAPLVDWWKTASALEQHAMVKALSNAEVDDFDSPEGAKVQAFFADLDDDVHAKLDSLHLPVGRAAYSEDTLVRLTRRMLADGVDLYTARLQEFGIEPSWTPPAPRIGEPVGNPAVDRVLKTVSRWLESATKTWGAPERVIIEHVREGFVTEKRAREMDGDMQRRAARNAKLFQEMQEKLNVQGKPSRADLWRYQSVQRQNCQCAYCGSPITFSNSEMDHIVPRAGQGSTNTRENLVAVCHRCNQSKGNTPFAIWAKNTSIEGVSVKEAVERTRHWVTDTGMRSPDFKKFTKAVVERFQRATMDEEIDARSMESVAWMANELRSRVAQHFASHGTTVRVYRGSLTAEARRASGISGKLKFFDGVGKSRLDRRHHAIDAAVIAFTSDYVAETLAVRSNLKQSQAHRQEAPQWREFTGKDAEHRAAWRVWCQKMEKLSALLTEDLRDDRVVVMSNVRLRLGNGSAHKETIGKLSKVKLGSQLSVSDIDKASSEALWCALTREPDFDPKEGLPANPERHIRVNGTHVYAGDNIGLFPVSAGSIALRGGYAELGSSFHHARVYKITSGKKPAFAMLRVYTIDLLPYRNQDLFSVELKPQTMSMRQAEKKLRDALATGNAEYLGWLVVDDELVVDTSKIATDQVKAVEAELGTIRRWRVDGFFSPSKLRLRPLQMSKEGIKKESAPELSKIIDRPGWLPAVNKLFSDGNVTVVRRDSLGRVRLESTAHLPVTWKVQ

SEQ ID NO: 176 - protein, 1084 aa, Corynebacterium diphtheriae
MKYHVGIDVGTFSVGLAAIEVDDAGMPIKTLSLVSHIHDSGLDPDKIKSAVTRLASSGIARRTRRLYRRKRRRLQQLDKFIQRQGWPVIELEDYSDPLYPWKVRAELAASYIADEKERGEKLSVALRHIARHRGWRNPYAKVSSLYLPDEPSDAFKAIREEIKRASGQPVPETATVGQMVTLCELGTLKLRGEGGVLSARLQQSDHAREIQEICRMQEIGQELYRKIIDVVFAAESPKGSASSRVGKDPLQPGKNRALKASDAFQRYRIAALIGNLRVRVDGEKRILSVEEKNLVFDHLVNLAPKKEPEWVTIAEILGIDRGQLIGTATMTDDGERAGARPPTHDTNRSIVNSRIAPLVDWWKTASALEQHAMVKALSNAEVDDFDSPEGAKVQAFFADLDDDVHAKLDSLHLPVGRAAYSEDTLVRLTRRMLADGVDLYTARLQEFGIEPSWTPPAPRIGEPVGNPAVDRVLKTVSRWLESATKTWGAPERVIIEHVREGFVTEKRAREMDGDMRRRAARNAKLFQEMQEKLNVQGKPSRADLWRYQSVQRQNCQCAYCGSPITFSNSEMDHIVPRAGQGSTNTRENLVAVCHRCNQSKGNTPFAIWAKNTSIEGVSVKEAVERTRHWVTDTGMRSTDFKKFTKAVVERFQRATMDEEIDARSMESVAWMANELRSRVAQHFASHGTTVRVYRGSLTAEARRASGISGKLEFLDGVGKSRLDRRHHAIDAAVIAFTSDYVAETLAVRSNLKQSQAHRQEAPQWREFTGKDAEHRAAWRVWCQKMEKLSALLTEDLRDDRVVVMSNVRLRLGNGSAHEETIGKLSKVKLGSQLSVSDIDKASSEALWCALTREPDFDPKDGLPANPERHIRVNGTHVYAGDNIGLFPVSAGSIALRGGYAELGSSFHHARVYKITSGKKPAFAMLRVYTIDLLPYRNQDLFSVELKPQTMSMRQAEKKLRDALATGNAEYLGWLVVDDELVVDTSKIATDQVKAVEAELGTIRRWRVDGFFGDTRLRLRPLQMSKEGIKKESAPELSKIIDRPGWLPAVNKLFSEGNVTVVRRDSLGRVRLESTAHLPVTWKVQ

SEQ ID NO: 177 - protein, 1084 aa, Corynebacterium diphtheriae
MKYHVGIDVGTFSVGLAAIEVDDAGMPIKTLSLVSHIHDSGLDPDEIKSAVTRLASSGIARRTRRLYRRKRRRLQQLDKFIQRQGWPVIELEDYSDPLYPWKVRAELAASYIADEKERGEKLSVALRHIARHRGWRNPYAKVSSLYLPDGPSDAFKAIREEIKRASGQPVPETATVGQMVTLCELGTLKLRGEGGVLSARLQQSDHAREIQEICRMQEIGQELYRKIIDVVFAAESPKGSASSRVGKDPLQPGKNRALKASDAFQRYRIAALIGNLRVWVDGEKRILSVEEKNLVFDHLVNLTPKKEPEWVTIAEILGIDRGQLIGTATMTDDGERAGARPPTHDTNRSIVNSRIAPLVDWWKTASALEQHAMVKALSNAEVDDFDSPERAKVQAFFADLDDDVHAKLDSLHLPVGRAAYSEDTLVRLTRRMLSDGVDLYTARLQEFGIEPSWTPPTPRIGEPVGNPAVDRVLKTVSRWLESATKTWGAPERVIIEHVREGFVTEKRAREMDGDMRRRAARNAKLFQEMQEKLNVQGKPSRADLWRYQSVQRQNCQCAYCGSPITFSNSEMDHIVPRAGQGSTNTRENLVAVCHRCNQSKGNTPFAIWAKNTSIEGVSVKEAVERTRHWVTDTGMRSTDFKKFTKAVVERFQRATMDEEIDARSMESVAWMANELRSRVAQHFASHGTTVRVYRGSLTAEARRASGISGKLEFLDGVGKSRLDRRHHAIDAAVIAFTSDYVAETLAVRSNLKQSQAHRQEAPQWREFTGKDAEHRATWRVWCQKMEKLSALLTEDLRDDRVVVMSNVRLRLGNGSAHEETIGKLSKVKLGSQLSVSDIDKASSEALWCALTREPDFDPKDGLPANPERHIRVNGTHVYAGDNIGLFPVSAGSIALRGGYAELGSSFHHARVYKITSGKKPAFAMLRVYTIDLLPYRNQDLFSVELKPQTMSMRQAEKKLRDALATGNAEYLGWLVVDDELVVDTSKIATDQVKAVEAELGTIRRWRVDGFFGDTRLRLRPLQMSKEGIKKESAPELSKIIDRPGWLPAVNKLFSEGNVTVVRRDSLGRVRLESTAHLPVTWKVQ

SEQ ID NO: 178 - protein, 1084 aa, Corynebacterium diphtheriae
MKYHVGIDVGTFSVGLAAIEVDDAGMPIKTLSLVSHIHDSGLDPDEIKSAVTRLASSGIARRTRRLYRRKRRRLQQLDKFIQRQGWPVIELEDYSDPLYPWKVRAELAASYIADEKERGEKLSVALRHIARHRGWRNPYAKVSSLYLPDGPSDAFKAIREEIKRASGQPVPETATVGQMVTLCELGTLKLRGEGGVLSARLQQSDYAREIQEICRMQEIGQELYRKIIDVVFAAESPKGSASSRVGKDPLQPGKNRALKASDAFQRYRIAALIGNLRVRVDGEKRILSVEEKNLVFDHLVNLTPKKEPEWVTIAEILGIDRGQLIGTATMTDDGERAGARPPTHDTNRSIVNSRIAPLVDWWKTASALEQHAMVKALSNAEVDDFDSPEGAKVQAFFADLDDDVHAKLDSLHLPVGRAAYSEDTLVRLTRRMLSDGVDLYTARLQEFGIEPSWTPPTPRIGEPVGNPAVDRVLKTVSRWLESATKTWGAPERVIIEHVREGFVTEKRAREMDGDMRRRAARNAKLFQEMQEKLNVQGKPSRADLWRYQSVQRQNCQCAYCGSPITFSNSEMDHIVPRAGQGSTNTRENLVAVCHRCNQSKGNTPFAIWAKNTSIEGVSVKEAVERTRHWVTDTGMRSTDFKKFTKAVVERFQRATMDEEIDARSMESVAWMANELRSRVAQHFASHGTTVRVYRGSLTAEARRASGISGKLKFFDGVGKSRLDRRHHAIDAAVIAFTSDYVAETLAVRSNLKQSQAHRQEAPQWREFTGKDAEHRAAWRVWCQKMEKLSALLTEDLRDDRVVVMSNVRLRLGNGSAHKETIGKLSKVKLSSQLSVSDIDKASSEALWCALTREPGFDPKEGLPANPERHIRVNGTHVYAGDNIGLFPVSAGSIALRGGYAELGSSFHHARVYKITSGKKPAFAMLRVYTIDLLPYRNQDLFSVELKPQTMSMRQAEKKLRDALATGNAEYLGWLVVDDELVVDTSKIATDQVKAVEAELGTIRRWRVDGFFSPSKLRLRPLQMSKEGIKKESAPELSKIIDRPGWLPAVNKLFSDGNVTVVRRDSLGRVRLESTAHLPVTWKVQ

SEQ ID NO: 179 - protein, 1084 aa, Corynebacterium diphtheriae
MKYHVGIDVGTFSVGLAAIEVDDAGMPIKTLSLVSHIHDSGLDPDKMKSAVTRLASSGIARRTRRLYRRKRRRLQQLDKFIQRQGWPVIELEDYSDPLYPWKVRAELAASYIADEKERGEKLSVALRHIARHRGWRNPYAKVSSLYLPDEPSDAFKSIREEIKRASGQPVPETATVGQMVTLCELGTLKLRGEGGVLSARLQQSDHAREIQEICRMQEIGQELYRKIIDVVFAAESPKGSASSRVGKDPLQPGKNRALKASDSFQRYRIAALISNLRVRVDGEKRILSVEEKNLVFDHLVNLAPKKEPEWVTIAEILGIDRGQLIGTATMTDDGERAGARPPTHDTNRSIVNSRIAPLVDWWKTASALEQHAMVKALSNAEVDDFDSPEGAKVQAFFADLDDDVHAKLDSLHLPVGRAAYSEDTLVRLTRRMLADGVDLYTARLQEFGIEPSWTPPAPRIGEPVGNPAVDRVLKTVSRWLESATKTWGAPERVIIEHVRDGFVTEKRAREMDGDMRRRAARNAKLFQEMQEKLNVQGKPSRADLWRYQSVQRQNCQCAYCGSPITFSNSEMDHIVPRAGQGSTNTRENLVAVCHRCNQSKGNTPFAIWAKNTSIEGVSVKEAVERTRHWVTDTGMRSTDFKKFTKAVVERFQRATMDEEIDARSMESVAWMANELRSRVAQHFASHGTTVRVYRGSLTAEARRASGISGKLEFLDGVGKSRLDRRHHAIDAAVIAFTSDYVAETLAVRSNLKQSQAHRQEAPQWREFTGKDAEHRAAWRVWCQKMEKLSALLTEDLRDDRVVVMSNVRLRLGNGSAHEETIGKLSKVKLGSQLSVSDIDKASSEALWCALTREPDFDPKDGLPANPERHIRVNGTHVYAGDNIGLFPVSAGSIALRGGYAELGSSFHHARVYKITSGKKPAFAMLRVYTIDLLPYRNQDLFSVELKPQTMSMRQAEKKLRDALATGNAEYLGWLVVDDELVVDTSKIATDQVKAVEAELGTIRRWRVDGFFGDTRLRLRPLQMSKEGIKKELAPELSKIIDRPGWLPAVNKLFSEGNVTVVRRDSLGRVRLESTAHLPVTWKVQ

SEQ ID NO: 180 - protein, 1089 aa, Corynebacterium matruchotii
  Corynebacterium matruchotii ATCC 14266
MNSANVNYRVGIDVGSYSLGMAAIAIDDDGKPTEILSAISLIHDSGVDPDSAKSAATRLATSGIARRTRRLYRRKRKRLAKLDKFISSQGWPLKEFEKYEDPFYPWRVRAELATTAITDQQELGEKLSIALRHIARHRGWRNPYSKVTALYTVTEPSDAFLAMQEECAKQLGRTIPETITVGQLVTGMNLGKTRLRGENSLLAARPRQSDNANEIHTIAKVQGLSNELVRQIIDHVFAAESPKGSAAEQVGKDPLQPTKKRALKASDAFQQYRIAALIGNLRIRGGKGNRRLTTEETRLVFDYLRSLPAKQEPTWQLVAEQLKIDRGNLVGTAIMTDDGERAGAKPPVHDTNRIMENTKIKPLATWWKSADADARAAMVKALSNAEVDDFDSQAGAQVQEFFFGISDEDQEKLDGLHLPIGRAAYSEDTLDRLTKRMIGEGMDLYEARQAEFKISNDWAPPAPEIGERVGNPAVDRVLKATARWLNAAERQWGAPKSVNIEHVRAAFMSESSARELDRDNQQRAKRNVKVVAEMQEKLGIEGRPSRADVWRFQSIQRQNGKCAYCGAEISFKNSEMDHIIPQAGEGSTNTRDNLVAVCRECNSSKSNIAFAVWAENTSRPGVSVQKAIERTHHWVTDSGLRKPEFDKFRKQVCDRLRRKATDEPIDARSLESVAWMANELRSRIAQKFKDGDTKVRVYKGALTAEARRASGISGKLEFVDGKGKSRLDRRHHAVDAAVVAFTSNYVAETLALRSNMKFDQELRRKAPQWREFTGSDHVHQVEWTKWKYRMQALAELLNNALVQDRIVVMHNLRLRLGNGAAHEDTIGKLTRLKVGDAISTTDIDRASSEALWCALTRDPDYDPKTGLPENPNRTIRIHGTHLTASDEITVFPVAAASIPIRDGFAKLGSNYHHVRLFRVPSGKKYKYCLMQVYTVDLLKFRKEDLFTVELKPQTISVRTCEALLRKALANGTAEYLGWLVSDDELLIDTSSFDTPGIVKLREEYGPVNRWRLAGLTSVTRLNLRPLYLSKEGLKPNVNPEIKKIIDNRSWIITVNKLFSSGHVKIIRRDALGRPRLHSAAHLPICWEVK

SEQ ID NO: 181 - protein, 1069 aa, Corynebacterium matruchotii
  Corynebacterium matruchotii ATCC 33806
MAAIAIDDDGKPTEILSAISLIHDSGVDPDSAKSAATRLATSGIARRTRRLYRRKRKRLAKLDKFISSQGWPLKEFEKYEDPFYPWRVRAELATTAITDQQELGEKLSIALRHIARHRGWRNPYSKVTALYTVTEPSDAFLAMQEECAKQLGRTIPETITVGQLVTGMNLGKTRLRGENSLLAARPRQSDNANEIHTIAKVQGLSNELVRQIIDHVFAAESPKGSAAEQVGKDPLQPTKKRALKASDAFQQYRIAALIGNLRIRGGKGNRRLTTEETRLVFDYLRSLPAKQEPTWQLVAEQLKIDRGNLVGTAIMTDDGERAGAKPPVHDTNRIMENTKIKPLATWWKSADADARAAMVKALSNAEVDDFDSQAGAQVQEFFFGISDEDQEKLDGLHLPIGRAAYSEDTLDRLTKRMIGEGMDLYEARQAEFKISNDWAPPAPEIGERVGNPAVDRVLKATARWLNAAERQWGAPKSVNIEHVRAAFMSESSARELDRDNQQRAKRNVKVVAEMQEKLGIEGRPSRADVWRFQSIQRQNGKCAYCGAEISFKNSEMDHIIPQVGEGSTNTRDNLVAVCRECNSSKSNIAFAVWAENTSRPGVSVQKAIERTHHWVTDSGLRKPEFDKFRKQVCDRLRRKATDEPIDARSLESVAWMANELRSRIAQKFKDGDTKVRVYKGALTAEARRASGISGKLEFVDGKGKSRLDRRHHAVDAAVVAFTSNYVAETLALRSNMKFDQELRRKAPQWREFTGSDHVHQVEWTKWKYRMQALAELLNNALVQDRIVVMHNLRLRLGNGAAHEDTIGKLTRLKVGDAISTTDIDRASSEALWCALTRDPDYDPKTGLPENPNRTIRIHGTHLTASDEITVFPVAAASIPIRDGFAKLGSNYHHVRLFRVPSGKKYKYCLMQVYTVDLLKFRKEDLFTVELKPQTISVRTCEALLRKALANGTAEYLGWLVSDDELLIDTSSFDTPGIVKLREEYGPVNRWRLAGLTSVTRLNLRPLYLSKEGLKPNVNPEIKKIIDNRSWIITVNKLFSSGHVKIIRRDALGRPRLHSAAHLPICWEVK

SEQ ID NO: 182 - protein, 1079 aa, Dinoroseobacter shibae
MRLGLDIGTSSIGWWLYETDGAGSDARITGVVDGGVRIFSDGRDPKSGASLAVDRRAARAMRRRRDRYLRRRATLMKVLAETGLMPADPAEAKALEALDPFALRAAGLDEPLPLPHLGRALFHLNQRRGFKSNRKTDRGDNESGKIKDATARLDMEMMANGARTYGEFLHKRRQKATDPRHVPSVRTRLSIANRGGPDGKEEAGYDFYPDRRHLEEEFHKLWAAQGAHHPELTETLRDLLFEKIFFQRPLKEPEVGLCLFSGHHGVPPKDPRLPKAHPLTQRRVLYETVNQLRVTADGREARPLTREERDQVIHALDNKKPTKSLSSMVLKLPALAKVLKLRDGERFTLETGVRDAIACDPLRASPAHPDRFGPRWSILDADAQWEVISRIRRVQSDAEHAALVDWLTEAHGLDRAHAEATAHAPLPDGYGRLGLTATTRILYQLTADVVTYADAVKACGWHHSDGRTGECFDRLPYYGEVLERHVIPGSYHPDDDDITRFGRITNPTVHIGLNQLRRLVNRIIETHGKPHQIVVELARDLKKSEEQKRADIKRIRDTTEAAKKRSEKLEELEIEDNGRNRMLLRLWEDLNPDDAMRRFCPYTGTRISAAMIFDGSCDVDHILPYSRTLDDSFPNRTLCLREANRQKRNQTPWQAWGDTPHWHAIAANLKNLPENKRWRFAPDAMTRFEGENGFLDRALKDTQYLARISRSYLDTLFTKGGHVWVVPGRFTEMLRRHWGLNSLLSDAGRGAVKAKNRTDHRHHAIDAAVIAATDPGLLNRISRAAGQGEAAGQSAELIARDTPPPWEGFRDDLRVRLDRIIVSHRADHGRIDHAARKQGRDSTAGQLHQETAYSIVDDIHVASRTDLLSLKPAQLLDEPGRSGQVRDPQLRKALRVATGGKTGKDFENALRYFASKPGPYQAIRRVRIIKPLQAQARVPVPAQDPIKAYQGGSNHLFEIWRLPDGEIEAQVITSFEAHTLEGEKRPHPAAKRLLRVHKGDMVALERDGRRVVGHVQKMDIANGLFIVPHNEANADTRNNDKSDPFKWIQIGARPAIASGIRRVSVDEIGRLRDGGTRPI

SEQ ID NO: 183 - protein, 1332 aa, Dolosigranulum pigrum
  Dolosigranulum pigrum ATCC 51524
MQKNYTIGLDIGTNSVGWAVMKDDYTLIRKRMKVLGNTDIKKIKKNFWGVRLFDEGETAKETRLKRGTRRRYQRRRNRLIYLQDIFQQPMLAIDENFFHRLDDSFFVPDDKSYDRHPIFGSLEEEVAYHNTYPTIYHLRKHLADNPEKADLRLVYTALAHIVKYRGHFLIEGELNTENTSISETFEQFLDTYSDIFKEQLVGDISKVEEILSSKQSRSRKHEQIMALFPNENKLGNFGRFMMLIVGNTSNFKPVFDLDDEYKLKLSDETYEEDLDTLLGMTDDVFLDVFMAAKNVYDAVEMSAIISTDTGNSKAVLSNQMINFYDEHKVDLAQLKQFFKTHLPDKYYECFSDPSKNGYAGYIDGKTNQEDFYKYIEKVMKTIKSDKKDYFLDKIDREVFLRKQRSFYNSVIPHQIHLQEMQAILDRQSQYYPFLAENRDKIESLVTFRIPYYVGPLTVSDQSEFAWMERQSDEPIRPWNFDEIVNKERSAEKFIERMTNMDTYLLEEKVLPKRSLLYQTFEVYNELTKVRYTNEQGKTEKLNRQQKAEIIETLFKQKNRVREKDIANYLEQYGYVDGTDIKGVEDKFNASLSTYNDLAKIDGAKAYLDDPEYADVWEDIIKILTIFEDKAMRKKQLQTYSDTLSPEILKKLERKHYTGWGRFSKKLINGLRDEGSNKTILDYLKSDEGSSGPTNRNFMQLIRDNTLSFKKKIEDAQTIEDTTHIYDTVAELPGSPAIKKGIRQALKIVEEIIDIIGYEPENIVVEMARESQTTKKGKDLSKERLEKLTEAIKEFDGPSDVKVKDLKNENLRNDRLYLYYLQNGRDMYTNEPLDINNLSKYDIDHIIPQSFTTDNSIDNKVLVSRTKNQGNKSDDVPSINIVHKMKPFWRQLHKAGLISDRKFKNLTKAEHGGLTEADRAHFLNRQLVETRQITKHVANLLDSQYNTAEEQRINIVLLKSSMTSRFRKEFKLYKVREINDYHHGHDAYLNAVVATTIMKVYPNLKPQFVYGQYKKTSMFKEEKATARKHFYSNITKFFKKEKVVNEETGEILWDTERHLSTIKRVLSWKQMNIVKKVEKQKGQLWKETIYPKGDSSKLIPVKEGMDPQKYGGLSQVSEAFAVVITHEKGKKKQLKSDLISIPIVDQKAYEQHPTAYLEEAGYNNPTVLHELFKYQLFELEDGSRRMIASAKEFQKGNQMVLPLELVELLYHANRYDKVKFPDSIEYVHDNLAKFDDLLEYVIDFSNKYINADKNVQKIQKIYKEHGTEDVELTVESFVNLMTFTAMGAPATFKFYGESITRSRYTSITEFRGSTLIFQSITGLYETRYKLEDN

SEQ ID NO: 184 - protein, 1340 aa, Dorea longicatena
  Dorea longicatena DSM 13814
MEQEYYLGLDMGTGSVGWAVTDSEYHVLRKHGKALWGVRLFESASTAEERRMFRTSRRRLDRRNWRIEILQEIFAEEISKKDPGFFLRMKESKYYPEDKRDINGNCPELPYALFVDDDFTDKDYHKKFPTIYHLRKMLMNTEETPDIRLVYLAIHHMMKHRGHFLLSGDINEIKEFGTTFSKLLENIKNEELDWNLELGKEEYAVVESILKDNMLNRSTKKTRLIKALKAKSICEKAVLNLLAGGTVKLSDIFGLEELNETERPKISFADNGYDDYIGEVENELGEQFYIIETAKAVYDWAVLVEILGKYTSISEAKVATYEKHKSDLQFLKKIVRKYLTKEEYKDIFVSTSDKLKNYSAYIGMTKINGKKVDLQSKRCSKEEFYDFIKKNVLKKLEGQPEYEYLKEELERETFLPKQVNRDNGVIPYQIHLYELKKILGNLRDKIDLIKENEDKLVQLFEFRIPYYVGPLNKIDDGKEGKFTWAVRKSNEKIYPWNFENVVDIEASAEKFIRRMTNKCTYLMGEDVLPKDSLLYSKYMVLNELNNVKLDGEKLSVELKQRLYTDVFCKYRKVTVKKIKNYLKCEGIISGNVEITGIDGDFKASLTAYHDFKEILTGTELAKKDKENIITNIVLFGDDKKLLKKRLNRLYPQITPNQLKKICALSYTGWGRFSKKFLEEITAPDPETGEVWNIITALWESNNNLMQLLSNEYRFMEEVETYNMGKQTKTLSYETVENMYVSPSVKRQIWQTLKIVKELEKVMKESPKRVFIEMAREKQESKRTESRKKQLIDLYKACKNEEKDWVKELGDQEEQKLRSDKLYLYYTQKGRCMYSGEVIELKDLWDNTKYDIDHIYPQSKTMDDSLNNRVLVKKKYNATKSDKYPLNENIRHERKGFWKSLLDGGFISKEKYERLIRNTELSPEELAGFIERQIVETRQSTKAVAEILKQVFPESEIVYVKAGTVSRFRKDFELLKVREVNDLHHAKDAYLNIVVGNSYYVKFTKNASWFIKENPGRTYNLKKMFTSGWNIERNGEVAWEVGKKGTIVTVKQIMNKNNILVTRQVHEAKGGLFDQQIMKKGKGQIAIKETDERLASIEKYGGYNKAAGAYFMLVESKDKKGKTIRTIEFIPLYLKNKIESDESIALNFLEKGRGLKEPKILLKKIKIDTLFDVDGFKMWLSGRTGDRLLFKCANQLILDEKIIVTMKKIVKFIQRRQENRELKLSDKDGIDNEVLMEIYNTFVDKLENTVYRIRLSEQAKTLIDKQKEFERLSLEDKSSTLFEILHIFQCQSSAANLKMIGGPGKAGILVMNNNISKCNKISIINQSPTGIFENEIDLLKI

SEQ ID NO: 185 - protein, 1380 aa, Eggerthella sp.
  Eggerthella sp. YY7918
MNLRHVGNYNIGLDMGTASVGWAAIDEQGELLHFKGKPTWGSRLFDSANTAATARMPRGQRRRYIRRRWRLDLLQKFFSEEMAEKDPEFFIRLRQSSLWPEDREGGHTAYHWPLFNDSDFNEKEYYEKFPTIFHLRQWLMETDEKADIRLIYLAFHNIVKHRGNFLQENNDSLSAQNANMRESLESFCIALEEWCDEKELTCSCDPQKLEHLFKEVKYRSDIRDGFAALLGLACSGENEVDVKAMAKEMGKAIVGYKADFSKIFTECDKEGSSFRLSDDEGPEAFLDICPDDGIALFEAIQMVYSSFILTGMLTEKGLSLSKISAYNQYGQDLESLKALVKEYVPNEYSSFFRGPTYSGSTEYDPSKAQGYTRYNLGPSKKGSGAKPMAYEDFKKSVEQLFANTNAINDERYKEMMGRFAEEKFLRRLRTSDNGRIPFQLNLEEMTAIIINQGKYYPFLLEQQEKLESLVRFRIPYYVGPLTRINARLDSKGNACFAWSKRKDGMDSASIKPWNWDEVIDKHASAQAFIERMTGTCTYLRGEPVLPRCSLLYEEYCVLNELNGARWTQDGDKFIRFDYKDRSDIIEELFKKRRGRIQYAAVADWMKQERSHANVHVSGGQGENAFESRLSSYHFFCNDVFGVDELPGSYVDMVEEIILWSTLFEDRSILREEIQRKYGDVLNEEQIKTICKKRFSGWGRLSRKLLCSLKAQTDNGPKSIMDILQEGDQNNGRVGRAMVFQEILHDEQLGFEQKIEEENTQSMLEGENLLIEDLPGSPAIRRSINQAVRIVDEIVGIAGHAPDNIFIEVTREDDTKKKGKRTTTRYSNIQKALEALKEEGAEALRELKTYKHNELDKRLSLYFMQNGKSLYSGIPLDIRRLSEYQIDHIIPQSYIKDDSYENMALVLPGENQSKADNLLISQDIRIKMKATWTALHKAGLMGDKKYNNLMNSSISDAKMKGFINRQLVETSQSVKLTQMMLSQKYPGAKVRPIKASISSQLRDACDLVKCREANDYHHAHDAYLACQVGRFVLKRHSSMFDNPIGMTKVIRDFVKRQGQEFKRNGKLPAYASRSGFIVQSFMRSGFDAETGELLRDDWNAPFEIARIKRCLNYRDCYISRMPMEDSGAFWDATIYSPKAGKKGALPVKQGLPVEKYGSYSREQFAYFFVYKAYNPKKKAYRLEFEAVPVRVASAVETRENALEEYAKSVAKQAGLEFVEVARPKVYKYQLIELGEDRLYITGKREVRNASQLAFSLDEIDLLKRLAEGEETSSEERERLFDVLIEKYARYAPRLARQLSVDSMSATFETLNAEEQLGILLSLVEIANGKRNMIDLSSAGGSKNAGCMNPTFSSELSSPGSNFTFIDQSVTGMFERRQRLEL

SEQ ID NO: 186 - protein, 1195 aa, Elusimicrobium minutum
MQKNINTKQNHIYIKQAQKIKEKLGDKPYRIGLDLGVGSIGFAIVSMEENDGNVLLPKEIIMVGSRIFKASAGAADRKLSRGQRNNHRHTRERMRYLWKVLAEQKLALPVPADLDRKENSSEGETSAKRFLGDVLQKDIYELRVKSLDERLSLQELGYVLYHIAGHRGSSAIRTFENDSEEAQKENTENKKIAGNIKRLMAKKNYRTYGEYLYKEFFENKEKHKREKISNAANNHKFSPTRDLVIKEAEAILKKQAGKDGFHKELTEEYIEKLTKAIGYESEKLIPESGFCPYLKDEKRLPASHKLNEERRLWETLNNARYSDPIVDIVTGEITGYYEKQFTKEQKQKLFDYLLTGSELTPAQTKKLLGLKNTNFEDIILQGRDKKAQKIKGYKLIKLESMPFWARLSEAQQDSFLYDWNSCPDEKLLTEKLSNEYHLTEEEIDNAFNEIVLSSSYAPLGKSAMLIILEKIKNDLSYTEAVEEALKEGKLTKEKQAIKDRLPYYGAVLQESTQKIIAKGFSPQFKDKGYKTPHTNKYELEYGRIANPVVHQTLNELRKLVNEIIDILGKKPCEIGLETARELKKSAEDRSKLSREQNDNESNRNRIYEIYIRPQQQVIITRRENPRNYILKFELLEEQKSQCPFCGGQISPNDIINNQADIEHLFPIAESEDNGRNNLVISHSACNADKAKRSPWAAFASAAKDSKYDYNRILSNVKENIPHKAWRFNQGAFEKFIENKPMAARFKTDNSYISKVAHKYLACLFEKPNIICVKGSLTAQLRMAWGLQGLMIPFAKQLITEKESESFNKDVNSNKKIRLDNRHHALDAIVIAYASRGYGNLLNKMAGKDYKINYSERNWLSKILLPPNNIVWENIDADLESFESSVKTALKNAFISVKHDHSDNGELVKGTMYKIFYSERGYTLTTYKKLSALKLTDPQKKKTPKDFLETALLKFKGRESEMKNEKIKSAIENNKRLFDVIQDNLEKAKKLLEEENEKSKAEGKKEKNINDASIYQKAISLSGDKYVQLSKKEPGKFFAISKPTPTTTGYGYDTGDSLCVDLYYDNKGKLCGEIIRKIDAQQKNPLKYKEQGFTLFERIYGGDILEVDFDIHSDKNSFRNNTGSAPENRVFIKVGTFTEITNNNIQIWFGNIIKSTGGQDDSFTINSMQQYNPRKLILSSCGFIKYRSPILKNKEG

SEQ ID NO: 187 - protein, 1337 aa, Enterococcus faecalis
  Enterococcus faecalis ATCC 29200
MKKDYVIGLDIGTNSVGWAVMTEDYQLVKKKMPIYGNTEKKKIKKNFWGVRLFEEGHTAEDRRLKRTARRRISRRRNRLRYLQAFFEEAMTDLDENFFARLQESFLVPEDKKWHRHPIFAKLEDEVAYHETYPTIYHLRKKLADSSEQADLRLIYLALAHIVKYRGHFLIEGKLSTENISVKEQFQQFMIIYNQTFVNGESRLVSAPLPESVLIEEELTEKASRTKKSEKVLQQFPQEKANGLFGQFLKLMVGNKADFKKVFGLEEEAKITYASESYEEDLEGILAKVGDEYSDVFLAAKNVYDAVELSTILADSDKKSHAKLSSSMIVRFTEHQEDLKKFKRFIRENCPDEYDNLFKNEQKDGYAGYIAHAGKVSQLKFYQYVKKIIQDIAGAEYFLEKIAQENFLRKQRTFDNGVIPHQIHLAELQAIIHRQAAYYPFLKENQEKIEQLVTFRIPYYVGPLSKGDASTFAWLKRQSEEPIRPWNLQETVDLDQSATAFIERMTNFDTYLPSEKVLPKHSLLYEKFMVFNELTKISYTDDRGIKANFSGKEKEKIFDYLFKTRRKVKKKDIIQFYRNEYNTEIVTLSGLEEDQFNASFSTYQDLLKCGLTRAELDHPDNAEKLEDIIKILTIFEDRQRIRTQLSTFKGQFSAEVLKKLERKHYTGWGRLSKKLINGIYDKESGKTILGYLIKDDGVSKHYNRNFMQLINDSQLSFKNAIQKAQSSEHEETLSETVNELAGSPAIKKGIYQSLKIVDELVAIMGYAPKRIVVEMARENQTTSTGKRRSIQRLKIVEKAMAEIGSNLLKEQPTTNEQLRDTRLFLYYMQNGKDMYTGDELSLHRLSHYDIDHIIPQSFMKDDSLDNLVLVGSTENRGKSDDVPSKEVVKDMKAYWEKLYAAGLISQRKFQRLTKGEQGGLTLEDKAHFIQRQLVETRQITKNVAGILDQRYNANSKEKKVQIITLKASLTSQFRSIFGLYKVREVNDYHHGQDAYLNCVVATTLLKVYPNLAPEFVYGEYPKFQTFKENKATAKAIIYTNLLRFFTEDEPRFTKDGEILWSNSYLKTIKKELNYHQMNIVKKVEVQKGGFSKESIKPKGPSNKLIPVKNGLDPQKYGGFDSPIVAYTVLFTHEKGKKPLIKQEILGITIMEKTRFEQNPILFLEEKGFLRPRVLMKLPKYTLYEFPEGRRRLLASAKEAQKGNQMVLPEHLLTLLYHAKQCLLPNQSESLAYVEQHQPEFQEILERVVDFAEVHTLAKSKVQQIVKLFEANQTADVKEIAASFIQLMQFNAMGAPSTFKFFQKDIERARYTSIKEIFDATIIYQSTTGLYETRRKVVD

SEQ ID NO: 188 - protein, 1337 aa, Enterococcus faecalis
  Enterococcus faecalis ATCC 4200
MKKDYVIGLDIGTNSVGWAVMTEDYQLVKKKMPIYGNTEKKKIKKNFWGVRLFEEGHTAEDRRLKRTARRRISRRRNRLRYLQAFFEEAMTALDENFFARLQESFLVPEDKKWHRHPIFAKLEDEVAYHETYPTIYHLRKKLADSSEQADLRLIYLALAHIVKYRGHFLIEGKLSTENISVKEQFQQFMIIYNQTFVNGESRLVSAPLPESVLIEEELTEKASRTKKSEKVLQQFPQEKANGLFGQFLKLMVGNKADFKKVFGLEEEAKITYASESYEEDLEGILAKVGDEYSDVFLAAKNVYDAVELSTILADSDKKSHAKLSSSMIVRFTEHQEDLKKFKRFIRENCPDEYDNLFKNEQKDGYAGYIAHAGKVSQLKFYQYVKKIIQDIAGAEYFLEKIAQENFLRKQRTFDNGVIPHQIHLAELQAIIHRQAAYYPFLKENQEKIEQLVTFRIPYYIGPLSKGDASTFAWLKRQSEEPIRPWNLQETVDLDQSATAFIERMTNFDTYLSSEKVLPKHSLLYEKFMVFNELTKISYTDDRGIKANFSGKEKEKIFDYLFKTRRKVKKKDIIQFYRNEYNTEIVTLSGLEEDQFNASFSTYQDLLKCGLTRAELDHPDNAEKLEDIIKILTIFEDRQRIRTQLSTFKGQFSAEVLKKLERKHYTGWGRLSKKLINGIYDKESGKTILGYLIKDDGVSKHYNRNFMQLINDSQLSFKNAIQKAQSSEHEETLSETVNELAGSPAIKKGIYQSLKIVDELVAIMGYAPKRIVVEMARENQTTSTGKRRSIQRLKIVEKAMAEIGSNLLKEQPTTNEQLRDTRLFLYYMQNGKDMYTGDELSLHRLSHYDIDHIIPQSFMKDDSLDNLVLVGSTENRGKSDDVPSKEVVKDMKAYWEKLYAAGLISQRKFQRLTKGEQGGLTLEDKAHFIQRQLVETRQITKNVAGILDQRYNANSKEKKVQIITLKASLTSQFRSIFGLYKVREVNDYHHGQDAYLNCVVATTLLKVYPNLAPEFVYGEYPKFQAFKENKATAKAIIYTNLLRFFTEDEPRFTKDGEILWSNSYLKTIKKELNYHQMNIVKKVEVQKGGFSKESIKPKGPSNKLIPVKNGLDPQKYGGFDSPVVAYTVLFTHEKGKKPLIKQEILGITIMEKTRFEQNPILFLEEKGFLRPRVLMKLPKYTLYEFPEGRRRLLASAKEAQKGNQMVLPEHLLTLLYHAKQCLLPNQSESLAYVEQHQPEFQEILERVVDFAEVHTLAKSKVQQIVKLFEANQTADVKEIAASFIQLMQFNAMGAPSTFKFFQKDIERARYTSIKEIFDATIIYQSTTGLYETRRKVVD

SEQ ID NO: 189 - protein, 1337 aa, Enterococcus faecalis
  Enterococcus faecalis D6
MKKDYVIGLDIGTNSVGWAVMTEDYQLVKKKMPIYGNTEKKKIKKNFWGVRLFEEGHTAEDRRLKRTARRRISRRRNRLRYLQAFFEEAMTALDENFFARLQESFLVPEDKKWHRHPIFAKLEDEVAYHETYPTIYHLRKKLADSSEQADLRLIYLALAHIVKYRGHFLIEGKLSTENISVKEQFQQFMIIYNQTFVNGESRLVSAPLPESVLIEEELTEKASRTKKSEKVLQQFPQEKANGLFGQFLKLMVGNKADFKKVFGLEEEAKITYASESYEEDLEGILAKVGDEYSDVFLAAKNVYDAVELSTILADSDKKSHAKLSSSMIVRFTEHQEDLKNFKRFIRENCPDEYDNLFKNEQKDGYAGYITHAGKVSQLKFYQYVKKIIQDIAGAEYFLEKIAQENFLRKQRTFDNGVIPHQIHLAELQAIIHRQAAYYPFLKENQEKIEQLVTFRIPYYVGPLSKGDANTFAWLKRQSEEPIRPWNLQETVDLDQSATAFIERMTNFDTYLPSEKVLPKHSLLYEKFMVFNELTKISYTDDRGIKANFSGKEKEKIFDYLFKTRRKVKKKDIIQFYRNEYNTEIVTLSGLEEDQFNASFSTYQDLLKCGLTRAELDHPDNAEKLEDIIKILTIFEDRQRIRTQLSTFKGQFSAEVLKKLERKHYTGWGRLSKKLINGIYDKESGKTILDYLIKDDGVSKHYNRNFMQLINDSQLSFKNAIQKAQSSEHEETLSETVNELAGSPAIKKGIYQSLKIVDELVAIMGYAPKRIVVEMARENQTTSTGKRRSIQRLKIVEKAMAEIGSNLLKEQPTTNEQLRDTRLFLYYMQNGKDMYTGDELSLHRLSHYDIDHIIPQSFMKDDSLDNLVLVGSTENRGKSDDVPSKEVVKDMKAYWEKLYAAGLISQRKFQRLTKGEQGGLTLEDKAHFIQRQLVETRQITKNVAGILDQRYNAKSKEKKVQIITLKASLTSQFRSIFGLYKVREVNDYHHGQDAYLNCVVATTLLKVYPNLAPEFVYGEYPKFQTFKENKATAKAIIYTNLLRFFTEDEPRFTKDGEILWSNSYLKTIKKELNYHQMNIVKKVEVQKGGFSKESIKPKGPSNKLIPVKNGLDPQKYGGFDSPIVAYTVLFTHEKGKKPLIKQEILGITIMEKTRFEQNPILFLEEKGFLRPRVLMKLPKYTLYQFPEGRRRLLASAKEAQKGNQMVLPEHLLTLLYHAKQCLLPNQSESLAYVEQHQPEFQEILERVVDFAEVHTLAKSKVQQIVKLFEANQTADVKEIAASFIQLMQFNAMGAPSTFKFFQKDIERARYTSIKEIFDATIIYQSTTGLYETRRKVVD

SEQ ID NO: 190 - protein, 1337 aa, Enterococcus faecalis
  Enterococcus faecalis E1Sol
MKKDYVIGLDIGTNSVGWAVMTEDYQLVKKKMPIYGNTEKKKIKKNFWGVRLFEEGHTAEDRRLKRTARRRISRRRNRLRYLQAFFEEAMTDLDENFFARLQESFLVPEDKKWHRHPIFAKLEDEVAYHETYPTIYHLRKKLADSSEQADLRLIYLALAHIVKYRGHFLIEGKLSTENTSVKEQFQQFMVIYNQTFVNGESRLVSAPLPESVLIEEELTEKASRTKKSEKVLQQFPQEKANGLFGQFLKLMVGNKADFKKVFGLEEEAKITYASESYEEDLEGILAKVGDEYSDVFLAAKNVYDAVELSTILADSDKKSHAKLSSSMIVRFTEHQEDLKKFKRFIRENCPDEYDNLFKNEQKDGYAGYIAHAGKVSQLKFYQYVKKIIQDIAGAEYFLEKIAQENFLRKQRTFDNGVIPHQIHLAELQAIIHRQAAYYPFLKENQEKIEQLVTFRIPYYVGPLSKGDASTFAWLKRQSEEPIRPWNLQETVDLDQSATAFIERMTNFDTYLPSEKVLPKHSLLYEKFMVFNELTKISYTDDRGIKANFSGKEKEKIFDYLFKTRRKVKKKDIIQFYRNEYNTEIVTLSGLEEDQFNASFSTYQDLLKCGLTRAELDHPDNAEKLEDIIKILTIFEDRQRIRTQLSTFKGQFSAEVLKKLERKHYTGWGRLSKKLINGIYDKESGKTILDYLVKDDGVSKHYNRNFMQLINDSQLSFKNAIQKAQSSEHEETLSETVNELAGSPAIKKGIYQSLKIVDELVAIMGYAPKRIVVEMARENQTTSTGKRRSIQRLKIVEKAMAEIGSNLLKEQPTTNEQLRDTRLFLYYMQNGKDMYTGDELSLHRLSHYDIDHIIPQSFMKDDSLDNLVLVGSTENRGKSDDVPSKKVVKKMKAYWEKLYAAGLISQRKFQRLTKGEQGGLTLEDKAHFIQRQLVETRQITKNVAGILDQRYNAKSKEKKVQIITLKASLTSQFRSIFGLYKVREVNDYHHGQDAYLNCVVATTLLKVYPNLAPEFVYGEYPKFQAFKENKATAKTIIYTNLMRFFTEDEPRFTKDSEILWSNSYLKTIKKELNYHQMNIVKKVEVQKGGFSKESIKPKGPSNKLIPVKNGLDPQKYGGFDSPVVAYTVLFTHEKGKKPLIKQEILGITIMEKTRFEQNPILFLEEKGFLRPRVLMKLPKYTLYEFPEGRRRLLASAKEAQKGNQMVLPEHLLTLLYHAKQCLLPNQSESLAYVEQHQPEFQEILERVVDFAEVHTLAKSKVQQIVKLFEANQTADVKEIAASFIQLMQFNAMGAPSTFKFFQKDIERARYTSIKEIFDATIIYQSTTGLYETRRKVVD

SEQ ID NO: 191 - protein, 1150 aa, Enterococcus faecalis
  Enterococcus faecalis Fly1
MYSIGLDLGISSVGWSVIDERTGNVIDLGVRLFSAKNSEKNLERRTNRGGRRLIRRKTNRLKDAKKILAAVGFYEDKSLKNSCPYQLRVKGLTEPLSKGEIYKVTLHILKKRGISYLDEDDTEAAKESQDYKEQVRKNAQLLTKYTPGQIQLQRLKENNRVKTGINAQGNYQLNVFKVSAYANELATILKTQQAFYPNELTDDWIALFVQPGIAEEAGLIYRKRPYYHGPGNEANNSPYGRWSDFKKTGQPATNIFDRLIGKDFQGELRASGLSLSAQQYNLLNDLTNLKIDGEIPLSPEQKEYILAELMTKEFTRFGVNDVAKLLGVKKERLSGWRLDKKGKPEIHTLKGYRNWRKIFAESGIDLATLPTETIDCLAKVLTLNTEHEGIENTLAFELPELAESVKLLVLDRYKELSQSVSTQAWHRFSLKTLHLLIPELMNATSEQNTLLEQFQLKSDVRKRYSEYKKLPTKDVLTEIYNPTVNKTVSQAFKVIDALLVKYGKEQIRYITIEMPRDDNEEDEKKRIKELHAKNSQRKNDSQSYFMQKSGWSQEKFQTTIQKNRRFLAKLLYYYEQDGICAYTGLSISPELLVSDSTEIDHIIPISISLDDSINNKVLVLSKANQVKGQQTPYDAWMDGSFKKINGKFSNWDDYQKWVESRHFSHKKENNLLETRNIFDSEQVEKFLARNLNDTRYASRLVLNTLQSFFANHETKVRVVNGSFTHTLRKKWGADLDKTRETHHHHAVDATLCAVTPFVKVSRYHYAVKEETGEKVMREIDFETGEIVDEMSYQEFKKSKKYERKTYQVKWPNFREQLKPVNLHPRIKFSHQVDRKANRKLSDATIYSVREKTEVKTLKSGKQKITTDEYTIGKIKDIYTVDGWEAFKKKQDKLLMKDLDEKTYERLLSIAETTPDFQEVEEKNGKVKRVKRSPFAVYCEENDIPAIQKYAKKNNGPLIRSLKYYDGKLNKHINITKDSQGRPVEKTKNGRKVTLQSLKPYRYDIYQDLETKAYYTVQLYYSDLRFVEGKYGITEKEYMKKVAEQTKGQVVRFCFSLQKNDGLEIEWKDSQRYDVRFYNFQSANSINFKGLEQEMMPAENQFKQKPYNNGAINLNIAKYGKEGKKLRKFNTDILGKKHYLYYEKEPKNIIK

SEQ ID NO: 192 - protein, 1337 aa, Enterococcus faecalis
MKKDYVIGLDIGTNSVGWAVMTEDYQLVKKKMPIYGNTEKKKIKKNFWGVRLFEEGHTAEDRRLKRTARRRISRRRNRLRYLQAFFEEAMTDLDENFFARLQESFLVPEDKKWHRHPIFAKLEDEVAYHETYPTIYHLRKKLADSSEQADLRLIYLALAHIVKYRGHFLIEGKLSTENISVKEQFQQFMIIYNQTFVNGESRLVSAPLPESVLIEEELTEKASRTKKSEKVLQQFPQEKANGLFGQFLKLMVGNKADFKKVFGLEEEAKITYASESYEEDLEGILAKVGDEYSDVFLAAKNVYDAVELSTILADSDKKSHAKLSSSMIVRFTEHQEDLKKFKRFIRENCPDEYDNLFKNEQKDGYAGYIAHAGKVSQLKFYQYVKKIIQDIAGAEYFLEKIAQENFLRKQRTFDNGVIPHQIHLAELQAIIHRQAAYYPFLKENQEKIEQLVTFRIPYYVGPLSKGDASTFAWLKRQSEEPIRPWNLQETVDLDQSATAFIERMTNFDTYLPSEKVLPKHSLLYEKFMVFNELTKISYTDDRGIKANFSGKEKEKIFDYLFKTRRKVKKKDIIQFYRNEYNTEIVTLSGLEEDQFNASFSTYQDLLKCGLTRAELDHPDNAEKLEDIIKILTIFEDRQRIRTQLSTFKGQFSAEVLKKLERKHYTGWGRLSKKLINGIYDKESGKTILDYLVKDDGVSKHYNRNFMQLINDSQLSFKNAIQKAQSSEHEETLSETVNELAGSPAIKKGIYQSLKIVDELVAIMGYAPKRIVVEMARENQTTSTGKRRSIQRLKIVEKAMAEIGSNLLKEQPTTNEQLRDTRLFLYYMQNGKDMYTGDELSLHRLSHYDIDHIIPQSFMKDDSLDNLVLVGSTENRGKSDDVPSKEVVKDMKAYWEKLYAAGLISQRKFQRLTKGEQGGLTLEDKAHFIQRQLVETRQITKNVAGILNQRYNANSKEKKVQIITLKASLTSQFRSIFGLYKVREVNDYHHGQDAYLNCVVATTLLKVYPNLAPEFVYGEYPKFQTFKENKATAKAIIYTNLLRFFTEDEPRFTKDGEILWSNSYLKTIKKELNYHQMNIVKKVEVQKGGFSKESIKPKGPSNKLIPVKNGLDPQKYGGFDSPVVAYTVLFTHEKGKKPLIKQEILGITIMEKTRFEQNPILFLEEKGFLRPRVLMKLPKYTLYEFPEGRRRLLASAKEAQKGNQMVLPEHLLTLLYHAKQCLLPNQSESLAYVEQHQPEFQEILERVVDFAEVHTLAKSKVQQIVKLFEANQTADVKEIAASFIQLMQFNAMGAPSTFKFFQKDIERARYTSIKEIFDATIIYQSTTGLYETRRKVVD

SEQ ID NO: 193 - protein, 1150 aa, Enterococcus faecalis
  Enterococcus faecalis R508
MYSIGLDLGISSVGWSVIDERTGNVIDLGVRLFSAKNSEKNLERRTNRGGRRLIRRKTNRLKDAKKILAAVGFYEDKSLKNSCPYQLRVKGLTEPLSKGEIYKVTLHILKKRGISYLDEDDTEAAKESQDYKEQVRKNAQLLTKYTPGQIQLQRLKENNRVKTGINVQGNYQLNVFKVSAYANELATILKTQQAFYPNELTDDWIALFVQPGIAEEAGLIYRKRPYYHGPGNEANNSPYGRWSDFQKTGEPATNIFDKLIGKDFQGELRASGLSLSAQQYNLLNDLTNLKIDGEVPLSSEQKEYILTELMTKEFTRFGVNDVVKLLGVKKERLSGWRLDKKGKPEIHTLKGYRNWRKIFAEAGIDLATLPTETIDCLAKVLTLNTEREGIENTLAFELPELSESVKLLVLDRYKELSQSISTQSWHRFSLKTLHLLIPELMNATSEQNTLLEQFQLKSDVRKRYSEYKKLPTKDVLAEIYNPTVNKTVSQAFKVIDALLVKYGKEQIRYITIEMPRDDNEEDEKKRIKELHAKNSQRKNDSQSYFMQKSGWSQEKFQTTIQKNRRFLAKLLYYYEQDGICAYTGLPISPELLVSDSTEIDHIIPISISLDDSINNKVLVLSKANQVKGQQTPYDAWMDGSFKKINGKFSNWDDYQKWVESRHFSHKKENNLLETRNIFDSEQVEKFLARNLNDTRYASRLVLNTLQSFFTNQETKVRVVNGSFTHTLRKKWGADLDKTRETHHHHAVDATLCAVTPFVKVSRYHYAVKEETGEKVMREIDFETGEIVNEMSYREFKKSKKYERKTYQVKWPNFREQLKPVNLHPRIKFSHQVDRKANRKLSDATIYSVREKTEVKTLKSGKQKITTDEYTIGKIKDIYTLDGWEAFKKKQDKLLMKDLDEKTYERLLSIAETTPDFQEVEEKNGKVKRVKRSPFAVYCEENDIPAIQKYAKKNNGPLIRSLKYYDGKLNKHINITKDSQGRPVEKTKNGRKVTLQSLKPYRYDIYQDLETKAYYTVQLYYSDLRFVEGKYGITEKEYMKKVAEQTKGQVVRFCFSLQKNDGLEIEWKDSQRYDVRFYNFQSANSINFKGLEQEIMPAENQFKQKPYNNGAINLNIAKYGKEGKKLRKFNTDILGKKHYLFYEKEPKNIIK

SEQ ID NO: 194 - protein, 1150 aa, Enterococcus faecalis
  Enterococcus faecalis T11
MYSIGLDLGISSVGWSVIDERTGNVIDLGVRLFSAKNSEKNLERRTNRGGRRLIRRKTNRLKDAKKILAAVGFYEDKSLKNSCPYQLRVKGLTEPLSKGEIYKVTLHILKKRGISYLDEDDTEAAKESQDYKEQVRENAQLLTKYTPGQIQLQRLKENNRVKTGINAQGNYQLNVFKVSAYANELATILKTQQAFYPNELTDDWIALFVQPGIAEEAGLIYRKRPYYHGPGNEANNSPYGRWSDFKKTGQPATNIFDKLIGKDFQGELRASGLSLSAQQYNLLNDLTNLKIDGEIPLSPEQKEYILAELMTKEFTRFGVNDVVKLLGVKKERLSGWRLDKKGKPEIHTLKGYRNWRKIFAESGIDLAMLPTETIDCLAKILTLNTEREGIENTLAFELPELAESVKLLVLDRYKELSQSVSTQAWHRFSLKTLHLLIPELMNATSEQNTLLEQFQLKSDVRKRYSEYKKLPTKDVLTEIYNPTVNKTVSQAFKVIDALLVKYGKEQIRYITIEMPRDDNEEDEKKRIKELHAKNSQRKNDSQSYFMQKSGWSQEKFQTTIQKNRRFLAKLLYYYEQDGICAYTGLSISPELLVSDSTEIDHIIPISISLDDSINNKVLVLSKANQVKGQQTPYDAWMDGSFKKINGKFSNWDDYQKWVESRHFSHKKENNLLETRNIFDSEQVEKFLARNLNDTRYASRLVLNTLQSFFANQETKVRVVNGSFTHTLRKKWGADLDKTRETHHHHAVDATLCAVTPFVKVSRYHYAVKEETGEKVMREIDFETGEIVDEMSYREFKKSKKYERKTYQVKWPNFREQLKPVNLHPRIKFSHQVDRKANRKLSDATIYSVREKTEVKTLKSGKQKITTDEYTIGKIKDIYTVDGWEAFKKKQDKLLMKDLDEKTYERLLSIAETTPDFQEVEEKNGKVKRVKRSPFAVYCEENDIPAIRKYAKKNNGPLIRSLKYYDGKLNKHINITKDSQGRPVEKTKNGRKVTLQSLKPYRYDIYQDLETKAYYTVQLYYSDLRFVEGKYGITEKEYMKKVAEQTKGQVVRFCFSLQKNDGLEIEWKDSQRYDVRFYNFQSANSINFKGLEQEMMPAENQFKQKPYNNGAINLNIAKYGKEGKKLRKFNTDILGKKHYLYYEKEPKNIIK

SEQ ID NO: 195 - protein, 1150 aa, Enterococcus faecalis
  Enterococcus faecalis TX0012
MYSIGLDLGISSVGWSVIDERTGNVIDLGVRLFSAKNSEKNLERRTNRGGRRLIRRKTNRLKDAKKILAAVGFYEDKSLKNSCPYQLRVKGLTEPLSRGEIYKVTLHILKKRGISYLDEVDTEAAKESQDYKEQVRKNAQLLTKYTPGQIQLQRLKENNRVKTGINAQGNYQLNVFKVSAYANELATILKTQQAFYPNELTDDWIALFVQPGIAEEAGLIYRKRPYYHGPGNEANNSPYGRWSDFQKTGEPATNIFDKLIGKDFQGELRASGLSLSAQQYNLLNDLTNLKIDGEVPLSSEQKEYILTELMTKEFTRFGVNDVVKLLGVKKERLSGWRLDKKGKPEIHTLKGYRNWRKIFAEAGIDLATLPTETIDCLAKVLTLNTEREGIENTLAFELPELSESVKLLVLDRYKELSQSISTQSWHRFSLKTLHLLIPELMNATSEQNTLLEQFQLKSDVRKRYSEYKKLPTKDVLAEIYNPTVNKTVSQAFKVIDALLVKYGKEQIRYITIEMPRDDNEEDEKKRIKELHAKNSQRKNDSQSYFMQKSGWSQEKFQTTIQKNRRFLAKLLYYYEQDGICAYTGLPISPELLVSDSTEIDHIIPISISLDDSINNKVLVLSKANQVKGQQTPYDAWMDGSFKKINGKFSNWDDYQKWVESRHFSHKKENNLLETRNIFDSEQVEKFLARNLNDTRYASRLVLNTLQSFFTNQETKVRVVNGSFTHTLRKKWGADLDKTRETHHHHAVDATLCAVTSFVKVSRYHYAVKEETGEKVMREIDFETGEIVNEMSYWEFKKSKKYERKTYQVKWPNFREQLKPVNLHPRIKFSHQVDRKANRKLSDATIYSVREKTEVKTLKSGKQKITTDEYTIGKIKDIYTLDGWEAFKKKQDKLLMKDLDEKTYERLLSIAETTPDFQEVEEKNGKVKRVKRSPFAVYCEENDIPAIQKYAKKNNGPLIRSLKYYDGKLNKHINITKDSQGRPVEKTKNGRKVTLQSLKPYRYDIYQDLETKAYYTVQLYYSDLRFVEGKYGITEKEYMKKVAEQTKGQVVRFCFSLQKNDGLEIEWKDSQRYDVRFYNFQSANSINFKGLEQEMMPAENQFKQKPYNNGAINLNIAKYGKEGKKLRKFNTDILGKKHYLFYEKEPKNIIK

SEQ ID NO: 196 - protein, 1150 aa, Enterococcus faecalis; identical to SEQ ID NO: 195
  Enterococcus faecalis TX0012

SEQ ID NO: 197 - protein, 1337 aa, Enterococcus faecalis
  Enterococcus faecalis TX0470
MKKDYVIGLDIGTNSVGWAVMTEDYQLVKKKMPIYGNTEKKKIKKNFWGVRLFEEGHTAEDRRLKRTARRRISRRRNRLRYLQAFFEEAMTALDENFFARLQESFLVPEDKKWHRHPIFAKLEDEVAYHETYPTIYHLRKKLADSSEQADLRLIYLALAHIVKYRGHFLIEGKLSTENISVKEQFQQFMIIYNQTFVNGESRLVSTPLPESVLIEEELTEKASRTKKSEKVLQQFPQEKANGLFGQFLKLMVGNKADFKKVFGLEEEAKITYASESYEEDLEGILAKVGDEYSDVFLAAKNVYDAVELSTILADSDKKSHAKLSSSMIVRFTEHQEDLKNFKRFIRENCPDEYDNLFKNEQKDGYAGYITHAGKVSQLKFYQYVKKIIQDIAGAEYFLEKIAQENFLRKQRTFDNGVIPHQIHLAELQAIIHRQAAYYPFLKENQEKIEQLVTFRIPYYVGPLSKGDASTFAWLKRQSEEPIRPWNLQETVDLDQSATAFIERMTNFDTYLPSEKVLPKHSLLYEKFMVFNELTKISYTDDRGIKANFSGKEKEKIFDYLFKTRRKVKKKDIIQFYRNEYNTEIVTLSGLEEDQFNASFSTYQDLLKCGLTRAELDHPDNAEKLEDIIKILTIFEDRQRIRTQLSTFKGQFSAEVLKKLERKHYTGWGRLSKKLINGIYDKESGKTILDYLVKDDGVSKHYNRNFMQLINDSQLSFKNAIQKAQSSEHEETLSETVNELAGSPAIKKGIYQSLKIVDELVAIMGYAPKRIVVEMARENQTTSTGKRRSIQRLKIVEKAMAEIGSNLLKEQPTTNEQLRDTRLFLYYMQNGKDMYTGDELSLHRLSHYDIDHIIPQSFMKDDSLDNLVLVGSTENRGKSDDVPSKEVVKDMKAYWEKLYAAGLISQRKFQRLTKGEQGGLTLEDKAHFIQRQLVETRQITKNVAGILDQRYNAKSKEKKVQIITLKASLTSQFRSIFGLYKVREVNDYHHGQDAYLNCVVATTLLKVYPNLAPEFVYGEYPKFQTFKENKATAKAIIYTNLLRFFTEDEPRFTKDGEILWSNSYLKTIKKELNYHQMNIVKKVEVQKGGFSKESIKPKGPSNKLIPVKNGLDPQKYGGFDSPIVAYTVLFTHEKGKKPLIKQEILGITIMEKTRFEQNPILFLEEKGFLRPRVLMKLPKYTLYEFPEGRRRLLASAKEAQKGNQMVLPEHLLTLLYHAKQCLLPNQSESLAYVEQHQPEFQEILERVVDFAEVHTLAKSKVQQIVKLFEANQTADVKEIAASFIQLMQFNAMGAPSTFKFFQKDIERARYTSIKEIFDATIIYQSTTGLYETRRKVVD

SEQ ID NO: 198 - protein, 1150 aa, Enterococcus faecalis
  Enterococcus faecalis TX1342
MYSIGLDLGVSSVGWSVIDERTGNVIDLGVRLFSAKNSEKNLERRTNRGGRRLIRRKTNRLKDAKKILAAVGFYEDKSLKNSCPYQLRVKGLTEPLSKGEIYKVTLHILKKRGISYLDEDDTEAAKESQDYKEQVRENAQLLTKYTPGQIQLQRLKENNRVKTGINAQGNYQLNVFKVSAYANELATILKTQQAFYPNELTDDWIALFVQPGIAEEAGLIYRKRPYYHGPGNEANNSPYGRWSDFKKTGQPATNIFDKLIGKDFQGELRASGLSLSAQQYNLLNDLTNLKIDGEIPLSPEQKEYILAELMTKEFTRFGINDVAKLLGVKKERLSGWRLDKKGKPEIHTLKGYRNWRKIFAESGIDLATLPTETIDCLAKVLTLNTEREGIENTLAFELPELAESVKLLVLDRYKELSQSVSTQAWHRFSLKTLHLLIPELMNATSEQNTLLEQFQLKSDVRKRYSEYKKLPTKDVLTEIYNPTVNKTVSQAFKVIDALLVKYGKEQIRYITIEMPRDDNEEDEKKRIKELHAKNSQRKNDSQSYFMQKSGWSQEKFQTTIQKNRRFLAKLLYYYEQDGICAYTGLSISPELLVSDSTEIDHIIPISISLDDSINNKVLVLSKANQVKGQQTPYDAWMDGSFKKINGKFSNWDDYQKWVESRHFSHKKENNLLETRNIFDSEQVEKFLARNLNDTRYASRLVLNTLQSFFANQETKVRVVNGSFTHTLRKKWGADLDKTRETHHHHAVDATLCAVTPFVKVSRYHYAVKEETGEKVMREIDFETGEIVDEMSYREFKKSKKYERKTYQVKWPNFREQLKPVNLHPRIKFSHQVDRKANRKLSDATIYSVREKTEVKTLKSGKQKITTDEYTIGKIKDIYTVDGWEAFKKKQDKLLMKDLDEKTYERLLSIAETTPDFQEVEEKNGKVKRVKRSPFAVYCEENDIPAIRKYAKNNNGPLIRSLKYYDGKLNKHINITKDSQGRPVEKTKNGRKVTLQSLKPYRYDIYQDLETKAYYTVQLYYSDLRFVEGKYGITEKEYMKKVAEQTKGQVVRFCFSLQKNDGLEIEWKDSQCYDVRFYNFQSANSINFKGLEQEMMPAENQFKQKPYNNGAINLNIAKYGKEGKKLRKFNTDILGKKHYLYYEKEPKNIIK

SEQ ID NO: 199 - protein, 1337 aa, Enterococcus faecalis
  Enterococcus faecalis TX4244
MKKDYVIGLDIGTNSVGWAVMTEDYQLVKKKMPIYGNTEKKKIKKNFWGVRLFEEGHTAEDRRLKRTARRRISRRRNRLRYLQAFFEEAMTDLDENFFARLQESFLVPEDKKWHRHPIFAKLEDEVAYHETYPTIYHLRKKLADSSEQADLRLIYLALAHIVKYRGHFLIEGKLSTENISVKEQFQQFMIIYNQTFVNGESRLVSAPLPESVLIEEELTEKASRTKKSEKVLQQFPQEKANGLFGQFLKLMVGNKADFKKVFGLEEEAKITYASESYEEDLEGILAKVGDEYSDVFLAAKNVYDAVELSTILADSDKKSHAKLSSSMIVRFTEHQEDLKKFKRFIRENCPDEYDNLFKNEQKDGYAGYIAHAGKVSQLKFYQYVKKIIQDIAGAEYFLEKIAQENFLRKQRTFDNGVIPHQIHLAELQAIIHRQAAYYPFLKENQEKIEQLVTFRIPYYVGPLSKGDASTFAWLKRQSEEPIRPWNLQETVDLDQSATAFIERMTNFDTYLPSEKVLPKHSLLYEKFMVFNELTKISYTDDRGIKANFSGKEKEKIFDYLFKTRRKVKKKDIIQFYRNEYNTEIVTLSGLEEDQFNASFSTYQDLLKCGLTRAELDHPDNAEKLEDIIKILTIFEDRQRIRTQLSTFKGQFSAEVLKKLERKHYTGWGRLSKKLINGIYDKESGKTILGYLIKDDGVSKHYNRNFMQLINDSQLSFKNAIQKAQSSEHEETLSETVNELAGSPAIKKGIYQSLKIVDELVAIMGYAPKRIVVEMARENQTTSTGKRRSIQRLKIVEKAMAEIGSNLLKEQPTTNEQLRDTRLFLYYMQNGKDMYTGDELSLHRLSHYDIDHIIPQSFMKDDSLDNLVLVGSTENLGKSDDVPSKEVVKDMKAYWEKLYAAGLISQRKFQRLTKGEQGGLTLEDKAHFIQRQLVETRQITKNVAGILDQRYNANSKEKKVQIITLKASLTSQFRSIFGLYKVREVNDYHHGQDAYLNCVVATTLLKVYPNLAPEFVYGEYPKFQTFKENKATAKAIIYTNLLRFFTEDEPRFTKDGEILWSNSYLKTIKKELNYHQMNIVKKVEVQKGGFSKESIKPKGPSNKLIPVKNGLDPQKYGGFDSPIVAYTVLFTHEKGKKPLIKQEILGITIMEKTRFEQNPILFLEEKGFLRPRVLMKLPKYTLYEFPEGRRRLLASAKEAQKGNQMVLPEHLLTLLYHAKQCLLPNQSESLAYVEQHQPEFQEILERVVDFAEVHTLAKSKVQQIVKLFEANQTADVKEIAASFIQLMQFNAMGAPSTFKFFQKDIERARYTSIKEIFDATIIYQSTTGLYETRRKVVD

SEQ ID NO: 200 - protein, 1339 aa, Enterococcus faecium
  Enterococcus faecium 1,141,733
MKKEYTIGLDIGTNSVGWSVLTDDYRLVSKKMKVAGNTEKSSTKKNFWGVRLFDEGQTAEARRSKRTARRRLARRRQRILELQKIFAPEILKIDEHFFARLNESFLVLDEKKQSRHPVFATIKQEKSYHQTYPTIYHLRQALADSSEKADIRLVYLAMAHLLKYRGHFLIEGELNTENSSVTETFRQFLSTYNQQFSEADDKQTEKLDEAVDCSFVFTEKMSKTKKAETLLKYFPHEKSNGYLSQFIKLMVGNQGNFKNVFGLEEAKLQFSKETYEEDLEELLEKIGDDYIDLFVQAKNVYDAVLLSEILSDSTKNTRAKLSAGMIRRYDAHKEDLVLLKRFVKENLPKKYRAFFGDNSVNGYAGYIEGHATQEDFYKFVKKELTGIRGSEVFLTKIEQENFLRKQRTFDNGVIPHQIHLTELRAIIANQKKHYPFLKEEQEKLESLLTFKIPYYVGPLAKKQENSPFAWLIRKSEEKIKPWNLPEIVDMEGSAVRFIERMINTDMYMPHNKVLPKNSLLYQKFSIYNELTKVRYQDERGQMNYFSSIEKKEIFHELFEKNRKVTKKDLQEFLYLKYDIKHAELSGIEKAFNASYTTYHDFLTMSENKREMKQWLEDPELASMFEEIIKTLTVFEDREMIKTRLSHHEATLGKHIIKKLTKKHYTGWGRLSKELIQGIRDKQSNKTILDYLINDDDFPHHRNRNFMQLINDDSLSFKKEIKKAQMITDTENLEEIVKELTGSPAIKKGILQSLKIVDEIVGIMGYEPANIVVEMARENQTTGRGLKSSRPRLKALEESLKDFGSQLLKEYPTDNSSLQKDRLYLYYLQNGRDMYTGAPLDIHRLSDYDIDHIIPRSFTTDNSIDNKVLVSSKENRLKKDDVPSEKVVKKMRSFWYDLYSSKLISKRKLDNLTKIKLTEEDKAGFIKRQLVETRQITKHVAGILHHRFNKAEDTNEPIRKVRIITLKSALVSQFRNRFGIYKVREINEYHHAHDAYLNGVVALALLKKYPQLAPEFVYGEYLKFNAHKANKATVKKEFYSNIMKFFESDTPVCDENGEIFWDKSKSIAQVKKVINHHHMNIVKKTEIQKGGFSKETVEPKKDSSKLLPRKNNWDPAKYGGLGSPNVAYTVAFTYEKGKARKRTNALEGITIMEREAFEQSPVLFLKNKGYEQAEIEMKLPKYALFELENGRKRMVASNKEAQKANSFLLPEHLVTLLYHAKQYDEISHKESFDYVNEHHKEFSEVFARVLEFAGKYTLAEKNIEKLEKIYKENQTDDLAKLASSFVNLMQFNAMGAPADFKFFDVTIPRKRYTSLTEIWQSTIIHQSITGLYETRIRMGK

SEQ ID NO: 201 - protein, 1340 aa, Enterococcus faecium
  Enterococcus faecium 1,231,408
MKKEYTIGLDIGTNSVGWSVLTDDYRLVSKKMKVAGNTEKSSTKKNFWGVRLFDEGQTAEARRSKRTARRRLARRRQRILELQKIFAPEILKIDEHFFARLNESFLVPDEKKQSRHPVFATIKQEKSYHQTYPTIYHLRQALADSSEKADIRLVYLAMAHLLKYRGHFLIEGELNTENSSVTETFRQFLSTYNQQFSEAGDKQTEKLDEAVDCSFVFTEKMSKTKKAETLLKYFPHEKSNGYLSQFIKLMVGNQGNFKNVFGLEEEAKLQFSKETYEEDLEELLEKIGDDYIDLFVQAKNVYDAVLLSEILSDSTKNTRAKLSAGMIRRYDAHKEDLVLLKRFVKENLPKKYRAFFGDNSVNGYAGYIEGHATQEAFYKFVKKELTGIRGSEVFLTKIEQENFLRKQRTFDNGVIPHQIHLSELRAIIANQKKHYPFLKEEQEKLESLLTFKIPYYVGPLAKKQENSPFAWLIRKSEEKIKPWNLPEIVDMEGSAVRFIERMINTDMYMPHNKVLPKNSLLYQKFSIYNELTKVRYQDERGQMNYFSSIEKKEIFHELFEKNRKVTKKDLQEFLYLKYDIKHAELSGIEKAFNASYTTYHDFLTMSENKREMKQWLEDPELASMFEEIIKTLTVFEDREMIKTRLSHHEATLGKHIIKKLTKKHYTGWGRLSKELIQGIRDKQSNKTILDYLINDDDFPHHRNRNFMQLINDDSLSFKKEIKKAQMITDTENLEEIVKELTGSPAIKKGILQSLKIVDEIVGIMGYEPANIVVEMARENQTTGRGLKSSRPRLKALEESLKDFGSQLLKEYPTDNSSLQKDRLYLYYLQNGRDMYTGAPLDIHRLSDYDIDHIIPRSFTTDNSIDNKVLVSSKENRLKKDDVPSEKVVKKMRSFWYDLYSSKLISKRKLDNLTKIKLTEEDKAGFIKRQLVETRQITKHVAGILHHRFNKAEDTNDPIRKVRIITLKSALVSQFRNRFGIYKVREINEYHHAHDAYLNGVVALALLKKYPQLAPEFVYGEYLKFNAHKANKATVKKEFYSNIMKFFESDTPVCDENGEIFWDKSKSIAQVKKVINHHHMNIVKKTEIQKGGFSKETVEPKKDSSKLLPRKNNWDPAKYGGLGSPNVAYTVAFTYEKGKARKRTNALEGITIMEREAFEQSPVLFLKNKGYEQAEIEMKLPKYALFELENGRKRMVASNKEAQKANSFLLPEHLVTLLYHAKQYDEISHKESFDYVNEHHKEFSEVFARVLEFAGKYTLAEKNIEKLEKIYKENQTDDLAKLASSFVNLMQFNAMGAPADFKFFDVTIPRKRYTSLTEIWQSTIIHQSITGLYETRIRMGK

SEQ ID NO: 202 - protein, 1339 aa, Enterococcus faecium
  Enterococcus faecium E1133
MKKEYTIGLDIGTNSVGWSVLTDDYRLVSKKMKVAGNTEKSSTKKNFWGVRLFDEGQTAEARRSKRTARRRLARRRQRILELQKIFAPEILKIDEHFFARLNESFLVLDEKKQSRHPVFATIKQEKSYHQTYPTIYHLRQALADSSEKADIRLVYLAMAHLLKYRGHFLIEGELNTENSSVTETFRQFLSTYNQQFSEADDKQTEKLDEAVDCSFVFTEKMSKTKKAETLLKYFPHEKSNGYLSQFIKLMVGNQGNFKNVFGLEEAKLQFSKETYEEDLEELLEKIGDDYIDLFVQAKNVYDAVLLSEILSDSTKNTRAKLSAGMIRRYDAHKEDLVLLKRFVKENLPKKYRAFFGDNSVNGYAGYIEGHATQEDFYKFVKKELTGIRGSEVFLTKIEQENFLRKQRTFDNGVIPHQIHLTELRAIIANQKKHYPFLKEEQEKLESLLTFKIPYYVGPLAKKQENSPFAWLIRKSEEKIKPWNLPEIVDMEGSAVRFIERMINTDMYIPHNKVLPKNSLLYQKFSIYNELTKVRYQDERGQMNYFSSIEKKEIFHELFEKNRKVTKKDLQEFLYLKYDIKHAELSGIEKAFNASYTTYHDFLTMSENKREMKQWLEDPELASMFEEIIKTLTVFEDREMIKTRLSHHEATLGKHIIKKLTKKHYTGWGRLSKELIQGIRDKQSNKTILDYLINDDDFPHHRNRNFMQLINDDSLSFKKEIKKAQMITDTENLEEIVKELTGSPAIKKGILQSLKIVDEIVGIMGYEPANIVVEMARENQTTGRGLKSSRPRLKALEESLKDFGSQLLKEYPTDNSSLQKDRLYLYYLQNGRDMYTGAPLDIHRLSDYDIDHIIPRSFTTDNSIDNKVLVSSKENRLKKDDVPSEKVVKKMRSFWYDLYSSKLISKRKLDNLTKIKLTEEDKAGFIKRQLVETRQITKHVAGILHHRFNKAEDTNEPIRKVRIITLKSALVSQFRNRFGIYKVREINEYHHAHDAYLNGVVALALLKKYPQLAPEFVYGEYLKFNAHKANKATVKKEFYSNIMKFFESDTPVCDENGEIFWDKSKSIAQVKKVINHHHMNIVKKTEIQKGGFSEETVEPKKDSSKLLPRKNNWDPAKYGGLGSPNVAYTVAFTYEKGKARKRTNALEGITIMEREAFEQSPVLFLKNKGYEQAEIEMKLPKYALFELENGRKRMVASNKEAQKANSFLLPEHLVTLLYHAKQYDEISHKESFDYVNEHHKEFSEVFARVLEFAGKYTLAEKNIEKLEKIYKENQTDDLAKLASSFVNLMQFNAMGAPADFKFFDVTIPRKRYTSLTEIWQSTIIHQSITGLYETRIRMGK

SEQ ID NO: 203 - protein, 1340 aa, Enterococcus faecium
  Enterococcus faecium E3083
MKKEYTIGLDIGTNSVGWSVLTDDYRLVSKKMKVAGNTEKSSTKKNFWGVRLFDEGQTAEARRSKRTARRRLARRRQRILELQKIFAPEILKIDEHFFARLNESFLVLDEKKQSRHPVFATIKQEKSYHQTYPTIYHLRQALADSSEKADIRLVYLAMAHLLKYRGHFLIEGELNTENSSVTETFRQFLSTYNQQFSEADDKQTEKLDEAVDCSFVFTEKMSKTKKAETLLKYFPHEKSNGYLSQFIKLMVGNQGNFKNVFGLEEEAKLQFSKETYEEDLEELLEKIGDDYIDLFVQAKNVYDAVLLSEILSDSTKNTRAKLSAGMIRRYDAHKEDLVLLKRFVKENLPKKYRAFFGDNSVNGYAGYIEGHATQEDFYKFVKKELTGIRGSEVFLTKIEQENFLRKQRTFDNGVIPHQIHLTELRAIIANQKKHYPFLKEEQEKLESLLTFKIPYYVGPLAKKQENSPFAWLIRKSEEKIKPWNLPEIVDMEGSAVRFIERMINTDMYIPHNKVLPKNSLLYQKFSIYNELTKVRYQDERGQMNYFSSIEKKEIFHELFEKNRKVTKKDLQEFLYLKYDIKHAELSGIEKAFNASYTTYHDFLTMSENKREMKQWLEDPELASMFEEIIKTLTVFEDREMIKTRLSHHEATLGKHIIKKLTKKHYTGWGRLSKELIQGIRDKQSNKTILDYLINDDDFPHHRNRNCMQLINDDSLSFKKEIKKAQMITDTENLEEIVKELTGSPAIKKGILQSLKIVDEIVGIMGYEPANIVVEMARENQTTGRGLKSSRPRLKALEESLKDFGSQLLKEYPTDNSSLQKDRLYLYYLQNGRDMYTGAPLDIHRLSDYDIDHIIPRSFTTDNSIDNKVLVSSKENRLKKDDVPSEKVVKKMRSFWYDLYSSKLISKRKLDNLTKIKLTEEDKAGFIKRQLVETRQITKHVAGILHHRFNKAEDTNEPIRKVRIITLKSALVSQFRNRFGIYKVREINEYHHAHDAYLNGVVALALLKKYPQLAPEFVYGEYLKFNAHKANKATVKKEFYSNIMKFFESDTPVCDENGEIFWDKSKSIAQVKKVINHHHMNIVKKTEIQKGGFSKETVEPKKDSSKLLPRKNNWDPTKYGGLGSPNVAYTVAFTYEKGKARKRTNALEGITIMEREAFEQSPVLFLKNKGYEQAEIEMKLPKYALFELENGRKRMVASNKEAQKANSFLLPEHLVTLLYHAKQYDEISHKESFDYVNEHHKEFSEVFARVLEFAGKYTLAEKNIEKLEKIYKENQTDDLAKLASSFVNLMQFNAMGAPADFKFFDVTIPRKRYTSLTEIWQSTIIHQSITGLYETRIRMGK

SEQ ID NO: 204 - protein, 1340 aa, Enterococcus faecium
  Enterococcus faecium PC4.1
MKKEYTIGLDIGTNSVGWSVLTDDYRLVSKKMKVAGNTEKSSTKKNFWGVRLFDEGQTAEARRSKRTARRRLARRRQRILELQKIFAPEILKIDEHFFARLNESFLVLDEKKQSRHPVFATIKQEKSYHQTYPTIYHLRQALADSSEKADIRLVYLAMAHLLKYRGHFLIEGELNTENSSVTETFRQFLSTYNQQFSEADDKQTEKLDEAVDCSFVFTEKMSKTKKAETLLKYFPHEKSNGYLSQFIKLMVGNQGNFKNVFGLEEEAKLQFSKETYEEDLEELLEKIGDDYIDLFVQAKNVYDAVLLSEILSDSTKNTRAKLSAGMIRRYDAHKEDLVLLKRFVKENLPKKYRAFFGDNSVNGYAGYIEGHATQEDFYKFVKKELTGIRGSEVFLTKIEQENFLRKQRTFDNGVIPHQIHLTELRAIIANQKKHYPFLKEEQEKLESLLTFKIPYYVGPLAKKQENSPFAWLIRKSEEKIKPWNLPEIVDMEGSAVRFIERMINTDMYIPHNKVLPKNSLLYQKFSIYNELTKVRYQDERGQMNYFSSIEKKEIFHELFEKNRKVTKKDLQEFLYLKYDIKHAELSGIEKAFNASYTTYHDFLTMSENKREMKQWLEDPELASMFEEIIKTLTVFEDREMIKTRLSHHEATLGKHIIKKLTKKHYTGWGRLSKELIQGIRDKQSNKTILDYLINDDDFPHHRNRNFMQLINDDSLSFKKEIKKAQMITDTENLEEIVKELTGSPAIKKGILQSLKIVDEIVGIMGYEPANIVVEMARENQTTGRGLKSSRPRLKALEESLKDFGSQLLKEYPTDNSSLQKDRLYLYYLQNGRDMYTGAPLDIHRLSDYDIDHIIPRSFTTDNSIDNKVLVSSKENRLKKDDVPSEKVVKKMRSFWYDLYSSKLISKRKLDNLTKIKLTEEDKAGFIKRQLVETRQITKHVAGILHHRFNKAEDTNEPIRKVRIITLKSALVSQFRNRFGIYKVREINEYHHAHDAYLNGVVALALLKKYPQLAPEFVYGEYLKFNAHKANKATVKKEFYSNIMKFFESDTPVCDENGEIFWDKSKSIAQVKKVINHHHMNIVKKTEIQKGGFSKETVEPKKDSSKLLPRKNNWDPAKYGGLGSPNVAYTVAFTYEKGKARKRTNALEGITIMEREAFEQSPVLFLKNKGYEQAEIEMKLPKYALFELENGRKRMVASNKEAQKANSFLLPEHLVTLLYHAKQYDEISHKESFDYVNEHHKEFSEVFARVLEFAGKYTLAEKNIEKLEKIYKENQTDDLAKLASSFVNLMQFNAMGAPADFKFFDVTIPRKRYTSLTEIWQSTIIHQSITGLYETRIRMGK

SEQ ID NO: 205 - protein, 1340 aa, Enterococcus faecium
  Enterococcus faecium TX1330
MKKEYTIGLDIGTNSVGWSVLTDDYRLVSKKMKVAGNTEKSSTKKNFWGVRLFDEGQTAEARRSKRTARRRLARRRQRILELQKIFAPEILKIDEHFFARLNESFLVLDEKKQSRHPVFATIKQEKSYHQTYPTIYHLRQALADSSEKADIRLVYLAMAHLLKYRGHFLIEGELNTENSSVTETFRQFLSTYNQQFSEADDKQTEKLDEAVDCSFVFTEKMSKTKKAETLLKYFPHEKSNGYLSQFIKLMVGNQGNFKNVFGLEEEAKLQFSKETYEEDLEELLEKIGDDYIDLFVQAKNVYDAVLLSEILSDSTKNTRAKLSAGMIRRYDAHKEDLVLLKRFVKENLPKKYRAFFGDNSVNGYAGYIEGHATQEDFYKFVKKELTGIRGSEVFLTKIEQENFLRKQRTFDNGVIPHQIHLTELRAIIANQKKHYPFLKEEQEKLESLLTFKIPYYVGPLAKKQENSPFAWLIRKSEEKIKPWNLPEIVDMEGSAVRFIERMNNTDMYIPHNKVLPKNSLLYQKFSIYNELTKVRYQDERGQMNYFSSIEKKEIFHELFEKNRKVTKKDLQEFLYLKYDIKHAELSGIEKAFNASYTTYHDFLTMSENKREMKQWLEDPELASMFEEIIKTLTVFEDREMIKTRLSHHEATLGKHIIKKLTKKHYTGWGRLSKELIQGIRDKQSNKTILDYLINDDDFPHHRNRNFMQLINDDSLSFKKEIKKAQMITDTENLEEIVKELTGSPAIKKGILQSLKIVDEIVGIMGYEPANIVVEMARENQTTGRGLKSSRPRLKALEESLKDFGSQLLKEYPTDNSSLQKDRLYLYYLQNGRDMYTGAPLDIHRLSDYDIDHIIPRSFTTDNSIDNKVLVSSKENRLKKDDVPSEKVVKKMRSFWYDLYSSKLISKRKLDNLTKIKLTEEDKAGFIKRQLVETRQITKHVAGILHHRFNKAEDTNEPIRKVRIITLKSALVSQFRNRFGIYKVREINEYHHAHDAYLNGVVALALLKKYPQLAPEFVYGEYLKFNAHKANKATVKKEFYSNIMKFFESDTPVCDENGEIFWDKSKSIAQVKKVINHHHMNIVKKTEIQKGGFSKETVEPKKDSSKLLPRKNNWDPAKYGGLGSPNVAYTVAFTYEKGKARKRTNALEGITIMEREAFEQSPVLFLKNKGYEQAEIEMKLPKYALFELENGRKRMVASNKEAQKANSFLLPEHLVTLLYHAKQYDEISHKESFDYVNEHHKEFSEVFARVLEFAGKYTLAEKNIEKLEKIYKENQTDDLAKLASSFVNLMQFNAMGAPADFKFFDVTIPRKRYTSLTEIWQSTIIHQSITGLYETRIRMGK

SEQ ID NO: 206 - protein, 1340 aa, Enterococcus faecium
  Enterococcus faecium TX1337RF
MKKEYTIGLDIGTNSVGWSVLTDDYRLVSKKMKVAGNTEKSSTKKNFWGVRLFDEGQTAEARRSKRTARRRLARRRQRILELQKIFAPEILKIDEHFFARLNESFLVLDEKKQSRHPVFATIKQEKSYHQTYPTIYHLRQALADSSEKADIRLVYLAMAHLLKYRGHFLIEGELNTENSSVTETFRQFLSTYNQQFSEADDKQTEKLDEAVDCSFVFTEKMSKTKKAETLLKYFPHEKSNGYLSQFIKLMVGNQGNFKNVFGLEEEAKLQFSKETYEEDLEELLEKIGDDYIDLFVQAKNVYDAVLLSEILSDSTKNTRAKLSAGMIRRYDAHKEDLVLLKRFVKENLPKKYRAFFGDNSVNGYAGYIEGHATQEDFYKFVKKELTGIRGSEVFLTKIEQENFLRKQRTFDNGVIPHQIHLTELRAIIANQKKHYPFLKEEQEKLESLLTFKIPYYVGPLAKKQENSPFAWLIRKSEEKIKPWNLPEIVDMEGSAVRFIERMINTDMYMPHNKVLPKNSLLYQKFSIYNELTKVRYQDERGQMNYFSSIEKKEIFHELFEKNRKVTKKDLQEFLYLKYDIKHAELSGIEKAFNASYTTYHDFLTMSENKREMKQWLEDPELASMFEEIIKTLTVFEDREMIKTRLSHHEATLGKHIIKKLTKKHYTGWGRLSKELIQGIRDKQSNKTILDYLINDDDFPHHRNRNFMQLINDDSLSFKKEIKKAQMITDTENLEEIVKELTGSPAIKKGILQSLKIVDEIVGIMGYEPANIVVEMARENQTTGRGLKSSRPRLKALEESLKDFGSQLLKEYPTDNSSLQKDRLYLYYLQNGRDMYTGAPLDIHRLSDYDIDHIIPRSFTTDNSIDNKVLVSSKENRLKKDDVPSEKVVKKMRSFWYDLYSSKLISKRKLDNLTKIKLTEEDKAGFIKRQLVETRQITKHVAGILHHRFNKAEDTNEPIRKVRIITLKSALVSQFRNRFGIYKVREINEYHHAHDAYLNGVVALALLKKYPQLAPEFVYGEYLKFNAHKANKATVKKEFYSNIMKFFESDTPVCDENGEIFWDKSKSIAQVKKVINHHHMNIVKKTEIQKGGFSKETVEPKKDSSKLLPRKNNWDPAKYGGLGSPNVAYTVAFTYEKGKARKRTNALEGITIMEREAFEQSPVLFLKNKGYEQAEIEMKLPKYALFELENGRKRMVASNKEAQKANSFLLPEHLVTLLYHAKQYDEISHKESFDYVNEHHKEFSEVFARVLEFAGKYTLAEKNIEKLEKIYKENQTDDLAKLASSFVNLMQFNAMGAPADFKFFDVTIPRKRYTSLTEIWQSTIIHQSITGLYETRIRMGK

SEQ ID NO: 207 - protein, 1336 aa, Enterococcus hirae
MTKDYTIGLDIGTNSVGWAVLTDDYQLMKRKMSVHGNTEKKKIKKNFWGARLFDEGQTAEFRRTKRTNRRRLARRKYRLSKLQDLFAEELCKQDDCFFVRLEESFLVPEEKQYKPASIFPTLEEEKEYYQKYPTIYHLRQKLVDSTEKEDLRLVYLALAHLLKYRGHFLFEGDLDTENTSIEESFRVFLEQYSKQSDQPLIVHQPVLTILTDKLSKTKKVEEILKYYPTEKINSFFAQCLKLIVGNQANFKRIFDLEAEVKLQFSKETYEEDLESLLEKIGDEYLDIFLQAKKVHDAILLSEIISSTVKHTKAKLSSGMVERYERHKADLAKFKQFVKENVPQKATVFFKDTTKNGYAGYIKGKTTQEEFYKFVKKELSGVVGSEPFLEKIDQETFLLKQRTYTNGVIPHQVHLIELKAIIDQQKQHYPFLEEAGPKIIALFKFRIPYYVGPLAKEQEASSFAWIERKTAEKINPWNFSEVVDIEKSAMRFIQRMTKQDTYLPTEKVLPKNSLLYQKYMIFNELTKVSYKDERGVKQYFSGDEKQQIFKQLFQKERGKITVKKLQNFLYTHYHIENAQIFGIEKAFNASYSTYHDFMKLAKTNQKAMQEWLEQPEMEPIFEDIVKILTIFEDRQMIKHQLSKYQEVFGEKLLKEFARKHYTGWGRFSAKLIHGIRDRKTNKTILDYLINDDDVPANRNRNLMQLINDEHLSFKEEIAKATVFSKHKSLVDVIQDLPGSPAIKKGIWQSLKIVEELIAIIGYKPKNIVIEMARENQKTHRTSPRLKALENGLKQIGSTLLKEQPTDNKALQKERLYLYYLQNGRDMYTGEPLEIENLHQYEVDHIIPRSFIVDNSIDNKVLVASKQNQKKRDDVPKKQIVNEQRIFWNQLKEAKLISPKKYAYLTKIELTPEDKARFIQRQLVETRQITKHVANILHQSFNQEEEGTDCDGVQIITLKATLTSQFRQTFGLYKVREINPHHHAHDAYLNGFIANVLLKRYPKLAPEFVYGKYVKYSLARENKATAKKEFYSNILKFLESDEPFCDENGEIYWEKSHHLPRIKKVLSSHQVNVVKKVEQQKGGFYKETVNSKEKPDKLIERKNNWDVTKYGGFGSPVIAYAIAFVYAKGKTQKKTRAIEGITIMEQAAFEKDPTTFLKEKGFPQVTEFIKLPKYTLFEFDNGRRRFLASHKESQKGNPFILSDQLVTLLYHAQHYDKITYQESFDYVNTHLSDFSAILTEVLAFAEKYTLADKNIERIQELYEENKYGETSMIAQSFLQLLQFNAIGAPADFKFFGVTIPRKRYTSLTEIWDATIIYQSVTGLYETRIRMGDLWAGEQ

SEQ ID NO: 208 - protein, 1330 aa, Enterococcus italicus
  Enterococcus italicus DSM 15952
MKNDYTIGLDIGTNSVGYSVVTDDYKVISKKMNVFGNTEKKSIKKNFWGVRLFESGQTAQEARMKRTSRRRIARRKNRICYLQEIFQPEMNHLDNNFFYRLNESFLVADDAKYDKHPIFGTLDEEIHFHEQFPTIYHLRKYLADGDEKADLRLVYLAIAHIIKFRGNFLIEGELNTENNSVIELSKVFVQLYNQTLSELEGFQFIDESIDFSEVLTQQLSKSERADNVLKLFPDEKGTGIFAQFIKLIVGNQGNFKKVFQLEEDQKLQLSTDDYEENIENLLAIIGDEYGDIFVAAQNLYQAILLAGILTSTEKTRAKLSASMIQRYEEHAKDLKLLKRFVKEHIPDKYAEIFNDATKNGYAGYIDGKTKEEEFYKYLKTTLVQKSGYQYFIEKIEQENFLRKQRIYDNGVIPHQVHAEELRAILRKQEKYYSFLKENHEKIEQIFKVRIPYYVGPLAKHNEQSRFAWNIRKSDEPIRPWNMNDVVDENASAVAFIERMTIKDIYLNENVLPRHSLIYEKFTVFNELTKVLYADDRGVFQRFSAEEKEDIFEKLFKSERKVTKKKLENYLRIELSISSPSVKGIEEQFNANFGTYLDLKKFDELHPYLDDEKYQDTLEEVIKVLTVFEDRSMIQNQLEQLPLNLSTKTIKALSRRKYTGWGRLSARLIDGIHDKNSGKTILDYLIEDESDSYIVNRNFMQLINDDHLSFKKIIEDSQPYKEQQSAEEIVSELSGSPAIKKGILQSLKIVDELVAIMGYKPKNIVVEMARENQTTGRGKQNSKPRLKGIENGLKEFSDSVLKGSSIDNKQLQNDRLYLYYLQNGKDMYTGHELDIDHLSTYDIDHIIPQSFLTDNSIDNRVLTTSKSNRGKSDNVPSEEVVRKMDRFWRKLLNAKLISERKYTNLTKKELTESDKAGFLKRQLVETRQITKHVATILDSKFNEDSNNRDVQIITLKSALVSEFRKTFNLYKVREINDLHHAHDAYLNAVVALSLLRVYPQLKPEFVYGEYGKNSIHDQNKATIKKQFYSNITRYFASKDYIINDDGEILWNKQETIAQVIKTLGMHQVNVVKKVEIQKGGFSKESIQPKGESQKLIRRKQQWNTKKYGGFDSPVVAYAILLSFDKGKRKARSFKIVGITIQDRESFEGNPILYLSKKDYHNPKVEAILPKYSLFEFENGRRRMVASASETQKGNQLIIPGHLMELLYHSKKIINGKNSDSVSYIQNNKEKFREIFEYIVDFSSKYISADANLNKIEKIFENNFHKASEQEIAKSFINLLTFTAMGAPADFEFFGEKIPRKRYVSISEIIDAVFIHQSITGLYETRVRLTEV

SEQ ID NO: 209 - protein, 1096 aa, Eubacterium dolichum
  Eubacterium dolichum DSM 3991
MMEVFMGRLVLGLDIGITSVGFGIIDLDESEIVDYGVRLFKEGTAAENETRRTKRGGRRLKRRRVTRREDMLHLLKQAGIISTSFHPLNNPYDVRVKGLNERLNGEELATALLHLCKHRGSSVETIEDDEAKAKEAGETKKVLSMNDQLLKSGKYVCEIQKERLRTNGHIRGHENNFKTRAYVDEAFQILSHQDLSNELKSAIITIISRKRMYYDGPGGPLSPTPYGRYTYFGQKEPIDLIEKMRGKCSLFPNEPRAPKLAYSAELFNLLNDLNNLSIEGEKLTSEQKAMILKIVHEKGKITPKQLAKEVGVSLEQIRGFRIDTKGSPLLSELTGYKMIREVLEKSNDEHLEDHVFYDEIAEILTKTKDIEGRKKQISELSSDLNEESVHQLAGLTKFTAYHSLSFKALRLINEEMLKTELNQMQSITLFGLKQNNELSVKGMKNIQADDTAILSPVAKRAQRETFKVVNRLREIYGEFDSIVVEMAREKNSEEQRKAIRERQKFFEMRNKQVADIIGDDRKINAKLREKLVLYQEQDGKTAYSLEPIDLKLLIDDPNAYEVDHIIPISISLDDSITNKVLVTHRENQEKGNLTPISAFVKGRFTKGSLAQYKAYCLKLKEKNIKTNKGYRKKVEQYLLNENDIYKYDIQKEFINRNLVDTSYASRVVLNTLTTYFKQNEIPTKVFTVKGSLTNAFRRKINLKKDRDEDYGHHAIDALIIASMPKMRLLSTIFSRYKIEDIYDESTGEVFSSGDDSMYYDDRYFAFIASLKAIKVRKFSHKIDTKPNRSVADETIYSTRVIDGKEKVVKKYKDIYDPKFTALAEDILNNAYQEKYLMALHDPQTFDQIVKVVNYYFEEMSKSEKYFTKDKKGRIKISGMNPLSLYRDEHGMLKKYSKKGDGPAITQMKYFDGVLGNHIDISAHYQVRDKKVVLQQISPYRTDFYYSKENGYKFVTIRYKDVRWSEKKKKYVIDQQDYAMKKAEKKIDDTYEFQFSMHRDELIGITKAEGEALIYPDETWHNFNFFFHAGETPEILKFTATNNDKSNKIEVKPIHCYCKMRLMPTISKKIVRIDKYATDVVGNLYKVKKNTLKFEFD

SEQ ID NO: 210 - protein, 1114 aa, Eubacterium rectale
MNYTEKEKLFMKYILALDIGIASVGWAILDKESETVIEAGSNIFPEASAADNQLRRDMRGAKRNNRRLKTRINDFIKLWENNNLSIPQFKSTEIVGLKVRAITEEITLDELYLILYSYLKHRGISYLEDALDDTVSGSSAYANGLKLNAKELETHYPCEIQQERLNTIGKYRGQSQIINENGEVLDLSNVFTIGAYRKEIQRVFEIQKKYHPELTDEFCDGYMLIFNRKRKYYEGPGNEKSRTDYGRFTTKLDANGNYITEDNIFEKLIGKCSVYPDELRAAAASYTAQEYNVLNDLNNLTINGRKLEENEKHEIVERIKSSNTINMRKIISDCMGENIDDFAGARIDKSGKEIFHKFEVYNKMRKALLEIGIDISNYSREELDEIGYIMTINTDKEAMMEAFQKSWIDLSDDVKQCLINMRKTNGALFNKWQSFSLKIMNELIPEMYAQPKEQMTLLTEMGVTKGTQEEFAGLKYIPVDVVSEDIFNPVVRRSVRISFKILNAVLKKYKALDTIVIEMPRDRNSEEQKKRINDSQKLNEKEMEYIEKKLAVTYGIKLSPSDFSSQKQLSLKLKLWNEQDGICLYSGKTIDPNDIINNPQLFEIDHIIPRSISFDDARSNKVLVYRSENQKKGNQTPYYYLTHSHSEWSFEQYKATVMNLSKKKEYAISRKKIQNLLYSEDITKMDVLKGFINRNINDTSYASRLVLNTIQNFFMANEADTKVKVIKGSYTHQMRCNLKLDKNRDESYSHHAVDAMLIGYSELGYEAYHKLQGEFIDFETGEILRKDMWDENMSDEVYADYLYGKKWANIRNEVVKAEKNVKYWHYVMRKSNRGLCNQTIRGTREYDGKQYKINKLDIRTKEGIKVFAKLAFSKKDSDRERLLVYLNDRRTFDDLCKIYEDYSDAANPFVQYEKETGDIIRKYSKKHNGPRIDKLKYKDGEVGACIDISHKYGFEKGSKKVILESLVPYRMDVYYKEENHSYYLVGVKQSDIKFEKGRNVIDEEAYARILVNEKMIQPGQSRADLENLGFKFKLSFYKNDIIEYEKDGKIYTERLVSRTMPKQRNYIETKPIDKAKFEKQNLVGLGKTKFIKKYRYDILGNKYSCSEEKFTSFC

SEQ ID NO: 211 - protein, 1391 aa, Eubacterium sp.
  Eubacterium sp. AS15
MENKQYYIGLDVGTNSVGWAVTDTSYNLLRAKGKDMWGARLFDEAKTAVERRTKRTSRRRSEREKARKAMLKELFADEINKVDPNFFIRLEESKFFLDDRSENNRQRYTLFNDAKFTDKDYYEKYKTIFHLRSALINSDEKFDVRLVFLAILNLFSHRGHFLNASLKGDGEIQGVDIFYNDLYEVCEEFEIDLPQISNIDNFEKILSQKGKSRTKILEELSEELSISKKEKIKYSLLKLICGMKIKVVDIYADEDIQEDDKKKDLGFRESDYEKSSLEVKEIIGDDHFELIERAKAVHDIGLLANIIGNSKYLCEARVEAYDNHHKDLQKIKELLKKYDIKAYTDMFRKMTDKNYSAYVGSVNSNIAKERRSVDNRKIEDLYEYIKKIALKNISDDNEDKIEILKKIETGEFLKKQLTASNGVIPNQLQSRELRAILKKAENYLPFLKEKGEKNLTVSEMIIQLFEFQIPYYVGPLDKNPKKDKNANSWAVIPSGGRILPWNFEDKVDVKGSRKEFIEKMVRKCTYLSEEHTLPKQSLLYEKFMVLNEINNIKIDGEKISVEAKQKIYNDLFMKGKKVSQKAIKQELISLNIMSKDSVLSGIDTVCNAYLSSIAKFRGVFDENVNNQSTIDMIEDIIFLKTVYSDEKRFVKEEIVEKYGDEIDKDKIKRILGFKFSNWGNISKSFLELEGADVGTGEIRSIIQSLWETNFNLMELLSSRFTYMDELEKRVKKLEKPLSEWTIEDLDDMYLSSPVKRMIWQSMKIVDEIQTVIGYAPKRIFVEMTRSEGEKVRTKSRKDRLKELYSAIKEDSKQWVKELDAKDESYFRSKKMYLYYLQKGRCMYSGEVIELDKLMDDNLYDIDHIYPRSFVKDDSLDNLVLVKKEINNRKQNDPITPQIQASCQGFWKVLHEQGFISNEKYSRLTRKTQEFSDEEKLSFINRQIVETGQATKCMAQILQKSMGEDVDVVFSKARLVSEFRHKFELFKSRLINDFHHANDAYLNIVVGNSYFVKFTRNPANFIKDARKNPDNPAYKYHMDRFFERDVKSKSEVAWIGQSEGNAGTIAIVKKTMSKNSPLITKKVEEGHGSITKETIVGVKEIKFGRNKVEKADKTPKKANLQAYRPIKTSDERLCNILRYGGRTSISISGYCLVEYVKKRKTIRSLEAIPVYLGRKDSLSEEKLLNYFRYNLNDGGKDSVSDIRLCLPFISTNSLVKIDGYLYYLGGKNDDRIQLYNAYQLKMKKEEVEYIRKIEKAVSMSKFDEIDREKNPVLTEEKNIELYNKIQDKFENTVFSKRMSLVKYNKKDLSFGDFLKNKKSKFEEIDLEKQCKVLYNIIFNLSNLKEVDLSDIGGSKSTGKCRCKKNITNYKEFKLIQQSITGLYSCEKDLMTI

SEQ ID NO: 212 - protein, 1107 aa, Eubacterium ventriosum
  Eubacterium ventriosum ATCC 27560
MGYTVGLDIGVASVGVAVLDENDNIVEAVSNIFDEADTSNNKVRRTLREGRRTKRRQKTRIEDFKQLWETSGYIIPHKLHLNIIELRNKGLTELLSLDELYCVLLSMLKHRGISYLEDADDGEKGNAYKKGLAFNEKQLKEKMPCEIQLERMKKYGKYHGEFIIEINDEKEYQSNVFTTKAYKKELEKIFETQRCNGNKINTKFIKKYMEIYERKREYYIGPGNEKSRTDYGIYTTRTDEEGNFIDEKNIFGKLIGKCSVYPEEYRASSASYTAQEFNLLNDLNNLKINNEKLTEFQKKEIVEIIKDASSVNMRKIIKKVIDEDIEQYSGARIDKKGKEIYHTFEIYRKLKKELKTINVDIDSFTREELDKTMDILTLNTERESIVKAFDEQKFVYEENLIKKLIEFRKNNQRLFSGWHSFSYKAMLQLIPVMYKEPKEQMQLLTEMNVFKSKKEKYVNYKYIPENEVVKEIYNPVVVKSIRTTVKILNALIKKYGYPESVVIEMPRDKNSDDEKEKIDMNQKKNQEEYEKILNKIYDEKGIEITNKDYKKQKKLVLKLKLWNEQEGLCLYSGKKIAIEDLLNHPEFFEIDHIIPKSISLDDSRSNKVLVYKTENSIKENDTPYHYLTRINGKWGFDEYKANVLELRRRGKIDDKKVNNLLCMEDITKIDVVKGFINRNLNDTRYASRVVLNEMQSFFESRKYCNTKVKVIRGSLTYQMRQDLHLKKNREESYSHHAVDAMLIAFSQKGYEAYRKIQKDCYDFETGEILDKEKWNKYIDDDEFDDILYKERMNEIRKKIIEAEEKVKYNYKIDKKCNRGLCNQTIYGTREKDGKIHKISSYNIYDDKECNSLKKMINSGKGSDLLMYNNDPKTYRDMLKILETYSSEKNPFVAYNKETGDYFRKYSKNHNGPKVEKVKYYSGQINSCIDISHKYGHAKNSKKVVLVSLNPYRTDVYYDNDTGKYYLVGVKYNHIKCVGNKYVIDSETYNELLRKEGVLNSDENLEDLNSKNITYKFSLYKNDIIQYEKGGEYYTERFLSRIKEQKNLIETKPINKPNFQRKNKKGEWENTRNQIALAKTKYVGKLVTDVLGNCYIVNMEKFSLVVDK

SEQ ID NO: 213 - protein, 1391 aa, Eubacterium yurii
  Eubacterium yurii subsp. margaretiae ATCC 43715
MENKQYYIGLDVGTNSVGWAVTDTSYNLLRAKGKDMWGARLFEKANTAAERRTKRTSRRRSEREKARKAMLKELFADEINRVDPSFFIRLEESKFFLDDRSENNRQRYTLFNDATFTDKDYYEKYKTIFHLRSALINSDEKFDVRLVFLAILNLFSHRGHFLNASLKGDGDIQGMDVFYNDLVESCEYFEIELPRITNIDNFEKILSQKGKSRTKILEELSEELSISKKDKSKYNLIKLISGLEASVVELYNIEDIQDENKKIKIGFRESDYEESSLKVKEIIGDEYFDLVERAKSVHDMGLLSNIIGNSKYLCEARVEAYENHHKDLLKIKELLKKYDKKAYNDMFRKMTDKNYSAYVGSVNSNIAKERRSVDKRKIEDLYKYIEDTALKNIPDDNKDKIEILEKIKLGEFLKKQLTASNGVIPNQLQSRELRAILKKAENYLPFLKEKGEKNLTVSEMIIQLFEFQIPYYVGPLDKNPKKDNKANSWAKIKQGGRILPWNFEDKVDVKGSRKEFIEKMVRKCTYISDEHTLPKQSLLYEKFMVLNEINNIKIDGEKISVEAKQKIYNDLFVKGKKVSQKDIKKELISLNIMDKDSVLSGTDTVCNAYLSSIGKFTGVFKEEINKQSIVDMIEDIIFLKTVYGDEKRFVKEEIVEKYGDEIDKDKIKRILGFKFSNWGNLSKSFLELEGADVGTGEVRSIIQSLWETNFNLMELLSSRFTYMDELEKRVKKLEKPLSEWTIEDLDDMYLSSPVKRMIWQSMKIVDEIQTVIGYAPKRIFVEMTRSEGEKVRTKSRKDRLKELYNGIKEDSKQWVKELDSKDESYFRSKKMYLYYLQKGRCMYSGEVIELDKLMDDNLYDIDHIYPRSFVKDDSLDNLVLVKKEINNRKQNDPITPQIQASCQGFWKILHDQGFMSNEKYSRLTRKTQEFSDEEKLSFINRQIVETGQATKCMAQILQKSMGEDVDVVFSKARLVSEFRHKFELFKSRLINDFHHANDAYLNIVVGNSYFVKFTRNPANFIKDARKNPDNPVYKYHMDRFFERDVKSKSEVAWIGQSEGNSGTIVIVKKTMAKNSPLITKKVEEGHGSITKETIVGVKEIKFGRNKVEKADKTPKKPNLQAYRPIKTSDERLCNILRYGGRTSISISGYCLVEYVKKRKTIRSLEAIPVYLGRKDSLSEEKLLNYFRYNLNDGGKDSVSDIRLCLPFISTNSLVKIDGYLYYLGGKNDDRIQLYNAYQLKMKKEEVEYIRKIEKAVSMSKFDEIDREKNPVLTEEKNIELYNKIQDKFENTVFSKRMSLVKYNKKDLSFGDFLKNKKSKFEEIDLEKQCKVLYNIIFNLSNLKEVDLSDIGGSKSTGKCRCKKNITNYKEFKLIQQSITGLYSCEKDLMTI

SEQ ID NO: 214 - protein, 1142 aa, Facklamia hominis
  Facklamia hominis CCUG 36813
MYSVGLDIGIASCGYSIINDVNGNIVELGTLLFKSRNSDNNEERRTNRGSRRLINRRRTRLDDGKKLLAEKGFKQDSKLKHVCPYELRVKGLHEKLTQGEIYKVVLHILKKRGISYLDESDENSSGIDGASYKDQVNLNLNLQKELTPGQIQLKRLKENGRIKSGVTFENGYQLNVFSVSAYANELNKILTKQSEYYSEIDQIWIDRFTKNGYRKEAGLVYRKRPYYDGPGNEKNNSIYGRWANFKEDGHPKENIFDQLIGLDSVDSTQVRASASTLTAQKYNLLNDLNNLTIIEDDRKFTTDEKVSIINYLMTQDITRFGPKELAKFYQLEVDQIRGWRIDNKGNPEIHSLKVYRDWKKIFNTSSIDLTSIQTWVVDELANVITLNTEIPSTLATLKIKIPDIDQQILNFVENNFYELKKKTSKNSWHSFSLKTLNILIPELLNTSEEQNTILERLNLKFDLKNKYAEKNQIPVKELLEQIYNPTVTKSVHQSIKLFNEIIEKYGKNNISYVTIEMPRDKNDQDQKDTIKRINKLNSERKNDSEKYFLERSGWDTIRFESALKKPRFAEKLLFYYEQKGKCAYSGQDILAESLLNESCEVDHIIPLSISFDDSIHNKVLVTASSNQEKGQRTPYMAFIDGAKLGQSWDDFVAWVNSCGFHRKKVQNLLYEENIFNPDVQRGFVSRNLNDTRYASRIVLNAIQSFFYKQKDLTKVKVVNGSFTHTLRKKWGSSLDKNRDTYHHHAVDATLCAVTPFINIVKYEFFEEDGIKYMVDLTTGEKVAYSDYKKMKFYDKRAYVPIWDGFIKQLTPANLYPKIKFSHQVDSKWNRKISDATIYSTRKIVETKINKKGVAKETVKDIVIDKIKDIYTPEGWRKFKEKQDKLLMKNFDEKTYNKLIKIAKEYPEKKEVQTSNGKVSLVEVSPFKMYCEEQNVPAIRKYSKKGNGPYIRSLKFYDKELGKHINITKDSYGNDIERTIRNKKIILKNQNSWRTDVYYNSVNNCYELLGIKYCHLKFYRGKYGIPKSIYDELKKEDEISSESVFKFSLYRHDRVRFEKDGEYIEALFGSKNESNKNYLELSPIDKNKWLSKENVKFFGEVAASGRFIKGLKPGIKVIKQSTDYMGHVYAIHQEKLKFVLSDA

SEQ ID NO: 215 - protein, 1512 aa, Fibrobacter succinogenes
MKKILGLDLGTNSIGWAVVNADEITRDDGSRYLKPNGISAAGSRIIPMSADILGDFEKGNSISQTAERTRMRMARRLHERALLRRERLLRVLNLLDFLPKHFADKIDRYGKFTDDSEPKLAWRKNTEGKYEFIFQDAFNEMLAEFKDKQPEIVEEGKKIPYDWTIYYLRKKALEKALSKEELSWILLQFNQKRGYYQLRGEEEEIPQDKKIEYLAQKVVKVEATDQKKGDDVWYNVYLENGMIYRRTSKAPLDWEGKVKEFIVTTEVENDGETPKKDKEGNIKRSFRAPKEDDWTLLKKKTEADIENSHKTVGCYIYDSLLNNPKQKIIGKLVRTVERKFYKEELTQILKKQVELIPELRDDNLYKQCIEELYPINEAHRNTIAKTDFANLFINDILFYQRPLKSKKSQIDNCPYEERIFIDSKTGEKKKVPVKCIAKSNPLFQEFRLWQFIQNLRIYQREKEIDGKLLTDIDITSECLKSEEDYVRLFDWLNDRETIEQEDLLKHLFNTKKSKNKENPYRWNYVEDKVYPCNETRATILKGFSKCGINASVLSPELEMALWHILYSVEDKKEIETALTHFAQKQGWNDDFAKVFSKAKPFKKDYGSYSEKAIKKLLSLMRMGKYWNQDNIDKNTLDRIDKIINGEYDEKISNRVRDNAINLKDISDFRGLPVWLACYIVYDRHSEAKDCTKWNSPEEIDSYLKKFKQHSLRNPIVEQVVTETLRTVRDIWIQEEQIDEIHLELGRDLKNPADKRKKMSENILKNENTNLRIKAMLMEFMNPSMGIENVRPYSPSQQDILRIYEENALDNLTKDDKDFDFISKISKQAQPSKTDIIRYKCWLEQKYRSPYTGKTISLSKLFTPAYEIEHVIPQSLYFDDSFSNKVICEAEVNKLKDRQLGYKFIAEHHGEKVQLSQGEVVEILSVDAYEKFVKENYANNRIKMKKLLMESIPDEFIERQLNDSRYISKVVKGLLSNIVREKIDDENYEPEAVSKNLISCNGAITDRLKKDWGMNDVWNSIILPRFIRMNQITGKDCFTTTNAEGHLIPQMPLELQKGFNKKRIDHRHHAMDAIVIACTTRDHVNLLNNEAAHSKFNATRYQLQRKLRRFEKAVIDGKEREVAKEFLKPWDSFSSDSKNILENIIVSFKQNQRVINKTTNAFLHFDENGKKTFIKQGKGDSWAIRKSMHKDTVFGEINLRKVRSVSLNEAIKVPERVLNKKIKEKILELKNNKIDAKNIKKYIEENHTGGYGIDSSKIDVFYFTKETKERFFATRKTLDTSFNQAKIKDSIADSGIQKILLAHLKSKNGDAEQAFSPDGIDEMNKNIVELNNGKFHQPILKVRVYEKADKFAVGQKGNKKVKFVEAAKGTNLFFAIFEKDGKRSYLTIPLNVMIDCQKQYGNQWKNNIEAYLKEKELVEKDVKLQFILSPNDLVYLPTEGSIDKKRIYKVVSFTNNRLYAIPYAIAKSIVDKNEFTQLNKIEFTDNKESIKDACVPVIIDRLGNVIEFNGKRL

SEQ ID NO: 216 - protein, 1365 aa, Filifactor alocis
MTKEYYLGLDVGTNSVGWAVTDSQYNLCKFKKKDMWGIRLFESANTAKDRRLQRGNRRRLERKKQRIDLLQEIFSPEICKIDPTFFIRLNESRLHLEDKSNDFKYPLFIEKDYSDIEYYKEFPTIFHLRKHLIESEEKQDIRLIYLALHNIIKTRGHFLIDGDLQSAKQLRPILDTFLLSLQEEQNLSVSLSENQKDEYEEILKNRSIAKSEKVKKLKNLFEISDELEKEEKKAQSAVIENFCKFIVGNKGDVCKFLRVSKEELEIDSFSFSEGKYEDDIVKNLEEKVPEKVYLFEQMKAMYDWNILVDILETEEYISFAKVKQYEKHKTNLRLLRDIILKYCTKDEYNRMFNDEKEAGSYTAYVGKLKKNNKKYWIEKKRNPEEFYKSLGKLLDKIEPLKEDLEVLTMMIEECKNHTLLPIQKNKDNGVIPHQVHEVELKKILENAKKYYSFLTETDKDGYSVVQKIESIFRFRIPYYVGPLSTRHQEKGSNVWMVRKPGREDRIYPWNMEEIIDFEKSNENFITRMTNKCTYLIGEDVLPKHSLLYSKYMVLNELNNVKVRGKKLPTSLKQKVFEDLFENKSKVTGKNLLEYLQIQDKDIQIDDLSGFDKDFKTSLKSYLDFKKQIFGEEIEKESIQNMIEDIIKWITIYGNDKEMLKRVIRANYSNQLTEEQMKKITGFQYSGWGNFSKMFLKGISGSDVSTGETFDIITAMWETDNNLMQILSKKFTFMDNVEDFNSGKVGKIDKITYDSTVKEMFLSPENKRAVWQTIQVAEEIKKVMGCEPKKIFIEMARGGEKVKKRTKSRKAQLLELYAACEEDCRELIKEIEDRDERDFNSMKLFLYYTQFGKCMYSGDDIDINELIRGNSKWDRDHIYPQSKIKDDSIDNLVLVNKTYNAKKSNELLSEDIQKKMHSFWLSLLNKKLITKSKYDRLTRKGDFTDEELSGFIARQLVETRQSTKAIADIFKQIYSSEVVYVKSSLVSDFRKKPLNYLKSRRVNDYHHAKDAYLNIVVGNVYNKKFTSNPIQWMKKNRDTNYSLNKVFEHDVVINGEVIWEKCTYHEDTNTYDGGTLDRIRKIVERDNILYTEYAYCEKGELFNATIQNKNGNSTVSLKKGLDVKKYGGYFSANTSYFSLIEFEDKKGDRARHIIGVPIYIANMLEHSPSAFLEYCEQKGYQNVRILVEKIKKNSLLIINGYPLRIRGENEVDTSFKRAIQLKLDQKNYELVRNIEKFLEKYVEKKGNYPIDENRDHITHEKMNQLYEVLLSKMKKFNKKGMADPSDRIEKSKPKFIKLEDLIDKINVINKMLNLLRCDNDTKADLSLIELPKNAGSFVVKKNTIGKSKIILVNQSVTGLYENRREL

SEQ ID NO: 217 - protein, 1347 aa, Finegoldia magna
  Finegoldia magna ACS-171-V-Col3
MKSEKKYYIGLDVGTNSVGWAVTDEFYNILRAKGKDLWGVRLFEKAKTAADTRTFRSGRRRNDRKGMRLQILREIFEDEIKKVDKDFYDRLDESKFWAEDKKVSGKYSLFNDKNFSDKQYFEKFPTIFHLRKYLMEEHGKVDIRYYFLAINQMMKRRGHFLIDGQISHVTDDKPLKEQLILLINDLLKIELEEELMDSIFEILADVNEKRTDKKNNLKELIKGQDFNKQEGNILNSIFESIVTGKAKIKNIISDEDILEKIKEDNKEDFVLTGDSYEENLQYFEEVLQENITLFNTLKSTYDFVILQSILKGKSTLSDAQVERYDEHKKDLEILKKVIKKYDEDGKLFKQVFKEDNGNGYVSYIGYYLNKNKKITAKKKISNIEFTKYVKGILEKQCDCEDEAVKYLLGKIEQENFLLKQISSINSVIPHQIHLFELDKILENLAKNYPSFNNKKEEFTKIEKIRKTFTFRIPYYVGPLNDYHKNNGGNAWIFRNKGEKIRPWNFEKIVDLHKSEEEFIKRMLNQCTYLPEETVLPKSSILYSEYMVLNELNNLRIKGKPLDTDVKLKLIEELFKKKTKVTLKSIRDYMIRNNFADKEDFDNSEKNLEIVSNMKSYIDFNNILGDKFELEMVEDLIEKITIHTGNKTLLKKYIEETYPDLSSSQIQKIINLKYKDWGRLSRKLLDGIKGRNKTDDVNTVINFMRNSSDNLMQIIEGKNYSFNEYIDNLRKKYIPQEISYEVVENLYVSPSVKKMIWQVIRVTEEITKVMGYDPDKIFIEMAKSEEEKKTTISRKNKLLDLYKAIKKDERDSQYEKLLTGLNKLDESELRSKKLYLYYTQMGRDMYTGEKIDLDKLFDSTHYDKDHIIPQSMKKDDSIINNLVLVNKNANQTTKGNIYPVPSSIRNNPDIYNYWKYLMEKEFISKEKYNRLIRNTPLTNEELGVFINRQLVETRQSTKAIKELFEKFYQKSKIIPVKASLASDLRKDMNTLKSREVNDLHHAHDAFLNIVAGDVWNREFTSNPINYVNENREGDKVKYSLSKYFTRPRKSKGKVIWTPEKGRKLIVDTLNKPSVLISNESHVKKGELFNATISGKKDYKKGKIYLPLKKDDRLKDVSKYGGYKAINGAFFFLVEHTKSKKRIRSIELFPLHLLSKFYEDKNTVLDYAINVLQLQDPKIIIDKINYRTEIIIDNFSYLISTKSNDGSITVKPNEQMYWRVDEISNLKKIENKYKKDAILTEEDRKIMESYIDKIYQQFKAGKYKNRRTTDTIIEKYEIIDLDTLDNKQLYQLLVAFISLSYKTSNNAVDFTVIGLGTECGKPRITNLPDNTYLVYKSITGIYEKRIRIK

SEQ ID NO: 218 - protein, 1348 aa, Finegoldia magna
MKSEKKYYIGLDVGTNSVGWAVTDEFYNILRAKGKDLWGVRLFEKADTAANTRIFRSGRRRNDRKGMRLQILREIFEDEIKKVDKDFYDRLDESKFWAEDKKVSGKYSLFNDKNFSDKQYFEKFPTIFHLRKYLMEEHGKVDIRYYFLAINQMMKRRGHFLIDGQISHVTDDKPLKEQLILLINDLLKIELEEELMDSIFEILADVNEKRTDKKNNLKELIKGQDFNKQEGNILNSIFESIVTGKAKIKNIISDEDILEKIKEDNKEDFVLTGDSYEENLQYFEEVLQENITLFNTLKSTYDFLILQSILKGKSTLSDAQVERYDEHKKDLEILKKVIKKYDEDGKLFKQVFKEDNGNGYVSYIGYYLNKNKKITAKKKISNIEFTKYVKGILEKQCDCEDEDVKYLLGKIEQENFLLKQISSINSVIPHQIHLFELDKILENLAKNYPSFNNKKEEFTKIEKIRKTFTFRIPYYVGPLNDYHKNNGGNAWIFRNKGEKIRPWNFEKIVDLHKSEEEFIKRMLNQCTYLPEETVLPKSSILYSEYMVLNELNNLRINGKPLDTDVKLKLIEELFKKKTKVTLKSIRDYMVRNNFADKEDFDNSEKNLEIASNMKSYIDFNNILEDKFDVEMVEDLIEKITIHTGNKKLLKKYIEETYPDLSSSQIQKIINLKYKDWGRLSRKLLDGIKGTKKETEKTDTVINFLRNSSDNLMQIIGSQNYSFNEYIDKLRKKYIPQEISYEVVENLYVSPSVKKMIWQVIRVTEEITKVMGYDPDKIFIEMAKSEEEKKTTISRKNKLLDLYKAIKKDERDSQYEKLLTGLNKLDDSDLRSRKLYLYYTQMGRDMYTGEKIDLDKLFDSTHYDKDHIIPQSMKKDDSIINNLVLVNKNANQTTKGNIYPVPSSIRNNPKIYNYWKYLMEKEFISKEKYNRLIRNTPLTNEELGGFINRQLVETRQSTKAIKELFEKFYQKSKIIPVKASLASDLRKDMNTLKSREVNDLHHAHDAFLNIVAGDVWNREFTSNPINYVKENREGDKVKYSLSKDFTRPRKSKGKVIWTPEKGRKLIVDTLNKPSVLISNESHVKKGELFNATIAGKKDYKKGKIYLPLKKDDRLQDVSKYGGYKAINGAFFFLVEHTKSKKRIRSIELFPLHLLSKFYEDKNTVLDYAINVLQLQDPKIIIDKINYRTEIIIDNFSYLISTKSNDGSITVKPNEQMYWRVDEISNLKKIENKYKKDAILTEEDRKIMESYIDKIYQQFKAGKYKNRRTTDTIIEKYEIIDLDTLDNKQLYQLLVAFISLSYKTSNNAVDFTVIGLGTECGKPRITNLPDNTYLVYKSITGIYEKRIRIK

SEQ ID NO: 219 - protein, 1348 aa, Finegoldia magna
  Finegoldia magna SY403409CC001050417
MKSEKKYYIGLDVGTNSVGWAVTDEFYNILRAKGKDLWGVRLFEKAKTAADTRTFRSGRRRNDRKGVRLQILREIFEDEIKKVDKDFYDRLDESKFWAEDKKVSGKYSLFNDKNFSDKQYFEKFPTIFHLRKYLMEEHGKVDIRYYFLAINQMMKRRGHFLIDGQISHVTDDKPLKQQLILLINDLLKIELEEEFMDSIFEILADVNEKKTEKKNILKELINAQDFNKQEGKILYSIFESIVTGKAKIKNIISDEDILEKIKEDNKEDFVLTGDSYEENLQYFEEVLQENITLFNTLKSAYDFVILQSILKGKSTLSDAQVERYDEHKKDLEILKKVIKKYDEDGKLFKQVFKEDNGNGYVSYIGYYLNKNKKITAKKKISNIEFTKYVKGILEKQCDCEDEDVKYLLGKIEQENFLLKQISSINSVIPHQIHLFELDKILENLAKYYPSFNNKKEEFTKIEKIRKTFTFRIPYYVGPLNDYHKNNGGNAWIFRNKGEKIRPWNFEKIVDLHKSEEEFIKRMLNQCTYLPEETVLPKSSILYSEYMVLNELNNLRINGKPIDTDVKLKLIEELFKKKTKVTLKSIRDYMIRNNFADKEDFDNSEKNLEIVSNMKSYIDFNNILGDKFELEMVEDLIEKITIHTGNKKLLKKYIEETYPDLSSSQIQKIINLKYKDWGRLSRKLLDGITGTNIETGEIDTVINFLRNSSDNLMQIIGSQNYSFNNDIDKLRKKYIPQEISYEVVENLYVSPSVKKMIWQVIRITEEITKVMGYDPDKIFIEMAKSEEGKKTTISRKNKLLALYKAIKKDERDSQYEKLLTGLNKLDDSDLRSRKLYLYYTQMGRDMYTGEKIDLDKLFDSTHYDKDHIIPQSMKKDDSIINNLVLVNKNANQTTKGNIYPVPSSIRNNPKIYNYWKYLMEKEFISKEKYNRLIRNTPLTNEELGGFINRQLVETRQSTKAIKELFEKFYKKSKIIPVKAILASDLRKDMNTLKSREVNDLHHAHDAFLNIVAGDVWNREFTSNPINYVKENREGDKVKYSLSKYFTRPRKSKGKVIWTPEKGRKLIVDTLNKPSVLISNESHVKKGELFNATIAGKKDYKKGKIYLPLKKDDRLQDVSKYGGYKAINGAFFFLVEHTKSKKRIRSIELFPLHLLSKFYEDKNTVLDYAINVLQLQDPKIIIDKINYRTEIIIDNFSYLISTKSNDGSITVKPNEQMYWRVDEISNLKKIENKYKKDAILTEEDRKIMESYIDKIYQQFKAGKYKNRRTTDTIIEKYEIIDLDTLDNKQLYQLLVAFISLSYKTSNNAVDFTVIGLGTECGKPRITNLPDNTYLVYKSITGIYEKRIRIK

SEQ ID NO: 220 - protein, 1516 aa, Flavobacteriaceae bacterium
  Flavobacteriaceae bacterium S85
MLKQQKDKIIGMNKKILGLDLGTNSIGWALVKQDLENKYGEIIGCGSRIIPMSQDVLGKFDAGISISQTAERTNYRSVRKLIQRNTLRRERLHRVLHQLDFLPKHYNDSIDFEKKLGQFKTDKETKLNYFVNQHGKHEFLFKDSFNEMVKEFKEEQPELFYIKNNGKETKIPYDWTIYYLRKKALSKKISKEELSWLVLNFNQKRGYYQLRGEIDEEKEKNKRYEKLYVSEVVKTNNTIKKTGEYLYDIYFDNGWKYEKQTTKPQDWLHKHKEFIITTTTLKNGETKRTFKTVDSEKDWIAIKSKTEQDIKESNKTVGAFIYDTLLKNPTQKIRGSLVKTIERKFYREEFEKILKEQIKHRPEINVNTAIGKENYTKCVTELYPRNEAHANNILTNDFNYLFTKDILFYQRPLKSKKSEIANCQYEYRTYIKKKEKTGKEERVKQPLKATPKSHPLFQEFRLWQFIHNLKIYIRETTVGNKPLFDVDITDTFFTSENDWATLFEYLNNKKEIEQKHVLEYLVSKKIISKSEKTDYRWNYVEDKKYPGNETRVDFINRLKKVENLNVDEFLTSELEFKLWHIIYSVTDKNEYEKALENFAIRQNIDKDSFVNSFKKFPPFKSDYGAYSTKAIKKLLPLMRLGKFWDGSEIPKVVVEKITDIKTRLTSVNYDESLFKKDEKKILETIVDDITPKQLLKSFVKLKGKNHLAGLNTYQACYLVYERHSESSDITQWENPDDIDSFLNHFKQHSLRNPIVEQVVTETLRTVRDIWKYYGNGSPNYFNEIHIELGREMKNPADKRKQMSAKINENENTNQRIKGILQELMNDGVQDIKPYSPSQQEILKIYEEGISQNPNVDYSKVSEDEITKIKKSNNPTLKEIQRYKLWLEQKYISPYTGKPIPLSELFTPAYQIEHIIPQSRYFDNSLSNKIICESEVNEDKSNKTAYEYLKTNGGSIVHGHHLLSLKEYEDHCQHYFKKNRTKLKNLLSEEIPEGFINRQLNDSRYISKLIKGLLSNIVREENEQEATSKNIVPVTGSITSKLKQDWGLNDKWNEIIAPRFKRLNKMTNSNDFGYFDEKINTFRIQVPDAISRGFNKKRIDHRHHTLDALVIACCTKKHIQYLNSLNNEIIKHELKPSILIKNAQGDYTKHFMLPWNNFPIDCKNAIENTIVSFKQNLRVINKTSNKYQSYKDENGNLRLGKDGKPKKGLTKQTKGNNWAVRKAMHEDTFYGEIVDGENKGKLKIKTLLDTSFDVKKIEDKVLDKSIRTILINYLKQDKYKNLSKPHEEAFSPNGIIEMNKNIISLNNNIPHKPIKRVTLKHEKGKKFSIKTLLDKKTKFAKSATGTNVFFCIYKNINGKIKYHTPSFEEIIEIQKQEFEIKYKSKLNVPETLFDKKESFELLFYLQPNDLVYLPNDEELKNRQLIDFNNLNKKQIKRIYKFTDGSGTTANFIPYQVAKVIFNLNKKEQAKSSFKYPIQNEFGVGSPQSKNQKSIEGILIKERCIKLKIDRLGNISKA

SEQ ID NO: 221 - protein, 1473 aa, Flavobacterium branchiophilum
MAKILGLDLGTNSIGWAVVERENIDFSLIDKGVRIFSEGVKSEKGIESSRAAERTGYRSARKIKYRRKLRKYETLKVLSLNRMCPLSIEEVEEWKKSGFKDYPLNPEFLKWLSTDEESNVNPYFFRDRASKHKVSLFELGRAFYHIAQRRGFLSNRLDQSAEGILEEHCPKIEAIVEDLISIDEISTNITDYFFETGILDSNEKNGYAKDLDEGDKKLVSLYKSLLAILKKNESDFENCKSEIIERLNKKDVLGKVKGKIKDISQAMLDGNYKTLGQYFYSLYSKEKIRNQYTSREEHYLSEFITICKVQGIDQINEEEKINEKKFDGLAKDLYKAIFFQRPLKSQKGLIGKCSFEKSKSRCAISHPDFEEYRMWTYLNTIKIGTQSDKKLRFLTQDEKLKLVPKFYRKNDFNFDVLAKELIEKGSSFGFYKSSKKNDFFYWFNYKPTDTVAACQVAASLKNAIGEDWKTKSFKYQTINSNKEQVSRTVDYKDLWHLLTVATSDVYLYEFAIDKLGLDEKNAKAFSKTKLKKDFASLSLSAINKILPYLKEGLLYSHAVFVANIENIVDENIWKDEKQRDYIKTQISEIIENYTLEKSRFEIINGLLKEYKSENEDGKRVYYSKEAEQSFENDLKKKLVLFYKSNEIENKEQQETIFNELLPIFIQQLKDYEFIKIQRLDQKVLIFLKGKNETGQIFCTEEKGTAEEKEKKIKNRLKKLYHPSDIEKFKKKIIKDEFGNEKIVLGSPLTPSIKNPMAMRALHQLRKVLNALILEGQIDEKTIIHIEMARELNDANKRKGIQDYQNDNKKFREDAIKEIKKLYFEDCKKEVEPTEDDILRYQLWMEQNRSEIYEEGKNISICDIIGSNPAYDIEHTIPRSRSQDNSQMNKTLCSQRFNREVKKQSMPIELNNHLEILPRIAHWKEEADNLTREIEIISRSIKAAATKEIKDKKIRRRHYLTLKRDYLQGKYDRFIWEEPKVGFKNSQIPDTGIITKYAQAYLKSYFKKVESVKGGMVAEFRKIWGIQESFIDENGMKHYKVKDRSKHTHHTIDAITIACMTKEKYDVLAHAWTLEDQQNKKEARSIIEASKPWKTFKEDLLKIEEEILVSHYTPDNVKKQAKKIVRVRGKKQFVAEVERDVNGKAVPKKAASGKTIYKLDGEGKKLPRLQQGDTIRGSLHQDSIYGAIKNPLNTDEIKYVIRKDLESIKGSDVESIVDEVVKEKIKEAIANKVLLLSSNAQQKNKLVGTVWMNEEKRIAINKVRIYANSVKNPLHIKEHSLLSKSKHVHKQKVYGQNDENYAMAIYELDGKRDFELINIFNLAKLIKQGQGFYPLHKKKEIKGKIVFVPIEKRNKRDVVLKRGQQVVFYDKEVENPKDISEIVDFKGRIYIIEGLSIQRIVRPSGKVDEYGVIMLRYFKEARKADDIKQDNFKPDGVFKLGENKPTRKMNHNQFTAFVEGIDFKVLPSGKFEKI

SEQ ID NO: 222 - protein, 1459 aa, Flavobacterium columnare
MKFNLGLDIGTNSIGWALVNEDYENKKGKIIAAGSRIIPMTQDILDKFGSGAITETQTALRTDYRSKRKLIQRFLLRRERLHRVLNVLDFLPKHYAESIDFEKYFGKFLPNTEPKLAYNQNQFIFQNSFLEMLKEFQEKHPELLTNNKKIPYDWTIYYLRKKALNQRIEKEELAWLLLQFNQKRGYNQLRDEEEESVPNKQVEFYSLKIIDVVADQPKEGRDKRWYSINLENGWTYRRESKTPLFNWEGKTKDFIVTTDLNQDGSIKKDKEGKEKRSFRAPSEGDWTLLKKKTEKEIYESGKTLGTYIYDALLNTPDLKIKGDFIRTIDRSIYKEELQQIINKQKEYHLELNSSKLYKACLEELYPKNEIYKSALKNKDIAYLFINDILYYQRPLKAPKYNIGKCTYESRTFKKEDKKIREYIPAVAKSHPLFQEFRLWQWIKNLKIYEKLSSDNCTDFFLTNEQDFENLFEFLWNKKEIDHKGILEYLVKTKFPDLKPKQVKTKVKEYRWNYVYDHEKDESKTYPCGETYFLLKNKLDKIYNAQDDFLDKERLYNLWHIIYSVTDKKQYEKALAKFALKNHLDTKSFVNTFKRIPPFKNDYAIYSLKAIKKLLPLMRVGKYWNYDDIDPITKQKIQCIITGEENDTISTLVREKTNHFSNENDFKNLPLWLAGYIVYNSHNESSEIEKWKSPQDIDTFLKKFKQHALRNPIVEQVVTETLRVVRDIWSKKGQGKKDFFNEIHIELGKDLKNPVDKRRKLSSTNTKNESTNTRIKALLIELFTQGVENVKPNSPKHQEILKIFEEGALNSGIEIEEDIIKISNTDQPTKKQLELYILWLEHKYKSPYTGQSIPLSKLFTPNYEIEHIIPRSKYYDDNLSNKVICETEINRLKNNQLGYEFINNHEIREVTLEEGKTIRLLSPEQYWNFVTTYYAKNKAKRENLLLKELPVQMVEKQLNDTRYVSKYVMQLLSKIVRKEDGTDNGINSTNILSISGKMTRALKNDWDLNDVWNDLLLYRFERLNTITKTNLFTTYSEQKQKRMPIVPDQYAKGFHKKRLDHRHHALDAIVIACITRNHINYMNNQNIQGEKLKKNAIEKENYREILQKSRLDIRAQLCEKKYNDNDPTKYNWVFIKPWADFTENTKDILESIIPSFKQNLRIINKTVNYYEKYNENGKKVKVRQIKGDNWAIRKPLHKETISGKVHLSYKTPAKGKILTATRKVLDSSMDFKSIEKITDTGIQKILKNYLEYKKSPELAFSPEGIEELNATITKYNNGFHHKPIYKVRIYEEGVKFPLGNKGNKKSKYVEAEKGTNLFFAIYKDQENNRYFETIPFNDVLETLKKGMSAVPEKNQEENTLVFALSPQDLVFVPTLDEIENPDIVDFKNLTKDQTNRIYKMVSSSGKQCFFIKAEVATSIVNKMEFSTSNKMENSIEGIQIKSNCWKLKLDRLGTITRVIK

SEQ ID NO: 223 - protein, 1535 aa, Flavobacterium columnare
MTKILGLDLGTNSIGWAIRDTENEGINQILDKGARIFSEGVKSENGKEISRAAERTAYRSARKIKYRRKLRKYETLKVLSINGMCPLSVEEVEQWKKSGFKEYPLNPEFLDWLRTNEDKNINPYLFRDKASKQKVTLFELGRALYHIAQRRGFLSNRLDQSAEGVFEEHNPQIQNLIEDLDSSNTILNELKEYYINLGIIDETEKSGFKKDLDEGEKKLKSLYNSLVAITKKNANDIETCKQELIARLNKKEDLGKVKGKIKDISQAMLDRNFKTLGQYFFSLYNKERIRNQYTSREEHYLEEFIIICQTQGIEGINTNEKLPEKKFTGLAKDLYRAIFFQRPLKSQKGLIGKCSFEKNKSRCAVSHPDYEEFRMWSYLNTIKIGTQSEKTLRFLTLEEKLKLVPKFYRKSDFNFEVLAKELVEKGASFGYYKSSKKNEFFYWFNYKPTDSVSACVVSASLENAIGKDWKIKTFEYQTRNTEKNEVTKSVDYKDLWHLLSVATSDTYLYDFAIEKLKLEPKNAKAFSKTKLKKDFASLSLAAIAKILPYLKQGLLYSHAVFMANIENIVDADIWKDEEQQKFIQSKIVELVDNYIVEKSKLELINGLLKIYNTEDKEGRKVYYSKEAESLFEADLRKKLVPFYKANIIIEEHEQEIIFQDLFPILMDQLKKQEFIKIGRLDKQIEAFLEGENEEGQIFCNHTDKLKKLYHPSDIEVFKKKTIKDEWGNEKVVLGSPLTTSIKNPMAMRALHQLRKVLNTLIANDQIDEDTRIHIEMARELNDANKRKGIQDFQNENKKFREEAIKEIKKLYLEECHKDVNPTEDDILRYQLWLEQGKCEIYEEGNNISICDIIGSNPSYDIEHTIPRSISQDNSQMNKTLCSLKFNRSIKKQKMPVELSNYNDILPRIAHWKKEAEELTRQIETISRSIKSAATKVAKDKNIRKRHYLTLKRDYILGKYERFTWEEPKVGFKNSQIPDTGIITKYAQAYLKSYFKRVESVKGGAVAEFRKLWGIQESFIDENWWKHYKDKDRDKHTHHTIDAITIACMPKDKYDLLAHAWRLEDEQDKKAAKVLIEQAKPWKTFKEDIEKIETEILVSHFTPDNVKKQSKSIIKNRGKKVYVLKNELPVNFKNKIEGKDYFKLKFDSKILYKIPKKKEKQTDTFYEELPKNYLNGVEGKDYFKINTTGKTFYKIPIFNQGDTIRGSLHQETTYGAIKLPDIDIETKKPLHTDKGGFILKKDIKGNEIVFFVVRKEISKISENDVQNIVDNVVRKKIENAIANSLITFKIVKKKKVAVIKEGVTIWMREPNIEKGIEGIPIKKVRIITNSVKNPIEIKVHSPLSKSRHKHKQKVYGQNDENYAMALYELDGKREFELINNFNLAKLLKQSQSYYPLHKEKEIKGKKILVPIEKRNNKDVILKRGQQVVFYDKTVENPKDISEIIDFRERIYIIEGLTIQRQKDKKTSKVNEYGIIQLRHFKEARKSEEISKDNFKPDGEFKINENKPTRKMNHNQFTAFVEGIDFKVLPSGKFQKI

SEQ ID NO: 224 - protein, 1354 aa, Flavobacterium psychrophilum
  Flavobacterium psychrophilum JIP02/86
MKKILGLDLGTNSIGWAFINEAENEIEVSSIVNTGVRIVPLTTDEESDFKKGNTISINADRTLKRGARRGLQRFKQRREALLETFNRIKFIATDFVYAETGAATTFSSYQLRAKSAVEAVTKEELVKVLLMLNKKRGYKSSRKAKTAEEGDAIDGMKIAKEIFENNLTPGQWVYNSLSKGGKFIPDFYHSDLQKELEKIVRFQNQFHSEQINDKLLADIQGKSRTQTSQHFSKTLNIPLAENKGTREETKLQHYQWRNEALANELDMKILAFIITEINNQINQSSGYLGAISDRSKELYFNQETVGQYQYKQLQENVHAKLKNQVFYRQDYLDEFEKIWETQAKFHSELNEKLKAEIRDITIFYQRKLKSQKHLVSFCEFEKGHKAIPKSSPLFQEFRIWQNLNNVVVKNETTKEVFELSEELKQLIAEELQFKESMTDVQMLTFCELKKGTHTVNFKKIEGNRTNTSIYKAFEKILEVEGYEIDFSKMKPLEIKETVAPIFETLNINTVILDFDPTIQGNDFDKQPYYQLWHLLYSAEDDDKLKETLKTKFGFKENHLPFILNINLQADYGSLSAKAIKKILPHLMDGHIYDKACLMVGYNHSSSLTTAQNNDRVLKDTLELLKKNSLRNPVVEKILNQMINVINAIMKDPAMGKPDEIRVELARELKANNEQRKKATSDINTATTEHERIRKLLHSEFNIPRVTRNDIIRYKLWLETGGISLYTGNPIKASDLFSKNYDIEHIIPKSRLFDDSFSNKTLCERQLNIDKSNKTAYSFLQEKLSENDFAAYENRVKDLFKTGKIKSYTKYKKLLMADNEIPEGFIDRQLRETQYIAKKAKEILLEVSRNVTATIGSVTDKLRQDWELVDVMKELNWEKYDKLGLTHIEEGKNGERLSKIKDWTKRNDHRHHAMDAITVAFTKPAYIQYLNNLNAKTQGENKANSIIGIENKHLYRDKNNKLRFISPMKNFREEAKKQLESILISYKAKNKVVTKNKNTTKKSGGTNQKIQLTPRGRLHKETVYGKLQQYATKEEKVNASFTEDYIQKVAKKEYREALLKRLEENDNDPKKAFTGKNALNKTPIYISLKDNIIVPEKVKTVWLETDYTIRKDITPDLKIDKVIDVGIKRILQNRLNEFNGDPKKAFVNLGESPIWLNKEKGIAIKRVTISGVSNAQALHTKKDHLGNEILDKNGNPIPVDFISTGNNHHVAIYRDEKGNLQEEVVSFYDAVIRRNLGLSVINKNHEKGWEFLFSMKQNEFFIFPSDGFNPHEIDLLNPNNYHLISPNIFRVQKISTKNYMFNHHLETKAVDGEMLKSKKELSKTSYHFIQTPTNLNGIIKVRINHLGKIVHLGEY

SEQ ID NO: 225 - protein, 1458 aa, Fluviicola taffensis
MTKTILGLDLGTNSIGWALINQDFDNKKGEILGMGSRIIPMTQDIKDEFGKGNSISQTAERTRLRGVRRLIHRTLLRRERLHRVLNIIGFLPEHYANQIDFEKRFGKFKPESEPKISFDGNDVFLFEKSYQEMLVDFKIHQPQLVSNGKKIPHDWTIYYLRKKALSKKIEKEELAWILLNFNQKRGYYQLRGEEEEETPNKLVEFHSLKIVEVNADEPQKGKPEIWYSLVLENGWVYRRASKTPLFDWKDKIREFIVTTEINNDGTVKTDKEGTEKRSFRAPKPEDWTLQKKKTEFELSKSGNEVGAFIYESILQKPNQKIRGKLISTIERKFYKEELKTILKTQLFFHKELKDEKLYNACIEELYKNNEAHRSLLSNKGFEHLFINDILFYQRPLRSKKSQISNCPLEKRTYKKEGIEITEGIKVISKSNPIYQEFRLWQWISNLSLYCIEPTETNVTSTFLNSIEDYENLFEFLNNRKEIEQKHLLKYLLENQGFKGKLLTNELEKFRWNFVADKKYPCNETGSLLHTRLSKVKNISPDFLTKEIEHQLWHIIYSVTDKIEYEQALKTFARKNNLDVDSFFEHFKKIPPFESTYGAYSEKAIKKLLPLIRLGKYWNWEAIDSISKDRISKILSGEYDENIKNRVREKAVHLTSENNFQGLQEWLAKYIVYDRHSEGNDLGKWTSVSDLETYLKEFKQHSLRNPIVEQVITETLRVVKDIWIKHGKGTENFFDEIHVELGREMKNNSEDRKRLTNTITENENTNLRIKALLMEMMNDNDVENVRPYSPSQQEILKIYEDGALNSNIELDDEIVKISKKAEPTKSELQRYKLWLEQKYRSPYTGQVIPLNKLFTSEYEIEHVVPQSRFFDDSFSNKVICESAVNKRKDNQLGLQFIKNHSGEKVELGFGKVVQVFTEEQYLDFVKEHYSKNRSKHNKLLLEEIPEKMIERQLNDTRYISKFVSSILSNIVRSEKDDDGLNSKNILPGNGKITTELKRDWGLNDVWNDLILPRFERMNTITNSDLFTTYNDKYQKHLPTVPFEYSKGFQKKRIDHRHHAMDALVIACATRDHLNLMNNQSAKSELKRYDLQNKLRKKEPYFNQKENKQKEAFKDFIKPWGTFTEDSKNALEKIIISFKQNLRVINKATNSYESYKDEDGNLRIGKDGKPEKGLIKQKGLNWAIRKPLHKDTVSGQINLSRIKLPNGKILTATRKNLDTSFDLKTIENSITDTGIQKILKNYLLSKESPELAFSPEGLEEMNNEIEKYNNGKFHHPINKARIYELGSKFNVGQTGNRRDKFVEAAKGTNLFFAIYQDENKNRSYETIPLNEVIEHQKWRASLPKEEQEKIPLVPVNKLKGTFIFSLSPNDLVYVPSNDELERSASIDFSKLKKEQINRLYKMVSSSGSQCFFVKSEVATSVVNKMEYSSLNKMEKSIDNLMVKEICIKLKIDRLGNISKA

SEQ ID NO: 226 - protein, 1646 aa, Francisella tularensis
MNIKILPIAIDLGAKNTGVFSAFYQKGTSLESLDNKNGKVYELSKDSYTLLMNNRTARRHQRRGIDRKQLVKRLFKLIWTKQLNLEWNKDTQQTISFLLNRRGFSFITDGYSPEYLNIAPEAVKAILMSILDDYNGEDDLDSYLQSATENDSKIDELYNKLLQKALEFKLRKLCIDIKEDKVTTKTLKELSNTEFKLLANYLVDYDRILRTQKFSYTDKQGNLRELNYYHHDKYNIQEFLKRNIIINDVILEKLTDDLDIWNLNFDKFDFEKNLEKLENQEDKDYLQTHLHHFVFAVNKIKSEMASGGRHRSQYFQEITNVLVENNHQEGYLKNFCENLHNKKYSNLSVKNLVNLIGNLSNLELKPLRKYFNDKIHAKADYWDEQKFAETYSDWILGEWRVGAKDKDKKDGAKYSYKNLCDELKQKVGINQDGIINQTKSDFVDFLLELDPCRTIPPYLDNNNRKPPKCQSLILNPKFLDNKYPNWQQYLQELKKLQTVQNYLGNFEIDLKDLKSSKEQPYFVKYKSLNQQIASGQRDYKDLDARVLQFIFDRVKASDELLLNEIYSHAKKLKQNTSSELEKLELCKKLDEVIANSQLSQILKSQHVNGIFEQGTFLHLVCKYYKQRQRARDSRLYIMPEYRYDKKLDKYNNTGRFDDDNQLLTYCNHKPRQKRYQLLNDLAGVLQVSPNFLKDKIGSDDDLFISKWLVEHIRGFKKACEDSLKIQKDNRGLLNHKINIARNTKGKCEKEIFNLICKIEGSEDKKGNYKHGLAYELGVLLFGEPNQASKLEFDRKIKKFNSIYSFAQIQQIAFAERKGNANTCAVCSADNAHRMQQIKVAKPVEGNKDNIILSAKAQRLPAIPTRIVDGAVKKIATILARNIVDDNWDNIKQALSNNQQLHVPIITESNAFEFEPALADIKGKSLKDKRKKALERIDPENVFKDKNNRIKEFAKGISAYSDANLANGDFDGAKEELDHIIPRSHKKYGTLNDEANLICVTREDNQNRGNKAVFLYDLKPNYKLKQFNTTDDLEIEKKIADTIWDASKQDFKFGNYRSFINLTPQEQIAFRHALFLADKNPIKKAVIRAIDNRNRTFVNGTQRYFAEVLANNIYLRAKKENLATNRITFDYFGIETTNSNGRGIADVRKLYEKVDSDIQAYAKGDKPQDSYSHLIDAMIAFCVAADEHKNEGSIGLKMGNQYGLFPTPDKYDENTGEIISWHNDDIFRKIKVSDNQFSDKKLVRKKATEGFNTHRQMTRDGIYGESYLPILIHKNLNEVRKGYNWENSEEIKIFKGKKYDIQQLNNLVYCLKFVDKPISIDIQITTLEELRNILETNNISTTAEYYYINLKTQKLHEYYIENYNTALGYKKYTKEMEFLRSLAYRTERVKIKSIDDVSMILAKDSNFKAGKIELPFKTEWQRLYLEWQNTTIKDNHEFLKSYFSVKNATKQHKKVRKDFSLPISTNEGKLLVKRKTWDNNFIYQILNDSDSRADGTKPFIPAFDISKNEIVETIIKSFTSKNIFWLPKNIELQKVDNKSIFAIDTSRWFEVETPKDLIEIGVSTIQYKIDNNSRPKVRVKLDYVMDDDSKINYFMNHSLLKSRYPDKVLEILKQSTIIEFESSGFNKTIKEMLGMTLAGIYNETSNN

SEQ ID NO: 227 - protein, 1629 aa, Francisella tularensis
MNFKILPIAIDLGVKNTGVFSAFYQKGTSLERLDNKNGKVYELSKDSYTLLMNNRTARRHQRRGIDRKQLVKRLFKLIWTEQLNLEWDKDTQQAISFLFNRRGFSFITDGYSPEYLNIVPEQVKAILMDIFDDYNGEDDLDSYLKLATEQESKISEIYNKLMQKILEFKLRKLCTDIKDDKVSTKTLKEITSYEFELLADYLANYSEILKTQKFSYTDKQGNLKELSYYHHDKYNIQEFLKRHATINIQILDTLLTDDLDIWNFNFEKFDFDKNEEKLQNQEDKDHIQAHLHHFVFAVNKIKSEMASGGRHRSQYFQEITNVLDENNHQEGYLKNFCENLHNKKYSNLSVKNLVNLIGNLSNLELKPLRKYFNDKIHAKADHWDEQKFTETYCHWILGEWRVGVKDQDKKDGAKYSYKDLCNELKQKVTKAGLVDFLLELDPCRTIPPYLDNNNRKPPKCQSLILNPKFLDNQYPNWQQYLQELKKLQSIQNYLESFETDLKVLKSSKDQPYFVEYRSSNQQIASGQRDYKDLDARILQFIFDRVKASDELLLNEIYFQAKKLKQKASSELEKLESSKKLDEVIANSQLSQILKSQHTNGIFEQGTFLHLVCKYYKQRQRARDSRLYIMPEYRYDKKLHKYNNTGRFDDDNQLLTYCNHKPRQKRYQLLNDLAGVLQVSPNFLKDKIGSDDDLFISKWLVEHIRGFKKACEDSLKIQKDNRGLLNHKINIARNTKGKCEKEIFNLICKIEGSEDKKGNYKHGLAYELGVLLFGEPNEASKPEFDRKIKKFNSIYSFAQIQQIAFAERKGNANTCAVCSADNAHRMQQIKITEPVEDNKDKIILSAKAQRLPAITTRIVDGAVKKMATILAKNIVDDNWQNIKQVLSAKHQLHIPIITESNAFEFEPALADVKGKSLKDRRKKALERISPENIFKDKNNRIKEFAKGISAYSGANLTDGDFDGAKEELDHIIPRSHKKYGTLNDEANLICVTRGDNKNKGNRIFCLRDLANNYKLKQFETTDDLEIEKKIADTIWDANKKDFKFGNYRSFINLTPQEQKAFRHALFLADENPIKQAVIRAINNRNRTFVNGTQRYFAEVLANNIYLRAKKENLNTDKISFDYFGIPTIGNGRGIAEIRQLYEKVDSDIQAYAKGDKPQASYSHLIDAMLAFCIAADEHRNDGSIGLEIDKNYSLYPLDKNTGEVFTKDIFSQIKITDNEFSDKKLVRKKATEGFNTHRQMTRDGIYAENYLPILIHKELDEVRKGYTWKNSEEIKIFKGKKYDIQQLNNLLYCLKFVDKPISIDIQISTLEELRNILTTNNIAATAEYYYINLKTQKLHEYYIENYNTALGYKKYTKEMEFLRSLAYRSERVKIKSIDDVKQVLDKDSNFIIGKITLPFKKEWQRLYREWQNITIKDDYEFLKSFFNVKSITKLHKKVRKDFSLPISTNEGKFLVKRKTWDNNFIYQILNDSDSRVDGTKPFIPAFDISKNEIVEAIIDSFTSKNIFWLPKNIELQKVDNKNIFAIDTSKWFEVETPSDLRDIGVATIQYKIDNNSRPKVRVKLDYVIDDDSKINYFTNHSLLKSRYPDKVLEILKQSTIIEFESSGFNKTIKEMLGMTLAGIYNETSNN

SEQ ID NO: 228 - protein, 1629 aa, Francisella novicida
  Francisella novicida FTG
MNFKILPIAIDLGVKNTGVFSAFYQKGTSLERLDNKNGKVYELSKDSYTLLMNNRTARRHQRRGIDRKQLVKRLFKLIWTEQLNLEWDKDTQQAISFLFNRRGFSFITDGYSPEYLNIVPEQVKAILMDIFDDYNGEDDLDSYLKLATEQESKISEIYNKLMQKILEFKLMKLCTDIKDDKVSTKTLKEITSYEFELLADYLANYSESLKTQKFSYTDKQGNLKELSYYHHDKYNIQEFLKRHATINDRILDTLLTDDLDIWNFNFEKFDFDKNEEKLQNQEDKDHIQAHLHHFVFAVNKIKSEMASGGRHRSQYFQEITNVLDENNHQEGYLKNFCENLHNKKYSNLSVKNLVNLIGNLSNLELKPLRKYFNDKIHAKADHWDEQKFTETYCHWILGEWRVGVKDQDKKDGAKYSYKDLCNELKQKVTKAGLVDFLLELDPCRTIPPYLDNNNRKPPKCQSLILNPKFLDNQYPNWQQYLQELKKLQSIQNYLDSFETDLKVLKSSKDQPYFVEYKSSNQQIASGQRDYKDLDARILQFIFDRVKASDELLLNEIYFQAKKLKQKASSELEKLESSKKLDEVIANSQLSQILKSQHTNGIFEQGTFLHLVCKYYKQRQRARDSRLYIMPEYRYDKKLHKYNNTGRFDDDNQLLTYCNHKPRQKRYQLLNDLAGVLQVSPNFLKDKIGSDDDLFISKWLVEHIRGFKKACEDSLKIQKDNRGLLNHKINIARNTKGKCEKEIFNLICKIEGSEDKKGNYKHGLAYELGVLLFGEPNEASKPEFDRKIKKFNSIYSFAQIQQIAFAERKGNANTCAVCSADNAHRMQQIKITEPVEDNKDKIILSAKAQRLPAIPTRIVDGAVKKMATILAKNIVDDNWQNIKQVLSAKHQLHIPIITESNAFEFEPALADVKGKSLKDRRKKALERISPENIFKDKNNRIKEFAKGISAYSGANLTDGDFDGAKEELDHIIPRSHKKYGTLNDEANLICVTRGDNKNKGNRIFCLRDLADNYKLKQFETTDDLEIEKKIADTIWDANKKDFKFGNYRSFINLTPQEQKAFRHALFLADENPIKQAVIRAINNRNRTFVNGTQRYFAEVLANNIYLRAKKENLNTDKISFDYFGIPTIGNGRGIAEIRQLYEKVDSDIQAYAKGDKPQASYSHLIDAMLAFCIAADEHRNDGSIGLEIDKNYSLYPLDKNTGEVFTKDIFSQIKITDNEFSDKKLVRKKAIEGFNTHRQMTRDGIYAENYLPILIHKELNEVRKGYTWKNSEEIKIFKGKKYDIQQLNNLVYCLKFVDKPISIDIQISTLEELRNILTTNNIAATAEYYYINLKTQKLHEYYIENYNTALGYKKYSKEMEFLRSLAYRSERVKIKSIDDVKQVLDKDSNFIIGKITLPFKKEWQRLYREWQNTTIKDDYEFLKSFFNVKSITKLHKKVRKDFSLPISTNEGKFLVKRKTWDNNFIYQILNDSDSRVDGTKPFIPAFDISKNEIVEAIIDSFTSKNIFWLPKNIELQKVDNKNIFAIDTSKWFEVETPSDLRDIGVATIQYKIDNNSRPKVRVKLDYVIDDDSKINYFTNHSLLKSRYPDKVLEILKQSTTIEFESSGFNKTIKEMLGMTLAGIYNETSNN

SEQ ID NO: 229 - protein, 1629 aa, Francisella novicida
  Francisella novicida GA99-3548
MNFKILPIAIDLGVKNTGVFSAFYQKGTSLERLDNKNGKVYELSKDSYTLLMNNRTARRHQRRGIDRKQLVKKLFKLIWTEQLNLEWDKDTQQAISFLFNRRGFSFITDGYSPEYLNIVPEQVKAILMDIFDDYNGEDDLDSYLKLATEQESKISEIYNKLMQKILEFKLRKLCTDIKDDKVSTKTLKEITSYEFELLADYLANYSESLKTQKFSYTDKQGNLKELSYYHHDKYNIQEFLKRHATINDEILDTLLTDDLDIWNFNFEKFDFDKNEEKLQNQEDKDHTQAHLHHFVFAVNKIKSEMASGGRHRGQYFQEITNVLDENNHQEGYLKNFCENLHNKKYSNLSVKNLVNLIGNLSNLELKPLRKYFNDKIHAKADHWDEQKFTETYCHWILGEWRVGLKDQDKKEGAKYSYKDLCNELKQKVTNAGLIDFLLELDPCRTIPPYLDNNNRKPPKCQSLILNPKFLDNQYPNWQQYLQELKKLQIIQDYLESFETDLKVLKSSKDQPYFVEYKSSNQQIASGQRDYKDLDARILQFIFDRVKASDELLLNEIYFQAKKLKQKASSELEKLESSKKLDEVIANSQLSKILKSQHTNGIFEQGTFLHLVCKYYKQRQRARDSRLYIMPEYRYDKKLDKYNNTGRFDDDNQLLTYCNHKPRQKRYQLLNDLAGVLQVSPNFLKDKIGSDDDLFISKWLVEHIRGFKKACEDSLKIQKDNRGLLNHKINIARNTKGKCEKEIFNLICKIEGSEDKKGNYKHGLAYELGVLLFGEPNEASKPEFDRKIKKFNSIYSFAQIQQIAFAERKGNANTCAVCSADNAHRMQQIKITEPVEDNKDKIILSAKAQRLPAIPTRIVDGAVKKMATILAKNIVDDNWQNIKQVLSAKHQLHIPIITESNAFEFEPALADVKGKSLKDRRKKALERISPENIFKDKNNRIKEFAKGISAYSGANLTDGDFDGAKEELDHIIPRSHKKYGTLNDEANLICVTRDDNKNKGNRIFCLHDLANNYKLKQFETTDDLEIEKKIADTIWDASKKDFKFGNYRSFINLTPQEQKAFRHALFLADENPIKQAVIRAINNRNRTFVNGTQRYFAEVLANNIYLRAKKENLNTDKISFDYFGIPTIGNGRGIAEIRQLYEKVDSDIQVYAKGDKPQASYSHLIDAMLAFCIAADEHRNDGSIGLEIDKNYSLYPLDKNTGEVFTKDIFSQIKITDNEFSDKKLVRKKATEGFNTHRQMTRDGIYAENYLPILIHKELDEVRKGYTWKNSEEIKIFKGKKYDIQQLNNLLYCLKFVDKPISIDIQISTLEELRNILTTNNIAATAEYYYINLKTQKLHEYYIENYNTALGYKKYTKEMEFLRSLAYRSERVKIKSIDDVKQVLDKDSNFIIGKITLPFKKEWQRLYREWQNTTIKDDYEFLKSFFNVKSITKLHKKVRKDFSLPISTNEGKFLVKRKTWDNNFIYQILNDSDSRVDGTKPFIPAFDISKNEIVEAIIDSFTSKNIFWLPKNIELQKVDNKNIFAIDTSKWFEVETPSDLRDIGVATIQYKIDNNSRPKVRVKLDYVIDDDSKINYFTNHSLLKSRYPDKVLEILKQSTIIEFESSGFNKTIKEMLGMTLAGIYNETSNN

SEQ ID NO: 230 - protein, 1629 aa, Francisella tularensis; identical to SEQ ID NO: 30

SEQ ID NO: 231 - protein, 1629 aa, Francisella novicida
  Francisella novicida GA99-3549
MNVKILPIAIDLGVKNTGVFSAFYQKGTSLERLDNKNGKVYELSKDSYTLLMNNRTARRHQRRGIDRKQLVKRLFKLIWTEQLNLEWDKDTQQAISFLFNRRGFSFITDGYSPEYLNIVPEQVKAILMDIFDDYNGEDDLDSYLKLATEQESKISEIYNKLMQKILEFKLRKLCTDIKDDKVSTKTLKEITSYEFELLADYLANYSEILKTQKFSYTDKQGNLKELSYYHHDKYNIQEFLKRHATINDEILDTLLTDDLDIWNFNFEKFDFDKNEEKLQNQEDKDHTQAHLHHFVFAVNKIKSEMASGGRHRGQYFQEITNVLDENNHQEGYLKNFCENLHNKKYSNLSVKNLVNLIGNLSNLELKPLRKYFNDKIHAKADHWDEQKFTETYCHWILGEWRVGVKDQDKKDGAKYSYKDLCNELKQKVTKAGLVDFLLELDPCRTIPPYLDNNNRKPPKCQSLILNPKFLDNQYPNWQQYLQELKKLQSIQNYLESFETDLKVLKSSKDQPYFVEYKSSNQQIASGQRDYKDLDARILQFIFDRVKASDELLLNEIYFQAKKLKQKASSELEKLESSKKLDEVIANSQLSQILKSQHTNGIFEQGTFLHLVCKYYKQRQRARDSRLYIMPEYRYDKKLDKYNNTGRFDDDNQLLTYCNHKPRQKRYQLLNDLAGVLQVSPNFLKDKIGSDDDLFISKWLVEHIRGFKKACEDSLKIQKDNRGLLNHKINIARNTKGKCEKEIFNLICKIEGSEDKKGNYKHGLAYELGVLLFGEPNEASKPEFDRKIKKFNSIYSFAQIQQIAFAERKGNANTCAVCSADNAHRMQQIKITEPVEDNKDKIILSAKAQRLPAIPTRIVDGAVKKMATILAKNIVDDNWQNIKQVLSAKHQLHIPIITESNAFEFEPALADVKGKSIKDRRKKALERISPENIFKDKNNRIKEFAKGISAYSGDNLASGDFDGAKEELDHIIPRSHKKYGTLNDEANLICVTRDDNKNKGNRIFCLHDLANNYKLKQFETTDDLEIEKKIADTIWDASKKDFKFGNYRSFINLTPQEQKAFRHALFLADENPIKQAVIRAINNRNRTFVNGTQRYFAEVLANNIYLRAKKENLNTDKISFDYFGIPTIGNGRGIVEIRQLYEKVDSDIQAYAKGDKPQASYSHLIDAMLAFCIAADEHRNDGSIGLEIDKNYSLYPLDKNTGEVFTKDIFSQIKITNNEFSDKKLVRKKATEGFNTHRQMTRDGIYAENYLPILIHKELDEVRKGYTWGNSEELKIHKGKKYDIQQLNNLVYCLKFIDKSISIDIQISTLEELRNILTTNNIATTAEYYYINLKTQKLHEYYIENYNTALGYKKYTKEMEFLRSLAYRSERVKIKSIDDVKQVLDKDSNFIIGKITLPFKKEWQRLYREWQNTTIKDDYEFLKSFFNVKSITKLHKKVRKDFSLPISTNEGKFLVKRKTWDNNFIYQILNDSDSRVDGTKPFIPAFDISKNEIVEAIIDSFTSKNIFWLPKNIELQKVDNKNIFAIDTSKWFEVETPSDLRDIGVATIQYKIDNNSRPKVRVKLDYVIDDDSKINYFTNHSLLKSRYPDKVLEILKQSTIIEFESSGFNKTIKEMLGMTLAGIYNETSNN

SEQ ID NO: 232 - protein, 1323 aa, Fructobacillus fructosus
  Fructobacillus fructosus KCTC 3544
MVYDVGLDIGTGSVGWVALDENGKLARAKGKNLVGVRLFDTAQTAADRRGFRTTRRRLSRRKWRLRLLDELFSAEINEIDSSFFQRLKYSYVHPKDEENKAHYYGGYLFPTEEETKKFHRSYPTIYHLRQELMAQPNKRFDIREIYLAIHHLVKYRGHFLSSQEKITIGSTYNPEDLANAIEVYADEKGLSWELNNPEQLTEIISGEAGYGLNKSMKADEALKLFEFDNNQDKVAIKTLLAGLTGNQIDFAKLFGKDISDKDEAKLWKLKLDDEALEEKSQTILSQLTDEEIELFHAVVQAYDGFVLIGLLNGADSVSAAMVQLYDQHREDRKLLKSLAQKAGLKHKRFSEIYEQLALATDEATIKNGISTARELVEESNLSKEVKEDTLRRLDENEFLPKQRTKANSVIPHQLHLAELQKILQNQGQYYPFLLDTFEKEDGQDNKIEELLRFRIPYYVGPLVTKKDVEHAGGDADNHWVERNEGFEKSRVTPWNFDKVFNRDKAARDFIERLTGNDTYLIGEKTLPQNSLRYQLFTVLNELNNVRVNGKKFDSKTKADLINDLFKARKTVSLSALKDYLKAQGKGDVTITGLADESKFNSSLSSYNDLKKTFDAEYLENEDNQETLEKIIEIQTVFEDSKIASRELSKLPLDDDQVKKLSQTHYTGWGRLSEKLLDSKIIDERGQKVSILDKLKSTSQNFMSIINNDKYGVQAWITEQNTGSSKLTFDEKVNELTTSPANKRGIKQSFAVLNDIKKAMKEEPRRVYLEFAREDQTSVRSVPRYNQLKEKYQSKSLSEEAKVLKKTLDGNKNKMSDDRYFLYFQQQGKDMYTGRPINFERLSQDYDIDHIIPQAFTKDDSLDNRVLVSRPENARKSDSFAYTDEVQKQDGSLWTSLLKSGFINRKKYERLTKAGKYLDGQKTGFIARQLVETRQIIKNVASLIEGEYENSKAVAIRSEITADMRLLVGIKKHREINSFHHAFDALLITAAGQYMQNRYPDRDSTNVYNEFDRYTNDYLKNLRQLSSRDEVRRLKSFGFVVGTMRKGNEDWSEENTSYLRKVMMFKNILTTKKTEKDRGPLNKETIFSPKSGKKLIPLNSKRSDTALYGGYSNVYSAYMTLVRANGKNLLIKIPISIANQIEVGNLKINDYIVNNPAIKKFEKILISKLPLGQLVNEDGNLIYLASNEYRHNAKQLWLSTTDADKIASISENSSDEELLEAYDILTSENVKNRFPFFKKDIDKLSQVRDEFLDSDKRIAVIQTILRGLQIDAAYQAPVKIISKKVSDWHKLQQSGGIKLSDNSEMIYQSATGIFETRVKISDLL

SEQ ID NO: 233 - protein, 1374 aa, Fusobacterium nucleatum
  Fusobacterium nucleatum subsp. vincentii ATCC 49256
MKKQKFSDYYLGFDIGTNSVGWCVTDLDYNVLRFNKKDMWGSRLFDEAKTAAERRVQRNSRRRLKRRKWRLNLLEEIFSDEIMKIDSNFFRRLKESSLWLEDKNSKEKFTLFNDDNYKDYDFYKQYPTIFHLRDELIKNPEKKDIRLIYLALHSIFKSRGHFLFEGQNLKEIKNFETLYNNLISFLEDNGINKSIDKDNIEKLEKIICDSGKGLKDKEKEFKGIFNSDKQLVAIFKLSVGSSVSLNDLFDTDEYKKEEVEKEKISFREQIYEDDKPIYYSILGEKIELLDIAKSFYDFMVLNNILSDSNYISEAKVKLYEEHKKDLKNLKYIIRKYNKENYDKLFKDKNENNYPAYIGLNKEKDKKEVVEKSRLKIDDLIKVIKGYLPKPERIEEKDKTIFNEILNKIELKTILPKQRISDNGTLPYQIHEVELEKILENQSKYYDFLNYEENGVSTKDKLLKTFKFRIPYYVGPLNSYHKDKGGNSWIVRKEEGKILPWNFEQKVDIEKSAEEFIKRMTNKCTYLNGEDVIPKDSFLYSEYIILNELNKVQVNDEFLNEENKRKIIDELFKENKKVSEKKFKEYLLVNQIANRTVELKGIKDSFNSNYVSYIKFKDIFGEKLNLDIYKEISEKSILWKCLYGDDKKIFEKKIKNEYGDILNKDEIKKINSFKFNTWGRLSEKLLTGIEFINLETGECYSSVMEALRRTNYNLMELLSSKFTLQESIDNENKEMNEVSYRDLIEESYVSPSLKRAILQTLKIYEEIKKITGRVPKKVFIEMARGGDESMKNKKIPARQEQLKKLYDSCGNDIANFSIDIKEMKNSLSSYDNNSLRQKKLYLYYLQFGKCMYTGREIDLDRLLQNNDTYDIDHIYPRSKVIKDDSFDNLVLVLKNENAEKSNEYPVKKEIQEKMKSFWRFLKEKNFISDEKYKRLTGKDDFELRGFMARQLVNVRQTTKEVGKILQQIEPEIKIVYSKAEIASSFREMFDFIKVRELNDTHHAKDAYLNIVAGNVYNTKFTEKPYRYLQEIKENYDVKKIYNYDIKNAWDKENSLEIVKKNMEKNTVNITRFIKEEKGELFNLNPIKKGETSNEIISIKPKLYDGKDNKLNEKYGYYTSLKAAYFIYVEHEKKNKKVKTFERITRIDSTLIKNEKNLIKYLVSQKKLLNPKIIKKIYKEQTLIIDSYPYTFTGVDSNKKVELKNKKQLYLEKKYEQILKNALKFVEDNQGETEENYKFIYLKKRNNNEKNETIDAVKERYNIEFNEMYDKFLEKLSSKDYKNYINNKLYTNFLNSKEKFKKLKLWEKSLILREFLKIFNKNTYGKYEIKDSQTKEKLFSFPEDTGRIRLGQSSLGNNKELLEESVTGLFVKKIKL

SEQ ID NO: 234 - protein, 1367 aa, Fusobacterium sp.
  Fusobacterium sp. 1_1_41FAA
MKKQQFSDYYLGFDIGTNSVGWCVTDFNYNVLRFNKKDMWGSRLFDEAKTAAERRVQRNSRRRLKRRKWRLNLLEEIFSDEILKIDSNFFRRLKESSLWLEDKSSKEKFTLFNDDNYKDYDFYKQYPTIFHLRNELIKNPEKKDIRLVYLALHSIFKSRGHFLFEGQNLKDIKNFETLYNNLMAFLEDNDIYKNIDSSYIGNLENIICDSKKGLKDKEKEFKEIFNSDKQLVGFFKLSVGSSVSLNDLFDTDEYKKGEVEKEKISFREQIYEDDKPIYYSILGEKIEFLDIAKSFYDFMVLNNILADSQYISEAKVKLYDEHKRDLKNLKYIIRKYNKENYDKLFKDKNESNYSAYIGLNKEKGKKEVIEKSRLKIDDFAKIIKGYLPKAEKIDEKDRSIFNEILDKIELKTILPKQRISDNGTLPYQIHEAELEKILENQAKYYDFLNHEENGISTKDKLLMTFKFRIPYYVGPLNSYHKNKGGNSWIVRKEEGKILPWNFEQKVDIEKSAEEFIKRMTNKCTYLNGEDVIPKDSFLYSEYIILNELNKVQVNDEFLNKEIKKKIIEDLFKKSKKISEKNFREYLLVNQITNKTVELKGVKDAFNSNYVSYIKFKDIFGDKLNLDIYKEISEKSILWKCLYGDDKKIFEKKIKSVYGDILTKDEIKKINSFKFNTWGRLSEKLLTEIEFIDLETGECYSSVMDALRRTNYNLMELLSSKFTLQENIDNENKEVSEFSYRDLVEESYVSPSLKRAILQTLKIYEEIRKITGRIPKKVFIEMARGGDETMKNKKIPARQEQLKKLYDSCGKDISNFSIDIKEMKNSLNSYDNNSLRQKKLYLYYLQFGKCMYTGKEIDLNRLLQNNDTYDIDHIYPRSKVIKDDSFDNLVLVLKNENAEKSNEYPLKKEIQEKMKSFWKFLKEKNFISDEKYKRLTGKDEFELRGFMARQLVNVRQTTKEAGKILQQIEPEIKIVYSKAEIASSFREMFDFIKVRELNDTHHAKDAYLNIVAGNVYNTKFTEKPYRYLQEIKENYDVKKIYNYDIKNAWDKEKSLEIVKKNMEKNTVNITRFIKEEKGQLFDLNPIRKGETSNEIIAIKPKFYEGSTEKLNEKYGYYKSLNPAYFIYVEHKEKNKIIRSFERVNLVDVNKIKDEKSLIKYLIENKGLIEPKVIKKVYKRQVILINNFPYSIVALDSNKLMDFENLKPLFLERKYEKILKNAIKFLEDNQGKTEEYYKFLYLKKKDRNEKNETIDSVKERYNIEFNEMYDKFLEKLDSKDYKNYINNKKYSELVNVKEKFIKLNLFDKAFTLKSFLDLFNRKTMADFSKVGLTKYLGKIQKISSNVLSKNELHLLEESVTGLFVKKIKL

SEQ ID NO: 235 - protein, 1367 aa, Fusobacterium sp.
  Fusobacterium sp. 3_1_27
MKKQKFSDYYLGFDIGTNSVGWCVTDLDYNVLRFNKKDMWGSRLFDEAKTAAERRVQRNSRRRLKRRKWRLNLLEEIFSDEIMKIDSNFFRRLKESSLWLEDKNSKEKFTLFNDDNYKDYDFYKQYPTIFHLRDELIKNPEKKDIRLIYLALHSIFKSRGHFLFEGQNLKEIKNFETLYNNLISFLEDNGINKSIDKDNIKKLEKIICDSGKGLKDKEKEFKEIFNSDKQLVAIFKLSVGSSVSLNDLFDTDEYKKEEVEKEKISFREQIYEDDKPIYYSILGEKIELLDIAKSFYDFMVLNNILSDSNYISEAKVKLYEEHKKDLKNLKYIIRKYNKENYDKLFKDKNENNYPAYIGLNKEKGKKEVVEKSGLKIDDLIKVIKGYLPKPERIEEKDKIIFNEILNKIELKTILPKQRISDNGTLPYQIHEVELEKILENQSKYYDFLNYEENGVSTKDKLLKTFKFRIPYYVGPLNSYHKDKGGNSWIVRKEEGKILPWNFEQKVDIEKSAEEFIKRMTNKCTYLNGEDVIPKDSFLYSEYIILNELNKVQVNDEFLNEENKRKIIDELFKENKKVSEKKFKEYLLVNQIANRTVELKGIKDSFNSNYVSYIKFKDIFGEKLNLDIYKEISEKSILWKCLYGDDKKIFEKKIKNEYGDILNKDEIKKINSFKFNTWGRLSEKLLTGIEFINLETGECYSSVMEALRRTNYNLMELLSSKFTLQESIDNGNKEMNEVSYRDLIEESYVSPSLKRAILQTLKIYEEIKKITGRVPKKVFIEMARGGDETMKNKKIPARQEQLKKLYDSCGNDIANFSIDIKKMKSSLSSYDNNSLRQKKLYLYYLQFGKCMYTGREIDLDRLLQNNDTYDIDHIYPRSKVIKDDSFDNLVLVLKNENAEKSNEYPVKKEIQEKMKSFWRFLKEKNFISDEKYKRLTGKDDFELRGFMARQLVNVRQTTKEVGKILQQIEPEIKIVYSKAEIASSFREMFDFIKVRELNDTHHAKDAYLNIVAGNVYNTKFTEKPYRYLQEIKENYDVKKIYNYDIKNAWDKENSLEIVKKNMKKNTVNITRFIKEEKGQLFDLNPIKKGETSNEIISIKPKLYNGKEEKLNEKYGYYKSLNPAYFLYVEHKEKNKRIKSFERVNLVDVNNIKDEKSLVKYLIENKKLVEPRLIKKVYKRQVILINDYPYSIVALDSNKLMDFENLKPLFLENKYEKILKNVIKFLEDNQGKSEENYKFIYLKKKDRYEKNETLESVKDRYNLEFNEMYDKFLEKLDSKDYKNYINNKKYKNLLDVKEKFIKLNLFDKAFTLKSFLDLFNRKTMADFSKVGLTKYLGKIQKISSNVLSKNELYLLEESVTGLFVKKIKL

SEQ ID NO: 236 - protein, 1367 aa, Fusobacterium sp.
  Fusobacterium sp. 3_1_36A2
MKKQKFSDYYLGFDIGTNSVGWCVTDLDYNVLRFNKKDMWGSRLFDEAKTAAERRVQRNSRRRLKRRKWRLNLLEEIFSDEIMKIDSNFFRRLKESSLWLEDKNSKEKFTLFNDDNYKDYDFYKQYPTIFHLRDELIKNPEKKDIRLIYLALHSIFKSRGHFLFEGQNLKEIKNFETLYNNLISFLEDNGINKSIDKDNIKKLEKIICDSGKGLKDKEKEFKEIFNSDKQLVAIFKLSVGSSVSLNDLFDTDEYKKEEVEKEKISFREQIYEDDKPIYYSILGEKIELLDIAKSFYDFMVLNNILSDSNYISEAKVKLYEEHKKDLKNLKYIIRKYNKENYDKLFKDKNENNYPAYIGLNKEKGKKEVVEKSGLKIDDLIKVIKGYLPKPERIEEKDKTIFNEILNKIELKTILPKQRISDNGTLPYQIHEVELEKILENQSKYYDFLNYEENGVSTKDKLLKTFKFRIPYYVGPLNSYHKDKGGNSWIVRKEEGKILPWNFEQKVDIEKSAEEFIKRMTNKCTYLNGEDVIPKDSFLYSEYIILNELNKVQVNDEFLNEENKRKIIDELFKENKKVSEKKFKEYLLVNQIANRTVELKGIKDSFNSNYVSYIKFKDIFGEKLNLDIYKEISEKSILWKCLYGDDKKIFEKKIKNEYGDILNKDEIKKINSFKFNTWGRLSEKLLTGIEFINLETGECYSSVMEALRRTNYNLMELLSSKFTLQESIDNGNKEMNEVSYRDLIEESYVSPSLKRAILQTLKIYEEIKKITGRVPKKVFIEMARGGDETMKNKKIPARQEQLKKLYDSCGNDIANFSIDIKKMKSSLSSYDNNSLRQKKLYLYYLQFGKCMYTGREIDLDRLLQNNDTYDIDHIYPRSKVIKDDSFDNLVLVLKNENAEKSNEYPVKKEIQEKMKSFWRFLKEKNFISDEKYKRLTGKDDFELRGFMARQLVNVRQTTKEVGKILQQIEPEIKIVYSKAEIASSFREMFDFIKVRELNDTHHAKDAYLNIVAGNVYNTKFTEKPYRYLQEIKENYDVKKIYNYDIKNAWDKENSLEIVKKNMKKNTVNITRFIKEEKGQLFDLNPIKKGETSNEIISIKPKLYNGKEEKLNEKYGYYKSLNPAYFLYVEHKEKNKRIKSFERVNLVDVNNIKDEKSLVKYLIENKKLVEPRLIKKVYKRQVILINDYPYSIVALDSNKLMDFENLKPLFLENKYEKILKNVIKFLEDNQGKSEENYKFIYLKKKDRYEKNETLESVKDRYNLEFNEMYDKFLEKLDSKDYKNYINNKKYKNLLDVKEKFIKLNLFDKAFTLKSFLDLFNRKTMADFSKVGLTKYLGKIQKISSNVLSKNELYLLEESVTGLFVKKIKL

SEQ ID NO: 237 - protein, 1391 aa, Galbibacter sp.
  Galbibacter sp. ck-I2-15
MKTILGLDLGTNSIGWALVKEAENENEVSDIIKLGVRVNPLTVDELTNFEGGKAYSNNAERTLKRGARRNLQRYKLRRENLIEILLKNGLINKDTALTEVGKETTHQTLKLRSKSANEKVSLEDLAKILLSINKKRGYKSSRKVNAEDDGVAIDGMEVAKLLYDENMTPGEYVLRLLESGKKHLPDFYRSDLQEEFNLVWKKQSEFYPLILTKELFFELHGKNKSQTWAICKEPLGIVGVKLKGSAKEQKFARYRLRKEALTQQIELEHLAIVLQDINNDSNKSSGYLGAISDRSKELFFNKETVGQYQYKQLQKDPNTSLKNQVFYRQDYLDEFEVIWRNQAKFYPQLTNELKQEIRDVVIFYQRKLKSQKNLISFCQFESTQQNYVEKETGKTKIRTIGRRVIPRSSPLFQEFKIWQSLNNLKFVNSESNQIIQFIELEDDVKKVVFDELNLRGDLKPNQVLKILSKYMKIGKLTQWKCNLEEIEGNRTNSALYNVFQMIAEEEGYGFNWGKKSALEIKSELKAIFSSIGINDSILDFDFSKKLDQQLSYQLWHLLYSAEEGNSKITEEDKFTYGNTGVALKKKLHLKFGFKPEYSTLISNLRFTSDYGNLSSKAISKILPFLRDGSDYSKACQYAGYNHSNSLSADELDNRELKPKLELLKKNSLRNPVVEKILNQMVNVVNQVIDNYGKPDEVRIELARELKKSAKERSQMTKNISDATRRNAEIKKYLSKEFGIPNPTKGDVIRYRLWEELASNGYKDLFRDKYIPKEKLFSNEIDIEHIIPKALLFDDSFSNKTLAFKVDNLKKADRTAFDFMSTDFSKDVDSYIGRIETLHKDGKISSSKYKKLMIPKSKLVDGFIERDLRNTQYIAKQARKMLLEVFKTVVPTTGKITDKLREDWDLINVMKELNFPKYKALGLTKKIERFDVGSEKIKSINVIEGWSKRNDHRHHAMDALAVAFTTHNHIQYLNYLNARKDIHHEMHGTIKSIENQIIGKDVMGKRRFIPPISDLRMKAKLQIESILISFKNKNKVVTWSVNKTKLKGKDNYNKRRQLTPRGQLHKETVYGKIKLIDPKPLKLNNKFTLVRASMIVDKVHREIVLQHLSKYDNNSEVAFDSKTIKIDPILIEGIGLKEVVCYEDVFKIRKKISGDNFKNEKHLEKVIDEKVKQILKDRVIKFQGNFKEAFSNLEENPIWLNKSKGIAVKSVAIKGVNNAESLHEGKDHFGDQILDKNKKQIPVDFVSTGNNHHVGIYEDKDGNLQERVVSFFEAVTRVNEGLPIIDKTYNSDIGWKFKFTMKQNEMFVFPSDDFDPNEFDLTDGKNAAKISPNLYRVQKIATKNYMFRHHLETVVTNDLEFTYKSIRSTGWLRNLVKVRINHLGEIVYVGEY

SEQ ID NO: 238 - protein, 1025 aa, Unknown
  Description of Unknown: gamma proteobacterium HdN1 polypeptide
MGGYMPQLMRYRLALDIGSTSIGWAMIRLSMQNEPIAIIRMGVRIFSDGRNPKDGSSLAVTRRVARQMRRRRDRLLKRKTRLLNALVQKKFFPEDADARKALVVLNPYELRKEGLYRQLSGPEFGRALFHISQRRGFLSNRKTDKKDNDSSVLKKAIVDLRQQLEVENCQTIGEWLFKQQQSGKSVRARLRGKTQKDKAYDFYIDRAMIAHEFDTLWVSQAKYDPLLFNEDARAILRDILLYQRPLKPVKPGRCTLIPDESRAPLALPLTQQARIYQELNHLRITTPALGAQALTVAQRNTIAALLEKSDVTFVKIAKALGLTSTTEFNLQDIKRDRLKGNATAIILARNQYFGRRWHDFNADLQNLIVDKLVNEGSETALIEWLKANTDVDESAAERVSGVTLPEGYGSLSVAALRRLLPALKEDVVVYSEAVKRAGFDSHSALSLIEQTGELYQELPYYGEVLQRHVGFGSGDPNDSPERRFGKIANPTVHIGLNELRKIINALIKRYGNPAEVVVELARDLKLSREKRKEIQEEQKQRQDRNEKRIKDACEILGIDPLVIDRGKRREISQKMQLWDELNPKDAANRRCPYTGDQISIEKLLSAEVEIEHILPFSKTLDDSLNNKTVAMRRANRDKGNRTPYEAFGESLNPDYDYDAILQRASLMPREKRKRFASDGYQQWLRDDKDFLSRALNDTAYLSRIAKEYLTLICPPNSVRAIPGRMTAQLRAMFGLNRLLSEGGIKNREDHRHHAIDAAVIGVTDQGLLQKFSRASARTRELQLSRLVDDMPLPWDTYREHVTRALEHLVVSHKPDHGYQGKMHEDTAWGLRDNGQVTRRVRSEDGGPRQRLLENKNVVKINSTRDFSRHGIDEQGQVNAYKGYVGGSNYCIEIWIDEKGKWNSDVVSTFQAYQIVRELGEKAAWQKLRNPLLSLSAKPLVMRLIIDDVVKMQIAGQNKIMRVVKIAQNGQIFFAEHNEANVDARDKDKNNPFKYISKTAGSLQKAGGIHMAISPIGDARPVRYGR

SEQ ID NO: 239 - protein, 1397 aa, Unknown
  Description of Unknown: gamma proteobacterium HTCC5015 polypeptide
MTKNYISPIAIDLGAKFTGVALYQYLEGADCTQEVAKGLLVDDRGNVTWSQEGRRGKRHQVRGYKRRKMAKRLLWLILDSEYGIKREEVTEPLLKFINGLLNRRGYTYISEEVDEESMNVSPLPFSEMMPDYFNSSAPLLEQLAKLLSDKNKLVRFRAEGKIPSNKNEFKKLLDTALDGKYKDEKKELSEAWGNILIASENVLKSTVDGHKSRSEYLANIKEDIKSNEELEKQISSKEIDGFYNLVGHLSNFQLRLLRKYFNDPNMSGVSYWDEKRLEKYFYQWVQGWHTKGGTDEAEKKNIILKTKGAPLLKTLKSLSADLTIPPYEDQNNRRPPKCQSVLLSDEKLTMHYPKWKEWVGQLVKQNDNAYLNENVTLANALHRIVERSRSIDPYQLRLLISITDAEKRNDLAGYKRLKLSLGSEVDEFLLLVKNIVDETKEAREGLWFETENKLFFKCGKTPPRKEKLKSTLLSAVLGKNLSDDEQSSFIEEFWKSGTPKIERRNVRGWCRLASQVQKTYGVYLKEYGLQQLHKLEAGKKLDDKPLALLYKNSGLIASKIGEALNIEPDEVSRFASPHSLAQIFNIIEGDVAGFNKTCRACTYENIWRMQEEKVESLLTNQLLSEIHGERKVPLKSAMCTRLSADSTRPFDGQMASIIEHIARKIAQHKIAQINDVPKEFSIDIPIIIESNQFSFTAELEEIKRGRGSAKAKKAKELGEKSKAGWVSKTERIKTSSEGICPYTGAPLGGSGEIDHIIPRSLTGRTKKTVFNSEANLIYCSSKGNHDKGNRVYVIEQLNDKYLKKQFSTSDVNLIKKKIKTTIQRFTEGGEKLRSFSELSREDQKAFRHALFVPELKSEVTSLLAVKNITRVNGTQAWLAKKIASLLAEHLDKQGRDYTLSAHQIDPWSVSKQRKMLASAEPIWAKKDPQPAASHVVDAVCTFLEALEQPHTASRLKTISSTSFEKTGWRSALIPDLIKVDALDRRPKYRRYNIGSTSLFKDGIYAERFLPILIDENGLMAGYDIDNSLKAKGADVVFESLSPFLLFKGEEVGAQSLSDWQERIDGRYLYMSIDKVKAFDYLQEKVGEKDIAAELLNSIHFTQRKTELRAKFSDDSGKKMKTLDAIRKSLKLTVTVNEIGKRKEKCGFSGTIGIPAKSAWENLLDEPLLETYWGTKMPPQEIWEKVYRKHFPRNIPNQAHRKVRKDFSLPVVDSVSGGFRVKRKTPNGYNYQLLAIDGYSAVGFKKEGDNVDFKSPALVPQIAESKSVTPISSELVHLDKNEIVYFDEWRKIDISDSDLKQFVSSLELAPGSQNRFYIRFTVDEDQFERHFKSALRVNGIQDLDTVNKTFDWNREIPSLLIPPRSNLFLLETGQKITFEYIANGANAEVKKAYSLRRA

SEQ ID NO: 240 - protein, 1186 aa, Gardnerella vaginalis
  Gardnerella vaginalis 1500E
MEGNISYAIGIDVGLNSVGLAAIRLDNNGEPIRILKAMSVIHDAGIDPNGAKESDTRKAISGVARRVRRLYRQRRRRLQKLDFLLHSLGFPVVENKDLDFSDSFIPWIFRAKLADEYIADEKQRKQMLSVAIRHIARHRGWRNPYQSIKSMTQETEYSEFYNELLKNIEKFAPGVGCEGSTPAQLVRDYLLLQQGKASRRLRITTDEKRKNHPNSLNPILPRKLMQSDNMLEILNIFNVQHIDDKYVREQIINAVFYAKSPRGSAENRVGKDAITGKGKRALKASLAFQKYRIISTISNLRIRENSKERCLTIEEKQSVYKLLTTSTDESSKEKSAEAPLYTWIDVADCLGIERYKLRGVGSQIGDGESVGNRPPMLNSELAIIYANNKSLGKSLLTWWLDANRTQEDKEALIEILSNTVDIEAIHDNPEYQDKYGSAIAFIDSMDETEIAALENISLPDGRAAYSLETLDKLNKQMLETDDDLFEARKKLFNLPNNWRPSEAPIAEPTGNPSVDRVLKIVHRFLISAKNRWGNPERINIEHVRSGFKSKKMANSYKELLDKRTKGKENLKAMMRNSLHLGMSDSISDADIRRYEAVQRQNGQCLYCGSEITYHTCELDHIVPRKGPGSTNTRENLVATCSLCNAQKCNTPFSTWCEQSTYCKNHDISVDSAINRVRAFIFPPNSYDKRGANQFKKEVIARLKQKVGDEAFDNRSIESVAWMANELHRRIDWYYNSQNYQTNNGISDITNKAQTNVGVYAGSLTAIARRMSGIDGKLEFFDGRRKTRFDRRHHAVDASVIAMMTPGIAQILAIKCNLRETQLLQGNKVVPGGIDWKEYPTANDQGYQQYANWSVRMNALLKLLNEEMRADRIAVVNSIRLRYNNSSVHQYKVNALLKLHVGDEIDSGTIRRSSTPALYCALTRNPDYDVNNGLPENPNRAILLHDKKLNADDSITFFKAQAVQLFVREGSAEIGSSTHHLRIYEYFKKLKSGKIKKSYGMIRVFQNDLHRHIHEDLFSCDLPEQSISMRYADTEVAHAVQTGNSNYLGYLVPGDEIIVDFSHVKLSGNIGTFVEFLNKIGANCAAYNHWVVVGTDTEKVLILKPSMISSEGIDKLYSNCKRNNFDYSSYEKSINEILVGKGWRVSVNVLAKYNAETIRRNALGEVRWTSRSHLPISWSWNTGENRE

SEQ ID NO: 241 - protein, 1186 aa, Gardnerella vaginalis
  Gardnerella vaginalis 284V
MEGNISYAIGIDVGLNSVGLAAIRLDDYGEPIRILKAMSVIHDAGIDPNGAKESDTRKAISGVARRVRRLYRQRRRRLQKLDFLLQSLGWPVVENKDLDFSDSFIPWIFRAKLADEYIADEEQRKQMLSVAIRHIARHRGWRNPYQSIKSMMQETEYSEFYNELLKNIEKLAPGVGCEGSTPAQLVRDYLLSQQGKASRRLRITTGGRRKNHPHSLDPVLPRKLMQSDNMLEILNIFNVQHIDDKYVREQIINAVFYAESPRGSAENRVGKDAITGKGKRALKASLAFQKYRIISTISNLRIRENSKERCLTIEEKQNVYKLLTTSIDKSSKRKSAEAPLYTWIDVADCLGIERYKLRGVGSQIGDGESVGNRPPMLNSELAILYANNKSLGQSLITWWLASNRTQEDKEALIEILSNTVDIEAIHDNPEYQDKYGSAIAFIDSMNETEIAALENISLPDGRAAYSLETLDELNKQMLETDDDLFEARKKLFNLPNNWRPAEAPIAEPTGNPSVDRVLKIVHRFLISAKNRWGNPERINIEHVRSGFQSKKMANSYKELLDKRTEGKENLKAMMRNSLHLGTSDSISDADIRRYEAVQRQNGQCLYCGSEITYHTCELDHIVPRKGPGSTNTRENLVATCSSCNAQKCNTPFATWCEQSTYCKNHDISADSAINRVRAFIFPPNSYDKRGANQFKKEVIARLKQKVGDEAFDNRSIESVAWMANELHRRIDWYYNSQNYQTNNGISDISNKAQTNVGVYAGSLTAIARRMSGIDGKLEFFDGRRKTRFDRRHHAVDASVIAMMTPGIAQILAIKCNLRETQLLQGNKVVPGGIDWKEYPTANDQGYQQYANWSVRMNALLKLLNEEMRADRIAVVNSIRLRYSNSSVHQYEVNALLKLHVGDEIDSETIRRSSTPALYCALTRNPDYDVNNGFPENPGRTILLHNKKLNADDSITFFKAQAVQLFVREGSAKIGNSIHHLRIYEYFEKLKSGKIKKSYGMIRVFQNDLHRHIHEDLFSCDLPEQSISMRYADTKVAHAVQTGNANYLGYLVPGDEIIVDFSHITLSENIGKFVEFLNKIGADCTAYRHWVVVGTDTEKVLILKPSMISSEGIDKLYSNCERNNFDYSSYEKSINEILAGKGWRVSVNVLAQYKAATIRRNALGEVRWASRSHLPISWSWDTGENRE

SEQ ID NO: 242 - protein, 1186 aa, Gardnerella vaginalis
  Gardnerella vaginalis 5-1
MEGNISYAIGIDVGLNSVGLAAIRLDNNGEPIRILKAMSVIHDAGIDPNGAKESDTRKAISGVARRVRRLYRQRRRRLQKLDFLLHSLGFPVVENKDLDFSDSFTPWIFRAKLADEYIADEKQRKQMLSVAIRHIARHRGWRNPYQSIKSMTQETEYSEFYNELLKNIEKFAPGVSCEGSTPAQLVRDYLLSQQGKASRRLRITTDDRRKNHPNSLDPVLPRKLMQSDNMLEILNIFNVQHIDNKYVREQIINAVFYAKSPRGSAENRVGKDAITGKGKRALKASLAFQKYRIISTISNLRIRENSKERCLTIEEKQSVYKLLTTSTDEYSKEKSAEAPLYTWIDVADCLGIERYKLRGVGSQIEDGESVGNRPPMLNSELAILYANAKSLKQSLITWWLAANRTQEDKEAFIEILSNTVDIEAIHDNPEYQDKYGSVIAFIDSMDETEIAALENISLPNGRAAYSLETLDKLNKQMLETDDDLFEARKKLFNLPNNWRPSEAPIAEPTGNPSVDRVLKIVHRFLISAKNRWGNPERINIEHVRSGFQSKKMANSYKKLLDKRTEGKENLKAMMRNSLHLGTSDSISDADIRRYEAVQRQNGQCLYCGSEITYHTCELDHIVPRKGPGSTNTRENLVATCSSCNAQKCNTPFATWCEESTYCKNHDISVDSAINRVRAFIFPPNSYDKRGASQFKKEVIARLKQKVGDEAFDNRSIESVAWMANELHRRIDWYYNSQNYQTNNGISDITNKAQTNVGVYAGSLTAIARRMSGIDGKLEFFDGRRKTRFDRRHHAVDASVIAMMTPGIAQILAIKCNLRETQLLQGNKVVPGGIDWKEYPTANDQGYQQYANWSVRMNALLELLNEEMRADRIAVVNSIRLRYSNSSVHKDDVHALLKLHVGDEIDSETIRRASTPALYCALTRNPDYDVNNGLPENTDRTILLHDKKLNADDSITFFKSKAAQLFVREGSVEIGNSIHHLRIYEYFEKLKSGKVKKSYGMIRVFQDDLHRYIHEDLFSCDLPEQSISMRYADTKVAHAVQTGNANYLGYLVPGDEIIVDFSHVKLSGYIGEFVEFLNKIGANCAAYKHWVVAGTDDKTTLILKPSMISSEGIDKLYSNCERNNFDYASYEKSIDKILVDKGWRVSVNVLDQYKAATIRRNALGEPRWASRSHLPISWSWDTGENRE

SEQ ID NO: 243 - protein, 1392 aa, Gemella haemolysans
  Gemella haemolysans ATCC 10379
MANKTWYLGLDIGSASVGWAATDTGYKIIRKNKKRLWGVRLFEEAKTAEDRRGYRSSRRRLARRKWRLNLLEELFTSEVKKVDENFFLRLKESQYHYEDKTHKVPYAIFNDKDYTDKDYYKDYPTIYHLRSKLMTEENPDIRKVFLAIHHIIKNRGHFLLQGQSFKDGNLNNLIKELLELDILHVGFEVTEEVVDKIADISLEKKTSKDKLNDIKELYPKEKQLLEVFRLIFGGKTSLDKLFAIDEYKELDAAIKSVSFKEKIYEEVRHDYEQVLSNYIELLDLAKLVYDSIILSDIKKEGKTLSESKVELFEKHRDDLLKLKNLVKNDSKLSEDKKVELYALIFKEDKDKGTNYVNYIRKSEEGKGCNYEDFKKFLVKELAKLEESSVKTEIIKDLELEQFLPLQRTKDNSVVPYQIHKEELVKILDNAARYHSFLNEKDESGYNVREKVIQLLEFRIPYYVGPLNSSKKAKEGGFAWSVRNTGYENTPVTPWNYSKVIDESASAEKFITNLTNKCTYLKGEDVLPKSSLLYSEFALLNELNALKYDGNRISLEARNTIIEKLFKQQGKKVTKTSIKNLLKAEGYIDGKGEITGIDITVKNDLKSYRDFKKILGNKFNSEHVENIILWITLYGESRKLIKAKIESVYGEVYSKDEITKMSRLVYKDWGRFSRKLLTELVSKKLYNEETGECLNIIGAMRQNNILFMELLADRFDYSKQIVEFNKELQEDVTEIAPEILDDLYVSPAVKRSIWQTVRIVEELKKIIGCAPAKIFVETTRSNQEKKKPTDSRKKQLELAYKAVKKDVKELEKEIGTINFDVLNDRLSSVEPSKLKAKKLYLYYTQLGRCMYSEEPINISELFDNNKYDIDHIYPQSKIKDDSFTNTVLVKRESNAAKTDRYPLGSDIQTPSNRRFWKFLKEKGLISDEKYNRLVRTEEFSDEELSGFIARQLVETSQSVKAVASILGELNPETSICYSKAENVSSFRQNFGKIKKGDRDSKNNDQLIKVREINDYHHAKDAYLNVVVGNVYDTKFTRNVFNFIKDKKDGRKYSLNKVFYENVSDSKTVAWEMDKTIHQVEKVMNNNNIMVTRRTSEQKGGLFDATVYKAKVAAKAKDGVYYPLKTSNSVVKDVAKYGGYTSIGIAYYSIFEYTIVNKKGEEKITRIIPIPIYISQNIKDSTALIEFGKSQIFCRAYEKIKDFKLLYRKLCIGSKININNYQYYIGGKSDERFYYDSAIQVTLDKKSEKYLKILSKYQNWKKENKDGELWENITKENNIELYNKLVEKMNSEIFTKKKSNKYNELNSEEIRNNFIKISVEEQAKVLLEILNLLTNKKSIFDLKSIDIKAARGKISFNLTSLIQFSIIEQSITGFYEKEITIIGDKGNDMENNNS

SEQ ID NO: 244 - protein, 1385 aa, Gemella morbillorum
  Gemella morbillorum M424
MKNKTWYLGLGVGPTSIGWAATDSNYKLLRKNKKRLWGVRLFEEAKTAVDRRTFRAERRRLARRKWRISLLEELFAKEVSKNDPNFFLRLKESKYHFEDKSLMNEYILFNDKDYTDKDYYKEYPTIYHLRLSLTTEENPDIRKVYLAVHSMLKNRGHFLLQGQSFNDSNIDSVIKELLELETVKINFEVTDEVIHSLKKIALEKKNLSDKNNDVKKLYPKEKQLQEIFKLVFGGKTSLDKLYDIEEYKELDNSVKSISFKEKVYEEVRPDYEQILSNYIELLDLAKLVYDSIVLADIKKEGKTISESKVELYNKHKDDLANLKKLVKIDSKLSEDKKKEVYFTIFKEDKEKGTNYVNYTHRSQEGKSCSYEDFKKFLKKELEKLEDSPTKTTILEELDLETFLPLQRTKDNSVVPYQIHKEELVKILDNAAKYHSFLAEKDDSGYSTREKVVQLFEFRIPYYIGPLNAHHNTENGGYSWAIRKKGMESVPVTPWNFKDVIDESASAEAFVNNLKNKCAYLSGEDVLPKNSLLYSEYALLNELNALRYEGNRISVEARDVIVTKLFKEQGKKVTKKTIKELLKTEGFIDGKGEIVGIDNIVKNDLKSYRDFKKILADKFDKERVENIILWITLYGESRKLIKEKITKVYGDFYTVDEIEKMSRLTYKDWGILSRKLLTELVSEKLYNEETGECLNIIGAMRQGTILFMELLADKFDYMSQIKNHNKENKDDITEITPDILENLHASPAVKRSIWQTVRIVEELKTIIGCVPTKIFIETTKRNNAPYKVPTLNRNDLVTKYKTIREHEIFELEKELKNTLDFTLNKNRLINEEPSKLKATKLYLYYTQLGRCMYTGKKIDLGELFDNNNKYDIDHIYPQSKVKDGSFNNIVLVTKASNDMKADVFPLKSKFQTKENKIFWRFLKEKKLITEEKYNRLVRTEEFSNGELTGFITRQLVETSQAIKVISNVLRELNPETTICYSKAENVSSFRQSFGKIKEANRKAENNEKLIRVQEINDYYNAKDAYLSIVVGNVYDVKFTRNVHNFIKNNKDARRYSLNGLFYTDVKNANTIAWEMDKTVHVVEKTMNNNNILITRRTSEQKGALYDATLYKAKVAEKAKEGTYYPLKTTDSKIKDVGKYGGFTKIKIAYYSIFEYTLDGKKGKQKITRIVPIPIYISQNIKDDKALLEYAQTRLPGKDLKIKYRKLCIGSLVKINNFNYYIGGKTNNNFTFDSAVQVILDKDSESYIKELAKYLNWKKENKDGKLWESITEDKNIQLYDSLVKKMNTGIFIRKTPNKYTELLTLEVKNKFINIDIDEQVKLLLEILNLLTNKKFTSKLNEIGITASRGVCSFNLSNQSQFSIIEQSVTGVYEKEKLIIEKKKEGIL

SEQ ID NO: 245 - protein, 1003 aa, Gluconacetobacter diazotrophicus
MIDESLTFGIDLGIGSCGWAVLRRPSAFGRKGVIEGMGSWCFDVPETSKERTPTNQIRRSNRLLRRVIRRRRNRMAAIRRLLHAAGLLPSTDSDALKRPGHDPWELRARGLDKPLKPVEFAVVLGHIAKRRGFKSAAKRKATNISSDDKKMLTALEATRERLGRYRTVGEMFARDPDFASRRRNREGKYDRTTARDDLEHEVHALFAAQRRLGQGFASPELEEAFTASAFHQRPMQDSERLVGFCPFERTEKRAAKLTPSFERFRLLARLLNLRITTPDGERPLTVDEIALVTRDLGKTAKLSIKRVRTLIGLEDNQRFTTIRPEDEDRDIVARTGGAMTGTATLRKALGEALWTDMQERPEQLDAIVQVLSFFEANETITEKLREIGLTLAVLDVLLTALDAGVFAKFKGAAHISTKAARNLLPHLEQGRRYDEACTMAGYDHAASRLSHHGQIVAKTQFNALVTEIGESIANPIARKALIEGLKQIWAMRNHWGLPGSIHVELARDVGNSIEKRREIEKHIEKNTALRARERREVHDLLDLEDVNGDTLLRYRLWKEQGGKCLYTGKAIHIRQIAATDNSVQVDHILPWSRFGDDSFNNKTLCLASANQQKKRSTPYEWLSGQTGDAWNAFVQRIETNKELRGFKKRNYLLKNAKEAEEKFRSRNLNDTRYAARLFAEAVKLLYAFGERQEKGGNRRVFTRPGALTAALRQAWGVESLKKQDGKRINDDRHHALDALTVAAVDEAEIQRLTKSFHEWEQQGLGRPLRRVEPPWESFRADVEATYPEVFVARPERRRARGEGHAATIRQVKERECTPIVFERKAVSSLKEADLERIKDGERNEAIVEAIRSWIATGRPADAPPRSPRGDIITKIRLATTIKAAVPVRGGTAGRGEMVRADVFSKPNRRGKDEWYLVPVYPHQIMNRKAWPKPPMRSIVANKDEDEWTEVGPEHQFRFSLYPRSNIEIIRPSGEVIEGYFVGLHRNTGALIPTPVGPDSYVIA

SEQ ID NO: 246 - protein, 1050 aa, Gluconacetobacter diazotrophicus
MGENMIDESLTFGIDLGIGSCGWAVLRRPSAFGRKGVIEGMGSWCFDVPETSKERTPTNQIRRSNRLLRRVIRRRRNRMAAIRRLLHAAGLLPSTDSDALKRPGHDPWELRARGLDKPLKPVEFAVVLGHIAKRRGFKSAAKRKATNISSDDKKMLTALEATRERLGRYRTVGEMFARDPDFASRRRNREGKYDRTTARDDLEHEVHALFAAQRRLGQGFASPELEEAFTASAFHQRPMQDSERLVGFCPFERTEKRAAKLTPSFERFRLLARLLNLRITTPDGERPLTVDEIALVTRDLGKTAKLSIKRVRTLIGLEDNQRFTTIRPEDEDRDIVARTGGAMTGTATLRKALGEALWTDMQERPEQLDAIVQVLSFFEANETITEKLREIGLTLAVLDVLLTALDAGVFAKFKGAAHISTKAARNLLPHLEQGRRYDEACTMAGYDHAASRLSHHGQIVAKTQFNALVTEIGESIANPIARKALIEGLKQIWAMRNHWGLPGSIHVELARDVGNSIEKRREIEKHIEKNTALRARERREVHDLLDLEDVNGDTLLRYRLWKEQGGKCLYTGKAIHIRQIAATDNSVQVDHILPWSRFGDDSFNNKTLCLASANQQKKRSTPYEWLSGQTGDAWNAFVQRIETNKELRGFKKRNYLLKNAKEAEEKFRSRNLNDTRYAARLFAEAVKLLYAFGERQEKGGNRRVFTRPGALTAALRQAWGVESLKKQDGKRINDDRHHALDALTVAAVDEAEIQRLTKSFHEWEQQGLGRPLRRVEPPWESFRADVEATYPEVFVARPERRRARGEGHAATIRQVKERECTPIVFERKAVSSLKEADLERIKDGERNEAIVEAIRSWIATGRPADAPPRSPRGDIITKIRLATTIKAAVPVRGGTAGRGEMVRADVFSKPNRRGKDEWYLVPVYPHQIMNRKAWPKPPMRSIVANKDEDEWTEVGPEHQFRFSLYPRSNIEIIRPSGEVIEGYFVGLHRNTGALTISAHNDPKSIHSGIGTKTLLAISKYQVDRFGRKSPVRKEVRTWHGEACISPTPPG

SEQ ID NO: 247 - protein, 1371 aa, Gordonibacter pamelaeae
  Gordonibacter pamelaeae 7-10-1-b
MNLRNVESYQVGLDIGTGSVGWAVLDDNGDLCRFKGKPTWGSRVFPTAETAAEARVHRGQRRRYDRRRQRIDLLQRFFADEVAKVDPEFFIRLNQARLHPENRDPAHADYRWPLFNGSNFTEKDYYRQFPTIYHLRAHLLKSDEPADIRLVYLALHNIVKHRGNFLHQDNPSLSARNANVGDAVEALCLALDEWCGAHDVECACDEAALAEALGDASLRPGEKRERAEAALGVEKAHKKLAKAVSSAVVGYAAEFGHVFFAESEGSKFALSNDEKVEAYVCPDEGRDLFDAMRAVHSSYVLMGILSEAQGELLSVCKVGEYERYKRDLETLKSLVRAYGPERYDEFFCGPFYEGTRDYDPGKAQGYTKYNLGASKLSHEDFLKEVQKLLKDIGAQADERYADIERAIEAGAFLRRLKTSDNGTIPYQLHLEEMDAIIERQAAFYPFLAQEKDKLKSLVSFRIPYYVGPLTQKNAARDGKGEARFAWSSRKPGMEDARVYPWNWEDVIDKDQSAEDFIRRMTGTCTYLKGEPVLARCSLDYELFCVLNELAGARWTQDGDKSYRFDAADRLGIVEDLFKKRKRVTYEAAEKWLARTHGPESGKSAGGAYHVSGGQGEDAFESQLSSHYDFCKILGVDELSDADEAMAEDIILWNTVFEDRSILKRKIKLAYGDRLGDAQVRKLCQKRYTGWGRLSGELLRGLRSATDNGPKTIMDILLEGDPNHARRMGAAMNLMEILHDDLLEFQAKIDEHNRERALAVGGMSVDEVTGSPALRRGINQALRVVDEIAGIAGKPPAHIYVEVTRDEGARNKGRRTTSRYRALEAALSSIKAQCADVYAELKERDPRALDDERLTLYFMQCGKCMYSGDALDINKLQTYQVDHILPQSYVKDDSFENKVLVRPDTNQRKGDTLLLDERLIARMRGFWRTLRDAELIGEKKFNNLTRTSVSDEQMKKFVSRQLVETGQMVKQVQQLLQARYPESEVQPVKAGVSHQLRVGCALAKSREINDFHHAHDAYLACQVGRFVQYRHSAVYSEPVKMAAVVKQFIKKQAEDYRRTRELPGSDGFIVSSFMTPGFDVKTGEVFRDAWDAGAEIDRIRRCFDYKDCFISRMPEETHGAFWDATIYSPRAAGKTLSLPLKRGLDPRKYGSYSREQFAYFFVYEAVKPKKKQRVLEFAPVPVRVASALANDPDALEDYARELAEAEGLVFERIRRRKVYKYQQIIVGDSRLYVTGREEVRNARQLAFSQDETKLICRIEQGEECEEGELLDLFRSMQRKYLACAPRLARLMKVAEMEEGFIAATASGKREVLLSLTSIAAAHRNSIDLKPIGRKGSSGQMKITFSKELSTNGILFVDSSVTGMFERRCRLGL

SEQ ID NO: 248 - protein, 1054 aa, Haemophilus parainfluenzae
  Haemophilus parainfluenzae ATCC 33392
MENKNLNYILGLDLGIASVGWAVVEIDEKENPLRLIDVGVRTFERAEVPKTGESLALSRRLARSARRLTQRRVARLKKAKRLLKSENILLSTDERLPHQVWQLRVEGLDHKLERQEWAAVLLHLIKHRGYLSQRKNESKSENKELGALLSGVDNNHKLLQQATYRSPAELAVKKFEVEEGHIRNQQGAYTHTFSRLDLLAEMELLFSRQQHFGNPFASEKLLENLTALLMWQKPALSGEAILKMLGKCTFEDEYKAAKNTYSAERFVWITKLNNLRIQENGLERALNDNERLALMEQPYDKNRLFYSQVRSILKLSDEAIFKGLRYSGEDKKAIETKAVLMEMKAYHQIRKVLEGNNLKAEWAELKANPTLLDEIGTAFSLYKTDEDISAYLAGKLSQPVLNALLENLSFDKFIQLSLKALYKLLPLMQQGLRYDEACREIYGDHYGKKTEENHHFLPQIPADEIRNPVVLRTLTQARKVINGVVRLYGSPARIHIETGREVGKSYKDRRELEKRQEENRKQRENAIKEFKEYFPHFAGEPKAKDILKMRLYKQQNAKCLYSGKPIELHRLLEKGYVEVDHALPFSRTWDDSFNNKVLVLANENQNKGNLTPFEWLDGKHNSERWRAFKALVETSAFPYAKKQRILSQKLDEKGFIERNLNDTRYVARFLCNFIADNMHLTGEGKRKVFASNGQITALLRSRWGLAKSREDNDRHHALDAVVVACSTVAMQQKITRFVRFEAGDVFTGERIDRETGEIIPLHFPTPWQFFKQEVEIRIFSDNPKLELENRLPDRPQANHEFVQPLFVSRMPTRKMTGQGHMETVKSAKRLNEGISVIKMPLTKLKLKDLELMVNREREKDLYDTLKARLEAFNDDPAKAFAEPFIKKGGAIVKSVRVEQIQKSGVLVREGNGVADNASMVRVDVFTKGGKYFLVPIYTWQVAKGILPNKAATQYKDEEDWEVMDNSATFKFSLHPNDLVKLVTKKKTILGYFNGLNRATGNIDIKEHDLDKSKGKQGIFEGVGIKLALSFEKYQVDELGKNIRLCKPSKRQPVR

SEQ ID NO: 249 - protein, 1052 aa, Haemophilus sputorum
  Haemophilus sputorum CCUG 13788
MKNTSLNYVLGLDLGISSVGWAVVEIDEKENPLSLIDVGVRTFERAETQKGESLALARRLARSARRLTQRRVARLKKAKRLLKSENILLSTDECLPHQVWQLRVEGLERKLERQEWAAVLLHLIKHRGYLSQRKNESKSENKELGALLSGVANNHKLLQQTTYRTPAELAVKKFEVEEGHIRNQQGSYTHTFSRLDLLSEMELLFSRQQHFGNPFTSEKLLENLTALLMWQKPALSGDAILKMLGKCTFENEYKAAKHTYSAERFIWITKLNNLRIQENGLERALNDNERLALMKQPYEKAKLTYAQVRSILNLSDEAIFKGLRYSGEDKKTSETKTVLMEMKAYHQIRLALEKNDLKTEWAELKVNSSLLDEIGTAFSLYKTDEDISTCLAGKLSQPVLNALLENLNFDKFIQLSLKALHKILPLMQQGLRYDEACAEIYGDHYGKKTEENHLLLPQIPADEIRNPVVLRTLTQARKVINGVVRLYSSPARIHIETGREVGKSYQDRRELEKRQEENRKQREKAISEIKTLFPNFSGEPKAKDILKMRLYYQQNAKCLYSGKPLELHRLLEQGYVEIDHALPFSRTWDDSFNNKVLVLANENQNKGNLTPFEWLDGKNNSERWKAFKALVETSAFPYTKKQRILSQKLDEKGFIERNLNDTRYVARFLCNFIADNMHLTGEGKRKVFASNGQITALLRGRWGLAKSREDNDRHHALDAVVVACSTVSMQQKITRFVRFEEGNVFTGERIDRETGEIIPLHFPAPWKFFREEVEIRIFSDNPKLELENRLIARPQANHEFVQPLFVSRMPTRKMIGQGHMETIKSAKRLNEGLSVIKMLLTKLRLKDLESMVNREREKELYEALKARLEAFNDEPAKAFAEPFMKKGGAIVKSVRVEQVQKSGVLVRDGNGVADNASMVRVDVFTKGGKYFLVPIYTWQVAKGILPNKAVIQGKNEEDWEVMDDATFRFSLHQNDLVKLVTKKKTIFGYFNGLNRATGNIDIKEHDLEKSKVKDGIHQSIGIKLALSFEKYQVDELGKNIRLCKSSKRQAVR

SEQ ID NO: 250 - protein, 1052 aa, Haemophilus parainfluenzae
MENKNLHYILGLDLGIASVGWAVVEIDEKENPLRLIDVGVRTFERAETQKGESLALSRRSARSARRLTQRRVARLKKAKRLLKSENILLSTDERLPHQVWQLRVEGLDRKLERQEWAAVLLHLIKHRGYLSQRKNESKSENKELGALLSGVASNHELLQQATYRTPAELAVKKFEVEEGHIRNQQGAYTHTFSRLDLLAEMELLFSRQQHFGNPFASEKLLENLTALLMWQKPALSGEDILKMLGKCTFEDEYKAAKNTYTAERFVWITKLNNLRIQENGLERALSDNERLMLIEQPYEKAKLTYAQVRSILNLSDDAIFKGVRYSGEDKKAIETKTTLMEMKAYHQIRKVLEGNNLKAEWVALKANPTLLDEIGTAFSLYKTDEDISAYLAGKLSQPVLNALLENLSFDKFIQLSLKALYKLLPLMQQGLRYDEACREIYGDHYGKKTEETHHFLPQIPADEIRNPVVLRTLTQARKVINGVVRLYGSPARIHIETGREVGKSYKDRHELKKRQEENRKQREKTISEIKTLFPNFSGEPKGKDILKMRLYYQQNAKCLYSGKPLELHRLFEQKYVEVDHALPLSRTWDDSFNNKVLVLANENQNKGNLTPFEWLDGKNNSERWRTFKALVETSAFPYAKKQRILSQKLDEKGFIERNLNDTRYVARFLCNFIADNMHLTGEGKRKVFASNGQITALLRRRWGLAKSREDNDRHHALDAVLVACSTVAMQQKITRFVRFKAGDVFTGERIDRETGEIIPLHFPTPWQFFKQEVEIRIFSDNPKLELENRLPDRPQANHEFVQPLFVSRMPTRKMTGQGHMETVKSAKRLNEGISMIKMPLTKLKLKDLELMVNREREKDLYDALKTRLEAFNDDPAKAFAEPFMKKGGAIVKSVRVEQVQKSGVLVRQGNGVADNASMVRVDVFTKDGKYFLVPIYTWQVAKGILPNKAVIQGKDEEDWEDIDDATFQFSLHPNDLISVKTKKDEFLGYFNGLNRHTGGINIRTHDLEKSKGKQGIFEGIGVKIALSFEKYQIDELGKNIRLCKPSKRQPVR

SEQ ID NO: 251 - protein, 1052 aa, Haemophilus sputorum
  Haemophilus sputorum HK 2154
MKNTSLNYVLGLDLGISSVGWAVVEIDEKENPLSLIDVGVRTFERAETQKGESLALARRLARSARRLTQRRVARLKKAKRLLKSENILLSTDECLPHQVWQLRVEGLERKLERQEWAAVLLHLIKHRGYLSQRKNESKSENKELGALLSGVANNHKLLQQTTYRTPAELAVKKFEVEEGHIRNQQGSYTHTFSRLDLLSEMELLFSRQQHFGNPFTSEKLLENLTALLMWQKPALSGDAILKMLGKCTFENEYKAAKHTYSAERFIWITKLNNLRIQENGLERALNDNERLALMKQPYEKAKLTYAQVRSILNLSDEAIFKGLRYSGEDKKTSETKTVLMEMKAYHQIRLALEKNDLKTEWAELKVNSSLLDEIGTAFSLYKTDEDISTCLAGKLSQPVLNALLENLNFDKFIQLSLKALHKILPLMQQGLRYDEACAEIYGDHYGKKTEENHLLLPQIPADEIRNPVVLRTLTQARKVINGVVRLYSSPARIHIETGREVGKSYQDRRELEKRQEENRKQREKAISEIKTLFPNFSGEPKAKDILKMRLYYQQNAKCLYSGKPLELHRLLEQGYVEIDHALPFSRTWDDSFNNKVLVLANENQNKGNLTPFEWLDGKNNSERWKAFKALVETSAFPYTKKQRILSQKLDEKGFIERNLNDTRYVARFLCNFIADNMHLTGEGKRKVFASNGQITALLRGRWGLAKSREDNDRHHALDAVVVACSTVSMQQKITRFVRFEEGNVFTGERIDRETGEIIPLHFPAPWKFFREEVEIRIFSDNPKLELENRLIARPQANHEFVQPLFVSRMPTRKMTGQGHMETIKSAKRLNEGLSVIKMLLTKLRLKDLESMVNREREKELYEALKARLEAFNDEPAKAFAEPFMKKGGAIVKSVRVEQVQKSGVLVRDGNGVADNASMVRVDVFTKGGKYFLVPIYTWQVAKGILPNKAVIQGKNEEDWEVMDDATFRFSLHQNDLVKLVTKKKTIFGYFNGLNRATGNIDIKEHDLEKSKVKDGIHQSIGIKLALSFEKYQVDELGKNIRLCKSSKRQAVR

SEQ ID NO: 252 - protein, 1338 aa, Helcococcus kunzii
  Helcococcus kunzii ATCC 51366
MQDYYLGLDIGTNSVGWAVTDENYNLLRKKGKDLWGVRLFKEAQPATERRGHRSSRRRTIRKSLRKQLLRELFEEEINAIDKDFFLRLDESKYWLEDKKIEGKYSLFNDENFTDKDYYEKFPTIFHLRKALIESDDKEDIRLYFLAINQMMKRRGHFLIDGKLSNVEDITPFKECIQNLINEELDTEIETEFYDKAIKIVSDYSLKKTEKKNLIKDLVKETDSIEDSKKIINIFNLLISGKSKVNGIFDDEEILEKIKEDNKEDFYLTSEKYEENLEYFSQLLDYRFELISSLKSIYDYIILQEVLKGKKYLSYAQVERYKNHKEDLRKLKQLIKKYDKNGKIYYQIFRDENFKKGYVAYLGYYKKNKKNVPVKKCDYDTFSKNIKSTLDKICDKEDPLYIELIDKIEKGGFLLKQIVSTNSVIPHQVHELELDKILENLEKNYPSFKEISDGVSKIDKIKMIFNFRIPYYVGPLNDYHKDKVNSNTWIVKNEGFENENIRPWNFSKIVDEHACEEEFIKRMINECSYIPGEKVLPKSSLLYSEYMVLNELNNLRVNGDKLNPKIKKEIVENIYKKERKVTLKKIRNFLIINNYVDSKVEFSGLSDGIKANMSSYIDFAEILDDNFDNNMVEDLIEQITIHVGNVKLLTEKISNKYPNLEKKQINKIVNLKFKDWARFSRKLLVGIEGTEKETGEINTIIGFLRETNENFMELMSNRYTFSEEISEIKKKYIPNKLSKQIVDDLYVSPAVKKMIWQVLNINDELIKVLGKQPKKIFIEMARGKEEKPEVKDSRKNKLIELYKNLGKEGKEWLNRIEDKTEADFRNRALYLYYTQMGRCMYTGEIIDIERLYDKELYDLDHIIPRKMKKDDSIHKNLVLVTRNSNQYEKKDNYPVPEVIKSRENVRHLWYALKKKGLITEEKYNRLTRINPLSDKELSEFIERQLVETRQTTKVVKDLFENYYTDSKIVTVKAGLVSELRRDFEVLKCREINDLNHAHDAFLNIIVGDVWSKKFTSNPYNFVKKNREKYTLNNIFTKNQKDLRGNEIWNCAEGKKRIIKTLNKPSVLFSVENFEQTGQLFDQNIIGKQDYKEKTSYVPIKGDERLQDISKYGGYRGISGAYFFIVEHTEKNKRVKTIESLPIYMKSYVEENGLLDFCTNEMKLVDPKIIVKKLNYKSEIIVDGFKYLISGKTENRLSLETNEYLYWNHTQTTDIKKILNINEKIELEKYNGDIESERENIIKYIQIILEKFKLKPFIKRRNLPNIEINFADYETEKLLQLLVNLIPLTTKYVSPVDLTVISGSKYAGKVLIPKKISNLNEVIFISKSITGIYESRRRII

SEQ ID NO: 253 - protein, 1007 aa, Helicobacter canadensis
  Helicobacter canadensis MIT 98-5491
MKVLGFDIGINSIGWAFVENNELKDCGVRLFTKAENPKTKESLALPRRNARSSRVRLRRRRSRLLSLKHIISKEFGLHYEDYIALDGNLPKAYTGKIESIYKLRYEALSQAISKEDLARVILHIAKHRGYMNKNQKTSQDSEKGAILSAIKENSNKIKHYQTAGEYFYKELFENLRDGTKEFKNIRNKAMKNEKTGNMESTYYNTILASDLEKELKLILEKQQAYHNYSDTFIKEVLEIAFYQRPLKDFSHLVGSCTFYENEKRACKNSYSAWEFIALGKIINTLESIKKDTGEIFSNEIITQILKEVLDKGSLSYTKLRKMINLDEKVKFKGLKYDKEGVEKTNLIEFKKLKEFKKALGEHNLERKTLDEIATHITLTKDENQLKKQLEQYALSQNQIDALAELDFNDHINLSFKALYEILPLMEKGKRYDEACNELGLKAKTSNQKSEFLPAFCDSIFAQELTNPIVNRAISEYRKVLNRLLKKYGKMHKIHIELARDAGLSKEARNKIEKEQKENKDINDKAEKTCKEFGLKPNAKNILKIKLWREQGEICAYSGKKITIDDLKEDKALEVDHIYPYSRSYDDSYNNKVLVFIKENQLKLNQTPYEAFGSNQEKWSKIQVLAQKLPYKKKNRILDENFKNKDQIEFISRNLNDTRYATSLIAKYTKEYLEFLPLSDDEDISLKSGEKGSKTHVQTMNGMLTSVLRHAWGFSQKDRNNHLHHALDAIIIAYSTNSIIKAFSDFKKNQEILKAKLYAKKLTSEEYKNQSKFTGFEKYRSKILEKLDSIFVSKPPNKNTKGALHEQTFYSYQDILEEYKTQEGLKRALECGKVRKIGTKYVVNDRMVRLDIFKKDNKFYGIPIYTMDFALGVLPNKVVTIGTDKDKIKKEWKTIDETYEFCFSLYKGDLVLIQKKEMQESEFAYYNGFDISSASISLEKHDNKFENLTENQKLLFPKAKEGDVEVRGIGIQGLKVFKKYMVTPLGEIQETRTEARQNIQPRKKHGLR

SEQ ID NO: 254 - protein, 1023 aa, Helicobacter cinaedi
  Helicobacter cinaedi CCUG 18818 = ATCC BAA-847
MKIYSFDIGVASIGWAFIENEVLQDCGIRIFTKAENPKNGASLALPRREARGVRKRLARRRGRLNTIKQLLCKEFGLQLEDYLSNDGELPKAYTASKANPLKSPYELRTLALSQKLDSKDLVRVILHIAKHRGYGNKHAKDSKDTESGKVKKAIEFNRKTLAEKGYRSVGEYLYREFFQQSRISQNNGATEFINVRNKAGNYEHCVAQDMLKEELESILNAQRQFGFSLKQDFESKLLTKIFEQRPLKSFADKVGNCCFIAGEKRAPKDSPSAIEFIALSRTINTLINLSKESGEIYNRAIILQIVESTLKKGEISYKELREIIRLDERLRFKDPRLDYSREIKEAEKVKFLEFKQLKGFKKALGESFTTLAISQLDEIAEHIALIKDRVKLNEKLESYALTKEQREALSNLSFSAHINLSLQALKQILPFMRGDNGEQCLDYDESVEKAGLKALSKDTLKGQMLPPLNEFEPYLSNPVVARALAEYRKVLNVLLKQYGSPHKIHIEYAREAKLSSTERQKYEKEQKDNYAANQAAHKKCQELGLEPSSTNLLKLKLWQEQGGLCLYSGAKITISYLQDPTALQVDHIYPYSRSFDDSYMNKCLVLTKANQEKGNRTPFEAFGTDSAKWGVITTLAQKLPHKKRRRILNTAFNDKEAGFKLRNLNDTSYIARLVADYTETYLEFLPLVESENTTLSKGQKGSKKHIAIVNGVLTSTMRYYLGFASKDRDNHLHHALDAVIIGFMNDSVIKAFSDFKKTQETSKAAYYAHTLSKQEYKKQRAFIQLPSGENFRVSVLEKVESVFVSKPPRKRVRGALHEATFYSPNDPKLLKNYGGTKGVERALALGKMRKVGAKIVSNGAMVRVDIFRHKSSGKFYGVPVYTMDFALGILPNKAVVVGKDQNGVIKDWLEMDSSYEFIFSLYKDDVILVQKKEMQRPELCYFVSFDTSGASIKVAKHDNNFSTLTENQKLLFSNATKEEVVGKSIGIQNLKVFEKWQVSVLGEVKRTQSYPRENISLASKAKK

SEQ ID NO: 255 - protein, 1023 aa, Helicobacter cinaedi
  Helicobacter cinaedi CCUG 18818
MKIYSFDIGVASIGWAFIENEVLQDCGIRIFTKAENPKNGASLALPRREARGVRKRLARRRGRLNTIKQLLCKEFGLQLEDYLSNDGELPKAYTASKANPLKSPYELRTLALSQKLDSKDLVRVILHIAKHRGYGNKHAKDSKDTESGKVKKAIEFNRKTLAEKGYRSVGEYLYREFFQQSRISQNNGATEFINVRNKAGNYEHCVAQDMLKEELESILNAQRQFGFSLKQDFENKLLTKIFEQRPLKSFADKVGNCCFIAGEKRAPKDSPSAIEFIALSRTINTLINLSKESGEIYNRAIILQIVESTLKKGEISYKELREIIRLDERLRFKDPRLDYSREIKEAEKVKFLEFKQLKGFKKALGESFTTLAISQLDEIAEHIALIKDRVKLNEKLESYALTKEQREALSNLSFSAHINLSLQALKQILPFMRGDNGEQCLDYDESVEKAGLKALSKDTLKGQMLPPLNEFEPYLSNPVVARALAEYRKVLNVLLKQYGSPHKIHIEYAREAKLSSTERQKYEKEQKDNYAANQAAHKKCQELGLEPSSTNLLKLKLWQEQGGLCLYSGAKITISYLQDPTALQVDHIYPYSRSFDDSYMNKCLVLTKANQEKGNRTPFEAFGTDSAKWGVITTLAQKLPHKKRRRILNTAFNDKEAGFKLRNLNDTSYIARLVADYTETYLEFLPLVESENTTLSKGQKGSKKHIAIVNGVLTSTMRYYLGFASKDRDNHLHHALDAVIIGFMNDSVIKAFSDFKKTQETSKAAYYAHTLSKQEYKKQRAFIQLPSGENFRVSVLEKVESVFVSKPPRKRVRGALHEATFYSPNDPKLLKNYGGTKGVERALALGKMRKVGAKIVSNGAMVRVDIFRHKSSGKFYGVPVYTMDFALGILPNKAVVVGKDQNGVIKDWLEMDSSYEFIFSLYKDDVILVQKKEMQRPELCYFVSFDTSGASIKVAKHDNNFSTLTENQKLLFSNATKEEVVGKSIGIQNLKVFEKWQVSVLGEVKRTQSYPRENISLASKAKK

SEQ ID NO: 256 - protein, 1023 aa, Helicobacter cinaedi
MKIYSFDIGVASIGWAFIENEVLQDCGIRIFTKAENPKNGASLALPRREARGVRKRLARRRGRLNTIKQLLCKEFGLQLEDYLSNDGELPKAYTASKANPLKSPYELRTLALSQKLDSKDLVRVILHIAKHRGYGNKHAKDSKDTESGKVKKAIEFNRKTLAEKGYRSVGEYLYREFFQQSRISQNNGATEFINVRNKAGNYEHCVAQDMLKEELESILNAQRQFGFSLKQDFENKLLTKIFEQRPLKSFADKVGNCCFIAGEKRTPKDSLSAIEFIALSRTINTLINLSKESGEIYNRAIILQIVESTLKKGEISYKELREIIRLDERLRFKDPRLDYSREIKEAEKVKFLEFKQLKGFKKALGESFTTLARSQLDEIAEHIALIKDRVKLNEKLESYALTKEQREALSNLSFSAHINLSLQALKQILPFMRGDNGEQCLDYDESVEKAGLKALSKDTLKGQMLPPLNEFEPYLSNPVVARALAEYRKVLNALLKQYGSPHKIHIEYAREAKLSSTERQKYEKEQKDNYAANQAAHKKCQELGLEPSSTNLLKLKLWQEQGGLCLYSGAKITISYLQDPTALQVDHIYPYSRSFDDSYMNKCLVLTKANQEKGNRTPFEAFGTDSAKWGVITTLAQKLPHKKRRRILNTAFNDKEAGFKLRNLNDTSYIARLVADYTETYLEFLPLVESENTTLGKGQKGSKKHIAIVNGALTSTMRYYLGFASKDRDNHLHHALDAVIIGFMNDSVIKAFSDFKKTQETSKAAYYAHTLSKQEYKKQRAFIQLPSGENFRASVLEKVESVFVSKPPRKRVRGALHEATFYSPNDPKLLKNYGGTKGVERALALGKMRKVGAKIVSNGAMVRVDIFRHKSSGKFYGVPVYTMDFALGILPNKAVVVGKDKNGVIKDWLEMDSSYEFIFSLYKDDLLLVQKKEMAEPELCYFMSFNSSIAQISVAKHDNNFSTLTKNQKLLFSNATQEDVSGKSIGIQNLQVFEKWQVSVLGEVKRTQSYPRENISLASKAKK

SEQ ID NO: 257 - protein, 1024 aa, Helicobacter mustelae
MIRTLGIDIGIASIGWAVIEGEYTDKGLENKEIVASGVRVFTKAENPKNKESLALPRTLARSARRRNARKKGRIQQVKHYLSKALGLDLECFVQGEKLATLFQTSKDFLSPWELRERALYRVLDKEELARVILHIAKRRGYDDITYGVEDNDSGKIKKAIAENSKRIKEEQCKTIGEMMYKLYFQKSLNVRNKKESYNRCVGRSELREELKTIFQIQQELKSPWVNEELIYKLLGNPDAQSKQEREGLIFYQRPLKGFGDKIGKCSHIKKGENSPYRACKHAPSAEEFVALTKSINFLKNLTNRHGLCFSQEDMCVYLGKILQEAQKNEKGLTYSKLKLLLDLPSDFEFLGLDYSGKNPEKAVFLSLPSTFKLNKITQDRKTQDKIANILGANKDWEAILKELESLQLSKEQIQTIKDAKLNFSKHINLSLEALYHLLPLMREGKRYDEGVEILQERGIFSKPQPKNRQLLPPLSELAKEESYFDIPNPVLRRALSEFRKVVNALLEKYGGFHYFHIELTRDVCKAKSARMQLEKINKKNKSENDAASQLLEVLGLPNTYNNRLKCKLWKQQEEYCLYSGEKITIDHLKDQRALQIDHAFPLSRSLDDSQSNKVLCLTSSNQEKSNKTPYEWLGSDEKKWDMYVGRVYSSNFSPSKKRKLTQKNFKERNEEDFLARNLVDTGYIGRVTKEYIKHSLSFLPLPDGKKEHIRIISGSMTSTMRSFWGVQEKNRDHHLHHAQDAIIIACIEPSMIQKYTTYLKDKETHRLKSHQKAQILREGDHKLSLRWPMSNFKDKIQESIQNIIPSHHVSHKVTGELHQETVRTKEFYYQAFGGEEGVKKALKFGKIREINQGIVDNGAMVRVDIFKSKDKGKFYAVPIYTYDFAIGKLPNKAIVQGKKNGIIKDWLEMDENYEFCFSLFKNDCIKIQTKEMQEAVLAIYKSTNSAKATIELEHLSKYALKNEDEEKMFTDTDKEKNKTMTRESCGIQGLKVFQKVKLSVLGEVLEHKPRNRQNIALKTTPKHV

SEQ ID NO: 258 - protein, 1688 aa, Ignavibacterium album
MEFKKVLGLDIGTNSIGCALLSLPKSIQDYGKGGRLEWLTSRVIPLDADYMKAFIDGKNGLPQVITPAGKRRQKRGSRRLKHRYKLRRSRLIRVFKTLNWLPEDFPLDNPKRIKETISTEGKFSFRISDYVPISDESYREFYREFGYPENEIEQVIEEINFRRKTKGKNKNPMIKLLPEDWVVYYLRKKALIKPTTKEELIRIIYLFNQRRGFKSSRKDLTETAILDYDEFAKRLAEKEKYSAENYETKFVSITKVKEVVELKTDGRKGKKRFKVILEDSRIEPYEIERKEKPDWEGKEYTFLVTQKLEKGKFKQNKPDLPKEEDWALCTTALDNRMGSKHPGEFFFDELLKAFKEKRGYKIRQYPVNRWRYKKELEFIWTKQCQLNPELNNLNINKEILRKLATVLYPSQSKFFGPKIKEFENSDVLHIISEDIIYYQRDLKSQKSLISECRYEKRKGIDGEIYGLKCIPKSSPLYQEFRIWQDIHNIKVIRKESEVNGKKKINIDETQLYINENIKEKLFELFNSKDSLSEKDILELISLNIINSGIKISKKEEETTHRINLFANRKELKGNETKSRYRKVFKKLGFDGEYILNHPSKLNRLWHSDYSNDYADKEKTEKSILSSLGWKNRNGKWEKSKNYDVFNLPLEVAKAIANLPPLKKEYGSYSALAIRKMLVVMRDGKYWQHPDQIAKDQENTSLMLFDKNLIQLTNNQRKVLNKYLLTLAEVQKRSTLIKQKLNEIEHNPYKLELVSDQDLEKQVLKSFLEKKNESDYLKGLKTYQAGYLIYGKHSEKDVPIVNSPDELGEYIRKKLPNNSLRNPIVEQVIRETIFIVRDVWKSFGIIDEIHIELGRELKNNSEERKKTSESQEKNFQEKERARKLLKELLNSSNFEHYDENGNKIFSSFTVNPNPDSPLDIEKFRIWKNQSGLTDEELNKKLKDEKIPTEIEVKKYILWLTQKCRSPYTGKIIPLSKLFDSNVYEIEHIIPRSKMKNDSTNNLVICELGVNKAKGDRLAANFISESNGKCKFGEVEYTLLKYGDYLQYCKDTFKYQKAKYKNLLATEPPEDFIERQINDTRYIGRKLAELLTPVVKDSKNIIFTIGSITSELKITWGLNGVWKDILRPRFKRLESIINKKLIFQDEDDPNKYHFDLSINPQLDKEGLKRLDHRHHALDATIIAATTREHVRYLNSLNAADNDEEKREYFLSLCNHKIRDFKLPWENFTSEVKSKLLSCVVSYKESKPILSDPFNKYLKWEYKNGKWQKVFAIQIKNDRWKAVRRSMFKEPIGTVWIKKIKEVSLKEAIKIQAIWEEVKNDPVRKKKEKYIYDDYAQKVIAKIVQELGLSSSMRKQDDEKLNKFINEAKVSAGVNKNLNTTNKTIYNLEGRFYEKIKVAEYVLYKAKRMPLNKKEYIEKLSLQKMFNDLPNFILEKSILDNYPEILKELESDNKYIIEPHKKNNPVNRLLLEHILEYHNNPKEAFSTEGLEKLNKKAINKIGKPIKYITRLDGDINEEEIFRGAVFETDKGSNVYFVMYENNQTKDREFLKPNPSISVLKAIEHKNKIDFFAPNRLGFSRIILSPGDLVYVPTNDQYVLIKDNSSNETIINWDDNEFISNRIYQVKKFTGNSCYFLKNDIASLILSYSASNGVGEFGSQNISEYSVDDPPIRIKDVCIKIRVDRLGNVRPL

SEQ ID NO: 259 - protein, 1092 aa, Ilyobacter polytropus
MKYSIGLDIGIASVGWSVINKDKERIEDMGVRIFQKAENPKDGSSLASSRREKRGSRRRNRRKKHRLDRIKNILCESGLVKKNEIEKIYKNAYLKSPWELRAKSLEAKISNKEIAQILLHIAKRRGFKSFRKTDRNADDTGKLLSGIQENKKIMEEKGYLTIGDMVAKDPKFNTHVRNKAGSYLFSFSRKLLEDEVRKIQAKQKELGNTHFTDDVLEKYIEVFNSQRNFDEGPSKPSPYYSEIGQIAKMIGNCTFESSEKRTAKNTWSGERFVFLQKLNNFRIVGLSGKRPLTEEERDIVEKEVYLKKEVRYEKLRKILYLKEEERFGDLNYSKDEKQDKKTEKTKFISLIGNYTIKKLNLSEKLKSEIEEDKSKLDKIIEILTFNKSDKTIESNLKKLELSREDIEILLSEEFSGTLNLSLKAIKKILPYLEKGLSYNEACEKADYDYKNNGIKFKRGELLPVVDKDLIANPVVLRAISQTRKVVNAIIRKYGTPHTIHVEVARDLAKSYDDRQTIIKENKKRELENEKTKKFISEEFGIKNVKGKLLLKYRLYQEQEGRCAYSRKELSLSEVILDESMTDIDHIIPYSRSMDDSYSNKVLVLSGENRKKSNLLPKEYFDRQGRDWDTFVLNVKAMKIHPRKKSNLLKEKFTREDNKDWKSRALNDTRYISRFVANYLENALEYRDDSPKKRVFMIPGQLTAQLRARWRLNKVRENGDLHHALDAAVVAVTDQKAINNISNISRYKELKNCKDVIPSIEYHADEETGEVYFEEVKDTRFPMPWSGFDLELQKRLESENPREEFYNLLSDKRYLGWFNYEEGFIEKLRPVFVSRMPNRGVKGQAHQETIRSSKKISNQIAVSKKPLNSIKLKDLEKMQGRDTDRKLYEALKNRLEEYDDKPEKAFAEPFYKPTNSGKRGPLVRGIKVEEKQNVGVYVNGGQASNGSMVRIDVFRKNGKFYTVPIYVHQTLLKELPNRAINGKPYKDWDLIDGSFEFLYSFYPNDLIEIEFGKSKSIKNDNKLTKTEIPEVNLSEVLGYYRGMDTSTGAATIDTQDGKIQMRIGIKTVKNIKKYQVDVLGNVYKVKREKRQTF

SEQ ID NO: 260 - protein, 1354 aa, Indibacter alkaliphilus
  Indibacter alkaliphilus LW1
MKKILGLDLGTTSIGWAFIKEPEKDVVGSEIVDMGVRIVPLSSDEENDFAKGNTISINADRTLKRGARRNLQRFKQRRNALLETFKEKNLIPSNFQYAEDGPSSTFSTLKLRDKAAKEKIELDDFVKVLLQINKKRGYKSSRKAMSEEDEGTAIDSMGIAKELYENDLTPGQWVYEALKNGRKNVPDFYRSDLQEEFKKIVNYQSEFYPDILNTSFVEDWMGKASTPTKQYFNKRGVQLAENKGKREERRLQEYKWRAEAVNFKIDLSEIALILSQINSQISNSSGYLGAISDRSKELYFKNLTVGQYLYQQVKKNPHTRLKGQVFYRQDYLDEFEKIWSVQSSFYPQLNDELKQEVRDVTIFFQRRLKSQKHLISNCEFEEHHKVVPKSHPIFQEFRIWQNLNNLTLIKKDNLNEKCELALEDKTALANELAFKKELSVKDALKVLGLKPSDWEFNFTKIEGNRTNHAFFEAFAKIIELEDGEPIDLGNLKADDILDQFSEAFLRIGIDTELLQVNSDIEGAEYEKQSYIQFWHLLYSSEDDQKLKQNLIRKFGFKPEHAKILASISLQDDHASLSSRAIKKILPHLQSGLIYDKACTYAGYNHSSSFTKDENEKRELRAELELLKKNSLRNPVVEKILNQMINVVNAILKDPNLGRPDEIRVEMARELKANAEQRKNMTSNIASATRDHEKYREILKKEFGLKRVTKNDLLRYKLWLETDGISLYTGKPIEASKLFSKEYDIEHIIPKARLFDDSFSNKTICERQLNIDKANVTAFSFLQNKLSADEFEQYQSRVKSLYGKLSKAKIQKLLMANDKIPEDFIARQLQETRYISKKAKEILFEITMRVSVTTGTITDKLREDWGLVEIMKELNWEKYDKLGLTYTIEGKHGERLNKIKDWNKRNDHRHHAMDALTVALTKPAYIQYLNNLNAKAIGNKKGTEIFAIEQKYLKRENGKLCFIPPIENIRAEAKKHLSKILVSYKAKNKVVTINKNKTKKKAGFNEQTALTPRGQLHKETVYGKSFHYSTKFEKIGASFDAQKINTVAKKEEREALLKRLAENGNDPKKAFTGKNSLNKMPIYLDLGKNIKLSEKVKTVVLEQNYTIRKNIDPDLKVDKVIDVGIKRILESRLEEFGGNAKLAFSNLEENPIWLNKEKGIPIKRVKISGVSNVESLHVKKDHFGEKILDEEGNEIPVDFVSTGNNHHVAIYEDEDGNLQDEVVNFYEAVIRRNQGESIIKYRHEEGWNFLYSIKQNEFFVFPSQDFNPNDFDLLDPKNYDLISPNLYRAQKFSKVMYGNSAVRDYVFRHHLETVLNDVKELKDVAYKQLKSLQYLNGIKKVRLNHLGQIIQVGEY

SEQ ID NO: 261 - protein, 1397 aa, Joostella marina
  Joostella marina DSM 19592
MKKVLGLDLGTNSIGWALVNEATKEEKKEGKSSEIIKLGVRVNPLTVDEKTNFEKGRPLSTNADRTLKRSARRNLQRYKLRRRNLIEILIKNGFITKDTPLTETGKDTTHQTLKLRAKSAKEKVDLKDFAKILLTINKKRGYKSSRKVNSDEDGLAIDGMAVAKHLYEQNLTPGQYVLNLLQKNKKYVPDFYRSDLQEEFKNIWNNQKTYYFDILTDTLFEELKDKNKSQTWAICKKPFDIAGIKQIGKASDKRLERYKWRTEGLTQKLNLEYLAIALQEINNDINKSSGYLGAISDRSKELFFNKETVGENLYRQLVKTPHTSLRNQVFYRQDYLDEFETIWETQAKFYPQLTHTLKEEIRDVIIFYQRKLKSQKSLISFCQFESWEQTYIEKETGKSKTRTVGRKVIPKSSPLFQEFKIWQNLNSLEFRNSDEGEIIEFIKLDEDIRQTVFEELNLRGNLKPNDVLKILGNYISLGKVSQWKCNFEEIEGNRTNAALYNVYQIIAENEGYGFDWAKKTASEINKELKNIFPQLGIDASILDFDFTQANFDKQTSYQLWHLLYSAEEDFKISEEDKVLYGNSSVSLKKKLHQKYGFKPEYTKLLTNISLQPDYGNLSAKAICNILPYLKENNVYSEACDLTGYNHSNFLTAEEQAKRPLKPILELLKKNSLRNPVVEKILNQMVNVVNQVIETYGKPDEIRIELTRELKKSAKERANMTKSIADATRRNDDYRKTIIKEFGIPNPTKSDVVRYRLWQELASRGYKDIFTDTEIKPQELFSNKIDIEHIIPKALLFDDSFSNKTLAFKKDNLKKANRTAYDFIANDYAPNLENYIERVESLHKDRKITRAKRNKLLMLQSKLPDGFIERDLRNSQYITKEAKKMLYEVCRTVVSTSGSITDKLREDWDLINVMKELNFPKYKALGLTEKIERYDIGAEKMKEVEIIEDWNKRNDHRHHAIDALTVAFSTHSHIQYLNHLNARRDEGHKKHAAIIAIESTITEKEGNKKRRFIAPLPNFRLQAKEHIESILVSFKNKNKVVTNNINKTKRIKKDKFNTKVQLTPRGQLHKETIYGKIKQPLEKHIKLNKSFTLEQAKLIIDKRQREKVLNHLEKYAHNSDIAFNSKTLKKNPLLISDEPLKEVLCFEEVFTIRKDISYDNFKNEKQLDKVIDEKVKQALKERINQYNGDFREAFSDIERNPIWLNKAKGICVKRATIKGVSNAEPLHTAKNHLGEEVLTENKEQIPVDYVSTGNNHHVAIYEDEDGNLQEKVVSFYEAVIRVNEGLPIIDKEYNKSLGWTFKFTMKQNEMFVFPSEDFNPTEIDLLDQKNASLISPNLFRVQKFTIKDYFFRHHLETTVENNNTLKNTTWRREGLSGIYGIIKIRLNHLGEIVQVGEY

SEQ ID NO: 262 - protein, 1060 aa, Kingella kingae
  Kingella kingae PYKK081
MAAKSLNYILGLDLGIASCGWAVVEMDEQENPLRLIDVGVRTFEEAENPKDGSSLAETRRLARAQRRLISRRANRMNKLCRLLKQENVLQANDYDEKGLIIGLPNQAWELRAQGLDRKLEPKEWAAVLIHLVKHRGYLSQRKNESQTADKELGALLSGMNHNHQLLQSQSNQYRTPAELAIKQFATQDGHIRNQRGAYTHTFNRLDLQNELNQLFDAQTRLGNPHVSGSLKTAINDLLMNQKAALSGDAILEMLGRCTFEPSEYKAAKNTYSAERFVWLGKLTNLRIQDNGLESALSREQRELLLNEPYNKTKLTYQQVRKLLRLPETAFFKGLRYGKDNAESATFMEMKSYHAIRKSLENKSLKSEWEKLKTQPKLLDLIGTAFSIYKTDDEIAGCLKNQLPENVIIALQGQLNFSNFMELSLKALEKLLPLMEQGLRYDEACTQIYGNRHEKIADKTEKFLPNIPADKLRNPVVLRTLTQARKVINAIIRRYGSPARVHIETGREVGKSFSDRDKLKKQQEENQEQRRRAIDEWKQFFPNAAHEPKAVDILKLRLYQLQQGKCLYSGLPIDVRRLPEKGYVEIDHALPFSRTWDDSFNNKILVLASENQNKGNQTPYEYLRGADNSESWRLFVENVQNCQFSPNKKQKIMAKQLDEKGFLERNLNDTRYVSRFLCQFISEHLHLTGKGKKRVFASNGQITALLRGRWGLSKNREENDRHHAVDAVVVACSTVAMQQKITQFVRYQKGNVFTGERIDKETGEVISIHFPTPWEHFREEVMIRVFDDNPLRTLPEKLPNRPEALHEYVMPLFVSRMPTRKMTGQGHKETIKSAKRLDEKISVLRVPLTQLKLNDLENMVNREREPALYEALKARLEQFKNDPAKAFAEPFFKQGGQQVKAVRVEIVQKSGMLLRKINGVADNGSMVRVDVFEKSGKFYLVPIYAWQVAEGILPNYAVVAHKDESDWILMDESYHFKFALYKNDLLEVQTKKGGIMGYFASLDRATGAITIREHDRDKKKCKDGEHRSIGVKMASSFKKLQVDELGKNIHETRSRKRPNIG

SEQ ID NO: 263 - protein, 1391 aa, Kordia algicida
  Kordia algicida OT-1
MKKILGLDLGTNSIGWALVNEAEHEHEQSSIVKLGVRVNPLSVDEKTNFEKGRPLSINADRTSKRSARRNLQRFKLRRKNLINLLLKHHIISNETILTEVGKNTTHQTLKLRSKATQEKISLEEFARILLSINKKRGYKSSRKEKNEDEGFTIDGMAIAKELYDNQLTPGQYVYNILQDGKNYIPDFYRSDLQAEFDDVWQFQKKFYSSILTDEFYLKLKGQGKENTRKLFLAIHQVYTAENKGKRDAVKLQYYKWRSEAVKKQLSIEEVAYVLVEINNNINKSSGYLGAISDRSKALYFNNETVGEYLYGQLVKNRHNSLRNQVFYRQDYLDEFEKIWETQAKFYDELTNELKQEIRDVVIFYQRKLKSQKHLISDCLFEKHHKAIPKSSPLFQEFKIWQNLNYLEFVHTQSKEKIFFSELDDETRQFVFAELNIRGTLKIKEIKKLIGLETPVYWKSNFDEIEGNRTNQVLYNVYQNIADDLGYGFDWSKKHAFEINAELQAIFKDVGIDTAILNFDASIEENDFDKQKSYQLWHLLYSAEDTDKATEEDKLIYGNINTKLKKQLHQKYGFEAKYGNLLANISLQQDYGNLSAKAIKKILPYLESGNSFYEACTIVGYNPSNSLTKEQQQNRKLKDKLELLPKNSLRNPVVEKILNQKVNLINQLIDEYGKPDEVRIELARELKKSAKQRADLSKHINDATLKNQNIRKTLQKDFGIQNPSKNDVIRYKLYDELKDNGYKTLFTNKYIPKEQLFSKDVDIEHIIPKAILFDDSFSNKTLAYRNVNLAKADATAFDFISSKHLDDLDNYKARVETLFQSKRISKGKYKKLLMTRQNLPEDFIERDLRNSQYIAKKATAMLKEVFRSVVPTSGRITDKLREDWDLVNVMKELNLPKYRTLGLTEFIERKNGNKIEQIIDWTKRNDHRHHAMDALTVAFTTHNHIQYLNNLNVTHGLNGVDTDHEKSRLYAIKQAITKVYIVGKTKKRKFIPPMENFRSHAKNHLEGILISFKNKNKVVTKNKNRTKTKTKGVFNEKIQLTPRGQLHKETIYGHAKKVIVTKEKVSSKFTHEKILQVTKPAYREALLKRLASFKNDPKKAFSGKNALSKNPLYFDITSGKKVPDTVKLSYFENSYVIRKEVNSDNFKNEKSLQKVLDVGIRRILEKRLADYNGNAKEAFSNLEKNPIWKDKEKGVCIKKVRIEALKNAEPLHVKKDHLGKIILDDENKSTPVDFISTGNNHHVAIYEDKDGKLHDKVVSFYEVVSRVNLGLPIIDKSFNSHLDWKFLFSMKQNEMFVFPSEDFNPKEIDIGNPKNNELISKYLFRVQKFSKVTYGNSAVRDYVFRHHLETELIDKKELKGITYYQLKSIGMLEKLVKVRINHIGKIVHIGEY

SEQ ID NO: 264 - protein, 1314 aa, Lactobacillus animalis
  Lactobacillus animalis KCTC 3501
MLKKDYSIGLDIGTNSVGHAVVTDDYKVPTKKMKVFGDTSKKTIKKNMLGVLLFNEGQTAADTRLKRGTRRRYTRRKNRLRYLQEIFAPELAKVDPNFLYRLEESSLVAEDKKYDVYPIFGKREEELLYHDTYKTIYHLRSALANNDQPADLRLVYLALAHIIKYRGNFLLEGEIDLRTTDINKVFAEFSETLNENSDENLGKLDVADIFKNNTFSKTKKSEELLKLSGAKKNQLAHQLFKMMVGNMGSFKKVLGTDEEHKLSFGKDTYEDDLNDLLAEAGDQYLDIFVAAKKVYDAAILASILDVKDTQTKTVFSQAMIERYEEHQKDLIELKRVFKKYLPEKCHDFFSEPKISGYAGYIDGKVSEEDFYKYTKKTLKGIPETEEILQKIDANNYLRKQRTFDNGAIPHQVHLKELVAIVENQGKYYPFLRENKDKFEKILNFRIPYYVGPLARGNSKFAWLTRAGEGKITPYNFDEMIDKETSAEDFIKHMTINDLYLPTEPVLPKHSLLYERYTIFNELAGVRYVTENGEAKYFDAQTKRSIFELFKLDRKVSEKMVIKHLKVVMPAIRIQALKGLDNGKFNASYGTYKDLVDMGVAPELLNDEVNSEKWEDIIKTLTIFEGRKLIKRRLENYRDFLGEDILRKLSRKKYTGWGRLSAKLLDGIYDKKTHKTILDCLMTEDYSQNFMQLINDDNYSFKETIKNAQVIEKEETLAKTVQELPGSPAIKKGILQSLEIVDEIIKVMGYKPKSIVVEMARETQKTHGTRKREDRVQQIVENLKDANELPEKLPSNAELSDERKYLYCLQNGRDMYTGAPLDYDHLQFYDVDHIIPQSFLKDDSIENKVLTIKKENVRKTNGLPSEAVIQKMGSFWKKLLDAGAMTNKKYDNLRRNLHGGLNEKLKERFIERQLVETRQITKYVAQLLDQRLNYDGNGVELDEKIAIVTLKAQLASQFRSEFKLRKVRALNNLHHAHDAYLNAIVANLIMAKYPELEPEFVYGKYRKAKFKGLGKATAKNTLYANVLYFLKENEVYPFWDKARDLPTIKRYLYRAQVNKVRKAERQIGGFSDEMLVPKSDSGKLLPRKEGLDPVKYGGYAKAVESYAVLITADEVKKGKTKKVKTLVNIPIIDSKKYEADPTAYLASRGYTNVTNSFILPKYSLLEDPEGRRRYLASFKEFQKANELILPQHLVELLYWVNAKDGEQKLEDHKAEFKELFDKIMEFADKYVVAPKNSEKIRRLYEENQDATPMELGKNFVELLRYTADGAASDFKFFGENIPRKRYNSAGSLLNGTLIYQSKTGLYETRIDLGKL

SEQ ID NO: 265 - protein, 1377 aa, Lactobacillus brevis
  Lactobacillus brevis subsp. gravesensis ATCC 27305
MESNHDGEQVKYTLGLDIGTSSIGYAAIDKHQKPIRAKGKHVIGVRLFQEGQTAADRRAFRTTRRRLKRRKWRLNLLNRLFDPYLSEVDPNFLPRLRQSNLSPKDDNKHFNGSTLFPDKTDAAFYRQYPTMYHLRYALMTEKRKFDIREVYLAIHHIVKYRGNFLNSATVDSFKTSNIDFTSQFDRLNELYRQVILDEPFQINMDQVDEMTNKLLDNDALKLDTQKQVAKLLPVIYNDKPIDKQYTRIATEFSKAILGYKTKLDVILNLDTQNAKDWVIRLDDEDIDDKLPALVENLDESRQEIVTIIRDLYAQITLNAIVPKGKSLSESMVDKYNDHKDHLDLLMGLIHELGDDSAKGIKLREAYTQYVGKSDDKTLNQDDFYAAIKKNLDEDSKRSPKIQRLIEQASFMPKQRTSANGVIPHQLHQLELDRIIENQGRYYPFLKKPNPNTHKPNGGKYKLDELVAFRIPYYVGPLITKRDQEKTSGADFAWMIRKPGQEGEITPWNFDQKVDRMASANRFIRRMTTKDSYLVAEDVLPDASLIYEKFKALNELNMLKVNDSRLSPSQKQDLFNNLFKKQKTIRTKKLQTYIRTNWELPSVMISGLADPDKFNSSLSTYIDFRDIFGEKVDDPNRQADYEEIIEWSTVFEDRKIYQAKLNQLDWLTEPQRKALLTKRYTGWGRLSKKLLTGLKDQNGDSILDQLWKTNDNFMQIQSRDEFAKQIHDENAKQFHEANNVDDILDDAFTSPQNKKAIRQVDKVVQDVVKAVGYAPDKIAIEFTRSLENNPQRTVSRQRQLQAAYKNIPREIMKSGLMAELGSVADSKKVLSDKLYLYFTQMGKDMYEDKTINIDNLPNYDIDHILPQAFIKDDSIDNRVLISKEENARKSNRVPLKFFGAKRMGFWKDLLNNGLISNRKFQNLTTDPEKISKYSAKGFIHRQLVETSQVIRLVANILGNEYSQAGTTIIEVSAKMNRQLREDFHLIKNRNVNDYHHAMDAYLTAYVGDYLYLRYPKLRPYFVYGDFKKAEDQDLNIRNFNFLHDLKDNESLDKIVDSETGEIVWEKHGSVKQLKKVYHYKFMLVSQEVYTRQDALFNQTIYPASDADKRKLIPIKNSKPVDVYGGYSGNIDAYMAIVRVHGKKEDNYKVVGIPMRAVTKLKKAEKEGHDSYLNAVHEVLKPQFTKKKKNRKTGEITETVDEFDVLLGKVYYRQLIVDGNKKFMLGSSSYQYNAKQLVLSDKAMQVLSKNGKVKSQDENQNLIDVYDEILEKVDQYFELYDQRHYRESLHKGRGIFVNLPLSNQYDGSKLTSYGKYETIDAILNGLHANATMSNLRYLGISSPFGKMQASNGLTIDPDSIICYQSPTGLFERQIKLSDL

SEQ ID NO: 266 - protein, 1371 aa, Lactobacillus buchneri
MKVNNYHIGLDIGTSSIGWVAIGKDGKPLRVKGKTAIGARLFQEGNPAADRRMFRTTRRRLSRRKWRLKLLEEIFDPYITPVDSTFFARLKQSNLSPKDSRKEFKGSMLFPDLTDMQYHKNYPTIYHLRHALMTQDKKFDIRMVYLAIHHIVKYRGNFLNSTPVDSFKASKVDFVDQFKKLNELYAAINPEESFKINLANSEDIGHQFLDPSIRKFDKKKQIPKIVPVMMNDKVTDRLNGKIASEIIHAILGYKAKLDVVLQCTPVDSKPWALKFDDEDIDAKLEKILPEMDENQQSIVAILQNLYSQVTLNQIVPNGMSLSESMIEKYNDHHDHLKLYKKLIDQLADPKKKAVLKKAYSQYVGDDGKVIEQAEFWSSVKKNLDDSELSKQIMDLIDAEKFMPKQRTSQNGVIPHQLHQRELDEIIEHQSKYYPWLVEINPNKHDLHLAKYKIEQLVAFRVPYYVGPMITPKDQAESAETVFSWMERKGTETGQITPWNFDEKVDRKASANRFIKRMTTKDTYLIGEDVLPDESLLYEKFKVLNELNMVRVNGKLLKVADKQAIFQDLFENYKHVSVKKLQNYIKAKTGLPSDPEISGLSDPEHFNNSLGTYNDFKKLFGSKVDEPDLQDDFEKIVEWSTVFEDKKILREKLNEITWLSDQQKDVLESSRYQGWGRLSKKLLTGIVNDQGERIIDKLWNTNKNFMQIQSDDDFAKRIHEANADQMQAVDVEDVLADAYTSPQNKKAIRQVVKVVDDIQKAMGGVAPKYISIEFTRSEDRNPRRTISRQRQLENTLKDTAKSLAKSINPELLSELDNAAKSKKGLTDRLYLYFTQLGKDIYTGEPINIDELNKYDIDHILPQAFIKDNSLDNRVLVLTAVNNGKSDNVPLRMFGAKMGHFWKQLAEAGLISKRKLKNLQTDPDTISKYAMHGFIRRQLVETSQVIKLVANILGDKYRNDDTKIIEITARMNHQMRDEFGFIKNREINDYHHAFDAYLTAFLGRYLYHRYIKLRPYFVYGDFKKFREDKVTMRNFNFLHDLTDDTQEKIADAETGEVIWDRENSIQQLKDVYHYKFMLISHEVYTLRGAMFNQTVYPASDAGKRKLIPVKADRPVNVYGGYSGSADAYMAIVRIHNKKGDKYRVVGVPMRALDRLDAAKNVSDADFDRALKDVLAPQLTKTKKSRKTGEITQVIEDFEIVLGKVMYRQLMIDGDKKFMLGSSTYQYNAKQLVLSDQSVKTLASKGRLDPLQESMDYNNVYTEILDKVNQYFSLYDMNKFRHKLNLGFSKFISFPNHNVLDGNTKVSSGKREILQEILNGLHANPTFGNLKDVGITTPFGQLQQPNGILLSDETKIRYQSPTGLFERTVSLKDL

SEQ ID NO: 267 - protein, 1371 aa, Lactobacillus buchneri
MKVNNYHIGLDIGTSSIGWVAIGEDGKPLRIKGKTAIGARLFQEGNPAADRRMFRTTRRRLSRRKWRLKLLEEIFDPYITPVDSTFFARLKQSNLSPKDSRKEFKGSMLFPDLTDMQYHKDYPTIYHLRHALMTQDEKFDIRMVYLAIHHIVKYRGNFLNSTPVDSFKASKVNFVDQFKKLNELYTAINPEESFQINLANSEDIGHQFLDPSIRKFDKKKQIPKIVPVSVDDKATDKINGKIASEIINAILGYKSKLDVVVQCTPVDSKSWALKFDEEDIDAKLQKILPEMDENQQSIIAILQNLYSQVTLNQIVPNGMSLSESMIEKYNDHHDHLKLYKKIIDQLADPKKKAALKKAYSQYVGDDGKVIEQADFWSSVKKNLDDSDLSKQIMDLIDAEKFMPKQRTSQNGVIPHQLHQRELDEIIEHQSKYYPWLAEINPNKHDLHLAKYKIEELVAFRVPYYVGPMITPDDQAKSAETVFSWMERKGKEAGQITPWNFDEKVDRNASANRFIKRMTTKDTYLIGEDVLPDESLLYEKFKVLNELNMVRVNGKLLKVADKQAIFQDLFENYKHISVKKLQNYIKSKTGLPSDPEISGLSDPEYFNNSLGTYNDFKKLFGNKVDEPDLQDDFEKIVEWSTVFEDKRILREKLNEITWLSDQQKDVLESSRYQGWGRLSKKLLTGIVNDQGERIIDELWNTNKNFMQIQSDNDFAKRIHEANADQMKAVDVEDVLADAYTSPQNKKAIRQVVKVVDDIQKAMGGVAPKYISIEFTRSEDRNPRRTISRQRQLENTLKDTAKSLAKSINPELLSELDNAAKSKKGLTDRLYLYFTQLGKDIYTGKPINIDEISTYDIDHILPQAFVKDDSLNNRVLVSKAINNGKSDNVPVQLFGAKMGHFWKQLAEAGLISKRKLKNLQTDPDTISKYAMHGFIRRQLVETSQVIKLVANILGDKYRNDNTKIIEITARMNHQMRDEFGFIKNREINDYHHAFDAYLTAFLGRYLYHRYIKLRPYFVYGDFKKFKEDKVTMRNFNFLHDLTDDTQEKIADAETGEVIWDRENSIQQLKDVYHYKFMLISHEVYTLRGAMFNQTVYPASDAGKRKLIPIKADRPINVYGGYSGSADAYMAIVRIHNKKGDKYRVVGVPMRARDRLDAAKKVSDADCDRALKDVLTPQLTKTKKSRKTGEITQVVEDFEIVLGKVMYRQLMIDGDKKFMLGSSTYQYNAKQLVLSDQSVKTLASKGRLDPLQESMDYNNVYTEILDKVNQYFSLYDMNKFRHKLNLGFSKFISFPNHNVFDGNTKASSGKREILEEVLNGLHANPTFGNLKDIGITTPFGQLQQPNGILLSDEAKIRYQSPTGLFERTVSLKDL

SEQ ID NO: 268 - protein, 1361 aa, Lactobacillus casei
  Lactobacillus casei BL23
MTKLGKPYGIGVDIGSNSIGFAAVDENSHLIRLKGKTVIGARLFEEGKAAADRRASRTTRRRLSRNRWRLSFLRDFFESHITPTGPNFFMRQKYSEISPKDKARYKYEKRLFNDRTDAEFYQQYPTMYHLRNRLLTDPSKADVREIYFAIHHILKSRGHFLTSGYAKDFNTNKVALNEIFPALQDAYAQVYPDLDITFDENKVNEFKTVLLNEKATPSDTQRALVNLLLAEDGDKDILKQQKQVLTEFAKAVVGLKTKLNVALGTEVDSSEATVWNFSLGQLDDKWAGIESAMTDEGTEILDQIRDLYRARLLNGIVPAGKTLSQAKVDDYAQHHEDLELFKDYLKQLEDDGTAKAIRQLYDRYIDGDDAKPFVREDFVKALTKEVTAHPNAKSPELLERLAQPDFMLKQRNKANGAIPVQMQQRELDQIIKNQSVYYDWLAAPNPVEKHRKSMPYQLDELLNFRIPYYVGPLVTAKEQKAAQGGVFAWMVRKDPDGNITPYNFDEKVDREASANTFIQRMKTTDTYLIGEDVLPKQSLLYQRYEVLNELNNVRVNNEKLSIEQKQQVIRELFERHNSVTIKQFAENLRAHGDYAHIPEIRGLADEKRFLSSLSTYRQLKSLLPDAIDDPAKQADIENIIAWSTVFEDAAIFKTKLKEINWLDSQTITKLSNIRYRGWGQFSHKFLNGLTLGNGHTIIQELFLSNNNLMQILTDETLQKKMTELNADKLKAANINDAIDDAYTSPSNKKALRQVLRVIEDIKRAADGQDPSWLYVETADGGGTPGKRTRARQHQLQEIYANAAHELIDSAVRGELEDKIADKADFNDRLVLYFMQGGRDIYTGTPLNIDQLSSYDIDHILPQSLIKDNSLDNRVLVHAIINREKNATFASTIYAQKMNATWRQWHEAGLISGRKLRNLQMRPDQIDKYASGFVARQLVETRQIIKLTEQIVAAQYPETKIIAVKAGLSHQLREELEFPKNRDVNHYHHAFDAFLAARIGTYLLKRFPNLQAFFTYGKFKKADVKKLRGFNFIRDITHAEDKIVVKDTGEVIWDKKRDVDELDRIYNFKRMLITHEVHFEKADLFKQTVYGAKDSKEAGGKKQLISKKKGYPVDIYGGYTQETGSYLSVVRLTKKAMYAVVKVSTRDAAKLAVAKSISEQKENETLNDIIDEKLSKISKNGKITHELFEVVLPRVGQKTLFKNSKYNLFLVNSDTYMHNYQELWMPREYQKMWKDISLSKYGDAQTEDQLDQIFGFIVSQVNSYFNLYDINQFRKKLNDAADKFATLPMRDTDDMQGKIATIGQLLIGLQANAARSDLRNLDIKTPLGLLQIPNGISLDSDTSVVYQSPTGLLEREVHLSDL

SEQ ID NO: 269 - protein, 1361 aa, Lactobacillus casei
  Lactobacillus casei Lc-10
MTKLGKPYGIGVDIGSNSIGFAAVDENSHLIRLKGKTVIGARLFEEGKAAADRRASRTTRRRLSRNRWRLSFLRDFFESHITPTGPNFFMRQKYSEISPKDKARYKYEKRLFNDRTDAEFYQQYPTMYHLRNRLLTDPSKADVREIYFAIHHILKSRGHFLTSGYAKDFNTNKVALNEIFPALQDAYAQVYPDLDITFDENKVNEFKTVLLNEKATPSDTQRALVNLLLAEDGDKDILKQQKQVLTEFAKAVVGLKTKLNVALGTEVDSSEATVWNFSLGQLDDKWAGIESAMTDEGTEILDQIRDLYRARLLNGIVPAGNTLSQAKVDDYAQHHEDLELFKDYLKQLEDDGTAKAIRQLYDRYIDGDDAKPFVREDFVKALTKEVTAHPNAKSPELLERLAQPDFMLKQRNKANGAIPVQMQQRELDQIIKNQSVYYDWLAAPNPVEKHRKSMPYQLDELLNFRIPYYVGPLVTAKEQKAAQGGVFAWMVRKDPDGNITPYNFDEKVDREASANTFIQRMKTTDTYLIGEDVLPKQSLLYQRYEVLNELNNVRVNNEKLSIEQKQQVIRELFERHNSVTIKQFAENLRAHGDYAHIPEIRGLADEKRFLSSLSTYRQLKSLLPDAIDDPAKQADIENIIAWSTVFEDAAIFKTKLKEINWLDSQTITKLSNIRYRGWGQFSHKFLNGLTLGNGHTIIQELFLSNNNLMQILTDETLQKKMTELNADKLKAANINDAIDDAYTSPSNKKALRQVLRVIEDIKRAADGQDPSWLYVETADGGGTPGKRTRARQHQLQEIYANAAHELIDSAVRGELEDKIADKADFNDRLVLYFMQGGRDIYTGTPLNIDQLSSYDIDHILPQSLIKDNSLDNRVLVHAIINREKNATFASTIYAQKMNATWRQWHEAGLISGRKLRNLQMRPDQIDKYASGFVARQLVETRQIIKLTEQIVAAQYPETKIIAVKAGLSHQLREELEFPKNRDVNHYHHAFDAFLAARIGTYLLKRFPNLQAFFTYGKFKKADVKKLRGFNFIRDITHAEDKIVVKDTGEVIWDKKRDVDELDRIYNFKRMLITHEVHFEKADLFKQTVYGAKDSKEAGGKKQLISKKKGYPVDIYGGYTQETGSYLSVVRLTKKAMYAVVKVSTRDAAKLAVAKSISEQKENETLNDIIDEKLSKISKNGKITHELFEVVLPRVGQKTLFKNSKYNLFLVNSDTYMHNYQELWMPREYQKMWKDISLSKYGDAQTEDQLDQIFGFIVSQVNSYFNLYDINQFRKKLNDAADKFATLPMRDTDDMQGKIATIGQLLIGLQANAARSDLRNLDIKTPLGLLQIPNGISLDSDTSVVYQSPTGLLEREVHLSDL

SEQ ID NO: 270 - protein, 1363 aa, Lactobacillus casei
  Lactobacillus casei M36
MTKLGKPYGIGVDIGSNSIGFAAVDENSHLIRLKGKTVIGARLFEEGKAAADRRASRTTRRRLSRNRWRLSFLRDFFESHITPTDPNFFMRQKYSEISPKDKARYKYEKRLFNDRTDAEFYQQYPTMYHLRNRLLTDPSKADVREIYFAIHHILKSRGHFLTSGYAKDFNTNKVALNEIFPALQDAYAQVYPDLDITFDENKVNEFKTVLLDEKATPSDTQRALVNLLLAEDGDKDILKQQKQVLTEFAKAVVGLKMKLNVALGTEVDSSEATAWNFSLGQLDDKWAGIESAMTDEGTEILDQIRDLYRARLLNGIVPAGKTLSQAKVDDYEQHHEDLELFKDYLKQLEDDGMAKVIRQLYDRYIDGDDAKPFVREDFVKALTKEVTAHPNAKSPELLERLVQPDFMLKQRNKANGAIPVQMQQRELDQIIKNQSVYYDWLAAPNPVEKHRQSMPYQLDELLNFRIPYYVGPLVTAKEQKAAQGGVFAWMVRKDPDGNITPYNFDEKVDREASANTFIQRMKTTDTYLIGEDVLPKQSLLYQSYEVLNELNNVRVNDNKLSFDQKQQVLGELFERHNTVTIKQFVDNLLAHGDYDRIPEVRGLADEKRFLSSLSTYNQLKGILHEAIDDSDKQTDIEKIIAWSTIFEDKAIFKTKLNEISWLTAGMINSLANIRYRGWGQFSHKLLNELTLSTGRTVFEELLISSHNLMQILTDEVLKQKIAELNAHELKASGIYAAIDDAYTSPSNKKALRQVLSVIDDITNAAGQAPNWLYIETADGDGVPGKRTNSRQRKIQEIYANAAQELITGSVRGELEDKIASRADFTDRLVLYFMQGGRDIYTGEPLNIDNLSSYDIDHILPQSLIKDNSLDNRVLVHPLVNREKDTIFASTRFAKQMNGMWRQWHAAGLISSRKLRNLQMRPDEIDKYASGFVARQLVETRQIIKLTEQIVADQYPDAKIIAVKAGLSSQLRKELDFPKNREVNHYHHAFDAFLAARIGTYLLKRYPNLEPFFTYGKFKKTEVKKLKSLKSFNFIRDMTHAKDKIVAKETGEIVWDNASDINELDRIYNFKRMLITHEVRFETASLFKQTLYAAKNSKNRGGSRQLIPKKKGYLVDIYGGYTQETGSYLSVVRLTKKAMYAVVKVSTRDAAKLAVAKSISEQKENETLKKIIDGKLSKTSKKGKTTHQLFEIVLPRVGQKTLFKNSKYNQFLVNSDTYMHNYQELWMPREYQRMWKDILLSNHGDAQLEGQLDQIFKFIVSQVNSYFNLYDINQFRKKIADATDKFAKLPTHDTDNARGKIATIGQLLIGLQANAMRSDLRNLDIKTPFGLLQIGTGITLDLDTSIIYQSPTGLFEREVPLTDL

SEQ ID NO: 271 - protein, 1361 aa, Lactobacillus casei; identical to SEQ ID NO: 268
  Lactobacillus casei group

SEQ ID NO: 272 - protein, 1360 aa, Lactobacillus casei
  Lactobacillus casei T71499
MTKLGKPYGIGVDIGSNSIGFAAVDENSHLIRLKGKTVIGARLFEEGKAAADRRASRTTRRRLSRNRWRLSFLRDFFESHITPTDPNFFMRQKYSEISPKDKARYKYEKRLFNDRTDAEFYQQYPTMYHLRTRLLTDPSKADVREIYFAIHHILKSRGHFLTPGYAKDFNTNKVALNEIFPALQDAYAQVYPDLDITFDENKVNEFKTVLLNEKATPSDTQRALVNLLLAEDGDKDILKQQKQVLTEFAKAVVGLKTKLNVALGTEVDSSEATVWNFSLGQLDDKWAGIESAMTDEGTEILDQIRDLYRARLLNGIVPAGKTLSQAKVDDYAQHHEDLELFKDYLKQLEDDGTAKAIRQLYDRYIDGDDAKPFVREDFVKALTKEVTAHPNAKSPELLERLAQPDFMLKQRNKANGAIPVQMQQRELDQIIKNQSVYYDWLAAPNPVEKHRKSMPYQLDELLNFRIPYYVGPLVTAKEQKAAQGGVFAWMVRKDPDGNITPYNFDEKVDREASANTFIQRMKTTDTYLIGEDVLPKQSLLYQSYEVLNELNNVRVNDNKLSFDQKQQVLGELFERHNTVTIKQFVDNLLAHGDYDRIPEVRGLADEKRFLSSLSTYNQLKGILHEAIDDADKQTDIENIIAWSTIFEDKAIFKTKLNEISWLNAGMINSLANIRYRGWGQFSHKLLNELTLSTGRTVFEELLISSRNLMQILTDEVLKQKIAELNAHELKASGIYAAIDDAYTSPSNKKALRQVLSVIDDITNAAGQAPNWLYIETADGDGVPGKRTNSRQRKIQEIYANAAQELITGSVRGELEDKIASRADFTDRLVLYFMQGGRDIYTGEPLNIDNLSSYDIDHILPQSLIKDNSLDNRVLVHPLVNREKDTIFASTRFAKQMNGMWRQWHAAGLISSRKLRNLQMRPDEIDKYASGFVARQLVETRQIIKLTEQIVADQYPDTKIIAVKAGLSSQLRKELDFPKNREVNHYHHAFDAFLAARIGTYLLKRYPNLEPFFTYGKFKKTEVKKLKSFNFIRDMTHAKDKIVAKETGEIVWDNASDINELDRIYNFKRMLITHEVRFETASLFKQTLYAAKNSKNRGGSRQLIPKKKGYLVDIYGGYTQETGSYLSVVRLTKKAMYAVVKVSTRDAAKLAVAKSISEQKENETLKKIIDGKLSKTSKKGKTTHQLFEIVLPRVGQKTLFKNSKYNQFLVNSDTYMHNYQELWMPREYQRMWKDILLSNHGDAQLEGQLDQIFKFIVSQVNSYFNLYDINQFRKKIADATDKFAKLPTHDTDNARGKIATIGQLLIGLQANAMRSDLRNLDIKTPFGLLQIGTGITLDLDTSIIYQSPTGLFEREVPLTDL

SEQ ID NO: 273 - protein, 1366 aa, Lactobacillus casei
  Lactobacillus casei UCD174
MTKLGKPYGIGVDIGSNSIGFAAVDENSHLIRLKGKTVIGARLFEEGKAAAYRRASRTTRRRLSRNRWRLSFLRDFFESHITPTDPNFFMRQKYSEISPKDKARYKYEKRLFNDRTDAEFYQQYPTMYHLRTRLLTDPSKADVREIYFAIHHILKSRGHFLTPGYAKDFNTNKVALNEIFPALQDAYAQVYPDLDITFDENKVNEFKTVLLNEKATPSDTQRALVNLLLAKEGDRDILKQQKQVLTEFAKAVVGLKTKLNVALGTEVDSSEATAWNFSLGQLDDKWAGIESAMTDEGTEILDQIRDLYRARLLNGIVPAGKTLSQAKVDDYAQHHEDLELFKDYLKQLEDDGTAKAIRQLYDRYIDGDDAKPFVREDFVKALTKEVTAHPNAKSPELLERLAQPDFMLKQRNKANGAIPVQMQQRELDQIIKNQAVYYDWLAAPNPVEKHRQSMTYQLDELLNFRIPYYVGPLVTAKEQKAAQGGVFAWMVRKDPDGNITPYNFDEKVDREASANTFIQRMKTTDTYLIGEDVLPKQSLLYQSYEVLNELNNVRVNDNKLSFDQKQQVLGELFERHNTVTIKQFVDNLLAHGDYDRIPEVRGLADEKRFLSSLSTYNQLKGILHEAIDDADKQTDIENIIAWSTIFEDKAIFKTKLNEISWLNAGMINSLANIRYRGWGQFSHKLLNELTLSTGRTVFEELLISSRNLMQILTDEVLKQKIAELNAHELKASGIYAAIDDAYTSPSNKKALRQVLSVIDDITNAAGQAPNWLYIETADGDGVPGKRTNSRQRKIQEIYANAAQELITGSVRGEFEDKIASRADFTDRLVLYFMQGGRDIYTGEPLNIDNLSSYDIDHILPQSLIKDNSLDNRVLVHPLVNREKDTIFASTRFAKQMNGMWRQWHAAGLISSRKLRNLQMRPDEIDKYASGFVARQLVETRQIIKLTEQIVADQYPDTKIIAVKAGLSSQLRKELDFPKNREVNHYHHAFDAFLAARIGTYLLKRYPNLEPFFTYGKFKKTEVKKLKSLKSLKSFNFIRDMTHAKDKIVAKETGEIVWDNASDINELDRIYNFKRMLITHEVRFETASLFKQTLYAAKNSKNRGGSRQLIPKKKGYLVDIYGGYTQETGSYLSVVRLTKKAMYAVVKVSTRDAAKLAVAKSISEQKENETLKKIIDGKLSKTSKKGKTTHQLFEIVLPRVGQKTLFKNSKYNQFLVNSDTYMHNYQELWMPREYQRMWKDILLSNHGDAQIEGQLDQIFKFIVSQVNSYFNLYDINQFRKKIADATDKFAKLPTHDTDNARGKIATIGQLLIGLQANAMRSDLRNLDIKTPFGLLQIGTGITLDLDTSIIYQSPTGLFEREVPLTDL

SEQ ID NO: 274 - protein, 1389 aa, Lactobacillus casei
MIIRTYELKTITTIAILKMFQLLTGGLSMTKLGKPYGIGVDIGSNSIGFAAVDENSHLIRLKGKTVIGARLFEEGKAAADRRASRTTRRRLSRNRWRLSFLRDFFESHITPTGPNFFMRQKYSEISPKDKARYKYEKRLFNDRTDAEFYQQYPTMYHLRNRLLTDPSKADVREIYFAIHHILKSRGHFLTSGYAKDFNTNKVALNEIFPALQDAYAQVYPDLDITFDENKVNEFKTVLLNEKATPSDTQRALVNLLLAEDGDKDILKQQKQVLTEFAKAVVGLKTKLNVALGTEVDSSEATVWNFSLGQLDDKWAGIESAMTDEGTEILDQIRDLYRARLLNGIVPAGKTLSQAKVDDYAQHHEDLELFKDYLKQLEDDGTAKAIRQLYDRYIDGDDAKPFVREDFVKALTKEVTAHPNAKSPELLERLAQPDFMLKQRNKANGAIPVQMQQRELDQIIKNQSVYYDWLAAPNPVEKHRKSMPYQLDELLNFRIPYYVGPLVTAKEQKAAQGGVFAWMVRKDPDGNITPYNFDEKVDREASANTFIQRMKTTDTYLIGEDVLPKQSLLYQRYEVLNELNNVRVNNEKLSIEQKQQVIRELFERHNSVTIKQFAENLRAHGDYAHIPEIRGLADEKRFLSSLSTYRQLKSLLPDAIDDPAKQADIENIIAWSTVFEDAAIFKTKLKEINWLDSQTITKLSNIRYRGWGQFSHKFLNGLTLGNGHTIIQELFLSNNNLMQILTDETLQKKMTELNADKLKAANINDAIDDAYTSPSNKKALRQVLRVIEDIKRAADGQDPSWLYVETADGGGTPGKRTRARQHQLQEIYANAAHELIDSAVRGELEDKIADKADFNDRLVLYFMQGGRDIYTGTPLNIDQLSSYDIDHILPQSLIKDNSLDNRVLVHAIINREKNATFASTIYAQKMNATWRQWHEAGLISGRKLRNLQMRPDQIDKYASGFVARQLVETRQIIKLTEQIVAAQYPETKIIAVKAGLSHQLREELEFPKNRDVNHYHHAFDAFLAARIGTYLLKRFPNLQAFFTYGKFKKADVKKLRGFNFIRDITHAEDKIVVKDTGEVIWDKKRDVDELDRIYNFKRMLITHEVHFEKADLFKQTVYGAKDSKEAGGKKQLISKKKGYPVDIYGGYTQETGSYLSVVRLTKKAMYAVVKVSTRDAAKLAVAKSISEQKENETLNDIIDEKLSKISKNGKITHELFEVVLPRVGQKTLFKNSKYNLFLVNSDTYMHNYQELWMPREYQKMWKDISLSKYGDAQTEDQLDQIFGFIVSQVNSYFNLYDINQFRKKLNDAADKFATLPMRDTDDMQGKIATIGQLLIGLQANAARSDLRNLDIKTPLGLLQIPNGISLDSDTSVVYQSPTGLLEREVHLSDL

SEQ ID NO: 275 - protein, 1354 aa, Lactobacillus coryniformis
  Lactobacillus coryniformis subsp. coryniformis KCTC 3167
MTLHYNVGLDIGTNSVGYTIVDDNGKILQVKGKNGYGVRVFKEGATAAERRIFRTTHRRLKRRKWRLRLLQDFFEPYILPQDDGFFIRRKESNLVLNDRDEDTASLFNDRSDRDFYQAYPTIYHLRQALMTEKRQFDVREIYLAMHHIIKYRGHFLLNGTVNNFTNNKIDLHSDFEELNALLLNVIPELKFQIDLDHSTMFQTTLLNTTISRSGRQRDLVKSFYNGSDDKQLAKQQKSVATELLKAILGLKAKFHKLFNLDLLETTEWEFSFDAEDIDDKLAKLEPLMTENQQQVMDILQRIFAAITLNGIVPEGKTLSASKVDSYQKHKQDLKLLKAIAQHSDKKTATVLQTAYNEYINGIASKPLKQEDFYKRLTNAVKKSSDPQVADMLALIDQEKFLPKQRTKENGAIPHQLHQLELERIIDNQKDYYPWLAELNPNQARQKVAKYKLSELVAFRVPYYVGPLIEPEVQQATSNAHFAWMARKEAGPITPWNFDQKVDRNVSAERFIKRMTTKDTYLLAEDVLPLHSLLYQRFIVLNELNNVRVNGQKLTKKQKQAVYQDLFKRQPHVTKKQFKSYLVQTGEFAESSKIEGLANETSFNSGLTTENELRKIFGAQLDEARYQVDFEQIIEWATLFEDAKILRTKLAEITWLTTEQIEKLAGIRYRGWGRFSRKLLAGLRDQNGQQIIDLLWDTPNNFMVIVSQAAFSEAITKENEKLIDRRGAQDVITDLYTSPQNKKALRQVLAIVADVQKAMGGVPPQRIFIEFAREDEKNPRRSVERSRQLEKLYQTISNEFLINSEVRQELKEAVDQKVNFKDRLFLYFLQGGVDLYSGKRINIDQLSHYDIDHILPQSFIKDDSLDNRVLVSQKLNRSKSDSVPLSEFANYKFGPAMQAKWLQLKEAGLLSKRKYDNLTLDPTKLSKFAPLGFVNRQLVETRQVIKLAANLLASEETKVVTIKANMTHQVRKELDFPKNRNVNNYHHAFDAYLTAFVGIFLSKRYPKLKPYFTYGDFQKGNKLPDLKNFNFLYELKNKDRSIDSNTGEIIWDKQRDLAYMNKIYNFKKVTVVHEVLTKSGALYNQTLYKASEDKASGRGTKQLIRKKDNMPTELYGGYTGSTSAFMSIVRLWKKDKPYYKVVGIPTRMAAKLANQAQLLDYLTKKFTTRKLVKKTGDYKTTVERFELVVPKVGFNQLVIDGGQPFMLGSATYQYNARELFISKEAVKALNKQLSTHVDLVQVFDEILVQVNRWFPLYDTNGFREKLSHGRDRFMKLNDSFEEKSDTQIDVLNRILIGFHANAARTNLKILGLGTDLGFMTQQAGIRLTEKAILVHQSPSGLFERKVALRDLKGLR

SEQ ID NO: 276 - protein, 1119 aa, Lactobacillus coryniformis
  Lactobacillus coryniformis subsp. torquens KCTC 3535
MGYRIGLDVGITSTGYAVLKTDKNGLPYKILTLDSVIYPRAENPQTGASLAEPRRIKRGLRRRTRRTKFRKQRTQQLFIHSGLLSKPEIEQILATPQAKYSVYELRVAGLDRRLTNSELFRVLYFFIGHRGFKSNRKAELNPENEADKKQMGQLLNSIEEIRKAIAEKGYRTVGELYLKDPKYNDHKRNKGYIDGYLSTPNRQMLVDEIKQILDKQRELGNEKLTDEFYATYLLGDENRAGIFQAQRDFDEGPGAGPYAGDQIKKMVGKDIFEPTEDRAAKATYTFQYFNLLQKMTSLNYQNTTGDTWHTLNGLDRQAIIDAVFAKAEKPTKTYKPTDFGELRKLLKLPDDARFNLVNYGSLQTQKEIETVEKKTRFVDFKAYHDLVKVLPEEMWQSRQLLDHIGTALTLYSSDKRRRRYFAEELNLPAELIEKLLPLNFSKFGHLSIKSMQNIIPYLEMGQVYSEATTNTGYDFRKKQISKDTIREEITNPVVRRAVTKTIKIVEQIIRRYGKPDGINIELARELGRNFKERGDIQKRQDKNRQTNDKIAAELTELGIPVNGQNIIRYKLHKEQNGVDPYTGDQIPFERAFSEGYEVDHIIPYSISWDDSYTNKVLTSAKCNREKGNRIPMVYLANNEQRLNALTNIADNIIRNSRKRQKLLKQKLSDEELKDWKQRNINDTRFITRVLYNYFRQAIEFNPELEKKQRVLPLNGEVTSKIRSRWGFLKVREDGDLHHAIDATVIAAITPKFIQQVTKYSQHQEVKNNQALWHDAEIKDAEYAAEAQRMDADLFNKIFNGFPLPWPEFLDELLARISDNPVEMMKSRSWNTYTPIEIAKLKPVFVVRLANHKISGPAHLDTIRSAKLFDEKGIVLSRVSITKLKINKKGQVATGDGIYDPENSNNGDKVVYSAIRQALEAHNGSGELAFPDGYLEYVDHGTKKLVRKVRVAKKVSLPVRLKNKAAADNGSMVRIDVFNTGKKFVFVPIYIKDTVEQVLPNKAIARGKSLWYQITESDQFCFSLYPGDMVHIESKTGIKPKYSNKENNTSVVPIKNFYGYFDGADIATASILVRAHDSSYTARSIGIAGLLKFEKYQVDYFGRYHKVHEKKRQLFVKRDE

SEQ ID NO: 277 - protein, 1368 aa, Lactobacillus curvatus
  Lactobacillus curvatus CRL 705
MSRPYNIGLDIGTSSIGWSVVDDQSKLVSVRGKYGYGVRLYDEGQTAAERRSFRTTRRRLKRRKWRLGLLREIFEPYITPIDDTFFLRQKQSNLSPKDQRKLYTQTSLFNDRTDRAFYDDYPTIYHLRYRLMTEKRQFDIREIYLAMHHIVKYRGHFLNEAPVSSFKSSEINLVAHFDRLNTIFADLFSESGFQLETDKLAEVKALLLDNQQSASNRQRQALSLIYTPSTNKAVEKQNKAIATELLKAILGLKAKFNVLTGIEAEDVKAWTLTFNAENFDEEMVKLESSLDDNAHQIIESLQELYSGVLLAGIVPENQSLSQAMITKYDDHQKHLKMLKAVREALAPGDRQRLKQAYDQYVDGQENTKAYSKEDFYGDITKALKNNPDHPIVSEIKKLIELDQFMPKQRTKDNGAIPHQLHQQELDRIIENQQQYYPWLAELNPNSKRQTVAKYKLDELVAFRVPYYVGPLITAEQQRQSSDAKFAWLIRKAEGRITPWNFDDKVDRQASANEFIKRMTTTDTYLLAEDVLPKQSLIYQRFEVLNELNGLKIDDQPITTELKQAIFTDLFMQKISVTVKNIQDYLVSEKRYASRPAITGLSDENKFNSRLSTYHDLKMIVGDAVDDVDKQADLEKCIEWSTIFEDGKIYSAKLNEIDWLTDQQRVQLAAKRYRGWGRLSAKLLTQIVNANGQRIMDLLWDTTDNFMRIVHSEDFDKLITEANQMMLAENDVQDVINDLYTSPQNKKALRQILLVVNDIQKAMKGQAPERILIEFAREDEVNSRLSVQRKRQVEQVYQNISNELLNNTEIRNELKDLSNSALSNTRLFLYFMQGGRDMYTGDSLNIDRLSTYDIDHILPQSFIKDNSLDNRVLVSQKMNRSKADQVPTDFTSVELGQKMQIQWEQMLRAGLITKKKYDNLTLNPDHISKYAMKGFINRQLVETRQVIKLATNLLMEQYGEDNIELITVKSGLTHQMRTEFDFPKNRNLNNHHHAFDAYLTAFVGLYLLKRYPKLKPYFVYGEYQKASQQDKWRNFNFLNGLKKDELVDENTEAVIWDKESGLAYLNKIYQFKKILVTRGVHENSGALFNQTLYAAKDDKASGQGGKQLIPAKQDRSTALYGGYSGKTVAYMCIVRIKNKKGDLYKVCGVETSWLAQLKQLTDEDSQKAFLEQKISPQFTKVKKQKGNIIEAVEEFEVIAPHILINQRFFDNGQELTLGSATYKHNEQELILDKTAVKLLNGALPLTQSEELAEQVYDEILDQVMHYFPLYDTNQFRAKLSTGKAAFMKLPWKSQWDGNKMVQVGQQVILDRILIGLHANAAMSDLKVLKMTTPFGMIQQSTGITLSADTQIIYQSPTGLFERRVALRDL

SEQ ID NO: 278 - protein, 1126 aa, Lactobacillus farciminis
  Lactobacillus farciminis KCTC 3681
MADRISLGLDIGVASVGFSVLDIDKGKVIELGARLFSATVAAGNQDRRDMRGARRLLNRNKQRRQDTGKLFKKFGLIDDFDKGSFYDNFNQNLNPYELRVKGLTEQLTKEELAESLYQIVKHRGISYALKDADVDEGGTDYSVSLKINSQELAEKTPAQIQLQRLNDYGKVRGQVVIGDDPDNQKVLLNVFPTSAYEKEAKQIIATQQQFYPESLTDKFTEEYCQILTRKRDYFVGPGNEKSRTDYGIYKTDGRTLDNLFEELIGHDKIYPEELRASAASYTAQLFNVLNDLNNLRILNYEDGKLTKEDKEKIIAEIKNNTTTINMLNVIKKVAGCSKDDIKGFRVNEKDKPEISSMPVYRKIHKDLLKAGVDISDWPVEFIDELSFILTLNTENGEIRKQLNNRLAPKFDFLNADLIQLIIDNKDSFEIKTNNKWHRFSVKTMNKLIPEMMERPVEQMTLLNEMGLVKKDKKRFENNKYLPYKEIAKDIFNPVASKSVREALKIVNAVLKKYGHIDYLVVEMPRDKNLKEEQDNIKEFQNKNKKAKDAAFEAFVKSVGSEQRVKEALSKNRKLQMKMRLWYQQQEIDPYNGKTIDATDLINNPDKFEIDHIIPQSISFYDSINNKTLCFASMNQVKGQKTPYEFMLEGHGQSYDKFKATVMANKNFGKAKRANYLFEENVSDIETRKRFLSRNLVDTRYSSRVVLNSLQDFFREKSADTKVTVIRGKFTSNMRKHWHIDKTRETFHHHAIDASIIAATPFLRMWKKGGTIFPVKVGEESIDIETGEILDDKNFDKAMYEEPYSGFVSEIMNADDRIKFSHQVDKKMNRKVSDATIYSTRTGKLAKDKKDAEYIVAKVKDIYSVDGFKKFKKVYDKDKTKFLLYKYDPRTFSKLERIISDCPDKVEKVQTNGKVKAVDISPFEMYRRDHGMIKKYSKKGNGPAIKQLKYLDKKLGSHIDITPANANGKHVILQSLKPWRTDVYLNHETGEYEIMGIKYSDLKFNKNEGYGIKKDKYLEIKKVEEVSEKSEFMFSLYRKDRVKVQDMKTGESVELLFWSRNFSNKKYAELKPISQAENDKKLPVYGKGRLIKRLIPKNCKIWKVNTTILGDPYYLEKESDSPKDILD

SEQ ID NO: 279 - protein, 1356 aa, Lactobacillus farciminis
  Lactobacillus farciminis KCTC 3681
MTKKEQPYNIGLDIGTSSVGWAVTNDNYDLLNIKKKNLWGVRLFEEAQTAKETRLNRSTRRRYRRRKNRINWLNEIFSEELAKTDPSFLIRLQNSWVSKKDPDRKRDKYNLFIDGPYTDKEYYREFPTIFHLRKELILNKDKADIRLIYLALHNILKYRGNFTYEHQKFNISNLNNNLSKELIELNQQLIKYDISFPDDCDWNHISDILIGRGNATQKSSNILKDFTLDKETKKLLKEVINLILGNVAHLNTIFKTSLTKDEEKLNFSGKDIESKLDDLDSILDDDQFTVLDAANRIYSTITLNEILNGESYFSMAKVNQYENHAIDLCKLRDMWHTTKNEEAVEQSRQAYDDYINKPKYGTKELYTSLKKFLKVALPTNLAKEAEEKISKGTYLVKPRNSENGVVPYQLNKIEMEKIIDNQSQYYPFLKENKEKLLSILSFRIPYYVGPLQSAEKNPFAWMERKSNGHARPWNFDEIVDREKSSNKFIRRMTVTDSYLVGEPVLPKNSLIYQRYEVLNELNNIRITENLKTNPIGSRLTVETKQRIYNELFKKYKKVTVKKLTKWLIAQGYYKNPILIGLSQKDEFNSTLTTYLDMKKIFGSSFMEDNKNYDQIEELIEWLTIFEDKQILNEKLHSSKYSYTPDQIKKISNMRYKGWGRLSKKILMDITTETNTPQLLQLSNYSILDLMWATNNNFISIMSNDKYDFKNYIENHNLNKNEDQNISDLVNDIHVSPALKRGITQSIKIVQEIVKFMGHAPKHIFIEVTRETKKSEITTSREKRIKRLQSKLLNKANDFKPQLREYLVPNKKIQEELKKHKNDLSSERIMLYFLQNGKSLYSEESLNINKLSDYQVDHILPRTYIPDDSLENKALVLAKENQRKADDLLLNSNVIDRNLERWTYMLNNNMIGLKKFKNLTRRVITDKDKLGFIHRQLVQTSQMVKGVANILDNMYKNQGTTCIQARANLSTAFRKALSGQDDTYHFKHPELVKNRNVNDFHHAQDAYLASFLGTYRLRRFPTNEMLLMNGEYNKFYGQVKELYSKKKKLPDSRKNGFIISPLVNGTTQYDRNTGEIIWNVGFRDKILKIFNYHQCNVTRKTEIKTGQFYDQTIYSPKNPKYKKLIAQKKDMDPNIYGGFSGDNKSSITIVKIDNNKIKPVAIPIRLINDLKDKKTLQNWLEENVKHKKSIQIIKNNVPIGQIIYSKKVGLLSLNSDREVANRQQLILPPEHSALLRLLQIPDEDLDQILAFYDKNILVEILQELITKMKKFYPFYKGEREFLIANIENFNQATTSEKVNSLEELITLLHANSTSAHLIFNNIEKKAFGRKTHGLTLNNTDFIYQSVTGLYETRIHIE

SEQ ID NO: 280 - protein, 1313 aa, Lactobacillus fermentum
  Lactobacillus fermentum 28-3-CHN
MHYLDEIFAPHLQEVDENFLRRLKQSNIHPEDPAKNQAFIGKLLFPDLLKKNERGYPTLIKMRDELPVEQRAHYPVTNIYKLREAMINEDRQFDLREVYLAVHHIMKYRGHFLNNASVDKFKVGRIDFYKSFNVLNEAYEELQNGEGSFTIEPSKVEKIGQLLLDTKMRKLNRQKAVAKLLEVKVADKEETKRNKQIATAMSKLVLGYKADFATVAMANGNEWKIDLSSETSEDEIEKFREELSDAQNDILTEITSLFSQIMLNEIVPNGMSISESMMDRYWTHERQLAEVKEYLATQPASARKEFDQVYNKYIGQAPKERGFDLEKGLKKILSKKENWKEIDELLKAGDFLPKQRTSANGVIPHQMHQQELDRIIEKQAKYYPWLATENPATGERDRHQAKYELDQLVSFRIPYYVGPLVTPEVQKATSGAKFAWAKRKEDGEITPWNLWDKIDRAESAEAFIKRMTVKDTYLLNEDVLPANSLLYQKYNVLNELNNVRVNGRRLSVGIKQDIYTELFKKKKTVKVSDVASLVMAKTRGVNKPSVEGLSDPKKFNSNLATYLDLKSIVGDKVDDNRYQTDLENIIEWRSVFEDGEIFADKLTEVEWLTDQQRSALVKKRYKGWGRLSKKLLTGIVDENGQRIIDLMWNTDQNFMQIVNQPVFKEQIDQLNQKAITNDGMTLREWVESVLDGAYTSPQNKKAIWQVVRVVEDIVKAVGNAPKSISIEFARNEGNKGEITRSRRTQLQKLFEDQAHELVKDTSLTEELEKAPDLSDRYYLYFTQGGKDMYTGDPINFDEISTKYDIDHILPQSFVKDDSLDNRVLVSRAENNKKSDRVPAKLYAAKMKPYWNQLLKQGLITQRKFENLTMDVDQNIKYRSLGFVKRQLVETRQVIKLTANILGSMYQEAGTDIIETRAGLTKQLREEFDLPKVREVNDYHHAVDAYLTTFAGQYLNRRYPKLRSFFVYGEYMKFKHGSDLKLRNFNFFHELMEGDKSQGKVVDQQTGELITTRDEVAKSFDRLLNMKYMLVSKEVHDRSDQLYGATIVTAKESGKLTSPIEIKKKRPVDLYGAYTNGTSAFMTIIKFTGNKPKYKVIGVPTTSAVGLKRVGKPGSESYNQELHRIIKSNPKVKKDFEIVVPHVSYSQLIVDDDCKFTLASDTYQHPATQLVLSKESMEIIADDFKFVKENTATADEQLVRVFDEIVNQMNHYFTIFDQRSNRQKVTKARDKFVSLPTESEYEGAKKTQVGKTEVITNLLMGLHANSAQGDLKVLGLSTFGFFQSSGGLNLSEDAMIVYQSPTGLFERRICLKDI

SEQ ID NO: 281 - protein, 1381 aa, Lactobacillus fermentum
  Lactobacillus fermentum ATCC 14931
MDYVKEYHIGLDIGTSSIGWAVTDSQFKLMRIKGKTAIGVRLFEEGKTAAERRTFRTTRRRLKRRKWRLHYLDKIFAPHLQEVDENFLRRLKQSNIHPEDPAKNQAFIGKLLFPDLLKKNERGYPTLIKMRDELPVEQRAHYPVTNIYKLREAMINEDRQFDLREVYLAVHHIVKYRGHFLNNASVDKFKVGRIDFDKSFNVLNEAYEELQNGEGSFTIEPSKVEKIGQLLLDTKMRKLDRQKAVAKLLEVKVADKEETKRNKQIATAMSKLVLGYKADFATVAMANGNEWKIDLSSETSEDEIEKFREELSDAQNDILTEITSLFSQIMLNAIVPNGMSISESMMDRYWTHERQLAEVKEYLATQPASARKEFDQVYNKYIGQVPKEKGFDLEKGLKKILSKKENWKEIDELLKAGDFLPKQRTSANGVIPHQMHQQELDRIIEKQAKYYPWLATENPATGERDRHQAKYELDQLVSFRIPYYVGPLVTPEVQKATSGAKFAWAKRKEDGEITPWNLWDKIDRAESAEAFIKRMTVKDTYLLNEDVLPANSLLYQKYNVLNELNNVRVNGRRLSVGIKQDIYTELFKKKKTVKAGDVASLVMAKTRGVNKPSVEGLSDPKKFNSNLATYLDLKSIMGDKVDDNRYQMDLENIIEWRSVFEDGEIFADKLTEVEWLTDEQRSALVKKRYKGWGRLSKKLLTGIVDENGQRIIDLMWNTDQNFMQIVNQPVFKEQIDQLNQKAITNDGMTLRERVESVLDDAYTSPQNKKAIWQVVRVVEDIVKAVGNAPKSISIEFARNEGNKGEITRSRRTQLQKLFEDQAHELVKDTSLTEELEKAPDLSDRYYFYFTQGGKDMYTGDPINFDEISTKYDIDHILPQSFVKDDSLDNRVLVSRAENNKKSDRVPAKLYAAKMKPYWNQLLKQGLITQRKFENLTMDVDQNIKYRSLGFVKRQLVETRQVIKLTANILGSMYQEAGTDIIETRAGLTKQLREEFDLPKVREVNDYHHAVDAYLTTFAGQYLNRRYPKLRSFFVYGEYMKFKHGSDLKLRNFNFFHELMEGDKSQGKVVDQQTGELITTRDEVAKSFDRLLNMKYMLVSKEVHDRSDQLYGATIVTAKESGKLTSPIEIKKNRPVDLYGAYTNGTSAFMTIIKFTGNKPKYKVIGVPTTSAVGLKRVGKPGSESYNQELHRIIKSNPKVKKDFEIVVPHVSYSQLIVDGDCKFTLASDTYQHPATQLVLSKESMEIIADDFKFVKENPATADEQLVRVFDEIVNQMNHYFTIFDQRSNRQKVTKARDKFVSLPTESEYEGAKKTQVGKTEVITNLLMGLHANAAQGDLKVLGLSTFGFFQSSGGLNLSEDAMIVYQSPTGLFERRICLKDI

SEQ ID NO: 282 - protein, 1327 aa, Lactobacillus florum
  Lactobacillus florum 2F
MTEQQQPYNIGLDIGTSSIGWAVTDQNDKLLHIRGHNGIGVRLFKEGESAAERRGFRTTRRRLSRRRWRLRFLDRIFDAELAKVDPNFLARLKQSNISPLDPNKQMFGNILFDDPQFDDQKFHQQYPTIYHLRSALAQPDAPQADVRLIYLALHHMIKFRGHFLNGAAVEKFHGGQLHLESEFQELNQIFSNQQRDHVQLQTSSLDEVATILKDNQRTPSDRQRELSARLFVPVDKTIDKENKKLATELLKAVLGLKAKFDVILGVEATDPQAFKLQFSSDDFDDKIAELASELTDEANEILTVLQRLYFSLNLADILTNRQTKQVADSISTAMINRYDDHKHHLKMLKELEAQVTQEQRDGLKKAYDEYIDGDKPTIDTFYTNIKKNLDDSELANQIKSLIDLQAFMPKQRSKENGSIPHQLHQRELDQLIEVQGKYYPWLLAAKDKLDALIAFRVPYYVGPMIDPNQSDDPQNTKFAWMVRKEAGEITPWNFEEKVDKTSSATNFIKRMTTTDTYLLGEPVLPKNSLLYQQFTVLNELNKLKVNGKALTVDQKKYLYEHVCKKQRRVTLKKLSDCLMARGDFPMGAIFTGTTDQKNMNNTLKTYQDFQEIFGDEIDNPDRQVDFEKMIEWSAIFEDREIFKLKLAELNWLTSEQLERVSKKRYQGWGRLSQKLLTHIVNENGERIIDQLWNTNQNFMEIMGQDSVKQAIQEHNGANVAQTGINETIDELYTSPQNKKAIRQILLVVDDIKKAVGYAPANIMMEFAREDRDDHRLIASRARQLEKTYQEISKNWFDNESVTQELKDQIKNKTKFTDRLYLYFIQGGIDLYTGHPLNIDQLSSYDIDHILPQSFLLDNSLNNRVLTSQAENRVHKEDRLPGETVANKMRPTWKMMREQGLMTQRKYNNLTLKPDQISKFNNRGQFINRQLVETRQVIKLAADIMSQKYQADQTKVVTVKANLTHHMREKFNFYKSRNVNDYHHAFDAYLTLFVGNWLLKEYPKLQPYFVYGDFAKTGTNNLKSFNFLYRFERDHKLNDKGAIDTDKDQQLGYMKRIYRFKKMLVTKQLETNEGALYGQTLYPAPKNDKKTRNLINSKKNRPSDIYGGYSNENGSFLTLVKLKKGSKYDYRLVAVPVSKISEIKESELATIEKAIAPQFLKSSGKYRDFQVVLSKILINQKVIDDGMIFTIGSKSYKHNAKQVVLSDNSIQIVSTLSRISDKEKLITVFDEIVDITSKYLPWYKVNDVEKTKMLFRQMQDIDEMKKIIDNSLIGLHCNASITDLGKVGLSKYWGRFVLTAGISLTVDAQLIYQSPTGLFEHRVKVSDL

SEQ ID NO: 283 - protein, 1391 aa, Lactobacillus gasseri
  Lactobacillus gasseri JV-V03
MTKIKNEYIVGLDVGTNSCGWVAMDFQNTILRMHGKTAIGSHLFDAGNSAADRRAFRTTRRRIKRRKWRLKLLEEIFDPYMTEVDPYFFARLKESGLSPLDKRKNVSSIVFPTALEDKKFYCNYPTIYHLRYDLMSEDKKFDLREIYLAIHHIVKYRGNFLYNTPVKDFEASKIDVKDSLEKLNELYERLDSEFTVELDSSNALEIEKIIRDKKVFKINKVKSIHQLLSLKTENKERTKLIKDVSKQIINAILGYKTKFETILLKNISKDEADDWEFKLTDVDADNKFENLIGDLNENEQEILLEIRNLANAITLSNIVEEGKTLSESMIDKYNKHSDDLELLKQVISDHPDRDKAKKLALAYDLYVNNRHGKLLQAKDVLGSKKTLSKEDFYKEVKKNLDDSKASQEILDTIALDSFMPKQRTNENGVIPYQLHQLELDRIIKNQGKYYPFLKEVNPVSSHLKEAPYKLDELIRFRVPYYVGPLISPNESTKNKQTKKNQNFAWMIRKEQGQITPWNFDQKVDRMASANKFIKRMTTKDTYLLGEDVLPANSLLYQKFTVLNELNNIKINGKRISVPLKEELYNNLFKKNSTVTTNKLKSYLKENYNLINVEIKGLADEKKFNSGLTTYNKLRNLKIFDQQLDDLNYDKDFERIIEWSTIFEDKAIYKDKLKTIKWLSDRQIDKLSKIRMQGWGQLSKKLLSQLTDNNGQTIIEQLWDSQNNFMQIVNQSDFKDAIAVANQNLLVNTSVEDILNEAYTSPANKKAIRQVVKVVDDIVKAASGKVPKQIAIEFTRDADDKAKISQTRANKLRKVYKELSNELASETIRNELERVAKDQKLLKDKYYLYFMQLGRDAYTGEPINIDDLGQYDIDHILPQSFIKDDSLENRVLVKKAVNNGKSDNVPVKLYGNRMAADLGMTIRHMWEKWKDQGLITKTKYNNLIIDPDKINKYESSGFIHRQLVETSQIIKLVSTILQSKYPDTEIIVVKARYNHYLRKHLNLYKSREVNDYHHAIDAYLSAICGNLLYQVYPYLRPFFVYGQYKKFSSDPKKEKIIYDKTRKYNFISQIFENKSNDIISLETKKKVFDKKDIIEKLKHAYNYKYMLVSRETETHDQEMFKMTVYPRLSRDTKKSRNLISKKKDMPTEIYGGYTNNSDAYMVIARINKKKGTEYRVFGVPMRELVNLRKAEKNGRYNAYLKQVLEPEIMYSKNGKKNKTISSFEIVKAKVPYKQVILDGDKKFMLASSTYVQNAKQLTLSQNSMQAITDNCENDTEEEKALEEKALIEAYDEILTNIDKYLPLFDINKFREKLHAGREKFINLSLDVKKDTILQVLNGLHDNAVMPKIKSLGLSTPLGFMQFSSGVPLSENAKLIYQSPTGLFEKRVKISDL

SEQ ID NO: 284 - protein, 1386 aa, Lactobacillus hominis
  Lactobacillus hominis CRBIP 24.179
MTKITEDYIVGLDIGTNSCGWVAMDSKNTILRMHGKTAIGSHLFDAGNSAADRRAFRTTRRRIKRRKWRLKLLEEIFDSHLAKVDPYFFARLKESGLSPLDTRKNVSSIIYPTSLEDKKFYVDNPTIYHLRYKLMTEDRKFDLREVYLAIHHIVKYRGNFLYNTPVKAFEASKIDVKGSLKKLNELYEGLDSEFNVELDSNNALEIENIIRDKKIFKINKVKEINQLLSLKTEDKERTKLMKDVSKQIVNAILGYKTKFETILLKDVSKDEADDWEFKLTDVDADNKFENLIGDLNENEQEILLVIRKLANAITLSNIVEEGKTLSESMKDKYKKHSDDLKLLKQVISDHPDRDKAKKLALAYDLYVNNRHGKILQAKDILEKKKTLSKEDFYKEIKKNLDDSKESQEILDAISLDSFMPKQRTNENGVIPYQLHQLELDKIIENQGKYYPFLKEVNPVSSHLKQAPYKLDELIRFRVPYYVGPLISPNESTKNKQTKKNQNFAWMIRKEQGQITPWNFDQKVDRMASANKFIKRMTTIDTYLLGEDVLPANSLLYQKFTVLNELNNVKINGKRISVPLKQELYNNLFKKNSTVTTNKLKSYLKENYKLIKVEIKGLSDEKKFNSGLTTYNKLKNLKIFDQQIDDPNYNKDFERIIEWSTIFEDKAIYKEKLKTIDWLSDRQIDKLSKIRMQGWGQLSKKLLSQLTDNNGQTIIEQLWDSQNNFMQIVNQADFKDAIAVANQNLLVDTSVEDILNEAYTSPANKKAIRQVVKVVDDIVKATSGKVPKQIAIEFTRDADDNAKISQSRANKLRKVYKEMSNELASETIRNELERVAKDQKLLKDKHYLYFMQLGRDAYTGELIDIDNLEQYDIDHVLPQSFIKDDSLENRVLVKKAVNNGKSDNVPVKLYGNRMATDLGMTIRHMWEKWKEQGLITKTKYNNLIIDPDKINKYESSGFIHRQLVETSQIIKLVSTILQSKYPDTEIIVVKARYNHYLRKRLNLYKSREVNDYHHAIDAYLSAICGNLLYQVYPYLRPFFVYGQYKKFSSEPEKEKIIYDKTRRYNFISQIFENKDNDIISRETKKKVFDKKDIIEKLKRAYNYKYMLVSRETETHDQEMFKMTVYPRLSRDTKKSRNLIPKKKDMPTEIYGGYTNNSDAYMIIARINKKKGPEYRVFGVPMRELVNLRKAEKNGHYKAYLKQVLEPEIMYSKNGKKNKTISSFEIVKAKVPYKQVILDGDKKFMLASSTYVQNAKQLTLSQYSMQAITDNCENDTEEEKALVEAYDEILTNIDKYLPLFDINKFREKLHAGREKFVDLPLAEKKETILQVLNGLHDNAVMPKIKSLGLSTPLGFMQFHTGVSLSENAKLIYQSPTGLFEKRLKISDL

SEQ ID NO: 285 - protein, 1369 aa, Lactobacillus iners
  Lactobacillus iners LactinV 11V1-d
MNNNYYLGLDLGTNSVGWAVTDDHYNIIKFHGKHMWGMRLFEEAETAKDRRLHRQARRRRQRLVERINLLEELFDKEISKVDQGFFARKKESDLHFEDKTTKSEYALFNDKSYTDRDYYKQYPTIFHLIMDLIENDKKRDIRLVYLACHYLIKHRGHFIFDGKNFTVDNSFENLLDKLITYLKDNDDITLSFPKDQLINIFKNSNLNSTEKSDQLKPFFGRTNLEKGIIKLLSGGKQDLSNMFRDETLKNSNYKNLKFSDNRFDDERDGYAADLGDRIDLLILLKQIYDASILESMMSQARVSIDGHKYISSAKVCAYEKHKSDLKRLKSLIKKYLPSEYNNIFRKITEKDNYVAYSKSNITNNKREKALKYVKYVDFTKYLTKKLKTIKTQDAEDDQEIFEIKGELEKQSFLPKQRTLDNSIIPYQLHLMELKKILDNQSKYYDFLLAKDDQEGITVKDKIISLLTFRLPYYIGPVNPAVHGKFAWVKRLANGKVTPWNYKEKIDIDASHEEFIKTKLSKCSFLIGCDVLPKNSLLYQKYMVLSELNTIKFNGVNISEKLKDDIYQNLFKNIQKVTKKRLQNYIKEHENIIGDVIVTGIDNAFKQGLVSYLKFKKIIGDKVDDDRYQKVLEKIIRDITLYDECAGKKIKKEYKDSDLFTEDELNKIVKLTFNDWGRLSAELLDQLEGEDTVSGETGKIIEFMQKHNYNLMQLMSKKFTFKSKIDEINKSYYQHDKFNYKSMIDSLYVSPATKRILWQSLKVVHEISKIMKHDPEKIFIEMARSKEDHPKRKLSRKADLKQVYKDSKKQIISIIGKDKYQDLSNELDNKDDRDLRWDNLYLYYTQLGRSMYSLKPIDISELMNKNLYDQDHIFPKSKKYDDSIENRVLVEKELNVKKSDIYPISDANIIPQKIKGQVESFWKMLYDHKLIGDKKYARLIRSKAFTDDELAGFIARQLVETRQATKETADLLKRLCPKSRIVYAKAQNASIFRQKFDIPKSRTINDLHHAQDAYLNIVVGNIFDTKFTQDPRNFIKNTKDSRNYNLEKIYDYNVERNNYVAWIAPDGETNGTIANVKCNLSTKDFRVTRPSFYKKGALFNQNLSRKGSNLAPIKEHSPKSNPLKYGGYSGKNNSFFVVVAGKDNKGKDIVKLIPVNTLIYNKMLHCDYKAKQELLTSYVANNFAINNFRIVKDDIKMYSLVKIDGAYYYLVGGTDERIEVKNAMQLLLSKDSIKAVKILEKESKDQFANIKNYKDIDIKLGRTFNEVVSKYTNSVFGKSMLISDKYRKDIFKSVEKSILEFNHLDTIGKADNLLKFVTLMRPSGSAHSLKMVGLIERIRKSNVISNFNEFKLINQSVTGLFENEEDLLKL

SEQ ID NO: 286 - protein, 1391 aa, Lactobacillus jensenii
  Lactobacillus jensenii 269-3
MKEIKDYIIGLDIGTNSCGYVVTDKQNNILKLKGKTAIGARLFKEGEAAADRRAFRTTRRRLARRRWRLSLLEEIFDEEMNKVDPSFFRRLKESDYSPKDRRKQFNSIVFESSEADKAFYEKYPTIYHLRNALMHDNQKHDLREIFLAVHHIVKYRGNFLREDSVKAFKAAKFTLQGEDGIGPVDKLNDLLKEIYIEAAPELATDNLSKIEDIIKDKKLYKQDKLKQIANLLPKAVDSKDKAKLNKDIAKQVANALMGYMFRLDTLFSFTDVDVKDYKLKFSDANIDESLDALTSLLTDAQIEFVLELQSIYNTIVLNEIVPDGMSLSESMVKKYDDHKKDLKLYKEYIDSLSDQKKAKQLEAAYALYVNYRKADLLAAKKLFEKKKIGDKKFVDVISNFEVFGKFVSDNLDDSELANKIKARLDLGEFLPKQRTNQNGVIPYQLHQVELTQILEKQGKYYPFLITPNPVESHRNNAPYEISELVSFRVPYYVGPLIDNQSIKDKQNKNKFAWMVRQKQGQITPWNFEEMVDTTESANQFIKRMTRKDTYLLAEDVLPKSSLIYQKFMILDELNRIKIDGKKLTSKLKHDIFEKLFKKQKSINLDNLKNYLLAEGNIPGLIEGLSDGINFNNSFSTYIDYRNIFGDEIDNPNKQADFEKMIEWSTVFEDRKIFKRKLKEITWLTPEQIKQVSSKRYSGWGRLSKKLLTQITDENGVNILQRLWNEPETLTEVLANPVIKRKISEANSLFVQINKVENILDDAYTSPQNKKAIRQVIRVVDDIIAAAHGKKPSQIAIEFARSSQNKAKVPDTRKKQLDKIYNKISSEILDSSIKNELKNLKSNKYLSKDKLFLYFKQMGRDAYTGDKLSLDQLQNYDIDHIFPRSFIKDDSLDNRVLTQKPINAKKSDYGIPALEFGNKYVPDLGITVKEMWKLWQENGLISKSKLINLCTNPKKIGSKRASGFINRQLVETSQVIKLVAIILQAEFPDTEIIEVKALQNTTLRESFHLYKNRSVNDYHHAIDAYLTTIVGNYLYQVYPKLRPYFVYGQFKKFNQEKNIDILKRLKNFNFLRQLIFNTDDNIYISGTKEIVFNKKDIIHKLETAYGYKYMNISRECYQETSSLFNQTLYAHNSSVKNSLIPKKKGLPTEIYGGYSGNKDSFFVLVKIVKKRTNLYRIVGIPTRELAKLNSSNNYNQALNKIVESKLCLKETESFKILIKRLLYGTLIVDNGQKFRIGSFKEKHNVQQLVLQLKSMKYIKFYIDGGQNYFTDVERKKLEKQDRDKCLLYVFDDIMNVVNKRFTLFDMSKYEKDGDSLREKFNCLDFNDKVSILSDLLKAFHANSDRTSITKLKITNLGRHQAGKNGITLTTNAQIIYQSPTGLFERRIKIKDL

SEQ ID NO: 287 - protein, 1395 aa, Lactobacillus jensenii
  Lactobacillus jensenii 27-2-CHN
MKEIKDYIIGLDIGTNSCGYVVTDKQNNILKLKGKTAIGARLFKEGQAAADRRSFRTTRRRLARRHWRLGLLEEIFDPEMEKIDPNFFRRLKESDYSPKDSRKQFNAIVFKSIKADKRFYKKYPTIYHLRNALMHDNQKHDLREIFMAVHHIVKYRGNFLREDSVNAFKAAKFSLRGEDGIGPVDKLNDLLKEIYSEYSPELATNNLSKIEDIIKDKNLYKQDKLKQVATLLIKEADSKDKAKLNKDIAKQVANSFMGYMFRLDTLFSLTDVDVKDYKLKFSDANIDESLDDLTSLLTDAQIEFVLELQSIYNTIVLNEIVPDGMSLSESMIKKYDDHKEDLKIFKEYIDSLSDQKKAKKLLSAYNLYVNYRKSDLVEAKNLFKNKKVGDKNFADVISNFEVFGKFVSDNLDDSELANKIKARLDLGEFLPKQRTNQNGVIPYQLHQVELTQILEKQGKYYPFLITPNPVESHRNNAPYEISELVSFRVPYYVGPLIDNQSIKDKQNKNKFAWMVRQKQGQITPWNLEEMVDTTESANQFIKRMTRKDTYLLAEDVLPKSSLVYQKFMILDELNRIKIDGKKLTSELKHDIFEKLFKKQKSINLDNLKNYLLVEGNIPGLIEGLSDGINFNNSFSTYIDYRNIFGDEIDNPNKQADFEKMIEWSTVFEDRKIFKRKLKEITWLTSEQIKQVSSKRYSGWGRLSKKLLTQITDENGVNILQRLWNEPETLTEVLANPVIKRKIVEANSSFTKAKDMKDILVEAYTSPQNKKAIRQVMRVVDDIIAAAHGKKPSQIAIEFAREDQDNPQMTKSRKAQLDQIYAKISDEFLDDAVKNELKNMKDNKPLAKDKVFLYFKQMGRDAYSGEKLSLDNLQDYDIDHIYPQSFIKDDSFDNRVLVQRAYNNGKSDNVPVLLFGNKIAAGLGITIRQMWKKWLELGLISKRKFNNLITDPEKISRNMASGFVNRQLVETSQVIKLVANILQAKLPDTEIIEVKASYNSILRKEFNLYKSREVNDYHHAIDAYLTTIVGNYLYQVYPKLRPYFVYGQFKKFGKAENQEDDPVKKIKKFNFIYQLIWGKDDAICISHTNQQVFSKKDIIDKLTTAYNFKYMNISHAVYTRNNNMFKQTLFPIIERTTAKTKSLIPKKLDRPTDIYGGYSNNNDAYLALVKVDKKRGSEYRVVGIPMRAAAMLKASKNYDEDLRKVIEPMVMFDKNGKAKRGIEGFRVLVGKMPFKQAVLDGNKKFMLTGTVDTPNLKQLVLSQQNMKYILDYIEDVDCRKHKFGDKVQNPDKCLLEVFDEIIEIVDKYFELFDSRDFREKLRNSRNKFIKLEASKKADTILAILKGLQAKSTRATIKELNISDFGRIITSSISPEAQLIYQSPTGLFERRVKVKDL

SEQ ID NO: 288 - protein, 1375 aa, Lactobacillus johnsonii
MTKIKDDYIVGLDIGTDSCGWVAMNSNNDILKLQGKTAIGSRLFEGGKSAAERRLFRTTHRRIKRRRWRLKLLEEFFDPYMAEVDPYFFARLKESGLSPLDKRKTVSSIVFPTSAEDKKFYDDYPTIYHLRYKLMTEDEKFDLREVYLAIHHIIKYRGNFLYNTSVKDFKASKIDVKSSIEKLNELYENLGLDLNVEFNISNTAEIEKVLKDKQIFKRDKVKKIAELFAIKTDNKEQSKRIKDISKQVANAVLGYKTRFDTIALKEISKDELSDWNFKLSDIDADSKFEALMGNLDENEQAILLTIKELFNEVTLNGIVEDGNTLSESMINKYNDHRDDLKLLKEVIENHIDRKKAKELALAYDLYVNNRHGQLLQAKKKLGKIKPRSKEDFYKVVNKNLDDSRASKEIKKKIELDSFMPKQRTNANGVIPYQLQQLELDKIIENQSKYYPFLKEINPVSSHLKEAPYKLDELIRFRVPYYVGPLISPNESTKDIQTKKNQNFAWMIRKEEGRITPWNFDQKVDRIESANKFIKRMTTKDTYLFGEDVLPANSLLYQKFTVLNELNNIRINGKRISVDLKQEIYENLFKKHTTVTVKKLENYLKENHNLVKVEIKGLADEKKFNSGLTTYNRFKNLNIFDNQIDDLKYRNDFEKIIEWSTIFEDKSIYKEKLRSIDWLNEKQINALSNIRLQGWGRLSKKLLAQLHDHNGQTIIEQLWDSQNNFMQIVTQADFKDAIAKANQNLLVATSVEDILNNAYTSPANKKAIRQVIKVVDDIVKAASGKVPKQIAIEFTRDADENPKRSQTRGSKLQKVYKDLSTELASKTIAEELNEAIKDKKLVQDKYYLYFMQLGRDAYTGEPINIDEIQKYDIDHILPQSFIKDDALDNRVLVSRAVNNGKSDNVPVKLFGNEMAANLGMTIRKMWEEWKNIGLISKTKYNNLLTDPDHINKYKSAGFIRRQLVETSQIIKLVSTILQSRYPNTEIITVKAKYNHYLREKFDLYKSREVNDYHHAIDAYLSAICGNLLYQNYPNLRPFFVYGQYKKFSSDPDKEKAIFNKTRKFSFISQLLKNKSENSKEIAKKLKRAYQFKYMLVSRETETRDQEMFKMTVYPRFSHDTVKAPRNLIPKKMGMSPDIYGGYTNNSDAYMVIVRIDKKKGTEYKILGIPTRELVNLKKAEKEDHYKSYLKEILTPRILYNKNGKRDKKITSFEIVKSKIPYKQVIQDGDKKFMLGSSTYVYNAKQLTLSTESMKAITNNFDKDSDENDALIKAYDEILDKVDKYLPLFDINKFREKLHSGREKFIKLSLEDKKDTILKVLEGLHDNAVMTKIPTIGLSTPLGFMQFPNGVILSENAKLIYQSPTGLFKKSVKISDL

SEQ ID NO: 289 - protein, 1382 aa, Lactobacillus mucosae
  Lactobacillus mucosae LM1
MDIGTNSIGWTAIDDHFSLLRVKGKNAIGVRTFKEGETAADRRGFRTARRRLSRRRWRLQFLDEFFAPYLAEVDPNFLARLKQSDISAKDPAKNQEYMGKLLFPDQEAASDGNGYPTLIQMRKAMPAEKAADFPVFNIYQLRYALMNEKRKFDLREIYLAVHHIVKYRGNFLNNTSVDKFKADQIDFNKSFETLNDLFRQVQPIAPFQIDLTKVDELGKLLLDTKQKKLDRQKAVAKLLPLIEDGTDKEIVKAHQQTAREISKLILGYKAKVGLILQNNLDQTLDMSTENSDDQLMQIAEELDDYQMELINQLSLLYSQIMLNEIVPNGETVSASMLNRYYKHRCQLKELKDYGAAQDKKTREQLDHLYAEYIGQIPKDSKFDFTKDLKKLMDKSDLGQKIKDEIEAGDYLPKQRTSANGVIPHQMHQQELDQIIENQKEYYPWLAEPNPVEKNIKNAKYKLDQLVSFRVPYYVGPMITLADQQKTSKASFAWAVRKKAGKITPWNFYDMIDREKSANNFIKRMTNKDTYLLSEDVLPASSLLYQKFTVLNELNNIRVNGRKLQPALKQAIYTDLFQKRKTVNLKTLTNFLAIHEPTLTKPKIEGLSNGRSFNSSLGTYIDMSKILGDSLDDLNYRDDIEKIIEWSTVFEDSEIYGVKLQEIQWLTNEQREKLVRKRYQGWGRLSKKLLTGITDENGQRIIDLMWDTSKNFMQIVHQPVFEEQIAELNQQLLQDADKAPLEVVDDILADAYTSPQNKKAIRQVVKVVADVVKAVGNAPASISIEFARNEDRNKELKNSRRHSIEKLYHETAEKLVKQTNLLEELGNVKDLNDRYYLYFTQAGRDMYDGTPINIDEISTHYEIDHILPQSFLKDNSLDNRVLVKKSENAAKSDRVPAKLYGAKMRAFWKQLKESQLISNRKYLNLTTDPEQVDKYQMQGFVHRQLVETRQIIKLAANIFGSLYPDSAVIETRAELTKQLREKFSLYKVRDVNDYHHAVDAYLTAFAGHYLYQRYPKLRPMFVYGDYAKIYADDLKRLRSVNLFHDLEKDQYNSGTAVNPETKEKIVDVDWLSDYVSKIQHFKYMLISKAVYTQHGQLYGATILPVAQVDKISAPIGIKDDKPVDIYGAYTNEVAAYMAIVRVNGKKPKYKVVSVPVRMLQRLKMAEQKGHDQYMQTLHDVLLRNFTSLKKNRKTGLKEAVVKDFDVLVPCVRYNQLVIDGDTKFTLGSATYQHNAKQLVLCNHSLETLANNFEYVRKHPDEADERMIMLYDDILDQVNHYFTLYDKNKFREKLNAGRDKYLKLPTFSQFENNKKTAIGKSEAIINILRGLHANAAITNLKCLGVSTPFGQLQSPSGIELSENAKLVYQSPTGLFSREVLLKDL

SEQ ID NO: 290 - protein, 1362 aa, Lactobacillus paracasei
  Lactobacillus paracasei subsp. paracasei 8700:2
MTKLGKPYGIGVDIGSNSIGFAAVDENSHLIRLKGKTVIGARLFEEGKAAAKRRAGRTTRRRLSRNRWRLSFLRDFFESHITPTDPNFFMRQKYSEISPKDKARYKYEKRLFNDRTDAEFYQQYSTMYHLRNRLMTDPSRADVREIYFAIHHILKSRGHFLTPGDAKDFNTNDVALDEIFPALQDAYAQVYPDLGITFDEDKANEFKTILLNEIATSIDTQRALVKLLLAEEDDKDILKQQKQVLTEFAKAVVGLKTKLNLALGTEVDSSEATAWNFSLGQLDDKWAGIESAMTDEGTEILDQIRDLYRARLLNGIVPTGKTLSQAKVDDYTQHHEDLQLFKAYLKQLEDDGTAKAIRQLYDRYIDGDDAAPFLRENFVKALTKDVTAHPNTKSPELLERLAQPDFMLKQRNKANGAIPVQMQQRELDQIIKNQAVYYDWLAAPNPVEKHRKSMPYQLDELLNFRIPYYVGPLVTAKEQKAAQGGVFAWMVRKDPEGNITPYNFDEKVDREASANTFIQRMKTTDTYLIGEDVLPKQSLLYQRYEVLNELNNVRVNNEKLSIEQKQQVIRELFERHNSVTIKQFAENLRAHGDYAHIPEIRGLADEKRFLSSLSTYRQLKSLLPEAIDDPAKQADIENIIAWSTVFEDAAIFKTKLKEISWLGSEAITKLSNIRYRGWGQFSRKFLNGLTLGNGHTIIQELLLSTNNLMQILTDETLQKKMTELNADKLKTANINDAIDNAYTSPSNKKALRQVLRVVDDIKRAADGQDPSWLYVETADGGGTPGKRTRARQHQLQEIYANAAHELIDTAVRGELEDKISDKADFNDRLVLYFMQGGRDIYTGAPLNIDQLSSYDIDHILPQSLIKDNSLDNRVLVHAIINREKNATFASTIYAQKMNATWRQWHEAGLISGRKLRNLQMRPDQIDKYASGFVARQLVETRQIIKLTEQIVAAQYPDTKIIAVKAGLSHQLREELEFPKNRDVNHYHHAFDAFLAARIGTYLLKRFPNLQAFFTYGKFTKADVKKLRGFNFIRDITHAEDKIVAKDTGEVVWDKQRDVDELDRIYNFKRMLITHEVRFETADLFKQTVYGARDSKEAGGSKQLIPKKKGYPVDIYGGYFRENTAYLAVVKVTKKTETIFKVVKIATSQVAALNKARSRSTAEELSVLTELLKPKFSKVGKNGKITDTPFEVVLPRVPREQLFYNAKYGFFMVNSDTMFHNFQEIWVSRSDQKILQQIRKAKIDYPNVDQDLDNLFHNLADQIVKYFDLYSIAGFKEKISQSQNTFNDLAVDDTDQSVGKITVINELLKGAQANGMTGSLKVLKISTPFGFTQDKSGVLTKDSSIIYQSPTGLFERSVRLTDL

SEQ ID NO: 291 - protein, 1382 aa, Lactobacillus pentosus
  Lactobacillus pentosus IG1
MKKIVNYNLGLDIGTSSIGYAAIDDQGRPVRHQNKTVMGVRLFKEGKTAESTRIFRGTRRRLSHRHWRLGYLDRIFDNEIAKVDENFLPRLKASKRARSDEKRSFRGSLLFPETGDDAYYQKYPTIYHLRYALITQKKQFDIRLIYLALHHMIKYRGNFLDTTPVSAFNIHDIDLTDQFASLNDCYQLLDMDFEFQFDLNNIEQVQKLLLDETLSKTKRQAAVSKVLVMSTGNKAFDDQQNGIASEFIKALLGGPFDLSKILNLSVADVKSWKLHMTDKDVDDTLNSLVEELDENHKQIVNLLQMIYSQVMMLGLLNGQQSISASMIERYDDHAKHWAALKKLLPALGEQEQSTIIHAYTAYTGHSRTKQLSRAEFYTKVNSILKKHENIAEATGLIELIDRNEFMPKQRDAVNGVIPHQLHQRELQLIIQNQQKYYPFLAAKAYPDADETMIEQLLSFRVPYYAGPLVDRDFINESSDQEQAMQNTKFSWLKRREAGEITPWNFEQKVDVQETANRFIKRLTTKDTYLMTEDVLPKESLIYQRFEVLNELNAIRINDRRLTAENKQLAFQQLFMAGNTKNVSIKKFRNFVFDSLKFPEKVKITGFAGQHNFLAKLSTYHDFKKIFGERVDHTDLQPDFERIVEWCTIFEDRHIYREKLKEIQWLSQSEIDQLVLIRNHGWGRLSKRLLTGIRDSDGRTVMDQLWFGTDNFMRIISQSDFAAAIANENRTQLNQHGLEDVLDSAFMSPQNKKAIRQVLKVVDDIEQTLGCPPKKVMIEFTRSPDKKKQRTVTRLEKVQQAYKAVADQLAGQSIVSELDQYANTHSKLSDTYYLYFMQLGRDLYSGKPIDIDSPMLDDDHILPRAFMKDNSLDNRALTEKPINNTKAAKFPSKVFGQQKEVTDFWKLLRRCGLMSNIKEKHLYLDPDNVDKWTRRGFIHRQLVETSQVIKIVANILNDRYQQSQTEVLEVPARLGTELRECFGWYKVREVNDYHHVFDAYLAAFIGNYLYRRYPKLQPYFVYGNFAELNKAQLKNIKSFNFLYNITDNKRVVKDIETGQTLWDDQIRQQIQHIYEYKYMLTSHEAFTQHKELYGQTIYPRREFKPGTLKAIKQDQPQELYGGYKNLTAAYMCIVKIQARKRRAAEYRVVRVATESLSALQQAKRLGVQAYERCLRQELVRNNEILRTNADPNSAPREFEVLLDRVLCHQMIISDGQKYLLGSHAYKINCMQLVLSNNSMKILSTSIVKLKQMTNEPLVQVYREILDVVNKYFTLYDVNSFRENLNQFFDKFRTLPITNEYESSKSGKKLIHRGQLETLTLILRGLHANSDKVQYGDQSTLLGGFQTKDGIKLSKDSVIQYTSPAGLNVRTVKLRDLEQKEAQK

SEQ ID NO: 292 - protein, 1361 aa, Lactobacillus pentosus
  Lactobacillus pentosus KCA1
MNEPYGVGLDIGTNSVGWTVVDMNGRVRKVKGKTALGARLFKEGATAEDRRGFRTTRRRLKRVKWRLRLLREFFDQPISKIDPNFFARRKYSDISPRDPNYNGLAKTLFNDRTDKEFYDDYATIYHLRDKLMTSNRKFDIREIYLAIHHIVKYRGNFLRTGPASQYGSASLHLATSFQKLNDLFAQSEETLNLKLVTDEALLQQIQQILVRTDLSRSEQQRQIWPLMAVLTGASAAEKKRQKNVVVELSKALVGLKAKMNVVTLTEVDAAVVKDWTFTMEESQDKLPEIEEQLSEVGQQIMDEVIQLYASVNLAQLIPAGKRFSQHMVEKYKHHEKNLELLKAYIHSQSDSKRGREIRATYDRYIDGVDSKPVTQEMFYKDLMKYVEADATSNHLAAEIKDEIDSEQFMPKLRTKQNGSIPYQVQQYELDQIISHQKKYYPWLGEENPVAERRGKFPYKLDELVGFRVPYYVGPLITKEDQQATSGAGFAWMVRKADGPITPWNFDQKVDRIASATAFIQRMQTTDTYLIGEDVLPARSLIYQRFMVLNELNNMRVEDRKLAPQQKQRLYNQVFKQHQHVSVKNIQQNLMDAGEYRKTPQITGLADPKGFNSSLSTYHDFKKILLEAIADEHKRADIEKIILWSTTFEDSAIFKQKLEEVAWLTDAQRKQLSGLRYRGWGQLSHKLLTAFKDDKGRSIMDGLWETSDNFMQLRKQPAIETQIKEANQANLTDADIQDTINELYTSPQNKKAIREVMLVLDDIKNAMHGQTPSWIFVEAARGGGVAGRRTQSRSSQIVEAYKGTAKEIVSEKVQHELNEKIKAKADFNTRLVLYFLQNGRDLYTNEAINIDRLSEYDIDHILPQSLVKDDSLDNRVLTSARINREKNDTFASEKFGRKMGAQWRELHRNGLMTQRKLKHLLMRPDEISKHATDFINRQLVETRQVIKLVEELISSEYPAASIVAVKANLTHQFRQTFNFPKLREVNDYHHAFDASLTAFIGMYLLKQYPKLERFFVYGKFAKQPINLTRFNIIRKLAVAEKPIANIETGEILWDKTADIKYFEKLYNYKRLLVTHEVRENYGAMFKQTLFKASYNKSKTLVPKKNHMETSVYGGYSNQETAYLAIVRIPFKSGFKFIVVGIPTRMVAKIKHYQSLGATLNQATHKVIEPKFTKISRKTKQTVISDYEVVLPKVYLDQVVRDQVKGQMYRFSLGSDKEYHNVQELYLPLSIQQAFVGHYDESDDQRSNDLVKVYDAALKQLQRYFPLHLSRNFDQVASQAHQSFEGLKNNVQTSDKQLGKKEVLNSLFVGLHANATRSNLSVLGMSKDFGRIKSNGITLTDQAEIIYQSPTGLFERKVALKDL

SEQ ID NO: 293 - protein, 1358 aa, Lactobacillus pentosus
  Lactobacillus pentosus MP-10
MNEPYGVGLDIGTNSVGWTVVDMNGRVRKVKGKTALGARLFKEGATAEDRRGFRTTRRRLKRVKWRLRLLREFFDQPISKIDPNFFARRKYSDISPRDPNYNGLAKTLFNDRTDQEFYHDYPTIYHLRDKLMTSDRKFDIREIYLAIHHIVKYRGNFLRTGPASQYGSASLHLATSFQKLNDLFAQSEESLNFKLVTDEAQLQQIQQILVRTDLSRSEQQRQIWPLMVVLMGATAAEKKRQKDFAKELANALVGLKAKLNVVTLTNVDTTVVKDWTFTLEESQDKLPEIEEQLSEVGQQIMDEVIQLYASVNLAQLIPAGKRFSQHMVEKYNHHEKNLELLKAYIHSQSDSKRGREIRATYDRYIDGVKSKPVTQEMFYKDLMKYVEADATSNHLAAEIKDEIDSEQFMPKLRTKQNGSIPYQVQQYELDQIISHQKKYYPWLGEENPVAERRGKFPYKLDELVGFRVPYYVGPLITKEDQQATSGAGFAWMVRKADGPITPWNFDQKVDRIASATAFIQRMQTTDTYLIGEDVLPARSLIYQRFMVLNELNNMRVEDQKLAPRQKQRLYNQVFKQHQHVSVKNIQQNLMDAGEYRETPKITGLADPKGFNSSLSTYHDFKKILPEAIADEHKRADIEKIILWSTTFEDSAIFKQKLEEVAWLTDAQRKQLSGLRYRGWGQLSHKLLTAFKDDNGRSVMDGLWETSDNFMQLRKQPAIETQIKEANQANLTDADIQDTINELYTSPQNKKAIREVMLVLDDIKNAMHGQTPSWIFIEAARGGGVAGRRTQSRSKQIVEAYKSTAKEIVSEKVQHELNEKIKAKADFNTRLVLYFLQNGRDLYTNEAINIDRLSEYDIDHILPQSLVKDDSLDNRVLTSARINREKNDTFASEKFGRKMGAQWRELHRNGLMTQRKLKHLLMRPDEISKHATDFINRQLVETRQVIKLVEELISSEYPSASIVAVKANLTHQFRQTFNFPKLREVNDYHHAFDASLTAFIGMYLLKQYPKLERFFVYGKFAKQPINLTRFNVIRKLAVAEEPIANIETGEILWDKTADIKCFEKLYNYKRLLVTHEVRENYGAMFDQTIFKATDSRKRLIQKKKGFATETYGGYTGRTLAYLAIVKVVTNKDTQYQVVGIPTTMVTQIQQLEASGLTSKQAVTKAIGAMINENNKKLQSYEVLLPKVRFEQVVRDEVKGHIHRFALGTDTYYHNIQELYLPLTIQRAFLGKRNDTDAQTEQNLLTVFETTLAQVNRYFPLYEMNKFKQILNSAQEKFAALPTKNKTVKNKLVTGKDGVLNNLFIGLHANASLGDLKILGMKIGFGKLQVPGGLKLTDQAEIIYQSPTGLFERKVALKDL

SEQ ID NO: 294 - protein, 1358 aa, Lactobacillus plantarum
MKEPYGVGLDIGTNSVGWTVVDASGHVRKIKGQTGIGVRLFKEGAAAADRRGFRTTRRRLKRVKWRLRLLREFFDQPISKVDINFFARRKYSDVSPRDPNYNGLEKTLFNDRSDQDFYHDYPTIYHLREALMTQHRKFDVREIYLAIHHIVKYRGNFLRNDAATAYRSGTLDLQQHFETLNHLFSQADLELNLNLTTDVALLDSIKQTLVRTDISRSDRQKLIMPLLAVLTGATTAEKKRQKAVVTEFAKALVGNKTKIDVLTLTDIDATEAKDWAFSLEENQDKLPGIEDRFSEVGQQIIDEVIRLYASVNLAQLIPEGKRFSQSMVEKYKRHGEDLKLLKAYIRSQSDAKRGRAIRATYDQYIDGVKSKQVTQEAFQKALGKFVDADVDLNSWAAQIKQAIDSEQFMPKLRTKQNGAIPYQVQQNELDQIISNQKEYYPWLGEENPVIKRRGKFPYKLDELFGFRVPYYVGPLITKEMQAATANAGFAWMVRKADGPITPWNFDDKVDRVASATAFIQRMQTTDTYLIGEEVLPARSLIYQRFMVLNELNNIRVDDGQLTPRQKQRLYNQVFKKHKRVTAKNIQDNLVAAREFPTAPRITGLADPKVFNSSLSTYHDLKQVLPEAMSDVRKQADIEKIILWSTIFEDSTIFKQKLTEISWLTAAQLKQLGQLRYRGWGQLLRKLLTGLKDDNNRSIMDGLWETNANFMQLRSQPAIENQIKSANQANLTTADLQDTINELYTSPQNKKAIREVMVVLADIKDAMHGQTPNWIFVEAARGGGVAGRRTQSRSKQIVAAYQGTAQAIVRDQVQRELKEKIKNKANFNTRLVLYFLQNGRDLYTGDAINIDRLSEYDIDHILPQSLVKDDSLDNRVLTNARINREKNDTFASEKFGKKMGAKWKEMHRMGLMTKRKLDHLLMRPDEISKYATGFINRQLVETRQVIKLVEELINAEYPSTAIVSVKANLTHQFRQTFDFPKIREVNDYHHAFDAALTAFIGTYLLKRYPKLERFFVYGKFAKQPVNLTRFNVIRKLAKTDTPITDIDTGEVLWDKLTDIKYFETLYDYKRLLVTREVSENYGAMFDQTLLKASDNGKRLIRKKQSFDTAIYGGYTGKTLAYMAIVKVSTKKDVQYQVVGVPTTMVTQIEQLEQQGMTNKQAVTKVIEPLIAANNKKMLTYEVLLPKVRFEQVVRDRIKGQTHRFALGTDTYYHNIQELYLPLTLQRAFLGKQNESEVQLNQNLLTVFDATLAQVNRYFPLYEMNKFKKILNSARDQIELLEAKNQFVKNKLVLGKQGILTNMFIGLHANASYGDLKVLGVKIDFGKLQVPGGIKLTGDAEIIYQSPTGLFERKIALKDL

SEQ ID NO: 295 - protein, 1363 aa, Lactobacillus rhamnosus
MTKLNQPYGIGLDIGSNSIGFAVVDANSHLLRLKGETAIGARLFREGQSAADRRGSRTTRRRLSRTRWRLSFLRDFFAPHITKIDPDFFLRQKYSEISPKDKDRFKYEKRLFNDRTDAEFYEDYPSMYHLRLHLMTHTHKADPREIFLAIHHILKSRGHFLTPGAAKDFNTDKVDLEDIFPALTEAYAQVYPDLELTFDLAKADDFKAKLLDEQATPSDTQKALVNLLLSSDGEKEIVKKRKQVLTEFAKAITGLKTKFNLALGTEVDEADASNWQFSMGQLDDKWSNIETSMTDQGTEIFEQIQELYRARLLNGIVPAGMSLSQAKVADYGQHKEDLELFKTYLKKLNDHELAKTIRGLYDRYINGDDAKPFLREDFVKALTKEVTAHPNEVSEQLLNRMGQANFMLKQRTKANGAIPIQLQQRELDQIIANQSKYYDWLAAPNPVEAHRWKMPYQLDELLNFHIPYYVGPLITPKQQAESGENVFAWMVRKDPSGNITPYNFDEKVDREASANTFIQRMKTTDTYLIGEDVLPKQSLLYQKYEVLNELNNVRINNECLGTDQKQRLIREVFERHSSVTIKQVADNLVAHGDFARRPEIRGLADEKRFLSSLSTYHQLKEILHEAIDDPTKLLDIENIITWSTVFEDHTIFETKLAEIEWLDPKKINELSGIRYRGWGQFSRKLLDGLKLGNGHTVIQELMLSNHNLMQILADETLKETMTELNQDKLKTDDIEDVINDAYTSPSNKKALRQVLRVVEDIKHAANGQDPSWLFIETADGTGTAGKRTQSRQKQIQTVYANAAQELIDSAVRGELEDKIADKASFTDRLVLYFMQGGRDIYTGAPLNIDQLSHYDIDHILPQSLIKDDSLDNRVLVNATINREKNNVFASTLFAGKMKATWRKWHEAGLISGRKLRNLMLRPDEIDKFAKGFVARQLVETRQIIKLTEQIAAAQYPNTKIIAVKAGLSHQLREELDFPKNRDVNHYHHAFDAFLAARIGTYLLKRYPKLAPFFTYGEFAKVDVKKFREFNFIGALTHAKKNIIAKDTGEIVWDKERDIRELDRIYNFKRMLITHEVYFETADLFKQTIYAAKDSKERGGSKQLIPKKQGYPTQVYGGYTQESGSYNALVRVAEADTTAYQVIKISAQNASKIASANLKSREKGKQLLNEIVVKQLAKRRKNWKPSANSFKIVIPRFGMGTLFQNAKYGLFMVNSDTYYRNYQELWLSRENQKLLKKLFSIKYEKTQMNHDALQVYKAIIDQVEKFFKLYDINQFRAKLSDAIERFEKLPINTDGNKIGKTETLRQILIGLQANGTRSNVKNLGIKTDLGLLQVGSGIKLDKDTQIVYQSPSGLFKRRIPLADL

SEQ ID NO: 296 - protein, 1361 aa, Lactobacillus rhamnosus
  Lactobacillus rhamnosus HN001
MTKLNQPYGIGLDIGSNSIGFAVVDANSHLLRLKGETAIGARLFREGQSAAERRESRTTRRRLSRTRWRLSFLRDFFAPHITKIDPDFFLRQKYSEISPKDKDRFKYEKRLFNDRTDAEFYEDYPSMYHLRLHLMTHTHKADPREIFLAIHHILKSRGHFLTPGAAKDFNTDKVDLEDIFPALTEAYAQVYPDLELTFDLAKADDFKAKLLDEQATPSDTQKALVNLLLSSDGEKEIVKKRKQVLTEFAKAITGLKTKFNLALGTEVDEADASNWQFSMGQLDDKWSNIETSMTDQGTEIFEQIQEHYRARLLNGIVPAGMSLSQAKVADYGQHKEDLELFKTYLKKLNDHELAKTIRGLYDRYINGDDAKPFLREDFVKALTKEVTAHPNEVSEQLLNRMGQANFMLKQRTKANGAIPVQLQQRELDQIIANQSKYYDWLAKPNPVEKHRASKPYQLDELLTFRIPYYVGPLITPKEQAESRENVFAWMIRKDPSGNITPYNFDEKVDCPASANMFIQRMKNTDTYLIGEDVLPKRSLLYQKYEVLNELNNVSIDGRRLGADQKQRLIREVFERHSSVTIKQVAENLVAHGDFAKRPEIRGLADEKRFLSSLSTYHQLKKILHEAIDDPTKEHDIENIITWSTVFEDAAIFKTELAKISWLDSDTIKALSNIRYRGWGQFSRKLLDGLKLGNGHTVIQELMLSNHNLMQILTDETLKTTMAELNQDKLKADDIEDVINDAYTSPSNKKALRQVLRVVEDIKHAANGQDPSWLYIETADGPGTAGKRTQSRQKQIQTVYANAAQELIDSAVRGELEDKIADKASFTDRLVLYFMQGGRDIYTGAPLNIDQLSHYDIDHILPQSLIKDDSLDNRVLVNATINREKNNVFASTLFASKMAATWRKWHEAGLISGRKLRNLMLRPDEIDKFAHGFVARQLVETRQIIKLTEQIAAAQYPNTKIIAVKAGLSHQLREELDFPKNRDVNHYHHAFDAFLAARIGTYLLKRYPKLAPFFTYGEFAKVDVKKFREFNFIGALTHAKKNIVAKDTGEIVWDKERDIQELDRIYNFKRMLITHEVYFETADLFKQTIYAAKDSKERGGSKQLIPKKQGYPTQVYGGYTRENTAYLAVVKTVEKKADVYRVVRIATSQVAALKEARAQSTVKERELLKKFLTTKFTKIGKNGKKAITPFDIVIPRVPREQLFHNKRYGFFMVNSDTLMHNYQELWMSRSDQQILSKLVKSAKTVENGQVGRLFENIVEQINKYFPLYDINQFRKKLDQSKDIFSKLPLEGNGTTSGKRETIQNILTGAGTGAKNGDLKNLGIKTPFGFLQVPSGIVLDDDTTLIYQSPTGMLNRIVRLSEL

SEQ ID NO: 297 - protein, 1361 aa, Lactobacillus rhamnosus
  Lactobacillus rhamnosus R0011
MTKLNQPYGIGLDIGSNSIGFAVVDANSHLLRLKGETAIGARLFREGQSAAERRESRTTRRRLSRTRWRLSFLRDFFAPHITKIDPDFFLRQKYSEISPKDKDRFKYEKRLFNDRTDAEFYEDYPSMYHLRLHLMTHTHKADPREIFLAIHHILKSRGHFLTPGAAKDFNTDKVDLEDIFPALTEAYAQVYPDLELTFDLAKADDFKAKLLDEQATPSDTQKALVNLLLSSDGEKEIVKKRKQVLTEFAKAITGLKTKFNLALGTEVDEADASNWQFSMGQLDDKWSNIETSMTDQGTEIFEQIQELYRARLLNGIVPAGMSLSQAKVADYGQHKEDLELFKTYLKKLNDHELAKTIRGLYDRYINGDDAKPFLREDFVKALTKEVTAHPNEVSEQLLNRMGQANFMLKQRTKANGAIPVQLQQRELDQIIANQSKYYDWLAKPNPVEKHRASKPYQLDELLTFRIPYYVGPLITPKEQAESRENVFAWMIRKDPSGNITPYNFDEKVDCPASANMFIQRMKNTDTYLIGEDVLPKRSLLYQKYEVLNELNNVSIDGRRLGADQKQRLIREVFERHSSVTIKQVAENLVAHGDFAKRPEIRGLADEKRFLSSLSTYHQLKKILHEAIDDPTKEHDIENIITWSTVFEDAAIFKTELAKISWLDSDTIKALSNIRYRGWGQFSRKLLDGLKLGNGHTVIQELMLSNHNLMQILTDETLKTTMAELNQDKLKADDIEDVINDAYTSPSNKKALRQVLRVVEDIKHAANGQDPSWLYIETADGPGTAGKRTQSRQKQIQTVYANAAQELIDSAVRGELEDKIADKASFTDRLVLYFMQGGRDIYTGAPLNIDQLSHYDIDHILPQSLIKDDSLDNRVLVNATINREKNNVFASTLFASKMAATWRKWHEAGLISGRKLRNLMLRPDEIDKFAHGFVARQLVETRQIIKLTEQIAAAQYPNTKIIAVKAGLSHQLREELDFPKNRDVNHYHHAFDAFLAARIGTYLLKRYPKLAPFFTYGEFAKVDVKKFREFNFIGALTHAKKNIVAKDTGEIVWDKERDIQELDRIYNFKRMLITHEVYFETADLFKQTIYAAKDSKERGGSKQLIPKKQGYPTQVYGGYTRENTAYLAVVKTVEKKADVYRVVRIATSQVAALKEARAQSTVKERELLKKFLTTKFTKIGKNGKKAITPFDIVIPRVPREQLFHNKRYGFFMVNSDTLMHNYQELWMSRSDQQILSKLVKSAKTVENGQVGRLFENIVEQINKYFPLYDINQFRKKLDQSKDIFSKLPLEGNGTTSGKRETIQNILTGAGTGAKNGDLKNLGIKTPFGFLQVPSGIVLDDDTTLIYQSPTGMLNRIVRLSEL

SEQ ID NO: 298 - protein, 1375 aa, Lactobacillus ruminis
  Lactobacillus ruminis ATCC 25644
MRKNQEPYNIGLDIGTSSIGWSIMNDNFDLMRVKGKKGIGVRLYNEGQSAAERRMHRTARRRYGRRKWRLRLLEDFFDEHMAEVDDTFFARLKDSNISPKDDKKYRKSLLFPKSKGVTYQDDGEFYKKYPTMYHLRYALMTEHRKFDLREIYLAFHHMVKYRGNFLYDTSVDSFEAKNLDIKGKFDEINDLLSSYTDFYVDNSNAALVESILLEKNTTRKDKSKKIAKLLHVEDKEKGKNKKAKDLATQISNAVLGLKCNFHLIFELQQKYSFDLCSEKTEENIAKLSEVLDENQKMLLMILKEVQDQVMLNAFVPSGMSLSEAMMQKYDDYGEQLKIYHELEHSVSDDSAAKLRGAYRDYNDNIIKRIDGDNKKDTFYKRVKNILTKISKEYVDQDVLESCGKLKKLIDENKLFIRQRTAANGVLPHQLHQIEMRKIIDNQKEYYPWLAEPNPNEKRRVYSKYKVEELIAFRIPYYVGPLVDPNNADKNKEARFSWMVRKKDGEITPWNFYDKVDWAESANNFIERMKSKDTYLLGEDVVPKESMLYQKYEVLNELNNLRINDSGLSDSFEDVKLKQAIYNDLFKKQKIVKITDLQNYLVQNHKYLVKPKISGLADENRFLSSLSTYSDLKTIFGDKVDDRTYFNDFEKMVEYSTVFEDGHDYNQKLDEYTWLTKEEKYKIGKKRYRGWGKLSKKLLTGLRDKNNHTIMDNLWETNRNFMQIQTADEFSKQIAEENERHLKGSVSDAINDMYTSPANKKAIRQVLRVVDDIQKAMGYAPSSISLEFAREDGPSVRTVSRANRMKSIYEKYASEVSEEVMKDLDGVIKDKKGLNDRLYLYFEQQGKDMYSGHPLDFDKVISGQEYDIDHILPQAVIKDDSLDNRVLTTKALNNDVKSKGVPCRMFNGMHSFWKNLYDKGFISRRKFNNLTTNPENIDKYKMKGFVNRQLVETRQIIKLVANVLNDKYQNDDVDIIEVRAELTHDVRKHFKFYKNRNVNDYHHAFDAYLTSFIGHYLFKKYPNLRPLFDYNDFMKVSDNVFKQLRGNNFLGEFLNKTGDIISTDGNFVLNKEEMINKLNKAYAFKKILVTKEVGQRTGAMFNETRYPAPNSRKAALKYRRMPKPDSLISVKDYKNTDIYGGYSGKNDAYMVIVDMGKQYMVVGVPVRYTEKLDKLRIKHSELYRDELRKVLSRDKTLLDSKGNVKRFDIVLDRVLYGQLIEDGNELFTLGSSKYKRNFRQLFLDKQCIEILDSSATPQPTDEELIWVYDQILDKVDKYFELYDINRQRETLRKGRAAFCSLPNISMKKDDVTKKKILNEILVALHANESESNCEKIGKKVFGRLQVPGGIKLSKEAKLIYQSPTGLFERVVYLKDL

SEQ ID NO: 299 - protein, 1339 aa, Lactobacillus salivarius
  Lactobacillus salivarius SMXD51
MERYHIGLDIGTSSIGWAVIGDDFKIKKKKGKNLIGTRLFNEGATAAERRGFRTQRRRLNRRKWRLKLLEEIFDPYMAEVDEYFFARLKSSNLSPKDSNKKYLGSLLFPDKSDSNFYDKYPTIYHLRRDLMEKDEKFDLREIYLAIHHIVKYRGNFLEKVPAKNYKNSGASIGFLLEEVNSLYKDIIGDESIAILNSEKFEDVEKIILDEETRNLDKQKSVGKLLVEDKKKKNIVTAFSKAIFGYKFNIEDLLLIENDEKNKLTFNDENIDDIFNELSHSLDDKQMDLLTKTREIYFKFKLNMIVPTGYTLSESMIEKYEMHKAHLKMYKEFINTLNTKDRKILKNAYSDYINTEKAKAANAQENFYKTVKKIIKDNNSDTAKKIIVLIDEGNFMPKQRTGENGVIPHQLHQIELDRIIENQAKYYPWLAEANPVEKNRKFAKYKLDELVTFRVPYYVGPLIDKTESNKNEKETKFAWMVRKAKGTITPWNFENLVDRTESANRFIKRMTSKDTYIIGEDVLPASSLLYEKFKVLNELNNIKVNEKKLDIEQKQDIYLNLFTTAKNVTKKSLATYLNCSADSISGLSDGEKFNSSLSSYIDLKAILGNIVDDCNKNEDLEKIIEYSTVFEDGNIYKEKLSEISWLTDEQIEKLSNIHFKGWGRLSKKLLTQITNENGERIIDALWNTSNNFMQIINDESIQAKLAEINGKYAGKSDLEDILSEAYTSPQNKKAIRQVMKVVEDIEKAMQCEPTSISIEFTRKKQKSRLTNTRYKKISDVYEKIADEVISEYELRKLQSELDSNANNMRDRYYLYFMQLGRDMYTGEKINIDELHQRYDIDHILPQSFIKDDSINNRVLTRKDVNNKEKSDKTAADLYAVEMSDFWRKLRKQGLITEQKYKNLLTKSDSIDKYAKKGFIKRQLVETSQVVKLVANILQDKYSDTKIIEVRAKLNSNLREEYKLIKNRAVNDYHHAIDGYLTTFIGQYLYKTYPKLRSYFVYNDFKKLDSNYLKHMKKFNFLWQLQDDKTIDIYDNVNNKFVLNVPEMKKYIQKIYNYKYMLVSKEVTTKNGAFYDQTKYNAKTVNLIPIKKNKPTNIYGGYKGKVSSYMMLVKIRKKKEVIYKFVGVPRLWTDELDRLKDTTERKILLNEIAKNSLSKTEQDFEVILDKVYYGQLIIDGNQKYTLGSSEYKYNAMQLHLSKHALEVLAKENVKDAEITDKDLVSVYEEILSVVNKYFELYDINKFRQKLNEGLEIFRKLPVYNVYESNKIKQVGKFEVLNRILMGLHANAMITDLKVLGIKTKLGQMQVNGGIKLSPDAKLIYQSPTGIFSRAVRVKDLG

SEQ ID NO: 300 - protein, 1331 aa, Lactobacillus sanfranciscensis
MNKQPYNIGLDIGTSSVGWSATELDNRLLHIKGHNGIGVRLFKEGESAADRRGFRTTRRRLARRKWRLRLLNEIFATEIAKVDPSFFARLKQSNVSPKDPNKTMFENILFDDENLDDQKFHHDYKTIYHLRQAIINHPEQKFDIRLIYLAMHHIIKYRGHFLNQANVQDFKGGKIDLEKSFKALNDIFENQGRDLRLVTDKANQYVKVLSDNAKTRSDRKKELSKLLYVPIDKDTDKNSKKVTGEILKAILGNKAKFDVIFGIEVENPKEWVLTFNSDDFDDKIEGLSSQMTDEDSEILLILKELYFALNLSDILNNSVTDKNAKTLSEAMINRYDDHKNQLAMLKKVIDSSDKKHAKELKEAYSAYIDGENNKKISFEDLKKRIQKNLVDSELSQKINDLLDHDYFLPKQRSKENGAIPHQLQQQELDQIIESQKQYYPFLAELNPNEKRSRQAKYKLDELVAFRVPYYVGPMVEVTDSNQENNGKFAWMIRKEQGEITPWNFDEKVDRTETATKFITRMTTTDTYLIGEPVLPKNSLLYQKFVVLNELNNLKINQEIITPGQKQYLYEHVMKKNKRVTLKKIADALVIKGDYPYAPEVKGTTDQKNLNNGLTTYIDLAKIFGNELDDVDREADFEKIIEWSTIFEDQHIFALKLQELKWLTEKQRNQVVKLRYQGWGKLSKELLAGLVDDNGQRIIDLLWSDNQNFMQIVNQKSFKESIADHNGAHLEEKNLKDVINDLYTSPQNKKAIRQVILVVDDIINAVGYEPANIMMEFAREDSNDHRLTNSRSRQLENVYKDITNSWFDNDSVKDELEDKIKNKDKFTDRLYLYFTQGGKDLYTGEPLNIDDLSSYDIDHILPQSFILDNSLDNRVLTSQRNNRVSKEDQLPGELFGTKMHAFWKRLKAAHLISNKKYYNLTLTPNSISKFNNQGRFINRQLVETRQVIKLAAEILHNRYSEEKGTNIVTIKANLTHHMREKFNFYKNRNVNDYHHAFDAYLTAFVGNWLLQQYPKLKPYFVYGDFAKTEINNLKSFNMLYKFEQAHQLNEKDGKIAKDADALLGYMKNVYHFKKMLVTKKLETNHGALFKQTLYPSPAHDIKKRQLIKPKDNRPTDIYGGYTHEERKYMSLVKVIGKKDNEYRMANVPLLKINKNNDIKEILKSQFSNKKFEIVLPKVLKNQLFSENGALFVIGSKGYKYNANQLVLSDLDMKLLNDLSNNKSIDEVTINQLFKNIVDSTNKYMPLYEIKNLNEVVEKFNNLEFNDKKKTITDFLLATHANPTMSNLKNIGLPSYFGRFTSGNAGIKLSENANVIYQSPTGLFSRKVKISDF

SEQ ID NO: 301 - protein, 1419 aa, Lactobacillus sp.
  Lactobacillus sp. 66c
MAKPQNYTIGLDIGTNSVGWTVTDDQNNILRIKSKKAIGARLFEEGKVAAERRSFRTTRRRLSRRKWRIKLLEELFDEEISKVDPNFFARSHESWISPKDKRERYSAIVFPTPEEDKKFHNEYPTIYHLRDRLMKDDQKHDIREIYVAIHHIMKYRGNFLHDESIETYRSGMSSLGGGDERTILNTKILDDLNDAFADNLATQGISVNSASADQINEIVTSGHLNVDSQKAIAKLLLPTTLSSDDKKQDKKIKKLATDAAKNVASAWLGYKANFAAILNIQEVDKDKKKIYSFALQGADEEDKVETLESVLSQDQIEIVDRIIRIRHAIVLGEIIPVGMTLSEAMIEKYDQHAKDLKNLKTVIRNLKDRKNAVKLQAIYDLYVNNRHADTAKAMKLAGVKKRTELLEPEEFNKSIEKLLDDSPVSAEIKKRIAEKDFLPLQRSNSNGVIPNQLHQIELDEIIKKQSKYYPFLGETNEHASADVARKAPTKLDQLLTFRVPYYVGPLITKEEQEEQDGHSFAWMIRKNPKDHEKITPWNFDEKVDRMASATQFIKRMTTKDTYLLGEDVLPSSSLKYQLFTVLNELNNLRINHKKLTREEKEQVIEDLFKKYKTVKADKFKNYWQKGHAGLDVKIQGMADPEKFNSTMSTYIDLQKIFGDQLDDAQRQNDFEKIIEYSTIFEDRKILGEKLRADFVWLSEDQIKRLCRLRLQGWGRLSLKLLTRLTDADGQNVLERLLNSNDNFMQIVKDPVIKAKIEQKNQKLLRADWSENATESILDEAYTSPQNKKAIRQVMRVVHDIVKACDGNLPAKFAIEFARSQDDDPKRTVARADRLQKIYAQISDEVVSQGVKDQLSGMKSLKDRYYLYFMQGGRDAYTGKPLNIDRLSDYDIDHIMPQSFIKDDSLDNRVLVTRAVNNQKSDNVPVLLYGNHLVADLGITIREMWDRWQKSGMISKRKLANLLTDPATLSEYRAEGFINRQLVETSQVIKLTATILQSEFPDSKIIEVPAKYNSILRKQFDLYKSREVNDYHHAIDAYLSTIVGNYLYQVYPNLRRLFVYGEFKKFSHGEEESSHQAVRRVKSMNFLDDLLRGKHGDDIYCRVTGEVIFSRKDIISKLKQAYSFKQMLVTQEVFTKKSALFDQTVYPSPARDSKTRSGLIPRKQGMDTEIYGGYSGNKDAYFVLAQVVKSKGHTLQVVGVPIRALRALANCSNYSEQLLKIVKAQVLFNKKTGKAKKGISDVRILLDKIPYRQPVLDGSAFYMLGSSTYKYNLKQISLSQQSMKYILDYIDDPNFNKHEMTKIDQQNEKECLLSVYDEILDKMDKYLSLYDINGFRKKLHVGRDKFIKLEVEKQAEAIKNVLRGFHANSDMTKLSDLGLSTSLGFMQASDGIKLSDNAVFIYQSPTGLFERRVKVSDLLK

SEQ ID NO: 302 - protein, 1289 aa, Lactobacillus versmoldensis
  Lactobacillus versmoldensis KCTC 3814
MRRRYRRRRNRLNWLDELFADELAKIDPSFLLRMKNSWVSKKESTRKRDPYNLFIDEKYNDVDYFNQYPTIFHLRKELITEDKKVDIRLIYLAIHNIIKYRGNFTLENQNFDISQLSSNFSQQISDFFALFSDFGVIMPEDFDPDKISDILLNPNLSPSGKVSEAIATISPKTNVKAKIKIILLLLVGNNGDLKKLFDLETTEKIAVKLSSRHIDSELPIILSELNEQQENIITIANSIFGSIILKDFLGDETSISAAKVISFEDHKQDLQKLKTMWRETSNKEAVKAGKKAYEDYIGHEDSETFYKKIKKFLEKAQPVDLANKALAEIELENYLPKQRNRNNTVIPYQLNENELIAILDHQEKYYPFLKENRDKILSLLTFRIPYYVGPLQDSNNNRFSWMTRKASGAIRPWNFSEKVNVEQSSNDFIKRMRSTDTYLIGEPVLPKKSLIYQCYEVLSELNNTRVKDGSSNPKRLDVTIKQRIYNEIFKNQKSVSVKVLQNWLIKESYFKSPEISGLADKKKYLSSLSTYIDFKKIFGQRFVDDPVNSPQLEELAEWLTLFEDKKILLIKLQNSKYSYDQATINKLSTMRYQGTGKLSKKLLVDLKTTKKSIGKSGAESLSILDLMWSTKDNFMQIIHDADYTFEQQIKEFNYDTEDELTPLEKVANLHGSPALKRGLNQSIKVVADIVKFMGHDPEKIFIEFTRSDDFSKLTISRYRRIKKQYLEIAKAIKKIPAEFKDIKEYQTQLEENKGKLASERLMLYFLQCGHSLYSNKPIDLNMINSSKYHVDHILPQSYIKDDSLENKALVLASENENKIDNMLISHDIIATNLPRWQALKDQNLMGSKKFADLTRTTVTENQKKGFIQRQLVQTSQIVKNITLILNDLYKNTSCIETRATLSSEFRKAFSNFDETTYHYQFPEFVKNRDVNDFHHAQDAFLACVIGEYQLKKYPKDNLRLVYDQYSKFLDSLKKDTRKKNGRMPRYTQNGFIIGSMFNGKTYVDDNGEIIWDQKIKESIRKTFNYHQFNVVRQTIEQHGKLFNDTIQPHSDRYKLIPLKTNRDPAIYGGYNNDNNAYSVVLDVDGKKKINGIPIRIANQLKSDELDLSSWLENNIKHKKPMTILIDKVPKYQRIINEETGDLLITSANEVINNVQLFLPSMYTALISLLDSTKTEMYSKLLSNYEANILIDIYDYLLTKLKNNYPLYRKEWAKLAEHRDDFIESDLVTQASTLQQLIKFMHADPSNVNLKFGNFKGNRFGRKNGNIKLSKTDFIYESPTGLFKSIKHID

SEQ ID NO: 303 - protein, 1372 aa, Legionella pneumophila
  Legionella pneumophila 130b
MESSQILSPIGIDLGGKFTGVCLSHLEAFAELPNHANTKYSVILIDHNNFQLSQAQRRATRHRVRNKKRNQFVKRVALQLFQHILSRDLNAKEETALCHYLNNRGYTYVDTDLDEYIKDETTINLLKELLPSESEHNFIDWFLQKMQSSEFRKILVSKVEEKKDDKELKNAVKNIKNFITGFEKNSVEGHRHRKVYFENIKSDITKDNQLDSIKKKIPSVCLSNLLGHLSNLQWKNLHRYLAKNPKQFDEQTFGNEFLRMLKNFRHLKGSQESLAVRNLIQQLEQSQDYISILEKTPPEITIPPYEARTNTGMEKDQSLLLNPEKLNNLYPNWRNLIPGIIDAHPFLEKDLEHTKLRDRKRIISPSKQDEKRDSYILQRYLDLNKKIDKFKIKKQLSFLGQGKQLPANLIETQKEMETHFNSSLVSVLIQIASAYNKEREDAAQGIWFDNAFSLCELSNINPPRKQKILPLLVGAILSEDFINNKDKWAKFKNFWNTHKIGRTSLKSKCKEIEEARKNSGNAFKIDYEEALNHPEHSNNKALIKIIQTIPDIIQAIQSHLGHNDSQALIYHNPFSLSQLYTILETKRDGFHKNCVAVTCENYWRSQKTEIDPEISYASRLPADSVRPFDGVLARMMQRLAYEIAMAKWEQIKHIPDNSSLLIPIYLEQNRFEFEESFKKIKGGSSDKTLEQAIEKQNIQWEEKFQRIINASMNICPYKGASIGGQGEIDHIYPRSLSKKHFGVIFNSEANLIYCSSQGNREKKEEHYLLEHLSPLYLKHQFGTDNVSDIKNFISQNVANIKKYISFHLLTPEQQKAARHALFLDYDDEAFKTITKFLMSQQKARVNGTQKFLGKQIMEFLSTLADSKQLQLEFSIKQITAEEVHDHRELLSKQEPKLVKSRQQSFPSHAIDATLTMSIGLKEFPQFSQELDNSWFINHLMPDEVHLNPVRSKEKYNKPNISSTPLFKDSLYAERFIPVWVKGETFAIGFSEKDLFEIKPSNKEKLFTLLKTYSTKNPGESLQELQAKSKAKWLYFPINKTLALEFLHHYFHKEIVTPDDTTVCHFINSLRYYTKKESITVKILKEPMPVLSVKFESSKKNVLGSFKHTIALPATKDWERLFNHPNFLALKANPAPNPKEFNEFIRKYFLSDNNPNSDIPNNGHNIKPQKHKAVRKVFSLPVIPGNAGTMMRIRRKDNKGQPLYQLQTIDDTPSMGIQINEDRLVKQEVLMDAYKTRNLSTIDGINNSEGQAYATFDNWLTLPVSTFKPEIIKLEMKPHSKTRRYIRITQSLADFIKTIDEALMIKPSDSIDDPLNMPNEIVCKNKLFGNELKPRDGKMKIVSTGKIVTYEFESDSTPQWIQTLYVTQLKKQP

SEQ ID NO: 304 - protein, 1372 aa, Legionella pneumophila
MESSQILSPIGIDLGGKFTGVCLSHLEAFAELPNHANTKYSVILIDHNNFQLSQAQRRATRHRVRNKKRNQFVKRVALQLFQHILSRDLNAKEETALCHYLNNRGYTYVDTDLDEYIKDETTINLLKELLPSESEHNFIDWFLQKMQSSEFRKILVSKVEEKKDDKELKNAVKNIKNFITGFEKNSVEGHRHRKVYFENIKSDITKDNQLDSIKKKIPSVCLSNLLGHLSNLQWKNLHRYLAKNPKQFDEQTFGNEFLRMLKNFRHLKGSQESLAVRNLIQQLEQSQDYISILEKTPPEITIPPYEARTNTGMEKDQSLLLNPEKLNNLYPNWRNLIPGIIDAHPFLEKDLEHTKLRDRKRIISPSKQDEKRDSYILQRYLDLNKKIDKFKIKKQLSFLGQGKQLPANLIETQKEMETHFNSSLVSVLIQIASAYNKEREDAAQGIWFDNAFSLCELSNINPPRKQKILPLLVGAILSEDFINNKDKWAKFKIFWNTHKIGRTSLKSKCKEIEEARKNSGNAFKIDYEEALNHPEHSNNKALIKIIQTIPDIIQAIQSHLGHNDSQALIYHNPFSLSQLYTILETKRDGFHKNCVAVTCENYWRSQKTEIDPEISYASRLPADSVRPFDGVLARMMQRLAYEIAMAKWEQIKHIPDNSSLLIPIYLEQNRFEFEESFKKIKGSSSDKTLEQAIEKQNIQWEEKFQRIINASMNICPYKGASIGGQGEIDHIYPRSLSKKHFGVIFNSEVNLIYCSSQGNREKKEEHYLLEHLSPLYLKHQFGTDNVSDIKNFISQNVANIKKYISFHLLTPEQQKAARHALFLDYDDEAFKTITKFLMSQQKARVNGTQKFLGKQIMEFLSTLADSKQLQLEFSIKQITAEEVHDHRELLSKQEPKLVKSRQQSFPSHAIDATLTMSIGLKEFPQFSQELDNSWFINHLMPDEVHLNPVRSKEKYNKPNISSTPLFKDSLYAERFIPVWVKGETFAIGFSEKDLFEIKPSNKEKLFTLLKTYSTKNPGESLQELQAKSKAKWLYFPINKTLALEFLHHYFHKEIVTPDDTTVCHFINSLRYYTKKESITVKILKEPMPVLSVKFESSKKNVLGSFKHTIALPATKDWERLFNHPNFLALKANPAPNPKEFNEFIRKYFLSDNNPNSDIPNNGHNIKPQKHKAVRKVFSLPVIPGNAGTMMRIRRKDNKGQPLYQLQTIDDTPSMGIQINEDRLVKQEVLMDAYKTRNLSTIDGINNSEGQAYATFDNWLTLPVSTFKPEIIKLEMKPHSKTRRYIRITQSLADFIKTIDEALMIKPSDSIDDPLNMPNEIVCKNKLFGNELKPRDGKMKIVSTGKIVTYEFESDSTPQWIQTLYVTQLKKQP

SEQ ID NO: 305 - protein, 1355 aa, Leuconostoc gelidum
  Leuconostoc gelidum KCTC 3527
MTYSIGLDIGTGSVGWAVIGDDYRLKRAKGKNLIGVRLFDSATTAAERRGYRTTRRRLSRRHWRLRLLNDIFASDLAEQDENFLPRLKYSWVNPDDEQNPQLNSDVANGALFGSSETDKAFHKNYPTIYHLRHELMTDTAKHDLREVYLAIHHIVKYRGNFLNTADKINAENSFNVDLFIAALDEYNEFLETPITSIKDAQLFSDKLTDINARNKSVRVENAMSETYDDKSKIFKAILTALVGNTANFQTIFDLSDLEKDEAKNFKFKLDLEDVETKLDVVRAKLSDEQNAFLEAVLIAYDGITLKMILGDYKSISQSMIESYKSHQRDWKYIKNNVRLNEQKIEPDKNSVKFFKLDPKKLIYPSNLAYLQVISSNEDEHRKGLDYFKTAIQDADILQRIENDTFLPRQRTKRNGVLPYQLHLAELEQIIKKQSKYYPFLANIYTQDNKTENKLIGLLKFRVPYYVGPLVEAEKVTGDGKNHWLIKKELQENTPITPFNFDDVVDKDKSGEQFIKRITGTDSYLIGEPTLPENSLLYQKYNVLQELNNVRNERHQRLPIKVKQDIFEHVFKIDKNVNAKKVMAYLKLNGYGDFQIAGLSDTRTGKFNSNLSSYNYFVDLLGREKTEKIREDRLEEIIEIQTVFEDKILVAKRLSNLDFLTPQEKSKLSAKHYTGWGRLSQKLLTTQFIKTALSEAGDIIPQSHSIIDLLYYTDKNLMEILNDKTFNVRNWLTEQNKGTESGNSLYDQIDALAGPKDIKRGITQVFSIIDDIKKAMGSNPETVYLEFARETQTSRLTNSRLNRVQEIYNSPELKTEFAYLAKKLEAETKESIHDDRLYLYYLQEGRDMYTGKEIPFDQISSNYDIDHIIPQAFTKDDSLDNRVLVNRATNARKSNSPTFTNDIIDNRKSWWQSLVKRGLMSKEKFERLTDKRKTFSENQTNHFIARQLVETRQIIKNVADLIKNNYDGTQAVAIRASLTGEMRRYLDWPKNRDMNDYHHAHDALMMATVGKYVDRRGFFDNGSVSDGAGNAYNLYTKDWLVAARVGTRNDSQRVNPYGFIVGSMNSKAVRQQVNKETGEIVWGNENLDYLRHVLSYKKILVTRRLSGSSGRLYAETLFSPNPKAKLIAQKANRSVALYGGFTKAESAYTALVEFNKKGDRSYKLIKVPMAIANRVNDKQITVTAYIASLNLRDFSRVVLEHLPLGTLIRESDGSEFYAASSEYKHNAKELWAPKEILRSSKKLDKATADNLIDIFDFLTNDKTISNFKFYEKDLLHLKNVRDKFVEASDEIKIKVLSDVIYELHNDAGWRDPFKHIQEKPAWTMLQVKGGIKLSEKAAIVYQSPTGLFETITIVGE

SEQ ID NO: 306 - protein, 1337 aa, Listeria innocua
  Listeria innocua ATCC 33091
MKNMKKPYTIGLDIGTNSVGWAVLTDQYDLVKRKMKIAGDSEKKQIKKNFWGVRLFDEGQTAADRRMARTARRRIERRRNRISYLQGIFAEEMSKTDANFFCRLSDSFYVDNEKRNSRHPFFATIEEEVEYHKNYPTIYHLREELVNSSEKADLRLVYLALAHIIKYRGNFLIEGALDTQNTSVDGIYKQFIQTYNQVFASGIEDGSLKKLEDNKDVAKILVEKVTRKEKLERILKLYPGEKSAGMFAQFISLIVGSKGNFQKPFDLIEKSDIECAKDSYEEDLESLLALIGDEYAELFVAAKNAYSAVVLSSIITVAETETNAKLSASMIERFDTHEEDLGELKAFIKLHLPKHYEEIFSNTEKHGYAGYIDGKTKQADFYKYMKMTLENIEGADYFIAKIEKENFLRKQRTFDNGAIPHQLHLEELEAILHQQAKYYPFLKENYDKIKSLVTFRIPYFVGPLANGQSEFAWLTRKADGEIRPWNIEEKVDFGKSAVDFIEKMTNKDTYLPKENVLPKHSLCYQKYLVYNELTKVRYINDQGKTSYFSGQEKEQIFNDLFKQKRKVKKKDLELFLRNMSHVESPTIEGLEDSFNSSYSTYHDLLKVGIKQEILDNPVNTEMLENIVKILTVFEDKRMIKEQLQQFSDVLDGVVLKKLERRHYTGWGRLSAKLLMGIRDKQSHLTILDYLMNDDGLNRNLMQLINDSNLSFKSIIEKEQVTTADKDIQSIVADLAGSPAIKKGILQSLKIVDELVSVMGYPPQTIVVEMARENQTTGKGKNNSRPRYKSLEKAIKEFGSQILKEHPTDNQELRNNRLYLYYLQNGKDMYTGQDLDIHNLSNYDIDHIVPQSFITDNSIDNLVLTSSAGNREKGDDVPPLEIVRKRKVFWEKLYQGNLMSKRKFDYLTKAERGGLTEADKARFIHRQLVETRQITKNVANILHQRFNYEKDDHGNTMKQVRIVTLKSALVSQFRKQFQLYKVRDVNDYHHAHDAYLNGVVANTLLKVYPQLEPEFVYGDYHQFDWFKANKATAKKQFYTNIMLFFAQKDRIIDENGEILWDKKYLDTVKKVMSYRQMNIVKKTEIQKGEFSKATIKPKGNSSKLISRKTNWDPMKYGGLDSPNMAYAVVIEYAKGKNKLVFEKKIIRVTIMERKAFEKDEKAFLEEQGYRQPKVLAKLPKYTLYECEEGRRRMLASANEAQKGNQQVLPNHLVTLLHHVANCEVSDGKSLDYIESNREMFAELLAHVSEFAKRYTLAEANLNKINQLFEQNKEGDIKAIAQSFVDLMAFNAMGAPASFKFFETTIERKRYNNLKELLNSTIIYQSITGLYESRKRLDD

SEQ ID NO: 307 - protein, 1334 aa, Listeria innocua
MKKPYTIGLDIGTNSVGWAVLTDQYDLVKRKMKIAGDSEKKQIKKNFWGVRLFDEGQTAADRRMARTARRRIERRRNRISYLQGIFAEEMSKTDANFFCRLSDSFYVDNEKRNSRHPFFATIEEEVEYHKNYPTIYHLREELVNSSEKADLRLVYLALAHIIKYRGNFLIEGALDTQNTSVDGIYKQFIQTYNQVFASGIEDGSLKKLEDNKDVAKILVEKVTRKEKLERILKLYPGEKSAGMFAQFISLIVGSKGNFQKPFDLIEKSDIECAKDSYEEDLESLLALIGDEYAELFVAAKNAYSAVVLSSIITVAETETNAKLSASMIERFDTHEEDLGELKAFIKLHLPKHYEEIFSNTEKHGYAGYIDGKTKQADFYKYMKMTLENIEGADYFIAKIEKENFLRKQRTFDNGAIPHQLHLEELEAILHQQAKYYPFLKENYDKIKSLVTFRIPYFVGPLANGQSEFAWLTRKADGEIRPWNIEEKVDFGKSAVDFIEKMTNKDTYLPKENVLPKHSLCYQKYLVYNELTKVRYINDQGKTSYFSGQEKEQIFNDLFKQKRKVKKKDLELFLRNMSHVESPTIEGLEDSFNSSYSTYHDLLKVGIKQEILDNPVNTEMLENIVKILTVFEDKRMIKEQLQQFSDVLDGVVLKKLERRHYTGWGRLSAKLLMGIRDKQSHLTILDYLMNDDGLNRNLMQLINDSNLSFKSIIEKEQVTTADKDIQSIVADLAGSPAIKKGILQSLKIVDELVSVMGYPPQTIVVEMARENQTTGKGKNNSRPRYKSLEKAIKEFGSQILKEHPTDNQELRNNRLYLYYLQNGKDMYTGQDLDIHNLSNYDIDHIVPQSFITDNSIDNLVLTSSAGNREKGDDVPPLEIVRKRKVFWEKLYQGNLMSKRKFDYLTKAERGGLTEADKARFIHRQLVETRQITKNVANILHQRFNYEKDDHGNTMKQVRIVTLKSALVSQFRKQFQLYKVRDVNDYHHAHDAYLNGVVANTLLKVYPQLEPEFVYGDYHQFDWFKANKATAKKQFYTNIMLFFAQKDRIIDENGEILWDKKYLDTVKKVMSYRQMNIVKKTEIQKGEFSKATIKPKGNSSKLIPRKTNWDPMKYGGLDSPNMAYAVVIEYAKGKNKLVFEKKIIRVTIMERKAFEKDEKAFLEEQGYRQPKVLAKLPKYTLYECEEGRRRMLASANEAQKGNQQVLPNHLVTLLHHAANCEVSDGKSLDYIESNREMFAELLAHVSEFAKRYTLAEANLNKINQLFEQNKEGDIKAIAQSFVDLMAFNAMGAPASFKFFETTIERKRYNNLKELLNSTIIYQSITGLYESRKRLDD

SEQ ID NO: 308 - protein, 1334 aa, Listeria monocytogenes
MKNPYTIGLDIGTNSVGWAVLTNQYDLVKRKMKVAGNSDKKQIKKNFWGVRLFDDGQTAVDRRMNRTARRRIERRRNRISYLQEIFAVEMANIDANFFCRLNDSFYVDSEKRNSRHPFFATIEEEVAYHKNYRTIYHLREELVNSSEKADLRLVYLALAHIIKYRGNFLIEGALDTKNTSVDGVYEQFIQTYNQVFMSNIEEGTLAKVEENIEVANILAGKFTRREKFERILQLYPGEKSTGMFAQFISLIVGSKGNFQKVFDLIEKTDIECAKDSYEEDLEALLAIIGDEYAELFVAAKNTYNAVVLSSIITVTATETNAKLSASMIERFDAHEKDLGELKAFIKLHLPKQYQEIFNNAAIDGYAGYIDGKTKQVDFYKYLKTILENIEGADYFIAKIEEENFLRKQRTFDNGAIPHQLHLEELEAIIHQQAKYYPFLREDYEKIKSLVTFRIPYFVGPLAKGQSEFAWLTRKADGEIRPWNIEEKVDFGKSAVDFIEKMTNKDTYLPKENVLPKHSLCYQKYMVYNELTKVRYIDDQGKTNYFSGQEKQQIFNDLFKQKRKVKKKDLELFLRNINHIESPTIEGLEDSFNASYATYHDLLKVGMKQEILDNPLNTEMLEDIVKILTVFEDKPMIKEQLQQFSDVLDGGVLKKLERRHYTGWGRLSAKLLVGIREKQSHLTILDYLMNDDGLNRNLMQLINDSNLSFKSIIEKEQVSTTDKDLQSIVADLAGSPAIKKGILQSLKIVDELVSIMGYPPQTIVVEMARENQTTGKGKNNSKPRYKSLEKAIKEFGSKILKEHPTDNQELKNNRLYLYYLQNGKDMYTGQELDIHNLSNYDIDHIVPQSFITDNSIDNLVLTSSAGNREKGGDVPPLEIVRKRKVFWEKLYQGNLMSKRKFDYLTKAERGGLTDADKARFIHRQLVETRQITKNVANILHQRFNNETDNHGNTMEQVRIVTLKSALVSQFRKQFQLYKVREVNDYHHAHDAYLNGVVANTLLKVYPQLEPEFVYGEYHQFDWFKANKATAKKQFYTNIMLFFGQKERIIDENGEILWDKKYLETIKKVLDYRQMNIVKKTEIQKGEFSKATIKPKGNSSKLIPRKENWDPMKYGGLDSPNMAYAVIIEHAKGKKKLIFEKKIIRITIMERKMFEKDEEAFLEEKGYRHPKVLTKLPKYTLYECEKGRRRMLASANEAQKGNQLVLSNHLVSLLYHAKNCEASDGKSLKYIEAHRETFSELLAQVSEFATRYTLADANLSKINNLFEQNKEGDIQAIAQSFVDLMAFNAMGAPASFKFFEATIDRKRYTNLKELLSSTIIYQSITGLYESRKRLDD

SEQ ID NO: 309 - protein, 1334 aa, Listeria monocytogenes
  Listeria monocytogenes FSL J1-194
MKNPYTIGLDIGTNSVGWAVLTDQYDLVKRKMKVAGNSDKKQIKKNFWGVRLFDDGQTAVDRRMNRTARRRIERRRNRISYLQEIFAVEMANIDANFFCRLNDSFYVDSEKRNSRHPFFATIEEEVAYHKNYRTIYHLREELVNSSEKADLRLVYLALAHIIKYRGNFLIEGALDTKNTSVDEVYKQFIQTYNQVFMSNIEEGALAKVEENTEVASILAGKFTRREKFERILRLYPGEKSTGMFAQFISLIVGNKGNFQKVFNLVEKTDIECAKDSYEEDLEALLAIIGDEYAELFVAAKNTYNAVVLSSIITVTATETNAKLSASMIERFDAHEKELGELKAFIKLHLPKQYQEIFNNAEIDGYAGYIDGKTKQVDFYKYLKTTLENVEGADYFITKIEEENFLRKQRTFDNGVIPHQLHLEELEAILHQQAKYYPFLREGYDKIKSLVTFRIPYFVGPLANGQSEFAWLTRKDDGEIRPWNIEEKVDFGKSAVDFIEKMTNKDTYLPKENVLPKHSLCYQKYMVYNELTKIRYIDDQGKTNYFSGREKQQIFNDLFKQKRKVKKKDLELFLRNINHIESPTIEGLEDSFNASYATYHDLLKVGLKQEILDNPLNTEILEDIVKILTVFEDKRMIKEQLEQFSDVLDGVVLKKLERRHYTGWGRLSAKLLVGIRDKQSHLTILDYLMNDDGLNRNLMQLINDSNLSFKSIIEKEQVSTTDKDLQSIVADLAGSPAIKKGILQSLKIVDELVSIMGYPPQTIVVEMARENQTTGKGKNNSKPRYKSLEKAIKDFGSQILKEHPTDNQELKNNRLYLYYLQNGKDIYTGQELDIHNLSNYDIDHIVPQSFITDNSIDNLVLTSSAGNREKGGDVPPLEIVRKRKVFWEKLYQGNLMSKRKFDYLTKAERGGLTEADKARFIHRQLVETRQITKNVANILHQRFNKETDNHGNTMEQVRIVTLKSALVSQFRKQFQLYKVREVNDYHHAHDAYLNGVVANTLLKVYPQLEPEFVYGEYHQFDWFKANKATAKKQFYTNIMLFFAQKERIIDENGEILWDKKYLETIKKVLDYRQINIVKKTEIQKGEFSKATIKPKGNSSKLIPRKENWDPMKYGGLDSPNMAYAVIIEHAKGKKKIVIEKKLIQINIMERKMFEKDEEAFLEEKGYHQPKVLTKLPKYTLYECEKGRRRMLSSANEAQKGNQLVLSNHLVSLLYHAKNCEASDGKSLKYIEAHRETFSELLAQVSEFATKYTLADANLSKINNLFEQNKEGDIKAIAQSFVDLMAFNAMGAPASFKFFEATIDRKRYTNLKELLSSTIIYQSITGLYESRKRLDD

SEQ ID NO: 310 - protein, 1334 aa, Listeria monocytogenes
  Listeria monocytogenes FSL J1-208
MKNPYTIGLDIGTNSVGWAVLTDQYDLVKRKMKVAGNSDKKQIKKNFWGVRLFDEGETAADRRMNRTARRRIERRRNRISYLQEIFALEMANIDANFFCRLNDSFYVDSEKRNSRHPFFATIEEEVAYHKNYRTIYHLREELVNSSEKADLRLVYLALAHIIKYRGNFLIEGALDTKNTSVDGVYKQFIQTYNQVFISNIEEGTLAKMEENTTVADILAGKFTRKEKLERILQLYPGEKSTGMFAQFISLIVGSKGNFQKVFDLVEKTDIECAKDSYEEDLEALLAIIGDEYAELFVAAKNTYNAVVLSSIITVTDTETNAKLSASMIERFDAHEKDLSELKAFIKLHLPKQYEEIFSNVAIDGYAGYIDGKTKQVDFYKYLKTLLENIEGADYFIAKIEEENFLRKQRTFDNGAIPHQLHLEELEAILHQQAKYYPFLKEAYDKIKSLVTFRIPYFVGPLANGQSDFAWLTRKADGEIRPWNIEEKVDFGKSAVDFIEKMTNKDTYLPKENVLPKHSLYYQKYMVYNELTKVRYIDDQGKTNYFSGQEKQQIFNDYFKQKRKVSKKDLEQFLRNMSHIESPTIEGLEDSFNSSYATYHDLLKVGIKQEVLENPLNTEMLEDIVKILTVFEDKRMIKEQLQQFSDVLDGAVLKKLERRHYTGWGRLSAKLLVGIRDKQSHLTILDYLMNDDGLNRNLMQLINDSNLSFKSIIEKEQVSTTDKDLQSIVADLAGSPAIKKGILQSLKIVDELVSIMGYPPQTIVVEMARENQTTVKGKNNSRPRYKSLEKAIKEFGSQILKEHPTDNQELRNNRLYLYYLQNGKDMYTGQELDIHNLSNYDIDHIVPQSFITDNSIDNLVLTSSAGNREKGDDVPPLEIVRKRKVFWEKLFQGNLMSKRKFDYLTKAERGGLTEADKATFIHRQLVETRQITKNVANILHQRFNNETDNHGNNMEQVRIVMLKSALVSQFRKQFQLYKVREVNDYHHAHDAYLNGVVANTLLKVYPQLEPEFVYGEYHQFDWFKANKATAKKQFYTNIMLFFAQKERIIDENGEILWDKKYLETIKKVLDYRQMNIVKKTEIQKGEFSKATIKPKGNSSKLIPRKENWDPMKYGGLDSPNMAYAVIIEHAKGKKKVVFEKKIIRITIMERKAFEKDEKSFLEKQGYRQPKVLTKLPKYTLYECENGRRRMLASANEAQKGNQQVLKGQLITLLHHAKNCEASDGKSLDYIESNREMFGELLAHVSEFAKRYTLADANLSKINQLFEQNKDNDIKVIAQSFVNLMAFNAMGAPASFKFFEATIERKRYTNLKELLSATIIYQSITGLYEARKRLDG

SEQ ID NO: 311 - protein, 1334 aa, Listeria monocytogenes
  Listeria monocytogenes FSL N3-165
MKKPYTIGLDIGTNSVGWAVLTDQYDLVKRKMKISGDSEKKQIKKNFWGVRLFEKGETAAKRRMSRTARRRIERRRNRISYLQEIFAIQMNEVDDNFFNRLKESFYAESDKKYNRHPFFGTVEEEVAYYKDFPTIYHLRKELIDSQKKADLRLVYLALAHIIKYRGHFLIEGALDTKNTSIDEMFKQFLQIYNQVFANDIEEASLKKTEKNQEVAQILAEKFTRKDKLDKILSLYPGEKTTGVFAQFVNIIVGSTGKFKKHFNLHEKKDINCAEDTYDTDLESLLAIIGDEFAEVFVAAKNAYNAVVLSNIITVTDSTTRAKLSASLIERFENHKEDLKKMKRFVRTYLPEKYDEIFDDTEKHGYAGYISGKTKQADFYKYMKATLEKIEGADYFIAKIEEENFLRKQRTFDNGVIPHQLHLEELEAILHQQAKYYPFLREDYEKIKSLVTFRIPYFVGPLAKGQSEFAWLTRKADGEIRPWNIEEKVDFGKSAVDFIEKMTNKDTYLPKENVLPKHSLCYQKYMVYNELTKVRYIDDQGKTNYFSGQEKQQIFNDLFKQKRKVKKKDLELFLRNINQIESPTIEGLEDSFNASYATYHDLLKVGMKQEILDNPLNTEMLEDIVKILTVFEDKRMIKEQLQQFSDVLDGTVLKKLERRHYTGWGRLSAKLLVGIRDKQSHLTILDYLMNDDGLNRNLMQLINDSNLSFKSIIEKEQVSTTDKDLQSIVAELAGSPAIKKGILQSLKIVDELVSVMGYPPQTIVVEMARENQTTNKGKNNSKPRYKSLEKAIKEFGSQILKEHPTDNQELKNNRLYLYYLQNGKDMYTGQELDIHNLSNYDIDHIVPQSFITDNSVDNLVLTSSAGNREKGDNVPPLEIVQKRKIFWEKLYQGNLMSKRKFDYLTKAERGGLTEADKARFIHRQLVETRQITKNVANILHQRFNYKTDGNKDTMETVRIVTLKSALVSQFRKQFQFYKVREVNDYHHAHDAYLNGVVANTLLKVYPQLEPEFVYGEYHQFGWFKANKATAKKQFYTNIMLFFAQKDRIIDENGEILWDKRYLETVKKVLGYRQMNIVKKTEIQKGEFSNVTPNPKGKSNKLIPRKKDWDPIKYGGFDGSKMAYAIIIEYEKQKRKVRIEKKLIQINIMEREAFEKDEKTFLEEKGYHQPKVLIKVPKYTLYECKNGRRRMLGSANEAHKGNQMLLPNHLMALLYHAEKYEAIDGESLAYIEVHRALFDELLAYISEFARKYTLSNDRLDEINMLYERNKDGDVKSIAESFVSLKKFNAFGVHQDFSFFGTKIERKRDRKLNELLNSTIIYQSITGLYESRKRLDN

SEQ ID NO: 312 - protein, 1334 aa, Listeria monocytogenes
  Listeria monocytogenes FSL R2-503
MKNPYTIGLDIGTNSVGWAVLTDQYDLVKRKMKVAGNSDKKQIKKNFWGVRLFDDGQTAVDRRMNRTARRRIERRRNRISYLQEIFAVEMANIDANFFCRLNDSFYVDSEKRNSRHPFFATIEEEVAYHKNYRTIYHLREELVNSSEKADLRLVYLALAHIIKYRGNFLIEGALDTKNTSVDEVYKQFIQTYNQVFMSNIEEGALAKVEENTEVASILAGKFTRREKFERILRLYPGEKSTGMFAQFISLIVGNKGNFQKVFNLVEKTDIECAKDSYEEDLEALLAIIGDEYAELFVAAKNTYNAVVLSSIITVTATETNAKLSASMIERFDAHEKELGELKAFIKLHLPKQYQEIFNNAEIDGYAGYIDGKTKQVDFYKYLKTTLENVEGADYFITKIEEENFLRKQRTFDNGVIPHQLHLEELEAILHQQAKYYPFLREGYDKIKSLVTFRIPYFVGPLANGQSEFAWLTRKDDGEIRPWNIEEKVDFGKSAVDFIEKMTNKDTYLPKENVLPKHSLCYQKYMVYNELTKIRYIDDQGKTNYFSGREKQQIFNDLFKQKRKVKKKDLELFLRNINHIESPTIEGLEDSFNASYATYHDLLKVGLKQEILDNPLNTEILEDIVKILTVFEDKRMIKEQLEQFSDVLDGVVLKKLERRHYTGWGRLSAKLLVGIRDKQSHLTILDYLMNDDGLNRNLMQLINDSNLSFKSIIEKEQVSTTDKDLQSIVADLAGSPAIKKGILQSLKIVDELVSIMGYPPQTIVVEMARENQTTGKGKNNSKPRYKSLEKAIKDFGSQILKEHPTDNQELKNNRLYLYYLQNGKDIYTGQELDIHNLSNYDIDHIVPQSFITDNSIDNLVLTSSAGNREKGGDVPPLEIVRKRKVFWEKLYQGNLMSKRKFDYLTKAERGGLTEADKARFIHRQLVETRQITKNVANILHQRFNKETDNHGNTMEQVRIVTLKSALVSQFRKQFQLYKVREVNDYHHAHDAYLNGVVANTLLKVYPQLEPEFVYGEYHQFDWFKANKATAKKQFYTNIMLFFAQKERIIDENGEILWDKKYLETIKKVLDYRQINIVKKTEIQKGEFSKATIKPKGNSSKLIPRKENWDPVKYGGLDSPNMAYAVIIEHAKGKKKIVIEKKLIQINIMERKMFEKDEEAFLEEKGYHQPKVLTKLPKYTLYECEKGRRRMLSSANEAQKGNQLVLSNHLVSLLYHAKNCEASDGKSLKYIEAHRETFSELLAQVSEFATKYTLADANLSKINNLFEQNKEGDIKAIAQSFVDLMAFNAMGAPASFKFFEATIDRKRYTNLKELLSSTIIYQSITGLYESRKRLDD

SEQ ID NO: 313 - protein, 1334 aa, Listeria monocytogenes
  Listeria monocytogenes serotype 1/2a str. F6854
MKNPYTIGLDIGTNSVGWAVLTNQYDLVKRKMKVAGNSDKKQIKKNFWGVRLFDDGQTAVDRRMNRTARRRIERRRNRISYLQEIFAVEMANIDANFFCRLNDSFYVDSEKRNSRHPFFATIEEEVAYHDNYRTIYHLREKLVNSSEKADLRLVYLALAHIIKYRGNFLIEGALDTKNTSVDEVYKQFIETYNQVFMSNIEEGALAKVEENIEVANILAGKFTRREKFERILQLYPGEKSTGMFAQFISLIVGSKGNFQKVFDLIEKTDIECAKDSYEEDLETLLAIIGDEYAELFVAAKNTYNAVVLSSIITVTDTETNAKLSASMIERFDAHEKDLVELKAFIKLNLPKQYEEIFSNAAIDGYAGYIDGKTKQVDFYKYLKTILENIEGSDYFIAKIEEENFLRKQRTFDNGAIPHQLHLEELEAIIHQQAKYYPFLKEDYDKIKSLVTFRIPYFVGPLANGQSEFAWLTRKADGEIRPWNIEEKVDFGKSAVDFIEKMTNKDTYLPKENVLPKHSLCYQKYMVYNELTKIRYIDDQGKTNYFSGREKQQVFNDLFKQKRKVKKKDLELFLRNINHIESPTIEGLEDSFNASYATYHDLLKVGMKQEILDNPLNTEMLEDIVKILTVFEDKPMIKEQLQQFSDVLDGGVLKKLERRHYTGWGRLSAKLLVGIREKQSHLTILDYLMNDDGLNRNLMQLINDSNLSFKSIIEKEQVSTTDKDLQSIVAELAGSPAIKKGILQSLKIVDELVSIMGYPPQTIVVEMARENQTTGKGKNNSKPRYKSLEKAIKEFGSQILKEHPTDNQELKNNRLYLYYLQNGKDMYTGQELDIHNLSNYDIDHIVPQSFITDNSIDNLVLTSSAGNREKGGDVPPLEIVRKRKVFWEKLYQGNLMSKRKFDYLTKAERGGLTEADKARFIHRQLVETRQITKNVANILYQRFNKETDNHGNTMEQVRIVTLKSALVSQFRKQFQLYKVREVNGYHHAHDAYLNGVVANTLLKVYPQLEPEFVYGEYHQFDWFKANKATAKKQFYTNIMLFFAQKERIIDENGEILWDKKYLETIKKVLDYRQMNIVKKTEIQKGEFSKATIKPKGNSSKLIPRKENWDPMKYGGLDSPNMAYAVIIEHAKGKKKIVIEKKLIQINIMERKMFEKDEEAFLEEKGYRHPKVLTKLPKYTLYECEKGRRRMLASANEAQKGNQLVLSNHLVSLLYHAKNCEASDGKSLKYIEAHRETFSELLAQVSEFATRYTLADANLSKINNLFEQNKEGDIKAIAQSFVDLMAFNAMGAPASFKFFEATIDRKRYTNLKELLSSTIIYQSITGLYESRKRLDD

SEQ ID NO: 314 - protein, 1087 aa, Listeriaceae bacterium
  Listeriaceae bacterium TTU M1-001
MKKLVLGLDIGVASVGWGIIDAENGDVVDTGVRLFSSRDASENESRRTSRQSRRLSRRKKHRRERIKQLLLAHDMDICDIVNENPYELRVKGLNEKLEVSEIYVALTHLAKRRGVSYLDDVVEEGGTIKSEHLNKNMEEIKSGKMPCEIQLERFEKYGQVRGMIEINQDTEESSFLVNIFRTSDYIKEAKTILATQQKFHKQITNEFIDEYIHIMASKRDYFIGPGNEKSRTDYGVYRTNGDTWDNLFEILIGKCSVFPEETRAARSSYVAQEFNLLNDLNNLKISNLESGKLSASQKHDIVEKVKNSKKFGTKDLLKYIASVCECKIEDIGGCRVDKNRKPIMHTFENYRKVHNALNEAGVDLRLSETDYDELMKIMTLNSETLEIKKQCKEKLPQLTEDYLNVCLVLNKKGAFSGWHALSLKAMKLMMPELYGTSKNQMQIIHTMQLGKAYLKPLNQQKYLNSEAILEEIYNPIAARSIRQTIKVTNAILKKYGHLDSVIIEMPRDYQTSEDERKMIEKMQKENEKEKKAALKRAREEYPFPDEAFRNHKELATKLRLWYQQDQFCVYSGRKISVVDLVRNPNQFEIDHIIPQSVSLDDSLNNKVLCFSEENQKKGQQTPFYYHKGKSGNWTYEQYKLFVEKLFDKKKISNKKRELLLFEEDINKWDVRRGFIARNLVDTRYASRVILNSYQQYFGNHEMGTKVKVVRGKFTSQLRKKWRIFKDRNESHSHHAIDALIVAATANLRLWKKNTLGVSDEGKVYDKETGEILPFEKLTESEYNEMMNKEPYLNFKTKLQNIETKVKYSYRVSKKVNRKISDATIYSTRERDGIDYIVGKIKNIYDVKTYKDQFLKRYKKNKEQFLMYQHDPQTFAILENIMATYQDAENPFLAYKKEYGVIRKYSKKGGGSPVTSLKFIDKVLGQKIDLTAKNQAALPKNKKVVLQSITPYRADVYYDEIDKRYHLIGVKYSLFSFSKQGYVINPIAYQKLLEKEQIHSEMKFCFSLYREDIIEFGEDPDSLTRYRFWSKNESGKNKIEVKPIEKPNFEKQTVLTITKKIKILNKYQTDVLGNSFKAQEEKDPRNIE

SEQ ID NO: 315 - protein, 1345 aa, Marinilabilia sp.
  Marinilabilia sp. AK2
MKKILGLDLGTTSIGWAFIKEPEKDVVGSEIVDMGVRIVALSSDEENDFAKGNTISINADRTLKRGARRNLQRFKLRRDALLEIFKEMKLIPSNFKYAEDGPSSTFSTLKLRDKAAKEKIELDDLVKVLLQINKKRGYRSSRKAKSEEDDGSAIDSMGIAKELYENDLTPGQWVFEALQKGRKNVPDFYRSDLQEEFKKIVNYQSEFYPDVLNSSFVEDWMGKASTPTKQYFNKKGVHLAENKGKREERRLQEYNWRAVAVNSKIDLSEIALILSQINSQISNSSGYLGAISDRSKELYFKNQTVGQYLYQQIKINPHTRLKGQVFYRQDYLDEFEKIWSVQSGFHPQLNDALKKEIRDITIFFQRRLKSQKHLISNCEFEDYHKVVPKSHPIFQEFRIWQNLNNLTLIKKDNLNEKSELALEDKIALANELAFKREQSVKDALNILGLKSSEWEFNFTKIEGNRTNHAFFEAFAKIIEIEDGEPLDLGNLKADDILDQFSEAFLRIGIDPGLLQVNNDIEGPNYEKQPYIQFWHLLYSSEDDQKLKQNLIKKFGFKPDHAKILASISLQDDHASLSSRAIKKILPHLQSGLIYDKACTYAGYNHSSSFTKEENEKRELSSELDLLKKNSLRNPVVEKILNQMINVVNAILKDPNLGKPDEIRVEMARELKANAEQRKNMTSNIASATRDHEKYREILKKEFGLKRVTKNDLLRYKLWLETDGISLYTGKPIEASKLFSKEYDIEHIIPKTRLFDDSFSNKTICERQLNIDKANVTAFSFLQNKLSGDEFEQYQSRVKSLFGKLSKAKIQKLLMANDKIPEDFIARQLQETRYISKKAKEILFEITRRVSVTTGTITDKLREDWGLVEIMKELNWEKYDKLGLTYTIEGKHGERLNKIKDWSKRNDHRHHAMDALTVALTKPAYIQYLNNLNAKELNGKKSTEIFAIEQKYLKRENGKLCFIPPVENIRTEAKKHLSKVLISYKAKNKVVTINKNRTNKKAGFNEQIALTPRGQLHKETVYGKAFHYSTKFEKIGASFDVQKINAVAKKEEREALLKRLAENGDDPKKAFTGKNSLSKMPIYLDLKRNIKLPEKVKTVVLEQNYTIRKNIDPDLKLDKVIDVGVKRILENRLKEFGGNAKLALSNLDENPIWLNKEKGITIKRVKISGVSNVESLHVKKDHFGEPILDQVGNEIPVDFVSTGNNHHVAIYEDEKGNLQEEVVSFFEAVVRQNQGLPIINKNHSLGWKFLFTLKQNEYFVFPSDDFDPTDVDLMDEENYHLISPNLFRVQKFTTKDYFFRHHLETTVEDKSELKGVSFKRLGLPGLNCIKKIRINHLGKIIQVGEY

SEQ ID NO: 316 - protein, 1352 aa, Megasphaera sp.
  Megasphaera sp. UPII 135-E
MKKRNREEYYVGLDIGTSSVGWAVATPDYRIPKFRGHKMWGSRLFAEGKRAAERRQFRTNRRRLARRRDRLQILEELFAEEMAKVDNTFFMRLKESKFFLEDKTVKEKHILFSTDKFDADRFYKDNPTIYHVRKRLMEEEPQDIRELFLAVHHILKYRGHFLFAGSLEQNGASIEELVRTLLGKQGLAILDDTIDSNEMVNILKNTGETKSDRKKDVQELWNPLKDKVKKAQAAEMAGLVLGLKSDISKLFANSDYKDLDSSIKNINFSSGDYEEKRDDYANSIGDDIVLLDTMKALYDTLILSQILQGKRSISAAKVEDYNTHKEQLRALKAILKPHKRLYNEMFRENNKKDLSNYVAYISSYSEGKRVNREGFYKYVQAVLKQVDDSDSKQAILEAIRLETFLPLLRVKDNAVIPHQIHQAELEAILETARKKYNFLNDVSDGVSVKDKIIQLFTFRIPYYVGPLNPHSGETVADRKQGTGWVVRKQRGKVYPWNFADMVDVKASAEAFITNLTNKCTYLIGEDVLPKRSLLYSEFMLLNELNMIKYDGHELPVAIKQLYIEQVFKQEHKKQTKGRVLDFLKRNGLITGSATAVITGMDDAIKGDLQSYRDMVRIFGAGFDHSMAERIIRWVTLFGEAKDILENKIREVYGNSISDSQMRAIKKLKYADWGRLSQAFLIAVKGCDKSGVERNIITCLRASSQNLMEILSDQGTYIKQIKAWNHQHTTNMMDTLDYQLVDDLYVAPSVKRSIWQSLCIVEELVKIMGQAPKKIFVEVTRTKQAEKTKKDSRKKRLVELYTAIGKEGAAWKKEIEAHQAGDFRRKKLYLYYTQMGRCMYSNEPIAMDALFTSAYDIDHIYPQSLTKDGSWDNLVLVKSQLNKEKSDQYPLRPAIREKNKAHWQYLCRAGFISEKKYERLMRTTELTAEELSGFIARQLVETSQATKAVTGLLERIYTNTEICFVKAETVSQFRHQHNFIKIRELNNYHHAKDAYLNIVVGNVYHEKFTKNPWEFIARSTERRPYNLNRMYDFDLLKQGRVIWQVPKSLETVQAMMKSNDVRITKKLLVQKGELYDATITKAHKAKEGTYFPLKGADARLRDVHRYGGYEKIKIAYYSVFSCREKASNTIHTLIIPIPVYKAGLLQTEADLTAYAWQTKQKTKPIKDIYSAITPIYKKLCINTVVKIDGFKYFLGGKTGDYMWLDPAIPVVLDEQAAAYLKAISKVGRADDVENTAQAIDLITAEANEAFYDVLLKKMEAKIFAKAYQTIVEKLASETARERFRELSIGAQCSCLLEILNLLANNKTTFTFFKDKMGVTMSRRKQPMDLTKLEECIVYETSITGLYEKAVSLL

SEQ ID NO: 317 - protein, 1080 aa, Methylocystis sp.
  Methylocystis sp. ATCC 49242
MRVLGLDGGIASIGWALIEIFEDHEPSDGRIIDTGAWMFDAPEEKSQTGTKLKSELRRIFRGQRRVIRRRRQRMNEVRRILHRHGLLSSDNRDALKQPGLDPWKIRAEGIDRLLSPIEFAVALGHIARHRGFKSNSKGAKTSDLDAESSRMKKAVGETREKLARFGSPAKLLVEDEGFVLRQTKLKSGALETVRRFRNRDGDYSRSLLRDDLAAEVRALFRAQARLQSTFAKVELEAEFTQAAFFQRPLQDSERLVGPCPFEPAEKRSPKRGYSFELFRFLSRLNHLTLREGSEERTLTVEELRTAAADFGGVAKFTFSTLRKRLALPDIAIFVGIKADDEKKLDVVARSGEAATGTARLRRVVIDALGELAWGALISAPERLDKITEIITFRSDLDRIRAGLIEAGFDTPLIEAIVRAAADGKLDAFTGVGHISAKAARNIIPGLMRGMTYDKACAAAGYDHTASRERDAFDVGMHGKEALKKILQEERISRELVGSPSARKALIEAVKQVKAIIEKYGVPDRIHVELARDVGKSIEERRDIHFGIEKRSRQKDKLRELFGKEVGHLPQDGERGKEELLRFELWNEQMGRCLYTDEYINPKQLVASDNSVQVDHILPWSRFGDDSYLNKTLCTAKANQDKKGRTPYEWFRADKPEAEWDAFVARVESIQFMKGLKKRNYKLKNAEEAAEKFRSRNLNDTRWTCRLLAEALKQLYPKGEKDKDGKERRRVFTRPGALTNRLRRAWSLQRRKKSEKGERIADDRHHALDAIIVAATTESLLIRATREVQDIERKGLHYDLTKNITQPWPGFADEALDAVEKVFVARAERRRARGKAHDATIRHIAVRDDEAKVYERKKVGDIKLGDLIRVKDAERNAPLIENLRKWIEAGSPRDNPPLSPKGDPVSKVRLVTKNKVNITLDTGNPERLATVDRGEMARVDVFRKANRKGKYEYYLVPIYPHEIATMETPPMRAVQGGGDDDKWPEIDSTFEFLWSINQLSLLELTKPDGEVIRSYFRSLDRNTGALTVSGIANSTATRKGIGTRTLIDFKKLHVDRLGQIFEVERELRTWRGETWRGKDCI

SEQ ID NO: 318 - protein, 1082 aa, Methylosinus trichosporium
  Methylosinus trichosporium OB3b
MRVLGLDAGIASLGWALIEIEESNRGELSQGTIIGAGTWMFDAPEEKTQAGAKLKSEQRRTFRGQRRVVRRRRQRMNEVRRILHSHGLLPSSDRDALKQPGLDPWRIRAEALDRLLGPVELAVALGHIARHRGFKSNSKGAKTNDPADDTSKMKRAVNETREKLARFGSAAKMLVEDESFVLRQTPTKNGASEIVRRFRNREGDYSRSLLRDDLAAEMRALFTAQARFQSAIATADLQTAFTKAAFFQRPLQDSEKLVGPCPFEVDEKRAPKRGYSFELFRFLSRLNHVTLRDGKQERTLTRDELALAAADFGAAAKVSFTALRKKLKLPETTVFVGVKADEESKLDVVARSGKAAEGTARLRSVIVDALGELAWGALLCSPEKLDKIAEVISFRSDIGRISEGLAQAGCNAPLVDALTAAASDGRFDPFTGAGHISSKAARNILSGLRQGMTYDKACCAADYDHTASRERGAFDVGGHGREALKRILQEERISRELVGSPTARKALIESIKQVKAIVERYGVPDRIHVELARDVGKSIEEREEITRGIEKRNRQKDKLRGLFEKEVGRPPQDGARGKEELLRFELWSEQMGRCLYTDDYISPSQLVATDDAVQVDHILPWSRFADDSYANKTLCMAKANQDKKGRTPYEWFKAEKTDTEWDAFIVRVEALADMKGFKKRNYKLRNAEEAAAKFRNRNLNDTRWACRLLAEALKQLYPKGEKDKDGKERRRVFSRPGALTDRLRRAWGLQWMKKSTKGDRIPDDRHHALDAIVIAATTESLLQRATREVQEIEDKGLHYDLVKNVTPPWPGFREQAVEAVEKVFVARAERRRARGKAHDATIRHIAVREGEQRVYERRKVAELKLADLDRVKDAERNARLIEKLRNWIEAGSPKDDPPLSPKGDPIFKVRLVTKSKVNIALDTGNPKRPGTVDRGEMARVDVFRKASKKGKYEYYLVPIYPHDIATMKTPPIRAVQAYKPEDEWPEMDSSYEFCWSLVPMTYLQVISSKGEIFEGYYRGMNRSVGAIQLSAHSNSSDVVQGIGARTLTEFKKFNVDRFGRKHEVERELRTWRGETWRGKAYI

SEQ ID NO: 319 - protein, 1123 aa, Mobiluncus curtisii
  Mobiluncus curtisii subsp. holmesii ATCC 35242
MFVYLNSPRGFGPATFLTDLPHFCIIFGNNDFMDNRKYHVGIDVGTNSVGFAAVEVGDSGSPIRFLNTMVVIHDSGVDPEQKKYAITRLASAGTARRTRRLYRTRRQRLRELDDFISNELGYPLVNLENFADPYEPWKVRADLATIKLPADELPEAMSIALRHMARHRGWRSPYQRVEALHLHAEISEEFSALKKRVMEKTGDVFSDDATPAEVLVDLMGRQKIRGADGMLSGKLRQSDNANELRKIASVQGIDDETLNRIIDRVFFSRSPKGKASERVGMDALPGQGSKPRALKAMPSFQKFRIVSVICNLRIKDSGDDNRPLSMEEKEQLIGYLMSSTTDDHVTWTDVAELLHVKRSNLQGTAKEGPDGERPYTRPPVNSAWSKIKDSKIKSLVALWKTGDVDVQSAIVEALSNASVLEDARPGADIVVAYLESLDDKELESLDKVGLPAGRASYSEDSLERLTERMLQDDCDLFEARKREFGVSDDWKPPADPIYAPVGNPGVDRVLKIVNRLLMAAEREWGAPTQINIEHVRSGFSSELMQREFERENERRRAQNEEAVKAILTEKGGNSHVSKYDIIRYYAVKRQNCQCLYCGTPITFSDCELDHIVPRKGVGSTNSRVNLAAACRSCNRDKSNLPFAVWAGKTSNFDVSIDGAVSRVKQWQRSQNEGAREFRAFQNEVISRLLKTTEDPEIDSRSLESVAWMARELHHRVEYYFQSKGAQTQVSVYRGAVTAQARKSSGLEDKVKMIGGGGKTRLDRRHHAMDAATIALMTPGISTTLSEKNNLRDAQKFTGQSETWKDYCGRTETAREHFAVWKSNMERLTDLFNDKLENDAIPVVQPLRLRLSDSKAHDDGIGKLDSKKLGSVWSLADIDRAATPQIWTALTRCDDFDPTKGLPENANRVIRAQGVKYESEDNIPVFPSNVAAIAVRDGYAEIGSTIHHARIYRIDDGKKIFYSMIRVFAVDLLKHQAEDLFTVKLPPSAISIRTCEDSLRRALSNGTAEYLGWLVPGDEIIVDTSDKAFHTGQIGDLLRNFPVNSFRLTGFPSNSRLRLKPVLLAGEGLRDDAEDSIKKILSGQGWRPAINVLFSKGKPRIVRRNSLGIERPSSNNGLPFSWEA

SEQ ID NO: 320 - protein, 1091 aa, Mobiluncus mulieris
  Mobiluncus mulieris 28-1
MDSRKYRVGIDVGTNSVGFAAVEEDDSGSPTRFLNTMVVIHDSGVDPEQKKYAITRLASAGTARRTRRLYRTRRQRLRELDDFISNELGYPLVNLENFADPYEPWKVRADLATTKLPNDELPEAMSIALRHMARHRGWRSPYQRVEALHLHAEISKEFAALKERVVEKTGDVFSDDATPAEVLVDLMGRQKVRGADGVLSGKLRQSDNANELRKIASVQGIDDETLNRIIDRVFSSKSPKGKASERVGMDALPGQGSKPRALKAMPSFQKFRVVSVICNLRIKDSGGDARPLSMEEKEKLIDYLMSSTTDDHVTWTDVADLLHVKRSQLQGTAKEGFDGERPYTRPPVNSTWSKIKDSKIKSLVALWKTGDVDVQSAIVEALSNASVLEDSRPGADIVVAYLESLDDKELESLDKVGLPAGRASYSEDSLERLTERMLRDDCDLFEARKREFNVADDWKPPADPIYAPVGNPGVDRVLKIVNRLLMAAEREWGAPTQINIEHVRSGFSSELMQREFERENERRRAQNEEAVKAILTEKGGNSRVSKYDITRYYAVKRQHCQCLYCGTPITFSDCELDHIVPRKGVGSTNTRVNLAAACRSCNRDKSNLPFAVWAGKASNFDVSIDDAVSRVKQWQRSQNEGVREFRAFQNEVISRLLKTTEDPEIDSRSLESVAWMARELHHRVEYYFQSKGAQTQVSVYRGAVTAQARKSSGLEDKVKMIGGGGKTRLDRRHHAMDAATIALMTPGISTTLSEKNNLRDAQKFTGQSETWKDYCGRTETARKHFAVWKSNMERLTDLFNDKLENDAIPVVQPLRLRLSNSKAHDDGIGKLDSKKLGSVWSLADIDRAATPQIWTALTRCDDFDPTKGLPENANRVIRAQGVKYESEDNIPVFPSNVAAIAVRDGYAEIGSTIHHARIYRIDDGKKTFYSMIRVFAVDLLKHQAEDLFTVKLPPSAISIRTCEDSLRRALSNGTAEYLGWLVPGDEIIVDTSDKAFHTGQIGDLLRNFPVNSFRLTGFPSNSRLRLKPVLLAGEGLRDDAEDSIKKILLGQGWRPAINVLFSKGKPRIVRRNSLGIERPSSNNGLPFSWEA

SEQ ID NO: 321 - protein, 1091 aa, Mobiluncus mulieris
  Mobiluncus mulieris FB024-16
MDSRKYRVGIDVGTNSVGFAAVEEDDSGSPTRFLNTMVVIHDSGVDSEQKKYAITRLASAGTARRTRRLYRTRRQRLRELDDFISNELGYPLVNLENFADPYEPWKVRADLATTKLPNDELPEAMSIALRHMARHRGWRSPYQRVEALHLHAEISKEFAALKERVVEKTGDVFSDDATPAEVLVDLMGRQKVRGADGVLSGKLRQSDNANELRKIASVQGIDDETLNRIIDRVFSSKSPKGKASERVGMDALPGQGSKPRALKAMPSFQKFRVVSVICNLRIKDSGGDARPLSMEEKEKLIDYLMSSTTDDHVTWTDVADLLHVKRSQLQGTAKEGFDGERPYTRPPVNSTWSKIKDSKIKSLVALWKTGDVDVQSAIVEALSNASVLEDSRPGADIVVAYLESLDDKELESLDKVGLPAGRASYSEDSLERLTERMLRDDCDLFEARKREFNVADDWKPPADPIYAPVGNPGVDRVLKIVNRLLMAAEREWGAPTQINIEHVRSGFSSELMQREFERENERRRAQNEEAVKAILTEKGGNSRVSKYDITRYYAVKRQHCQCLYCGTPITFSDCELDHIVPRKGVGSTNTRVNLAAACRSCNRDKSNLPFAVWAGKASNFDVSIDDAVSRVKQWQRSQNEGVREFRAFQNEVISRLLKTTEDPEIDSRSLESVAWMARELHHRVEYYFQSKGAQTQVSVYRGAVTAQARKSSGLEDKVKMIGGGGKTRLDRRHHAMDAATIALMTPGISTTLSEKNNLRDAQKFTGQSETWKDYCGRTETARKHFAVWKSNMERLTDLFNDKLENDAIPVVQPLRLRLSNSKAHDDGIGKLDSKKLGSVWSLADIDRAATPQIWTALTRCDDFDPTKGLPENANRVIRAQGVKYESEDNIPVFPSNVAAIAVRDGYAEIGSTIHHARIYRIDDGKKTFYSMIRVFAVDLLKHQAEDLFTVKLPPSAISIRTCEDSLRRALSNGTAEYLGWLVPGDEIIVDTSDKAFHTGQIGDLLRNFPVNSFRLTGFPSNSRLRLKPVLLAGEGLRDDAEDSIKKILLGQGWRPAINVLFSKGKPRIVRRNSLGIERPSSNNGLPFSWEA

SEQ ID NO: 322 - protein, 1473 aa, Mucilaginibacter paludis
  Mucilaginibacter paludis DSM 18603
MKNILGLDLGTNSIGWALIEKDTDQKNGNILGTGSRIIPMSQDIKDEFGKGNSISQTADRTKFRSVRRLRERHLLRRERLHRVLNVLGFLPKHYADQIDFKKRLGKLVNETEPKLVYDNKNFIFKKSFEAMLSDFNQHQPLLLADGKKVPFDWTIYYLRKKALTEKIEKEELAWLILNFNQKRGYYQLRGEEEEENPNKMVAFHSLKIVEVIADESQKGKAETWYSLILENGWIYRRSSKTPLYDWKGKQRDFIVTTDLNDDGSIKTDKEGLEKRSFRAPVEDDWTLVKKKTEQEINRSHKTVGTYIYENLLQDPKQKIKGKLVRTIEREFYKDELKMILKNQQKFHPELNDEHLYINCVRELYRNNQAHQTILSKKDFVHLFIDDIIFYQRPLRSQKSSISNCTLEFRKYKNENGTDQTDYLKAIPKSHPLFQEFRLWQWIYNLGIYQKEDDTNVTDELIKNIDGYQDLFDFLNNKKEIRQDILIKFLVEQTGLKGKPLSSVVAKYRWNFVEDKIYPCNETGTQIRTRLAKVENTPEDFLTAETEIKLWHIIYSVNDKADYEKALKTFAEKHNLDTHSFVENFKKFPPFKSEYGSFSEKAIKKLLPLIRLGKYWSWENIDKKTQERIEKILTGEFDEAIKSRVRDKAIHLTEEDHFQGLQLWLASYVVYGRHSEADNLDKWHTVADLEDYLAEFRQHSLRNPIVEQVITETLRVVKDIWLQYGQGAKDFFSEIHIELAREMKNTGDERKRLTSLVTDNENTNLRIKVLLSELLNDGNVENVRPYSPMQQEALKIFEDGVLNSDIEIEDDILKISKMAQPTNTELKRYKLWLEQKYRSPYTGQIIPLNRLFTADYEIEHIIPQSRFFDDSFSNKIICESAVNQLKDKQLGLEFIKNHSGTIVKLGMGKTAKILDVESYNEFVKGNYTKNISKRNKLMLEEIPDKMIERQLNDTRYISKFIISALSNIVRSESNDDGFNSKNVLPGNGKITSRLKQDWGMNDIWNELILPRFERMNKITDSAVFTAWNENNQKFLPIVPLEFSKGFQKKRIDHRHHALDALVIAASTREHINLLNNEHAKSDKRFDLNRKLRKFEKVAYNDPKTGKRIEKEVPTIFLKPWETFTVDAKNSLESIIVSFKQNLRVINRATNYSESYNDENGALRLGKDGNPLKEKIKQSKGDSWAIRKPMHKDFVYGKVHLQNVKLPKDKFITAIRKSLDVTFDLKRIETITDTGIQKILKNYLHSKENKVELAFSPEGIEDMNQHIERYNDGKKHQPIHKVRVFEIGSRFSLGESGNKKTKFVEAAKGTNLFFAVYQDDNKGKRNYETIPLNIVIERQKLGLHSVPTEDAKGGKLLFHLSPNDMVYVPTSEELEDNLASVNIKRLNTAQRKRIYKVEKASGVECYFIRQDIAYLIKNYDAKTKIGELESQNKLQTTMTDDRLKITDVCVKLNIDRLGSIAETFLGNQYGASKKT

SEQ ID NO: 323 - protein, 1233 aa, Mycoplasma canis
  Mycoplasma canis PG 14
MEKKRKVTLGFDLGIASVGWAIVDSETNQVYKLGSRLFDAPDTNLERRTQRGTRRLLRRRKYRNQKFYNLVKRTEVFGLSSREAIENRFRELSIKYPNIIELKTKALSQEVCPDEIAWILHDYLKNRGYFYDEKETKEDFDQQTVESMPSYKLNEFYKKYGYFKGALSQPTESEMKDNKDLKEAFFFDFSNKEWLKEINYFFNVQKNILSETFIEEFKKIFSFTRDISKGPGSDNMPSPYGIFGEFGDNGQGGRYEHIWDKNIGKCSIFTNEQRAPKYLPSALIFNFLNELANIRLYSTDKKNIQPLWKLSSVDKLNILLNLFNLPISEKKKKLTSTNINDIVKKESIKSIMISVEDIDMIKDEWAGKEPNVYGVGLSGLNIEESAKENKFKFQDLKILNVLINLLDNVGIKFEFKDRNDIIKNLELLDNLYLFLIYQKESNNKDSSIDLFIAKNESLNIENLKLKLKEFLLGAGNEFENHNSKTHSLSKKAIDEILPKLLDNNEGWNLEAIKNYDEEIKSQIEDNSSLMAKQDKKYLNDNFLKDAILPPNVKVTFQQAILIFNKIIQKFSKDFEIDKVVIELAREMTQDQENDALKGIAKAQKSKKSLVEERLEANNIDKSVFNDKYEKLIYKIFLWISQDFKDPYTGAQISVNEIVNNKVEIDHIIPYSLCFDDSSANKVLVHKQSNQEKSNSLPYEYIKQGHSGWNWDEFTKYVKRVFVNNVDSILSKKERLKKSENLLTASYDGYDKLGFLARNLNDTRYATILFRDQLNNYAEHHLIDNKKMFKVIAMNGAVTSFIRKNMSYDNKLRLKDRSDFSHHAYDAAIIALFSNKTKTLYNLIDPSLNGIISKRSEGYWVIEDRYTGEIKELKKEDWTSIKNNVQARKIAKEIEEYLIDLDDEVFFSRKTKRKTNRQLYNETIYGIATKTDEDGITNYYKKEKFSILDDKDIYLRLLREREKFVINQSNPEVIDQIIEIIESYGKENNIPSRDEAINIKYTKNKINYNLYLKQYMRSLTKSLDQFSEEFINQMIANKTFVLYNPTKNTTRKIKFLRLVNDVKINDIRKNQVINKFNGKNNEPKAFYENINSLGAIVFKNSANNFKTLSINTQIAIFGDKNWDIEDFKTYNMEKIEKYKEIYGIDKTYNFHSFIFPGTILLDKQNKEFYYISSIQTVRDIIEIKFLNKIEFKDENKNQDTSKTPKRLMFGIKSIMNNYEQVDISPFGINKKIFE

SEQ ID NO: 324 - protein, 1233 aa, Mycoplasma canis; identical to SEQ ID NO: 323
  Mycoplasma canis PG 14

SEQ ID NO: 325 - protein, 1233 aa, Mycoplasma canis
  Mycoplasma canis UF31
MEKKRKVTLGFDLGIASIGWAIVDSETNQVYKLGSRLFDAPDTNLERRTQRGTRRLLRRRKYRNQKFYNLVKRTEVFGLSSREAIENRFRELSIKYPNIIELKTKALSQEVCPDEIAWILHDYLKNRGYFYDEKETKEDFDQQTVESMPSYKLNEFYKKYGYFKGALSQPTESEMKDNKDLKEAFFFDFSNKEWLKEINYFFNVQKNILSETFIEEFKKIFSFTRDISKGPGSDNMPSPYGIFGEFGDNGQGGRYEHIWDKNIGKCSIFTNEQRAPKYLPSALIFNFLNELANIRLYSTDKKNIQPLWKLSSIDKLNILLNLFNLPISEKKKKLTNANINDIVKKESTKSIMLSVEDIDMIKDEWAGKEPNVYGVGLSGLNIEESAKENKFKFQDLKILNVLINLLDNVGIKFEFKDRNDIIKNLELLDNLYLFLIYQKESNNKDSSIDLFIAKNELLNIENLKLKLKEFLLGAGNEFENHNSKTHSLSKKAIDAILPKLLDNNEGWNLEAIKNYDEEIKSQIEDNSSLMAKQDKKYLNDNFLKDAILPPNVKVTFQQAILIFNKIIQKFSKDFEIDKVVIELAREMTQDQENDALKGIAKAQKSKKSLVEERLEANNIDKSVFNDKYEKLIYKIFLWISQDFKDPYTGAQISTNEIVNNKVEIDHIIPYSLCFDDSSANKVLVHKQSNQEKSNSLPYEYIKQGHSGWNWDEFTKYVKRVFVNNVDSILSKKERLKKSENLLTTSYDGYDKLGFLARNLNDTRYATILFRDQLNNYAEHHLIDNKKMFKVIAMNGAVTSFIRKNMSYDNKLRLKDRSDFSHHAYDAAIIALFSNKTKTLYNLIDPSLNGIISKRSEGYWVIEDRYTGEIKELKKEDWTSIKNNVQARKIAKEIEEYLIDLDDEVFFSRKTKRKTNRQLYNETIYGIAAKTDEDGITNYYKKEKFSILDDKDIYLRLLREREKFVINQSNPEVIDQIIEIIESYGKENNIPSRDEAINIKYTKNKINYNLYLKQYMRSLTKSLDQFSEEFINQMIANKTFVLYNPTKNTTRKIKFLRLVNDVKINDIRKNQVINKFNGKNNEPKAFYENINSLGAIVFKNSANNFKTLSINTQIAIFGDKNWDIEDFKTYNMEKIEKYKEIYGIDKTYNFHSFIFPGTILLDKQNKEFYYISSIQTVRDIIEIKFLNKIEFKDENKNPDTSKTPKRLMFGIKSIMNNYEQVDISPFGINKKIFE

SEQ ID NO: 326 - protein, 1233 aa, Mycoplasma canis
  Mycoplasma canis UF33
MEKKRKVTLGFDLGIASVGWAIVDSETNQVYKLGSRLFDAPDTNLERRTQRGTRRLLRRRKYRNQKFYNLVKRTEVFGLSSREAIENRFRELSIKYPNIIELKTKALSQEVCPDEIAWILHDYLKNRGYFYDEKETKEDFDQQTVESMPSYKLNEFYKKYGYFKGALSQPTESEMKDNKDLKEAFFFDFSNKEWLKEINYFFNVQKNILSETFIEEFKKIFSFTRDISKGPGSDNMPSPYGIFGEFGDNGQGGRYEHIWDKNIGKCSIFTNEQRAPKYLPSALIFNFLNELANIRLYSTDKKNIQPLWKLSSVDKLNILLNLFNLPISEKKKKLTSTNINDIVKKESIKSIMISVEDIDMIKDEWAGKEPNVYGVGLSGLNIEENAKENKFKFQDLKILNVLINLLDNVGIKFEFKDRNDIIKNLELLDNLYLFLIYQKESNNKDSSIDLFIAKNKSLNIENLKLKLKEFLLGAGNEFENHNSKSHSLSKKAIDAILPKLLDNNEGWNLEAIKNYDEEIKSQIEDNSSLMAKQDKKYLNDNFLKDAILPPNVKVTFQQAILIFNKIIQKFSKDFEIDKVVIELAREMTQDQENDALKGMAKAQKSKKSLVEERLEANNIDKSVFNDKYEKLIYKIFLWISQDFKDPYTGAQISVNEIVNNKVEIDHIIPYSLCFDDSSANKVLVHKQSNQEKSNSLPYEYIKQGHSGWNWDEFTKYVKRVFVNNVDSILSKKERLKKSENLLTTSYDGYDKLGFLARNLNDTRYATILFRDQLNNYAEHHLIDNKKMFKVIAMNGAVTSFIRKNMSYDNKLRLKDRSDFSHHAYDAAIIALFSNKTKTLYNLIDPSLNGIISKRSEGYWVIEDRYTGEIKELKKEDWTSIKNNVQARKIAKEIEEYLIDLDDEVFFSRKTKRKTNRQLYNETIYGIAAKTDEDGITNYYKKEKFSILDDKDIYLRLLREREKFVINQSNPEVIDQIIEIIESYGKENNIPSRDEAINIKYTKNKINYNLYLKQYMRSLTKSLDKFSEEFINQMIANKTFVLYNPTKNTTRKIKFLRLVNDVKINDIRKNQVINKFNGKNNEPKAFYENINSLGAIVFKNSANNFKTLSINTQIAIFGDKNWDIEDFKTYNMEKIEKYKEIYGIDKTYNFHSFIFPGTILLDKQNKEFYYISSIQTVRDIIEIKFLNKIEFKDENKNQDTSKTPKRLMFGIKSIMNNYEQVDISPFGINKKIFE

SEQ ID NO: 327 - protein, 1233 aa, Mycoplasma canis
  Mycoplasma canis UFG1
MEKKRKVTLGFDLGIASVGWAIVDSETNQVYKLGSRLFDAPDTNLERRTQRGTRRLLRRRKYRNQKFYNLVKRTEVFGLSSREAIENRFRELSIKYPNIIELKTKALSQEVCPDEIAWILHDYLKNRGYFYDEKETKEDFDQQTVESMPSYKLNEFYKKYGYFKGALSQPTESEMKDNKDLKEAFFFDFSNKEWLKEINYFFNVQKNILSETFIEEFKKIFSFTRDISKGPGSDNMPSPYGIFGEFGDNGQGGRYEHIWDKNIGKCSIFTNEQRAPKYLPSALIFNFLNELANIRLYSTDKKNIQPLWKLSSVDKLNILLNLFNLPISEKKKKLTSTNINDIVKKESIKSIMLSVEDIDMIKYEWAGKEPNVYGVGLSGLNIEESAKENKFKFQDLKILNVLINLLDNVGIKFEFKDRNDIIKNLELLDNLYLFLIYQKESNNKDSSIDLFIAKNKSLNIENLKLKLKEFLLGAGNEFENHNSKTHSLSKKAIDAILPKLLDNNEGWNLEAIKNYDEEIKSQIEDNSSLMAKQDKKYLNDNFLKDAILPPNVKVTFQQAILIFNKIIQKFSKDFEIDKVVIELAREMTQDQENDALKGIAKAQKSKKSLVEERLEANNIDKSVFDDKYEKLIYKIFLWISQDFKDPYTGAKISANEIVNNKVEIDHIIPYSLCFDDSSANKVLVHKQSNQEKSNSLPYEYIKQGHSGWNWDEFTKYVKRVFVNNVDSILSKKERLKKSENLLTTSYDGYDKLGFLARNLNDTRYATILFRDQLNNYAEHHLIDNKKMFKVIAMNGAVTSFIRKNMSYDNKLRLKDRSDFSHHAYDAAIIALFSNKTKTLYNLIDPSLNGIISKRSEGYWVIEDRYTGEIKELKKEDWTSIKNNVQARKIAKEIEEYLIDLDDEVFFSRKTKRKTNRQLYNETIYGIAAKTDEDGITNYYKKEKFSILDDKDIYLRLLREREKFVINQSNPEVIDQIIEIIESYGKENNIPSRDEAINIKYTKNKINYNLYLKQYMRSLTKSLDQFSEEFINQMIANKTFVLYNPTKNTTRKIKFLRLVNDVKINDIRKNQVINKFNGKNNEPKAFYENINSLGAIVFKNSANNFKTLSINTQIAIFGDKNWDIEDFKTYNMEKIEKYKEIYGIDKTYNFHSFIFPGTILLDKQNKEFYYISSIQTVRDIIEIKFLNKIEFKDENKNQDTSKTPKRLMFGIKSIMNNYEQVDISPFGINKKIFE

SEQ ID NO: 328 - protein, 1233 aa, Mycoplasma canis
  Mycoplasma canis UFG4
MEKKRKVTLGFDLGIASVGWAIVDSETNQVYKLGSRLFDAPDTNLERRTQRGTRRLLRRRKYRNQKFYNLVKRTEVFGLSSREAIENRFRELSIKYPNIIELKTKALSQEVCPDEIAWILHDYLKNRGYFYDEKETKEDFDQQTIESMPSYKLNEFYKKYGYFKGALSQPTESEMKDNKDLKEAFFFDFSNKEWLKEINYFFNVQKNILSETFIEEFKKIFSFTRDISKGPGSDNMPSPYGIFGEFGDNGQGGRYEHIWDKNIGKCSIFTNEQRAPKYLPSALIFNFLNELANIRLYSTDKKNIQPLWKLSSIDKLNILLNLFNLPISEKKKKLTSANINDIVKKESTKSIMLSVEDIDMIKDEWAGKEPNVYGVGLSGLNIEESAKENKFKFQDLKILNVLINLLDNVGIKFEFKDRNDIIKNLELLDNLYLFLIYQKESNNKDSSIDLFIAKNESLNIENLKLKLKEFLLGAGNEFENHNSKTHSLSKKAIDAILPKLLDNNEGWNLEAIKNYDEEIKSQIEDNSFLMAKQDKKYLNDNFLKDAILPPNVKVTFQQAILIFNKIIQKFSKDFEIDKVVIELAREMTQDQENDALKGIAKAQKSKKSLVEERLEANNIDKSVFNEKYEKLIYKIFLWISQDFKDPYTGAKISANEIVDNKVEIDHIIPYSLCFDDSSANKVLVHKQSNQEKSNSLPYEYIKQGHSGWNWDEFTKYVKRVFVNNVDSILSKKERLKKSENLLTTSYDGYDKLGFLARNLNDTRYATILFRDQLNNYAEHHLIDDKKMFKVIAMNGAVTSFIRKNMSYDNKLRLKNRNDFSHHAYDAAIIALFSNKTKTLYNLIDPSLNGIISKRSEGYWVIEDRYTGEIKELKKEDWTSIKNNVQARKIAKEIEEYLIDLDDEVFFSRKTKRKTNRQLYNETIYGIAAKTDEDGITNYYKKEKLSILDDKDIYLRLLREREKFVINQSNPEVIDQIIEIIESYGKENNIPSRDEAINIKYTKNKINYNLYLKQYMRSLTKSLDQFSEEFINQMIANKTFVLYNPTKNTTRKIKFLRLVNDVKINDIRKNQVINKFNGKNNEPKAFYENINSLGAIVFKNSANNFKTLSINTQIAIFGDKNWDIEDFKTYNMEKIEKYKEIYGIDKTYNFHSFIFPGTILLDKQNKEFYYISSIQTVRDIIEIKFLNKIEFKDENKNQDTSKTPKRLMFGIKSIMNNYEQVDISPFGINKKIFE

SEQ ID NO: 329 - protein, 1239 aa, Mycoplasma cynos
MEEKRKVTLGFDLGVASVGWAIVDSETNEVYKLGSRLFDIPDTNIDRRAKRGSRRLVRRRSYRNQKFYNLIKRTKTFGFLDKEAIEKEFVLLSIKYPNIIELKVKGLQEEVSKSEAVWILHDYLKNRGYFYDDKEEKDDLENPSIESMPSYKLYEFYKEYGYFKGALSSPTESEKNKDSDLEKAIFFNFSNKEWTKEINHFFKIQKNIFSEDFKAKFMEFFSFIRDISKGPGSENMPSQYSIFGKYGDDGMGGKYQHIWDKNIGKCSIFKDKVRAPKYLPSALFFNLLNELSNIRLYSVDKREKSVLWRLSSKDKINIILNILQIILFKNDGKISNLDINKIVKNESIKSIILNEIDLDLIKDMWFEKEPNVYGIGLSGLNIEENKKENRFKFQDLKIFSVFIDLLKKSNINIEFNNEKDIIHNLKLLDELYFFLITQKYSRDKYGSIKKFILNNKSFNIDNLDEKLNIFLSISDDEFDNHNSKTHSLSKEAIYFIFPKLLHNNEGWNLEAIKNYDIDVREEISKHSFGIKKQDKKYLDDAFLDDAILPPSVKVTIKQSILIFNKIIKKFSNKFQIDNVVIELAREMTQEKEMDAQKSLNRLKKSRKKIIEERLNANNIDSKMFRDKTGEISPNYIYKIYLWISQNFKDPYTGENISANDILKNNVEIDHIIPYSLCFDDSSSNKVLVFKHSNQSKGNFLPFDMISTFSENSVWNWKEYTQYVEKTFKTNLESILDKKERVKKADNLLTSSYDGYDKLGFLARNLNDTRYATILFRDQLINYSENHLIDSKKMFKVIAMNGGVTSFIRKNMSFDSGLKVKDRSIFSHHAYDAAIIALFSNKTKILYNLINPSLDGIISKRSEGYWVLEDRLTGEIRKLNYNDWQSIKNNVEVKKIAREIESHLSNLDNVVMFSRKSKRKTNKELYNETLYGIATRIDENGIKNYYKKEKFNILEDENIYLRLLNERENFIINRSNPEVIDAIIEIFETIDKNKIPARDVAKNIKYTDNKIKYNLYLKDYMRKLVDEFPDKFRKDFIEQMIAKKIFILFNPIKNTTRKIKSLRSINNNKIEDIRKKQVLEKFNTAKNEPRSFYESLNSLGAIIFKNNLNIYKKMSISSQIATFGDKNWKIDDINTYNKEKLNKYKEIYGIDETYDFYSFIFPGTILLDEKNKEFLYISSIQTLKDKIELKFLDRIEFEKKNVNSNLKPKIKREIISTKKLMSDYKIIKISPLGINKKIFE

SEQ ID NO: 330 - protein, 1269 aa, Mycoplasma gallisepticum
MNNSIKSKPEVTIGLDLGVGSVGWAIVDNETNIIHHLGSRLFSQAKTAEDRRSFRGARRLIRRRKYKLKRFINLIWKYNSYFGFKNKEDILNNYQEQQKLHNTVLNLKLEALNAKIDPKALSWILHDYLKNRGHFYEDNRDFNVYPTEELANYFGEYGYYKGIIDSKEDNDDKLEEGLTKYKFSNQHWLEEIKKVLSNQTGLPEKFKEEYESLFSYVRNYSEGPGSINSVSPYGIYHLDEKEGKVVQKYNNIWDKTIGKCSIFPDEYRAPKNSPIAMIFNEINELSTIRSYSIYLTGWFINQEFKKAYLNKLLDLLIKTNSEKPIDARQFKKLREETIAESIGKETLKDVEREEKLEKEDHKWKLKGLKLNTNGKIQYNDLSSLAKFVHKLKQHLKLDFLLEDQYTTLDKINFLQSLFVYLGKHLRYSNRVDSANLKEFSDSNKLFERVLQEQKDDLFKLFEQTDKDDEKILAQTHSLSTKAMLLAITRMTNLDNDEDNQKNNDKGWNFEAIKNFDQKFIDITKKNNNLSLKQDKRYLDDRFINDAILSPGVKRILREATKVFNAILKQFSEEYDVTKVVIELARELSEEKELENTKNYEKLIKKNSDKISERLEALDIAEDKIEDILKSPTKSYKVLLWLQQDHIDPYSQKEIAFEDILTKTEKTEIDHIIPYSISFDDSSSNKLLVLAESNQAKSNQTPYEFITSGNAGIKWEDYEAYCRKFKDGDTSLLDSTQRSKKFAKMMKTDTSSKYDIGFLARNLNDTRYATIVFRDALKDYANNHLVEDKPMFKVVCINGGVTSFLRKNFDKSWYAKKDRDKNIHHAVDASIISIFSNETKTLFNQLTQFADYKLFKNTDGSWKKIDPKTGVVTEVTDENWKQIRVRNQVSEIAKVINKCIQDSNIERKARYSRKIENKTNISLFNDTVYSAKKVGYEDQIKRKNLKTLDIHESAEENKNSKVKKQFVYRKLVNVSLLNNDKLADLFAEKEDILMYRANPWVINLAEQIFNEYTENKKIKSQNVFEKYMLDLTKEFPEKFSEAFVKSMLRNKTAIIYNVEKKVVHRIKRLKILSSELKENKLSNVIIRSKNESGTKLSYQDTINSIALMIMRSIDPTAKKQYIRVPLNTLNLHLGDQDFDLHNIDAYLKKPKFVKYLKANEIGDEYKPWRVLTSGTLLIHKKDKKLMYISSFQNLKDVIEIKNLIETEYKENDDSDPKKKKKANRFLMTLSTILNDYILLDAKDNFDILGLSKNRIDEILNSKLGLDKITK

SEQ ID NO: 331 - protein, 1224 aa, Mycoplasma gallisepticum
MNNSIKSKPEVTIGLDLGVGSVGWAIVDNETNIIHHLGSRLFSQAKTAEDRRSFRGARRLIRRRKYKLKRFINLIWKYNSYFGFKNKEDILNNYQEQQKLHNTVLNLKLEALNAKIDPKALSWILHDYLKNRGHFYEDNRDFNVYPTEELANYFGEYGYYKGIIDSKEDNDDKLEEGLTKYKFSNQHWLEEIKKVLSNQTGLPEKFKEEYESLFSYVRNYSEGPGSINSVSPYGIYHLDEKEGKVVQKYNNIWDKTIGKCSIFPDEYRAPKNSPIAMIFNEINELSTIRSYSIYLTGWFINQEFKKAYLNKLLDLLIKTNSEKPIDARQFKKLREETIAESIGKETLKDVEREEKLEKEDHKWKLKGLKLNTNGKIQYNDLSSLAKFVHKLKQHLKLDFLLEDQYTTLDKINFLQSLFVYLGKHLRYSNRVDSANLKEFSDSNKLFERVLQEQKDDLFKLFEQTDKDDEKILAQTHSLSTKAMLLAITRMTNLDNDEDNQKNNDKGWNFEAIKNFDQKFIDITKKNNNLSLKQDKRYLDDRFINDAILSPGVKRILREATKVFNAILKQFSEEYDVTKVVIELARELSEEKELENTKNYEKLIKKNSDKISERLEALDIAEDKIEDILKSPTKSYKVLLWLQQDHIDPYSQKEIAFEDILTKTEKTEIDHIIPYSISFDDSSSNKLLVLAESNQAKSNQTPYEFITSGNAGIKWEDYEAYCRKFKDGDTSLLDSTQRSKKFAKMMKTDTSSKYDIGFLARNLNDTRYATIVFRDALKDYANNHLVEDKPMFKVVCINGGVTSFLRKNFDKSWYAKKDRDKNIHHAVDASIISIFSNETKTLFNQLTQFADYKLFKNTDGSWKKIDPKTGVVTEVTDENWKQIRVRNQVSEIAKVINKCIQDSNIERKARYSRKIENKTNISLFNDTVYSAKKVGYEDQIKRKNLKTLDIHESAEENKNSKVKKQFVYRKLVNVSLLNNDKLADLFAEKEDILMYRANPWVINLAEQIFNEYTENKKIKSQNVFEKYMLDLTKEFPEKFSEAFVKSMLRNKTAIIYNVEKKVVHRIKRLKILSSELKENKLSNVIIRSKNESGTKLSYQDTINSIALMIMRSIDPTAKKQYIRVPLNTLNLHLGDQDFDLHNIDAYLKKPKFVKYLKANEIGDEYKPWRVLTSGTLLIHKKDKKLMYISSFQNLKDVIEIKNLIETEYKENDDSDPKKRRKQIGS

SEQ ID NO: 332 - protein, 1269 aa, Mycoplasma gallisepticum
MNNSIKSKPEVTIGLDLGVGSVGWAIVDNETNIIHHLGSRLFSQAKTAEDRRSFRGVRRLIRRRKYKLKRFVNLIWKYNSYFGFKNKEDILNNYQEQQKLHNTVLNLKSEALNAKIDPKALSWILHDYLKNRGHFYEDNRDFNVYPTKELAKYFDKYGYYKGIIDSKEDNDNKLEEELTKYKFSNKHWLEEVKKVLSNQTGLPEKFKEEYESLFSYVRNYSEGPGSINSVSPYGIYHLDEKEGKVVQKYNNIWDKTIGKCNIFPDEYRAPKNSPIAMIFNEINELSTIRSYSIYLTGWFINQEFKKAYLNKLLDLLIKTNGEKPIDARQFKKLREETIAESIGKETLKDVENEEKLEKEDHKWKLKGLKLNTNGKIQYNDLSSLAKFVHKLKQHLKLDFLLEDQYATLDKINFLQSLFVYLGKHLRYSNRVDSANLKEFSDSNKLFERILQKQKDGLFKLFEQTDKDDEKILAQTHSLSTKAMLLAITRMTNLDNDEDNQKNNDKGWNFEAIKNFDQKFIDITKKNNNLSLKQNKRYLDDRFINDAILSPGVKRILREATKVFNAILKQFSEEYDVTKVVIELARELSEEKELENTKNYKKLIKKNGDKISEGLKALGISEDEIKDILKSPTKSYKFLLWLQQDHIDPYSLKEIAFDDIFTKTEKFEIDHIIPYSISFDDSSSNKLLVLAESNQAKSNQTPYEFISSGNAGIKWEDYEAYCRKFKDGDSSLLDSTQRSKKFAKMMKTDTSSKYDIGFLARNLNDTRYATIVFRDALEDYANNHLVEDKPMFKVVCINGSVTSFLRKNFDDSSYAKKDRDKNIHHAVDASIISIFSNETKTLFNQLTQFADYKLFKNTDGSWKKIDPKTGVVTEVTDENWKQIRVRNQVSEIAKVIEKYIQDSNIERKARYSRKIENKTNISLFNDTVYSAKKVGYEDQIKRKNLKTLDIHESAKENKNSKVKRQFVYRKLVNVSLLNNDKLADLFAEKEDILMYRANPWVINLAEQIFNEYTENKKIKSQNVFEKYMLDLTKEFPEKFSEFLVKSMLRNKTAIIYDDKKNIVHRIKRLKMLSSELKENKLSNVIIRSKNQSGTKLSYQDTINSLALMIMRSIDPTAKKQYIRVPLNTLNLHLGDHDFDLHNMDAYLKKPKFVKYLKANEIGDEYKPWRVLTSGTLLIHKKDKKLMYISSFQNLNDVIEIKNLIETEYKENDDSDSKKKKKANRFLMTLSTILNDYILLDAKDNFDILGLSKNRIDEILNSKLGLDKIVK

SEQ ID NO: 333 - protein, 1269 aa, Mycoplasma gallisepticum; identical to SEQ ID NO: 332
  Mycoplasma gallisepticum str. F

SEQ ID NO: 334 - protein, 1270 aa, Mycoplasma gallisepticum
MNNSIKSKPEVTIGLDLGVGSVGWAIVDNETNIIHHLGSRLFSQAKTAEDRRSFRGVRRLIRRRKYKLKRFVNLIWKYNSYFGFKNKEDILNNYQEQQKLHNTVLNLKLEALNAKIDPKALSWILHDYLKNRGHFYEDNRDFNVYPTEELANYFDEFGYYKGIIDSKNDDDDKLEEGLTKYKFSNQHWLEEVKKVLSNQTGLPEKFKEEYESLFSYVRNYSEGPGSINSVSPYGIYHLDEKEGKVVQKYNNIWDKTIGKCSIFPDEYRAPKNSPIAMIFNEINELSTIRSYSIYLTGWFINQEFKKAYLNKLLDLLIKTNSEKPIDARQFKKLREETIAESIGKETLKDVESEEKLEKDDHKWKLKGLKLNTNGKIQYNDLSSLAKFVHKLKQHLKLDFLLEDQYTPLDKINFLQSLYVYLGKHLRYSNRVDSANLKEFSDSSRLFERVLQEQKDGLFKLFEQTDKDDEKILTQTHSLSTKAMLLAITRMTNLDNDEDNQKNNDKGWNFEAIKNFDQKFIDITKTNNNLSLKQDKRYLDDQFINDAILSPGVKRILREATKVFNAILKQFSEEYDVTKVVIELARELSEEKELENTKNYKKLIKKNGDKISEGLKALGIAEDKIEEILKSPTKSYKVLLWLQQDHIDPYSQKEIAFDDILTKTEKTEIDHIIPYSISFDDSSSNKLLVLAESNQAKSNQTPYEFINSGKAEITWEVYEAYCHKFKNGDSSLLDSTQRSKKFAKMMKTDTSSKYDIGFLARNLNDTRYATIVFRDALKDYANNHLVEDKPMFKVVCINGGVTSFLRKNFDPKSWYAKKDRDKNIHHAVDASIISIFSNETKTLFNQLTKFADYKLFKNTDGSWKKIDPKTGVVSEVTDENWKQIRVRNQVSEIAKVIDKYIQDSNIERKARYSRKIENKTNISLFNDTVYSAKKVGYEDQIKRKNLKTLDIHESAEENKNSKVKKQFVYRKLVNVSLLNNDKLADLFAEKEDILMYRANPWVINLAEQIFNEYTENKKIKSQNVFEKYMLDLTKEFPEKFSEAFVKSMIRNKTAIIYNVEKDVVHRIKRLKILSSELKENKWSNVIIRSKNESGTKLSYQDTINSIALMIMRSIDPTAKKQYIRVPLNTLNLHLGDQDFDLHNIDAYLKKPKFVKYLKANEIGDEYKPWRVLTSGTLLIHKKDKKLMYISSFQNLNDLIEIKNLIETEYKENVDSDPKKKKKASQILRSLSVILNDYILLDAKYNFDILGLSKNKIDEILNSKLDLDKIAK

SEQ ID NO: 335 - protein, 1236 aa, Mycoplasma mobile
MYFYKNKENKLNKKVVLGLDLGIASVGWCLTDISQKEDNKFPIILHGVRLFETVDDSDDKLLNETRRKKRGQRRRNRRLFTRKRDFIKYLIDNNIIELEFDKNPKILVRNFIEKYINPFSKNLELKYKSVTNLPIGFHNLRKAAINEKYKLDKSELIVLLYFYLSLRGAFFDNPEDTKSKEMNKNEIEIFDKNESIKNAEFPIDKIIEFYKISGKIRSTINLKFGHQDYLKEIKQVFEKQNIDFMNYEKFAMEEKSFFSRIRNYSEGPGNEKSFSKYGLYANENGNPELIINEKGQKIYTKIFKTLWESKIGKCSYDKKLYRAPKNSFSAKVFDITNKLTDWKHKNEYISERLKRKILLSRFLNKDSKSAVEKILKEENIKFENLSEIAYNKDDNKINLPIINAYHSLTTIFKKHLINFENYLISNENDLSKLMSFYKQQSEKLFVPNEKGSYEINQNNNVLHIFDAISNILNKFSTIQDRIRILEGYFEFSNLKKDVKSSEIYSEIAKLREFSGTSSLSFGAYYKFIPNLISEGSKNYSTISYEEKALQNQKNNFSHSNLFEKTWVEDLIASPTVKRSLRQTMNLLKEIFKYSEKNNLEIEKIVVEVTRSSNNKHERKKIEGINKYRKEKYEELKKVYDLPNENTTLLKKLWLLRQQQGYDAYSLRKIEANDVINKPWNYDIDHIVPRSISFDDSFSNLVIVNKLDNAKKSNDLSAKQFIEKIYGIEKLKEAKENWGNWYLRNANGKAFNDKGKFIKLYTIDNLDEFDNSDFINRNLSDTSYITNALVNHLTFSNSKYKYSVVSVNGKQTSNLRNQIAFVGIKNNKETEREWKRPEGFKSINSNDFLIREEGKNDVKDDVLIKDRSFNGHHAEDAYFITIISQYFRSFKRIERLNVNYRKETRELDDLEKNNIKFKEKASFDNFLLINALDELNEKLNQMRFSRMVITKKNTQLFNETLYSGKYDKGKNTIKKVEKLNLLDNRTDKIKKIEEFFDEDKLKENELTKLHIFNHDKNLYETLKIIWNEVKIEIKNKNLNEKNYFKYFVNKKLQEGKISFNEWVPILDNDFKIIRKIRYIKFSSEEKETDEIIFSQSNFLKIDQRQNFSFHNTLYWVQIWVYKNQKDQYCFISIDARNSKFEKDEIKINYEKLKTQKEKLQIINEEPILKINKGDLFENEEKELFYIVGRDEKPQKLEIKYILGKKIKDQKQIQKPVKKYFPNWKKVNLTYMGEIFKK

SEQ ID NO: 336 - protein, 1265 aa, Mycoplasma ovipneumoniae
  Mycoplasma ovipneumoniae SC01
MHNKKNITIGFDLGIASIGWAIIDSTTSKILDWGTRTFEERKTANERRAFRSTRRNIRRKAYRNQRFINLILKYKDLFELKNISDIQRANKKDTENYEKIISFFTEIYKKCAAKHSNILEVKVKALDSKIEKLDLIWILHDYLENRGFFYDLEEENVADKYEGIEHPSILLYDFFKKNGFFKSNSSIPKDLGGYSFSNLQWVNEIKKLFEVQEINPEFSEKFLNLFTSVRDYAKGPGSEHSASEYGIFQKDEKGKVFKKYDNIWDKTIGKCSFFVEENRSPVNYPSYEIFNLLNQLINLSTDLKTTNKKIWQLSSNDRNELLDELLKVKEKAKIISISLKKNEIKKIILKDFGFEKSDIDDQDTIEGRKIIKEEPTTKLEVTKHLLATIYSHSSDSNWININNILEFLPYLDAICIILDREKSRGQDEVLKKLTEKNIFEVLKIDREKQLDFVKSIFSNTKFNFKKIGNFSLKAIREFLPKMFEQNKNSEYLKWKDEEIRRKWEEQKSKLGKTDKKTKYLNPRIFQDEIISPGTKNTFEQAVLVLNQIIKKYSKENIIDAIIIESPREKNDKKTIEEIKKRNKKGKGKTLEKLFQILNLENKGYKLSDLETKPAKLLDRLRFYHQQDGIDLYTLDKINIDQLINGSQKYEIEHIIPYSMSYDNSQANKILTEKAENLKKGKLIASEYIKRNGDEFYNKYYEKAKELFINKYKKNKKLDSYVDLDEDSAKNRFRFLTLQDYDEFQVEFLARNLNDTRYSTKLFYHALVEHFENNEFFTYIDENSSKHKVKISTIKGHVTKYFRAKPVQKNNGPNENLNNNKPEKIEKNRENNEHHAVDAAIVAIIGNKNPQIANLLTLADNKTDKKFLLHDENYKENIETGELVKIPKFEVDKLAKVEDLKKIIQEKYEEAKKHTAIKFSRKTRTILNGGLSDETLYGFKYDEKEDKYFKIIKKKLVTSKNEELKKYFENPFGKKADGKSEYTVLMAQSHLSEFNKLKEIFEKYNGFSNKTGNAFVEYMNDLALKEPTLKAEIESAKSVEKLLYYNFKPSDQFTYHDNINNKSFKRFYKNIRIIEYKSIPIKFKILSKHDGGKSFKDTLFSLYSLVYKVYENGKESYKSIPVTSQMRNFGIDEFDFLDENLYNKEKLDIYKSDFAKPIPVNCKPVFVLKKGSILKKKSLDIDDFKETKETEEGNYYFISTISKRFNRDTAYGLKPLKLSVVKPVAEPSTNPIFKEYIPIHLDELGNEYPVKIKEHTDDEKLMCTIK

SEQ ID NO: 337 - protein, 1314 aa, Mycoplasma synoviae
MLRLYCANNLVLNNVQNLWKYLLLLIFDKKIIFLFKIKVILIRRYMENNNKEKIVIGFDLGVASVGWSIVNAETKEVIDLGVRLFSEPEKADYRRAKRTTRRLLRRKKFKREKFHKLILKNAEIFGLQSRNEILNVYKDQSSKYRNILKLKINALKEEIKPSELVWILRDYLQNRGYFYKNEKLTDEFVSNSFPSKKLHEHYEKYGFFRGSVKLDNKLDNKKDKAKEKDEEEESDAKKESEELIFSNKQWINEIVKVFENQSYLTESFKEEYLKLFNYVRPFNKGPGSKNSRTAYGVFSTDIDPETNKFKDYSNIWDKTIGKCSLFEEEIRAPKNLPSALIFNLQNEICTIKNEFTEFKNWWLNAEQKSEILKFVFTELFNWKDKKYSDKKFNKNLQDKIKKYLLNFALENFNLNEEILKNRDLENDTVLGLKGVKYYEKSNATADAALEFSSLKPLYVFIKFLKEKKLDLNYLLGLENTEILYFLDSIYLAISYSSDLKERNEWFKKLLKELYPKIKNNNLEIIENVEDIFEITDQEKFESFSKTHSLSREAFNHIIPLLLSNNEGKNYESLKHSNEELKKRTEKAELKAQQNQKYLKDNFLKEALVPLSVKTSVLQAIKIFNQIIKNFGKKYEISQVVIEMARELTKPNLEKLLNNATNSNIKILKEKLDQTEKFDDFTKKKFIDKIENSVVFRNKLFLWFEQDRKDPYTQLDIKINEIEDETEIDHVIPYSKSADDSWFNKLLVKKSTNQLKKNKTVWEYYQNESDPEAKWNKFVAWAKRIYLVQKSDKESKDNSEKNSIFKNKKPNLKFKNITKKLFDPYKDLGFLARNLNDTRYATKVFRDQLNNYSKHHSKDDENKLFKVVCMNGSITSFLRKSMWRKNEEQVYRFNFWKKDRDQFFHHAVDASIIAIFSLLTKTLYNKLRVYESYDVQRREDGVYLINKETGEVKKADKDYWKDQHNFLKIRENAIEIKNVLNNVDFQNQVRYSRKANTKLNTQLFNETLYGVKEFENNFYKLEKVNLFSRKDLRKFILEDLNEESEKNKKNENGSRKRILTEKYIVDEILQILENEEFKDSKSDINALNKYMDSLPSKFSEFFSQDFINKCKKENSLILTFDAIKHNDPKKVIKIKNLKFFREDATLKNKQAVHKDSKNQIKSFYESYKCVGFIWLKNKNDLEESIFVPINSRVIHFGDKDKDIFDFDSYNKEKLLNEINLKRPENKKFNSINEIEFVKFVKPGALLLNFENQQIYYISTLESSSLRAKIKLLNKMDKGKAVSMKKITNPDEYKIIEHVNPLGINLNWTKKLENNN

SEQ ID NO: 338 - protein, 1304 aa, Mycoplasma synoviae
  Mycoplasma synoviae 53
MLNNVQNLWKYLLLLIFDKKIIFLFKIKVILIRRYMENNNKEKIVIGFDLGVASVGWSIVNAETKEVIDLGVRLFSEPEKADYRRAKRTTRRLLRRKKFKREKFHKLILKNAEIFGLQSRNEILNVYKDQSSKYRNILKLKINALKEEIKPSELVWILRDYLQNRGYFYKNEKLTDEFVSNSFPSKKLHEHYEKYGFFRGSVKLDNKLDNKKDKAKEKDEEEESDAKKESEELIFSNKQWINEIVKVFENQSYLTESFKEEYLKLFNYVRPFNKGPGSKNSRTAYGVFSTDIDPETNKFKDYSNIWDKTIGKCSLFEEEIRAPKNLPSALIFNLQNEICTIKNEFTEFKNWWLNAEQKSEILKFVFTELFNWKDKKYSDKKFNKNLQDKIKKYLLNFALENFNLNEEILKNRDLENDTVLGLKGVKYYEKSNATADAALEFSSLKPLYVFIKFLKEKKLDLNYLLGLENTEILYFLDSIYLAISYSSDLKERNEWFKKLLKELYPKIKNNNLEIIENVEDIFEITDQEKFESFSKTHSLSREAFNHIIPLLLSNNEGKNYESLKHSNEELKKRTEKAELKAQQNQKYLKDNFLKEALVPLSVKTSVLQAIKIFNQIIKNFGKKYEISQVVIEMARELTKPNLEKLLNNATNSNIKILKEKLDQTEKFDDFTKKKFIDKIENSVVFRNKLFLWFEQDRKDPYTQLDIKINEIEDETEIDHVIPYSKSADDSWFNKLLVKKSTNQLKKNKTVWEYYQNESDPEAKWNKFVAWAKRIYLVQKSDKESKDNSEKNSIFKNKKPNLKFKNITKKLFDPYKDLGFLARNLNDTRYATKVFRDQLNNYSKHHSKDDENKLFKVVCMNGSITSFLRKSMWRKNEEQVYRFNFWKKDRDQFFHHAVDASIIAIFSLLTKTLYNKLRVYESYDVQRREDGVYLINKETGEVKKADKDYWKDQHNFLKIRENAIEIKNVLNNVDFQNQVRYSRKANTKLNTQLFNETLYGVKEFENNFYKLEKVNLFSRKDLRKFILEDLNEESEKNKKNENGSRKRILTEKYIVDEILQILENEEFKDSKSDINALNKYMDSLPSKFSEFFSQDFINKCKKENSLILTFDAIKHNDPKKVIKIKNLKFFREDATLKNKQAVHKDSKNQIKSFYESYKCVGFIWLKNKNDLEESIFVPINSRVIHFGDKDKDIFDFDSYNKEKLLNEINLKRPENKKFNSINEIEFVKFVKPGALLLNFENQQIYYISTLESSSLRAKIKLLNKMDKGKAVSMKKITNPDEYKIIEHVNPLGINLNWTKKLENNN

SEQ ID NO: 339 - protein, 1401 aa, Myroides injenensis
  Myroides injenensis M09-0166
MKRILGLDLGTTSIGWAYVHEAENVNETSSIQKVGVRVNPLTTEEQTNFEKGKPITTNASRTLARSARRNLQRYKLRRDNLIQILKENNWINNTTSLTETGNHSTFETYELRNKAASEKLTLDQLSRVLLMLNKKRGYKSSRKVNSKEEGQLIDGMEVAKKLYHEQLTPGQLSLQLMNQGVKKLPDYYRSDLNQELESIWNFQQQFYPNILTDKFKEEINGKGLTSTSSAFWNIYNFNTAENKGSRDEKKKQALQWRSEALSKQLSKEIVAYIIADLNGQIYNSSGYLGAISDRSKELYFNNLTVGQYLFKQLKSNPHTSLKNQVFYRQDYLNEFEKIWETQSKFYPKELTAALKREIRDVIIFYQRKLKSQKGLISFCEFEQKQKTINGKTKTIGHRVIPKSSPLFQEFKIWQQLHNVVLRNKKTNEIVSLADEQKVHLFEELNLKGKLKSNQVLKLIENKPKDWELNYTELEGNNTNKALYNAYLDILDIEGYDVRNELKVKLNKDDIELSDLDVNASEIKEMIFSVFKHLGINTEILEFDATLEDKVFEKQASYQLWHLLYSYEEDNSPTGLDRLYNLLHKKFGFKLNHAKLIGNVLFQDDYGSLSSKAIKNIFPYITENNYYTACELAGYKHSKHSLTKEENETRELKNRLTILPKNSLRNPVVEKIINQMINVVNTLIDEENNILIAQGKEPNFQFDEIRIELARELKKNAKEREELTKSINKSKTDHEKIIKILQKEDGIKNPTRNDIVRFKLYSELKNNGYKDLYTNEYIERKDIFTKEYDIEHIIPQSKLFDDSFSNKTLVRRNVNLKKGNQTAYDFILCEYGQEKANEFETRITNLYNLGKDEGISKSKFKKLLMQESEIGNGFIERDLRETQYIAKKAKSLLLEITRNVISTSGSITDRLREDWGLINVMKELNLQKYRDAGLTEFVKMKDGNKKEVIIDWTKRNDHRHHAMDALTIAFTKHNHIQYLNHLNARKNVNNELHNNIIAIEKLETTLVSDERGNKKRIFKEPIANFRTIAKSHLEAILVSHKAKNKVVTKNINKISGKKISQQTLTPRGQLHKETIYGKIRQYVSKQEKVGPKFTIEVIEQVSNPTYRNLLLKRLEENNNDPKKAFGGKNSLNKNPIYINLEKNIKVPEVLKLVWLEDNYTIRKEISPDLKIDKVIDQGVKQILQNRLAQYKGDSKLAFSNLDANPIWLNEDKGIAIKRVTISGIATAQPLHRKKDHLGQPILDHNGQEIPVDFISTGNNHHVAIYEDENGKLQESVVSHFEAVERVNQKLPIIDKTFNQHLGWKFLFTMKQNELFLFPSDDFNPNEIDLFDKQNYTVISKHLFRIQKLSTKDYSFRHHLETNVEEIKDLKTITWRREGLNGIQNIIKVRTNHLGEIIHIGEY

SEQ ID NO: 340 - protein, 1466 aa, Myroides odoratus
  Myroides odoratus DSM 2801
MKNILGLDLGTNSIGWALVKEDFENKQGEILGLGSRIIPMSQDILGEFGRGNSISQTADRTGYRGVRRLRERHLLRRERLHRVLNILGFLPNHYAKEIDFTKRLGKFINHAEPKLSFDKEFIFKDSFNEMLKDFQQNQPGFIINKHGEEALVPYDWTIYYLRKKALTQKIDKEELAWILLNFNQKRGYYQLRGEEEEENTNKLVEFYSLKIIDVIADNEVNKKGEVWYSLHLENGWIYRRSSKISLVDWKDKVRDFIVTTDVNDDGSEKLDKDGVVKRSFRAPSADDWTLLKKKTEQDIDNSNKTVGAYIYENLLLNPKQKIKGKLVRTIERKFYKDELKQILEKQKEFHQELQNEQLLQDCVRELYKYNEQHQQMLESKDFVHLFLNDIIFYQRPLRSQKSLISNCTLEKRVSRDGVVFPIKVISKSNPYYQEFRLLQWLQNLAIYRKDDDVNVTQEFLNSIESWENLLQFLNAKKEIKQEQLIKFLLEQKGLKGNSLKTAILTYRWNYVTDKVYPMNETRSLIQDKLKKVENVATDFLSFDNEMALWHIIYSVNDKIEYEKALAKFASKHNLDEISFVESFKKFPPFKSDYGSFSEKAIKKLLPLMRFGSVWNKNNIVPSVLDRIDKILTGEYDEKIKIRVREKAEQFQLNQIEDFQNLPLWLAQYVVYDRHSEAEIAGKWNSVKDLENYLKEFKQHSLRNPIVEQIITETLRVVKDIWQQYGNGVQNFFDEIHIELGREMKNTADERKRITNSVTENENTNLRIKALLVELKEDTNIENVRPHSPMQQEILKIYEEGVLNAVENIDEDILKISKTAQPSKSELIRYKLWLEQKYQSPYTGEMIPLSRLFTSDYEIEHVIPQSRYFDDSLSNKVICEAAVNKRKDNQLGLEFIKNHHSEKIELGNGRTAQVLEVEAYESFVKKNYDKNRGKRNKLLLEDVPEKMIERQLNDTRYISKFVTHLLSNIVRKDEVNSKDDGINSKNIIPGNGKITSQLKQDWGLNDVWNELILPRFERMNNLTNSTDFTSTNTNGKIIPTVPLEYSKGFSKKRIDHRHHALDALVIALATRDHVNLLNNESALPKKDRTKEEQKSFRFDLQVNLRNKEKYFNVKEGREKEKFTTFKKPWNTLTQDTRDALENMVVSFKQNLRVINKATNYYESYTDENGNLRLDKYGNPKKELISQKGTNWAIRKSLHKETVSGQIHLDRVKVTKGKIVTATRKSLDSSFNEKSIESITDTGIQKILRNYLKAKDNKPDVAFSPEGIEELNKSISVYNEGKNHQPIIKVRIFEQGSKFPVGETGNKIAKFVEAAKGTNLFFGIYQDKTGKRSYDTIPLNLVIERLKQGLSPVPETNEKGHQLLFHLSPNDLVYVPTIDDNEQLDSNRVYKFTDSSDTTCNFIPSNISAIIFNINSKEQEKRGINYPIQNELGVGSPQSKNQKSFDGFMIKEVCIKLKVDRLGNISKT

SEQ ID NO: 341 - protein, 1077 aa, Neisseria bacilliformis
  Neisseria bacilliformis ATCC BAA-1200
MQQKPQRYILGLDLGIASVGWACVWADENEHPTGLLDCGVRTFERAEVPKTGDSLALARRQARSVRRLIRRRAHRLLRLRRLLKREGVLLSADFNENGLVRGLPIDAWALRVAGLDRKLSNKEWAAVLLHLVKHRGYLSQRKNETQSKDKELGRLLAGVNGNREALQNRSDEYRTAAELAVKKFAAENNGSLRNKGGDYSHTFDRKDLQRELHLLFERQRALDNPFTSSEMEAAVDELLMKQRSALQGEAVLKMLGRCTFEPSEYKAAKNTYSAERFVWLTKLNNLRIQYNGEERALSEAERRLLLDEPYQKAKLTYKQVRTILELPESAVFKGLRYGHGEDGLKAESGTLMEMKAYHAVRKALKDAGLEGEWENRIRNPELLDAIGTAFSLYKTDEDIRANLAAFRLSENVLEALLAGLNFDKFVHLSLKALAKILPLMEQGMRYDEACKEAYGDHYGAKEQEDHRLLPPFVADDIRNPVVFRTLTQARKIVNEIVRRYGSPLRVHIETGREVGKSFSDRKEIEKRQEENRKERERAAAHFKELFPNFAGEPKAQDILKLRLYEQQHGKCLYSGKEIDLRRLPEKGYVEIDHALPFSRTWDDSFNNKVLVLGKENQDKRNRTPYEYLDGKGNSGAWRAFAERVSGCRFPYAKKQRLLTQKLDEKTEQGFLERNLNDTRYVARFLCQFIEEKMHLEGAGKKRVFASNGQITALLRGFWGLKKVREENDRHHALDAVVVACSSVSMQQKITRHFRYREELEHIDRETGEVIHGFPQPWEFFRQEVMTRVFSDDPVSELAEKLDSRPEAVHEFVTPLFVSRAPHRKVTGQGHLETIRSAKRLDEKISVVKLPLTQLKTKDIERIVGYPNREPALYDALAARLAAFKDDPAKAFSEPFYKTGKDGKCGVLVKAVRVENVQKSGLLVRKDESGKMQGVADNATMVRVDVFGKNGKNYLVPVYAWQVEKGELPNRAVVAYADEEDWDEMDDSFEFKFSLYPNDLVEVVTKKDKFFGYYSGFNRATGAINIKEHDLSKSKVKNGVYEGIGVKTAQSFQKYQVDTLGKTIRLCKPEKRMGFKKK

SEQ ID NO: 342 - protein, 1082 aa, Neisseria cinerea
  Neisseria cinerea ATCC 14685
MAAFKPNPMNYILGLDIGIASVGWAIVEIDEEENPIRLIDLGVRVFERAEVPKTGDSLAAARRLARSVRRLTRRRAHRLLRARRLLKREGVLQAADFDENGLIKSLPNTPWQLRAAALDRKLTPLEWSAVLLHLIKHRGYLSQRKNEGETADKELGALLKGVADNTHALQTGDFRTPAELALNKFEKESGHIRNQRGDYSHTFNRKDLQAELNLLFEKQKEFGNPHVSDGLKEGIETLLMTQRPALSGDAVQKMLGHCTFEPTEPKAAKNTYTAERFVWLTKLNNLRILEQGSERPLTDTERATLMDEPYRKSKLTYAQARKLLDLDDTAFFKGLRYGKDNAEASTLMEMKAYHAISRALEKEGLKDKKSPLNLSPELQDEIGTAFSLFKTDEDITGRLKDRVQPEILEALLKHISFDKFVQISLKALRRIVPLMEQGNRYDEACTEIYGDHYGKKNTEEKIYLPPIPADEIRNPVVLRALSQARKVINGVVRRYGSPARIHIETAREVGKSFKDRKEIEKRQEENRKDREKSAAKFREYFPNFVGEPKSKDILKLRLYEQQHGKCLYSGKEINLGRLNEKGYVEIDHALPFSRTWDDSFNNKVLALGSENQNKGNQTPYEYFNGKDNSREWQEFKARVETSRFPRSKKQRILLQKFDEDGFKERNLNDTRYINRFLCQFVADHMLLTGKGKRRVFASNGQITNLLRGFWGLRKVRAENDRHHALDAVVVACSTIAMQQKITRFVRYKEMNAFDGKTIDKETGEVLHQKAHFPQPWEFFAQEVMIRVFGKPDGKPEFEEADTPEKLRTLLAEKLSSRPEAVHKYVTPLFISRAPNRKMSGQGHMETVKSAKRLDEGISVLRVPLTQLKLKDLEKMVNREREPKLYEALKARLEAHKDDPAKAFAEPFYKYDKAGNRTQQVKAVRVEQVQKTGVWVHNHNGIADNATIVRVDVFEKGGKYYLVPIYSWQVAKGILPDRAVVQGKDEEDWTVMDDSFEFKFVLYANDLIKLTAKKNEFLGYFVSLNRATGAIDIRTHDTDSTKGKNGIFQSVGVKTALSFQKYQIDELGKEIRPCRLKKRPPVR

SEQ ID NO: 343 - protein, 1081 aa, Neisseria flavescens
  Neisseria flavescens SK114
MTAFKPNPINYILGLDIGIASVGWAMVEIDEEENPIRLIDLGVRVFERAEVPKTGDSLAAARRLARSVRRLTRRRAHRLLRARRLLKREGVLQAADFDENGLIKSLPNTPWQLRAAALDRKLTPLEWSAVLLHLIKHRGYLSQRKNEGETADKELGALLKGVADNAHALQTGDFRTPAELAVNKFEKESGHIRNQRGDYSHTFSRKDLQAELVLLFEKQKEFGNPHISDGLKEGIETLLMAQRPALSGDAVQKMLGYCTFEPTEPKAAKNTYTAERFIWLTKLNNLRILEQGSERPLTDTERATLIDMPYKNKLTYAKARELLGLDDTAFFKGLRYGKDNAESATLMEMKAYHAIRRALEKEGLKDKKSPLSLSPELQDEIGTAFSLFKTDEDITGRLKGCLQPEILDALLKHINFDKFVQISLKALRRIVPLMEQGKRYDEACAETYGDHYGEKNSEEMLYLPPIPADEIRNPVVLRALSQARKVINGVVRRYGSPARIHIETAREVGKSFKDRKEIEKRQEENRKDREKAAAKFREYFPNFVGEPKSKDILKLRLYEQQHGKCLYSGKAIDIRRLNGKGYVEIDHALPFSRTWDDSFNNKVLVLGSENQNKGNRTPYEYLNGKDNSREWLEFKARVETSRFPHSKKQRVLLQKFDEKGFKERNLNDTRYVNRFLCQFVADHMQLTGKGKRRVFASNGQITNLLRGFWGLHKVRAENDRHHALDAVVVACSTVAMQQKITCFVRYKEMNAFDGKTVDKETGEVLHQKTHFPQPWEFFAQEVMIRVFGKPDGKPEFEEADTPEKLRALLAEKLSSRPEAVHEYVTPLFVSRAPNRKMSGAHKDTLRSAKRFVKHNEKISVKRVWLTEIKLADLENMVNYKNGREIELYEALKARLGAYGGNAKQAFDPKDNPFYKKGGQLVKAVRVEKTQESGVLLNKKNAYTIADNGDMVRVDVFCKVDKKGKNQYFIVPIYAWQVAENILPDIDCKGYRIDDSYTFCFSLHKYDLIAFQKDEKSKVEFAYYINCDSSNGRFYLAWHDKGSKEQQFRISTQNLVLMQKYQIDELGKEIRPCRLKKRPPVR

SEQ ID NO: 344 - protein, 1082 aa, Neisseria lactamica
MAAFKPNPMNYILGLDIGIASVGWAMVEIDKEENPIRLIDLGVRVFERAEVPKTGDSLAMARRLARSVRRLTRRRAHRLLRARRLLKREGVLQDADFDENGLVKSLPNTPWQLRAAALDRKLTCLEWSAVLLHLIKHRGYLSQRKNEGETADKELGALLKGVADNAHALQTGDFRTPAELALNKFEKESGHIRNQRGDYSHTFSRKDLQAELNLLFEKQKEFSNPHVSDSLKEGIETLLMAQRPALSGDAVQKMLGHCTFEPAEPKAAKNTYTAERFIWLTKLNNLRILEQGSERPLTDTERATLMDEPYRKSKLTYAQARKLLGLEDTAFFKGLRYGKDNAEAPTLMEMKAYHAISRALEKEGLKDKKSPLNLSTELQDEIGTAFSLFKTDKDITGRLKDRVQPEILEALLKHISFDKFVQISLKALRRIVPLMEQGKRYDEACAEIYGDHYCKKNAEEKIYLPPIPADEIRNPVVLRALSQARKVINCVVRRYGSPARIHIETAREVGKSFKDRKEIEKRQEENRKDREKAAAKFREYFPNFVGEPKSKDILKLRLYEQQHGKCLYSGKEINLVRLNEKGYVEIDHALPFSRTWDDSFNNKVLVLGSENQNKGNQTPYEYFNGKDNSREWQEFKARVETSRFPRSKKQRILLQKFDEEGFKERNLNDTRYVNRFLCQFVADHILLTGKGKRRVFASNGQITNLLRGFWGLRKVRAENDRHHALDAVVVACSTVAMQQKITRFVRYKEMNAFDGKTIDKETGEVLHQKAHFPQPWEFFAQEVMIRVFGKPDGKPEFEEADTPEKLRTLLAEKLSSRPEAVHEYVTPLFVSRAPNRKMSGQGHMETVKSAKRLDEGISVLRVPLTQLKLKGLEKMVNREREPKLYDALKAQLETHKDNPAKAFAEPFYKYDKAGNRTQQVKAVRIEQVQKTGVWVRNHNGIADNATMVRVDVFEKGGKYYLVPIYSWQVAKGILPDRAVVAFKDEEDWTVMDDSFEFRFVLYANDLIKLTAKKNEFLGYFVSLNRATGAIDIRTHDTDSTKGKNGIFQSVGVKTALSFQKNQIDELGKEIRPCRLKKRPPVR

SEQ ID NO: 345 - protein, 1082 aa, Neisseria meningitidis
MAAFKPNPINYILGLDIGIASVGWAMVEIDEDENPICLIDLGVRVFERAEVPKTGDSLAMARRLARSVRRLTRRRAHRLLRARRLLKREGVLQAADFDENGLIKSLPNTPWQLRAAALDRKLTPLEWSAVLLHLIKHRGYLSQRKNEGETADKELGALLKGVADNAHALQTGDFRTPAELALNKFEKESGHIRNQRGDYSHTFSRKDLQAELNLLFEKQKEFGNPHISDGLKEGIETLLMTQRPALSGDAVQKMLGHCTFEPAEPKAAKNTYTAERFIWLTKLNNLRILEQGSERPLTDTERTTLIDEPYRKSKLTYAQARKLLELDNTAFFKGLRYGKDNAEASTLMEMKAYHAISRALEKEGLKDKKSPLNLSPELQDEIGTAFSLFKTDEDITGRLKDRVQPEILEALLKHISFDKFVQISLKALRRIVPLMEQGKRYDEACAEIYGDHYGKKNTEEKIDLPPIPADEIRNPVVLRALSQARKVINGVVRRYGSPARIHIETAREVGKSFKDRKEIEKRQEENRKDREKAATKFREYFPNFVGEPKSKDILKLRLYEQQHGKCLYSGKEINLGRLNEKGYVEIDHALPFSRTWDDSFNNKVLVLGSENQNKGNQTPYEYFNGKDNSREWQEFKARVETSRFPRSKKQRILLQKFDEEGFKERNLNDTRYVNRFLCQFVADHMLLTGKGKRRVFASNGQITNLLRGFWGLRKVRAENDRHHALDAVVVACSTVAMQQKITRFVRYKEMNAFDGKTIDKETGEVLHQKTHFPQPWEFFAQEVMIRVFGKPDGKPEFEEADTPEKLRTLLAEKLSSRPEAVHEYVTPLFVSRAPNRKMSGQGHMETVKSAKRLDEGVSVLRVPLTQLKLKDLEKMVNREREPKLYEALKARLEAHKDDPAKAFAEPFYKYDKAGNRTQQVKAVRVEQVQKTGVWVRNHNGIADNATMVRVDVFEKGDKYYLVPIYSWQVAKGILPDRAVVQGKDEEDWQLIDDSFNFKFSLHPNDLVEVITKKARMFGYFASCHRGTGNINIRIHDLDHKIGKNGILEGIGVKTALSFQKYQIDELGKEIRPCRLKKRPPVR

SEQ ID NO: 346 - protein, 1082 aa, Neisseria meningitidis
  Neisseria meningitidis 2007056
MAAFKPNPINYILGLDIGIASVGWAMVEIDEDENPICLIDLGVRVFERAEVPKTGDSLAMARRLARSVRRLTRRRAHRLLRARRLLKREGVLQAADFDENGLIKSLPNTPWQLRAAALDRKLTPLEWSAVLLHLIKHRGYLSQRKNEGETADKELGALLKGVADNAHALQTGDFRTPAELALNKFEKESGHIRNQRGDYSHTFSRKDLQAELILLFEKQKEFGNPHVSGGLKEGIETLLMTQRPALSGDAVQKMLGHCTFEPAEPKAAKNTYTAERFIWLTKLNNLRILEQGSERPLTDTERATLMDEPYRKSKLTYAQARKLLGLEDTAFFKGLRYGKDNAEASTLMEMKAYHAISRALEKEGLKDKKSPLNLSPELQDEIGTAFSLFKTDEDITGRLKDRIQPEILEALLKHISFDKFVQISLKALRRIVPLMEQGKRYDEACAEIYGDHYGKKNTEEKIYLPPIPADEIRNPVVLRALSQARKVINGVVRRYGSPARIHIETAREVGKSFKDRKEIEKRQEENRKDREKAAAKFREYFPNFVGEPKSKDILKLRLYEQQHGKCLYSGKEINLGRLNEKGYVEIDHALPFSRTWDDSFNNKVLVLGSENQNKGNQTPYEYFNGKDNSREWQEFKARVETSRFPRSKKQRILLQKFDEDGFKERNLNDTRYVNRFLCQFVADRMRLTGKGKKRVFASNGQITNLLRGFWGLRKVRAENDRHHALDAVVVACSTVAMQQKITRFVRYKEMNAFDGKTIDKETGEVLHQKTHFPQPWEFFAQEVMIRVFGKPDGKPEFEEADTPEKLRTLLAEKLSSRPEAVHEYVTPLFVSRAPNRKMSGQGHMETVKSAKRLDEGVSVLRVPLTQLKLKDLEKMVNREREPKLYEALKARLEAHKDDPAKAFAEPFYKYDKAGNRTQQVKAVRVEQVQKTGVWVRNHNGIADNATMVRVDVFEKGDKYYLVPIYSWQVAKGILPDRAVVQGKDEEDWQLIDDSFNFKFSLHPNDLVEVITKKARMFGYFASCHRGTGNINIRIHDLDHKIGKNGILEGIGVKTALSFQKYQIDELGEEIRPCRLKKRPPVR

SEQ ID NO: 347 - protein, 1082 aa, Neisseria meningitidis
  Neisseria meningitidis 63049
MAAFKPNPINYILGLDIGIASVGWAMVEIDEEENPIRLIDLSVRVFERAEVPKTGDSLAMARRLARSVRRLTRRRAHRLLRARRLLKREGVLQAADFDENGLIKSLPNTPWQLRAAALDRKLTPLEWSAVLLHLIKHRGYLSQRKNEGETADKELGALLKGVADNAHALQTGDFRTPAELALNKFEKESGHIRNQRGDYSHTFSRKDLQAELILLFEKQKEFGNPHVSGGLKEGIETLLMTQRPALSGDAVQKMLGHCTFEPAEPKAAKNTYTAERFVWLTKLNNLRILEQGSERPLTDTERATLMDEPYRKSKLTYAQARKLLGLEDTAFFKGLRYGKDNAEASTLMEMKAYHAISRALEKEGLKDKKSPLRLSPELQDEIGTAFSLFKTDEDITGRLKDRVQPEILEALLKHISFDKFVQISLKALRRIVPLMEQGKRYDEACAEIYGDHYGKKNAEEKIYLPPIPADEIRNPVVLRALSQARKVINGVVRRYGSPARIHIETAREVGKSFKDRKEIEKRQEENRKDREKAAAKFREYFPNFVGEPKSKDILKLRLYEQQHGKCLYSGKEINLGRLNEKGYVEIDHALPFSRTWDDSFNNKVLVLGSENQNKGNQTPYEYFNGKDNSREWQEFKARVETSRFPRSKKQRILLQKFDEDGFKERNLNDTRYVNRFLCQFVADRMRLTGKGKKRVFASNGQITNLLRGFWGLRKVRAENDRHHALDAVVVACSTVAMQQKITRFVRYKEMNAFDGKTIDKETGEVLHQKTHFPQPWEFFAQEVMIRVFGKPDGKPEFEEADTPEKLRTLLAEKLSSRPEAVHEYVTPLFVSRAPNRKMSGQGHMETVKSAKRLDEGVSVLRVPLTQLKLKDLEKMVNREREPKLYEALKARLEAHKDDPAKAFAEPFYKYDKAGNRTQQVKAVRVEQVQKTGVWVRNHNGIADNATMVRVDVFEKGDKYYLVPIYSWQVAKGILPDRAVVQGKDEEDWQLIDDSFNFKFSLHPNDLVEVITKKARMFGYFASCHRGTGNINIRIHDLDHKIGKNGILEGIGVKTALSFQKYQIDELGKEIRPCRLKKRPPVR

SEQ ID NO: 348 - protein, 1082 aa, Neisseria meningitidis
MAAFKPNSINYILGLDIGIASVGWAMVEIDEEENPIRLIDLGVRVFERAEVPKTGDSLAMARRLARSVRRLTRRRAHRLLRTRRLLKREGVLQAANFDENGLIKSLPNTPWQLRAAALDRKLTPLEWSAVLLHLIKHRGYLSQRKNEGETADKELGALLKGVAGNAHALQTGDFRTPAELALNKFEKESGHIRNQRSDYSHTFSRKDLQAELILLFEKQKEFGNPHVSGGLKEGIETLLMTQRPALSGDAVQKMLGHCTFEPAEPKAAKNTYTAERFIWLTKLNNLRILEQGSERPLTDTERATLMDEPYRKSKLTYAQARKLLGLEDTAFFKGLRYGKDNAEASTLMEMKAYHAISRALEKEGLKDKKSPLNLSPELQDEIGTAFSLFKTDEDITGRLKDRIQPEILEALLKHISFDKFVQISLKALRRIVPLMEQGKRYDEACAEIYGDHYGKKNTEEKIYLPPIPADEIRNPVVLRALSQARKVINGVVRRYGSPARIHIETAREVGKSFKDRKEIEKRQEENRKDREKAAAKFREYFPNFVGEPKSKDILKLRLYEQQHGKCLYSGKEINLGRLNEKGYVEIDHALPFSRTWDDSFNNKVLVLGSENQNKGNQTPYEYFNGKDNSREWQEFKARVETSRFPRSKKQRILLQKFDEDGFKERNLNDTRYVNRFLCQFVADRMRLTGKGKKRVFASNGQITNLLRGFWGLRKVRAENDRHHALDAVVVACSTVAMQQKITRFVRYKEMNAFDGKTIDKETGEVLHQKTHFPQPWEFFAQEVMIRVFGKPDGKPEFEEADTLEKLRTLLAEKLSSRPEAVHEYVTPLFVSRAPNRKMSGQGHMETVKSAKRLDEGVSVLRVPLTQLKLKDLEKMVNREREPKLYEALKARLEAHKDDPAKAFAEPFYKYDKAGNRTQQVKAVRVEQVQKTGVWVRNHNGIADNATMVRVDVFEKGDKYYLVPIYSWQVAKGILPDRAVVQGKDEEDWQLIDDSFNFKFSLHPNDLVEVITKKARMFGYFASCHRGTGNINIRIHDLDHKIGKNGILEGIGVKTALSFQKYQIDELGKEIRPCRLKKRPPVR

SEQ ID NO: 349 - protein, 1082 aa, Neisseria meningitidis
  Neisseria meningitidis 92045
MAAFKPNPINYILGLDIGIASVGWAMVEIDEEENPIRLIDLGVRVFERAEVPKTGDSLAMARRLARSVRRLTRRRAHRLLRARRLLKREGVLQAADFDENGLIKSLPNTPWQLRAAALDRKLTPLEWSAVLLHLIKHRGYLSQRKNEGETADKELGALLKGVADNAHALQTGDFRTPAELALNKFEKECGHIRNQRGDYSHTFSRKDLQAELNLLFEKQKEFGNPHVSGGLKEGIETLLMTQRPALSGDAVQKMLGHCTFEPAEPKAAKNTYTAERFIWLTKLNNLRILEQGSERPLTDTERATLMDEPYRKSKLTYAQARKLLGLEDTAFFKGLRYGKDNAEASTLMEMKAYHAISRALEKEGLKDKKSPLNLSPELQDEIGTAFSLFKTDEDITGRLKDRIQPEILEALLKHISFDKFVQISLKALRRIVPLMEQGKRYDEACAEIYGDHYGKKNTEEKIYLPPIPADEIRNPVVLRALSQARKVINGVVRRYGSPARIHIETAREVGKSFKDRKEIEKRQEENRKDREKAAAKFREYFPNFVGEPKSKDILKLRLYEQQHGKCLYSGKEINLVRLNEKGYVEIDHALPFSRTWDDSFNNKVLVLGSENQNKGNQTPYEYFNGKDNSREWQEFKARVETSRFPRSKKQRILLQKFDEEGFKERNLNDTRYVNRFLCQFVADHILLTGKGKRRVFASNGQITNLLRGFWGLRKVRAENDRHHALDAVVVACSTVAMQQKITRFVRYKEMNAFDGKTIDKETGEVLHQKTHFPQPWEFFAQEVMIRVFGKPDGKPEFEEADTPEKLRTLLAEKLSSRPEAVHEYVTPLFVSRAPNRKMSGQGHMETVKSAKRLDEGVSVLRVPLTQLKLKDLEKMVNREREPKLYEALKARLEAHKDDPAKAFAEPFYKYDKAGNRTQQVKAVRVEQVQKTGVWVRNHNGIADNATMVRVDVFEKGGKYYLVPIYSWQVAKGILPDRAVVQGKDEEDWQLIDDSFNFKFSLHPNDLVEVITKKARMFGYFASCHRGTGNINIRIHDLDHKIGKNGILEGIGVKTALSFQKYQIDELGKEIRPCRLKKRPPVR

SEQ ID NO: 350 - protein, 1081 aa, Neisseria meningitidis
  Neisseria meningitidis 93003
MAAFKPNPINYILGLDIGIASVGWAMVEIDEEENPIRLIDLGVRVFERAEVPKTGDSLAMARRLARSVRRLTRRRAHRLLRARRLLKREGVLQAADFDENGLIKSLPNTPWQLRAAALDRKLTPLEWSAVLLHLIKHRGYLSQRKNEGETADKELGALLKGVADNAHALQTGDFRTPAELALNKFEKESGHIRNQRGDYSHTFSRKDLQAELILLFEKQKEFGNPHVSGGLKEGIETLLMTQRPALSGDAVQKMLGHCTFEPAEPKAAKNTYTAERFIWLTKLNNLRILEQGSERPLTDTERATLMDEPYRKSKLTYAQARKLLGLEDTAFFKGLRYGKDNAEASTLMEMKAYHAISRALEKEGLKDKKSPLNLSPELQDEIGTAFSLFKTDEDITGRLKDRVQPEILEALLKHISFDKFVQISLKALRRIVPLMEQGKRYDEACAEIYGDHYGKKNTEEEIYLPPITADEIRNPVVLRALSQARKVINAVVRRYGSPARIHIETAREVGKSFKDRKEIEKRQEENRKDREKAAAKFREYFPNFVGEPKSKDILKLRLYEQQHGKCLYSGKEINLVRLNEKGYVEIDHALPFSRTWDDSFNNKVLVLGSENQNKGNQTPYEYFNGKENSREWQEFKARVETSRFPRSKKQRILLQKFDEDGFKERNLNDTRYVNRFLCQFVADRMRLTGKGKKRVFASNGQITNLLRGFWGLHKVRAENDRHHALDAVVVACSTIAMQQKITRFVRYKEMNAFDGKTIDKETGEVLHQKAHFPQPWEFFAQEVMIRVFGKPDGKPEFEEADTPEKLRTLLAEKLSSRPEAVHEYVTPLFVSRAPNRKMSGQGHMETVKSAKRLDEGISVLRVPLTQLKLKDLEKMVNRAREPKLYEALKARLEAHKDDPAKAFAEPFYKYDKAGNRTQQVKAVRVEQVQKTGVWVRNHNGIADNATMVRVDVFEKAGKYYLVPIYSWQVAKGILPDRAVVAYADEEDWTVIDESFRFKFVLYSNDLIKVQLKKDSFLGYFSGLDRATGAISLREHDLEKSKGKDGMHRIGVKTALSFQKYQIDEMGKEIRPCRLKKRPPVR

SEQ ID NO: 351 - protein, 1081 aa, Neisseria meningitidis
  Neisseria meningitidis 93004
MAAFKPNPINYILGLDIGIASVGWAMVEIDEDENPICLIDLGVRVFERAEVPKTGDSLAMARRLARSVRRLTRRRAHRLLRARRLLKREGVLQAADFDENGLIKSLPNTPWQLRAAALDRKLTPLEWSAVLLHLIKHRGYLSQRKNEGETADKELGALLKGVADNAHALQTGDFRTPAKLALNKFEKESGHIRNQRGDYSHTFSRKDLQAELNLLFEKQKEFGNPHISDGLKEGIETLLMTQRPALSGDAVQKMLGHCTFEPTEPKAAKNTYTAERFVWLTKLNNLRILEQGSEQPLTDTQRAKLMDEPYRKSKLTYAQARKLLGLEDTAFFKGLRYGKDNAEASTLMEMKAYHAISRALEKEGLKDKKSPLNLSPELQDEIGTAFSLFKTDEDITGRLKDRVQPEILEALLKHISFDKFVQISLKALRRIVPLMEQGKRYNEACAEIYGDHYGKKNTEEKIYLPPIPADEIRNPVVLRALSQARKVINGVVRRYGSPARIHIETAREVGKSFKDRKEIEKRQEENRKDREKAAAKFQEYFPNFVGEPKSKDILKLRLYEQQHGKCLYSGKEINLGRLNEKGYVEIDHALPFSRTWDDSFNNKVLVLGSENQNKGNQTPYEYFNGKDNSREWQEFKARVETSRFPRSKKQRILLQKFDEDGFKERNLNDTRYVNRFLCQFVADRMRLTGKGKKRVFASNGQITNLLRGFWGLRKVRAENDRHHALDAVVVACSTVAMQQKITRFVRYKEMNAFDGKTIDKETGEVLHQKTHFPQPWEFFAQEVMIRVFGKPDGKPEFEEADTPEKLRTLLAEKLSSRPEAVHEYVTPLFVSRAPNRKMSGQGHMETVKSAKRLDEGVSVLRVPLTQLKLKDLEKMVNREREPKLYEALKARLEAHKDDPAKAFAEPFYKYDKAGNRTQQVKAVRVEQVQKTGVWVRNHNGIADNATMVRVDVFEKGDKYYLVPIYSWQVAKGILPDRAVVAYADEEDWTVIDESFRFKFVLYSNDLIKVQLKKDSFLGYFSGLDRATGAISLREHDLEKSKGKDGMHRIGVKTALSFQKYQIDEMGKEIRPCRLKKRPPVR

SEQ ID NO: 352 - protein, 1082 aa, Neisseria meningitidis
  Neisseria meningitidis 96023
MAAFKPNPINYILGLDIGIASVGWAMVEIDEDENPICLIDLGVRVFERAEVPKTGDSLAMARRLARSVRRLTRRRAHRLLRARRLLKREGVLQAADFDENGLIKSLPNTPWQLRAAALDRKLTPLEWSAVLLHLIKHRGYLSQRKNEGETADKELGALLKGVADNAHALQTGDFRTPAELALNKFEKESGHIRNQRGDYSHTFSRKDLQAELILLFEKQKEFGNPHVSGGLKEGIETLLMTQRPALSSDAVQKMLGHCTFEPAEPKAAKNTYTAERFIWLTKLNNLRILEQGSERPLTDTERATLMDEPYRKSKLTYAQARKLLGLEDTAFFKGLRYGKDNAEASTLMEMKAYHAISRALEKEGLKDKKSPLNLSPELQDEIGTAFSLFKTDEDITGRLKDRIQPEILEALLKHISFDKFVQISLKALRRIVPLMEQGKRYDEACAEIYGDHYGKKNTEEKIYLPPIPADEIRNPVVLRALSQARKVINGVVRRYGSPARIHIETAREVGKSFKDRKEIEKRQEENRKDREKAAAKFREYFPNFVGEPKSKDILKLRLYEQQHGKCLYSGKEINLGRLNEKGYVEIDHALPFSRTWDDSFNNKVLVLGSENQNKGNQTPYEYFNGKDNSREWQEFKARVETSRFPRSKKQRILLQKFDEDGFKERNLNDTRYVNRFLYQFVADRMRLTGKGKKRVFASNGQITNLLRGFWGLRKVRAENDRHHALDAVVVACSTVAMQQKITRFVRYKEMNAFDGKTIDKETGEVLHQKTHFPQPWEFFAQEVMIRVFGKPDGKPEFEEADTPEKLRTLLAEKLSSRPEAVHEYVTPLFVSRAPNRKMSGQGHMETVKSAKRLDEGVSVLRVPLTQLKLKDLEKMVNREREPKLYEALKARLEAHKDDPAKAFAEPFYKYDKAGNRTQQVKAVRVEQVQKTGVWVRNHNGIADNATMVRVDVFEKGDKYYLVPIYSWQVAKGILPDRAVVQGKDEEDWQLIDDSFNFKFSLHPNDLVEVITKKARMFGYFASCHRGTGNINIRIHDLDHKIGKNGILEGIGVKTALSFQKYQIDELGKEIRPCRLKKRPPVR

SEQ ID NO: 353 - protein, 1081 aa, Neisseria meningitidis
  Neisseria meningitidis 98008
MAAFKPNPINYILGLDIGIASVGWAMVEIDEDENPICLIDLGVRVFERAEVPKTGDSLAAARRLARSVRRLTRRRAHRLLRARRLLKREGVLQAADFDENGLIKSLPNTPWQLRSAALDRKLTPLEWSAVLLHLIKHRGYLSQRKNEGETADKELGALLKGVANNAHALQTGDFRTPAELALNKFEKESGHIRNQRGDYSHTFSRKDLQAELILLFEKQKEFGNPHVSGGLKEGIETLLMTQRPALSGDAVQKMLGHCTFEPAEPKAAKNTYTAERFIWLTKLNNLRILEQGSERPLTDTERATLMDEPYRKSKLTYAQARKLLGLEDTAFFKGLRYGKDNAEASTLMEMKAYHAISRALEKEGLKDKKSPLNLSPELQDEIGTAFSLFKTDEDITGRLKDRIQPEILEALLKHISFDKFVQISLKALRRIVPLMEQGKRYDEACAEIYGDHYGKKNTEEKIYLPPIPADEIRNPVVLRALSQARKVINGVVRRYGSPARIHIETAREVGKSFKDRKEIEKRQEENRKDREKAAAKFREYFPNFVGEPKSKDILKLRLYEQQHGKCLYSGKEINLGRLNEKGYVEIDHALPFSRTWDDSFNNKVLVLGSENQNKGNQTPYEYFNGKDNSREWQEFKARVETSRFPRSKKQRILLQKFDEDGFKERNLNDTRYVNRFLCQFVADRMRLTGKGKKRVFASNGQITNLLRGFWGLRKVRAENDRHHALDAVVVACSTVAMQQKITRFVRYKEMNAFDGKTIDKETGEVLHQKTHFPQPWEFFAQEVMIRVFGKPDGKPEFEEADTPEKLRTLLAEKLSSRPEAVHEYVTPLFVSRAPNRKMSGQGHMETVKSAKRLDEGVSVLRVPLTQLKLKDLEKMVNREREPKLYEALKARLEAHKDDPAKAFAEPFYKYDKAGNRTQQVKAVRVEQVQKTGVWVRNHNGIADNATMVRVDVFEKAGKYYLVPIYSWQVAKGILPDRAVVAYADEEGWTVIDESFRFKFVLYSNDLIKVQLKKDSFLGYFSGLDRATGAISLREHDLEKSKGKDGMHRIGVKTALSFQKYQIDEMGKEIRLCRLKKRPPVR

SEQ ID NO: 354 - protein, 1082 aa, Neisseria meningitidis
MAAFKPNPINYILGLDIGIASVGWAMVEIDEEENPIRLIDLGVRVFERAEVPKTGDSLAMVRRLARSVRRLTRRRAHRLLRARRLLKREGVLQAADFDENGLIKSLPNTPWQLRAAALDRKLTPLEWSAVLLHLIKHRGYLSQRKNEGETADKELGALLKGVADNAHALQTGDFRTPAELALNKFEKESGHIRNQRGDYSHTFSRKDLQAELILLFEKQKEFGNPHISGGLKEGIETLLMTQRPALSGDAVQKMLGHCTFEPAEPKAAKNTYTAERFIWLTKLNNLRILEQGSERPLTDTERATLMDEPYRKSKLTYAQARKLLGLEDTAFFKGLRYGKDNAEASTLMEMKAYHAISRALEKEGLKDKKSPLNLSPELQDEIGTAFSLFKTDEDITGRLKDRIQPEILEALLKHISFDKFVQISLKALRRIVPLMEQGKRYDEACAEIYGDHYGKKNTEEKIYLPPIPADEIRNPVVLRALSQARKVINGVVRRYGSPARIHIETAREVGKSFKDRKEIEKRQEENRKDREKAAAKFREYFPNFVGEPKSKDILKLRLYEQQHGKCLYSGKEINLGRLNEKGYVEIDHALPFSRTWDDSFNNKVLVLGSENQNKGNQTPYEYFNGKDNSREWQEFKARVETSRFPRSKKQRILLQKFDEDGFKERNLNDTRYVNRFLCQFVADRMRLTGKGKKRVFASNGQITNLLRGFWGLRKVRAENDRHHALDAVVVACSTVAMQQKITRFVRYKEMNAFDGKTIDKETGEVLHQKTHFPQPWEFFAQEVMIRVFGKPDGKPEFEEADTPEKLRTLLAEKLSSRPEAVHEYVTPLFVSRAPNRKMSGQGHMETVKSAKRLDEGVSVLRVPLTQLKLKDLEKMVNREREPKLYEALKARLEAHKDDPAKAFAEPFYKYDKAGNRTQQVKAVRVEQVQKTGVWVRNHNGIADNATMVRVDVFEKGDKYYLVPIYSWQVAKGILPDRAVVQGKDEEDWQLIDDSFNFKFSLHPNDLVEVITKKARMFGYFASCHRGTGNINIRIHDLDHKIGKNGILEGIGVKTALSFQKYQIDELGKEIRPCRLKKRPPVR

SEQ ID NO: 355 - protein, 1082 aa, Neisseria meningitidis
  Neisseria meningitidis alpha275
MAAFKPNPINYILGLDIGIASVGWAMVEIDEDENPICLIDLGVRVFERAEVPKTGDSLAAARRLARSVRRLTRRRAHRLLRARRLLKREGVLQAADFDENGLIKSLPNTPWQLRAAALDRKLTPLEWSAVLLHLIKHRGYLSQRKNEGETADKELGALLKGVADNAHALQTGDFRTPAELALNKFEKESGHIRNQRGDYSHTFSRKDLQAELILLFEKQKEFGNPHVSGGLKEGIETLLMTQRPALSGDAVQKMLGHCTFEPAEPKAAKNTYTAERFIWLTKLNNLRILEQGSERPLTDTERATLMDEPYRKSKLTYAQARKLLGLEDTAFFKGLRYGKDNAEASTLMEMKAYHAISRALEKEGLKDKKSPLNLSPELQDEIGTAFSLFKTDEDITGRLKDRVQPEILEALLKHISFDKFVQISLKALRRIVPLMEQGKRYDEACAEIYGDHYGKKNTEEKIYLPPIPADEIRNPVVLRALSQARKVINGVVRRYGSPARIHIETAREVGKSFKDRKEIEKRQEENRKDREKAAAKFREYFPNFVGEPKSKDILKLRLYEQQHGKCLYSGKEINLGRLNEKGYVEIDHALPFSRTWDDSFNNKVLVLGSENQNKGNQTPYEYFNGKDNSREWQEFKARVETSRFPRSKKQRILLQKFDEDGFKERNLNDTRYVNRFLCQFVADRMRLTGKGKKRVFASNGQITNLLRGFWGLRKVRAENDRHHALDAVVVACSTVAMQQKITRFVRYKEMNAFDGKTIDKETGEVLHQKTHFPQPWEFFAQEVMIRVFGKPDGKPEFEEADTPEKLRTLLAEKLSSRPEAVHEYVTPLFVSRAPNRKMSGQGHMETVKSAKRLDEGVSVLRVPLTQLKLKDLEKMVNREREPKLYEALKARLEAHKDDPAKAFAEPFYKYDKAGNRTQQVKAVRVEQVQKTGVWVRNHNGIADNATMVRVDVFEKGDKYYLVPIYSWQVAKGILPDRAVVQGKDEEDWQLIDDSFNFKFSLHPNDLVEVITKKARMFGYFASCHRGTGNINIRIHDLDHKIGKNGILEGIGVKTALSFQKYQIDELGKEIRPCRLKKRPPVR

SEQ ID NO: 356 - protein, 1082 aa, Neisseria meningitidis
  Neisseria meningitidis ATCC 13091
MAAFKPNPINYILGLDIGIASVGWAMVEIDEEENPIRLIDLGVRVFERAEVPKTGDSLAMARRLARSVRRLTRRRAHRLLRTRRLLKREGVLQAANFDENGLIKSLPNTLWQLRAAALDRKLTPLEWSAVLLHLIKHRGYLSQRKNEGETADKELGALLKGVAGNAHALQTGDFRTPAELALNKFEKESGHIRNQRGDYSHTFSRKDLQAELNLLFEKQKEFGNPHISDGLKEGIETLLMTQRPALSGDAVQKMLGHCTFEPTEPKAAKNTYTTERFIWLTKLNNLRILEQGSERPLTDTERATLMDEPYRKSKLTYAQARKLLELDDIAFFKGLRYGKDNAEASTLMEMKAYHAISRALEKEGLKDKKSPLNLSPELQDEIGTAFSLFKTDEDITGRLKDRIQPEILEALLKHINFDKFVQISLKALRRIVPLMEQGKRYDEACAEIYGDHYGKKNTEEKIDLPPIPADEIHNPVVLRALSQARKVINGVVRRYGSPARIHIETAREVGKSFKDRKEIEKRQEENRKDREKAAAKFREYFPNFVGEPKSKDILKLRLYEQQHGKCLYSGKEINLGRLNEKGYVEIDHALPFSRTWDDSFNNKVLVLGSENQNKGNQTPYEYFNGKDNSREWQEFKARVETSRFPRSKKQRILLQKFDEDGFKERNLNDTRYVNRFLCQFVADRMRLTGKGKKRVFASNGQITNLLRGFWGLRKVRAENDRHHALDAVVVACSTVAMQQKITRFVRYKEMNAFDGKTIDKETGEVLHQKTHFPQPWEFFAQEVMIRVFGKPDGKPEFEEADTPEKLRTLLTEKLSSRPEAVHEYVTPLFVSRAPNRKMSGQGHMETVKSAKRLDEGISVLRVPLTQLKLKDLEKMVNREREPKLYEALKARLEAHKDDPAKAFAEPFYKYDKAGNRTQQVKAMRVEQVQKTGVWVRNHNGIADNATMVRVDVFEKGDKYYLVPIYSWQVAKGILPDRAVVQGKDEEDWQLIDDSFNFKFSLHPNDLVEVITKKARMFGYFASCHRGTGNINIRIHDLDHKIGKNGILEGIGVKTALSFQKYQIDELGKEIRPCRLKKRPPVR

SEQ ID NO: 357 - protein, 1081 aa, Neisseria meningitidis
  Neisseria meningitidis N1568
MAAFKPNPINYILGLDIGIASVGWAMVEIDEEENPIRLIDLGVRVFERAEVPKTGDSLAMARRLARSVRRLTRRRAHRLLRARRLLKREGVLQAADFDENGLIKSLPNTPWQLRAAALDRKLTPLEWSAVLLHLIKHRGYLSQRKNEGETADKELGALLKGVADNAHALQTGDFRTPAELALNKFEKECGHIRNQRGDYSHTFSRKDLQAELNLLFEKQKEFGNPHVSGGLKEGIETLLMTQRPALSGDAVQKMLGHCTFEPAEPKAAKNTYTAERFIWLTKLNNLRILEQGSERPLTDTERATLMDEPYRKSKLTYAQARKLLSLEDTAFFKGLRYGKDNAEASTLMEMKAYHTISRALEKEGLKDKKSPLNLSPELQDEIGTAFSLFKTDEDITGRLKDRIQPEILEALLKHISFDKFVQISLKALRRIVPLMEQGKRYDEACAEIYGDHYGKKNTEEKIYLPPIPADEIRNPVVLRALSQARKVINGVVRRYGSPARIHIETAREVGKSFKDRKEIEKRQEENRKDREKAAAKFREYFPNFVGEPKSKDILKLRLYEQQHGKCLYSGKEINLGRLNEKGYVEIDHALPFSRTWDDSFNNKVLVLGSENQNKGNQTPYEYFNGKDNSREWQEFKARVETSRFPRSKKQRILLQKFDEDGFKERNLNDTRYVNRFLCQFVADRMRLTGKGKKRVFASNGQITNLLRGFWGLRKVRAENDRHHALDAVVVACSTVAMQQKITRFVRYKEMNAFDGKTIDKETGEVLHQKTHFPQPWEFFAQEVMIRVFGKPDGKPEFEEADTPEKLRTLLAEKLSSRPEAVHEYVTPLFVSRAPNRKMSGQGHMETVKSAKRLDEGVSVLRVPLTQLKLKDLEKMVNREREPKLYEALKARLEAHKDDPAKAFAEPFYKYDKAGNRTQQVKAVRVEQVQKTGVWVRNHNGIADNATMVRVDVFEKGDKYYLVPIYSWQVAKGILPDRAVVAYADEEDWTVIDESFRFKFVLYSNDLIKVQLKKDSFLGYFSGLDRATGAISLREHDLEKSKGKDGMHRIGVKTALSFQKYQIDEMGKEIRPCRLKKRPPVR

SEQ ID NO: 358 - protein, 1081 aa, Neisseria meningitidis
  Neisseria meningitidis NM140
MAAFKPNPINYILGLDIGIASVGWAMVEIDEDENPICLIDLGVRVFERAEVPKTGDSLAAARRLARSVRRLTRRRAHRLLRARRLLKREGVLQAADFDENGLIKSLPNTPWQLRSAALDRKLTPLEWSAVLLHLIKHRGYLSQRKNEGETADKELGALLKGVADNAHALQTGDFRTPAELALNKFEKESGHIRNRRGDYSHTFSRKDLQAELDLLFEKQKEFGNPHISDDLKEGIETLLMTQRPALSGDAVQKMLGHCTFEPTEPKAAKNTYTAERFVWLTKLNNLRILEQGSERPLTDTERATLMDEPYRKSKLTYAQARKLLELDDTAFFKGLRYGKDNAEASTLMEMKAYHAISRALEKEGLKDKKSPLNLSPELQDEIGTAFSLFKTDEDITGRLKDRVQPEILEVLLKHISFDKFVQISLKALRRIVPLMEQGKRYDEACAEIYGDHDGKKNTEEKIYLPPIPADEIRNPVVLRALSQARKVINAVVRRYGSPARIHIETAREVGKSFKDRKEIEKRQEENRKDREKAAAKFREYFPNFVGEPKSKDILKLRLYEQQHGKCLYSGKEINLGRLNEKGYVEIDHALPFSRTWDDSFNNKVLVLGSENQNKGNQTPYEYFNGKDNSREWQEFKARVETSRFPRSKKQRILLQKFDEEGFKERNLNDTRYVNRFLCQFVADHMLLTGKGKRRVFASNGQITNLLRGFWGLRKVRAENNRHHALDAVVVACSTVAMQQKITRFVRYKEMNAFDGKTIDKETGEVLHQKTHFPQPWEFFAQEVMIRVFGKPDGKPEFEEADTPEKLRTLLAEKLSSRPEAVHEYVTPLFVSRAPNRKMSGQGHMETVKSAKRLDEGVSVLRVPLTQLKLKDLEKMVNREREPKLYEALKARLEAHKDDPAKAFAEPFYKYDKAGNRTQQVKAVRVEQVQKTGVWVRNHNGIADNATMVRVDVFEKAGKYYLVPIYSWQVAKGILPDRAVVAYADEEGWTVIDESFRFKFVLYSNDLIKVQLKKDSFLGYFSGLDRATGAISLREHDLEKSKGKDGMHRIGVKTALSFQKYQIDEMGKEIRLCRLKKRPPVR

SEQ ID NO: 359 - protein, 1082 aa, Neisseria meningitidis
  Neisseria meningitidis NM220
MAAFKPNPINYILGLDIGIASVGWAMVEIDEEENPIRLIDLGVRVFERAEVPKTGDSLAMARRLARSVRRLTRRRAHRLLRARRLLKREGVLQAADFDENGLIKSLPNTPWQLRAAALDRKLTPLEWSAVLLHLIKHRGYLSQRKNEGETADKELGALLKGVANNAHALQTGDFRTPAELALNKFEKESGHIRNQRGDYSHTFSRKDLQAELILLFEKQKEFGNPHVSGGLKEGIETLLMTQRPALSGDAVQKMLGHCTFEPAEPKAAKNTYTAERFIWLTKLNNLRILEQGSERPLTDTERATLMDEPYRKSKLTYAQARKLLGLEDTAFFKGLRYGKDNAEASTLMEMKAYHAISRALEKEGLKDKKSPLNLSSELQDEIGTAFSLFKTDEDITGRLKDRVQPEILEALLKHISFDKFVQISLKALRRIVPLMEQGKRYDEACAEIYGDHYGKKNTEEKIYLPPIPADEIRNPVVLRALSQARKVINGVVRRYGSPARIHIETAREVGKSFKDRKEIEKRQEENRKDREKAAAKFREYFPNFVGEPKSKDILKLRLYEQQHGKCLYSGKEINLVRLNEKGYVEIDHALPFSRTWDDSFNNKVLVLGSENQNKGNQTPYEYFNGKDNSREWQEFKARVETSRFPRSKKQRILLQKFDEDGFKECNLNDTRYVNRFLCQFVADHILLTGKGKRRVFASNGQITNLLRGFWGLRKVRAENDRHHALDAVVVACSTVAMQQKITRFVRYKEMNAFDGKTIDKETGKVLHQKTHFPQPWEFFAQEVMIRVFGKPDGKPEFEEADTPEKLRTLLAEKLSSRPEAVHEYVTPLFVSRAPNRKMSGAHKDTLRSAKRFVKHNEKISVKRVWLTEIKLADLENMVNYKNGREIELYEALKARLEAYGGNAKQAFDPKDNPFYKKGGQLVKAVRVEKTQESGVLLNKKNAYTIADNGDMVRVDVFCKVDKKGKNQYFIVPIYAWQVAENILPDIDCKGYRIDDSYTFCFSLHKYDLIAFQKDEKSKVEFAYYINCDSSNGRFYLAWHDKGSKEQQFRISTQNLVLIQKYQVNELGKEIRPCRLKKRPPVR

SEQ ID NO: 360 - protein, 1082 aa, Neisseria meningitidis
  Neisseria meningitidis NM233
MAAFKPNPINYILGLDIGIASVGWAMVEIDEEENPIRLIDLGVRVFERAEVPKTGDSLAMARRLARSVRRLTRRRAHRLLRARRLLKREGVLQAADFDENGLIKSLPNTPWQLRAAALDRKLTPLEWSAVLLHLIKHRGYLSQRKNEGETADKELGALLKGVANNAHALQTGDFRTPAELALNKFEKESGHIRNQRGDYSHTFSRKDLQAELILLFEKQKEFGNPHVSGGLKEGIETLLMTQRPALSGDAVQKMLGHCTFEPAEPKAAKNTYTAERFIWLTKLNNLRILEQGSERPLTDTERATLMDEPYRKSKLTYAQARKLLGLEDTAFFKGLRYGKDNAEASTLMEMKAYHAISRALEKEGLKDKKSPLNLSSELQDEIGTAFSLFKTDEDITGRLKDRVQPEILEALLKHISFDKFVQISLKALRRIVPLMEQGKRYDEACAEIYGDHYGKKNTEEKIYLPPIPADKIRNPVVLRALSQARKVINGVVRRYGSPARIHIETAREVGKSFKDRKEIEKRQEENRKDREKAAAKFREYFPNFVGEPKSKDILKLRLYEQQHGKCLYSGKEINLVRLNEKGYVEIDHALPFSRTWDDSFNNKVLVLGSENQNKGNQTPYEYFNGKDNSREWQEFKARVETSRFPRSKKQRILLQKFDEDGFKECNLNDTRYVNRFLCQFVADHILLTGKGKRRVFASNGQITNLLRGFWGLRKVRAENDRHHALDAVVVACSTVAMQQKITRFVRYKEMNAFDGKTIDKETGKVLHQKTHFPQPWEFFAQEVMIRVFGKPDGKPEFEEADTPEKLRTLLAEKLSSRPEAVHEYVTPLFVSRAPNRKMSGAHKDTLRSAKRFVKHNEKISVKRVWLTEIKLADLENMVNYKNGREIELYEALKARLEAYGGNAKQAFDPKDNPFYKKGGQLVKAVRVEKTQESGVLLNKKNAYTIADNGDMVRVDVFCKVDKKGKNQYFIVPIYAWQVAENILPDIDCKGYRIDDSYTFCFSLHKYDLIAFQKDEKSKVEFAYYINCDSSNGRFYLAWHDKGSKEQQFRISTQNLVLIQKYQVNELGKEIRPCRLKKRPPVR

SEQ ID NO: 361 - protein, 1082 aa, Neisseria meningitidis
MAAFKPNPINYILGLDIGIASVGWAMVEIDEDENPICLIDLGVRVFERAEVPKTGDSLAMARRLARSVRRLTRRRAHRLLRARRLLKREGVLQAADFDENGLIKSLPNTPWQLRAAALDRKLTPLEWSAVLLHLIKHRGYLSQRKNEGETADKELGALLKGVADNAHALQTGDFRTPAELALNKFEKESGHIRNQRGDYSHTFSRKDLQAELILLFEKQKEFGNPHVSGGLKEGIETLLMTQRPALSSDAVQKMLGHCTFEPAEPKAAKNTYTAERFIWLTKLNNLRILEQGSERPLTDTERATLMDEPYRKSKLTYAQARKLLGLEDTAFFKGLRYGKDNAEASTLMEMKAYHAISRALEKEGLKDKKSPLNLSPELQDEIGTAFSLFKTDEDITGRLKDRIQPEILEALLKHISFDKFVQISLKALRRIVPLMEQGKRYDEACAEIYGDHYGKKNTEEKIYLPPIPADEIRNPVVLRALSQARKVINGVVRRYGSPARIHIETAREVGKSFKDRKEIEKRQEENRKDREKAAAKFREYFPNFVGEPKSKDILKLRLYEQQHGKCLYSGKEINLGRLNEKGYVEIDHALPFSRTWDDSFNNKVLVLGSENQNKGNQTPYEYFNGKDNSREWQEFKARVETSRFPRSKKQRILLQKFDEDGFKERNLNDTRYVNRFLCQFVADRMRLTGKGKKRVFASNGQITNLLRGFWGLRKVRAENDRHHALDAVVVACSTVAMQQKITRFVRYKEMNAFDGKTIDKETGEVLHQKTHFPQPWEFFAQEVMIRVFGKPDGKPEFEEADTPEKLRTLLAEKLSSRPEAVHEYVTPLFVSRAPNRKMSGQGHMETVKSAKRLDEGVSVLRVPLTQLKLKDLEKMVNREREPKLYEALKARLEAHKDDPAKAFAEPFYKYDKAGNRTQQVKAVRVEQVQKTGVWVRNHNGIADNATMVRVDVFEKGDKYYLVPIYSWQVAKGILPDRAVVQGKDEEDWQLIDDSFNFKFSLHPNDLVEVITKKARMFGYFASCHRGTGNINIRIHDLDHKIGKNGILEGIGVKTALSFQKYQIDELGKEIRPCRLKKRPPVR

SEQ ID NO: 362 - protein, 1082 aa, Neisseria meningitidis
MAAFKPNPINYILGLDIGIASVGWAMVEIDEDENPICLIDLGVRVFERAEVPKTGDSLAMARRLARSVRRLTRRRAHRLLRARRLLKREGVLQAADFDENGLIKSLPNTPWQLRAAALDRKLTPLEWSAVLLHLIKHRGYLSQRKNEGETADKELGALLKGVADNAHALQTGDFRTPAELALNKFEKESGHIRNQRGDYSHTFSRKDLQAELILLFEKQKEFGNPHVSGGLKEGIETLLMTQRPALSGDAVQKMLGHCTFEPAEPKAAKNTYTAERFIWLTKLNNLRILEQGSERPLTDTERATLMDEPYRKSKLTYAQARKLLGLEDTAFFKGLRYGKDNAEASTLMEMKAYHAISRALEKEGLKDKKSPLNLSPELQDEIGTAFSLFKTDEDITGRLKDRIQPEILEALLKHISFDKFVQISLKALRRIVPLMEQGKRYDEACAEIYGDHYGKKNTEEKIYLPPIPADEIRNPVVLRALSQARKVINGVVRRYGSPARIHIETAREVGKSFKDRKEIEKRQEENRKDREKAAAKFREYFPNFVGEPKSKDILKLRLYEQQHGKCLYSGKEINLGRLNEKGYVEIDHALPFSRTWDDSFNNKVLVLGSENQNKGNQTPYEYFNGKDNSREWQEFKARVETSRFPRSKKQRILLQKFDEDGFKERNLNDTRYVNRFLCQFVADRMRLTGKGKKRVFASNGQITNLLRGFWGLRKVRAENDRHHALDAVVVACSTVAMQQKITRFVRYKEMNAFDGKTIDKETGEVLHQKTHFPQPWEFFAQEVMIRVFGKPDGKPEFEEADTPEKLRTLLAEKLSSRPEAVHEYVTPLFVSRAPNRKMSGQGHMETVKSAKRLDEGVSVLRVPLTQLKLKDLEKMVNREREPKLYEALKARLEAHKDDPAKAFAEPFYKYDKAGNRTQQVKAVRVEQVQKTGVWVRNHNGIADNATMVRVDVFEKGDKYYLVPIYSWQVAKGILPDRAVVQGKDEEDWQLIDDSFNFKFSLHPNDLVEVITKKARMFGYFASCHRGTGNINIRIHDLDHKIGKNGILEGIGVKTALSFQKYQIDELGKEIRPCRLKKRPPVR

SEQ ID NO: 363 - protein, 1089 aa, Neisseria sp.
  Neisseria sp. oral taxon 014 str. F0314
MTAFKPNPLNYILGLDIGIASVGWAMVEIDDKENPVRLIDLGVRVFERAEMPKTGDSLAAARRLARSVRRLTRRRAHRLLRARRLLKHEGVLKPEDFDENGLVKPLPYIPKQPRNTPWQLRAAALDRKLTPLEWAAVLLHLVKHRGYLSQRKNEGETDDKELGALLKGVADNTHALQAGNFRTPAELALNKFEKESGHIRNQRGDYSHTFSRKDLQAELVLLFEKQKEFGNPYVSDDLKNGIENLLMTQRPALSGDAIQKMLGHCTFEPAEPKAAKNTYTAERFIWLTKLNNLRILNQGNERPLTDAERTTLMDEPYKKSKLTYAQARKLLDLDDTAFFKGLRYGKDNAESATLMEMKAYHAISRALEKEGLKDKKSPLSLSPELQDEIGTAFSLFKTDEEITGRLKGCLQPEILDALLKHISFDKFVQISLKALRRIVPLMEQGKRYDEACAEIYGDHHGRRNSEETLYLPPIPADEIRNPVVLRALSQARKVINGVGRRYGSPARIHIETAREVGKSFKDRKEIEKRQEENRKDREKAAAEFQEYFPNFVGEPKSKDILKLRLYRQQNCKCLYSGKEINLGRLNEKGYVEIDHALPFSRTWDDSFNNKVLVLGSENQNKGNRTPYEYLNGKDNSREWQEFKARVETSRFPHSKKQRILLQKFDEEGFKERNLNDTRYVNRFLCKFVADHMQLTGKGKRRVFASNGQITNLLRGFWGLRKVRAENDRHHALDAVVVACSTVAMQQRITRFVRYKEMNAFDGKTVDKETGEVLHQKTHFPQPWEFFAQEVMIRVFGKPDGKPELEEADTPEKLRALLAEKLSSRPEAVHEYVAPLFVSRAPNRKMSGQGHMETIKSPKRLDEGISVVRVPLTQLKLKDLEKMVNREREPKLYEALKARLEAHKDDPAKAFAEPFYKQDKAGNRTQQVKAVRIEQVQKTGVWVRNQNGIADNATMVRVDVFEKGGKYYLVPIYSWQVAKGILPDKAIIAFKDEEEWQLIDDSFNFKFPLHPNDLVEVITKKARIFGYFASCHRGTGNINIRIHDLDNKVGKNGILEGIGVKTALSFQKYQIDELGKEIRPCRLKKRPPVR

SEQ ID NO: 364 - protein, 1097 aa, Neisseria wadsworthii
  Neisseria wadsworthii 9715
MKKQPQRYILGLDLGIASVGWALILVDGAENPVGLLDCGVRTFERAEVPKTGDSLALARRQARSVRRLIRRRAHRLLRLRRLLKREGILSAADFNSDGLPNLPIDAWQLRVAGLERKLTNQEWAAVLLHLVKHRGYLSQRKSETQTENKELGRLLAGVAENSKLLSESSEQYRTPAELAVKLFAEQSGHLRNKGGEYTHTFNRLDLQKELHLLFERQYALGNPFASAELQSKVDELLMTQRSALQGEAVLKMLGKCTFEPSEYKAAKNTYSAERFIWLTKLNNLRILYNGEERALDEGDRKKLLDEPYKKAKLTYKQVRSILNLPESAVFKGLRYGKDSDGLKAENGTLMEMKAYHKIRTILDKAGLKGEWENRIRNPEILDKIGTAFSLYKTDEDIQAALADLRLPENVLDALLAGLNFDKFIQLSLKALRNILPLMERGIRYDEACKEVYGDHRALAESKNQVLLPPIPADEIRNPVVLRTLTQARKVINAIIRRYGSPQRVHIETARELGKSKQERDKIDRKNKENQNDRNRLASDIRKHFNFEPTPKDILKLRLYEQQHGKCLYSDLREEKGECLYTGNVIELHRLFEDGYVEIDHALPLSRTWDNSLNNKVLVLKSSNQNKGNKTPYEWLDGANNSRRWREFQARVQGCHFPYVKKQRIQTAKLDSKAEQGFLERNLNDTRYISKFMCQFITANLRLAETSNALMEEVAGENPYWKERKRQRVFAPSGSIIALLRGLWGLKKVREDNDRHHALDAIVVACSTVSMQQKITKAMQRRETLETVDSETGEVKTRIPQPWDFFRQEVMIRVFSDSPREELAEKLNSRPEALHDFVSPLFVSRAPNRKMTGQGHLETVKSAKRLSENISVVRKPLTALKLKDIENIVGYPDREPALYQALRERLLAHKDDPVKAFADKPFYKPAKDGGQGSLVKAVRIIENTKHGLKIRNGITDTNGDMVRTDVYQKTDKKGKRQYFIVPVYAWQVEKNELPTVDCKGYEIDDNYEFCFSLYKYDLIEIQNPNDINQELRAYYINCDSSDGRFWLAYHDKSAKEQQFRISTQNQPIIKKYQVDTLGKEIRLCKAEKRTALNGKKKK

SEQ ID NO: 365 - protein, 1426 aa, Niabella soli
  Niabella soli DSM 19437
MPRKNILGLDLGTTSIGFAKIIEDDDYQCSSVELIGVRVNPLTTDEQTNFEKGKPVSVNADRTLKRGMRRNLDRYQLRRDYLIEILRTHHIITADTKLAEDGKNTTHTTYALRALAATAEIPLEAFVRVLLAINKKRGYKSSRKAKNEDEGQLIDGMAIARRLYEESLTPGQFSYQLLKEGKKYLPDFYRSDLNTELNKVWNFQKQFYPEILTDEFKRHLEGKGQRATAVAFWGQHGFSMAENKGSREEKKLHAYKWRSEAAHKQLTKEEVAFVITEINNDLNKSSGYLGAISDRSKELFFNKQTVGQYLHQQLKENPHTRLKGQVFYRQDYLDEFETIWEMQAKFYSALTLELKEEVRDVVIFYQRKLKSQMGLISLCEFESKEIEIEKNGEKAKKRIGLRVAPKSSPLFQEFKIWQVLNNLEFRNKKTKEVFVPEMAAKQQLFDELNIKGNLLASEAIKILGYKTKDWEANYHTLEGNRTNKSLYDAWLKILELEGYDENLLKLSGSDDIDVSKIEKPALEIRQMVLAVFEVLGISGAILDFDAEADGKAFEQQPAYQLWHLLYSAEDDGKKYSQEDIFTYGHDNIGLKKKLCEKFGFRPEHTKILVNVVFSDDYGNLSSKAMRRIYPFIKELTYDKACAEAGYRHSAASLTKEEIAARPLQNRLDLLKKNELRSPVVEKILNQMVNVVNTLVDDENQNRKARGLSEDFHFDEIRIELARELKKNAKERAEMTTNINTAKQSHEKIIRILQTEFGVPNPSRNDIVRYKLYEELKNNGYKDLYTNTYISRDILFSKQIDVDHIIPQMSLFDDSFSNKTVVFRKDNQDKGNKTAYDYILGKYGEQALEEYISRITSLFELGKKNKEEGIGKAKFQKLQKRLVDIGDGFIERDLRESQYIAKKANNMLYAICRSVVSTSGEITARLREDWDLVNVMQEINLPKFRALGLTEMVEKKDGAQKERITDWTKRNDHRHHAMDALAIAFTRHSHIQYLNHLNARKDEANKWHPVVSKIEEKETVLIYDDLGNRKRKFKAPMPNFREVVKEHLENVLISHKAKNKVVTKNKNKIKTVRGEKVKTELTPRGQLHKETIYGRYRYYESKEEKIGPKFDAEMIGMVTNPQYKKLLLERLAANGNDPKKAFWGKNALNKNPLYVDEARQELLPEKILLRWLNDDYSIRKDVTPENLKDIKTIEKILDKGVKKILLKRLADFGNDPKKAFSDLDKNPIWQNEAKRIAIKRVTISGIKNAAPLHHKKDHLGNDILDEKGKQIPSSFVSTGNNHHVAIYRDAEGNLQERVVSLFDAVQLVNGGEPVIDKEYNKGIGWQFLFTMKQNEMFVFPDEKTGFNPREVDLLSSGNRKLISPNLFRVQKLASKNYFFRHHLETSVEEKKELKNIAYKPQLGLNALSNIVKVRINHIGEIVSVGEY

SEQ ID NO: 366 - protein, 1132 aa, Nitratifractor salsuginis
MKKILGVDLGITSFGYAILQETGKDLYRCLDNSVVMRNNPYDEKSGESSQSIRSTQKSMRRLIEKRKKRIRCVAQTMERYGILDYSETMKINDPKNNPIKNRWQLRAVDAWKRPLSPQELFAIFAHMAKHRGYKSIATEDLIYELELELGLNDPEKESEKKADERRQVYNALRHLEELRKKYGGETIAQTIHRAVEAGDLRSYRNHDDYEKMIRREDIEEEIEKVLLRQAELGALGLPEEQVSELIDELKACITDQEMPTIDESLFGKCTFYKDELAAPAYSYLYDLYRLYKKLADLNIDGYEVTQEDREKVIEWVEKKIAQGKNLKKITHKDLRKILGLAPEQKIFGVEDERIVKGKKEPRTFVPFFFLADIAKFKELFASIQKHPDALQIFRELAEILQRSKTPQEALDRLRALMAGKGIDTDDRELLELFKNKRSGTRELSHRYILEALPLFLEGYDEKEVQRILGFDDREDYSRYPKSLRHLHLREGNLFEKEENPINNHAVKSLASWALGLIADLSWRYGPFDEIILETTRDALPEKIRKEIDKAMREREKALDKIIGKYKKEFPSIDKRLARKIQLWERQKGLDLYSGKVINLSQLLDGSADIEHIVPQSLGGLSTDYNTIVTLKSVNAAKGNRLPGDWLAGNPDYRERIGMLSEKGLIDWKKRKNLLAQSLDEIYTENTHSKGIRATSYLEALVAQVLKRYYPFPDPELRKNGIGVRMIPGKVTSKTRSLLGIKSKSRETNFHHAEDALILSTLTRGWQNRLHRMLRDNYGKSEAELKELWKKYMPHIEGLTLADYIDEAFRRFMSKGEESLFYRDMFDTIRSISYWVDKKPLSASSHKETVYSSRHEVPTLRKNILEAFDSLNVIKDRHKLTTEEFMKRYDKEIRQKLWLHRIGNTNDESYRAVEERATQIAQILTRYQLMDAQNDKEIDEKFQQALKELITSPIEVTGKLLRKMRFVYDKLNAMQIDRGLVETDKNMLGIHISKGPNEKLIFRRMDVNNAHELQKERSGILCYLNEMLFIFNKKGLIHYGCLRSYLEKGQGSKYIALFNPRFPANPKAQPSKFTSDSKIKQVGIGSATGIIKAHLDLDGHVRSYEVFGTLPEGSIEWFKEESGYGRVEDDPHH

SEQ ID NO: 367 - protein, 1166 aa, Nitrobacter hamburgensis
MHVEIDFPHFSRGDSHLAMNKNEILRGSSVLYRLGLDLGSNSLGWFVTHLEKRGDRHEPVALGPGGVRIFPDGRDPQSGTSNAVDRRMARGARKRRDRFVERRKELIAALIKYNLLPDDARERRALEVLDPYALRKTALTDTLPAHHVGRALFHLNQRRGFQSNRKTDSKQSEDGAIKQAASRLATDKGNETLGVFFADMHLRKSYEDRQTAIRAELVRLGKDHLTGNARKKIWAKVRKRLFGDEVLPRADAPHGVRARATITGTKASYDYYPTRDMLRDEFNAIWAGQSAHHATITDEARTEIEHIIFYQRPLKPAIVGKCTLDPATRPFKEDPEGYRAPWSHPLAQRFRILSEARNLEIRDTGKGSRRLTKEQSDLVVAALLANREVKFDKLRTLLKLPAEARFNLESDRRAALDGDQTAARLSDKKGFNKAWRGFPPERQIAIVARLEETEDENELIAWLEKECALDGAAAARVANTTLPDGHCRLGLRAIKKIVPIMQDGLDEDGVAGAGYHIAAKRAGYDHAKLPTGEQLGRLPYYGQWLQDAVVGSGDARDQKEKQYGQFPNPTVHIGLGQLRRVVNDLIDKYGPPTEISIEFTRALKLSEQQKAERQREQRRNQDKNKARAEELAKFGRPANPRNLLKMRLWEELAHDPLDRKCVYTGEQISIERLLSDEVDIDHILPVAMTLDDSPANKIICMRYANRHKRKQTPSEAFGSSPTLQGHRYNWDDIAARATGLPRNKRWRFDANAREEFDKRGGFLARQLNETGWLARLAKQYLGAVTDPNQIWVVPGRLTSMLRGKWGLNGLLPSDNYAGVQDKAEEFLASTDDMEFSGVKNRADHRHHAIDGLVTALTDRSLLWKMANAYDEEHEKFVIEPPWPTMRDDLKAALEKMVVSHKPDHGIEGKLHEDSAYGFVKPLDATGLKEEEAGNLVYRKAIESLNENEVDRIRDIQLRTIVRDHVNVEKTKGVALADALRQLQAPSDDYPQFKHGLRHVRILKKEKGDYLVPIANRASGVAYKAYSAGENFCVEVFETAGGKWDGEAVRRFDANKKNAGPKIAHAPQWRDANEGAKLVMRIHKGDLIRLDHEGRARIMVVHRLDAAAGRFKLADHNETGNLDKRHATNNDIDPFRWLMASYNTLKKLAAVPVRVDELGRVWRVMPN

SEQ ID NO: 368 - protein, 1044 aa, Nitrosomonas sp.
  Nitrosomonas sp. AL212
MLHKMRYRLALDLGSTSLGWAMVRLNANQQPCAVIKAGVRIFSNGRNPKDGSSLAVTRREARSMRRRRDRLLKRKARMMRTLIEYGFFPANETQRKALENLNPYALRAKGLDEALTPSEFARALFHINQRRGFKSNRKTDKKDSDSGALKTAIKQLHSVLDPQGNDGKPRTVGELLYKRFTDLSKLPKDRTVRARYRQDKIVKDDGKTKIDKYYDLYIDRAMIEQEFDALWKKQSELNPILFTENARADLKDVLLYQRSLKPVKPGRCTFMSEEERAPLALPSTQRFRMYQEVNNLRILREGLKEESLTLQQRDDLINALEKNNRRTFTQIKKLLGVGGSVQFNFEDPKREELKGNTTSAILGKSEHFGEAWFAFNEAKQDAIVLQLIKEENEAKLVRWLQDETGIDEKRAEVIANAGLPEGYGSLCIEALARILPELRRDVVTYDKAVQAAGFEHHSKLNRNEEIPDITFKIESIDRNSGEIKQFHLHKELPYYGEYLQRHVGFGSGKPEDSIEKRYGKIANPTVHIGLNQVRVVVNALIKRYGHPSEIIVEVARDLKQSKDRRDEENKRQAENQKRNERLRKDIADILGISEERVRRDDIEKMILWEELSFDPADRRCPYSGVQVSTVMLLSDEVEVEHILPFSQTLDDSLNNKTVALRQANRIKGNRTPWEAFGTSNISGFDYSGILTRAELMPKAKRYRFAEDGYQRWLKDDAGFLARALNDTRHLSKIAREYMSLICPNTRVIPGQMTAMLRRNFGLNDVLGLNGEKNRNDHRHHAVDACVIAVTDQGLLQRFAAASASARERQLNRLVENMPLPWESYREHVRRAIDGIWVSHRPDHSHEGAMHNDTAYGLRGNGRVSFHKMVEGKREYIEDNLKVIEITDTKAIDRHGLLPTGKPRPYKGYKGDSNYCIEIVRNEKGRWEGEIISTFDAYQLVRKYGIVQLRYPVLSVSGKPLVMRLIRNDFVRLEHEGITRTLRVCKMREDGQVALADVTEANVDARTRTKEICYVFKTGGSLQKAKARRITISPIGELRDPGFKE

SEQ ID NO: 369 - protein, 1498 aa, Odoribacter laneus
  Odoribacter laneus YIT 12061
METTLGIDLGTNSIGLALVDQEEHQILYSGVRIFPEGINKDTIGLGEKEESRNATRRAKRQMRRQYFRKKLRKAKLLELLIAYDMCPLKPEDVRRWKNWDKQQKSTVRQFPDTPAFREWLKQNPYELRKQAVTEDVTRPELGRILYQMIQRRGFLSSRKGKEEGKIFTGKDRMVGIDETRKNLQKQTLGAYLYDIAPKNGEKYRFRTERVRARYTLRDMYIREFEIIWQRQAGHLGLAHEQATRKKNIFLEGSATNVRNSKLITHLQAKYGRGHVLIEDTRITVTFQLPLKEVLGGKIEIEEEQLKFKSNESVLFWQRPLRSQKSLLSKCVFEGRNFYDPVHQKWIIAGPTPAPLSHPEFEEFRAYQFINNIIYGKNEHLTAIQREAVFELMCTESKDFNFEKIPKHLKLFEKFNFDDTTKVPACTTISQLRKLFPHPVWEEKREEIWHCFYFYDDNTLLFEKLQKDYALQTNDLEKIKKIRLSESYGNVSLKAIRRINPYLKKGYAYSTAVLLGGIRNSFGKRFEYFKEYEPEIEKAVCRILKEKNAEGEVIRKIKDYLVHNRFGFAKNDRAFQKLYHHSQAITTQAQKERLPETGNLRNPIVQQGLNELRRTVNKLLATCREKYGPSFKFDHIHVEMGRELRSSKTEREKQSRQIRENEKKNEAAKVKLAEYGLKAYRDNIQKYLLYKEIEEKGGTVCCPYTGKTLNISHTLGSDNSVQIEHIIPYSISLDDSLANKTLCDATFNREKGELTPYDFYQKDPSPEKWGASSWEEIEDRAFRLLPYAKAQRFIRRKPQESNEFISRQLNDTRYISKKAVEYLSAICSDVKAFPGQLTAELRHLWGLNNILQSAPDITFPLPVSATENHREYYVITNEQNEVIRLFPKQGETPRTEKGELLLTGEVERKVFRCKGMQEFQTDVSDGKYWRRIKLSSSVTWSPLFAPKPISADGQIVLKGRIEKGVFVCNQLKQKLKTGLPDGSYWISLPVISQTFKEGESVNNSKLTSQQVQLFGRVREGIFRCHNYQCPASGADGNFWCTLDTDTAQPAFTPIKNAPPGVGGGQIILTGDVDDKGIFHADDDLHYELPASLPKGKYYGIFTVESCDPTLIPIELSAPKTSKGENLIEGNIWVDEHTGEVRFDPKKNREDQRHHAIDAIVIALSSQSLFQRLSTYNARRENKKRGLDSTEHFPSPWPGFAQDVRQSVVPLLVSYKQNPKTLCKISKTLYKDGKKIHSCGNAVRGQLHKETVYGQRTAPGATEKSYHIRKDIRELKTSKHIGKVVDITIRQMLLKHLQENYHIDITQEFNIPSNAFFKEGVYRIFLPNKHGEPVPIKKIRMKEELGNAERLKDNINQYVNPRNNHHVMIYQDADGNLKEEIVSFWSVIERQNQGQPIYQLPREGRNIVSILQINDTFLIGLKEEEPEVYRNDLSTLSKHLYRVQKLSGMYYTFRHHLASTLNNEREEFRIQSLEAWKRANPVKVQIDEIGRITFLNGPLC

SEQ ID NO: 370 - protein, 1389 aa, Oenococcus kitaharae
  Oenococcus kitaharae DSM 17330
MARDYSVGLDIGTSSVGWAAIDNKYHLIRAKSKNLIGVRLFDSAVTAEKRRGYRTTRRRLSRRHWRLRLLNDIFAGPLTDFGDENFLARLKYSWVHPQDQSNQAHFAAGLLFDSKEQDKDFYRKYPTIYHLRLALMNDDQKHDLREVYLAIHHLVKYRGHFLIEGDVKADSAFDVHTFADAIQRYAESNNSDENLLGKIDEKKLSAALTDKHGSKSQRAETAETAFDILDLQSKKQIQAILKSVVGNQANLMAIFGLDSSAISKDEQKNYKFSFDDADIDEKIADSEALLSDTEFEFLCDLKAAFDGLTLKMLLGDDKTVSAAMVRRFNEHQKDWEYIKSHIRNAKNAGNGLYEKSKKFDGINAAYLALQSDNEDDRKKAKKIFQDEISSADIPDDVKADFLKKIDDDQFLPIQRTKNNGTIPHQLHRNELEQIIEKQGIYYPFLKDTYQENSHELNKITALINFRVPYYVGPLVEEEQKIADDGKNIPDPTNHWMVRKSNDTITPWNLSQVVDLDKSGRRFIERLTGTDTYLIGEPTLPKNSLLYQKFDVLQELNNIRVSGRRLDIRAKQDAFEHLFKVQKTVSATNLKDFLVQAGYISEDTQIEGLADVNGKNFNNALTTYNYLVSVLGREFVENPSNEELLEEITELQTVFEDKKVLRRQLDQLDGLSDHNREKLSRKHYTGWGRISKKLLTTKIVQNADKIDNQTFDVPRMNQSIIDTLYNTKMNLMEIINNAEDDFGVRAWIDKQNTTDGDEQDVYSLIDELAGPKEIKRGIVQSFRILDDITKAVGYAPKRVYLEFARKTQESHLTNSRKNQLSTLLKNAGLSELVTQVSQYDAAALQNDRLYLYFLQQGKDMYSGEKLNLDNLSNYDIDHIIPQAYTKDNSLDNRVLVSNITNRRKSDSSNYLPALIDKMRPFWSVLSKQGLLSKHKFANLTRTRDFDDMEKERFIARSLVETRQIIKNVASLIDSHFGGETKAVAIRSSLTADMRRYVDIPKNRDINDYHHAFDALLFSTVGQYTENSGLMKKGQLSDSAGNQYNRYIKEWIHAARLNAQSQRVNPFGFVVGSMRNAAPGKLNPETGEITPEENADWSIADLDYLHKVMNFRKITVTRRLKDQKGQLYDESRYPSVLHDAKSKASINFDKHKPVDLYGGFSSAKPAYAALIKFKNKFRLVNVLRQWTYSDKNSEDYILEQIRGKYPKAEMVLSHIPYGQLVKKDGALVTISSATELHNFEQLWLPLADYKLINTLLKTKEDNLVDILHNRLDLPEMTIESAFYKAFDSILSFAFNRYALHQNALVKLQAHRDDFNALNYEDKQQTLERILDALHASPASSDLKKINLSSGFGRLFSPSHFTLADTDEFIFQSVTGLFSTQKTVAQLYQETK

SEQ ID NO: 371 - protein, 1389 aa, Oenococcus kitaharae; identical to SEQ ID NO: 370
  Oenococcus kitaharae DSM 17330

SEQ ID NO: 372 - protein, 1399 aa, Olsenella uli
MNLRNTTDEYNIGLDMGTNSVGWAVTDKAGAIAHFKGKPTLGSRLFDAAQTAAGARIHRSQRRRYVRRRWRLDLLQSLFQDEVSKVDSEFFCRLRQSRLYVGDREKGHADYTWPIFNDSDFNEVDYYKRFPTIYHLRKWLMETDEKADIRLIYLATHNIVKHRGNFLRENNKSLSSRDANPAQAVKSLRLALNDWCSERDYECAWKGEEDDGAIDEAILNVLADGEKGRSDQAKEIAKLTGVDCGDAKQSKQCNEAIAKAIVGLKVEMKNIFGEFPAEKTSYIYLSSDEDVEAVRESCPDDSGELFQALCKLYSAYILQELLSYADPSGQTISANMVAKYKQYGRDLRLLKELTRTYAPQKYDLFFRGETYAGSSDYVVDEARGYTRYNLGTTKANYDDFQKSVKELFKGTDALQDERYQEMMVAFGEQKFLRRLKTSDNGSIYYQLHLEELHTILENQGKHYPFLLSEEDKIESLVSFRIPYYVGPLTRKNAAIGHDGKERFAWSSRKDGMEHAVITPWNWEEIIDRDKSAEDFIMRMTGDCTYLQGEPVLPKCSLLYEEFCALNEFNGAHWTVDGDDERRFDAAQRERIMCDLFRRTRSVTYNKVSDWLERKYNFTGARVRGGQGEHGFESKLGSYIFFCKDVFKTDGLDEADYTMIEQIILWSTLFEDRDILKRKIEEAYGGDRLTSEQIKVICKKRFTGWGRLSKRLLTDIKVNTDTGRKSIMDVLREGNPNNGQRSRTMVFMEVLRDEDLGFQKAIDGLNRDYFREHNNGLMDVNDLPGSPAIRRSINQAVRIVDEIASIARKEPTNIFIEVTREEDDPRKKGKRTKRRYDAIKSALEKFKKDDPSLWKELCEKAPGDMDERLSLYFMQRGKCMYSGRPIKIEELHTGKYEVDHIIPRSYIKDDSFENKVLVYREENQHKTDALLIDSSIRQKMGGYWRMLHDAKLVGDKKFRNLFRNHIDDKAMKGFVARQIVETSQMVKLVQTLFEARYPNTRIVPVKAGISHDLREAAGLVKCREANDFHHAHDAFLACRIGLFIQKRHPSVYDNPIGLARIMRDYARMQAREYKKSHCLAHTQGFIVNSFLSSGFDEETGEIFKDDWDAKAEVEGIRRVLNCRQCFISRMPVEGDTRYGGRYWGETIYSPKGKHKHEIPLKQGLDPNLYGGYSDLLYSYFLIYEASDVSSGERVLRFIGIPTSIAARMANQKRLEEYVSRLALQENLEHVRMVRKIMKKQLIEVDNCRLLVTAADAVTNATELAFSLDEMKIISTCAKCINGADPSAIDKIGNAQDSFFDNLKRRGSDRCALLFSQLKLDKLSQNFYMISSDDKSKILISILDRIRAKSNSVDLSLVGGAKHAAQMKFDFNAKLNNPASSFVLIDQSVTGMFERRTRIGL

SEQ ID NO: 373 - protein, 1535 aa, Ornithobacterium rhinotracheale
MNTILGLDLGTNSIGWALIKVLNDKTRLPLEIIDLGVVVIPTDQRTLDKFSKGESISKTAERTKQKGVRKLYERKKLRRERLHRVLNILGFLPEHYSKKIDFKKHLGQFFGNSQPKISYVENDHGKHEFIFMDSYREMLKEFSKHNIKNVPYDWTIYYLRKKALSQKISKEELAWVILNFNKKRGYYQFRDDNADENKENKIEKYYALKVTNVKKEDAQNYTITLENGWIYKNKSKISLLDWVGSTKEFISTEKFDNKGNIIKKKNGEDDRTLKLVDSEKDWIAIKKSTEDRIENYGKTVGTYLYEHLLKDPNQKLNGELINIIDRKFYKNELKQILEKQKEFHPELLNEDLFQKSIIELYPKNSTRQKELKNKDLCYLLIDDVIYYQRDLKKKNSTINKCSFESREYYLNGEKQIQKINCIAKSKPLYQEFRTLQFIKNLKVYEIIDGLEKDITSKLLPDFETKEHFFEWLNDKEKIDQLQLLSYKCFDLHDNVKNDLIAKGIKRPTEKAIRTELLEKYRWNYSKDNDRNFLLNETRFKILKYLKKVDKKLTLTNEQIESLWLLLYSAKDERELKNGLQKFSEKNKLPKKFSDIFISFPPFKKEYGAYSEKALKKLLSLVRFGKYWSFNKIDNNIQNKIMNILNGEVDDSISDRVREKTILLQDKNDFQDLPLWLASYVAYNRFSEVSEIKYWDSPDKIEFLKQHSIGNPIVEKIINETLKLIKDIWVIHGKSCKNFFSEIHIELSREIKSSSKKRAQITNNNTKNQKLNNLIKSLLIEMASDTKYENVTPYSPSQQEILKIYDEGIYSKEENSEKIKEINKIRNNNKISKSDITKYKLWLEQGYISPYTGKIIPLTKLFTAKYQKEHIIPQTKFFDDSFNNKVICEAEVNKLKDNSLAMNFIKAKGGKAVKLSDGETVTILNQEEYKQLVRTSFKKNSIKLRNLLLEEIPDTFTKRQLNDTKYISKLVLSLLSNIVREKGELESTAKRIVSTNGQITSILRNDWGLNNIWNKLITPRFERLNNINKNKIYGNWENKKGKNVFQINYLNDNLSTLNTKRIDHRHHALDALIVACTTRNHINFLNNQYAKSRNQRHDLRAKLKRRETITTEGSKKQVFKDFIKPWESFTQDALKKLETTIVNFKVNKRIINKTINWYKKWEKQKDGTYKKIQKKQTKGDAWAIRKPLHIDTIYGIVCKKLPLKSALENYKNIIDENLKHKIKELKEVNKFDNNQIINFFKECNFIFEDNNIQKVEVYDFKDNRDKTILSSSRQLIDESFTPKKIGKVLDPTIRNILLKHLNSTKYNNKFDSDGNPIKPEKLAFSPEGLKDLNKNIKHLNNNKEHQPIKRVKLFETLGNKIKVGYTQQKNKKFAETATGTNLFLGIYSDNNKRDFKTIPLILAIQREKEGLNPCPDTDEKGNQLLFSLSPNELVFVPNNEERKNPNLVDFENLSKDQIDRIYKFVSCTGSEAYFVPSRTAKPIIENENGTNNKSQRIIEFNEKTSIKNEKNEPVLIKTICWKIEVNRLGKIIKVIK

SEQ ID NO: 374 - protein, 1443 aa, Parabacteroides johnsonii
  Parabacteroides johnsonii DSM 18315
MIKLLYLEKLKQYTMKKILGLDLGTSSIGWALVNEAENSDEVSSIIKLGVRVNPLTVDEMQNFEKGKSITTNADRTLKRSMRRNLQRYKLRRDALIELLKKVGFITDKTILSEQGNRTTFETYRLRAKAAEEEISLKELARVLLMINKKRGYKSSRKAKGEEEGALIDGMEIAKKLYDEDLTPGQLCLQLLESGKKFFPDFYRSDLQEEFNKIWDFQKQFNLFSFCDVAKEEVKGKNKSQTWAILAKYFVETKKVNVWNEHEAQTENREEVYKLVGLKRTVKGEELKKENYRWRVQALTEQLDLEKIAVVLQEINGQISASSGYLGAISDRSKVLYFNRQTVGQYQMAELNKNPNMSLRNMVFYRQDYLDEFNVIWEKQAEFHKELTPELKKEIRDIIIFYQRRLKSQKGLISFCEFENREVVVEKEGKKQTKIIGCKVIPRSHPLFQEFKIWQTLNNIEVFVGEKKGKRKKSNVSSDLFGDTEDALITEGRRFLYQEEKKILAKELSIKKGLTKAEILRLLFENPQELDINFKQIDGNQTGFALFSAYSNMIEKYGYEPLDFKKPAEDLISQLKTVFTDLGWNTDLLFIDLDKENKEWEKQPYFRLWHLLYSFEGDNTPTGNGKLIEKIMQLCGIEKEYAIELANVSLQDDYGSLSAKAIKKILLYLKEGNQYDMACEYAGYRHSKSSLTKEEIENKVLKDKLEILPKNSLRNPVVEKILNQMVNVINTVMEVYGRPDEIRVELARELKKSAKEREELTKAVAKNTREHEEIRKVLQSEFGMINVSRNDIIRYKLYEELKDNGYKTLYSNQYIPREKLFSKEIDIEHIIPQSRLFDDSLSNKTLEYKSINIEKGNKTAYDFVKEKYGEEGLQQYLNRCENLCKDKKAKLRKLKMELNEIPDGFIDRDLRNTQYIAKKALSMLTEICRRVVATTGSITDKLREDWQLVDVMKELNLPKYEALGLVEVYEDKDGRKIKRIKDWTKRNDHRHHAMDALTVAFTKDVFIQYFNNKNAAWESDSKEHTNIVGIKTRYFESGKAVPPIPLGQFRVEAKCHLENLLVSIKAKNKVVTTNVNCIKKKGGTYKNTQQTPRGQLHLETIYGSHNQYVTKIEKVNASFDAVKIATVSKQDYRNALLKRLEVFGNDPKKAFTGKNSLEKNPIYLDRAQTIQVPDKVQTVELETAYTIRKPVDPTLNVDKVVDKKIRLILEQRLKEYGGDAKKAFVNLDENPIWLNEEKGISIKRVTIRGISKAQALHDKKDKDGNFILDETGKRIPVDFVNTGNNHHVAIYRKPVLDKKGQVIFDDEGNPMYELDEDVVPFFEAVTRANLGIPIIDKDYKKSEGWQFLFSMKQNEYFVFPNEKTGFNPKEVDLLDPDNYAMISPNLFRVQKIGLNDYTFRHHLETTIQNDLKFITWIRCGKSGIKDIVKVRINHIGQIVSVGEY

SEQ ID NO: 375 - protein, 1424 aa, Parabacteroides sp.
  Parabacteroides sp. D13
MKRILGLDLGTNSIGWALVNEAETDEEVSSIIRLGVRVNPLTVDETQNFEKGKSITTNAERTLKRSMRRNLQRYKLRRDALVEFLKELGFITDETILSEQGNRTTFETCRLRAKAAEEEISLEELSRVLLMINKKRGYKSSRKVKKEEDGVLIDGMEIAKKLYEEDLTPGQLCSQLLESGKKVLPDFYRSDLQEELDRIWSVQKQFHPDVFCDAAKEEIKGKNRSQTWAILANYFVWKEEVVGWNDREAKNETIEKECKLVGLKRTTKGYELKKENYRWRAQALTEQLGLEEIAVVLQEINGQINASSGYLGAISDRSKVLYFNHQTVGQYQMAELDKNPHASLRNMVFYRQDYLDEFDRIWEKQAEFHKELTAELKKEIRDMIIFYQRRLKSQKGLISFCEFERLEIVVEKDGKKQTKVIGCKVIPRSHPLFQEFKVWQTLNDIKVLGREKKRNALSASESRALYPEEKEILARELAIKENMKKADVLKLLFENPQELDLNFKQIDGNRTGFSLFSAYSKMIEKYGYEPLDFKKPADEIIGQLRTIFTDLGWNTNLFTIDLTKEGKELEMQPYFRLWHLLYSFEGDNTSTGNGKLIEKIMQLCGVEKEYAVELASLSFQDDYGSLSAKAIKRILPYLKEGNLYDVACEYAGYRHSKSSLTKEEIENKVLKGKLEVLPKNSLRNPVVEKILSQMVNVINTIIDTYGKPDEIRVELARELKKSAKEREELTKAIAKSTREHEEIRKLLQDEFGMMNVSRNDIIRYKLYEELKDNGYKTLYSNQYIPKEKIFSKEIDIEHIIPQSRLFDDSLSNKTLEYKAINIEKGNKTAYDFVKEKYGEEGLQQYINRCESLFNDKKAKLRKLKMEQKDIPDGFIDRDLRNTQYIAKKALAMLNEICRRVVATTGSITDQLREDWQLVDVMKELNLPKYEALGFVETYEDKDGRKIKRIKDWTKRNDHRHHAMDALTVAFTKDAFIQYFNNKNAAQDSGNRNHTNIIGIKTRYFDKGRALPPIPLEQFRIEAKQHLEKLLVSIKAKNKVVTVNVNRTKKRKGENTKIQQTPRGQLHLETVYGSHKQYVTKIEKVNASFDAAKIATVSKRAYRNALLKRLETFGNDPKKAFTGKNALEKNPLYADKYQTIRVPEKVQTVEFETIYTIRKPVDPALNVDKVVDVKVRAILERRLKEYGGDPKKAFVNFWENPIWLNKEKGISIKRVSIRGINNAQSIHVKKDKNGNPIWDENGKQIPVDFVNTGNNHHVAIYRKPVLDKKGQVTFDEDGNLMYELDEVVVPFFEAVTRANLGLPIIDKDYRKSEGWQFLFSMKQNEYFVFPNEKTGFNPKEVDLLNPDNYAMISPNLFRVQTMSKVMYGNNVVRDYKFRHHLETTVKDMKELKDIAYKQYKTLSFGNSVVKIRINHIGQIVSVGEY

SEQ ID NO: 376 - protein, 1428 aa, Parasutterella excrementihominis
  Parasutterella excrementihominis YIT 11859
MGKTHIIGVGLDLGGTYTGTFITSHPSDEAEHRDHSSAFTVVNSEKLSFSSKSRTAVRHRVRSYKGFDLRRRLLLLVAEYQLLQKKQTLAPEERENLRIALSGYLKRRGYARTEAETDTSVLESLDPSVFSSAPSFTNFFNDSEPLNIQWEAIANSPETTKALNKELSGQKEADFKKYIKTSFPEYSAKEILANYVEGRRAILDASKYIANLQSLGHKHRSKYLSDILQDMKRDSRITRLSEAFGSTDNLWRIIGNISNLQERAVRWYFNDAKFEQGQEQLDAVKLKNVLVRALKYLRSDDKEWSASQKQIIQSLEQSGDVLDVLAGLDPDRTIPPYEDQNNRRPPEDQTLYLNPKALSSEYGEKWKSWANKFAGAYPLLTEDLTEILKNTDRKSRIKIRSDVLPDSDYRLAYILQRAFDRSIALDECSIRRTAEDFENGVVIKNEKLEDVLSGHQLEEFLEFANRYYQETAKAKNGLWFPENALLERADLHPPMKNKILNVIVGQALGVSPAEGTDFIEEIWNSKVKGRSTVRSICNAIENERKTYGPYFSEDYKFVKTALKEGKTEKELSKKFAAVIKVLKMVSEVVPFIGKELRLSDEAQSKFDNLYSLAQLYNLIETERNGFSKVSLAAHLENAWRMTMTDGSAQCCRLPADCVRPFDGFIRKAIDRNSWEVAKRIAEEVKKSVDFTNGTVKIPVAIEANSFNFTASLTDLKYIQLKEQKLKKKLEDIQRNEENQEKRWLSKEERIRADSHGICAYTGRPLDDVGEIDHIIPRSLTLKKSESIYNSEVNLIFVSAQGNQEKKNNIYLLSNLAKNYLAAVFGTSDLSQITNEIESTVLQLKAAGRLGYFDLLSEKERACARHALFLNSDSEARRAVIDVLGSRRKASVNGTQAWFVRSIFSKVRQALAAWTQETGNELIFDAISVPAADSSEMRKRFAEYRPEFRKPKVQPVASHSIDAMCIYLAACSDPFKTKRMGSQLAIYEPINFDNLFTGSCQVIQNTPRNFSDKTNIANSPIFKETIYAERFLDIIVSRGEIFIGYPSNMPFEEKPNRISIGGKDPFSILSVLGAYLDKAPSSEKEKLTIYRVVKNKAFELFSKVAGSKFTAEEDKAAKILEALHFVTVKQDVAATVSDLIKSKKELSKDSIENLAKQKGCLKKVEYSSKEFKFKGSLIIPAAVEWGKVLWNVFKENTAEELKDENALRKALEAAWPSSFGTRNLHSKAKRVFSLPVVATQSGAVRIRRKTAFGDFVYQSQDTNNLYSSFPVKNGKLDWSSPIIHPALQNRNLTAYGYRFVDHDRSISMSEFREVYNKDDLMRIELAQGTSSRRYLRVEMPGEKFLAWFGENSISLGSSFKFSVSEVFDNKIYTENAEFTKFLPKPREDNKHNGTIFFELVGPRVIFNYIVGGAASSLKEIFSEAGKERS

SEQ ID NO: 377 - protein, 1037 aa, Parvibaculum lavamentivorans
MERIFGFDIGTTSIGFSVIDYSSTQSAGNIQRLGVRIFPEARDPDGTPLNQQRRQKRMMRRQLRRRRIRRKALNETLHEAGFLPAYGSADWPVVMADEPYELRRRGLEEGLSAYEFGRAIYHLAQHRHFKGRELEESDTPDPDVDDEKEAANERAATLKALKNEQTTLGAWLARRPPSDRKRGIHAHRNVVAEEFERLWEVQSKFHPALKSEEMRARISDTIFAQRPVFWRKNTLGECRFMPGEPLCPKGSWLSQQRRMLEKLNNLAIAGGNARPLDAEERDAILSKLQQQASMSWPGVRSALKALYKQRGEPGAEKSLKFNLELGGESKLLGNALEAKLADMFGPDWPAHPRKQEIRHAVHERLWAADYGETPDKKRVIILSEKDRKAHREAAANSFVADFGITGEQAAQLQALKLPTGWEPYSIPALNLFLAELEKGERFGALVNGPDWEGWRRTNFPHRNQPTGEILDKLPSPASKEERERISQLRNPTVVRTQNELRKVVNNLIGLYGKPDRIRIEVGRDVGKSKREREEIQSGIRRNEKQRKKATEDLIKNGIANPSRDDVEKWILWKEGQERCPYTGDQIGFNALFREGRYEVEHIWPRSRSFDNSPRNKTLCRKDVNIEKGNRMPFEAFGHDEDRWSAIQIRLQGMVSAKGGTGMSPGKVKRFLAKTMPEDFAARQLNDTRYAAKQILAQLKRLWPDMGPEAPVKVEAVTGQVTAQLRKLWTLNNILADDGEKTRADHRHHAIDALTVACTHPGMTNKLSRYWQLRDDPRAEKPALTPPWDTIRADAEKAVSEIVVSHRVRKKVSGPLHKETTYGDTGTDIKTKSGTYRQFVTRKKIESLSKGELDEIRDPRIKEIVAAHVAGRGGDPKKAFPPYPCVSPGGPEIRKVRLTSKQQLNLMAQTGNGYADLGSNHHIAIYRLPDGKADFEIVSLFDASRRLAQRNPIVQRTRADGASFVMSLAAGEAIMIPEGSKKGIWIVQGVWASGQVVLERDTDADHSTTTRPMPNPILKDDAKKVSIDPIGRVRPSND

SEQ ID NO: 378 - protein, 1058 aa, Pasteurella multocida
  Pasteurella multocida subsp. gallicida X73
MQTTNLSYILGLDLGIASVGWAVVEINENEDPIGLIDVGVRIFERAEVPKTGESLALSRRLARSTRRLIRRRAHRLLLAKRFLKREGILSTTDLEKGLPNQAWELRVAGLERRLSAIEWGAVLLHLIKHRGYLSKRKNESQTNNKELGALLSGVAQNHQLLQSDDYRTPAELALKKFAKEEGHIRNQRGAYTHTFNRLDLLAELNLLFAQQHQFGNPHCKEHIQQYMTELLMWQKPALSGEAILKMLGKCTHEKNEFKAAKHTYSAERFVWLTKLNNLRILEDGAERALNEEERQLLINHPYEKSKLTYAQVRKLLGLSEQAIFKHLRYSKESAESATFMELKAWHAIRKALENQGLKDTWQDLAKKPDLLDEIGTAFSLYKTDEDIQQYLEGKLPDSVINALLVSLNFDKFIELSLKSLRKILPLMEQGKRYDQACHEIYGHHYGEKNQQISQLLPVIPTQEIRNPVVLRTLSQARKVINAIIRQYGSPARVHIETGRELGKSFKERREIQKQQEDNRTKRESAVQKFKELFSDFSSEPKSKDILKFRLYEQQHGKCLYSGKEINIHRLNEKGYVEIDHALPFSRTWDDSFNNKVLVLASENQNKGNQTPYEWLQGKINSERWKNFVALVLGSQCSAAKKQRLLTQVIDDNKFIDRNLNDTRYIARFLSNYIQENLLLVGKNKKNVFTPNGQITALLRSRWGLIKVRENNDRHHALDAIVVACATPSMQQKITRFIRFKEVHPYKIENRYEMVDQESGEIISPHFPEPWAYFRQEVNIRVFDNHPDTVLKEMLPDRPQANHQFVQPLFVSRAPTRKMSGQGHMETIKSAKRLAEGISVLRIPLTQLKPNLLENMVNKEREPALYVGLKARLAEFNQDPAKAFATPFYKQGGQQVKAIRVELVQKSGVLVRQGNGVADNAPGSIVRTDVFIKNNKFFLVPIYTWQVAKGILPNKAIVAHKNEDEWEEMDEGAKFKFSIFPNDLIELRTKTECFLGYYIGPDRHNGSISLREHDSEISKGNAGVYRVGVKLALSLEKYHIDELGKNRRICRPHQRRPVR

SEQ ID NO: 379 - protein, 1056 aa, Pasteurella multocida
  Pasteurella multocida subsp. multocida str. P52VAC
MQTTNLSYILGLDLGIASVGWAVVEINENEDPIGLIDVGVRIFERAEVPKTGESLALSRRLARSTRRLIRRRARRLLLAKRFLKREGILSTTDLEKGLPNQAWELRVAGLERRLSAIEWGAVLLHLIKHRGYLSKRKNESQTNNKELGALLSGVAQNHQLLQSDDYRTPAELALKKFAKEEGHIRNQRGAYTHTFNRLDLLAELNLLFAQQHQFGNPHCKEHIQQYMTELLMWQKPALSGEAILKMLGKCTHEKNEFKAAKHTYSAERFVWLTKLNNLRILEDGAERALNEEERQLLINHPYEKSKLTYAQVRKLLGLSEQAIFKHLRYSKENAESATFMELKAWHAIRKALENQGLKDTWQDLAKKPDLLDEIGTAFSLYKTDEDIQQYLTNKVPNSVINALLVFLNFDKFIELALKSLRKILPLMEQGKRYDQACREIYGHHYGEANQKTSQLLPAIPAQEIRNPVVLRTLSQARKVINAIIRQYGSPARVHIETGRELGKSFKERREIQKQQEDNRTKRESAVQKFKELFSDFSSEPKSKDILKFRLYEQQHGKCLYSGKEINIHRLNEKGYVEIDHALPFSRTWDDSFNNKVLVLASENQNKGNQTPYEWLQGKINSERWKNFVALVLGSQCSAAKKQRLLTQVIDDNKFIDRNLNDTRYIARFLSNYIQENLLLVGKNKKNVFTPNGQITALLRSRWGLIKIRENNDRHHALDAIVVACATPSMQQKITRFIRFKEVHPYKIENRYEMVDQESGEIISPHFPEPWAYFRQEVNIRVFDNHPDTVLKEMLPDRPQANHQFVQPLFVSRAPTRKMSGQGHMETIKSAKRLAEGISVLRIPLTQLKPNLLENMVNKEREPALYAGLKARLAEFNQDPAKAFTTPFYKQGGQQVKAIRVEQVQKSGVLVRENNGVADNASIVRTDVFIKNNKFFLVPIYTWQVAKGILPNKAIVAHKNEDEWEEMDEGAKFKFSLFPNDLVELKTKKEYFFGYYIGLDRATGNISLKEHDGEISKGKDGVYRVGVKLALSFEKYQVDELGKNRQICRPQQRQPVR

SEQ ID NO: 380 - protein, 1056 aa, Pasteurella multocida
MQTTNLSYILGLDLGIASVGWAVVEINENEDPIGLIDVGVRIFERAEVPKTGESLALSRRLARSTRRLIRRRAHRLLLAKRFLKREGILSTIDLEKGLPNQAWELRVAGLERRLSAIEWGAVLLHLIKHRGYLSKRKNESQTNNKELGALLSGVAQNHQLLQSDDYRTPAELALKKFAKEEGHIRNQRGAYTHTFNRLDLLAELNLLFAQQHQFGNPHCKEHIQQYMTELLMWQKPALSGEAILKMLGKCTHEKNEFKAAKHTYSAERFVWLTKLNNLRILEDGAERALNEEERQLLINHPYEKSKLTYAQVRKLLGLSEQAIFKHLRYSKENAESATFMELKAWHAIRKALENQGLKDTWQDLAKKPDLLDEIGTAFSLYKTDEDIQQYLTNKVPNSVINALLVSLNFDKFIELSLKSLRKILPLMEQGKRYDQACREIYGHHYGEANQKTSQLLPAIPAQEIRNPVVLRTLSQARKVINAIIRQYGSPARVHIETGRELGKSFKERREIQKQQEDNRTKRESAVQKFKELFSDFSSEPKSKDILKFRLYEQQHGKCLYSGKEINIHRLNEKGYVEIDHALPFSRTWDDSFNNKVLVLASENQNKGNQTPYEWLQGKINSERWKNFVALVLGSQCSAAKKQRLLTQVIDDNKFIDRNLNDTRYIARFLSNYIQENLLLVGKNKKNVFTPNGQITALLRSRWGLIKARENNNRHHALDAIVVACATPSMQQKITRFIRFKEVHPYKIENRYEMVDQESGEIISPHFPEPWAYFRQEVNIRVFDNHPDTVLKEMLPDRPQANHQFVQPLFVSRAPTRKMSGQGHMETIKSAKRLAEGISVLRIPLTQLKPNLLENMVNKEREPALYAGLKARLAEFNQDPAKAFATPFYKQGGQQVKAIRVEQVQKSGVLVRENNGVADNASIVRTDVFIKNNKFFLVPIYTWQVAKGILPNKAIVAHKNEDEWEEMDEGAKFKFSLFPNDLVELKTKKEYFFGYYIGLDRATGNISLKEHDGEISKGKDGVYRVGVKLALSFEKYQVDELGKNRQICRPQQRQPVR

SEQ ID NO: 381 - protein, 1364 aa, Pediococcus acidilactici
  Pediococcus acidilactici DSM 20284
MGDRKYNLGLDIGTSSIGFAAVDENNQPIRVKGKTAIGVRLFEEGKTAADRRGFRTTRRRLSRRRWRINLLNEIFDAHLAEVDPTFLARLKESNRSNLDPKKSFQGSLLFPERKDYQFYEEYPTIYHLRKALMEKDRKFDFREIYLAVHHIIKYRGNFLNGTPMRSFKVENIELDTLFDQLNQLYAEIVPDNELAFDLAQVADVKDVLSSTTIYKMDKKKQLVKMMLLPASNKALQSENKKIVTQFVNAILNYKFKLDVLLQVETDADWSLKLNDEGADDKLEEFTGDLDENRLEIIDLLQRLHNWFSLNEITKDGNSLSAAMVEKYENHHHHLGLLKKVIENHPDAKKAKALKETYTAYVGKTDDKTQNQDDFYKAVEKNLDDSPDAKEIKRLIQLDQFMPKQRTGQNGAIPHQLHQQELDQIIEKQSKYYPFLAEPNPNVKRRKDAPYKLDELIAFKIPYYVGPLVTPEEQAQNGENVFAWMKRKAAGPITPWNFDEKVDRMESANRFIRRMTTKDTYLFGEDVLPAESMIYQKFVVLNELNNLKINGRHLSLKDKQDVYNDLFKQQKTVSIKALQNYYVTKKKAATAPTVGGLADPKKFLSSLSTYIDFKNMFGERVNDPQFQEDLEQIVEWSTIFEDRGIFKAKLQALGWLSEKQIQQLVAKRYKGWGRLSKKLLTGLKNAEGYSILDEMWRSTGNFMQIQSRPEFAALIQQANEKQFEGNDPDNVWENIENILGDAYTSPQNKKAIRQVVKVVQDIEKAVGNPPEKIAIEFTREAAANPQRTQSRLRTLEKLYESAEEVVDAGLTAELAEFKENKHVLSDKYYLYFTQLGRDVYTGDTISLDKLNDYDVDHILPQSFIKDDSLDNRVLTIRAVNNGKSDNVPAKMFGKKMGSFWRYLLDNGMISKRKYNNLITDPDNISKYAQKGFINRQLVETSQVIKLTANILNGIYDKDTEIIEVPAKMNSQMRKMFDLVKVREVNDYHHAFDAYLTIFIGNYLYKCYPKLQPYFVYDNFKKFGNKEDIGHKRFNFLGKIEREKKVVAPETGEILWSNVAPNETIKQIKKVYDYKFMIVSREITTRRAELFNQTVYPKNYHGKLIPIKEDRPTDLYGGYSGNTDAYLAIVALEDKKKGKYFKVVGIPTRVAAKLEKLKQQDSQQYLQALHKVIAPQFTKSTKKGIKKTEFEIVLDKVHYRQLVQDGPVKMMLGSSTYKYNAKQLVLSEKALQVIADDRKFDETQKDDNLIAVYDEILSIVNQSFDLYDINGFRKKLNDNRDQFIDLPAETKYEGRKVVAHGKREMILEILKGLHANAAFGNLKPIGFSTAFGQLQVPNGIILSKNAILIHQSPSGLFERKIKLSDL

SEQ ID NO: 382 - protein, 1366 aa, Pediococcus acidilactici
  Pediococcus acidilactici MA18/5M
MGDRKYNLGLDIGTSSIGFAAVDENNQPIRVKGKTAIGVRLFEEGKTAADRRGFRTTRRRLSRRRWRINLLNEIFDAHLAEVDPTFLARLKESNRSNLDPKKSFQGSLLFPERKDYQFYEEYPTIYHLRKALMEEDRKFDIREIYLAVHHIIKYRGNFLNGTPMRSFKVENIELDTLFDQLNQLYAEIVPDNELAFDLAQVADVKDVLSSTTIYKMDKKKQLVKMMLLPASNKALQSENKKIVTQFVNAILNYKFKLDVLLQVETDADWSLKLNDEGADDKLEEFTGDLDENRLEIIDLLQRLHNWFSLNEITKDGNSLSAAMVEKYENHHHHLGLLKKVIENHPDAKKAKALKETYTAYVGKTDDKTQNQDDFYKAVEKNLDDSPDAKEIKRLIQLDQFMPKQRTGQNGAIPHQLHQQELDQIIEKQSKYYPFLAEPNPNVKRRKDAPYKLDELIAFKIPYYVGPLVTPEEQAQNKENVFAWMKRKAAGPITPWNFDEKVDRMESANRFIRRMTTKDTYLFGEDVLPAESMIYQKFVVLNELNNLKINGRHLSLKDKQDVYNDLFKQQKTVSIKALQNYYVTKKKAATAPTVGGLADPKKFLSSLSTYIDFKNMFGERVNDPQFQEDLEQIVEWSTIFEDRGIFKAKLQALGWLSEKQIQQLVAKRYKGWGRLSKKLLTGLKNAEGYSILDEMWRSTENFMQIQTRPEFAALIQQANEKQFEGNDPNNVWENIESILGDAYTSPQNKKAIRQVVKVVQDIEKAVGNPPEKIAIEFTREAAANPQRTQSRLRTLEKLYESAEEVVDAGLTAELAEFKENKHVLSDKYYLYFTQLGRDVYTGDTISLDKLNDYDVDHILPQSFIKDDSLDNRVLTIRAVNNGKSDNVPAKMFGKKMGSFWRYLLDNGMISKRKYNNLITDPDNISKYAQKGFINRQLVETSQVIKLTANILNGIYDKDTEIIEVPAKMNSQMRKMFDLVKVREVNDYHHAFDAYLTIFIGKYLYKCYPKLRPYFVYGKFKKFGDNEDIEVGDGRFNFLNRIERLKNVTDPETGEILWSNVAPNETIKQIKKVYNYKFMLVSRETTTRRAELFNQTVYPKNYRGKLIPIKEDRPTDLYGGYSGNTDAYLAIVALEDKKKGKYFKVVGIPTRAAAKLEKLKQQDSQQYLQALHKVIAPQFTKSTKKGIKKTEFEIVLDKVHYRQLVQDGPVKMMLGSSTYKYNAKQLVLSEKALQVIADDRKFDETQKDDNLIAVYDEILSIVNQSFDLYDINGFRKKLNDNRDQFIDLPAETKYEGRKVVAHGKREMILEILKGLHANAAFGNLKPIGFSTAFGQLQVPNGIILSKNAILIHQSPSGLFERKIKLSDL

SEQ ID NO: 383 - protein, 1364 aa, Peptoniphilus duerdenii
  Peptoniphilus duerdenii ATCC BAA-1640
MKNLKEYYIGLDIGTASVGWAVTDESYNIPKFNGKKMWGVRLFDDAKTAEERRTQRGSRRRLNRRKERINLLQDLFATEISKVDPNFFLRLDNSDLYREDKDEKLKSKYTLFNDKDFKDRDYHKKYPTIHHLIMDLIEDEGKKDIRLLYLACHYLLKNRGHFIFEGQKFDTKNSFDKSINDLKIHLRDEYNIDLEFNNEDLIEIITDTTLNKTNKKKELKNIVGDTKFLKAISAIMIGSSQKLVDLFEDGEFEETTVKSVDFSTTAFDDKYSEYEEALGDTISLLNILKSIYDSSILENLLKDADKSKDGNKYISKAFVKKFNKHGKDLKTLKRIIKKYLPSEYANIFRNKSINDNYVAYTKSNITSNKRTKASKFTKQEDFYKFIKKHLDTIKETKLNSSENEDLKLIDEMLTDIEFKTFIPKLKSSDNGVIPYQLKLMELKKILDNQSKYYDFLNESDEYGTVKDKVESIMEFRIPYYVGPLNPDSKYAWIKRENTKITPWNFKDIVDLDSSREEFIDRLIGRCTYLKEEKVLPKASLIYNEFMVLNELNNLKLNEFLITEEMKKAIFEELFKTKKKVTLKAVSNLLKKEFNLTGDILLSGTDGDFKQGLNSYIDFKNIIGDKVDRDDYRIKIEEIIKLIVLYEDDKTYLKKKIKSAYKNDFTDDEIKKIAALNYKDWGRLSKRFLTGIEGVDKTTGEKGSIIYFMREYNLNLMELMSGHYTFTEEVEKLNPVENRELCYEMVDELYLSPSVKRMLWQSLRVVDEIKRIIGKDPKKIFIEMARAKEAKNSRKESRKNKLLEFYKFGKKAFINEIGEERYNYLLNEINSEEESKFRWDNLYLYYTQLGRCMYSLEPIDLADLKSNNIYDQDHIYPKSKIYDDSLENRVLVKKNLNHEKGNQYPIPEKVLNKNAYGFWKILFDKGLIGQKKYTRLTRRTPFEERELAEFIERQIVETRQATKETANLLKNICQDSEIVYSKAENASRFRQEFDIIKCRTVNDLHHMHDAYLNIVVGNVYNTKFTKNPLNFIKDKDNVRSYNLENMFKYDVVRGSYTAWIADDSEGNVKAATIKKVKRELEGKNYRFTRMSYIGTGGLYDQNLMRKGKGQIPQKENTNKSNIEKYGGYNKASSAYFALIESDGKAGRERTLETIPIMVYNQEKYGNTEAVDKYLKDNLELQDPKILKDKIKINSLIKLDGFLYNIKGKTGDSLSIAGSVQLIVNKEEQKLIKKMDKFLVKKKDNKDIKVTSFDNIKEEELIKLYKTLSDKLNNGIYSNKRNNQAKNISEALDKFKEISIEEKIDVLNQIILLFQSYNNGCNLKSIGLSAKTGVVFIPKKLNYKECKLINQSITGLFENEVDLLNL

SEQ ID NO: 384 - protein, 1087 aa, Phascolarctobacterium succinatutens
  Phascolarctobacterium succinatutens YIT 12067
MLRMKYAIGLDIGIASVGYAVLALDHEENPWGIIRLGSRIFDVAENPKDGASLALPRREARSVRRRLRRHHHRLERIKNLLINTEFITKDELLHLYDGNLSDVYELRVKALDYSVTNAELTRILLHLAQRRGFKSNRKSDANDKEAGQLLEAVSANAKRMQENHYRTVGEMFYKDDLFSKYKRNKGGTYLTTVHRDMIAAEARTILEKQFALGNNICTQDFIDKYLSILLSQRQFDEGPGEPSPYAGNQIANMIGKCTFEPNEYRAAKASYSFERFNLLQKVNHLRLLLEGKSIALDNEQRKKIIALAHDKADLRYSHIRKALGLDEKVLFNTITYNDDVSVIEKKTKFNFLQAYHQIKKVLAEDMQKLTTEQLDNIGQILSTYKSDNKRTEELSALGLEKKIIDALLGINGLSKFAHLSLKALRKINPYLEEGKIYNEACTAAGYDFKAHANTQKTELLPAYKEEMDDITSPVARRAIAQSIKVINAIIREQKGSPLYINIELAREMAKGFDERTQIDKANKENQAKNERIMERIRTEFHKANPTGMDLIKLKLWEEQDGRSPYSQKAISINRLFEPGYVDIDHIVPYSISFDDSFKNKVLVFSDENRDKGNRLPIAYLQSKFGAKAAENFMIWVQSNIKDYKKRQKLLKREITEEDINKFKERNLQDTKTISRFLYNYINDYLLFAPSDTGKKKRVTAVNGTITAYLRKRWGINKIRANGDKHHAVDAVVIACTTDKMIKDLSSFSRYHELEYTHTDTESFLVNSLTGEILKRFPYPWEDFRPELMARLSDNPADALRKLNLIFYHGIDLSTIKPIFVSRMPRHKVTGAAHKATIKSARCLDNGIVICKTSLQNLKLDKEGEIANYYAPESDTILYNALKERLRSYDNKPAKAFAEPFYKPKADGTPGPLVKKVKVYEKSTLNVAVQQNTAVADNDSMVRVDVFHVKGNGYYLVPIYIADTLKKELPNKAIVAYKPYADWPVMDDSNFIFSLYPNDLIKFEHKNSVKFAKVNKESTLNDFYSTKSEIVYFKGCNINTGAITIINHENTYVVSSLGVKTLPSLEKYQADVLGNYTKVKKEVRKPFR

SEQ ID NO: 385 - protein, 1333 aa, Planococcus antarcticus
  Planococcus antarcticus DSM 14505
MKNYTIGLDIGVASVGWVCIDENYKILNYNNRHAFGVHEFESAESAAGRRLKRGMRRRYNRRKKRLQLLQSLFDSYITDSGFFSKTDSQHFWKNNNEFENRSLTEVLSSLRISSRKYPTIYHLRSDLIESNKKMDLRLVYLALHNLVKYRGHFLQEGNWSEAASAEGMDDQLLELVTRYAELENLSPLDLSESQWKAAETLLLNRNLTKTDQSKELTAMFGKEYEPFCKLVAGLGVSLHQLFPSSEQALAYKETKTKVQLSNENVEEVMELLLEEESALLEAVQPFYQQVVLYELLKGETYVAKAKVSAFKQYQKDMASLKNLLDKTFGEKVYRSYFISDKNSQREYQKSHKVEVLCKLDQFNKEAKFAETFYKDLKKLLEDKSKTSIGTTEKDEMLRIIKAIDSNQFLQKQKGIQNAAIPHQNSLYEAEKILRNQQAHYPFITTEWIEKVKQILAFRIPYYIGPLVKDTTQSPFSWVERKGDAPITPWNFDEQIDKAASAEAFISRMRKTCTYLKGQEVLPKSSLTYERFEVLNELNGIQLRTTGAESDFRHRLSYEMKCWIIDNVFKQYKTVSTKRLLQELKKSPYADELYDEHTGEIKEVFGTQKENAFATSLSGYISMKSILGAVVDDNPAMTEELIYWIAVFEDREILHLKIQEKYPSITDVQRQKLALVKLPGWGRFSRLLIDGLPLDEQGQSVLDHMEQYSSVFMEVLKNKGFGLEKKIQKMNQHQVDGTKKIRYEDIEELAGSPALKRGIWRSVKIVEELVSIFGEPANIVLEVAREDGEKKRTKSRKDQWEELTKTTLKNDPDLKSFIGEIKSQGDQRFNEQRFWLYVTQQGKCLYTGKALDIQNLSMYEVDHILPQNFVKDDSLDNLALVMPEANQRKNQVGQNKMPLEIIEANQQYAMRTLWERLHELKLISSGKLGRLKKPSFDEVDKDKFIARQLVETRQIIKHVRDLLDERFSKSDIHLVKAGIVSKFRRFSEIPKIRDYNNKHHAMDALFAAALIQSILGKYGKNFLAFDLSKKDRQKQWRSVKGSNKEFFLFKNFGNLRLQSPVTGEEVSGVEYMKHVYFELPWQTTKMTQTGDGMFYKESIFSPKVKQAKYVSPKTEKFVHDEVKNHSICLVEFTFMKKEKEVQETKFIDLKVIEHHQFLKEPESQLAKFLAEKETNSPIIHARIIRTIPKYQKIWIEHFPYYFISTRELHNARQFEISYELMEKVKQLSERSSVEELKIVFGLLIDQMNDNYPIYTKSSIQDRVQKFVDTQLYDFKSFEIGFEELKKAVAANAQRSDTFGSRISKKPKPEEVAIGYESITGLKYRKPRSVVGTKR

SEQ ID NO: 386 - protein, 1197 aa, Porphyromonas sp.
  Porphyromonas sp. oral taxon 279 str. F0450
MLMSKHVLGLDLGVGSIGWCLIALDAQGDPAEILGMGSRVVPLNNATKAIEAFNAGAAFTASQERTARRTMRRGFARYQLRRYRLRRELEKVGMLPDAALIQLPLLELWELRERAATAGRRLTLPELGRVLCHINQKRGYRHVKSDAAAIVGDEGEKKKDSNSAYLAGIRANDEKLQAEHKTVGQYFAEQLRQNQSESPTGGISYRIKDQIFSRQCYIDEYDQIMAVQRVHYPDILTDEFIRMLRDEVIFMQRPLKSCKHLVSLCEFEKQERVMRVQQDDGKGGWQLVERRVKFGPKVAPKSSPLFQLCCIYEAVNNIRLTRPNGSPCDITPEERAKIVAHLQSSASLSFAALKKLLKEKALIADQLTSKSGLKGNSTRVALASALQPYPQYHHLLDMELETRMMTVQLTDEETGEVTEREVAVVTDSYVRKPLYRLWHILYSIEEREAMRRALITQLGMKEEDLDGGLLDQLYRLDFVKPGYGNKSAKFICKLLPQLQQGLGYSEACAAVGYRHSNSPTSEEITERTLLEKIPLLQRNELRQPLVEKILNQMINLVNALKAEYGIDEVRVELARELKMSREERERMARNNKDREERNKGVAAKIRECGLYPTKPRIQKYMLWKEAGRQCLYCGRSIEEEQCLREGGMEVEHIIPKSVLYDDSYGNKTCACRRCNKEKGNRTALEYIRAKGREAEYMKRINDLLKEKKISYSKHQRLRWLKEDIPSDFLERQLRLTQYISRQAMAILQQGIRRVSASEGGVTARLRSLWGYGKILHTLNLDRYDSMGETERVSREGEATEELHITNWSKRMDHRHHAIDALVVACTRQSYIQRLNRLSSEFGREDKKKEDQEAQEQQATETGRLSNLERWLTQRPHFSVRTVSDKVAEILISYRPGQRVVTRGRNIYRKKMADGREVSCVQRGVLVPRGELMEASFYGKILSQGRVRIVKRYPLHDLKGEVVDPHLRELITTYNQELKSREKGAPIPPLCLDKDKKQEVRSVRCYAKTLSLDKAIPMCFDEKGEPTAFVKSASNHHLALYRTPKGKLVESIVTFWDAVDRARYGIPLVITHPREVMEQVLQRGDIPEQVLSLLPPSDWVFVDSLQQDEMVVIGLSDEELQRALEAQNYRKISEHLYRVQKMSSSYYVFRYHLETSVADDKNTSGRIPKFHRVQSLKAYEERNIRKVRVDLLGRISLL

SEQ ID NO: 387 - protein, 1485 aa, Prevotella bivia
  Prevotella bivia JCVIHMP010
MKNILGLDLGTNSIGWAKISIDDNGKYIKDSIKLGSRIIPMSQDVLSNFSKGVTLSQTSERTSFRGARRLRERTLLRRERLHRILHLLGFLPKHYEKAIGWDRNDNKTYGKFINHAEPKLAWCKDNNGKMRFLFMDSFHDMLSEFSEKHPELLANGKKIPLDWTIYYLRKKALYKAITKEELAWILLNFNQKRGYYQLRGEEDRDSEANKKEYLELKVIGVEATGEKKGNDIWYNIHLENGWIYRRSSKNPLNDWLGKVKSFIVTTDLDADGNPKKDKDGNIKRSFRAPSEGDWTLIKKRTESLLENSGQTVGQFIYNHILEEPSAKIRGNFIRTIERKYYKDELKAILEKQKEFHHELSSESLLTECAKELYKRNIAHQEVLLKKGIIHLLLNDILFYQRPLKIKKSLIDNCPYENYKYVDKKSGDIKVKSIKCIAKSNPFFQEFRLWQFVSNLRLYRKSDDKDVTSEHLVTTDDYANLFTYLNNRKDIKQSVLLKEYFKIKKVKTINGAEYPVRWNYIDDDNKTYPCNETRYDILHALSKTELKSEWLTPERTYRLWHLLYSIESKEETKKALNKLNLSDDFTEAFLTIKPFKKEYGSYSEKAIKKLLSLMRMGYLWSEDEAIKQVGAEIEKTIEGELPDYVLQRLEKSQHNYNKISDFSGLPLWLASYIIYGRHSEAKEIIHWDNPESMMAYIKDFRQHSMRNPIVEQCVLETLRTVHDIWKEIGHIDEIHIELGREMKSTSEQRKAITQNVLHNQNTNIRIKLLLQELKNDNNITGVRPYSPMQQEILRIYEEGALQGLTKEDKDYNDILKISQTAQPTSNELTRYKLWLEQKYRSPYTGKAISLSKLFTSAYQIEHVIPQSRYFDDSLSNKVICESEVNTLKKAMLGMEFIKTCGGQKVHCTLLGDVEIYNEEDYKAFVNEHYSNNRTKRNKLLMEDIPQEFINRQLNDSRYISKMVKQLLSAIVRGQEEVEATSKFVIPCTGGITDRLKKDWGLNDIWNNLVSPRFQRMNALTGSEYFGHWENKEGKRVFQTTMPIQLQQGFSKKRIDHRHHAMDALVIACASRNIISYLNNETAQDTERRRDLRQKLCDKGGSVRKPWDSFTQDTQYALKDIIVTFKNYVRIINKATNYYEHYKTDGKKGMISQKGDELWAIRKPMHKETVFGKVNLRRPKRVSLSKAIDSVDIICNRKLKKYIKARLNEGLQKKQILNIFKELNNVWEGIDVNKIDIWEMSNDKEPMVATRKQLDTSFDEKKIRSISDTGIQKILLNYLITKNNNPELAFTPEGIQEMNSNISEYNDHKKHQPIYKVRVTEPLGAKYPIGTMGNNPKKFVEAQAGTNLYFAIYEDKEGKRNYDTIPLNIAAERLNQQLSPVPETNENNTPLKFYLSPNDLVYVPSEEERHSGNNIQLDKNRIYKMVSSTSKRCFFIHHRVAISLVDKKEFSAQNKMERSIDNEQVMIKSVCWKLITDRLGNIIKVIK

SEQ ID NO: 388 - protein, 1457 aa, Prevotella buccae
  Prevotella buccae ATCC 33574
MKTILGLDLGTNSIGWAKVSVDDYGNYLHDIKLGSRIIPMSQDVLGNFDSGVTVSQTAQRTEFRSKRRLVQRNLQRRERLHRVLHVLDFLPAHYDAAIGWDRTEAVTYGKFLNHAEPKLAWEELGNGKRRFLFMDSFHEMVADFARCQPALVADGKKIPLDWTIYYLRKKALTQAITKEELAWILLNFNQKRGYYQLRGEEEEENPTKQEEYYELKVVSVEATDSRKGNDTWYNVHLENGWIYRRSSKISLDDWVGKVKQFIVTTEYEKDGATLKTDKEGYVKRSFRAPNENDWGLRKKRTETLLEMSGKTVGAFIYDHLLQEPADKIRGNFIRTIERHYYKAELEAILAEQCKYHIELRDKEMLEACARELYLNNLPHQRSLMKKDMTYLLLYDLIFYQRPLKSKKALIANCPYEYYEYVDKETGEIKRQNIKCIAKSNPYFQEFRLWQFVLNLRLFDRVEDKEVTANYLPTADDHARLFTYLNDRKEINQETLLKDYFKLKKVKIGNEKEYPIRWNYIEDKEKKYPCNETRYELLMALDRAGIEHKWLDDNNLEYRLWHLLYSVEVKSESETALRKLKNDDAFVNSFLKVKPFKKEYGAYSEKAIKRLLAVMRKGFLWNEQDICDETRKRIEIIIKGDVDEKVKERMGHAAYSFDRVSDFQGLPEWLACYVVYGRHSEAMDIQHWDSPERLMAYINNFKQYSLRNPIVEQCILETLRTVHDIWKETGQIDEIHVELGREMKSTSEERARRTQNVLRNENTNLRIKSLLIELKNDTDICNVHPYSPMQQEILRIYEEGALQELNREDEDFEEISKISQMSQPSGKELNRYKLWLEQKYRSPYTGKAISLAKLFTPAYQIEHVIPQSRYFDDSFTNKVICEAEVNTLKSNLLGYEFIKKHGGEIIHCTTLGDVRIFSESEYKAFVMDHYANNKSKKDKLLMEDIPQEFLSRQMNDSRYISKVVKTLLSNIVRMADESEATSKSVIVCTGGVTDRLKKDWGLNDVWNSIVYSRFERLNRLTGTEAFGHWENKDGKRVFQTSMPLELQRGFRKKRIDHRHHAMDALVIACASRNIVNYLNNESANNPKKREDLRRQLCDKNRVIRKPWETFTQDAYNALENVVVSFKNYVRVINKATNRYEHYDENGKKRFVQQKGSELWAIRKPMHKETYYGHVNLRRKELVTLQKALDDIPSICDKKLRDYISALVEKHFNKRQLLAHFKSTDYYWQKQYVNKVYVWTFSDDIKPLVATRKLLDTSFDAKRIGTITDTGIQKILRNYLEAKGGNATLAFTPEGIAEMNQNISKYNDGKPHQPILKVRITEPMGAKYRVGQTGNKMAKYVEAQSGTNLYFAIYEDSEGKRSYTTVPLDEVAERLKQRLSPVPEKDENDVPLKFYLSPNDLVYVPTEEELQLRECKLNKDRIYKMVSSTGNECHFIPYYVANVIYNKGGFNMQMHRPQS

SEQ ID NO: 389 - protein, 1218 aa, Prevotella buccalis
  Prevotella buccalis ATCC 35310
MNKRILGLDTGTNSLGWAVVDWDEHAQSYELIKYGDVIFQEGVKIEKGIESSKAAERSGYKAIRKQYFRRRLRKIQVLKVLVKYHLCPYLSDDDLRQWHLQKQYPKSDELMLWQRTSDEEGKNPYYDRHRCLHEKLDLTVEADRYTLGRALYHLTQRRGFLSNRLDTSADNKEDGVVKSGISQLSTEMEEAGCEYLGDYFYKLYHEQGNKVRIRQRYTDRKKHYQHEFDAICEKQELSSELIEDLQRAIFFQLPLKSQRHGVGRCTFERGKPRCADSHPDYEEFRMLCFVNNIQVKGPHDLELRPLTYEEREKIEHLFFRKSKPNFDFEDIAKELAGKKNYAWIHDKEERAYKFNYRMTQGVPGCPTTAQLKSIFGDDWKTGIAETYTLIQKKNGSKSLQEMVDDVWNVLYSFSSVEKLKEFAHHKLQLDEENAEKFAKIKLSHSFAALSLKAIRKFLPFLRKGMYYTHASFFANIPTIVGKEIWNNEQSRKYIMENVGELVFNYQPKHRDVQGTIEMLIKDFLANNFELPAGATDKLYHPSMIETYPHALRNEFGILQLGSPRTNAIRNPMAMRSLHVLRRVVNQLLKESIIDENTEVHVEYARELNDANKRRAIADRQKEQDKQHKKYGDEIRKLYKEETGKDIEPTQTDVLKFQLWEEQNHYCLYTGEQIGITDFIGSNPKFDIEHTIPQSVGGDSTQMNLTLCDNRFNREVKKAKLPTELANHEEILTRIEPWKNKYEQLVKERDKQRTFAGMDKAVKDIRIQKRHKLQMEIDYWRGKYERFTMTEVPEGFSRRQGTGIGLISRYAGLYLKSLFHQADSRNKSNVYVVKGVATAEFRKMWGLQSEYEKKCRDNHSHHCMDAITIACIGKREYDLMAEYYHMEETFRQGRGSKPKFSKPWATFTEDVLNIYKNLLVVHDTPNNMPKHTKKYVQTSKGKVLAQGDTARGSLHLDTYYGAIERDGEIRYVVRRPLSSFTNPKELENIVDETVKRTIKEAIADKNFKQAIAEPIYMNEDKGILIKKVRCFANSVKQPINIRQHRDLSKKEYKQQYHVMNENNYLLAIYEGLVKNKVVREFEIVSYIEAAKYYKRSQDRNIFSSIVPTHSTKYGLPLKTKLLMGQQVLMFEENPDEIQVDNTKDLVKRLYKVVGIEKDGRIKFKHHQEARKEGLTIYSTPYKNNDDYVPIFRQSIKNINILVDGIDFNIDILGKVTLKE

SEQ ID NO: 390 - protein, 1422 aa, Prevotella denticola
  Prevotella denticola CRIS 18C-A
MTQKVLGLDLGTNSIGSSVRNLDLSDDLKGQLEFFSSDIFRSSVNKESNGREYSLAAQRSAHSRSRGLNEARRRKLWATLDLLIKYGFCPMSPESLMRWRTYDKQRGLFREYPIDDKNFNAWILLDFDGDGKPDYSSPYQLRRELVIRQFDFDQPIERYKLGRALYHIAQHRGFKSSKGETLSQQETNSKQSLTDDTADVAGEMKASEEKLSKGLSTYMKENNLLTVGAAFAQLEDEGVRVRNNNDYRAIRSQFQREIETIFKFQQGLSVENELYERLVSEKKNIGTIFYKRPLRSQRGNVGKCTLERTKPRCAIGHPLFEKFRAWTLINNIKVRMSEEEQAEQLPMKLRFELYNDCFLAFVRAEFKFEDIRKYLEKRLGVHFSYNDKTINYKDSTSVAGCPITARFRKLLGEDWESFHVDGQKQRQAHGKNNASFHTVSYSTNDIWHFCYDAEEPEAVLSFAQDNLKWEKKKAEELVRIWSAIPQGYAMLSQKAIRNINKMLILGLKYSDAVLLAKVPEIVEITDGEILSVTEDYHRVEAQVGYEKQINNIVNALIAKYKSASEEYRFADHNYEYQLDKSDEKDIIKQIESNIGTRKWSLLDADEQTDILQKVRDKYQNFFRSHERKFVESPKLGECFEEYLMKKFPMVEGERWKKLYHPSQIAIYRPVPANKDRSALRLGNPDIGAIKNPTVLRVLNTLRKRVNQLLDDGIISPDETRVVVETARELNDANRKWALDTYNRIRHDENEKIKKILAEFYPKRDNISTVDIDKARYVIDQREMDYFTEAKTYHKDIKKYKLWLEQGGQCMYTGRTINLSNLFDPNSFDVEHTIPESISFDSSDMNLTLCDAHYNRFIKKNHIPADLPNYDKSVVIDGKEYSPIKPRLQRWADRVERLNRNVEYWRGQARRAQNKDRKDQCMREMHLWKMELEYWTKKLERFTITEVTDEFKNSQLVDTRVITRHAVLYLKSIFPHVDVQRGDVTAKFRKILGIQSVDEKKDRSLHSHHAIDATTLTIIPGAAKRERMLELFAKIEEVNKMLSFSGNEDRTGLKQELDGLKNQLNKEVKACRIGHNVSEIGTFINDNIIINHHVKNQALTPVRRRLRKRGHIVGGMDNPRWQTGDALRGEIHKASYYGAITQYAKDKEGKVLMKEGRPQINPTIKFVIRRELKYKKSSTDSGFASWDDLGKAIVDKELFALMKGQFPEGTSFKDACEQGIYMIKKGKNGEVDTKLYRIRHIRCKTKQKNALKIKEQAYKSEKEYKRYFYAAVGDLYAMCCYTNGKTREFKIYSLYDISCHRKVGVEDIPEFITDKKGNRLMLDYKLHTGDMILLYKENPEELYDLDNVSLSKLLYKINGFENDGLRIRMVNHLVAKEAMGESVKDYAKLPDIIRCGVKTIKFLVMGENRDFVIKNGKISFNHR

SEQ ID NO: 391 - protein, 1375 aa, Prevotella histicola
  Prevotella histicola F0411
MKKILGLDLGTTSIGWALVYESENTDEKSSIVRLGVRVNPLSVDEKGNFEKGKAITTNADRQQTHGARINLQRYKLRRENLKDCLQKQGWIGTEALCEEGKTSTFETYMLRAKAAEEEISLHELCRVLFMMNKKRGYKSNRKANNKEDGKLFDGMTVAKKLYEEHLTPAEYSFQLLSSGKKFKQEYYRSDLKEEFDRIWNEQQKYYPEILTDDFKQQLQGKSKGNTSKIFLGKYGIYSADLKGLDRKLQPLKWRVEALKQQVDKEVLAFVISDLNGQIASTSGLLGAISDRSKELYFNKQTVGQYLWTSLKETPHVSIKNKPFYRQDYLDEFEKIWETQATYHKELTPELKQEIRDIIIFYQRPLKSKKGLISVCELEQRKVKVTIDGKEKEISIGPKVAPKSSPMFQEFRIWQNLNNILLIDKGNNSIHPLYEEEKNLLYEELSVKEKLSKAEALKVLNKNSKQWDLNYKEIEGNRTQAVLYDCYNRIIVMTGHEEYNFKKLKASEIRSYVKTTFTGLGFNTDILEFDSSLTGHELEKQPMYQLWHLLYSYESDNSRTGNDALLRKLETAFGFPKEYAAVLSDVVFEDSYGNLSVKAMRKILPHLQAGLNYSQACEEAGYKHSRRSLTKNELDQKEYKEKLELLPKNSLHNPVVEKILNQMINVINAVIDEYGKPDEIRIELARELKIGAAERENMTRSINQGNAENKRIREILEKEFALSYISRNDIIKYKLYEELKSNGFKTLYSDTYISKDKLFSKDFDIEHIIPKARLFDDSLSNKTIEARDVNIAKSNKTAFDFISEKYDQQGIEAYKKKLDILLQDGSISKAKYNRLLMKEADIPSGFIDRDLRDTQYIAKKAYEILSDLVRNVTPTTGAVTSRLREDWQLVDVMKELNFEKYQKLGLVEVIEDRDGRKIKRIKDWTKRNDHRHHAMDALTIAFTKPSYIQYLNNLNARSDKNSSIYGIENKELHREDNKLRFNAPLPINEFRAEARRHLKSILVSVKAKNKVMTQNVNVIKTKHGVIKKVQLTPRGELHNATFYGTKKRPIIKMVKVGAALDEVTIKKVSSSFIREALLDRLHEYNGDAKKAFTGRNSIDKNPIYIDEEHKKTVPALVKTIEWEMYHPTRKLISPDLKIDKVIDKGIREILKTRLAKFNGDAQKAFSNLDENPIYKDEAKKITLKRVSLEGVSSVIPLHTLKDREGKLVVGKDGKPVLGDYVQTSNNHHIAFYMDENGNLQDNVVSFFEAAERKSQGVPVIDKNYNHDKGWNFLFTMKQNEYFVFPNEVTGFNPSEVDLMDEANYSIISPNLYRVQKMSKASGRDYWFRHHLEAMLNDDPKLRNSMFKRITSLKALEGIVKVRINCIGKIVAVGEYD

SEQ ID NO: 392 - protein, 1380 aa, Prevotella intermedia
MKRILGLDLGTTSIGWALVNEAENNNEASSIVRLGVRVNPLTVDEKSNFEKGKAITTNADRQLRHGARINLQRYKLRRQNLHDCLQKQGWLGTEAMYEEGKASTFETYKLRAKAAEEEISLHEFARVLFMLNKKRGYKSNRKANNKEDGQLFDGMTIAKKLYEEHLTPAEYSLQLLNKGKKFTQGYYRSDLNAELERIWDEQKKYYPEILTDEFKQQLEGKTKTNTSKIFLAKYGIYSADLKGLDRKFQPLKWRVEALQQQVDKEVLAFVISDLKGQIANTSGLLGAISDRSKELYFNKQTVGQYLWASLEENPHISIKNKPFYRQDYLDEFEKIWETQAAFHKQLTPELKQEIRDIIIFYQRPLKSKKSLISVCELEQRKVKATIDGKEKEITIGPKVAPKSSPVFQEFRIWQNLNNVLLIDNDTNEKRPLDEVERNLLYKELSIKAKLSKTEALKILNKKGKQWDLNYRELEGNRTQAILFDCYNRIITLTGHEECDFKKIKASEIRHYVSTIFKNLGFSTEILDFDPSLKKHELEKQPMYQLWHLLYSYESDNSRTGNESLLRKLETTFGFPEEYATVLCDVVFEEDYGNLSVKAMREILPYLQAGNDYSQACAYAGYNHSRHSLTKEELDQKVYKERLELLPKNSLRNPVVEKILNQMINVINAIIDEYGKPDEIRIEMARELKSSAADRKKTTHAISQGNAENQRIREILEKEFSLSYISRNDIIKYKLYEELEPNYYKTLYSDTYITKDKLFSKDFDIEHIIPKARLFDDSFSNKTLEARNINLEKSNKTAFDFIKEKYGEDGAEAYKKKLDMLLENDAISRPKYNNLLRAEADIPSDFINRDLRNTQYIAKKACEILGELVKTVTPTTGKITNRLREDWQLVDVMKELNFEKYEKLGLTEIVEDRDGRKIKRIKDWTKRNDHRHHAMDALAIAFTKPSFIQYLNNLNARSNKGDSIYAIENKELHYEEGKLRFNAPIPVNEFRAEAKRHLSAILVSIKAKNKVMTQNVNKIKTKHGIIKKIQLTPRGPLHNETIYGTKMRPIIKMVKVGAALDEATINKVSSPAIREALLKRLNEYSGNAKKAFTGKNTLEKNPIYLNAGRTKTVPSLVKTVEWESFHPTRKLIDKDLNVDKVVDKGIREILKARLEEFNGDAKKAFSNLEENPIYLDEAKKIALKRVSIEGVLSAIPLHTLKNQAGKPITGKDGKPVLGNYVQTSNNHHIAFYYDEDGNLQDNAVSFFEAAERKSQGIPVIDKDYNRDKGWRFLFTMKQNEYFVFPNEATGFIPSEVDLTDEANYGIISPNLYRVQKVSRIDKGTSASRDYWFRHHLETILNDDAKLKNLAFKRIRGLLELKDIIKVRINSTGKIVAVGEYD

SEQ ID NO: 393 - protein, 1425 aa, Prevotella micans
  Prevotella micans F0438
MIQKIFGLDLGTNSIGSSVRNLELGENLTEQLEFFSSDIFGSSVSKNSNGREYSLAGNRSAHRRSRGLNEARRRKLWATLDLLIEHGLCPMSPDSLMQWRTYDKQKGLYRQYPIEDKDFNAWIMLDFNGDGKPDYSSPYQLRRELVVRQFDFDQPIERYKLGRALYHIAQHRGFKSSKGETIADQEKNEKKPIAEEGADIANEMKASETKLSKGLVAYMQENHLKTVGEAFAKLEDERVRIRNNESYRAIRSQYQDEIKEIFTYQKKLSVESELYERLTSEKKGVGTIFYKRPLRSQRGNVGKCTLERNKPRCPIGRPEFEEFRAWTLINNIKIRETAGEPYKQLPIKLRQELLKDCFLSKVKADFKFEDIRKYIEKRLGLSFSNDDKTINYKDSVSIAACPVTVRMKKLLGENWANCRIDGEKRRQAHGKNNNNEHIVSYTEEDIWHVCYNAEDPEEVSNFARKALHWDENKIKELVRLWTSIPQGYAMLSLKAIRNINRMLLLGLKYSDAVLLAKLPDIVPVSDEDILAITKEFLQLEDKLNQEKQINNIVNSLIANYKSKLEENRFADHNYQYQLGEGDDEDINTQIKSHIGAKLWVQIGADEQTKIFQAVRSKYQDFFKSYKRKFVESPKLGELLVAFLTEKFPNVKSKQWERLYHPSQIAIYRPIPVDNDRSKLRLGNPNIGAIKNPTVMRVLNTLRRRVNQLLDDGVISPDETRVVVETARELNDANTKWALDRYNRIRRDENEKIRKILKELNPTTNSISEQDIDKARYIFEQCETDFYTDGKVPYYNKDIKKYKLWLEQGGQCLYTGQTINLTNLFNPNAFDMEHTIPKSISFDNSDQNLTLCESYYNRFIKKNNIPTDMPNYDKDVTINGKEYTAIKPRLQRWKERVDRLSRNVDFWKGQARRAQDKDRKDECIREKHLWDMELAYWKGKLERFTMTDVTDGFKNSQLVDTRVITRHAVLYLKSIFNHVEVQRGETTAEFRKILGLQSIDEKKDRSLHSHHAIDATMLTVIPSAAKRDRMLELFYKIEETKKALKNYNDNNKTGLNLELKGLEEKLDKEKKDCRVGRRVNDLDRFINENIIVSHHTKDQALTPAHRRLRKRGKIVGGKEHPRWQTGDSLRGEIHKASYYGAITQFAKDANGKVLMKDGQAQIDPTIYYVIRRELKYKRSTQDSGFTNWEDLEKVIVDTDLFGLMKGQFPEGTSFKDACEQGFYMIKKGKNGEGDVKTHRIRHVRCKAVKTALRIKEQTYKSSKDYKQFFYAAVGDLYVMCYYTDGKKRDFKIYSLYDISNHRKSGTEDIPKFITDKKGNHLPLDYKLRTGDMVLLYKDNPEELKDLDQVNLKRRLYKVNRFESEGLIILLTHHLSTTTERGCSIGKIENYQNLPTAIRCGIKTIKFLIMGKHRDFVIRNGNIEFKH

SEQ ID NO: 394 - protein, 1506 aa, Prevotella nigrescens
  Prevotella nigrescens ATCC 33563
MKTILGLDLGPNSIGWAKVEVDDEGNYLRNIKLGSRIIPMTQDMLGDFDKGVKVSQTAIRTDFRGNRRLIERHLLRRERLHRVLHALKFLPKHYEDAIGWDRNEPATYGKFVNNSEPKLAWERQEDGSMRFLFMESFNEMVADFAQNQPSLVSDGKKIPLDWTIYYLRKKALTRPIKKEELAWILLNFNQKRGYYQLRGEEEEDNLTKRKEYYKLKVVGVEADGAPKGGKTWYNIHLENGWTARCQSKIPLDDWVGKVKEYIVTTEYEDDGKTPKCDKEGKVKRSFKSPEKDDWQLIKTRTEKFIDDSNKTVGAFIYDYLLEKPFDKIRGKYIRTIERKYYKNELREILREQTKYHEGLHSLEALKICAEELYKNNQQHQEYLLKKDMTFLLLNDLIFYQRPLKSKKSLIADCPYEVYKYDDKLTGKKGQKKIKCIAKSNPYYQEFRLWQFIANLRLFSVTDGKEVTAEYLKTEEDYVRLFSFLNDRKDIKQETFLRSFLKLKKESIGSEKIYPIRWNYIEDANKSYPCNATRHELLLAFDRADIPRELLDVEEREYRLWHLLYSIEAKEETESALRKLKANKAFGDLNIDDAFVNSFLKIKPFEKEYGAYSEKAIKKLLAVMRRGSLWKEADICEATKQNIAKILQNDIDEKLKKKIEAAVSSFNKLSDFQGLPTWLACYVVYGRHSEAAQIQCWQSPEDLKTYINKFKQHSLRNPIVEQCLLETLRTVYDIWKDAGQIDEIHIELGRNMKSTAEQRARKTKDILRNENTNLRIKNLLVELKNDDKIENVRPYSPSQQEILRIYEEGALQELSKEDEMFEDISKISKMAQPSPTELSRYKLWLEQKYRSPYTGRVIPLSKLFTTAYQIEHIIPQSRYFDDSFNNKVICESEVNSLKDNMLGYEFIKECGGRIVHCTLLGDVKIFTKEEYKDFVTKHYIDNTYKRDKLLLEDIPQEFSARQLNDSRYISKMVQTVLSNIVRAENEQEATSKFVVSCNGAITNRLKKDWGLNDVWSSIVCPRFKRLNEITKTNAFGHWEDKAGKHVFQTTVPLELQRGFSKKRIDHRHHAMDALVIACASRNIVNYLNNESANSPEKREDLRKKLCDEKRKIRKPWKTFTQDAREALSDVVVSFKNYVRVINKATNYYEHYSSSGNKVMISQKGNDMWAIRKPLHKESVFGRVNLCRKVIVSLKKALENIPAICDKTLRDYINALVEKHFNTRQLLAHFKSINYRLNRQCVEKVEVWQFSDEKIEMVARRKSLDTSFDDKQISSITDTGIQKILLNYLQTKDGNAEIAFTPEGIEEMNKNISLYNDGKAHQPILKVRVATPKGMKYPVGQTGNKATKFVVAEKGTNLYFAIYENELGVRSYDTIPLNIVVERLKEGLSPVPQANEADIPLKFYLSPNDLVYVPTKENEDELCRDRIYKFVDSSGTTANFVPHTSANTIYNVDKEYAEKCCNGAVFLNEYGLGSPQSKNQRALTGEMIKEICWKLKVDRLGNIIKVIK

SEQ ID NO: 395 - protein, 1380 aa, Prevotella nigrescens
  Prevotella nigrescens F0103
MKRILGLDLGTTSIGWALVNEAESNNEASSIVRLGVRVNPLTVDEKSNFEKGKAITTNADRQLRHGARINLQRYKLRRQNLHDCLQKQGWLGTEAMYEEGKASTFETYKLRAKAAEEEISLHEFARVLFMLNKKRGYKSNRKANNKEDGQLFDGMTIAKKLYEEHLTPAEYSLQLLNKGKKFTQGYYRSDLNAELERIWDEQKKYYPEILTDEFKQQLEGKTKTNTSKIFLAKYGIYSADLKGLDRKLQPLKWRVEALKQQVDKEVLAFVISDLKGQIANTSGLLGAISDRSKELYFNKQTVGQYLWASLEENPHISIKNKPFYRQDYLDEFEKIWETQATFHKQLTPELKQEIRDIIIFYQRPLKSKKSLISVCELEQRKVKATIDGKEKEITIGPKVAPKSSPVFQEFRIWQNLNNVLLIDNDTNEKRPLDEDERYLLYKELSIKAKLSKTEALKILNKKGKQWDLNYKELEGNRTQAILFDCYNRIITLTGHEECDFKKIKASEIRHYVSTIFKNLGFSTEILDFDPSLEKHELEKQPMYQLWHLLYSYESDNSRTGNESLLRKLETTFGFPEEYATVLCDVVFEEDYGNLSVKAMRKILPYLQAGNDYSQACAYAGYNHSRHSLTKEELDQKVYKERLELLPKNSLRNPVVEKILNQMINVINAIIDEYGKPDEIRIEMARELKSSAADRKKTTHAINQGNDENQCIREILEKEFALSYISRNDIIKYKLYEELKPNGFKTLYSDTYIPKDKLFSKDFDIEHIIPKARLFDDSYSNKTLEARDINLAKSNKTAFDFVKEKYGEQGAEAYKKKLDMLLGNNVISKPKYNKLLMTEADIPSDFINRDLRNTQYIARKACEILGELVRTVTPTTGKITNRLREDWQLVDVMKELNFEKYEKLGLTEIVEDRDGRKIKRIKDWTKRNDHRHHAMDALAIAFTKPSYIQYLNNLNARSNKGDSIYAIENKELHYEEGKLRFNAPIPVNVFRAEAKRHLSAILVSIKAKNKVMTQNVNKIKTKHGIIKKIQLTPRGPLHNETIYGTKMRPIIKKVKVGAALDEATINKVSSPAIREVLLKRLNEYSGNAKKAFTGKNTLDKNPIYLNAERTKTVPASVKTVEWENYHPIRKPITPDLKVDKVIDKGIGEILKARLEEFNGDAKKAFSNLEENPIYLDQTKKIALKRVSIEGVLSTIPLHTLKNQAGKPIMGKDGKPVLGNYVQTSNNHHIAFYYDEDGNLQDNAVSFFEAAERKSQGISVIDKDYNRDKGWRFLFTMKQNEYFVFPNEATGFIPSEVDLTDEANYGIISPNLYRVQKMSRIEKGTSVSRDYWFRHHLETILNDDSRLKNSAFKRINSLKPLEGIIKVRINSIGKIVAVGEYD

SEQ ID NO: 396 - protein, 1391 aa, Prevotella oralis
  Prevotella oralis ATCC 33269
MKKILGLDLGTTSIGWALVNEKENNEELSSIIRLGVRVNPLTVDEKSNFEKGKDITTNADRTKCRSARRNLQRFKLRREALADCLKRHGLMTDETPLCETNNSIIFKTYSNRAKAVCEKIALDDFVRVLFMINKKRGYKSSRKLNTDDEGTLVDGMDVAKLLYNEQITPGEYLLRLFKKGKKTRPDFYLSDLKAELERIWDFQRTFYPEILCNALKEDLKGKSRTQSSAIFYAKYKVSTAKIAGKDKRLQELTWRTDALRKQLTIDEVAYVICSINGEVNGSSQRLSMISDRSKLLYFNHQTIGQYLMQRLEENPNAGLKNIIFYRQDYEDEFNDIWNSQATYHKELTPELKKEVKDIIFYQRGLKSCKWLINYCELEHEEIEVKTPEGKLRKITIGSKTCPKSSPLFQEFKIWQVLNNLQVSPLNSRRKAKRKKDEEPSLFSDEDMNTACRYLNEEEKLTLFKELSIKKELKKKDALKLLFENYKELDLNYKVISGNVTMANLYRAFQDIISLTGNGEFDFQAMPAEEAEKTVEEIFGGLGYKTAFLHFDASLHDKEFERQPAYRLWHLLYSYAGDQSKTGIEALVKRIQELCGFEPEYARILANISFIPDYGNLSSKAMRKILPYMQDGYEYSEACSKAGYRHSASSLTKEEINKKNYKTHLDEIKRNSLRNPIVEKILNQMVNVVNSVIDTYSNIDEIRIEMARELKKSKPEREDMSFAISKATKETERIKGILEQEFKIQHVTRNDIIRYRLYEELKPNGYKTLYSNTYIPREDLFSKKFDIEHIIPKARLFDDSYSNKTLELRDINIEKGNQTAYDFVLSKYGEEGLYKYEQRVEEFKKNNEQAGTKCRKLLMREADIPSDFLNRDLNDSQYIAKKAHELLREIVPTVTATTGSITNRLREDWKLVNVMKELNWEKYDKLGLTEEYKDKDGNTVRHIKDWTKRNDHRHHAMDALTIAFTKPSFIQYLNNLNARSNRGGSIYGIEQKELERENNKLVFIPPIDPKIFRKQAKEHLSNILISIKAKNKVVTKNVNKTKSKSGTNRKVQLTPRGQLHLETVYGKIRTYKTEEIKVGTKLTEELIAKVADKKIREALMQRLSEYGGNIKKAFQNISKHPIWLNGSHTKHVPEKVKIVFFEDVFTIRKAITPDIKIDKVIDSKIRRILQERLNEFGGEASKAFSNLDENPIWFNRDKGIAIKSVKIRGIAKGTAIRVKKDIHGKTIIGNNGYPVANDYVNTGNNHHVAIFRDKDGNLQEHIVSFYEATARAIQNLPIVDRNYNSEKDWKFLFSMKQNEYFVFPNPNTGFNPSEISLKDEKNYALISPNLFRVQKLSHYYYVFRHHLETNVDTNLQLKDITWKRITAVNNLTGAVKVRIDHLGRIVDVGEYK

SEQ ID NO: 397 - protein, 1204 aa, Prevotella ruminicola
MERILGIDTGTNSLGWAIVDKDENQYHLVAKGTNIFSEGVKIEKGIESSKAAERTEHRSVRKHYWRRKIRKIRLLTILSDNDLCPRLKHEQLRQWRLKKVYPTDDTFMEWQRTEDKAQVNPYKFRYICLTQKLDLSDITQRFILGRALYHLNQRRGFLSNRKEATKESEGTVKEGISSLSKDMKDSGCEYLGEYFYQLYQQGKKIRNHYTARKEHYLKEFKAICSKQELDDALIEKLEKAIFDQRPLKSQKGQVGTCTFEKGKSRCPSSHPLYEDFRMYSFINNIKVQVDTLYDKGERSLTDEEKQLIIPLFKRKSKRTFPFEDIAKKIAGKNNYCYIKSNEEKAYKFNYQMDTQVSGSPVNAQLEEIFGEDWLSSVCEVYTLANNKSRFQIMNDVWHVLFFYDDEDKLKEFAKDRLQLDDELAEKFSKISIPNDYAALSLKAIRKIMPYLRDYGLIYSEAVFLANLVDVLPQHVWGIKEMREAAIENVIDVMHSYDKNNIDGITLEGCVKTFLKERYQVSDDNLKKLYHPSMLDPYPRQRPNDEGVFQLGSPRISSVKNPMAMHSLFRLRKVVNLMLKKGYITPDTKVHIEFSRDLNDANKRWAIQTWQRENEKERERCRKEIEKYIASPSDTDILKYQLWEEQNHKCLYTGDEIRITDFLGDNPKYDIEHTIPRSAGGDSTKMNLTLCSSRFNRDEKKTKLPAELVNHDEILERISNWKEKYEDIDKQIRKISTKGATSKEDKDSKIRRRHYLILQRDYWRGKYQRFTMTEVPEGFSRRQGTDISVISRYARMYLKSVFKQVYIVKGIATSDFRKMWGIQDEYAKKERVNHVHHCIDAITIACIGKAEYDKLADYRHQYDDYLFQGKTKPTFDKPWPSFVIDIKHIQDELLIAHYAKDNLEKFTKKNLRGKDGRIIRDKFGNKLQMKGDTSRNSLHNDKFYGAINHEGEIKYVYRTNIEALDAKSIGNIVDPTVRSIIESAIAIHGSLKAAINKGIWMNEEKHIPIKKVRVFRNDVKKPIELKDQRDLSDKDYKQHYYVTNDGNYMMLIFSKLNNKGREIRQHVVINSLEATEVIKSHKRSQVGKVVWESYYSKEGFDLIYKLKSGTMILLYENNRDEVWDLDIRNLQKRLYIITKMKYDGRIYMMHHQEAREKKDLEEKSGSFKINEDYRPLIVNSYNQFNALVQDLDFEINDLGEIRRLI

SEQ ID NO: 398 - protein, 1424 aa, Prevotella sp.
  Prevotella sp. C561
MTQKVLGLDLGTNSIGSAVRNLDLSDDLQWQLEFFSSDIFRSSVNKESNGREYSLAAQRSAHRRSRGLNEVRRRRLWATLNLLIKHGFCPMSSESLMRWCTYDKRKGLFREYPIDDKDFNAWILLDFNGDGRPDYSSPYQLRRELVTRQFDFEQPIERYKLGRALYHIAQHRGFKSSKGETLSQQETNSKPSSTDEIPDVAGAMKASEEKLSKGLSTYMKEHNLLTVGAAFAQLEDEGVRVRNNNDYRAIRSQFQHEIETIFKFQQGLSVESELYERLISEKKNVGTIFYKRPLRSQRGNVGKCTLERSKPRCAIGHPLFEKFRAWTLINNIKVRMSVDTLDEQLPMKLRLDLYNECFLAFVRTEFKFEDIRKYLEKRLGIHFSYNDKTINYKDSTSVAGCPITARFRKMLGEEWESFRVEGQKERQAHSKNNISFHRVSYSIEDIWHFCYDAEEPEAVLAFAQETLRLERKKAEELVRIWSAMPQGYAMLSQKAIRNINKILMLGLKYSDAVILAKVPELVDVSDEELLSIAKDYYLVEAQVNYDKRINSIVNGLIAKYKSVSEEYRFADHNYEYLLDESDEKDIIRQIENSLGARRWSLMDANEQTDILQKVRDRYQDFFRSHERKFVESPKLGESFENYLTKKFPMVEREQWKKLYHPSQITIYRPVSVGKDRSVLRLGNPDIGAIKNPTVLRVLNTLRRRVNQLLDDGVISPDETRVVVETARELNDANRKWALDTYNRIRHDENEKIKKILEEFYPKRDGISTDDIDKARYVIDQREVDYFTGSKTYNKDIKKYKFWLEQGGQCMYTGRTINLSNLFDPNAFDIEHTIPESLSFDSSDMNLTLCDAHYNRFIKKNHIPTDMPNYDKAITIDGKEYPAITSQLQRWVERVERLNRNVEYWKGQARRAQNKDRKDQCMREMHLWKMELEYWKKKLERFTVTEVTDGFKNSQLVDTRVITRHAVLYLKSIFPHVDVQRGDVTAKFRKILGIQSVDEKKDRSLHSHHAIDATTLTIIPVSAKRDRMLELFAKIEEINKMLSFSGSEDRTGLIQELEGLKNKLQMEVKVCRIGHNVSEIGTFINDNIIVNHHIKNQALTPVRRRLRKKGYIVGGVDNPRWQTGDALRGEIHKASYYGAITQFAKDDEGKVLMKEGRPQVNPTIKFVIRRELKYKKSAADSGFASWDDLGKAIVDKELFALMKGQFPAETSFKDACEQGIYMIKKGKNGMPDIKLHHIRHVRCEAPQSGLKIKEQTYKSEKEYKRYFYAAVGDLYAMCCYTNGKIREFRIYSLYDVSCHRKSDIEDIPEFITDKKGNRLMLDYKLRTGDMILLYKDNPAELYDLDNVNLSRRLYKINRFESQSNLVLMTHHLSTSKERGRSLGKTVDYQNLPESIRSSVKSLNFLIMGENRDFVIKNGKIIFNHR

SEQ ID NO: 399 - protein, 1483 aa, Prevotella sp.
  Prevotella sp. MSX73
MKTILGLDLGTNSIGWAKVSVDDYGNYLHDIKLGSRIIPMSQDVLGNFDSGVTVSQTAQRTEFRSKRRLVQRNLQRRERLHRVLHVLDFLPAHYDAAIGWDRTEAVTYGKFLNHAEPKLAWEELGNGKRRFLFMDSFHEMVADFARCQPALVADGKKIPLDWTIYYLRKKALTQAITKEELAWILLNFNQKRGYYQLRGEEEEENPTKQEEYYELKVVSVEATDSRKGNDTWYNVHLENGWIYRRSSKISLDDWVGKVKQFIVTTEYEKDGTTLKTDKEGNVKRSFRAPNENDWGLRKKRTETLLEMSGKTVGAFIYDHLLQEPADKIRGNFIRTIERHYYKAELEAILAEQCKYHIELRDKEMLEACARELYLNNLPHQRSLMKKDMTYLLLYDLIFYQRPLKSKKALIANCPYEYYEYVDKETGEIKRQNIKCIAKSNPYFQEFRLWQFVLNLRLFDRVEDKEVTANYLPTADDHARLFTYLNDRKEINQETLLKDYFKLKKVKIGNEKEYPIRWNYIEDKEKKYPCNETRYELLMALDRAGIEHKWLDDNNLEYRLWHLLYSVEVKSESETALRKLKNDDAFVNSFLKVKPFKKEYGAYSEKAIKRLLAVMRKGFLWNEQDICDETRKRIEIIIKGDVDEKVKERMGHAAYSFDRVSDFQGLPEWLACYVVYGRHSEAMDIQRWDSPERLMAYINNFKQYSLRNPIVEQCILETLRTVHDIWKETGQIDEIHVELGREMKSTSEERARRTQNVLRNENTNLRIKSLLIELKNDTDICNVHPYSPMQQEILRIYEEGALQELNREDEDFEEISKISQMSQPSGKELNRYKLWLEQKYRSPYTGKAISLAKLFTPAYQIEHVIPQSRYFDDSFTNKVICEAEVNTLKSNLLGYEFIKKHGGEIIHCTTLGDVRIFSESEYKAFVMDHYANNKSKKDKLLMEDIPQEFLSRQMNDSRYISKVVKTLLSNIVRMADESEATSKSVIVCTGGVTDRLKKDWGLNDVWNSIVYSRFERLNRLTGTEAFGHWENKDGKRVFQTSMPLELQRGFRKKRIDHRHHAMDALVIACASRNIVNYLNNESANNPKKREDLRRQLCDKNRVIRKPWETFTQDAYNALENVVVSFKNYVRVINKATNRYEHYDENGKKRFVQQKGSELWAIRKPMHKETYYGHVNLRRKELVTLQKALDDIPSICDKKLRDYISALVEKHFNKRQLLAHFKSTDYYWQKQYVNKVYVWTFSDDIKPLVATRKLLDTSFDAKRIGTITDTGIQKILRNYLEAKGGNATLAFTPEGIVEMNQNISKYNDGKPHQPILKVRITEPMGAKYRVGQTENKMAKYVEAQSGTNLYFAIYEDSEGKRSYTTVPLDEVAERLKQRLSPVPEKDENDVPLKFYLSPNDLVYVPTEEELQLRECKLNKDRIYKMVSSTGSECHFIPYYVANVIYNKVEFEAKNKIGRALTGEMIKAVCWKLEIDRLGNILKVIK

SEQ ID NO: 400 - protein, 1375 aa, Prevotella sp.
  Prevotella sp. oral taxon 306 str. F0472
MKKILGLDLGTTSIGWALVNESENKDEQSSIVRLGVRVIPLTVDEKGNFEKGKAITTNADRQQVHAARINLQRYKLRRENLRDCLQKQGWIGSEPMCEDGKSSTFETYKLRAKAAVEEVSLHEFARVLFMLNKKRGYKSNRKANDKEEGKLFDGMTIAKKLYEEHLTPAEYSLQLLNTGRKFTPEYYRSDLIEEFEKIWNEQQKYYPEILTDEFKQQLEGKAKSNTSKLFLGKYGIYSADTKGLDRRLQPLKWRVEAMKQQVDKDVLAFVISDLKGQIANTSGLLGAISDRSKELYFSKQTIGQYLWASLQENPHISIKNQPFYRQDYLDEFEKIWETQATYHKELTSELKQEIRDIIIFYQRPLKSKKNLIAVCELEQRKVKVTVDGKEKEITIGPKIAPKSSPMFQEFRIWQNLNNILLLDHETNSKRPLYEEERNLLYEELSVKEKLSKTEALKVLGKKSKQWDLNYKELEGNRTQAVLYDCYNRIIVMSGHEECNFKKLKASDIRHYVKMIFKNLAFNTDILCFDSSLKGHELERQPMCQLWHLLYSYEGDNSRTGNDALLRKLETSFGFPKEYAAVLADVIFEDSYGNLSVKAMRNILPHLQAGKDYSQACEEAGYKHSRRSLTKEELNQKVYKEKLELLPKNSLHNPVVEKILNQMVNVINAVIEEYGKPDEIRIELARDLKIGAAERENMTRSINQGNAENKRIREILEKEFALSYLSRNDIIKYKLYEELKSNGFKTLYSDTYISKDKLFSKDFDIEHIIPKARLFDDSLSNKTIEARDVNIAKSNKTAFDFILERYGEQGVKTYKTKLLRLLEDGAISNKKYNNLLKTEADIPSGFIDRDLRNTQYIAKKAYEILSELVKIVTPTTGSVTNRLREDWQLVDVMKELNFEKYQKLGLADVIEDRDGRKVKRIKDWTKRNDHRHHAMDALTIAFTKPSYIQYLNNLNARSDKSSSIYGIEVKELHREEGKFRFNAPLPINEFRAEAKRHLKSVLVSIKAKKKVMTQNVNKIKTKHGIIKKVQLTPRGELHNATYYGTKKRPLVRMVKVGAALDEATIKRVCSPAIRAALLKRLNAYNGDAKEAFTGRNSIDKNPIYLDIEQTKLVPVLVKTIEWGMYHPIRKRITPDLKIDKVIDKGIREKLKARLAEFNGDAQKAFSNLDENPIYMDEAKRITLKRVSIEGVLSAIPLHTLKDKAGKPVIGSDGKPVFGDYVQTSNNHHIAFYIDDKGNLQDNPVSFFEAAERKSQGVPVIDRRYNCDKGWHFVFTMKQNEYFVFPNEATGFIPSEVDLLDEANYCIISPNLYRVQKLSKASGRDYWFRHHLETMLNDDLRLKNSTFKRIQSLKGLEDIVKVRINSIGKIVAVGKYD

SEQ ID NO: 401 - protein, 1216 aa, Prevotella stercorea
  Prevotella stercorea DSM 18206
MTKILGIDTGTNSLGWAIVDKTADNYNLLDKGVNIFQEGVKIEKGIESSKAAERTEHRATRVRYYRIKLRKIRLLRILSDNHLCPPLSQEELSTWRLKKVYPKNELFMQWQRTDDDTEKTPYAYRHKCIHEKLDLSDVTDRYILGRAFYHIIQRRGFLSNRKEQGGEDSGKVKEGISTLTHEMNEAGYEYLGDYFYALYNKGEKIRKHYTARNEHFLSEFKAICEKQDLEKELGSEVVRNIEKAIFDQRPLKSQKGQVGKCVFEKNKTKCPSSHPMYEEFRMLTFINNIKIKTPNDDVLRPLNTGEREKIMPLFFRKSKKQFDFEDITKKLAPKKMYGFYKKEEDAEMPFLFNYPMDTSVSGCPVTAALKDVFGDDWITAICETYTLGEGKSRFDIVNDIWHALYFYSDKDKLAEFAINRLQLSEDEAKIFSEISLPADYASLSLKAICKILPYLRRGLIYSHAVFLGNLCEVMPKYEWSIKEMRETIIDNIIMEMDKCDTKDKRTFEVCIKDYLKGQYNVSDNSLKKLYHPSMIETYPRVQYTNEHGVYQLGSPRIDSVRNPMAMRSMFRLRKLVNRLLVEGKIDQNTEVHIEFARELNDANKRNAIALFVKENQSANDEARKQIITLFKKETGTDIEPTDKDILKYVLWEEQNHICLYTGKQIRISDFIGANPKFDIEHTIPRSVGGDSTKMNLTLCDSRFNREVKKTKLPVELPNHDEIMERIKEWKKNYELLDIQIRKNKKLSKGATTKEQKDTIIRKRHLLELRRDYWRGKYERFTMESVPEGFSRRQGTDISVISKYARLYLKSLFNRVYTVKGIATSDFRKIWGIQDIYSKKERINHVHHCIDAIVIACIGLDEYNKLGAYYHDEENNKWYGMSKASFKKPWATFVEDIKKIQDEILVYHYTPDNMPKQGRRRIKIDGKKILCKGDAARGSLHNDTYYGAIENDGAVKYVKRIDLASLEEKDVKNIVDDTVRSIIEAAIKEKGFKDAMASTIWMNEEKRVPIKKVRCFTPSITKPLNIRKQRDVSIKEYKQQYHVANDSNYLLALYIGTDNKGKEKREFEIVNILQAAQYYRTSNDKEVVDRHIVPIKSEHDYPFAYTLKIGTMVLLYEKSPNEVWDATIKERNRRLYKVTGLSTMRMKGRNGEYAYATVKLIHNEEARPSKDIKAKNGEYEQGEEFRPAIIMLHTQLNALVQGYDFEINELGEIRRLR

SEQ ID NO: 402 - protein, 1234 aa, Prevotella tannerae
  Prevotella tannerae ATCC 51259
MPNFWSIFTENLQTYLMKTRILGLDTGTNSLGWAVVDRDENNQYTPICRGDLIFTEGVKQEKGIEFSLAAERTSYRASRRHYFRRRLRKVEVLKVLVKHKLCPPLSDEALNRWHTKKEYPLDEDFILWQRTNEADNKNPYHDRHICLHRKLNLKDSQTDRYTLGRALYHLTQRRGFLSNRLDQNEEAEETGKVKSAISELSKEMKEAGCEFLGDYFYLLYRTEGNRVRIRSRYTDREKHYLQEFKEICRVQELDEDLAKALEKTIFFQRPLKSQRQGVGKCTMEKGHSRCAVSHPLYEEYRLLCYLNNIRIKTPSDDRLRPLNAEEREKITPLFYKEKNFDFEKIAKKLAGKTPFGWIRDAEDWPYQFNYRMTQEAPACPTTAQLIKVFGEDWKAALAETYTMSAKQDGTLKTEDEICTDIWNVLYSFSSKEKLKEFGLKKLQLDEVQAKAFSEIRLTRDFASLSLKAIRKILFFLRTGEDYSKAIFLANIPTIVGEEIWNDIERRSRLLYKVDLALRPQEERDAEEHRTIAERIKAAVAAEVPDAPIDLLYHPSMIEAYPDAKRNERFDCYQLGSPKTNAVRNPMAMRSLHMVRKVINHLLRKHIIDEKTEIHIEYARELNDANKRQAIADWQRELSKRHTAYAQNIRQLYKAETGLVIEPTKADILKYQLWEEQQHVCLYTGKKIGIADFLGANPKFDIEHTIPRSRGGDSTQENLTLCESKFNRDIKRDKLPTELANYEEILARIEHWKKQCYALKLKRDGIRTHSGLEKSIKDSRIRRRHLVGLEYGYLKGKYDRFTMKEVPEGFSRRQGAGIGLISKYAGLFLKSLFKDPKNPNRSNVYVVKGAITAEFRKLWGLQQADEAKSRENHTHHCIDAYTIACIGPCEYAALAAYYRSDEEFKYGRRREKPQFEKPWPTFTEDLLKLQEELLIVHQTTDKLGKRDRRKVKTPRGKFLTGGDSARGRLHQETYYGAINYDGNIKYVVRKPLDSLTEKDLDKIVDETVMGIVKGAVEAKGSLKEALADGIYMNKEKGILIKRVRIFSDVSEPINLKQLRDVSTKEYKRHIHLRKDENYLFAIYEGIDKKKNKKQTETATVDYLDAAKFYKDSKRRDKANSLVGDYSKKNKLPLKCILKKRQMVLFYEHSPEEIRFKDKKDLSRRLYIVTSIAKDGRVKFLHHQAATATGIQSSPSPFTNDGEHQPYYRLSASNIKVLVAGIDFDINILGEITPKL

SEQ ID NO: 403 - protein, 1487 aa, Prevotella timonensis
  Prevotella timonensis CRIS 5C-B1
MKNILGLDLGSNSVGWALVKVEENGNPIGSIKMGSRIIPMSQDILGSFEKGDTVSQTAQRTLYRGKRRLIERHVLRRERLCRVLHIMNFLPAHFDRLLGWDKTDNKTYGKFIDDSEPKLAWRQNKNEMGKMEFVFMDSFHEMLSDFAKHQPQLIANGKKVPLDWTIYYLRKKALTQLISKEELAWILLNFNKKRGYYQLRGEEEEEQPTKKEEYKVLKVISVDADEGQKGNGIWYNIHLEDGGIYKKKSDIPLYDWVGKTLQLIVVTTYEKDGKTPKIFDSGKQNPSYRLPKEDDWGLVKKRTESQLQSSGKTVGAFIYDNILSKPDDKIRGNLVRTIERKYYKKELIEILQQQAKYHDELHNQNLLESCAKELYAHNDVHYNEVIKSNMINLLVNDIIFYQRPLKSKKSLIANCKYESYEYVDKETGEIKEMPIKCIAKSNPYYQEFRLWQFIHNLRLSDVVTREDVTAQYLSTPQDYCNLFTYLNDRKEIKQDILLKDFFKIKKVQIDKEKVFPIEWNYIKDATKSYPCNETRYELLSALKRAGMDKQWLDDTPNMQYRLWHLLYSVEEKEESAKALRKLYDDDKFVTSFLKIKPFNKCYGAYSEKAIKRLLTLMRMGKAWNEQAIDAKTLKCIQQIITDNVDSKLKEKIDDSRYVLHHVSDFQGLPTYLASYVIYGRHSEVTDIQCWDSPEDLLKFIRDFKQHSLRNPIVEQVILETLRVVYDIWKAEKHIDEIHVEVAREMKLTAQQRNEANLRNLNNEATNLRIKYLLEELKNDTFIKDVRPLSPIHQEKMRIYEQAVLGNLNKQDKDYDDIIKISKKEHPTNAELIRYKLWLEQRYCSPYTGKAISLSKLFTTAYEIEHIIPQSRYFDNSFNNKVICEAEVNKAKGNMLGYEFIKKQGGQKIYCTQLGKAVTILKEEAYKQFVNEHYAHNKRKRDNLLAENIPESFSSRQLNDTRYITKTIMSLLSNVVRQQSEEEATAKNLLPSSGSVTDRLKNDWGLKDVWNTIVTPRFERLNKLSGTNDFGEMKEENGNRYFQTNVPLEYEKGFKKKRIDHRHHAMDALVIACTTRNMVNYISNANANSPKQREDLRQLLCDKNRIINKPWDTFTQDALKALNDIVVSFKNNVRIINRATNRYQRYDKNGKKIIFSQKGDDMWAIRKSMHKETVFGRVNLIRKEVLPIAKALDNISAICNAQLRAYVNDLVDKHFNKKQLVAHFKSLNYKWNRQDVSKVEVWISSDNKTPMVAVRKPLDTSFDKKKIASITDTGIQTILLNYLESKGGDASVAFAPEGIQEMNSNIELYNNGKAHKPIKNVRLSEPLGAKYQVGERGAKTKKYVEADKGTNLFFAIYEDEEGKRYYYSVPLREAIERQKQKLSPVPEYNEKGVALKFYLSPNDLVYVPTEEERTMGTCHIDKARIYKMVSSTGCSCYFVPSTFAKVIVDKVELQSLNKMEKAITDECIKEVCWKLKVDRLGNIINVIK

SEQ ID NO: 404 - protein, 1218 aa, Prevotella timonensis
  Prevotella timonensis CRIS 5C-B1
MNKRILGLDTGTNSLGWAVVDWDEHAQSYELIKYGDVIFQEGVKIEKGIESSKAAERSGYKAIRKQYFRRRLRKIQVLKVLVKYHLCPYLSDDDLRQWHLQKQYPKSDELMLWQRTSDEEGKNPYYDRHRCLHEKLDLTVEADRYTLGRALYHLTQRRGFLSNRLDTSADNKEDGVVKSGISQLSTEMEEAGCEYLGDYFYKLYDAQGNKVRIRQRYTDRNKHYQHEFDAICEKQELSSELIEDLQRAIFFQLPLKSQRHGVGRCTFERGKPRCADSHPDYEEFRMLCFVNNIQVKGPHDLELRPLTYEEREKIEPLFFRKSKPNFDFEDIAKALAGKKNYAWIHDKEERAYKFNYRMTQGVPGCPTIAQLKSIFGDDWKTGIAETYTLIQKKNGSKSLQEMVDDVWNVLYSFSSVEKLKEFAHHKLQLDEESAEKFAKIKLSHSFAALSLKAIRKFLPFLRKGMYYTHASFFANIPTIVGKEIWNKEQNRKYIMENVGELVFNYQPKHREVQGTIEMLIKDFLANNFELPAGATDKLYHPSMIETYPNAQRNEFGILQLGSPRTNAIRNPMAMRSLHILRRVVNQLLKESIIDENTEVHVEYARELNDANKRRAIADRQKEQDKQHKKYGDEIRKLYKEETGKDIEPTQTDVLKFQLWEEQNHHCLYTGEQIGITDFIGSNPKFDIEHTIPQSVGGDSTQMNLTLCDNRFNREVKKAKLPTELANHEEILTRIEPWKNKYEQLVKERDKQRTFAGMDKAVKDIRIQKRHKLQMEIDYWRGKYERFTMTEVPEGFSRRQGTGIGLISRYAGLYLKSLFHQADSRNKSNVYVVKGVATAEFRKMWGLQSEYEKKCRDNHSHHCMDAITIACIGKREYDLMAEYYRMEETFKQGRGSKPKFSKPWATFTEDVLNIYKNLLVVHDTPNNMPKHTKKYVQTSIGKVLAQGDTARGSLHLDTYYGAIERDGEIRYVVRRPLSSFTKPEELENIVDETVKRTIKEAIADKNFKQAIAEPIYMNEEKGILIKKVRCFAKSVKQPINIRQHRDLSKKEYKQQYHVMNENNYLLAIYEGLVKNKVVREFEIVSYIEAAKYYKRSQDRNIFSSIVPTHSTKYGLPLKTKLLMGQLVLMFEENPDEIQVDNTKDLVKRLYKVVGIEKDGRIKFKYHQEARKEGLPIFSTPYKNNDDYAPIFRQSINNINILVDGIDFTIDILGKVTLKE

SEQ ID NO: 405 - protein, 1496 aa, Prevotella veroralis
  Prevotella veroralis F0319
MKTILGLDLGTNSIGWAKVCVDDNGNYLRDIKLGSRIIPMSQDVLGNFDKGVTESQTSVRTGFRGVRRIRERSLLRRERLHRVLHVLGYLPPHYDSAIGWNKNEPSTYGKFLNHGEPKLAWEHKEDGSMRFLFMESFHEMMADFAKSQPSLVSDGKKIPLDWTIYYLRKKALSQPIRKEELAWLLLNFNQKRGYYQLRGEEDDDNPTKCEEYYELKVVGIEADEEGKNGNTWYNVKLENGWIYRRQSKIPLDDWIGKVREFIVTTEYEKDGITLKKDKNGDVKRSFRSPSEDDWGLRKKRTEKLLDSSKMTVGAFVYDHLLAEPSDKIRGKFIRTIERKYYKKELYAILCEQSKYHEELRSGDYLNKCAEELYKNNQPHRNSLLTKDLAYLLLEDLIFYQRPLKTKKSLIAECPYEAYKYVDKETGEIKRQGIKCIAKSNPYYQEFRLWQFISNLRLFNKADDKEVTADYLPTQDDYVRLFAYLNDRKEINQETLLKEFFKLKKITVNSEKVFPIRWNYIEDKEKKYPCNETRHELLLALDRARIDHSWLEKPGQEYRLWHLLYSVESKEETKEALRKLKDDDAFVESFLKVKPFKREYGAYSEKAIKKLLAVMRMGSLWRETDICDTTKGNITKILQGEIDEKLKEKISASVSSYNQLSDFQGLPVWLACYVVYGRHSEAAEIQHWKTPESLLAYINGFKQHSLRNPIVEQCILETLRTVHDIWKEVGHIDEIHVELGRNMKSTADQRARISENVLRNENTNLRIKSLLLELKNDPNIKDVRPYSPMQQEKLRIYEEGVLQELTKDDKDFTEITKISTMAQPSAKELQRYKLWLEQKYRSPYTGKSISLTKLFTSAYQIEHVIPQSRYFDDSFSNKVICESEVNSLKDNMLGYEFIKNHGGEIIHCTMLGDVKVLSESEYKAFVNDHYAHNKRKRENLLLEDIPQEFLNRQMNDSRYISKVVKALLSNIVRAEGEEEATSKFVVSCSGGITDRLKKDWGLNDVWNKIVYPRFERLNRLTGTEAFGQWENKDGKRVFQTAVPLELQRGFNKKRIDHRHHAMDALVIACTSRNIINYLNNESANNPKKREDLRQKLCDKNRTIRKPWETFTQDATAALEDVIVSFKNYVRIINKATNYYERYDVEGKKVIAEQRGDDMWAIRKPMHEATYYGRVNLRRKKKVNLRVALENISSICDNKLRIYINGLVEKGFNTKQILDKFKNTNDHFSMQKIDKVEIWQFTNEEEKLVATRKPLDTSFDTKKIASITDTGIQTILLNYLETKGGDSTIAFTPEGIVEMNQNISKYNNGKEHMPILKVRLYTKLGKKIPVGQTGCKAKQFVIAEAGTNLYFAIYEDEEGKRSYRTIPLNEVVERLKQGLSPVPEKNDKDVHLKFYLSPNDLVYVPIEDEHESLAKDHIYKFVDSSGTTANFIPHRSANVIFELNKKDAEKFCSGSIIQNEYGVGSSQSKNQKAITGEMIKAVCRKLEVDRLGNVIKVI

SEQ ID NO: 406 - protein, 1062 aa, Ralstonia syzygii
  Ralstonia syzygii R24
MAEKQHRWGLDIGTNSIGWAVIALIEGRPAGLVATGSRIFSDGRNPKDGSSLAVERRGPRQMRRRRDRYLRRRDRFMQALINVGLMPGDAAARKALVTENPYVLRQRGLDQALTLPEFGRALFHLNQRRGFQSNRKTDRATAKESGKVKNAIAAFRAGMGNARTVGEALARRLEDGRPVRARMVGQGKDEHYELYIAREWIAQEFDALWASQQRFHAEVLADAARDRLRAILLFQRKLLPVPVGKCFLEPNQPRVAAALPSAQRFRLMQELNHLRVMTLADKRERPLSFQERNDLLAQLVARPKCGFDMLRKIVFGANKEAYRFTIESERRKELKGCDTAAKLAKVNALGTRWQALSLDEQDRLVCLLLDGENDAVLADALREHYGLTDAQIDTLLGLSFEDGHMRLGRSALLRVLDALESGRDEQGLPLSYDKAVVAAGYPAHTADLENGERDALPYYGELLWRYTQDAPTAKNDAERKFGKIANPTVHIGLNQLRKLVNALIQRYGKPAQIVVELARNLKAGLEEKERIKKQQTANLERNERIRQKLQDAGVPDNRENRLRMRLFEELGQGNGLGTPCIYSGRQISLQRLFSNDVQVDHILPFSKTLDDSFANKVLAQHDANRYKGNRGPFEAFGANRDGYAWDDIRARAAVLPRNKRNRFAETAMQDWLHNETDFLARQLTDTAYLSRVARQYLTAICSKDDVYVSPGRLTAMLRAKWGLNRVLDGVMEEQGRPAVKNRDDHRHHAIDAVVIGATDRAMLQQVATLAARAREQDAERLIGDMPTPWPNFLEDVRAAVARCVVSHKPDHGPEGGLHNDTAYGIVAGPFEDGRYRVRHRVSLFDLKPGDLSNVRCDAPLQAELEPIFEQDDARAREVALTALAERYRQRKVWLEELMSVLPIRPRGEDGKTLPDSAPYKAYKGDSNYCYELFINERGRWDGELISTFRANQAAYRRFRNDPARFRRYTAGGRPLLMRLCINDYIAVGTAAERTIFRVVKMSENKITLAEHFEGGTLKQRDADKDDPFKYLTKSPGALRDLGARRIFVDLIGRVLDPGIKGD

SEQ ID NO: 407 - protein, 1066 aa, Rhodopseudomonas palustris
MSERVVRRILGIDLGIASCGWGVVDISGAGGGIIATGVRCFDAPLIDKTGEPKSATRRTARGQRRIVRRRRQRMNGVRRLLCEFGLLPDPRPDALNQAMRRISTASAAAQVTPWTLRAAAHQRLLSNEELAVVLGHIARHRGFRSNAKNEAGANAADETSKMKKAMEATREGLAKYHAFGDMIANDPKFANRKRNRDKDYSHTAKRSDLEDEVRAILRAQLRFGSAAATETLAQTFADVAFFQRPLQDSEDRVGDCPFEPGQKRAARRAPSFELFRFLSRLANLKLAVGRSPERRLTAEEIALAAKGFGETKKTITFKSLREALDLDPNARFSGIGKDKEASLDVVARTGGAAYGTKTLKDALGDAPWRSLSRTPETLDRIAEILSFREDITSIRNGLEDLGLDSLVVEALMQAAANGDFKEFTRAGHISARAARNIIPGLREGLVYSEACARVGYDHAARLSVPLDQVGSPVTRKALSEALKQVRAVAREYGPIDYFHIELARSVGKSAEERKQLTDGIEARNVEKAKRRKQAEEHLGRAPSDDELLRYELAKEQNFKCIYSGDAIDPAGVAANDTRYQVDHILPWSRFGDDSYLNKTLCTARSNQNKRGRTPFEWFEADKTDVEWMEYVARVENLQEVKGRKKRNYSIKDAAAIEDKFKARNLTDTQWATRLLADELSRMFPPRECERAICGRADGGNDGLTIVEERRVFTRPGAITSKLRRAWGLEGLKKQDGKRVEDDRHHAVDALVLAATTESLLQRLTVEVQRREREGRPDDIFHCAEPWRGFRADVRRTVYGSETMPGIFVSRAERRRARGKAHDATIKQIREIEGERLVFERKPVEKLTDKDLEKIPIPKPYGQVSDPKRLRDELVESLRAWIAAGKPKDRPPLSPKGDVIRKVRIQTNDKVSVEINGGTVDRGDMARVDVFRKKNKKAVWEYYVVPIYPHQIVALNDPPDRAVIAYAEDKDWKEIDSSYEFLWSLFGLSYVEISKANGECIDGYFRGLHRGTGAASVCKHISLGKDATVSGIGLKTLASFKKFTIDRLGRKFEIPREVRTWRGEACT

SEQ ID NO: 408 - protein, 1064 aa, Rhodopseudomonas palustris
MSECVTRRILGIDLGIASCGWGVIEVGEASGSIIASGVRCFDAPLIDKTGEPKSATRRTARGQRRIIRRRRQRMNAVRRLLAEFGVLTGRSPDALHQALLRLSQSVAGSQVTPWTLRAAAHERKLTNDELAVVLGHIARHRGFRSNSKNDGGANAADETSKMKKAMETTREGLARYHSFGAMIASDPKFADRKRNRDKDYSHTAKRSDLEDEVRTIFRSQTRFGSLVASEKLSQAFADAAFFQRPLQDSEDMVGSCPFEPGQKRTARRAPSFELFRFLSRLANLKLTVGRAPERRLTPDEIALAAKGFGETKKSITFKSLREALDLDPNARFSGVAKEKESTLDVAARTGGAAYGTKTLKDALGDAPWRSLSRMPEKLDRIAEILSFREDMKAIRNGLEEVGLDGLVVDALMQATANGDFKDFTRAAHISALAARNIIPGLREGLVYSDACTRVGYDHAARPAVPLSQIGSPVTRKALSEALKQVRAVAREYGPIDYFHIELARSIGKSAEERKKLTDGIEARNVEKEKRRKEAAEHLGRAPSDDELLRYELAKEQNFKCIYSGDPIDPAGISANDTRYQVDHILPWSRFGDDSYVNKTLCTARSNQNKRGRTPFEWFDADKTEAEWMEYSARVEDLKEVKGRKKRNYSIKDAASVEDKFKARNLTDTQWATRLLADELKRMFPPRECERVVTVRADGGNDGLSIVEERRVFTRPGAITSKLRRAWGLEGLKKQDGKRVEDDRHHAVDALVLAATTESLLNRLTVEVQQREREGRQDDIFHCSQPWPGFRVDVQRTVYGSETMPGIFVSRAERRRARGKAHDATVKQIRDIDGERIVFERKPIEKLTDKDLERIPVPEPYGKAADPKKLRDELVENLRAWIAAGKPKDKPPRSPKGDIIRKVRIETKDKVAVEINGGTVDRGDMARVDVFRKKNKKGVWEFYVIPIYPHQIVASALPPNRAVIAYKAESEWTAIDGCFEFAWSLNPMSYLELVKSNGELIEGYFRSMDRTTGAINLSPMSTNSETIRSIGVKTLSSFRKFTVDRLGRKFEIPREVRTWRGEACT

SEQ ID NO: 409 - protein, 1173 aa, Rhodospirillum rubrum
  Rhodospirillum rubrum ATCC 11170
MRPIEPWILGLDIGTDSLGWAVFSCEEKGPPTAKELLGGGVRLFDSGRDAKDHTSRQAERGAFRRARRQTRTWPWRRDRLIALFQAAGLTPPAAETRQIALALRREAVSRPLAPDALWAALLHLAHHRGFRSNRIDKRERAAAKALAKAKPAKATAKATAPAKEADDEAGFWEGAEAALRQRMAASGAPTVGALLADDLDRGQPVRMRYNQSDRDGVVAPTRALIAEELAEIVARQSSAYPGLDWPAVTRLVLDQRPLRSKGAGPCAFLPGEDRALRALPTVQDFIIRQTLANLRLPSTSADEPRPLTDEEHAKALALLSTARFVEWPALRRALGLKRGVKFTAETERNGAKQAARGTAGNLTEAILAPLIPGWSGWDLDRKDRVFSDLWAARQDRSALLALIGDPRGPTRVTEDETAEAVADAIQIVLPTGRASLSAKAARAIAQAMAPGIGYDEAVTLALGLHHSHRPRQERLARLPYYAAALPDVGLDGDPVGPPPAEDDGAAAEAYYGRIGNISVHIALNETRKIVNALLHRHGPILRLVMVETTRELKAGADERKRMIAEQAERERENAEIDVELRKSDRWMANARERRQRVRLARRQNNLCPYTSTPIGHADLLGDAYDIDHVIPLARGGRDSLDNMVLCQSDANKTKGDKTPWEAFHDKPGWIAQRDDFLARLDPQTAKALAWRFADDAGERVARKSAEDEDQGFLPRQLTDTGYIARVALRYLSLVTNEPNAVVATNGRLTGLLRLAWDITPGPAPRDLLPTPRDALRDDTAARRFLDGLTPPPLAKAVEGAVQARLAALGRSRVADAGLADALGLTLASLGGGGKNRADHRHHFIDAAMIAVTTRGLINQINQASGAGRILDLRKWPRTNFEPPYPTFRAEVMKQWDHIHPSIRPAHRDGGSLHAATVFGVRNRPDARVLVQRKPVEKLFLDANAKPLPADKIAEIIDGFASPRMAKRFKALLARYQAAHPEVPPALAALAVARDPAFGPRGMTANTVIAGRSDGDGEDAGLITPFRANPKAAVRTMGNAVYEVWEIQVKGRPRWTHRVLTRFDRTQPAPPPPPENARLVMRLRRGDLVYWPLESGDRLFLVKKMAVDGRLALWPARLATGKATALYAQLSCPNINLNGDQGYCVQSAEGIRKEKIRTTSCTALGRLRLSKKAT

SEQ ID NO: 410 - protein, 1059 aa, Rhodovulum sp.
  Rhodovulum sp. PH10
MGIRFAFDLGTNSIGWAVWRTGPGVFGEDTAASLDGSGVLIFKDGRNPKDGQSLATMRRVPRQSRKRRDRFVLRRRDLLAALRKAGLFPVDVEEGRRLAATDPYHLRAKALDESLTPHEMGRVIFHLNQRRGFRSNRKADRQDREKGKIAEGSKRLAETLAATNCRTLGEFLWSRHRGTPRTRSPTRIRMEGEGAKALYAFYPTREMVRAEFERLWTAQSRFAPDLLTPERHEEIAGILFRQRDLAPPKIGCCTFEPSERRLPRALPSVEARGIYERLAHLRITTGPVSDRGLTRPERDVLASALLAGKSLTFKAVRKTLKILPHALVNFEEAGEKGLDGALTAKLLSKPDHYGAAWHGLSFAEKDTFVGKLLDEADEERLIRRLVTENRLSEDAARRCASIPLADGYGRLGRTANTEILAALVEETDETGTVVTYAEAVRRAGERTGRNWHHSDERDGVILDRLPYYGEILQRHVVPGSGEPEEKNEAARWGRLANPTVHIGLNQLRKVVNRLIAAHGRPDQIVVELARELKLNREQKERLDRENRKNREENERRTAILAEHGQRDTAENKIRLRLFEEQARANAGIALCPYTGRAIGIAELFTSEVEIDHILPVSLTLDDSLANRVLCRREANREKRRQTPFQAFGATPAWNDIVARAAKLPPNKRWRFDPAALERFEREGGFLGRQLNETKYLSRLAKIYLGKICDPDRVYVTPGTLTGLLRARWGLNSILSDSNFKNRSDHRHHAVDAVVIGVLTRGMIQRIAHDAARAEDQDLDRVFRDVPVPFEDFRDHVRERVSTITVAVKPEHGKGGALHEDTSYGLVPDTDPNAALGNLVVRKPIRSLTAGEVDRVRDRALRARLGALAAPFRDESGRVRDAKGLAQALEAFGAENGIRRVRILKPDASVVTIADRRTGVPYRAVAPGENHHVDIVQMRDGSWRGFAASVFEVNRPGWRPEWEVKKLGGKLVMRLHKGDMVELSDKDGQRRVKVVQQIEISANRVRLSPHNDGGKLQDRHADADDPFRWDLATIPLLKDRGCVAVRVDPIGVVTLRRSNV

SEQ ID NO: 411 - protein, 1405 aa, Riemerella anatipestifer
MKTILGLDLGTNSIGWALVKEAENSNEKSEIIKLGVRVNPLTVDEKTNFEAGRPLSTNADRTAKRSARRNLQRYKLRRKNLIDLLIKNQLIDKDTPLTEIGKNTTHQTLELRAKAARERIELEDLARVFLAINKKRGYRSSRKVNNEEEGQAVDGMAVAKKLYDENLTPGQYAYELLSKGKKYVPDFYRSDLQAEFNAIWEYQKQFYADILDDELYNALKGQGQQNSRKRFLAIKGVYTAENKGKRDDVKLRHYKWRSEAISKKINIEEVAYVLVEINNDLNKSSGYLGAISDRSKELYFNKETVGENLWKQIQKNPHTSLKNQVFYRQDYLDEFEQIWETQAQFHPQLTLALKEQIRDVIIFYQRKLKSQKGLLSFCQFESWEIERKDENGNVILNKTTQLPKRQTVGRRVAPKSSPLFQEFKIWQNINNLEVTKISEGASKNKKETETLSDDERKLLFEELNLRGNLSQKEVLQILGLKDKEYKTNFSEGLEGNRTNAALFNIYQQIAENEGYGFDWSKKSAQEIKEELKAVFPQIGIQADILDFNANLDGKEFENQASYQLWHLLYSAEEDDKINEEDQIIYGNSAVSLKKKLCEKFGFTPEYAKWIANVSLQDDYGNLSTKAMRKIIPYLIDGNDYSEACALAGYNHSNSLTKEENDNRELLDKLELLPKNSLRNPVVEKILNQMVNVVNQVIETYGKPDEVRIELARELKKSAEKRAEMTKSINEATRRNEDIKKLITKDFGIPNPTKSDVVRYRLWEELAPLAYKDVFTGKQIKKEDLFSSKIDIEHIIPKALLFDDSFSNKTLVFRETNLKKADRTAYDFIESDYNATLDDYIQRVETLYNNTKGTISKGKRNKLLMAQKNLPDGFIERDLRNSQYIAKKAKAMLYQVFKDVNVTSGSITDRLREDWDLINVMKELNFPKYKALGLTEIEERYDIGQEKTKRVEVITDWTKRNDHRHHAMNALTVAFTTSSHIQYLNYLNARKNESHKEHKNIKGIENKITHKQKDKRKFIPPMPNFREEAKKHIETILVSIKNKNKVYTKNINKTKKKSGHNTKEQLTPRGQLHKETVYGKSKRPMSKPTKINKNFSLEQAQLIINVQEKELVLRHLAQFDNNPAVAFDTKTLKKMPLLKNGEPLKEVLCFEEIFTIRKDITPDLKIEKVVDEKIKAILEQRKKDFGGNAKEAFSDLDKNPIWLNKKKGICIKRVTITGVSNAEALHHQKDHLGREILDDNGNPIPADFVSTGNNHHLAVYLDSEGKLQDNIVSFYEAVVRTSQGLPVVDKGLNKDLGWKFLFSLKQNEMFVFPNDDFDINDFDLLDDKKAELISKHLYRVQKISKVSAGNSFVRDIVFRHHLETTVKEVKELKDISYIQLKSLEGLRNIKKVRINHIGKIVQVGEY

SEQ ID NO: 412 - protein, 1400 aa, Riemerella anatipestifer
MKTILGLDLGTNSIGWALVKETENSNEKSEIIKLGVRVNPLTVDEKTNFEAGRPLSTNADRTAKRSARRNLQRYKLRRKNLIDLLIKHRLIDKDTPLTEIGKNTTHQTLELRAKAARERIELEDLARVFLAINKKRGYRSSRKVNNEEEGQVVDGMAVAKKLYDENLTPGQYAYELLSKGKKYVPDFYRSDLQAEFDSIWEYQKQFYADILDDELYNALKGQGQQNSRKRFLAIKGVYTAENKGKRDEVKLQHYKWRSEAITQKLSIEEVAYVLVEINNDLNKSSGYLGAISDRSKELYFNKETVGENLWKQIQKNPHTSLKNQVFYRQDYLDEFEQIWETQAQFHPQLTLALKEQIRDVVIFYQRKLKSQKGLLSFCQFESWEIERKDENGNVILNKTTQLPKRQTVGRRVAPKSSPLFQEFKIWQNINNLEIAKISDGNSKNKKETEALSDDERKLLFEELNLRGNLSQKEVLQILGLKDKEYKTNFPEGLEGNRTNAALFNIYQQIAENEGYGDWTKKSAQEIKEELKAVFPQIGIQADILDFNAELDGKEFENQASYQLWHLLYSAEEDDKINEEDQIIYGNSAVSLKKKLCEKFGFTPEYAKWIANVSLQDDYGNLSTKAMRKIIPYLIDGNDYSEACALAGYNHSNSLTKEENDNRERLNKLELLPKNSLRNPVVEKILNQMVNVVNQVIETYGKPDEVRIELARELKKSAEERAEMTKGINEATRRNEDIKKLITKNFGIPNPTKNDVVRYRLWEELAPLAYKDVFTGRQIKKEDLFSSKIDIEHIIPKALLFDDSFSNKTLAFRETNLKKADRTAYGFIESDYNATLDDYIQRVETLYNNAKGTISKGKRNKLLMAQKNLPDGFIERDLRNSQYIAKKAKSMIEKVFNDVNVTSGSITDRLREDWDLINVMKELNFPKYKALGLTEIEERYDIGQEKTKKVEVITDWTKRNDHRHHAMDALTVAFTTKSHVQYLNNLNTIHSLKGDEVDLELSKLYGLKNTITEVVNKKRKFIPPMPNFREEAKKHIETILVSIKNKNKVYTKNINKTKKESGYHTKEQLTPRGQLHKETVYGKSKRPMNKPTKINKNFSLEQAQLIINVQEKELVLRHLAQFDNNPAVAFDTKTLKKMPLLKNGEPLKEVLCFEEIFTIRKDITPDLKIEKVVDEKIKAILEQRKKDFGGNAKEAFSDLDKNPIWLNKEKGICIKRVTITGVSNAEALHHQKDHLGREILDDNGNPIPADFVSTGNNHHVAIYEDEKGKLQEKVVSLYEAVARANQGLPVVDKGLNEDLGWKFLFTMKQNEMFVFPNDDFDVNDIDLLDENNAKIISQHLFRVQKLATKNYMFRHHLETNVQEVKELNDIAYKSIRSTEPLKNIKKVRINHIGKIVQVGEY

SEQ ID NO: 413 - protein, 1140 aa, Roseburia intestinalis
  Roseburia intestinalis L1-82
MRENGSDERRRNMDEKMDYRIGLDIGIASVGWAVLQNNSDDEPVRIVDLGVRIFDTAEIPKTGESLAGPRRAARTTRRRLRRRKHRLDRIKWLFENQGLINIDDFLKRYNMAGLPDVYQLRYEALDRKLTDEELAQVLLHIAKHRGFRSTRKAETAAKENGAVLKATDENQKRMQEKGYRTVGEMIYLDEAFRTGCSWSEKGYILTPRNKAENYQHTMLRAMLVEEVKEIFSSQRRLGNEKATEELEEKYLEIMTSQRSFDLGPGMQPDGKPSPYAMEGFSDRVGKCTFLGDQGELRGAKGTYTAEYFVALQKINHTKLVNQDGETRNFTEEERRALTLLLFTQKEVKYAAVRKKLGLPEDILFYNLNYKKAATKEEQQKENQNTEKAKFIGMPYYHDYKKCLEERVKYLTENEVRDLFDEIGMILTCYKNDDSRTERLAKLGLVPIEMEGLLAYTPTKFQHLSMKAMRNIIPFLEKGMTYDKACEEAGYDFKADSKGTKQKLLTGENVNQTINEITNPVVKRSVSQTVKVINAIIRTYGSPQAINIELAREMSKTFEERRKIKGDMEKRQKNNEDVKKQIQELGKLSPTGQDILKYRLWQEQQGICMYSGKTIPLEELFKPGYDIDHILPYSITFDDSFRNKVLVTSQENRQKGNRTPYEYMGNDEQRWNEFETRVKTTIRDYKKQQKLLKKHFSEEERSEFKERNLTDTKYITTVIYNMIRQNLEMAPLNRPEKKKQVRAVNGAITAYLRKRWGLPQKNRETDTHHAMDAVVIACCTDGMIQKISRYTKVRERCYSKGTEFVDAETGEIFRPEDYSRAEWDEIFGVHIPKPWETFRAELDVRMGDDPKGFLDTHSDVALELDYPEYIYENLRPIFVSRMPNHKVTGAAHADTIRSPRHFKDEGIVLTKTALTDLKLDKDGEIDGYYNPQSDLLLYEALKKQLLLYGNDAKKAFAQDFHKPKADGTEGPVVRKVKIQKKQTMGVFVDSGNGIAENGGMVRIDVFRVNGKYYFVPVYTADVVKKVLPNRASTAHKPYGEWKVMEDKDFLFSLYSRDLIHIKSKKDIPIKMVNGGMEGIKETYAYYIGADISAANIQGIAHDSRYKFRGLGIQSLDVLEKCQIDVLGHVSVVRSEKRMGFS

SEQ ID NO: 414 - protein, 1128 aa, Roseburia intestinalis
  Roseburia intestinalis M50/1
MDEKMDYRIGLDIGIASVGWAVLQNNSDDEPVRIVDLGVRIFDTAEIPKTGESLAGPRRAARTTRRRLRRRKHRLDRIKWLFENQGLINIDDFLKRYNMAGLPDVYQLRYEALDRKLTDEELAQVLLHIAKHRGFRSTRKAETAAKENGAVLKATDENQKRMQEKGYRTVGEMIYLDEAFRIGCSWSEKGYILTPRNKAENYQHTMLRAMLVEEVKEIFSSQRRLGNKKATEELEEKYLEIMTSQRSFDLGPGMQPDGKPSPYAMEGFSDRVGKCTFLGDQGELRGAKGTYTAEYFVALQKINHTKLVNQDGETRNFTEEERRALTLLLFTQKEVKYAAVRKKLGLPEDILFYNLNYKKAATKEEQQKENQNTEKAKFIGMPYYHDYKKCLEERVKYLTENEVRDLFDEIGMILTCYKNDDSRTERLAKLGLVPIEMEGLLAYTPTKFQHLSMKAMRNIIPFLEKGMTYDKACEEAGYDFKADSKGTKQKLLTGENVNQTINEITNPVVKRSVSQTVKVINAIIRTYGSPQAINIELAREMSKTFEERRKIKGDMEKRQKNNEDVKKQIQELGKLSPTGQDILKYRLWQEQQGICMYSGKTIPLEELFKPGYDIDHILPYSITFDDSFRNKVLVTSQENRQKGNRTPYEYMGNDEQRWNEFETRVKTTIRDYKKQQKLLKKHFSEEERSEFKERNLTDTKYITTVIYNMIRQNLEMAPLNRPEKKKQVRAVNGAITAYLRKRWGLPQKNRETDTHHAMDAVVIACCTDGMIQKISRYTKVRERCYSKGTEFVDAETGEIFRPEDYSRAEWDEIFGVHIPKPWETFRAELDVRMGDDPKGFLDTHSDVALELDYPEYIYENLRPIFVSRMPNHKVTGAAHADTIRSPRHFKDEGIVLTKTALTDLKLDKDGEIDGYYNPQSDLLLYEALKKQLLLYGNDAKKAFAQDFHKPKADGTEGPVVRKVKIQKKQTMGVFVDSGNGIAENGGMVRIDVFRVNGKYYFVPVYTADVVKKVLPNRASTANKPYSEWRTMEDKDFLFSLYSRDLVHIKSKKGIPIKNVDGSLGESKEVYAYYIGADISGAKIEGKAHDSRYTFRGIGVQKLELIEKCQVDILGHISTVKNEKRMGFS

SEQ ID NO: 415 - protein, 1152 aa, Roseburia inulinivorans
  Roseburia inulinivorans DSM 16841
MNAEHGKEGLLIMEENFQYRIGLDIGITSVGWAVLQNNSQDEPVRITDLGVRIFDVAENPKNGDALAAPRRDARTTRRRLRRRRHRLERIKFLLQENGLIEMDSFMERYYKGNLPDVYQLRYEGLDRKLKDEELAQVLIHIAKHRGFRSTRKAETKEKEGGAVLKATTENQKIMQEKGYRTVGEMLYLDEAFHTECLWNEKGYVLTPRNRPDDYKHTILRSMLVEEVHAIFAAQRAHGNQKATEGLEEAYVEIMTSQRSFDMGPGLQPDGKPSPYAMEGFGDRVGKCTFEKDEYRAPKATYTAELFVALQKINHTKLIDEFGTGRFFSEEERKTIIGLLLSSKELKYGTIRKKLNIDPSLKFNSLNYSAKKEGETEEERVLDTEKAKFASMFWTYEYSKCLKDRTEEMPVGEKADLFDRIGEILTAYKNDDSRSSRLKELGLSGEEIDGLLDLSPAKYQRVSLKAMRKMQPYLEDGLIYDKACEAAGYDFRALNDGNKKHLLKGEEINAIVNDITNPVVKRSVSQTIKVINAIIQKYGSPQAVNIELAREMSKNFQDRTNLEKEMKKRQQENERAKQQIIELGKQNPTGQDILKYRLWNDQGGYCLYSGKKIPLEELFDGGYDIDHILPYSITFDDSYRNKVLVTAQENRQKGNRTPYEYFGADEKRWEDYEASVRLLVRDYKKQQKLLKKNFTEEERKEFKERNLNDTKYITRVVYNMIRQNLELEPFNHPEKKKQVWAVNGAVTSYLRKRWGLMQKDRSTDRHHAMDAVVIACCTDGMIHKISRYMQGRELAYSRNFKFPDEETGEILNRDNFTREQWDEKFGVKVPLPWNSFRDELDIRLLNEDPKNFLLTHADVQRELDYPGWMYGEEESPIEEGRYINYIRPLFVSRMPNHKVTGSAHDATIRSARDYETRGVVITKVPLTDLKLNKDNEIEGYYDKDSDRLLYQALVRQLLLHGNDGKKAFAEDFHKPKADGTEGPVVRKVKIEKKQTSGVMVRGGTGIAANGEMVRIDVFRENGKYYFVPVYTADVVRKVLPNRAATHTKPYSEWRVMDDANFVFSLYSRDLIHVKSKKDIKTNLVNGGLLLQKEIFAYYTGADIATASIAGFANDSNFKFRGLGIQSLEIFEKCQVDILGNISVVRHENRQEFH

SEQ ID NO: 416 - protein, 1156 aa, Ruminococcus albus
  Ruminococcus albus 8
MGNYYLGLDVGIGSIGWAVINIEKKRIEDFNVRIFKSGEIQEKNRNSRASQQCRRSRGLRRLYRRKSHRKLRLKNYLSIIGLTTSEKIDYYYETADNNVIQLRNKGLSEKLTPEEIAACLIHICNNRGYKDFYEVNVEDIEDPDERNEYKEEHDSIVLISNLMNEGGYCTPAEMICNCREFDEPNSVYRKFHNSAASKNHYLITRHMLVKEVDLILENQSKYYGILDDKTIAKIKDIIFAQRDFEIGPGKNERFRRFTGYLDSIGKCQFFKDQERGSRFTVIADIYAFVNVLSQYTYTNNRGESVFDTSFANDLINSALKNGSMDKRELKAIAKSYHIDISDKNSDTSLTKCFKYIKVVKPLFEKYGYDWDKLIENYTDTDNNVLNRIGIVLSQAQTPKRRREKLKALNIGLDDGLINELTKLKLSGTANVSYKYMQGSIEAFCEGDLYGKYQAKFNKEIPDIDENAKPQKLPPFKNEDDCEFFKNPVVFRSINETRKLINAIIDKYGYPAAVNIETADELNKTFEDRAIDTKRNNDNQKENDRIVKEIIECIKCDEVHARHLIEKYKLWEAQEGKCLYSGETITKEDMLRDKDKLFEVDHIVPYSLILDNTINNKALVYAEENQKKGQRTPLMYMNEAQAADYRVRVNTMFKSKKCSKKKYQYLMLPDLNDQELLGGWRSRNLNDTRYICKYLVNYLRKNLRFDRSYESSDEDDLKIRDHYRVFPVKSRFTSMFRRWWLNEKTWGRYDKAELKKLTYLDHAADAIIIANCRPEYVVLAGEKLKLNKMYHQAGKRITPEYEQSKKACIDNLYKLFRMDRRTAEKLLSGHGRLTPIIPNLSEEVDKRLWDKNIYEQFWKDDKDKKSCEELYRENVASLYKGDPKFASSLSMPVISLKPDHKYRGTITGEEAIRVKEIDGKLIKLKRKSISEITAESINSIYTDDKILIDSLKTIFEQADYKDVGDYLKKTNQHFFTTSSGKRVNKVTVIEKVPSRWLRKEIDDNNFSLLNDSSYYCIELYKDSKGDNNLQGIAMSDIVHDRKTKKLYLKPDFNYPDDYYTHVMYIFPGDYLRIKSTSKKSGEQLKFEGYFISVKNVNENSFRFISDNKPCAKDKRVSITKKDIVIKLAVDLMGKVQGENNGKGISCGEPLSLLKEKN

SEQ ID NO: 417 - protein, 1341 aa, Ruminococcus lactaris
  Ruminococcus lactaris ATCC 29176
MGKGYYVGLDMGTGSVGWAVTDESYQILRRHGKAMWGVRLFESAKTAEERRMFRTGRRRLDRRGWRIEILQEIFAEEISRVDPGFFLRMKESKYYPEDKRDIQGNCPELPYTLFVDKTFTDKDFHKKYPTIYHLRKMLMETEDTPDMRLVYLALHHMMKHRGHFLLSGDISQVTEFKNTFNQFIENIRNEEMDFEIELDESAVQMIEETLKDKNLTRSAKKSKLVKGLNAKNVRDKAFLTLLSGGTVKLSDLFGMEELNEGERPKISFADNGYEEYAAVVEMELGELYYIVESAKAVYDWAILSDILGGSTSVSDAKVRAYEKHKADLKYLKAVVKEYFPKEVYNAVFVESSDKLNNYPAYIGMTKKNGKKVSLEGKRCSREEFMDFLKKNIVVKLPDEEAKMYLQSELEKDSFLPKQVNKDNGVIPYQVHKYELKKILDNLGDKIPFLKENAEKIEKLFSFRIPYYVGPLRTGNGENSKFAWAERKSTEKIYPWNFENVIDVEQSAENFIRRMTNKCTYLIGEDVLPKDSLLYSKFMVLNELNNLRLDGQKISVELKQKIYRDVFCRSRKVTQKKLKSYLIREGIAGKNVELTGIDGDFKGSLTAYHDFKEKLIDVELTQKEKEEIILNIVLFGDDKKLLKQRLKKKFPQLTEKQINTVTALSYKGWGRLSKKLLEEVTVPAPETGEVWNIITALWETNDNFMQLLSKEYQFSDRIEEFNEEKADPEVSYQTIEDLYVSPAVKRQIWQTLQIIQEIEKVMGEKPKRVFVEMAREKQENKRTESRKKTLSDLYTKCKKEEPEWIEALCTSLEKHEEHQLRSDKLYLYYTQKGRCMYSGEPIDLEDLWDNTKYDIDHIYPQSKTMDDSLKNRVLVKKEYNAKKSDTYPIAADIQKKMMPFWKSLLTGGFIPKEKYDRLVRNNPLDANELAGFIERQIVETRQSTKAVAEILKKILPDTEIVYVKAKTVSKFRQDFDFIKVRDMNDLHHAKDAYLNIVVGNVYFVKFTKNAAWFVKENPGRTYNLEKMFIWDVARDGEIAWKAGKSGSIVQVRAMMEKNHILVTRRSYEVKGGLFDQQILKKGKGQVPVKESDERLRDIGKYGGYNKAAGVYFMLVSSKDKKGKEQRTIEFVPIYLKDRVEKDMESARNYLMEERGLREPKILIKKIKIDTLFKVDGFYMWLSGRTSNQLIFKGANQLILSKEDMKTLKKVVKYIQRQKEDKNVKISMRDGITEEELLKLYETFLDKIRHSIYGARLSSQEKTLVNGKEKFIDLSVEAKCQVLYEILHLFQCQSGAANLKMIGGPASAGILVMNNNISKCKNISIVNQSPTGIYEKEIDLLRV

SEQ ID NO: 418 - protein, 1471 aa, Scardovia wiggsiae
  Scardovia wiggsiae F0424
MGYKAPRNDKGEIDYGVGLDLGNGSVGWVAMDKDYHLIRARGHELIGARLFDPANSAENRRESRTTRRRLSRRRWRLRMLDSLFASELAKIDPNFLARRKYSWVHPKDEQNHENWYGSIIFGSKEQDKQFYKDYPTIYHLRKKLTEDTERHDIREIYVAIHHIVKYRGHFLREGEINSENLFDPEGFVELIKDVIKLNNSYDESTPIFEASPADVSEALLNEHTSRSGRIEDTLDKLDFSVSRVDKHELKGMRDAAKAVIGAIVGNTADFSKIFNLDNLDKDSKDNLKLKFADSNFDEKYGGVVGSGLLDETQIELVDRIHAVYDAVALKGILGDAHTISEAKVESYEKHRKNWKLIKEELRTKENKDEVDLWYGDLSGRQYKNPPDPEKGPDEGSKKDSPIRDSDQKQNLIKKANDYFTELIDDSQLSEEQKNCLKNDINNGQLFPVQRSSDNGVIPYQIHLNELRRIIENQKQYYPFLAETFIRKTAEGKSYEENKIVALLKFRVPYYVGPLVSKEDMEEHSSGNSAYHWMARNPGRGEAITPWNFDEVVDKDESGARFISRLTGTDTYLLGEPTLPQHSLLYEEYMVLSELNNVRLNVRQGNHWSDKNRQRLSYKQKEFLIENLFKEHKTVTRKRAEDCLSSMGCGEVQLFGLSDEKKFASSLSSYITLKKILGKAFVDDSGNSAILERIIEVQTVFEDREPLTHQLSLIDSLTVEQRKQLAKIHYTGWGKLSRKLLTSKKGSYKIHSQNEIMRTQHSIIDIMRGDSLNLIEIIRDKKIGIGEWIDNENLDRETGESDVSRLESVFEGIVMSPRVKRGVVQAVRVIDDLAKAIGNPPQRIFIEMADEVQASQRTVSRLSRLKALYGSPSLQKEFNDLKDLRKSLNETKDADLQEDRLYLYYIQLGKDLYTGKEISIDSLSSAYDIDHIVPQALTQDDSIDNRVLVSRKENARKTDSYLYTPDLIKNMRPLWGKLLAAGLMSQKKYDALTRVDDFKDREKQRFVQRSLVETRQIMKNVSTILRTYYGEDTNVVTLKSSITHDMRKYLGFPYKNRDINDYHHAQDALCISAAGQFMLNRHFVSGGEVTDGASNAYNMYLAEYLQEFRDAKARGERKRSTAFGFVVGSMSSKDDEKRTDHRTGEIVWSETNAEYLRKVMNYKKMLITQKVGDVKTRALYDETRYGHKESSAKSIKFDNLRRDTSLYGGFSGASTAYMMLVEYKKKNKLVSITAQEASLLAVADQKNDTVSVMDGILASHGLSGAKILLPKIVTGQLLDYSDALVTLQSASELNTARQMWLPRNDYNDIDIILKSKDIEDAAHKLGYDSDTVHVLRRIQKLFEAVFRVAESQFPLHQLSKDQQEEILRDPQNYGFGSAVKLLGGLLKALHANAENTNLAGLVKVLHGDKEYSDDGKAKEFKKFGFSPRWRRISNPTGFTLSDSDTFIYQSPSGIFEQRVTVKELKEKADKQK

SEQ ID NO: 419 - protein, 1178 aa, Scardovia inopinata
  Scardovia inopinata F0304
MGKRHNSNMAKKKISYRIGIDVGLNSTGLAAIEVDDDGAPIRILNTMSVIHDGGVDPDAAKVRGTRLAISGIARRTRRMRRRRAKRLDRLEQILEKYGYTDTEPVLEEPYGPWICRAELADGFINDDEQRRMMIGIAIRHIARHRGWRNPYQNVRALLNIDDSDLSEEYKNLKEKVQDQINDGKDLPNFTPSQLVRDYLDNFSGQPAARIRTGKAGPRGNRRDAVGILPQRMRQSDYAYELQRIFDMQKIGRDEAQELLMAVFEAKSPKGSAEKRIGKDPLTGKKRALKASLAFQKYRIVATITNLRIKTGTGSERMLSPTELNDIYTYLLRVQDDNHLPTWEDICEEVLHIGRYQLAGIGKTFEGGERISNMPPVIQTSLAIHGLSEGTLAEKLTKWWDKADDDSRESMIKLLSNTVDIDRVNEVDENFASALDFIDSLDDEELTKLDKIALPRGRAAYSEEALNKLTADMLNTGDDLFSARQRIYHVNNSWRPPQPPIGEPLGNPAVDRVLKITNRYLMNCLNRWGQPRRVTIEHTRSGFTSVKQATEHQKISDKRAEYRRDIVKQLEEAGVESVHEYDIRRWEAVQRQNGQCLYCGRDITFKTCEMDHIVPRKGPGSTNTRTNFAAVCPECNRMKSNIPFASWAETKEAKDRGVSLDKAIKQVRFFNFTKNEYSPQAQRNFKKSMIERLKQKTSDEPLDNRSIESVSWMADELYKRIDWYFNHEQYETSKKAINDDKDNLSGTQVVVYPGSITAEARNAAGLGGNIHFIGGRYKTRLDRRHHAVDACVIAMMEPGIARILTERNQLRQAQRLTARIEDDEVNWKDYPTENTAGYNKYQAWSDRMHALLEYMNNALDYDKIPVVRWERLQLGNRSAHEDTIHPLKKLPLSHEISAIDINHASTPALYEALVSLPDFSEQDGLPADPSRQINVNGERYSGDDLVSFFNSNAAQIAIQGGSAELGTAFHHARIYRCWTVGKNGKKKIFFGMIRVYQHDLLHAKNEDLFTYPLKRSSVSMRYAKKEVVHAILSGNAEYVGYLCVGDELVLDLKGDKSNDEGGSRLSGQVGEFVQKFEEDSKVNSQIVNRWTVDGFPDEAKLRLRPSMFAGEGLKNMKSELVENAAIKNILSKTGWRVSVDVISKKSPVVLRRNAFGEPRWKTNAGLPVSYRWQDTETKE

SEQ ID NO: 420 - protein, 1063 aa, Simonsiella muelleri
  Simonsiella muelleri ATCC 29453
MEKFHYVLGLDLGIASVGWAAIEIDKETETSIGLLDCGVRTFERAEVPKTGDSLAKARREARSTRRLIRRRSHRLLRLKRLLKREIFRQPETFKDLPINAWQLRVKGLDSRLNEYEWAAVLLHLVKHRGYLSQRKSEMSETDSKSEMGRLLAGVAENHQLLQQEQYRTPAELALKKFVKHFRNKGGDYAHTFNRLDLQAELHLLFQKQRELGNPFTSPELERQVDDLLMTQRSALQGDAILKMLGHCGFEPEQFKAAKNTFSAERFIWLTKLNNLRIQDQGKERALTADERTKLLDEPYKKSKLTYAQVRKLLSLPQTAIFKGLRYDLEHDKKAENSTLMEMKSYHNIRQTLEKSGLKTEWQSIATQPEILDAIGTAFSIYKTDEDISHELKTCRLPENVLNELLKNINFDGFIQLSLTALRKILPLMEQGYRYDEACTQIYGNHHSGSLQQESKQFLPHIPIDDVRNPVVFRTLTQARKVVNAIIRRYGSPARVHIEMARELGKSKSDRDRIEKQQQKNKKERENAVAKFKEDFPDFVGEPRGKDILKMRLYEQQHGKCLYSGHDIDINRLNEKGYVEIDHALPFSRTWDDSQNNKVLVLGSENQNKRNQTPDEYLDGANNSQRWLEFQARVQTCHFSYGKKQRIQLAKLDDETEKGFLERNLNDTRYIARFMCQFVQENLYLTGKGKRLVFASNGGMTATLRNLWGLRKVREDNDRHHALDAIVVACSTASMQQKITKAFQRHESIEYVDTETGEVKFRIPQPWDFFRQEVMIRVFSDQPCEDLVEKLSARPEALHDNVTPLFVSRAPNRKMSGQGHLETIKSAKRLSEENSMVKKPLTTLKLKDIPEIVGYPSREPQLYAALKTRLETHDDDPIKAFAKPFYKPNKNGELGALVRSVRVKGVQNTGVMVHDGKGIADNATMVRVDVYTKAGKNYLVPVYVWQVAQGILPNRAVTSGKSEADWDLIDESFEFKFSLSRGDLVEMISNKGRIFGYYNGLDRANGSIGIREHDLEKSKGKDGVHRVGVKTATAFNKYHVDPLGKEIHRCSSEPRPTLKIKSKK

SEQ ID NO: 421 - protein, 1327 aa, Solobacterium moorei
  Solobacterium moorei F0204
MEGQMKNNGNNLQQGNYYLGLDVGTSSVGWAVTDTDYNVLKFRGKSMWGARLFDEASTAEERRTHRGNRRRLARRKYRLLLLEQLFEKEIRKIDDNFFVRLHESNLWADDKSKPSKFLLFNDTNFTDKDYLKKYPTIYHLRSDLIHNSTEHDIRLVFLALHHLIKYRGHFIYDNSANGDVKTLDEAVSDFEEYLNENDIEFNIENKKEFINVLSDKHLTKKEKKISLKKLYGDITDSENINISVLIEMLSGSSISLSNLFKDIEFDGKQNLSLDSDIEETLNDVVDILGDNIDLLIHAKEVYDIAVLTSSLGKHKYLCDAKVELFEKNKKDLMILKKYIKKNHPEDYKKIFSSPTEKKNYAAYSQTNSKNVCSQEEFCLFIKPYIRDMVKSENEDEVRIAKEVEDKSFLTKLKGTNNSVVPYQIHERELNQILKNIVAYLPFMNDEQEDISVVDKIKLIFKFKIPYYVGPLNTKSTRSWVYRSDEKIYPWNFSNVIDLDKTAHEFMNRLIGRCTYTNDPVLPMDSLLYSKYNVLNEINPIKVNGKAIPVEVKQAIYTDLFENSKKKVTRKSIYIYLLKNGYIEKEDIVSGIDIEIKSKLKSHHDFTQIVQENKCTPEEIERIIKGILVYSDDKSMLRRWLKNNIKGLSENDVKYLAKLNYKEWGRLSKTLLTDIYTINPEDGEACSILDIMWNTNATLMEILSNEKYQFKQNIENYKAENYDEKQNLHEELDDMYISPAARRSIWQALRIVDEIVDIKKSAPKKIFIEMAREKKSAMKKKRTESRKDTLLELYKSCKSQADGFYDEELFEKLSNESNSRLRRDQLYLYYTQMGRSMYTGKRIDFDKLINDKNTYDIDHIYPRSKIKDDSITNRVLVEKDINGEKTDIYPISEDIRQKMQPFWKILKEKGLINEEKYKRLTRNYELTDEELSSFVARQLVETQQSTKALATLLKKEYPSAKIVYSKAGNVSEFRNRKDKELPKFREINDLHHAKDAYLNIVVGNVYDTKFTEKFFNNIRNENYSLKRVFDFSVPGAWDAKGSTFNTIKKYMAKNNPIIAFAPYEVKGELFDQQIVPKGKGQFPIKQGKDIEKYGGYNKLSSAFLFAVEYKGKKARERSLETVYIKDVELYLQDPIKYCESVLGLKEPQIIKPKILMGSLFSINNKKLVVTGRSGKQYVCHHIYQLSINDEDSQYLKNIAKYLQEEPDGNIERQNILNITSVNNIKLFDVLCTKFNSNTYEIILNSLKNDVNEGREKFSELDILEQCNILLQLLKAFKCNRESSNLEKLNNKKQAGVIVIPHLFTKCSVFKVIHQSITGLFEKEMDLLK

SEQ ID NO: 422 - protein, 1179 aa, Sphaerochaeta globosa
MSKKVSRRYEEQAQEICQRLGSRPYSIGLDLGVGSIGVAVAAYDPIKKQPSDLVFVSSRIFIPSTGAAERRQKRGQRNSLRHRANRLKFLWKLLAERNLMLSYSEQDVPDPARLRFEDAVVRANPYELRLKGLNEQLTLSELGYALYHIANHRGSSSVRTFLDEEKSSDDKKLEEQQAMTEQLAKEKGISTFIEVLTAFNTNGLIGYRNSESVKSKGVPVPTRDIISNEIDVLLQTQKQFYQEILSDEYCDRIVSAILFENEKIVPEAGCCPYFPDEKKLPRCHFLNEERRLWEAINNARIKMPMQEGAAKRYQSASFSDEQRHILFHIARSGTDITPKLVQKEFPALKTSIIVLQGKEKAIQKIAGFRFRRLEEKSFWKRLSEEQKDDFFSAWTNTPDDKRLSKYLMKHLLLTENEVVDALKTVSLIGDYGPIGKTATQLLMKHLEDGLTYTEALERGMETGEFQELSVWEQQSLLPYYGQILTGSTQALMGKYWHSAFKEKRDSEGFFKPNTNSDEEKYGRIANPVVHQTLNELRKLMNELITILGAKPQEITVELARELKVGAEKREDIIKQQTKQEKEAVLAYSKYCEPNNLDKRYIERFRLLEDQAFVCPYCLEHISVADIAAGRADVDHIFPRDDTADNSYGNKVVAHRQCNDIKGKRTPYAAFSNTSAWGPIMHYLDETPGMWRKRRKFETNEEEYAKYLQSKGFVSRFESDNSYIAKAAKEYLRCLFNPNNVTAVGSLKGMETSILRKAWNLQGIDDLLGSRHWSKDADTSPTMRKNRDDNRHHGLDAIVALYCSRSLVQMINTMSEQGKRAVEIEAMIPIPGYASEPNLSFEAQRELFRKKILEFMDLHAFVSMKTDNDANGALLKDTVYSILGADTQGEDLVFVVKKKIKDIGVKIGDYEEVASAIRGRITDKQPKWYPMEMKDKIEQLQSKNEAALQKYKESLVQAAAVLEESNRKLIESGKKPIQLSEKTISKKALELVGGYYYLISNNKRTKTFVVKEPSNEVKGFAFDTGSNLCLDFYHDAQGKLCGEIIRKIQAMNPSYKPAYMKQGYSLYVRLYQGDVCELRASDLTEAESNLAKTTHVRLPNAKPGRTFVIIITFTEMGSGYQIYFSNLAKSKKGQDTSFTLTTIKNYDVRKVQLSSAGLVRYVSPLLVDKIEKDEVALCGE

SEQ ID NO: 423 - protein, 1426 aa, Sphingobacterium spiritivorum
  Sphingobacterium spiritivorum ATCC 33861
MKHILGLDLGTNSIGWALIKQDFENKQGEILGMGSRIIPMSQDILGDFGKGNSVSQTAERTKYRSVRRLRERFLLRRERLHRILNVLGFLPEHYASQIDFTKRFGKFKEETEPKLVYSNEGFIFKKSFEEMLSDFKTHQPQLLEDNKKIPYDWTIYYLRKKALSRKIEKEELAWILLNFNQKRGYYQLRGEEEEENPNKLIEFYSLKIVDVLADEPQKGKSDIWYSLILENGWIYRRSSKTPLFDWKEKTRDFIVTIDLNDDGSVKTDKEGNEKRSFRAPGENDWTLVKKKTEQEIDSSRKTVGTYIYETLLKNPKQKIKGKLVRTIERKFYKTELKQILEKQKEFHPELRQDDLYSDCVRELYKNNEAHQLTLSKKDFVHLFMEDIIFYQRPLGSQKSSISNCTLEFRKYKDENGTEHTQYLKAIPKSNPYYQEFRIWQWMYNLNIYKKEDDTNVTKDFLNTKADFESLFEFLNNRKEVDQKALLKHFKLNDKTHRWNYVEDKKYPCNETKTMILSRLDKVENISDDFLTREMEQKIWHIIYSVNDKVEYEKALKSFAGKNNLEDNSFFEAFKKFPPFKSEYGAFSEKAIKKLLPLMRMGKFWNYNNISEQSKSRIQKIITGEYDENIKDKVREKAIHLTTETDFQGLQLWLVQYIVYGRHSEAAMLGKWNSADDLEEFLKEFKQHSLRNPIVEQVITETLRVVKDIWQKYGNGAKDFFREIHIELGREMKLPAEERERLTRQISENENTNFRIKALLAEMMDDNSVENVRPFSPMQQEILKIYEEGVLNSDIEIEDDILKISKTAQPSSSDLKRYKLWLEQKYKSPYTGQIIPLNKLFTPEYEIEHIIPQSRYFDDSFTNKIICESAVNKLKDNYIGLEFIKKLGGSIVECGNGKSVAILKHDAYEDFIKKHYANNRSKRNKLLLEDIPEKMIERQMNDTRYISKYISGVLSNIVRVEDGTDEGVNSKNIVPGNGKITTQLKQDWGLNDVWNDLILPRFERMNHLTNSTDFTAWNENHQKFLPTVPVEFSKGFSKKRIDHRHHALDALVIACATKDHVNLLNNQSAKSDTKRYDLKKKLMKFEKVAYNHPQTGERIEREAPKQFLKPWETFTIDAKNHLETIIVSFKQNLRVINKATNYYEKYVEKEGTKVKERVEQKGTNWAIRKPMHKETVSGKIDLPRIKVPKGKILTATRKSLDTSFNLKTIGSITDTGIQKILKNYLQYKDNNPELAFSPEGIEDMNKNIEKFNNGKAHQSISKVRVFELGSKFPLGQSGNKKEKYVEAAKGTNLFFAIYQDKNGKRSYETIPLNEVIERQKQGLSVVDLKGVDDFYLSPNDLVYVPSEDELENISMIDFNKMSSERIYKVVSFTGNQIFFVRQDIATSVVNKAEFSTLNKMERAIDGTMIKETCVKLQIDRLGNISKI

SEQ ID NO: 424 - protein, 1110 aa, Sphingobium sp.
  Sphingobium sp. AP49
MAEGKKRIWRLGADLGANSLGWAAIELSAPVNGKPIAILAAGSRIFSDGRDPKSGASLAVDRRDARAMRRRRDRFKQRQKALIKYLIADGLFPADEAARNAMAAIDPYAVRARALDEALSLPELGRALFHLNQRRGFKSNRKADRKADDDAGKIAIGIDRTRDAIAEDEADAGAEPGSWTFGKWLHERRLKGQSVRTRLRPESGEDAKGDGYDFYPDRALMEEEFDAIWAAQAPHHPDVLTNDVHDRLHEIIFYQRPLKAPQVGMCSLIPGDRRLPKAHPLFQRRRLLEELNALMIVRPGEVAQRLTREERDILLLKLKDKNKVSFATLRKALKLDPDARFNKESEDRTDLKGDEVAAVMGSKTRFGNLWVHLSIEAQWDVLARLDAVESDAEDAAFCAWLVETYALTPEQARAVANAPLPPGYGRFGETATRKLIEALRDGKKDDRVLVYSEAVTEAGLGHHSDRRTGEVFEDAKGRPQLPYYGVALERHIMPGTGDPSDPEEMRVGRLTNPTVHIGLNQLRRILNVLIRAYGPPAEIAIELARELKLTDEDKKRINRENNDNRIAAERRSEKLLAIGQADSGANRALLKLWEELNPANVLDRRCIYSGRQISIDMLFSAAVEVDHILPFAATLDDSNGNKIVCLREANREKRKRSPHDAWGHSARWDEIAARAAQLPRNKRWRFEPDAMDKFRDEGGFQARHLVDTQYLARLSREYLATLYPEKGEGSGHIWVSPGRLTEMVRRKLGLNDLLPDHNFGGGADQAKNRLDHRHHAIDAVVVAIVDRGMLNAIARASGQEGAEGRERIIIPEPWDGFRDALRETVNRITVSHRTDHGTASKAGLPKGKDATAGRLHNDTAYGFTGDTDAKGNSIVVRRVPLSSFKKLADLDRIRDADLKAALYQHLNGLEGKAFEKALAEFHKLEWHNFGGVRRVRVTEPLTVIPIKDRNGRIYKGYKGDSNYRYDVWELPDGKWVTNWKNEAGEAMSSVISMFDAHQSSEPPRPHPAARKILSLHQNDLLAIEREGEDRKLMRVVKFGQSGQITLAEHQQAGDLKKRDAVSNDDDPFKYFAPTSGGLKKVKARQVRIDEIGRVLDPGFPARTARRKTRG

SEQ ID NO: 425 - protein, 1090 aa, Sphingomonas sp.
  Sphingomonas sp. S17
MDWRLGLDLGANSLGWAALRLDRAGDPIGILAMGSRIFSDGRDPKSGASLAVDRRAARAMRRRRDRFKQRQAALLKYLIRDGLFPADQADRQRLADEDPYALRARALDEELSLFEIGRALFHLNQRRGFQSNRKADRGQDDEAGKIAVGVDRLNQQMEEQGARTLGEFLHQRRRAATDANHIPSVRTRLRPETGEGAKGDGYDFYPSRALIAEEFEEIWAAQAPHYPDTLTQQVHDRLYEIIFHQRPLRAPQVGQCTLVAGETRLPKAHPLFQKRRLLEEINALMIVRPGEIAQRLTPEERDTLYLKLKDKRTVSFATLRKTLKLDSAARFNKESENRTELKGDEVAAELGAKTRLGTRWQHLSGDQQWEVVHRLMALESQADEAAFRDWISQTYDLLPEQAAAVLGARLPQGHGRFGPTATTTLIDSLLHDRTEDGRVVVYSEAVQRSGLGHHSDLRHDRDDEDVTELPYYGVALERHIMPGTAEPTDPEEMRIGRLTNPTVHIGLNQLRHVVNRLIRAYGPPKEIAIELARELKLSEDEKKKRNSENRDNRLAAEGRSKKLEEIRQRDTGANRALLKLWEELNPGNVLDRRCIYTGEQISIDMLFSDRVEVDHILPFAQTLDDSNGNKLLCLREANREKRRRSPYEAWGHTDRWPDIAERASRLPKPKRWRFEPDAMQRFATEDGFLARHLVDTQYLGRLAREYLSWLYPGRGEGSGHVWVSPGRLTEMVRRKLGLNDLLPDHNFGGGADQPKNRLDHRHHAIDALVVAIVDRGMLQAIARASGQDGSEGRERIHIPAPWDGFRDDLRVAVNGIIVSHRPDHGTVAKAGLARGRDQTAGRLHNDTAYGLTGETDAKGNSIVVRRIPLSAIKKPADIARVRDPLLRNALAEFTKGLDGKAFEARIGRFHELGPLLYRGIRRVRVVETLTVIPIRDAEGRAYKGYKGDSNYRYDVWEMPDGKWRCQVVSMFDAHQSTEQARPHPAARKILSLQRNDILAIERTEGDRELVRVVKFSEKQFAVAPPHEGGSLKTRDGNADDPFRYLYPSPNTLKGWRARQVRIDELGRVLDPGFPARKSVRRTRPRAAPVD

SEQ ID NO: 426 - protein, 1084 aa, Sporolactobacillus vineae
  Sporolactobacillus vineae DSM 21990 = SL153
MKYSIGLDIGISSVGWSVINLDRERIELMGARLFDAAENPKNGSSLAAPRRDARSARRRLRRRRYRVGRVRHFIIDRGLVTRGQADQLFDWKDGDLDIWLVRVNALERLLTDREFARVLIHIAKNRGYRSNRKSEAKSGENGQVLSAIKANKELMEEKGYQTVAEMLVNEPETFAGRKRNRGGEYTHVIARSELEHEIRLIFTKQRAFGNRFATEENENTYVKIWAAQRPVATKDDILKKIGDCTFEKGEKRAPKASYAFQYFRALDKLNRLRILSVREPSRNLTDDERNLIVPALFNHDKQKYSDLRKILQLRDDQKFNELFYDPGKSLKENENKTFLSLAEQYKIRKVIRDVQGKDGLLQYRPLDIDTIAYALTVFKDDQDTRDYLSNTFVNGNGKQVLNLANRAFDAELIDGLLSLSFAKFGHLSLKALHKLIPHMEQGLSYYDACKKVGYHDNEQVGKSKQHLLPVIPADEIRNPVVVRSLSQTRKVINAIIKRYGSPTFMYIELAREMGRPYNERRDLEKQYNKNRTVNDSAIEQIHELYPEIGAPRGHDILKYKLWQQQDCKCAYSLEKIPAEKIFEPGYAEVDHIIPYSRSFDDSNSNKVLVLSRMNQEKKNRTPYEWFGGDEHRWNKFESYVNALKVNRKKKSLLTKKNMDTEEEDTFKSRHLNDTRYITRFIKSFVEDNLLFREIEGAKQHVFTVNGAYTSLMRKRWGFNKNREESDLHHSVDAVIIAVSQPFRNEVSRYFKHREISLPQLLKRTWDYFPEPWEGFVKELRARTLQDPEKLKLALESLDLDSYDPEFIDEVKPIFISRMPKRSIKGQIHDETLRRNRGKTKDGFVKIVTRTRLENIKFDKNGDFPMYGRESDPKTYQAIKQRYLENNKDKKKAFIEPLYKPAKNPNNASLIRSVKIEDKANQIVPLRDEAVAYNASIVRTEVYRNKETGKFYLAPVYVSDVFAGREPRRFIRANVPYEQWVNITDKFTFLFNLYPNDVIYIKMKKVKTTKSNINKTISWQESYFYFKGTDIHTGAITIIDHMNSFTDRVGTQGLQLFEKYQVDPLGNLSRVHGETQYGVPALSHS

SEQ ID NO: 427 - protein, 1053 aa, Staphylococcus aureus; identical to SEQ ID NO: 28
  Staphylococcus aureus subsp. aureus

SEQ ID NO: 428 - protein, 1054 aa, Staphylococcus lugdunensis
  Staphylococcus lugdunensis M23590
MNQKFILGLDIGITSVGYGLIDYETKNIIDAGVRLFPEANVENNEGRRSKRGSRRLKRRRIHRLERVKKLLEDYNLLDQSQIPQSTNPYAIRVKGLSEALSKDELVIALLHIAKRRGIHKIDVIDSNDDVGNELSTKEQLNKNSKLLKDKFVCQIQLERMNEGQVRGEKNRFKTADIIKEIIQLLNVQKNFHQLDENFINKYIELVEMRREYFEGPGKGSPYGWEGDPKAWYETLMGHCTYFPDELRSVKYAYSADLFNALNDLNNLVIQRDGLSKLEYHEKYHIIENVFKQKKKPTLKQIANEINVNPEDIKGYRITKSGKPQFTEFKLYHDLKSVLFDQSILENEDVLDQIAEILTIYQDKDSIKSKLTELDILLNEEDKENIAQLTGYTGTHRLSLKCIRLVLEEQWYSSRNQMEIFTHLNIKPKKINLTAANKIPKAMIDEFILSPVVKRTFGQAINLINKIIEKYGVPEDIIIELARENNSKDKQKFINEMQKKNENTRKRINEIIGKYGNQNAKRLVEKIRLHDEQEGKCLYSLESIPLEDLLNNPNHYEVDHIIPRSVSFDNSYHNKVLVKQSENSKKSNLTPYQYFNSGKSKLSYNQFKQHILNLSKSQDRISKKKKEYLLEERDINKFEVQKEFINRNLVDTRYATRELTNYLKAYFSANNMNVKVKTINGSFTDYLRKVWKFKKERNHGYKHHAEDALIIANADFLFKENKKLKAVNSVLEKPEIESKQLDIQVDSEDNYSEMFIIPKQVQDIKDFRNFKYSHRVDKKPNRQLINDTLYSTRKKDNSTYIVQTIKDIYAKDNTTLKKQFDKSPEKFLMYQHDPRTFEKLEVIMKQYANEKNPLAKYHEETGEYLTKYSKKNNGPIVKSLKYIGNKLGSHLDVTHQFKSSTKKLVKLSIKPYRFDVYLTDKGYKFITISYLDVLKKDNYYYIPEQKYDKLKLGKAIDKNAKFIASFYKNDLIKLDGEIYKIIGVNSDTRNMIELDLPDIRYKEYCELNNIKGEPRIKKTIGKKVNSIEKLTTDVLGNVFTNTQYTKPQLLFKRGN

SEQ ID NO: 429 - protein, 1334 aa, Staphylococcus pseudintermedius
MGRKPYILSLDIGTGSVGYACMDKGFNVLKYHDKDALGVYLFDGALTAQERRQFRTSRRRKNRRIKRLGLLQELLAPLVQNPNFYQFQRQFAWKNDNMDFKNKSLSEVLSFLGYESKKYPTIYHLQEALLLKDEKFDPELIYMALYHLVKYRGHFLFDHLKIENLTNNDNMHDFVELIETYENLNNIKLNLDYEKTKVIYEILKDNEMTKNDRAKRVKNMEKKLEQFSIMLLGLKFNEGKLFNHADNAEELKGANQSHTFADNYEENLTPFLTVEQSEFIERANKIYLSLTLQDILKGKKSMAMSKVAAYDKFRNELKQVKDIVYKADSTRTQFKKIFVSSKKSLKQYDATPNDQTFSSLCLFDQYLIRPKKQYSLLIKELKKIIPQDSELYFEAENDTLLKVLNTTDNASIPMQINLYEAETILRNQQKYHAEITDEMIEKVLSLIQFRIPYYVGPLVNDHTASKFGWMERKSNESIKPWNFDEVVDRSKSATQFIRRMTNKCSYLINEDVLPKNSLLYQEMEVLNELNATQIRLQTDPKNRKYRMMPQIKLFAVEHIFKKYKTVSHSKFLEIMLNSNHRENFMNHGEKLSIFGTQDDKKFASKLSSYQDMTKIFGDIEGKRAQIEEIIQWITIFEDKKILVQKLKECYPELTSKQINQLKKLNYSGWGRLSEKLLTHAYQGHSIIELLRHSDENFMEILTNDVYGFQNFIKEENQVQSNKIQHQDIANLTTSPALKKGIWSTIKLVRELTSIFGEPEKIIMEFATEDQQKGKKQKSRKQLWDDNIKKNKLKSVDEYKYIIDVANKLNNEQLQQEKLWLYLSQNGKCMYSGQSIDLDALLSPNATKHYEVDHIFPRSFIKDDSIDNKVLVIKKMNQTKGDQVPLQFIQQPYERIAYWKSLNKAGLISDSKLHKLMKPEFTAMDKEGFIQRQLVETRQISVHVRDFLKEEYPNTKVIPMKAKMVSEFRKKFDIPKIRQMNDAHHAIDAYLNGVVYHGAQLAYPNVDLFDFNFKWEKVREKWKALGEFNTKQKSRELFFFKKLEKMEVSQGERLISKIKLDMNHFKINYSRKLANIPQQFYNQTAVSPKTAELKYESNKSNEVVYKGLTPYQTYVVAIKSVNKKGKEKMEYQMIDHYVFDFYKFQNGNEKELALYLAQRENKDEVLDAQIVYSLNKGDLLYINNHPCYFVSRKEVINAKQFELTVEQQLSLYNVMNNKETNVEKLLIEYDFIAEKVINEYHHYLNSKLKEKRVRTFFSESNQTHEDFIKALDELFKVVTASATRSDKIGSRKNSMTHRAFLGKGKDVKIAYTSISGLKTTKPKSLFKLAESRNEL

SEQ ID NO: 430 - protein, 1334 aa, Staphylococcus pseudintermedius; identical to SEQ ID NO: 429
  Staphylococcus pseudintermedius ED99

SEQ ID NO: 431 - protein, 1112 aa, Staphylococcus simulans
  Staphylococcus simulans ACS-120-V-Sch1
MLVGLKFKQSILFENMENAEDIKESATGSDAISLSDDYYENLSEFLTDEQLNFIESANTFFMGIMLDRILKGATSISAAKVRDYKIFKSQLKLIKDIVYQNKYDKYHEFFVTSKEDMRAYQENPDAKNFGKLSKFDQYLIHSKDQYAKLMKDLKGLVPKEYTEVLNLIDEQKFLVVQNTTDNASIPYQNNVFEAENILRNQQKYYPEITEEMIGKVINLISFRIPYYVGPLTNKNGQSDFAWMIRKSDEQTLPWNFDKVIDKSKSAEKFIRRMTSKCTYLLEEDVLPKHSLLYQEMEVLNELNNVQLRGENEPKHRIHRLDPKVKQFIYHNLFQKKKNVTHKDLITLLQNSEHRNTLNKTSGQKLKVFGTQNDSKFASKLSTYNDMKAILGSVENKRQMIEELVLWITIFEDKAILKQKIGEKYPNITEKQLNQIVKLNYSGWGRLSEKLLTKEVNGRSLIDLMYSTENNFMEIITDKTLGFDCFIKNSNKVKNAKISYKDVAELRTSPALKKGIWNAIKMVREISNLFGAPEKIIIEFATEDQAKGKRQKSRSELWDDLVKKNNLKRNKEFEGLFEELKAYPDLDFSNPKLWLYIHQNGKCMYTKKPIDLERLMSDTNNQLYEIDHILPRTFVKDDSINNKVLVIQSANQKKSGDKMPLEIFDNHVLVPFWKMLYENDLISSSKLSKLMKKEFNDLDKEGFIQRQLVETRQIISHVSDFLTEEYPSTTVVPMKANVVSELRRKFDIPKIRQLNDWHHAVDAYLNGFVYQAARVFYPKVNLFEFNFKWEKVREKWRQLGEFTENNKKREFFLFKRMENYVNEYGEGMISKLIFDLDNFKFNYSRKVESTESAFYKQSAFSPKNTTAQYDSDKNKTAIYKEMKNKRGIVVSYTYVKKDQELIGYGVFNETVFEYVNNADVDMNTRALKIVRKAFPKLDIKKAQYLFSINKGDALLVNGHPFLFVSAYERINGKQLEFDIAMQRKIKQALSPYNNMTEQEKVEFYNQFAEKVIEEFRNSIGLQSRDRKVNLIKNLFNNTEKSNDSMTQSILEVLKMTKVSAERSKELKIRWNGQTPNTFIDTKNNAEIQYKSITGLKTTKPKSIFKLAESKNEL

SEQ ID NO: 432 - protein, 1370 aa, Streptococcus agalactiae
  Streptococcus agalactiae 2603V/R
MNKPYSIGLDIGTNSVGWSIITDDYKVPAKKMRVLGNTDKEYIKKNLIGALLFDGGNTAADRRLKRTARRRYTRRRNRILYLQEIFAEEMSKVDDSFFHRLEDSFLVEEDKRGSKYPIFATLQEEKDYHEKFSTIYHLRKELADKKEKADLRLIYIALAHIIKFRGHFLIEDDSFDVRNTDISKQYQDFLEIFNTTFENNDLLSQNVDVEAILTDKISKSAKKDRILAQYPNQKSTGIFAEFLKLIVGNQADFKKYFNLEDKTPLQFAKDSYDEDLENLLGQIGDEFADLFSAAKKLYDSVLLSGILTVIDLSTKAPLSASMIQRYDEHREDLKQLKQFVKASLPEKYQEIFADSSKDGYAGYIEGKTNQEAFYKYLSKLLTKQEDSENFLEKIKNEDFLRKQRTFDNGSIPHQVHLTELKAIIRRQSEYYPFLKENQDRIEKILTFRIPYYIGPLAREKSDFAWMTRKTDDSIRPWNFEDLVDKEKSAEAFIHRMTNNDFYLPEEKVLPKHSLIYEKFTVYNELTKVRYKNEQGETYFFDSNIKQEIFDGVFKEHRKVSKKKLLDFLAKEYEEFRIVDVIGLDKENKAFNASLGTYHDLEKILDKDFLDNPDNESILEDIVQTLTLFEDREMIKKRLENYKDLFTESQLKKLYRRHYTGWGRLSAKLINGIRDKESQKTILDYLIDDGRSNRNFMQLINDDGLSFKSIISKAQAGSHSDNLKEVVGELAGSPAIKKGILQSLKIVDELVKVMGYEPEQIVVEMARENQTTNQGRRNSRQRYKLLDDGVKNLASDLNGNILKEYPTDNQALQNERLFLYYLQNGRDMYTGEALDIDNLSQYDIDHIIPQAFIKDDSIDNRVLVSSAKNRGKSDDVPSLEIVKDCKVFWKKLLDAKLMSQRKYDNLTKAERGGLTSDDKARFIQRQLVETRQITKHVARILDERFNNELDSKGRRIRKVKIVTLKSNLVSNFRKEFGFYKIREVNNYHHAHDAYLNAVVAKAILTKYPQLEPEFVYGDYPKYNSYKTRKSATEKLFFYSNIMNFFKTKVTLADGTVVVKDDIEVNNDTGEIVWDKKKHFATVRKVLSYPQNNIVKKTEIQTGGFSKESILAHGNSDKLIPRKTKDIYLDPKKYGGFDSPIVAYSVLVVADIKKGKAQKLKTVTELLGITIMERSRFEKNPSAFLESKGYLNIRADKLIILPKYSLFELENGRRRLLASAGELQKGNELALPTQFMKFLYLASRYNESKGKPEEIEKKQEFVNQHVSYFDDILQLINDFSKRVILADANLEKINKLYQDNKENISVDELANNIINLFTFTSLGAPAAFKFFDKIVDRKRYTSTKEVLNSTLIHQSITGLYETRIDLGKLGED

SEQ ID NO: 433 - protein, 1377 aa, Streptococcus agalactiae
  Streptococcus agalactiae 515
MNKPYSIGLDIGTNSVGWSIITDDYKVPAKKMRVLGNTDKEYIKKNLIGALLFDGGNTAADRRLKRTARRRYTRRRNRILYLQEIFAEEMSKVDDSFFHRLEDSFLVEEDKRGSKYPIFATMQEEKYYHEKFPTIYHLRKELADKKEKADLRLVYLALAHIIKFRGHFLIEDDRFDVRNTDIQKQYQAFLEIFDTTFENNHLLSQNVDVEAILTDKISKSAKKDRILAQYPNQKSTGIFAEFLKLIVGNQADFKKHFNLEDKTPLQFAKDSYDEDLENLLGQIGDEFADLFSVAKKLYDSVLLSGILTVTDLSTKAPLSASMIQRYDEHHEDLKHLKQFVKASLPENYREVFADSSKDGYAGYIEGKTNQEAFYKYLLKLLTKQEGSEYFLEKIKNEDFLRKQRTFDNGSIPHQVHLTELRAIIRRQSEYYPFLKENQDRIEKILTFRIPYYVGPLAREKSDFAWMTRKTDDSIRPWNFEDLVDKEKSAEAFIHRMTNNDLYLPEEKVLPKHSLIYEKFTVYNELTKVRFLAEGFKDFQFLNRKQKETIFNSLFKEKRKVTEKDIISFLNKVDGYEGIAIKGIEKQFNASLSTYHDLKKILGKDFLDNTDNELILEDIVQTLTLFEDREMIKKCLDIYKDFFTESQLKKLYRRHYTGWGRLSAKLINGIRNKENQKTILDYLIDDGSANRNFMQLINDDDLSFKPIIDKARTGSHSDNLKEVVGELAGSPAIKKGILQSLKIVDELVKVMGYEPEQIVVEMARENQTTAKGLSRSRQRLTTLRESLANLKSNILEEKKPKYVKDQVENHHLSDDRLFLYYLQNGRDMYTKKALDIDNLSQYDIDHIIPQAFIKDDSIDNRVLVSSAKNRGKSDDVPSIEIVKARKMFWKNLLDAKLMSQRKYDNLTKAERGGLTSDDKARFIQRQLVETRQITKHVARILDERFNNEVDNGKKICKVKIVTLKSNLVSNFRKEFGFYKIREVNDYHHAHDAYLNAVVAKAILTKYPQLEPEFVYGMYRQKKLSKIVHEDKEEKYSEATRKMFFYSNLMNMFKRVVRLADGSIVVRPVIETGRYMGKTAWDKKKHFATVRKVLSYPQNNIVKKTEIQTGGFSKESILAHGNSDKLIPRKTKDIYLDPKKYGGFDSPIVAYSVLVVADIKKGKAQKLKTVTELLGITIMERSRFEKNPSAFLESKGYLNIRDDKLMILPKYSLFELENGRRRLLASAGELQKGNELALPTQFMKFLYLASRYNESKGKPEEIEKKQEFVNQHVSYFDDILQLINDFSKRVILADANLEKINKLYQDNKENIPVDELANNIINLFTFTSLGAPAAFKFFDKIVDRKRYTSTKEVLNSTLIHQSITGLYETRIDLGKLGED

SEQ ID NO: 434 - protein, 1370 aa, Streptococcus agalactiae; identical to SEQ ID NO: 432

SEQ ID NO: 435 - protein, 1378 aa, Streptococcus agalactiae
  Streptococcus agalactiae ATCC 13813
MNKPYSIGLDIGTNSVGWSIITDDYKVPAKKMRVLGNTDKEYIKKNLIGALLFDGGNTAADRRLKRTARRRYTRRRNRILYLQEIFAEEMSKVDDSFFHRLEDSFLVEEDKRGSKYPIFATMQEEKYYHEKFPTIYHLRKELADKKEKADLRLIYLALAHIIKFRGHFLIEDDRFDVRNTDIQKQYQAFLEIFDTTFENNDLLSQNVDVEAILTDKISKSAKKDRILARYPNQKSTGIFAEFLKLIVGNQADFKKHFNLEDKTPLQFAKDSYDEDLENLLGQIGDEFADLFSAAKKLYDSVLLSGILTVIDLSTKAPLSASMIQRYDEHHEDLKHLKQFVKASLPENYREVFADSSKDGYAGYIEGKTSQEAFYKYLLKLLTKQEGSEYLLEKIKNEDFLRKQRTFDNGSIPHQVHLTELRAIIRRQSEYYPFLKENLDRIEKILTFRIPYYVGPLAREKSDFAWMTRKTDDSIRPWNFEDLVDKEKSAEAFIHRMTNNDLYLPEEKVLPKHSLIYEKFTVYNELTKVRFLAEGFKDFQFLNRKQKETIFNSLFKEKRKVTEKDIISFLNKVDGYEGIAIKGIEKQFNASLSTYHDLKKILGKDFLDNTDNELILEDIIQTLTLFEDREMIKKRLDIYKDFFTESQLKKLYRRHYTGWGRLSAKLINGIRNKENQKTILDYLIDDGSANRNFMQLIKDAGLSFKPIIDKARTGSHSDNLKEVVGELAGSPAIKKGILQSLKIVDELVKVMGYEPEQIVVEMARENQTTAKGLSRSRQRLTTLRESLGNLKSNILEEKKPKYVKDQVENHHLSDDRLFLYYLQNGKDMYTDDELDIDNLSQYDIDHIIPQAFIKDDSIDNRVLVSSAKNRGKSDDVPSIEIVKARKMFWKNLLDAKLMSQRKYDNLTKAERGGLTSDDKARFIQRQLVETRQITKHVARILDERFNNELDSKGRRIRKVKIVTLKSNLVSNFRKEFGFYKIREVNNYHHAHDAYLNAVVAKAILTKYPQLEPEFVYGLYRRKKLSKIVREDKEEKYSEATRKMFFYSNLMNMFKRVVRLADGSIVVRPVIETGRYMGKTAWDKKKHFATVRKVLSYPQNNIVKKTEIQTGGFSKESILAHGNSDKLIPRKTKDIYLDPKKYGGFDSPIVAYSVLVVADIKKGKAQKLKTVTELLGITIMERSRFEKNTSAFLESKGYLNIRDDKLMILPKYSLFELENGRRRLLASAGELQKGNELALPTQFMKFLYLASRYNESKGKPEEIEKKQEFVNQHVSYFDDILQLINDFSNRVILADANLEKINKLYQDNKENIPVDELANNIINLFTFTSLGAPAAFKFFDKIVDRKRYTSTKEVLNSTLIHQSITGLYETRIDLGKLGEG

SEQ ID NO: 436 - protein, 1370 aa, Streptococcus agalactiae
  Streptococcus agalactiae CJB111
  MOD_RES (117)..(117): Any amino acid
MNKPYSIGLDIGTNSVGWSIITDDYKVPAKKMRVLGNTDKEYIKKNLIGALLFDGGNTAADRRLKRTARRRYTRRRNRILYLQEIFAEEMSKVDDSFFHRLEDSFLVEEDKRGSKYXIFATLQEEKDYHEKFSTIYHLRKELADKKEKADLRLIYIALAHIIKFRGHFLIEDDSFDVRNTDISKQYQDFLEIFNTTFENNDLLSQNVDVEAILTDKISKSAKKDRILAQYPNQKSTGIFAEFLKLIVGNQADFKKYFNLEDKTPLQFAKDSYDEDLENLLGQIGDEFADLFSAAKKLYDSVLLSGILTVIDLSTKAPLSASMIQRYDEHREDLKQLKQFVKASLPEKYQEIFADSSKDGYAGYIEGKTNQEAFYKYLSKLLTKQEDSENFLEKIKNEDFLRKQRTFDNGSIPHQVHLTELKAIIRRQSEYYPFLKENQDRIEKILTFRIPYYIGPLAREKSDFAWMTRKTDDSIRPWNFEDLVDKEKSAEAFIHRMTNNDFYLPEEKVLPKHSLIYEKFTVYNELTKVRYKNEQGETYFFDSNIKQEIFDGVFKEHRKVSKKKLLDFLAKEYEEFRIVDVIGLDKENKAFNASLGTYHDLEKILDKDFLDNPDNESILEDIVQTLTLFEDREMIKKRLENYKDLFTESQLKKLYRRHYTGWGRLSAKLINGIRDKESQKTILDYLIDDGRSNRNFMQLINDDGLSFKSIISKAQAGSHSDNLKEVVGELAGSPAIKKGILQSLKIVDELVKVMGYEPEQIVVEMARENQTTNQGRRNSRQRYKLLDDGVKNLASDLNGNILKEYPTDNQALQNERLFLYYLQNGRDMYTGEALDIDNLSQYDIDHIIPQAFIKDDSIDNRVLVSSAKNRGKSDDVPSLEIVKDCKVFWKKLLDAKLMSQRKYDNLTKAERGGLTSDDKARFIQRQLVETRQITKHVARILDERFNNELDSKGRRIRKVKIVTLKSNLVSNFRKEFGFYKIREVNNYHHAHDAYLNAVVAKAILTKYPQLEPEFVYGDYPKYNSYKTRKSATEKLFFYSNIMNFFKTKVTLADGTVVVKDDIEVNNDTGEIVWDKKKHFATVRKVLSYPQNNIVKKTEIQTGGFSKESILAHGNSDKLIPRKTKDIYLDPKKYGGFDSPIVAYSVLVVADIKKGKAQKLKTVTELLGITIMERSRFEKNPSAFLESKGYLNIRADKLIILPKYSLFELENGRRRLLASAGELQKGNELALPTQFMKFLYLASRYNESKGKPEEIEKKQEFVNQHVSYFDDILQLINDFSKRVILADANLEKINKLYQDNKENISVDELANNIINLFTFTSLGAPAAFKFFDKIVDRKRYTSTKEVLNSTLIHQSITGLYETRIDLGKLGED

SEQ ID NO: 437 - protein, 1370 aa, Streptococcus agalactiae
  Streptococcus agalactiae COH1
MNKPYSIGLDIGTNSVGYSVVTDDYKVPAKKMRVLGNTDKEYIKKNLIGALLFDGGNTASDRRLKRTARRRYTRRRNRILYLQEIFAEEMSKVDDSFFHRLEDSFLVEDDKRGSKYPIFATMQEEKDYHEKFPTIYHLRKELADKKEKANLRLVYLALAHIIKFRGHFLIEDDSFDVRNTDIQRQYQAFLEIFDTTFENNHLLSQNIDVEGILTDKISKSAKKDRILAQYPNQKSTGIFAEFLKLIVGNQADFKKHFNLEDKTPLQFAKDSYDEDLENLLGQIGDEFADLFSVAKKLYDSVLLSGILTVTDLSTKAPLSASMIQRYDEHREDLKQLKQFVKASLPEKYQEIFTDSSKDGYAGYIEGKTNQGAFYKYLSKLLTKQEGSEYFLEKIKNEDFLRKQRTFDNGSIPHQVHLTELKAIIRRQSEYYPFLKENLDRIEKILTFRIPYYVGPLAREKSDFAWMTRKTDDSIRPWNFEELVDKEASAEAFIHRMTNNDLYLPEEKVLPKHSLIYEKFTVYNELTKVRYKNEQGETYFFDSNIKQEIFDGVFKEHRKVSKKKLLDFLAKEYEEFRIVDVIGLDKENKAFNASLGTYHDLKKILDKDFLDNPDNESILEDIVQTLTLFEDREMIKKRLENYKDLFTESQLKKLYRRHYTGWGRLSAKLINGIRDKESQKTILDYLISDGRANRNFMQLIHDDGLSFKPIIDKAQAGSHSDNLKEVVGELAGSPAIKKGILQSLKIVDELVKVMGYEPEQVVVEMARENQTTNQGRRNTRQRYKLLEEGVKNLASDLNGNILKEYPTDNQALQNERLFLYYLQNGRDMYTGEALDIDNLSQYDIDHIVPQAFIKDDSIDNRVLVSSAKNRGKSDNVPSIDIVKARKAFWKKLLDAKLMSQRKYDNLTKAERGGLTSDDKARFIQRQLVETRQITKHVARILDERFNNELDSKGRRIRKVKIVTLKSNLVSNFRKEFGFYKIREVNDYHHAHDAYLNAVVAKAILTKYPQLEPEFVYGDYPKYNSYKTRKSATEKLFFYSNIMNFFKTKVTLADGTVVVKDDIEVNNDTGEIVWDKKKHFATVRKVLSYPQVNIVKKTEIQTGGFSKESILAHGNSDKLIPRKTKDIYLDPKKYGGFDSPIVAYSVLVVADIKKGKAQKLKTVTELLGITIMERFRFEKNPSAFLESKGYLNIRDDKLMILPKYSLFELENGRRRLLASAGELQKGNELALPTQYMKFLYLASRYNELKGKPEEIEQKQEFVVQHVSYFDDILQIINDFSNRVILADANLEKINKLYQDNKENISVDELANNIINLFTFTSLGAPAAFKFFDKIVDRKRYTSTKEVLNSTLIHQSITGLYETRIDLGKLGED

SEQ ID NO: 438 - protein, 1370 aa, Streptococcus agalactiae
  Streptococcus agalactiae FSL S3-026
MNKPYSIGLDIGTNSVGWSIITDDYKVPAKKMRVLGNTDKEYIKKNLIGALLFDGGNTAADRRLKRTARRRYTRRRNRILYLQEIFAEEMSKVDDSFFHRLEDSFLVEEDKRGSKYPIFATMQEEKYYHEKFPTIYHLRKELADKKEKADLRLIYLALAHIIKFRGHFLIEDDRFDVRNTDIQKQYQAFLEIFDTTFENNDLLSQNVDVEAILTDKISKSAKKDRILARYPNQKSTGIFAEFLKLIVGNQADFKKHFNLEDKTPLQFAKDSYDEDLENLLGQIGDEFADLFSAAKKLYDSVLLSGILTVTDLSTKAPLSASMIQRYDEHREDLKQLKQFVKASLPEKYQEIFADSSKDGYAGYIEGKTNQEAFYKYLSKLLTKQEGSEYLLEKIKNEDFLRKQRTFDNGSIPHQVHLTELRAIIRRQSEYYPFLKENLDRIEKILTFRIPYYVGPLAREKSDFAWMTRKTDDSIRPWNFEDLVDKEKSAEAFIHRMTNNDLYLPEEKVLPKHSLIYEKFTVYNELTKVRFLAEGFKDFQFLNRKQKETIFNSLFKEKRKVTEKDIISFLNKVDGYEGIAIKGIEKQFNASLSTYHDLKKILGKDFLDNTDNELILEDIVQTLTLFEDREMIRKRLDIYKDFFTESQLKKLYRRHYTGWGRLSAKLINGIRNKENQKTILDYLIDDGSANRNFMQLIKDAGLSFKPIIDKARTGSHSDNLKEVVGELAGSPAIKKGILQSLKIVDELVKVMGYEPEQIVVEMARENQTTAKGLSRLRQRLTTLRESLANLKSNILEEKKPKYVKDQVENHHLSDDRLFLYYLQNGKDMYTDDELDIDNLSQYDIDHIIPQAFIKDDSIDNRVLVSSAKNRGKSDDVPSVEIVKDCKVFWKKLLDAKLMSQRKYDNLTKAERGGLTSDDKARFIQRQLVETRQITKHVARILDERFNNELDSKGRRIRKVKIVTLKSNLVSNFRKEFGFYKIREVNNYHHAHDAYLNAVVAKAILTKYPQLEPEFVYGDYPKYNSYKTRKSATEKLFFYSNIMNFFKTKVTLADGTVVVKDDIEVNNDTGEIVWDKKKHFATVRKVLSYPQVNIVKKTEIQTGGFSKESILAHGNSDKLIPRKTKDIYLDPKKYGGFDSPIVAYSVLVVADIKKGKAQKLKTVTELLGITIMERSRFEKNPSAFLESKGYLNIRDDKLMILPKYSLFELENGRRRLLASADELQKGNELALPTQFMKFLYLASRYNELKGKPEEIEQKQEFVVQHVSYFDDILQIINDFSNRVILADANLEKINKLYQDNKENIPVDELANNIINLFTFTSLGAPAAFKFFDKIVDRKRYTSTKEVLNSTLIHQSITGLYETRIDLGKLGED

SEQ ID NO: 439 - protein, 1370 aa, Streptococcus agalactiae
  Streptococcus agalactiae GB00112
MNKPYSIGLDIGTNSVGYSVVTDDYKVPAKKMRVLGNTDKEYIKKNLIGALLFDGGNTASDRRLKRTARRRYTRRRNRILYLQEIFAEEMSKVDDSFFHRLEDSFLVEDDKRGSKYPIFATMQEEKDYHEKFPTIYHLRKELADKKEKADLRLVYLALAHIIKFRGHFLIEDDSFDVRNTDIQRQYQAFLEIFDTTFENNHLLSQNIDVEGILTDKISKSAKKDRILAQYPNQKSTGIFAEFLKLIVGNQADFKKHFNLEDKTPLQFAKDSYDEDLENLLGQIGDEFADLFSVAKKLYDSVLLSGILTVTDLSTKAPLSASMIQRYDEHREDLKQLKQFVKASLPEKYQEIFTDSSKDGYAGYIEGKTNQGAFYKYLSKLLTKQEGSEYFLEKIKNEDFLRKQRTFDNGSIPHQVHLTELKAIIRRQSEYYPFLKENLDRIEKILTFRIPYYVGPLAREKSDFAWMTRKTDDSIRPWNFEELVDKEASAEAFIHRMTNNDLYLPEEKVLPKHSLIYEKFTVYNELTKVRYKNEQGETYFFDSNIKQEIFDGVFKEHRKVSKKKLLDFLAKEYEEFRIVDVIGLDKENKAFNASLGTYHDLKKILDKDFLDNPDNESILEDIVQTLTLFEDREMIKKRLENYKDLFTESQLKKLYRRHYTGWGRLSAKLINGIRDKESQKTILDYLISDGRANRNFMQLIHDDGLSFKPIIDKAQAGSHSDNLKEVVGELAGSPAIKKGILQSLKIVDELVKVMGYEPEQVVVEMARENQTTNQGRRNTRQRYKLLEEGVKNLASDLNGNILKEYPTDNQALQNERLFLYYLQNGRDMYTGEALDIDNLSQYDIDHIVPQAFIKDDSIDNRVLVSSAKNRGKSDNVPSIDIVKARKAFWKKLLDAKLMSQRKYDNLTKAERGGLTSDDKARFIQRQLVETRQITKHVARILDERFNNELDSKGRRIRKVKIVTLKSNLVSNFRKEFGFYKIREVNDYHHAHDAYLNAVVAKAILTKYPQLEPEFVYGDYPKYNSYKTRKSATEKLFFYSNIMNFFKTKVTLADGTVVVKDDIEVNNDTGEIVWDKKKHFATVRKVLSYPQVNIVKKTEIQTGGFSKESILAHGNSDKLIPRKTKDIYLDPKKYGGFDSPIVAYSVLVVADIKKGKAQKLKTVTELLGITIMERFRFEKNPSAFLESKGYLNIRDDKLMILPKYSLFELENGRRRLLASAGELQKGNELALPTQYMKFLYLASRYNELKGKPEEIEQKQEFVVQHVSYFDDILQIINDFSNRVILADANLEKINKLYQDNKENISVDELANNIINLFTFTSLGAPAAFKFFDKIVDRKRYTSTKEVLNSTLIHQSITGLYETRIDLGKLGED

SEQ ID NO: 440 - protein, 1370 aa, Streptococcus agalactiae
  Streptococcus agalactiae H36B
  MOD_RES (9)..(9): Any amino acid
MNKPYSIGXDIGTNSVGWSIITDDYKVPAKKMRVLGNTDKEYIKKNLIGALLFDGGNTAADRRLKRTARRRYTRRRNRILYLQEIFAEEMSKVDDSFFHRLEDSFLVEEDKRGSKYPIFATLQEEKDYHEKFSTIYHLRKELADKKEKADLRLIYIALAHIIKFRGHFLIEDDSFDVRNTDISKQYQDFLEIFNTTFENNDLLSQNVDVEAILTDKISKSAKKDRILAQYPNQKSTGIFAEFLKLIVGNQADFKKYFNLEDKTPLQFAKDSYDEDLENLLGQIGDEFADLFSAAKKLYDSVLLSGILTVIDLSTKAPLSASMIQRYDEHREDLKQLKQFVKASLPEKYQEIFADSSKDGYAGYIEGKTNQEAFYKYLSKLLTKQEDSENFLEKIKNEDFLRKQRTFDNGSIPHQVHLTELKAIIRRQSEYYPFLKENQDRIEKILTFRIPYYIGPLAREKSDFAWMTRKTDDSIRPWNFEDLVDKEKSAEAFIHRMTNNDFYLPEEKVLPKHSLIYEKFTVYNELTKVRYKNEQGETYFFDSNIKQEIFDGVFKEHRKVSKKKLLDFLAKEYEEFRIVDVIGLDKENKAFNASLGTYHDLEKILDKDFLDNPDNESILEDIVQTLTLFEDREMIKKRLENYKDLFTESQLKKLYRRHYTGWGRLSAKLINGIRDKESQKTILDYLIDDGRSNRNFMQLINDDGLSFKSIISKAQAGSHSDNLKEVVGELAGSPAIKKGILQSLKIVDELVKVMGYEPEQIVVEMARENQTTNQGRRNSRQRYKLLDDGVKNLASDLNGNILKEYPTDNQALQNERLFLYYLQNGRDMYTGEALDIDNLSQYDIDHIIPQAFIKDDSIDNRVLVSSAKNRGKSDDVPSLEIVKDCKVFWKKLLDAKLMSQRKYDNLTKAERGGLTSDDKARFIQRQLVETRQITKHVARILDERFNNELDSKGRRIRKVKIVTLKSNLVSNFRKEFGFYKIREVNNYHHAHDAYLNAVVAKAILTKYPQLEPEFVYGDYPKYNSYKTRKSATEKLFFYSNIMNFFKTKVTLADGTVVVKDDIEVNNDTGEIVWDKKKHFATVRKVLSYPQNNIVKKTEIQTGGFSKESILAHGNSDKLIPRKTKDIYLDPKKYGGFDSPIVAYSVLVVADIKKGKAQKLKTVTELLGITIMERSRFEKNPSAFLESKGYLNIRADKLIILPKYSLFELENGRRRLLASAGELQKGNELALPTQFMKFLYLASRYNESKGKPEEIEKKQEFVNQHVSYFDDILQLINDFSKRVILADANLEKINKLYQDNKENISVDELANNIINLFTFTSLGAPAAFKFFDKIVDRKRYTSTKEVLNSTLIHQSITGLYETRIDLGKLGED

SEQ ID NO: 441 - protein, 1377 aa, Streptococcus agalactiae
MNKPYSIGLDIGTNSVGWSIITDDYKVPAKKMRVLGNTDKEYIKKNLIGALLFDGGNTAADRRLKRTARRRYTRRRNRILYLQEIFAEEMSKVDDSFFHRLEDSFLVEEDKRGSKYPIFATMQEEKYYHEKFPTIYHLRKELADKKEKADLRLVYLALAHIIKFRGHFLIEDDRFDVRNTDIQKQYQAFLEIFDTTFENNHLLSQNVDVEAILTDKISKSAKKDRILAQYPNQKSTGIFAEFLKLIVGNQADFKKHFNLEDKTPLQFAKDSYDEDLENLLGQIGDEFADLFSVAKKLYDSVLLSGILTVTDLSTKAPLSASMIQRYDEHHEDLKHLKQFVKASLPENYREVFADSSKDGYAGYIEGKTNQEAFYKYLLKLLTKQEGSEYFLEKIKNEDFLRKQRTFDNGSIPHQVHLTELRAIIRRQSEYYPFLKENQDRIEKILTFRIPYYVGPLAREKSDFAWMTRKTDDSIRPWNFEDLVDKEKSAEAFIHRMTNNDLYLPEEKVLPKHSLIYEKFTVYNELTKVRFLAEGFKDFQFLNRKQKETIFNSLFKEKRKVTEKDIISFLNKVDGYEGIAIKGIEKQFNASLSTYHDLKKILGKDFLDNTDNELILEDIVQTLTLFEDREMIKKCLDIYKDFFTESQLKKLYRRHYTGWGRLSAKLINGIRNKENQKTILDYLIDDGSANRNFMQLINDDDLSFKPIIDKARTGSHSDNLKEVVGELAGSPAIKKGILQSLKIVDELVKVMGYEPEQIVVEMARENQTTAKGLSRSRQRLTTLRESLANLKSNILEEKKPKYVKDQVENHHLSDDRLFLYYLQNGRDMYTKKALDIDNLSQYDIDHIIPQAFIKDDSIDNRVLVSSAKNRGKSDDVPSIEIVKARKMFWKNLLDAKLMSQRKYDNLTKAERGGLTSDDKARFIQRQLVETRQITKHVARILDERFNNEVDNGKKICKVKIVTLKSNLVSNFRKEFGFYKIREVNDYHHAHDAYLNAVVAKAILTKYPQLEPEFVYGMYRQKKLSKIVHEDKEEKYSEATRKMFFYSNLMNMFKRVVRLADGSIVVRPVIETGRYMRKTAWDKKKHFATVRKVLSYPQNNIVKKTEIQTGGFSKESILAHGNSDKLIPRKTKDIYLDPKKYGGFDSPIVAYSVLVVADIKKGKAQKLKTVTELLGITIMERSRFEKNPSAFLESKGYLNIRDDKLMILPKYSLFELENGRRRLLASAGELQKGNELALPTQFMKFLYLASRYNESKGKPEEIEKKQEFVNQHVSYFDDILQLINDFSKRVILADANLEKINKLYQDNKENIPVDELANNIINLFTFTSLGAPAAFKFFDKIVDRKRYTSTKEVLNSTLIHQSITGLYETRIDLGKLGED

SEQ ID NO: 442 - protein, 1370 aa, Streptococcus agalactiae
MNKPYSIGLDIGTNSVGWSIITDDYKVPAKKMRVLGNTDKEYIKKNLIGALLFDGGNTAADRRLKRTARRRYTRRRNRILYLQEIFAEEMSKVDDSFFHRLEDSFLVEEDKRGSKYPIFATMQEEKDYHEKFPTIYHLRKELADKKEKADLRLVYLALAHIIKFRGHFLIEDDRFDVRNTDIQKQYQAFLEIFDTSFENNHLLSQNVDVEAILTDKISKSAKKDRILAQYPNQKSTGIFAEFLKLIVGNQADFKKHFNLEDKTPLQFAKDSYDEDLENLLGQIGDEFADLFSAAKKLYDSVLLSGILTVTDLSTKAPLSASMIQRYDEHREDLKQLKQFVKASLPEKYQEIFADSSKDGYAGYIEGKTNQEAFYKYLSKLLTKQEDSEYFLEKIKNEDFLRKQRTFDNGSIPHQVHLTELKAIIRRQSEYYPFLKENQDKIEKILTFRIPYYVGPLARGNSDFAWMTRKTDDSIRPWNFEDLVDKEKSAEAFIHRMTNNDLYLPEEKVLPKHSLIYEKFTVYNELTKVRYKNEQGETYFFDSNVKQEIFDGVFKEHRKVSKKQLLDFLAKEFEEFRIVDVTGLDKENKAFNASLGTYHDLKKILDKDFLDNPDNESILEDIVQTITLFEDREMIKKRLENYKDLFTESQLKKLYRRHYTGWGRLSAKLINGIRDRESQKTILDYLISDGRANRNFMQLINDDGLSFKSIISKAQSGSHSDNLKEVVGELAGSPAIKKGILQSLKIVDELVKVMGYEPEQIVVEMARENQTTNQGRRNSRQRYKLLEDGVKNLASDLNGDILKEYPTDNQALQNERLFLYYLQNGRDMYTGEALDIDNLSQYDIDHIVPQAFIKDDSIDNRVLVSSAKNRGKSDDVPSIDIVKARKAFWKKLLDAKLISQRKYDNLTKAERGGLTPDDKAGFIQRQLVETRQITKHVARILDERFNNKVDDNNKPIRKVKIVTLKSNLVSNFRKEFGFYKIREVNNYHHAHDAYLNAVVAKAILTKYPQLEPEFVYGDYPKYNSYKTRKSATEKLFFYSNIMNFFKTKVTLADETVVVKDDIEVNNETGEIAWDKKKHFATVRKVLSYPQVNIVKKTEVQTGGFSKESILAHSNSDKLIPRKTKDIYLDPKKYGGFDSPIVAYSVLVLADIKKGKAQKLKTVKELIGITIMERERFEKNPSAFLESKGYLNIRTDKLIILPKYSLFELENGRRRLLASAGELQKGNELALPTQYMKFLYLASRYNESKGKPEEIEKKQEFVNQHVSYFDDILQLINDFSKRVILADANLEKINKLYSDNKDNTPVDELAKNIINLFTFTSLGAPAAFKFFDKSVDRKRYTSTKEVLDSTLIHQSITGLYETRIDLGKLGED

SEQ ID NO: 443 - protein, 1370 aa, Streptococcus agalactiae
  Streptococcus agalactiae STIR-CD-17
MNKPYSIGLDIGTNSVGWSIITDDYKVPAKKMRVLGNTDKEYIKKNLIGALLFDGGNTAADRRLKRTARRRYTRRRNRILYLQEIFAEEMSKVDDSFFHRLEDSFLVEEDKRGSKYPIFATMQEEKDYHEKFPTIYHLRKELADKKEKADLRLVYLALAHIIKFRGHFLIEDDRFDVRNTDIQKQYQAFLEIFDTSFENNHLLSQNVDVEAILTDKISKSAKKDRILAQYPNQKSTGIFAEFLKLIVGNQADFKKHFNLEDKTPLQFAKDSYDEDLENLLGQIGDEFADLFSAAKKLYDSVLLSGILTVTDLSTKAPLSAYMIQRYDEHREDLKQLKQFVKASLPEKYQEIFADSSKDGYAGYIEGKTNQEAFYKYLSKLLTKQEDSEYFLEKIKNEDFLRKQRTFDNGSIPHQVHLTELKAIIRRQSEYYPFLKENQDKIEKILTFRIPYYVGPLARGNSDFAWMTRKTDDSIRPWNFEDLVDKEKSAEAFIHRMTNNDLYLPEEKVLPKHSLIYEKFTVYNELTKVRYKNEQGETYFFDSNVKQEIFDGVFKEHRKVSKKQLLDFLAKEFEEFRIVDVTGLDKENKAFNASLGTYHDLKKILDKDFLDNPDNESILEDIVQTITLFEDREMIKKRLENYKDLFTESQLKKLYRRHYTGWGRLSAKLINGIRDRESQKTILDYLISDGRANRNFMQLINDDGLSFKSIISKAQSGSHSDNLKEVVGELAGSPAIKKGILQSLKIVDELVKVMGYEPEQIVVEMARENQTTNQGRRNSRQRYKLLEDGVKNLASDLNGDILKEYPTDNQALQNERLFLYYLQNGRDMYTGEALDIDNLSQYDIDHIVPQAFIKDDSIDNRVLVSSAKNRGKSDDVPSIDIVKARKAFWKKLLDAKLISQRKYDNLTKAERGGLTPDDKAGFIQRQLVETRQITKHVARILDERFNNKVDDNNKPIRKVKIVTLKSNLVSNFRKEFGFYKIREVNNYHHAHDAYLNAVVAKAILTKYPQLEPEFVYGDYPKYNSYKTRKSATEKLFFYSNIMNFFKTKVTLADETVVVKDDIEVNNETGEIAWDKKKHFATVRKVLSYPQVNIVKKTEVQTGGFSKESILAHSNSDKLIPRKTKDIYLDPKKYGGFDSPIVAYSVLVLADIKKGKAQKLKTVKELIGITIMERERFEKNPSAFLESKGYLNIRTDKLIILPKYSLFELENGRRRLLASAGELQKGNELALPTQYMKFLYLASRYNESKGKPEEIEKKQEFVNQHISYFDDILQLINDFSKRVILADANLEKINKLYSDNKDNTPVDELAKNIINLFTFTSLGAPAAFKFFDKSVDRKRYTSTKEVLDSTLIHQSITGLYETRIDLGKLGED

SEQ ID NO: 444 - protein, 1125 aa, Streptococcus anginosus
  Streptococcus anginosus 1_2_62CV
MNGLVLGLDIGIASVGVGILNKETGEIIHANSRIFPAATADSNVERRGFRQGRRLGRRKKHRSARLNNLFEEFGFITDFSAIPLNLNPYALRVKGLSEELTNEELFIALKNIIKRRGISYLDDASEDGETASNEYGKAVEENRKLLADKTPGQIQLERFEKYGQVRGDFTVVENGENHRLINVFSTSAYKKEAERILRRQQEFNVRISDEFIEAYLTILTGKRKYYHGPGNEKSRTDYGRFRTDGTTLDNIFGILIGKCTFYPDEYRAAKASYTAQEFNLLNDLNNLTVPTETKKLSPEQKRQIVEYARTAKTLGTPTLLKYIAKLVDGSIDDIKGYRIDKSDKPEMHTFDAYRKMRTLDLVNIDALSRETLDDLAHILTLNTESEGILEALNSKMPSTFTKEQIDELIQFRKKNSAVFGKGWHNFSLKLMNELISELYETSEEQMTILTRLGKQRSREISKRTKYIDEKELTEEIYNPVVAKSVRQAIKIINEATKRYGIFDNIVIEMARENNEEDAKKDYIKRQKANQDEKNASMEKAAFQYNGKKELPDSIFHGHKELATKIRLWHQQGERCLYTGKNISIRDLIHNPHQYEIDHILPLSLSFDDGLANKVLVLATANQEKGQRTPFQAIDSMDDAWSYREFKQYVRNSKSLSNKKKDYLLTEEDISKIEVKQKFIERNLVDTRYSSRVVLNTLQEFYKTNDFDTKISVVRGQFTSQLRRKWKIEKSRDTYHHHAVDALIIAASSQLRLWKKQNNPLISYKEGQFVDPETGEILSLTDDEYKELVFRPPYDYFVDTLKSKSFEDSILFSYQVDSKYNRKISDATIYGTRKAQLGKDKQEETYVLGKIKDIYSQKGYEDFIKRYNKDETQFLIYHKDPQTFEKVIEEILKTYPDKELNEKGKEIPCNPFEKYRQENGPIRKYSKKGKGPEIKSLKYYDNKLGNHIDITPVNSQNQVVLQSLKPWRTDVYFNPRTSKYELMGLKYSDLRFEKGSGSYGISPEKYNKVKAKEGVNEDSEFKFTLYKNDLILIKDTETGEQQLFRYGSRNDTSKHYVELKPYEKAKFEGNQQLMNLLGTVAKGGQCLKGINKPNLSIYKVKTDVLGNKYFIKKEGDQPQLNFKKKF

SEQ ID NO: 445 - protein, 1345 aa, Streptococcus anginosus
  Streptococcus anginosus F0211
MDQKYSIGLDIGTNSVGWAVVTDDYKVPAKKMKVLGNTDKQSIKKNLLGALLFDSGETAEATRLKRTARRRYTRRRNRLRYLQEIFAEEMNKVDENFFQRLDDSFLVDEDKRGERHPIFGNIAAEVKYHDDFPTIYHLRKHLADISQKADLRLVYLALAHMIKFRGHFLIEGQLKAENTNVQALFKDFVEVYDKTVEESHLSEMTVDALSILTEKVSKSRRLENLIAHYPAEKKNTLFGNLIALSLGLQPNFKTNFQLSEDAKLQFSKDTYEEDLEGLLGEIGDEYADLFASAKNLYDAILLSGILTVDDNSTKAPLSASMVKRYEEHQKDLKKLKDFIKVNAPDQYNAIFKDKNKKGYAGYIENGVKQDEFYKYLKGILLQINGSGDFLDKIDREDFLRKQRTFDNGSIPHQIHLQEMHAILRRQEEHYPFLKENQDKIEKILTFRIPYYVGPLARKGSRFAWAEYKADEKITPWNFDDILDKEKSAEKFITRMTLNDLYLPEEKVLPKHSLLYETFTVYNELTKVKYVNEQGEAKFFDANMKQEIFDHVFKENRKVTKDKLLNYLNKEFEEFRIVNLTGLDKENKAFNSSLGTYHDLRKILDKSFLDDKANEKTIEDIIQTLTLFEDREMIRQRLQKYSDIFTKAQLKKLERRHYTGWGRLSYKLINGIRNKENKKTILDYLIDDGYANRNFMQLINDDALSFKEEIARAQIIGDVDDIANVVHDLPGSPAIKKGILQSVKIVDELVKVMGHNPANIIIEMARENQMTDKGRRNSQQRLKLLQDSLKNLDNPVNIKNVENQQLQNDRLFLYYIQNGKDMYTGETLDINNLSQYDIDHIIPQAFIKDNSLDNRVLTRSDKNRGKSDDVPSIEVVHEMKSFWSKLLSVKLITQRKFDNLTKAERGGLTEEDKAGFIKRQLVETRQITKHVAQILDERFNTEFDGNKRRIRNVKIITLKSNLVSNFRKEFELYKVREINDYHHAHDAYLNAVVGNALLLKYPQLEPEFVYGEYPKYNSYRSRKSATEKFLFYSNILRFFKKEDIQTNEDGEIAWNKEKHIKILRKVLSYPQVNIVKKTEEQTGGFSKESILPKGESDKLIPRKTKNSYWNPKKYGGFDSPVVAYSILVFADVEKGKSKKLRKVQDMVGITIMEKKRFEKHPVDFLEQRGYRNVRLEKIIKLPKYSLFELENKRRRLLASARELQKGNELVIPQRFTTLLYHSYQIEKNYEPEHREYVEKHKDEFKELLEYISVFSRKYVLADNNLTKIEMLFSKNKDAEVSSLAKSFISLLTFTAFGAPAAFNFFGENIDRKRYTSVTECLNATLIHQSITGLYETRIDLSKLGED

SEQ ID NO: 446 - protein, 1386 aa, Streptococcus anginosus
  Streptococcus anginosus SK1138
MNQKYSIGLDIGTNSVGWAVITDDYKVPAKKMKVLGNTDKQSIKKNLLGALLFDSGETAEATRLKRTARRRYTRRRNRLRYLQEIFAEEMMQVDESFFQRLDDSFLVDEDKRGERHPIFGNIAAEVKYHDEFPTIYHLRKHLADISQKADLRLVYLALAHMIKFRGHFLIEGQLKAENTNVQALFKDFVEVYDKTVEESHLSEITVDALSILTEKVSKSRRLENLIAHYPAEKKNTLFGNLIALFLGLQPNFKTNFQLSEDAKLQFSKDTYEEDLEGLLGEVGDEYADLFASAKNLYDAILLSGILTVDDNSTKAPLSASMVKRYEEHQKDLKKFEDFIKVNALDQYNAIFKDKNKKGYAGYIESGVKQDEFYKYLKGILLQINGSGDFLDKIDREDFLRKQRTFDNGSIPHQIHLQEMHAILRRQGEHYPFLKENQDKIEKILTFRIPYYVGPLARKGSRFAWAEYKADEKITPWNFDDILDKEKSAEKFITRMTLNDLYLPEEKVLPKHSLLYETFTVYNELTKVKYVNEQGEAKFFDANMKQEIFDHVFKENRKVTKDKLLNYLNKEFEEFRIVNLTGLDKENKVFNSSLGTYHDLRKILNKSFLDNKENAQIIEDIIQTLTLFEDREMIRQRLQKYSDIFTKAQLKKLERRHYTGWGRLSYKLINGIRNKENKKTILDYLIDDGYANRNFMQLINDDALSFKEEIAKAQIIGDVDDIANVVHDLPGSPAIKKGILQSVKIVDELVKVMGHNPANIIIEMARENQTTDRGRRNSQQRLKLLQDSLKNLDNPVNIKNVENQQLQNDRLFLYYIQNGKDMYTGETLDINNLSQYDIDHIIPQAYIKDDSFDNRVLTSSSENRGKSDNVPSIEVVCARKADWMRLRKAGLISQRKFDNLTKAERGGLTENDKAGFIKRQLVETRQITKHVAQVLDARFNAKHDENKKVIRDVKIITLKSNLVSQFRKDFKFYKVREINDYHHAHDAYLNAVIGTALLKKYPKLASEFVYGEFKKYDVRKFIAKSDKEIGKATAKYFFYSNLMNFFKKEVKFADGTVVERPDIETSEDGEIAWNKQTDFKIVRKVLSYPQVNIVKKTEVQTHGLDRGKPRGLFNANPSPKPKPDSSENLVGVKRNLDPKKYGGYAGISNSYAVLVKAIIEKGVKKKETMVLEFQGISILDRITFEKDKRAFLLGKGYKDIKKIIELPKYSLFELKDGSRRMLASILSTNNKRGEIHKGNELFVPQKFTTLLYHAKRINNPINKDHIEYVKKHRDDFKELLNYVLEFNEKYVGATKNGERLKEAVADFDSKSNEEICTSFLGAVNSKNAGLFELTSLGSASDFEFLGVKIPRYRDYTPSSLLKDSTLIHQSITGLYETRIDLSKLGED

SEQ ID NO: 447 - protein, 1396 aa, Streptococcus anginosus
  Streptococcus anginosus SK52 = DSM 20563
MTKPYSIGLDIGTNSVGWAVITDDYKVPAKKMKVLGNTNRDYIKKNLLGALLFDGGETAEGRRLKRTARRRYTRRKNRLRYLQEIFAEEMMQVDESFFQRLDDSFLVEEDKQGSKYPIFGTLKEEKEYHKKFKTIYHLREELANSKEKADLRLVYLALAHMIKFRGHFLYEGDLKAENTDVQALFKDFVEEYDKTIEESHLSEITVDALSILTEKVSKSSRLENLIAHYPTEKKNTLFGNLIALSLGLQANFKTNFQLSEDAKLQFSKDTYEEDLEGLLGEVGDEYADLFVSAKNLYDAILLSGILTVDDNSTKAPLSASMVKRYKEHKEELAAFKRFIKEKLPKKYEEIFKDDTKNGYAGYVGADKKLRKRSGKLATEEEFYKYVKGILNKVEGADYFLDKIDREDFLRKQRTFDNGSIPHQIHLQEMHAILRRQGEHYPFLKENQDKIEKILTFRIPYYVGPLARKGSRFAWAEYKADEKITPWNFDDILDKEKSAEKFITRMTLNDLYLPEEKVLPKHSPLYETFTVYNELTKVKYVNEQGEAKFFDTNMKQEIFDHVFKENRKVTKDKLLNYLNKEFEEFRIVNLTGLDKENKAFNASLGTYHDLRKILDKSFLDDKVNEKIIEDIIQTLTLFEDREMIRQRLQKYSDIFTTQQLKELERRHYTGWGRLSYKLINGIRNKENKKTILDYLIDDGYANRNFMQLINDDALSFKEEIARAQIIGDVDDIANVVHDLPGSPAIKKGILQSVKIVDELVKVMGHNPTNIIIEMARENQTTDKGRRNSQQRLKLLQDSLKNLDNPVNIKNVENQQLQNDRLFLYYIQNGKDMYTGETLDINNLSQYDIDHIIPQAFIKDNSLDNRVLTRSDKNRGKSDDVPSIEVVHEMKSFWSKLLSVKLITQRKFDNLTKAERGGLTENDKAGFIKRQLVETRQITKHVAQVLDARFNAKHDENKKVIRDVKIITLKSNLVSQFRKDFKFYKVREINDYHHAHDAYLNAVIGTALLKKYPKLASEFVYGEFKKYDVRKFIAKSDKEIGKATAKYFFYSNLMNFFKKEVKFADGTVVERPDIETSEDGEIAWNKQTDFKIVRKVLSYPQVNIVKKTEVQTHGLDRGKPRGLFNANPSPKPKPDSSENLVGIKRNLDPKKYGGYAGISNSYAVLVKAIIEKGVKKKETMVLEFQGISILDRITFEKDKRAFLLGKGYKDIKKIIELPKYSLFELKDGSRRMLASILSTNNKRGEIHKGNELFVPQKFTTLLYHAKRINNPINKDHIEYVKKHRDDFKELLNYVLEFNEKYVGATKNGERLKEAVADFDSKSNEEICTSFLGAVNSKNAGLFELTSLGSASDFEFLGVKIPRYRDYTPSSLLKDSILIHQSITGLYETRIDLSKLGED

SEQ ID NO: 448 - protein, 1373 aa, Streptococcus bovis
  Streptococcus bovis ATCC 700338
MTKKNYSIGLDIGTNSVGWAVITDDYKVPAKKMKVLGNTDKKYIKKNLLGALLFDSGETAEATRLKRTARRRYTRRKNRLRYLQEIFAEEMTKVDESFFQRLDESFLRWDDDNKKLGRYPIFGNKADVVKYHQEFPTIYHLRKHLADSSEKADLRLVYLALAHMIKFRGHFLIEGELNAENTDVQKIFADFVGVYDRTFDDSHLSEITVDAASILTEKISKSRRLENLIKYYPTEKKNTLFGNLIALALGLQPNFKMNFKLSEDAKLQFSKDSYEEDLGELLGKIGDDYADLFTSAKNLYDAILLSGILIVDDNSTKAPLSASMIKRYVEHQEDLEKLKEFIKANKSELYHDIFKDKNKNGYAGYIENGVKQDEFYKYLKNTLSKIAGSDYFLDKIEREDFLRKQRTFDNGSIPHQIHLQEMHAILRRQGDYYPFLKENQDRIEKILTFRIPYYVGPLARKDSRFSWAEYHSDEKITPWNFDKVIDKEKSAEKFITRMTLNDLYLPEEKVLPKHSHVYETYAVYNELTKIKYVNEQGKDSFFDSNMKQEIFDHVFKENRKVTKEKLLNYLNKEFPEYRIKDLIGLDKENKSFNASLGTYHDLKKILDKAFLDDKVNEEVIEDIIKTLTLFEDKDMIHERLQKYSDIFTADQLKKLERRHYTGWGRLSYKLINGIRNKENNKTILDYLIDDGSANRNFMQLINDDTLPFKQIIQKSQVVGDVDDIEAVVHDLPGSPAIKKGILQSVKIVDELVKVMGDNPDNIVIEMARENQTTNRGRSQSQQRLKKLQNSLKELGSNILNEEKPSYIEDKVENSHLQNDQLFLYYIQNGKDMYTGDELDIDHLSDYDIDHIIPQAFIKDDSIDNRVLTSSAKNRGKSDDVPSLDIVRARKAEWVRLYKSGLISKRKFDNLTKAERGGLTEADKAGFIKRQLVETRQITKHVAQILDARFNTESDENDKVIRDVKVITLKSNLVSQFRKDFEFYKVREINDYHHAHDAYLNAVVGTALLKKYPKLASEFVYGEYKKYDIRKFITNSSDKATAKYFFYSNLMNFFKRVIRYSNGKVIVRPVVEYSKDTEDIAWDKKSNFRTICKVLSYPQVNIVKKVETQTGGFSKESILPKGDSDKLIPRKTKKAYWDTKKYGGFDSPTVAYSVFVVADVEKGKAKKLKTVKELVGISIMERSFFEENPVEFLENKGYHNIREDKLIKLPKYSLFEFEGGKRRLLASASELQKGNEMVIPGHLVKLLYHAQRINSFNSTKYLDYVSAHKKEFEKVLSCVEDFANLYVDVEKNLSKIRAVADSMDNFSIEEISNSFINLLTLTALGAPADFNFLGEKIPRKRYTSTKECLNATLIHQSITGLYETRIDLSKIGEE

SEQ ID NO: 449 - protein, 1375 aa, Streptococcus canis
  Streptococcus canis FSL Z3-227
MEKKYSIGLDIGTNSVGWAVITDDYKVPSKKFKVLGNTNRKSIKKNLMGALLFDSGETAEATRLKRTARRRYTRRKNRIRYLQEIFANEMAKLDDSFFQRLEESFLVEEDKKNERHPIFGNLADEVAYHRNYPTIYHLRKKLADSPEKADLRLIYLALAHIIKFRGHFLIEGKLNAENSDVAKLFYQLIQTYNQLFEESPLDEIEVDAKGILSARLSKSKRLEKLIAVFPNEKKNGLFGNIIALALGLTPNFKSNFDLTEDAKLQLSKDTYDDDLDELLGQIGDQYADLFSAAKNLSDAILLSDILRSNSEVTKAPLSASMVKRYDEHHQDLALLKTLVRQQFPEKYAEIFKDDTKNGYAGYVGIGIKHRKRTTKLATQEEFYKFIKPILEKMDGAEELLAKLNRDDLLRKQRTFDNGSIPHQIHLKELHAILRRQEEFYPFLKENREKIEKILTFRIPYYVGPLARGNSRFAWLTRKSEEAITPWNFEEVVDKGASAQSFIERMTNFDEQLPNKKVLPKHSLLYEYFTVYNELTKVKYVTERMRKPEFLSGEQKKAIVDLLFKTNRKVTVKQLKEDYFKKIECFDSVEIIGVEDRFNASLGTYHDLLKIIKDKDFLDNEENEDILEDIVLTLTLFEDREMIEERLKTYAHLFDDKVMKQLKRRHYTGWGRLSRKMINGIRDKQSGKTILDFLKSDGFSNRNFMQLIHDDSLTFKEEIEKAQVSGQGDSLHEQIADLAGSPAIKKGILQTVKIVDELVKVMGHKPENIVIEMARENQTTTKGLQQSRERKKRIEEGIKELESQILKENPVENTQLQNEKLYLYYLQNGRDMYVDQELDINRLSDYDVDHIVPQSFIKDDSIDNKVLTRSVENRGKSDNVPSEEVVKKMKNYWRQLLNAKLITQRKFDNLTKAERGGLSEADKAGFIKRQLVETRQITKHVARILDSRMNTKRDKNDKPIREVKVITLKSKLVSDFRKDFQLYKVRDINNYHHAHDAYLNAVVGTALIKKYPKLESEFVYGDYKVYDVRKMIAKSEQEIGKATAKRFFYSNIMNFFKTEVKLANGEIRKRPLIETNGETGEVVWNKEKDFATVRKVLAMPQVNIVKKTEVQTGGFSKESILSKRESAKLIPRKKGWDTRKYGGFGSPTVAYSILVVAKVEKGKAKKLKSVKVLVGITIMEKGSYEKDPIGFLEAKGYKDIKKELIFKLPKYSLFELENGRRRMLASATELQKANELVLPQHLVRLLYYTQNISATTGSNNLGYIEQHREEFKEIFEKIIDFSEKYILKNKVNSNLKSSFDEQFAVSDSILLSNSFVSLLKYTSFGASGGFTFLDLDVKQGRLRYQTVTEVLDATLIYQSITGLYETRTDLSQLGGD

SEQ ID NO: 450 - protein, 1345 aa, Streptococcus constellatus
  Streptococcus constellatus subsp. constellatus SK53
MGKPYSIGLDIGTNSVGWAVVTDDYKVPAKKMKVLGNTDKQSIKKNLLGALLFDSGETAEATRLKRTARRRYTRRKNRLRYLQEIFTGEMNKVDENFFQRLDDSFLVDEDKRGEHHPIFGNIAAEVKYHDDFPTIYHLRRHLADTSKKADLRLVYLALAHMIKFRGHFLYEGDLKAENTDVQALFKDFVEEYDKTIEESHLSEITVDALSILTEKVSKSSRLENLIAHYPTEKKNTLFGNLIALSLDLHPNFKTNFQLSEDAKLQFSKDTYEEDLEGFLGEVGDEYADLFASAKNLYDAILLSGILTVDDNSTKAPLSASMVKRYEEHQKDLKKLKDFIKVNAPDQYNAIFKDKNKKGYASYIESGVKQDEFYKYLKGILLKINGSGDFLDKIDREDFLRKQRTFDNGSIPHQIHLQEMHAILRRQGEHYPFLKENQDKIEKILTFRIPYYVGPLARKGSRFAWAEYKADEKITPWNFDDILDKEKSAEKFITRMTLNDLYLPEEKVLPKHSPLYEAFTVYNELTKVKYVNEQGEAKFFDTNMKQEIFDHVFKENRKVTKDKLLNYLNKEFEEFRIVNLTGLDKENKAFNSSLGTYHDLRKILDKSFLDDKANEKTIEDIIQTLTLFEDREMIRQRLQKYSDIFTKAQLKKLERRHYTGWGRLSYKLINGIRNKENKKTILDYLIDDGYANRNFMQLINDDALSFKEEIARAQIIDDVDDIANVVHDLPGSPAIKKGILQSVKIVDELVKVMGHNPANIIIEMARENQTTDKGRRNSQQRLKLLQDSLKNLDNPVNIKNVENQQLQNDRLFLYYIQNGKDMYTGETLDINNLSQYDIDHIIPQAFIKDNSLDNRVLTRSDKNRGKSDDVPSIEVVHEMKSFWSKLLSVKLITQRKFDNLTKAERGGLTEEDKAGFIKRQLVETRQITKHVAQILDERFNTEFDGNKRRIRNVKIITLKSNLVSNFRKEFELYKVREINDYHHAHDAYLNAVVGNALLLKYPQLEPEFVYGEYPKYNSYRSRKSATEKFLFYSNILRFFKKEDIQTNEDGEIAWNKEKHIKILRKVLSYPQVNIVKKTEEQTGGFSKESILPKGESDKLIPRKTKNSYWDPKKYGGFDSPVVAYSILVFADVEKGKSKKLRKVQDMVGITIMEKKRFEKNPVDFLEQRGYRNVRLEKIIKLPKYSLFELENKRRRLLASAKELQKGNELVIPQRFTTLLYHSYRIEKDYEPEHREYVEKHKDEFKELLEYISVFSRKYVLADNNLTKIEMLFSKNKDAEVSSLAKSFISLLTFTAFGAPAAFNFFGENIDRKRYTSVTECLNATLIHQSITGLYETRIDLSKLGED

SEQ ID NO: 451 - protein, 1371 aa, Streptococcus dysgalactiae
MDKKYSIGLDIGTNSVGWAVITDDYKVPSKKFKVLGNTDRHSIKKNLIGALLFDSGETAEATRLKRTARRRYTRRKNRIRYLQEIFSSEMSKVDDSFFHRLEESFLVEEDKKHERHPIFGNIVDEVAYHEKYPTIYHLRKKLADSTDKADLRLIYLALAHMIKFRGHFLIEGDLNPDNSDMDKLFIQLVQTYNQLFEENPINASRVDAKAILSARLSKSRRLENLIAQLPGEKRNGLFGNLIALSLGLTPNFKSNFDLAEDAKLQLSKDTYDDDLDNLLAQIGDQYADLFLAAKNLSDAILLSDILRVNSEITKAPLSASMIKRYDEHHQDLTLLKALVRQQLPEKYKEIFFDQSKNGYAGYIDGGASQEEFYKFIKPILEKMDGTEELLAKLNREDLLRKQRTFDNGSIPHQIHLGELHAILRRQEDFYPFLKDNREKIEKILTFRIPYYVGPLARGNSRFAWMTRKSEETITPWNFEEVVDKGASAQSFIERMTNFDKNLPNEKVLPKHSLLYEYFTVYNELTKVKYVTEGMRKPEFLSGKQKEAIVDLLFKTNRKVTVKQLKEDYFKKIECFDSVEISGVEDRFNASLGTYHDLLKIIKDKDFLDNEENEDILEDIVLTLTLFEDKEMIEERLKKYANLFDDKVMKQLKRRHYTGWGRLSRKLINGIRDKQSGKTILDFLKSDGFANRNFMQLINDDSLTFKEAIQKAQVSGQGHSLHEQIANLAGSPAIKKGILQSVKVVDELVKVMGHKPENIVIEMARENQTTQKGQKNSRERMKRIEEGIKELGSQILKEHPVENTQLQNEKLYLYYLQNGRDMYVDQELDINRLSDYDVDHIVPQSFIKDDSIDNKVLTRSDKNRGKSDNVPSEEVVKKMKNYWRQLLNAKLITQRKFDNLTKAERGGLSELDKAGFIKRQLVETRQITKHVAQILDSRMNTKYDENDKLIREVKVITLKSKLVSDFRKDFQFYKVREINNYHHAHDAYLNAVVGTALIKKYPKLESEFVYGDYKVYDVRKMIAKSEQEIGKATAKRFFYSNIMNFFKTEITLANGEIRKRPLIETNEETGEIVWDKGRDFATVRKVLSMPQVNIVKKTEVQTGALTNESIYARGSFDKLISRKHRFESSKYGGFGSPTVTYSVLVVAKSKVQDGKVKKIKTGKELIGITLLDKLVFEKNPLKFIEDKGYGNVQIDKCIKLPKYSLFEFENGTRRMLASVMANNNSRGDLQKANEMFLPAKLVTLLYHAHKIESSKELEHEAYILDHYNDLYQLLSYIERFASLYVDVEKNISKVKELFSNIESYSISEICSSVINLLTLTASGAPADFKFLGTTIPRKRYGSPQSILSSTLIHQSITGLYETRIDLSQLGGD

SEQ ID NO: 452 - protein, 1371 aa, Streptococcus dysgalactiae
MDKKYSIGLDIGTNSVGWAVITDDYKVPSKKFKVLGNTDRHSIKKNLIGALLFDSGETAEATRLKRTARRRYTRRKNRIRYLQEIFSSEMSKVDDSFFHRLEESFLVEEDKKHERHPIFGNIVDEVAYHEKYPTIYHLRKKLADSTDKADLRLIYLALAHMIKFRGHFLIEGDLNPDNSDVDKLFIQLVQTYNQLFEEKPINASGVDAKAILSARLSKSKRLENLIAQLPGEKKNGLFGNLIALSLGLTPNFKSNFDLAEDAKLQLSKDTYDDDLDNLLAQIGNQYADLFLAAKNLSDAILLSDILRVNSEITKAPLSASMIKRYDEHHQDLTLLKALVRQQLPEKYKEIFFDQSKNGYAGYIDGGASQEEFYKFIKPILEKMDGTEELLAKLNREDLLRKQRTFDNGSIPHQIHLGELHAILRRQEDFYPFLKDNREKIEKILTFRIPYYVGPLARGNSRFAWMTRKSEETITPWNFEEVVDKGASAQSFIERMTNFDKNLPNEKVLPKHSLLYEYFTVYNELTKVKYVTEGMRKPEFLSGKQKEAIVDLLFKTNRKVTVKQLKEDYFKKIECFDSVEISGVEDRFNASLGTYHDLLKIIKDKDFLDNEENEDILEDIVLTLTLFEDKEMIEERLKKYANLFDDKVMKQLKRRHYTGWGRLSRKLINGIRDKQSGKTILDFLKSDGFANRNFMQLINDDSLTFKEAIQKAQVSGQGHSLHEQIANLAGSPAIKKGILQSVKVVDELVKVMGHKPENIVIEMARENQTTQKGQKNSRERMKRIEEGIKELGSQILKEHPVENTQLQNEKLYLYYLQNGRDMYVDQELDINRLSDYDVDHIVPQSFIKDDSIDNKVLTRSDKNRGKSDNVPSEEVVKKMKNYWRQLLNAKLITQRKFDNLTKAERGGLSELDKAGFIKRQLVETRQITKHVAQILDSRMNTKYDENDKLIREVKVITLKSKLVSDFRKDFQFYKVREINNYHHAHDAYLNAVVGTALIKKYPKLESEFVYGDYKVYDVRKMIAKSEQEIGKATAKRFFYSNIMNFFKTEITLANGEIRKRPLIETNEETGEIVWDKGRDFATVRKVLSMPQVNIVKKTEVQTGALTNESIYARGSFDKLISRKHRFESSKYGGFGSPTVTYSVLVVAKSKVQDGKVKKIKTGKELIGITLLDKLVFEKNPLKFIEDKGYGNVQIDKCIKLPKYSLFEFENGTRRMLASVMANNNSRGDLQKANEMFLPAKLVTLLYHAHKIESSKELEHEAYILDHYNDLYQLLSYIERFASLYVDVEKNISKVKELFSNIESYSISEICSSVINLLTLTASGAPADFKFLGTTIPRKRYGSPQSILSSTLIHQSITGLYETRIDLSQLGGD

SEQ ID NO: 453 - protein, 1371 aa, Streptococcus dysgalactiae
MDKKYSIGLDIGTNSVGWAVITDDYKVPSKKFKVLGNTDRHSIKKNLIGALLFDSGETAEATRLKRTARRRYTRRKNRIRYLQEIFSSEMSKVDDSFFHRLEESFLVEEDKKHERHPIFGNIVDEVAYHEKYPTIYHLRKKLADSTDKADLRLIYLALAHMIKFRGHFLIEGDLNPDNSDMDKLFIQLVQTYNQLFEENPINASRVDAKAILSARLSKSRRLENLIAQLPGEKRNGLFGNLIALSLGLTPNFKSNFDLAEDAKLQLSKDTYDDDLDNLLAQIGDQYADLFLAAKNLSDAILLSDILRVNSEITKAPLSASMIKRYDEHHQDLTLLKALVRQQLPEKYKEIFFDQSKNGYAGYIDGGASQEEFYKFIKPILEKMDGTEELLAKLNREDLLRKQRTFDNGSIPHQIHLGELHAILRRQEDFYPFLKDNREKIEKILTFRIPYYVGPLARGNSRFAWMTRKSEETITPWNFEEVVDKGASAQSFIERMTNFDKNLPNEKVLPKHSLLYEYFTVYNELTKVKYVTEGMRKPEFLSGKQKEAIVDLLFKTNRKVTVKQLKEDYFKKIECFDSVEISGVEDRFNASLGTYHDLLKIIKDKDFLDNEENEDILEDIVLTLTLFEDKEMIEERLKKYANLFDDKVMKQLKRRHYTGWGRLSRKLINGIRDKQSGKTILDFLKSDGFANRNFMQLINDDSLTFKEAIQKAQVSGQGHSLHEQIANLAGSPAIKKGILQSVKVVDELVKVMGHKPENIVIEMARENQTTQKGQKNSRERMKRIEEGIKELGSQILKEHPVENTQLQNEKLYLYYLQNGRDMYVDQELDINRLSDYDVDHIVPQSFIKDDSIDNKILTRSDKNRGKSDNVPSEEVVKKMKNYWRQLLNAKLITQRKFDNLTKAERGGLSELDKAGFIKRQLVETRQITKHVAQILDSRMNTKYDENDKLIREVKVITLKSKLVSDFRKDFQFYKVREINNYHHAHDAYLNAVVGTALIKKYTKLESEFVYGDYKVYDVRKMIAKSEQEIGKATAKRFFYSNIMNFFKTEITLANGEIRKRPLIETNEETGEIVWDKGRDFATVRKVLSMPQVNIVKKTEVQTGALTNESIYARGSFDKLISRKHRFESSKYGGFGSPTVTYSVLVVAKSKVQDGKVKKIKTGKELIGMTLLDKLVFEKNPLKFIEDKGYGNVQIDKCIKLPKYSLFEFENGTRRMLASVMANNNSRGDLQKANEMFLPAKLVTLLYHAHKIESSKELEHEAYILDHYNDLYQLLSYIERFASLYVDVEKNISKVKELFSNIESYSISEICSSVINLLTLTASGAPADFKFLGTTIPRKRYGSPQSILSSTLIHQSITGLYETRIDLSQLGGD

SEQ ID NO: 454 - protein, 1371 aa, Streptococcus dysgalactiae
MDKKYSIGLDIGTNSVGWAVITDDYKVPSKKFKVLGNTDRHSIKKNLIGALLFDSGETAEATRLKRTARRRYTRRKNRIRYLQEIFSSEMSKVDDSFFHRLEESFLVEEDKKHERHPIFGNIVDEVAYHEKYPTIYHLRKKLADSTDKADLRLIYLALAHMIKFRGHFLIEGDLNPDNSDMDKLFIQLVQTYNQLFEENPINASRVDAKAILSARLSKSRRLENLIAQLPGEKRNGLFGNLIALSLGLTPNFKSNFDLAEDAKLQLSKDTYDDDLDNLLAQIGDQYADLFLAAKNLSDAILLSDILRVNSEITKAPLSASMIKRYDEHHQDLTLLKALVRQQLPEKYKEIFFDQSKNGYAGYIDGGASQEEFYKFIKPILEKMDGTEELLAKLNREDLLRKQRTFDNGSIPHQIHLGELHAILRRQEDFYPFLKDNREKIEKILTFRIPYYVGPLARGNSRFAWMTRKSEETITPWNFEEVVDKGASAQSFIERMTNFDKNLPNEKVLPKHSLLYEYFTVYNELTKVKYVTEGMRKPEFLSGKQKEAIVDLLFKTNRKVTVKQLKEDYFKKIECFDSVEISGVEDRFNASLGTYHDLLKIIKDKDFLDNEENEDILEDIVLTLTLFEDKEMIEERLKTYAHLFDDKVMKQLKRRHYTGWGRLSRKLINGIRDKQSGKTILDFLKSDGFANRNFIQLIHDDSLTFKEAIQKAQVSGQGHSLHEQIANLAGSPAIKKGILQSVKVVDELVKVMGHKPENIVIEMARENQTTQKGQKNSRERMKRIEEGIKELGSQILKEHPVENTQLQNEKLYLYYLQNGRDMYVDQELDINRLSDYDVDHIVPQSFIKDDSIDNKVLTRSDKNRGKSDDVPSEEVVKKMKNYWRQLLNAKLITQRKFDNLTKAERGGLSELDKAGFIKRQLVETRQITKHVAQILDSRMNTKYDENDKLIREVKVITLKSKLVSDFRKDFQFYKVREINNYHHAHDAYLNAVVGTALIKKYPKLESEFVYGDYKVYDVRKMIAKSEQEIGKATAKRFFYSNIMNFFKTEITLANGEIRKRPLIETNEETGEIVWNKGRDFATVRKVLSMPQVNIVKKTEVQTGALTNESIYARGSFDKLISRKHRFESSKYGGFGSPTVTYSVLVVAKSKVQDGKVKKIKTGKELIGITLLDKLVFEKNPLKFIEDKGYGNVQIDKCIKLPKYSLFEFENGTRRMLASVMANNNSRGDLQKANEMFLPAKLVTLLYHAHKIESSKELEHEAYILDHYNDLYQLLSYIERFASLYVDVEKNISKVKELFSNIESYSISEICSSVINLLTLTASGAPADFKFLGTTIPRKRYGSPQSILSSTLIHQSITGLYETRIDLSQLGGD

SEQ ID NO: 455 - protein, 1348 aa, Streptococcus equi
MKKPYTIALDIGTNSVGWVVVTDDYRVPTKKMKVLGNTERKTIKKNLIGALLFDSGDTAEGTRLKRTARRRYTRRKNRLRYLKEIFTEEMAKVDDGFFQRLEDSFYVLEDKEGNKHPIFANLADEVAYHKKYPTIYHLRKELVDNPQKADLRLIYLAVAHIIKFRGHFLIEGTLSSKNNNLQKSFDHLVDTYNLLFEEQRLLTEGINAKELLSAALSKSKRLENLISLIPGQKKTGIFGNIIALSLGLTPNFKANFGLSKDVKLQLAKDTYADDLDSLLAQIGDQYADLFLAAKNLSDAILLSDILTESDEITRAPLSASMVKRYREHHKDLVTLKTLIKDQLPEKYQEIFLDKTKNGYAGYIEGQVSQEEFYKYLKPILARLDGSEPLLLKIDREDFLRKQRTFDNGSIPHQIHLEELHAILRRQEVFYPFLKDNRKKIESLLTFRIPYYVGPLARGHSRFAWVKRKFDGAIRPWNFEEIVDEEASAQIFIEKMTKNDLYLPNEKVLPKHSLLYETFTVYNELTKVKYATEGMTRPQFLSADQKQAIVDLLFKTNRKVTVKQLKENYFKKIECWDSVEITGVEDSFNASLGTYHDLLKIIQDKDFLDNPDNQKIIEDIILTLTLFEDKKMISKRLDQYAHLFDKVVLNKLERHHYTGWGRLSGKLINGIRDKQSGKTILDFLKADGFANRNFMQLIHDSELSFIDEIAKAQVIGKTEYSKDLVGNLAGSPAIKKGISQTIKIVDELVKIMGYLPQQIVIEMARENQTTAQGIKNARQRMRKLEETAKKLGSNILKEHPVDNSQLQNDKRYLYYLQNGKDMYTGDDLDIDYLSSYDIDHIIPQSFIKNNSIDNKVLTSQGANRGKLDNVPSEAIVRKMKGYWQSLLRAGAISKQKFDNLTKAERGGLTQVDKAGFIQRQLVETRQITKHVAQILDSRFNTEFDDHNKRIRKVHIITLKSKLVSDFRKEFGLYKIRDINHYHHAHDAYLNAVVAKAILGKYPQLAPEFVYGDYPKYNSFKERQKATQKMLFYSNILKFFKDQESLHVNSDGEEIWNANKHLPIIKNVLSIPQVNIVKKTEVQTGGFYKESILSKGNSDKLIPRKNNWDTRKYGGFDSPTVAYSVLVIAKMEKGKAKVLKPVKEMVGITIMERTAFEENPVVFLEARGYREIQEHLIIKLPKYSLFELENGRRRLLASASELQKGNELFLPVDYMTFLYLAAHYHELTGSSEDVLRKKYFVDRHLHYFDDIIQMINDFAERHILASSNLEKINHTYHNNSDLPVNERAENIINVFTFVALGAPAAFKFFDATIDRKRYTSTKEVLNATLIHQSVTGLYETRIDLSQLGEN

SEQ ID NO: 456 - protein, 1377 aa, Streptococcus equinus
  Streptococcus equinus ATCC 9812
MEKTYSIGLDIGTNSVGWAVITDDYKVPAKKMKVLGNTDKKYIKKNLLGALLFDSGETAEATRLKRAARRRYTRRKNRLRYLQEIFAKEMAKVDESFFQRLEESFLTDDDKTFDSHPIFGNKAEEDTYHQEFPTIYHLRKHLADSPEKVDLRLVYLALAHMIKFRGHFLIEGQLNAENTDVQKIFADFVGVYDRTFDDSHLSEITVDAASILTEKISKSRRLENLIKQYPTEKKNTLFGNLVALALGLQPNFKTNFKLSEDAKLQFSKDTYDEDLEELLGKIGDDYADLFTAAKNLYDAILLSGILTVDDNSTKAPLSASMIKRYEEHHEDLEKLKTFIKVNNFDKYHEIFKDKSKNGYAGYIENGVKQDIFYKHLKSIISEKNGGQYFLDKIEREDFLRKQRTFDNGSIPYQIHLQEMRTILRRQGEYYPFLKENQAKIEKILTFRIPYYVGPLARKNSRFAWAKYHSDEPITPWNFDEVVDKEKSAEKFITRMTLNDLYLPEEKVLPKHSYVYETFAVYNELTKIKYVNEQGKSFFFDANMKQEIFDHVFKENRKVTKAKLLSYLNNEFEEFRINDLIGLDKDSKSFNASLGTYHDLKKILDKSFLDDKTNEQIIEDIVLTLTLFEDRDMIHERLQKYSDIFTSQQLKKLERRHYTGWGRLSYKLINGIRNKENNKTILDFLIDDGDANRNFMQLINDDSLSFKTTIQEAQVVGDVDDIEAVVHDLPGSPAIKKGILQSVKIVDELVKVMGHNPQNIVIEMARENQITGYGRNRSNQRLKRLQDSLKEFGSDILSKKKPSYVDSKVENSHLQNDRLFLYYIQNGKDMYTGEELDIDHLSDYDIDHIIPQAFIKDNSIDNRVLTSSAKNRGKSDDVPSIEIVRNRKSYWYKLYKSGLISKRKFDNLTKAERGGLTETDKAGFIKRQLVETRQITKHVAQILDARFNTKCDENDKVIRDVKVITLKSSLVSQFRKEFKFYKVREINDYHHAHDAYLNAVVGTALLKKYPKLAPEFVYGEYKKYDVRKLVAKSSDNHSELGKATAKYFFYSNLMNFFKTEVKYADGRVFERPDIETNADGEVVWNKQRDFNIVRKVLSYPQVNIVKKVEVQTGGFSKESILPKGDSDKLIPRKTKKLQWETQKYGGFDSPTVAYSVLVVADVEKGKTRKLKTVKELVGISIMERSSFEENPVSFLEKKGYHNVQEDKLIKLPKYSLFEFEGGRRRLLASATELQKGNEVVLPQYMVNLLYHSQHVNNSHKPEHLNYVKQHKDEFKDIFNLIISIARINILKPKVVDNLINEFTEYGQEDISSLSESFINLLKFISFGAPGAFKFLKLDVKQSNLRYKSTTEALSATLIHQSVTGLYETRIDLSKLGEE

SEQ ID NO: 457 - protein, 1370 aa, Streptococcus gallolyticus
MTKKNYSIGLDIGTNSVGWAVITDDYKVPAKKMKVLGNTDKKYIKKNLLGALLFDSGETAEATRLKRTARRRYTRRKNRLRYLQEIFAEEMTKVDESFFYRLDESFLTTDEKDFERHPIFGNKAEEDAYHQKFPTIYHLRNYLADSSEKADLRLVYLALAHMIKYRGHFLIEGKLNAENTDVQKLFTDFVGVYDRTFDDSHLSEITVDVASTLTEKISKSRRLENLIKYYPTEKKNTLFGNLIALALGLQPNFKMNFKLSEDAKLQFSKDTYEEDLEELLGKIGDDYADLFTSAKNLYDAILLSGILTVDDNSTKAPLSASMIKRYVEHHEDLEKLKEFIKANKSELYHDIFKDKNKNGYAGYIENGVKQDEFYKYLKNTLSKIDGSDYFLDKIEREDFLRKQRTFDNGSIPHQIHLQEMHAILRRQGDYYPFLKEKQDRIEKILTFRIPYYVGPLVRKDSRFAWAEYRSDEKITPWNFDKVIDKEKSAEKFITRMTLNDLYLPEEKVLPKHSHVYETYAVYNELTKIKYVNEQGKESFFDSNMKQEIFDHVFKENRKVTKEKLLNYLNKEFPEYRIKDLIGLDKENKSFNASLGTYHDLKKILDKAFLDDKVNEEVIEDIIKTLTLFEDKDMIHERLQKYSDIFTANQLKKLERRHYTGWGRLSYKLINGIRNKENNKTILDYLIDDGSANRNFMQLINDDTLPFKQIIQKSQVVGDVDDIEAVVHDLPGSPAIKKGILQSVKIVDELVKVMGDNPDNIVIEMARENQTTNRGRSQSQQRLKKLQSSLKELGSNILNEEKPSYIEDKVENSHLQNDQLFLYYIQNGKDMYTGDELDIDHLSDYDIDHIIPQAFIKDDSIDNRVLTSSAKNRGKSDDVPSLDIVRARKAEWVRLYKSGLISKRKFDNLTKAERGGLTEADKAGFIKRQLVETRQITKHVAQILDARFNTEHDENDKVIRDVKVITLKSNLVSQFRKDFEFYKVREINDYHHAHDAYLNAVVGTALLKKYPKLASEFVYGEYKKYDIRKFITNSSDKATAKYFFYSNLMNFFKTKVKYADGTVFERPIIETNADGEIAWNKQIDFEKVRKVLSYPQVNIVKKVETQTGGFSKESILPKGDSDKLIPRKTKKVYWDTKKYGGFDSPTVAYSVFVVADVEKGKAKKLKTVKELVGISIMERSFFEENPVEFLENKGYHNIREDKLIKLPKYSLFEFEGGRRRLLASASELQKGNEMVLPGYLVELLYHAHRADNFNSTEYLNYVSEHKKEFEKVLSCVEDFANLYVDVEKNLSKIRAVADSMDNFSIEEISNSFINLLTLTALGAPADFNFLGEKIPRKRYTSTKECLTATLIHQSITGLYETRIDLSKLGEE

SEQ ID NO: 458 - protein, 1370 aa, Streptococcus gallolyticus; identical to SEQ ID NO: 457
  Streptococcus gallolyticus subsp. gallolyticus TX20005

SEQ ID NO: 459 - protein, 1371 aa, Streptococcus gallolyticus
MTEKNYSIGLDIGTNSVGWAVITDDYKVPAKKMKVLGNTDKKYIKKNLLGALLFDNGETAEATRLKRTARRRYTRRKNRLRYLQEIFAEEMAKVDESFFYRLDESFLTTDDKDFERHPIFGNKADEIKYHQEFPTIYHLRKHLADSHEKADLRLIYLALAHMIKFRGHFLIEGELNAENTDVQKLFEAFVEVYDRTFDDSNLSEITVDASSILTEKFSKSRRLENLIKHYPTEKKNTLFGNLVALALGLQPNFKTSFKLSEDAKLQFSKDTYEEDLEELIGKIGDEYADLFTSAKNLYDAILLSGILTVADNTTKAPLSASMIKRYNEHQVDLKKLKEFIKNNASDKYDEIFNDKDKNGYAGYIENGVKQDEFYKYLKTTLSKIDGSDYFLDKIEREDFLRKQRTFDNGSIPHQIHLQEMHAILRRQGEHYAFLKENQAKIEKILTFRIPYYVGPLARKNSRFAWAEYHSDEKITPWNFDEIIDKEKSAEKFITRMTLNDLYLPEEKVLPKHSLVYETYTVYNELTKVKYVNEQGKSNFFDANMKQEIFEHVFKENRKVTKDKFLNYLNKEFPEYRIQDLIGLDKENKSFNASLGTYHDLKKILDKSFLDDKTNETIIEDIIQTLTLFEDRDMIRQRLQKYSDIFTPQQLKKLERRHYTGWGRLSYKLINGIRNKENGKSILDYLIDDGYANRNFMQLISDDTLPFKQIIKDAQIIGDIDDVTSVVRELPGSPAIKKGILQSVKIVDELVKVMGHNPDNIVIEMARENQTTNRGRNQSQQRLKKLQDSLKELGSNILNEEKPSYIEGKVENNHLQDDRLFLYYIQNGKDMYTGDELDIDHLSDYDIDHIIPQAFIKDDSIDNRVLTSSAKNRGKSDDVPSLDIVHDRKADWIRLYKSGLISKRKFDNLTKAERGGLTENDKAGFIKRQLVETRQITKHVAQILDSRFNTERDENDKVIRNVKVITLKSNLVSQFRKDFKFYKVREINDYHHAHDAYLNAVVGTALLKKYPKLAPEFVYGEYKKYDIRKFITSSGDKATAKYFFYSNLMNFFKRVIRYSNGKVVVRPVIECSKDTGEIAWNKQTDFEKVRRVLSYPQVNIVKKVETQTGGFSKESILPKGNSDKLIPRKTKKFRWDTPKYGGFDSPNIAYSVFVIADVEKGKAKKLKTVKELVGISIMERSSFEENPVVFLEKKGYQNVQEDNLIKLPKYSLFEFEGGRRRLLASASELQKGNEVVLSRHLVELLYHAHRVNSFNNSEHLKYVSEHKKEFGEVLSCVENFAKSYVDVEKNLGKIRAVADKIDTFSIEDISISFVNLLTLTALGAPADFNFLGEKIPRKRYTSTKECLNATLIHQSITGLYETRIDLSKLGEE

SEQ ID NO: 460 - protein, 1130 aa, Streptococcus gallolyticus
MTNGKILGLDIGIASVGVGIIEAKTGKVVHANSRLFSAANAENNAERRGFRGSRRLNRRKKHRVKRVRDLFEKYEIVTDFRNLNLNPYELRVKGLTEQLTNEELFAALRTISKRRGISYLDDAEDDSTGSTDYAKSIDENRRLLKTKTPGQIQLERLEKYGQLRGNFTVYDENGEAHRLINVFSTSDYEKEARKILETQADYNKKITAEFIDDYVEILTQKRKYYHGPGNEKSRTDYGRFRTDGTTLENIFGILIGKCSFYPDEYRASKASYTAQEYNFLNDLNNLKVPTETGKLSTEQKEALVEFAKSTATLGPAKLLKEIAKILDCKVDEIKGYREDDKGKPDLHTFEPYRKLKFNLDSVNIDDLSREVLDKLADILTLNTEREGIEDAIRHNLPNQFTEGQISEIIKVRKSQSTAFNKGWHSFSAKLMNELIPELYATSDEQMTILTRLEKFKVNKKSSKNTKTIDEKEVTDEIYNPVVAKSVRQTIKIINAAVKKYGDFDKIVIEMPRDKNADDEKKFIDKRNKENKKEKDDALKRAAYLYNGTDKLPDEVFHGNKQLETKIRLWYQQGERCLYSGKPIPIQELVHNSNNFEIDHILPLSLSFDDSLANKVLVYAWTNQEKGQKTPYQVIDSMDAAWSFREMKDYVLKQKGLGKKKRDYLLTTENIDKIEVKKKFIERNLVDTRYASRVVLNSLQSALRELGKDTKISVIRGQFTSQLRRKWKIDKSRETYHHHAVDALIIAASSQLKLWEKQDNPMFVDYGNNQVVDKQTGEILSVSDDEYKELVFQPPYQGFVNMISSKGFEDEILFSYQVDSKYNRKVSDATIYSTRKAKIGKDKKEETYVLGKIKDIYSQNGFDTFIKKYNKDKTQFLMYQKDPLTWENVIEVILRDYPTTKKSEDGKNDVKCNPFEEYRRENGLVCKYSKKGKGTPIKSLKYYDKKLGNCIDITPEGSKNEVVLQSLNPWRADVYFNPETLKYELLGLKYSDLSFEKGTGKYHISQEKYDVIKEKEGIGKKSEFKFTLYRNDLILIKDTASGEQEIYRFLSRTMPNVKHYAELKPYDKEKFDNVQELVEALGEADKVGRCIKGLNKSNLSIYKVRTDVLGNKYFVKKEGDKPKLDFKNNKK

SEQ ID NO: 461 - protein, 1136 aa, Streptococcus gordonii
MNGLVLGLDIGIASVGVGILEKDTGKIIHASSRLFPAATADNNVERRSNRQGRRLNRRKKHRSVRLQDLFEGYGLLTDFSKVSMNLNPYQLRVQGMENQLTNEELFVALKNIVKRRGISYLDDASEDGGTVSSDYGKAVEENRKLLAEKTPGQIQLERFEKYGQLRGDFTVEENGEKHRLINVFSTSAYRKEAERILRKQQEFNSKITDEFIEDYLIILTGKRKYYHGPGNEKSRTDYGRFRTDGTTLDNIFGILIGKCTFYTEEYRASKASYTAQEFNLLNDLNNLTVPTETKKLSEEQKKLIIEYAKSAKTLGASTLLKYIAKMIDASVDQIRGYRVDVNNKPEMHTFEVYRKMQSLETIKVEELPRKVLDELAHILTLNTEREGIEEAINSKLKDIFNRDQVLELVQFRKNNSSLFSKGWHNFSIKLMMELIPELYETSEEQMTILTRLGKQRSKETSKRTKYIDEKELTEEIYNPVVAKSVRQAIKIINEATKKYGIFDNIVIEMARENNEEDAKKDYIKRQKANQDEKNAAMEKAAFQYNGKKELPDNIFHGHKELTTKIRLWHQQGEKCLYTGKNIPISDLIHNQYKYEIDHILPLSLSFDDSLSNKVLVLATANQEKGQRTPFQALDSMDDAWSYREFKSYVKDSKLLSNKKKDYLLTEEDISKIEVKQKFIERNLVDTRYSSRVVLNALQDFYKSHQLDTTISVVRGQFTSQLRRKWGIEKSRETYHHHAVDALIIAASSQLRLWKKHSNPLIAYKEGQFVDSETGEIVSLSDEEYKELVFKAPYDHFVDTLRSKKFEDSILFSYQVDSKYNRKISDATIYATRKAKLDKEKKEYTYTLGKIKDIYALGTKTPSKTGFYKFLDLYKTDKSQFLMYQKDRKTWDEVIEKIIEQYRPFKEYDKNGKEVDFNPFEKYRIGNGPIRKYSKKGNGPEIKSLKYYDILLGKHKNITPDGSRNTVALLSLNPWRTDVYYNSETKKYEFLGLKYADLCFEEGGAYGISEVKYKKIREKEGIGKNSEFKFTLYKNDLILIKDTETNCQQFFRFWSRTGKDNPKSFEKHKIELKPYEKAKFEKGEELKVLGKVPPSSNQFQKNMQIENLSIYKVKTDILGNKHFIKKEGDEPKLKFKK

SEQ ID NO: 462 - protein, 1129 aa, Streptococcus infantarius
  Streptococcus infantarius subsp. infantarius ATCC BAA-102
MSNGKILGLDIGVASVGVGIIDSKTGNVIHANSRLFSAANAENNAERRGFRGARRLTRRKKHRVKRVRDLFEKYDISTDFRNLNLNPYELRVKGLTEQLTNEELFAALRTIAKRRGISYLDDAEDDSTGSSDYAKSIDENRRLLKTKTPGQIQLERLEKYGQLRGNFTVYDENGEAHRLINVFSTSDYKNEARKILETQSNYNKQITDEFIEDYIEILTQKRKYYHGPGNEKSRTDYGRFRTDGTTLENIFGILIGKCSFYPEEYRASKASYTAQEFNFLNDLNNLKVPTETGKLSTEQKEYLVDFAKKSKALGASKLLKEIAKIVDCSVDDIKGYRVDNKDKPDLHTFEPYRKLKFNLSSIDIDELSRETLDKLADILTLNTEREGIEDAIKRNLPSQFTEEQISEIVQIRKNQSSAFNKGWHSFSAKLMNELIPELYVTSEEQMTILTRLEKFKVNKKSSKNTKTIDEKEITDEIYNPVVAKSVRQTIKIINAAVKKYGDFDKIVIEMPRDKNAEDEKKFIDKKQKENKKEKDDSLKRAAFLYNGTDNLPDGVFHGNKELKTKIRLWYQQGERCLYSGKLISIHDLVHNSNKFEIDHILPLSLSFDDSLANKVLVYAWTNQEKGQKTPYQVIDSMDTAWSFREMKDYVLKQKGLGKKKCEYLLTTENIDKIEVKKKFIERNLVDTRYASRVVLNSLQTALKELGKDTKVSVVRGQFTSQLRRKWNIDKSRETYHHHAVDALIIAASSQLKLWQKQENPMFESYGENQVVNKETGEILSISDDKYKELVFQPPYQGFVNTISSKGFEDEILFSYQVDSKFNRKVSDATIYSTRKAKLGKDKKDETYVLGKIKDIYSQDGFDTFIKRYKKDKTQFLMYQKDPLTWENVIEVILRDYPSEKLSEDGKKTVKCNPFEEYRRENGLICKYSKKGNGTPIKSLKYYDKKLGNCIDITPEKSKNRVVLRQISPWRADIYFNLETLKYELMGLKYSDLSFEKGTGKYHISQEKYDAIREKEGIGKKSEFKFTLYRNDLILIKDTLNNCERMLRFGSKNDTSKHYVELKPLEKGTFDSEEEILPVLGKVAKSGQFIKGLNKPNISIYKVRTDVLGNKFFIKKEGDKPKLDFKNNNK

SEQ ID NO: 463 - protein, 1375 aa, Streptococcus infantarius
MEKSYSIGLDIGTNSVGWAVITDDYKVPAKKMKVLGNTDKKYIKKNLLGALLFDSGETAEVTRLKRTARRRYTRRKNRLRYLQEIFAKEMTKVDESFFQRLEESFLTDDDKTFDSHPIFGNKAEEDAYHQKFPTIYHLRKYLADSQEKADLRLVYLALAHMIKYRGHFLIEGELNAENTDVQKLFNVFVETYDKIVDESHLSEIEVDASSILTEKVSKSRRLENLIKQYPTEKKNTLFGNLIALALGLQPNFKTNFKLSEDAKLQFSKDTYEEDLEELLGKVGDDYADLFISAKNLYDAILLSGILTVDDNSTKAPLSASMIKRYVEHHEDLEKLKEFIKINKLKLYHDIFKDKTKNGYAGYIDNGVKQDEFYKYLKTILTKIDDSDYFLDKIERDDFLRKQRTFDNGSIPHQIHLQEMHSILRRQGDYYPFLKENQAKIEKILTFRIPYYVGPLARKDSRFAWANYHSDEPITPWNFDEVVDKEKSAEKFITRMTLNDLYLPEEKVLPKHSHVYETFTVYNELTKIKYVNEQGESFFFDANMKQEIFDHVFKENRKVTKAKLLSYLNNEFEEFRINDLIGLDKDSKSFNASLGTYHDLKKILDKSFLDDKTNGQIIEDIVLTLTLFEDRDMIHERLQKYSDFFTSQQLKKLERRHYTGWGRLSYKLINGIRNKENNKTILDFLIDDGHANRNFMQLINDESLSFKTIIQEAQVVGDVDDIEAVVHDLPGSPAIKKGILQSVKIVDELVKVMGDNPDNIVIEMARENQTTGYGRNKSNQRLKRLQDSLKEFGSDILSKKKPSYVDSKVENSHLQNDRLFLYYIQNGKDMYTGEELDIDRLSDYDIDHIIPQAFIKDNSIDNKVLTSSAKNRGKSDDVPSIEIVRNRRSYWYKLYKSGLISKRKFDNLTKAERGGLTEADKAGFIKRQLVETRQITKHVAQILDARFNTKRDENDKVIRDVKVITLKSNLVSQFRKEFKFYKVREINDYHHAHDAYLNAVVGTALLKKYPKLTPEFVYGEYKKYDVRKLIAKSSDDYSEMGKATAKYFFYSNLMNFFKTEVKYADGRVFERPDIETNADGEVVWNKQKDFDIVRKVLSYPQVNIVKKVEAQTGGFSKESILSKGDSDKLIPRKTKKVYWNTKKYGGFDSPTVAYSVLVVADIEKGKAKKLKTVKELVGISIMERSFFEENPVSFLEKKGYHNVQEDKLIKLPKYSLFEFEGGRRRLLASATELQKGNEVMLPAHLVELLYHAHRIDSFNSTEHLKYVSEHKKEFEKVLSCVENFSNLYVDVEKNLSKVRAAAESMTNFSLEEISASFINLLTLTALGAPADFNFLGEKIPRKRYTSTKECLSATLIHQSVTGLYETRIDLSKLGEE

SEQ ID NO: 464 - protein, 1368 aa, Streptococcus iniae
  Streptococcus iniae 9117
MRKPYSIGLDIGTNSVGWAVITDDYKVPSKKMRIQGTTDRTSIKKNLIGALLFDNGETAEATRLKRTTRRRYTRRKYRIKELQKIFSSEMNELDIAFFPRLSESFLVSDDKEFENHPIFGNLKDEITYHNDYPTIYHLRQTLADSDQKADLRLIYLALAHIIKFRGHFLIEGNLDSENTDVHVLFLNLVNIYNNLFEEDIVETASIDAEKILTSKTSKSRRLENLIAEIPNQKRNMLFGNLVSLALGLTPNFKTNFELLEDAKLQISKDSYEEDLDNLLAQIGDQYADLFIAAKKLSDAILLSDIITVKGASTKAPLSASMVQRYEEHQQDLALLKNLVKKQIPEKYKEIFDNKEKNGYAGYIDGKTSQEEFYKYIKPILLKLDGTEKLISKLEREDFLRKQRTFDNGSIPHQIHLNELKAIIRRQEKFYPFLKENQKKIEKLFTFKIPYYVGPLANGQSSFAWLKRQSNESITPWNFEEVVDQEASARAFIERMTNFDTYLPEEKVLPKHSPLYEMFMVYNELTKVKYQTEGMKRPVFLSSEDKEEIVNLLFKKERKVTVKQLKEEYFSKMKCFHTVTILGVEDRFNASLGTYHDLLKIFKDKAFLDDEANQDILEEIVWTLTLFEDQAMIERRLVKYADVFEKSVLKKLKKRHYTGWGRLSQKLINGIKDKQTGKTILGFLKDDGVANRNFMQLINDSSLDFAKIIKNEQEKTIKNESLEETIANLAGSPAIKKGILQSIKIVDEIVKIMGQNPDNIVIEMARENQSTMQGIKNSRQRLRKLEEVHKNTGSKILKEYNVSNTQLQSDRLYLYLLQDGKDMYTGKELDYDNLSQYDIDHIIPQSFIKDNSIDNTVLTTQASNRGKSDNVPNIETVNKMKSFWYKQLKSGAISQRKFDHLTKAERGALSDFDKAGFIKRQLVETRQITKHVAQILDSRFNSNLTEDSKSNRNVKIITLKSKMVSDFRKDFGFYKLREVNDYHHAQDAYLNAVVGTALLKKYPKLEAEFVYGDYKHYDLAKLMIQPDSSLGKATTRMFFYSNLMNFFKKEIKLADDTIFTRPQIEVNTETGEIVWDKVKDMQTIRKVMSYPQVNIVMKTEVQTGGFSKESIWPKGDSDKLIARKKSWDPKKYGGFDSPIIAYSVLVVAKIAKGKTQKLKTIKELVGIKIMEQDEFEKDPIAFLEKKGYQDIQTSSIIKLPKYSLFELENGRKRLLASAKELQKGNELALPNKYVKFLYLASHYTKFTGKEEDREKKRSYVESHLYYFDEIMQIIVEYSNRYILADSNLIKIQNLYKEKDNFSIEEQAINMLNLFTFTDLGAPSAFKFFNGDIDRKRYSSTNEIINSTLIYQSPTGLYETRIDLSKLGGK

SEQ ID NO: 465 - protein, 1338 aa, Streptococcus macacae
  Streptococcus macacae NCTC 11558
MTKPYSIGLDIGTNSVGWAVVTDGYKVPAKKMKVLGNTDKSHIKKNLLGALLFDSGNTAKDRRLKRTARRRYTRRRNRILYLQEIFAEEMAKADESFFQRLNESFLTNDDKEFDSHPIFGNKAEEEAHHHKFPTIFHLRKHLADSTEKSDLRLIYLALAHMIKFRGHFLIEGQLKAENTNVQTLFDDFVEVYDKTVEESHLSEISVSSILTEKISKSRRLENLIKYYPTEKKNTLFGNLIALSLGLQPNFKTNFKLSEDAKLQFSKDTYEEDLGELLGKIGDNYADLFISAKNLYDAILLSGILTIDDNTTKAPLSASMIKRYEEHQEDLAQLKKFIRQNLPDQYSEVFSDKTKDGYAGYIDGKTNQEAFYKYIKNMLSKTEGADYFLDKIDREDFLRKQRTFDNGSVPHQIHLQEMHAILRRQGEYYPFLKENQDKIEKILTFRIPYYVGPLARKGSRFAWAEYKADKKVTPWNFDDILDKEKSAEEFITRMTLNDLYLPEEKVLPKHSLVYETFNVYNELTKVKYVNEQGKAIFFDANMKQEIFDHVFKENRKVTKDKLLNYLNKEFEEFRIVNLTGLDKENKAFNSSLGTYHDLRKILDKSFLDDKVNEKIIEDIIQTLTLFEDREMIRQRLQKYSDIFTTQQLKKLERRHYTGWGRLSAKLINGIRDKQSNKTILGYLIDDGYSNRNFMQLINDDSLPFKEEIARAQVIGETDDLNQLVSDIAGSPAIKKGILQSLKIVDELVKVMGHNPANIVIEMARENQTTAKGRRSSQQRYKRLEEAIKNLDHDLNHKILKEHPTDNQALQNDRLFLYYLQNGRDMYTEDPLDINRLSDYDIDHIIPQSFIKDDSIDNKVLVSSAKNRGKSDNVPSEDVVNRMRPFWNKLLSCGLISQRKYSNLTKKELKPDDKAGFIKRQLVETRQITKHVAQILDARFNTKRDENKKVIRDVKIITLKSNLVSQFRKDFKFYKVREINDYHHAHDAYLNAVIGKALLDVYPQLEPEFVYGEYPHFHGYKENKATAKKFFYSNIMNFFKKDDIRTDENGEIVWKKDEHISNIKRVLSYPQVNIVKKVEIQTVGQNGGLFDDNPKSPLEVTPSKLVPLKKELNPKKYGGYQKPTTAYPVLLITDTKQLIPISVMNKKQFEQNPVKFLRDRGYQQVGKNDFIKLPKYTLVDIGDGIKRLWASSKEIHKGNQLVVSKKSQILLYHAHHLDSDLSNDYLQNHNQQFDVLFNEIISFSKKCKLGKEHIQKIENVYSNKKNSASIEELAESFIKLLGFTQLGATSPFNFLGVKLNQKQYKGKKDYILPCTEGTLIRQSITGLYETRVDLSKIGED

SEQ ID NO: 466 - protein, 1130 aa, Streptococcus macedonicus
MTNGKILGLDIGIASVGVGIIEAKTGKVVHANSRLFSAANAENNAERRGFRGSRRLNRRKKHRVKRVRDLFEKYGIVTDFRNLNLNPYELRVKGLTEQLTNEELFAALRTISKRRGISYLDDAEDDSTGSTDYAKSIDENRRLLKTKTPGQIQLERLEKYGQLRGNFTVYDENGEAHRLINVFSTSDYEKEARKILETQADYNKKITAEFIDDYVEILTQKRKYYHGPGNEKSRTDYGRFRTDGTTLENIFGILIGKCNFYPDEYRASKASYTAQEYNFLNDLNNLKVPTETGKLSTEQKESLVEFAKNTAILGPAKLLKEIAKILDCKVDEIKGYREDDKGKPDLHTFEPYRKLKFNLDSVNIDYLSREVLDKLADILTLNTEREGIEDAIKRNLPNQFTEEQISEIINVRKSQSTAFNKGWHSFSAKLMNELIPELYATSDEQMTILTRLEKFKVKKKSSKNIKTIDEKEITDEIYNPVVAKSVRQTIKIINAAVKKYGDFDKIVIEMPRDKNADDEKKFINKRNKENKKEKDDALKRAAYLYNGTDKLPDEVFHGNKQLETKIRLWYQQGERCLYSGKPIPIQELVHNSNNFEIDHILPLSLSFDDSLANKVLVYSWTNQEKGQKTPYQVIDSMDAAWSFREMKEYVLKQKGLGKKKRDYLLTTENIDKIEVKKKFIERNLVDTRYASRVVLNSLQSALRELGKDTKVSVVRGQFTSQLRRKWKIDKSRETYHHHAVDALIIAASSQLKLWEKQDNPMFVDYGNNQVVDKQTGEILSVSDNEYKELVFQPPYQGFVNTISSKGFEDEILFSYQVDSKYNRKVSDATIYSTRKAKIGKDKKEETYVLGKIKDIYSQNGFDTFVKKYNKDKTQFLMYQKDPLTWENVIEVILGDYPTTKKSEDGKNDVKCNPFEEYRRENGLICKYSKKGKGTPIKSLKYYDKKLGNCIDITPEESRNKVILQSINPWRADVYFNPETLKYELMGLKYSDLSFEKGTGNYHISQEKYDAIKEKEGIGKKSEFKFTLYRNDLILIKDIASGEQEIYRFLSRTMPNVNHYVELKPYDKEKFDNVQELVEALGEADKVGRCIKSLNKPNISIYKVRTDVLGNKYFVKKEGDKPKLDFKNNKK

SEQ ID NO: 467 - protein, 1134 aa, Streptococcus mitis
  Streptococcus mitis ATCC 6249
MNGLVLGLDIGIASEGVGILEKNSGKIIHANSRLFPAATADNNVERRKNRQARRLNRRKKHRGVRFQDLFEDYGLLTDFSKVSINLNPYRLRVDGLNQQLTNEELFIALKNIVKRRGISYLDDASEDGGAVSSDYGKAVEENRKLLAEQTPGQIQLERFEKYGQVRGDFTVVENGEKLRLINVFSTSAYKKEAERILRKQQEFNNQITDEFIEDYLKILTGKRKYYHGPGNEKSRTDYGRFRTDGTTLDNIFGILIGKCTFYPEEYRASKASYTAQEFNLLNDLNNLTVPTETKKLSEEQKKVIVEYAKEAKTLGASTLLKYIAKMIDASVDQIRGYRVDVNNKPEMHTFEVYRKMQSLETISVGELSRNVLDELAHILTLNTEREGMEEAINTKLKDSFSQDQVLELVQFRKNNSSLFSKGWHNFSLKLMMELIPELYETSEEQMTILTRLGKQKSKETSKRTKYIDEKELTEEIYNPVVAKSVRQAIKIINEATKKHGIFDNIVIEMARENNEEDAKKDYIKRQKANQDEKNAAMEKAAFQYNGKKELPDNIFHGHKELATKIRLWHQQGEKCLYTGKTIPISDLIYNQYKYEIDHILPLSLSFDDSLSNKVLALATANQEKGQRTPFQALDSMDDAWSYREFKSYVKDLKSLSNKKKDYLLTEEDISKIEVKQKFIERNLVDTRYSSRVVLNALQDFYKSHQFDTTISVVRGQFTSQLRRKWGLEKSRETYHHHAVDALIIAASSQLRLWKKQNNPLITYKEGQFVDSQTGEIISLTDDEYKELVFKAPYDHFVDTLSSKTFEDSILFSYQVDSKFNRKISDATIYATRKAKLDKEKKEYTYTLGKIKDIYSLGTKTPSKTGFYKFLDLYNKDKSQFLMFQKDRKTWDEVIEKIMEQYRPFKEYDKTGKLVDFNPFEKYRQENEPIRKYSKKGNGPEIKSLKYYDILLGKHKNITPEGSRNTVALLSLNPWRTDVYYNMETKKYEFLGLKYADLPFEEGGAYGISTETYNELREKEGIGKNSEFKFTLYKNDLILIKDTETNCQQIFRFWSRTGKDNPKSFEKHKIELKPYEKARFEKGEELEVLGKVPPSSNQLQKNMQIENLSIYKVKTDVLGNKHFIKKEGDKPKLKF

SEQ ID NO: 468 - protein, 1392 aa, Streptococcus mitis
  Streptococcus mitis SK321
MNNNNYSIGLDIGTNSVGWAVITDDYKVPSKKMKVLGNTDKHFIKKNLIGALLFDEGATAEDRRFKRTARRRYTRRKNRLRYLQEIFSEEMSKVDSSFFHRLDDSFLVPEDKRGSKYPIFATLAEEKEYHKKFPTIYHLRKHLADSKEKTDLRLIYLALAHMIKYRGHFLYEESFDIKNNDIQKIFSEFISIYDNTFEGSSLSGQNAQVEAIFTDKISKSAKRERILKLFAYEKSTDLFSEFLKLIVGNQADFKKHFDLEEKAPLQFSKDTYDEDLENLLGQIGDDFADLFLVAKKLYDAILLSGILTVTDSSTKAPLSASMIERYENHQKDLAALKQFIQNNLQEKYDEVFSDQSKDGYARYINGKTTQEAFYKYIKNLLSKFEGSDYFLDKIEREDFLRKQRTFDNGSIPHQIHLQEMNAIIRRQGEHYPFLKEYKEKIETILTFRIPYYVGPLARGNRNFAWLTRNSDQAIRPWNFEEIVDQASSAEEFINKMTNYDLYLPEEKVLPKHSLLYETFAVYNELTKVKFISEGLRDYQFLDSGQKKQIVNQLFKEKRKVTEKDIIQYLHNVDGYDGIELKGIEKQFNASLSTYHDLLKIIKDKEFMDDPKNEEILENIVHTLTIFEDREMIKQRLAQYASIFDKKVIKALTRRHYTGWGKLSAKLINGICDKKTGKTILDYLIDDGYSNRNFMQLINDDGLSFKDIIQKAQVVGKTNDVKQVVQELPGSPAIKKGILQSIKLVDELVKVMGHAPESIVIEIARENQTTARGKKNSQQRYKRIEDALKNLAPGLDSNILKEHPTDNIQLQNDRLFLYYLQNGKDMYTGEALDINQLSSYDIDHIVPQAFIKDDSLDNRVLTSSKDNRGKSDNVPSLEVVQKRKAFWQQLLDSKLISEHKFNNLTKAERGGLDERDKVGFIRRQLVETRQITKHVAQILDARFNTEVNEKDKKNRTVKIITLKSNLVSNFRKEFKLYKVREINDYHHAHDAYLNAVVAKAILKKYPKLEPGFVYGDYQKYDIKRYISRSKDPKEVEKATEKYFFYSNLLNFFKEEVHYADGTIVKRENIEYSKDTGEIAWNKEKDFATIKKVLSLPQVNIVKKTEIQTHGLDRGKPRGLFNSNPSPKPSEDRKENLVPIKQGLDPRKYGGYAGISNSYAVLVKAIIEKGAKKQQKTVLEFQGISILDKINFEKNKENYLLEKGYIKILSTITLPKYSLFEFPDGTRRRLASILSTNNKRGEIHKGNELVIPEKYTTLLYHAKNINKTLEPEHLEYVEKHRNDFAKLLEYVLNFNDKYVGALKNGERIRQAFIDWETVDIEKLCFSFIGPRNSKNAGLFELTSQGSASDFEFLGVKIPRYRDYTPSSLLNATLIHQSITGLYETRIDLSKLGED

SEQ ID NO: 469 - protein, 1345 aa, Streptococcus mutans
  Streptococcus mutans 11SSST2
MKKPYSIGLDIGTNSVGWAVVTDDYKVPAKKMKVLGNTDKSHIKKNLLGALLFDSGNTAADRRLKRTARRRYTRRRNRILYLQEIFAEEMSKVDDSFFHRLEDSFLVTEDKRGERHPIFGNLEEEVKYHENFPTIYHLRQYLADNPEKVDLRLVYLALAHIIKFRGHFLIEGKFDTRNNDVQRLFQEFLAVYDNTFENSSLQEQNVQVEEILTDKISKSAKKDRVLKLFPNEKSNGRFAEFLKLIVGNQADFKKHFELEEKAPLQFSKDTYEEELEVLLTQIGDNYAELFLSAKKLYDSILLSGILTVTDVSTKAPLSASMIQRYNEHQMDLAQLKQFIRQKLSDKYNEVFSDVSKDGYAGYIDGKTNQEAFYKYLKGLLNKIEGSGYFLDKIEREDFLRKQRTFDNGSIPHQIHLQEMRAIIRRQAEFYPFLADNQDRIEKILTFRIPYYVGPLARGKSDFAWLSRKSADKITPWNFDEIVDKESSAEAFINRMTNYDLYLPNQKVLPKHSLLYEKFTVYNELTKVKYKTEQGKTAFFDANMKQEIFDGVFKVYRKVTKDKLMDFLEKEFDEFRIVDLTGLDKENKAFNASYGTYHDLRKILDKDFLDNSKNEKILEDIVLTLTLFEDREMIRKRLENYSDLLTKEQVKKLERRHYTGWGRLSAELIHGIRNKESRKTLLDYLIDDGNSNRNFMQLINDDALSFKEEIAKAQVIGETDNLNQVVSDIAGSPAIKKGILQSLKIVDELVKIMGHQPENIVVEMARENQFTNQGRRNSQQRLKGLTDSIKEFGSQILKEHPVENSQLQNDRLFLYYLQNGRDMYTGEELDIDYLSQYDIDHIIPQAFIKDNSIDNRVLTSSKENRGKSDDVPSKDVVRKMKPYWSKLLSAKLITQRKFDNLTKAERGGLTDDDKAGFIKRQLVETRQITKHVARILDERFNTETDENNKKIRQVKIVTLKSNLVSNFRKEFELYKVREINDYHHAHDAYLNAVIGKALLGVYPQLEPEFVYGDYPHFHGHEENKATAKKFFYSNIMNFFKKDDVRTDKNGEIIWKKDEHISNIKKVLSYPQVNIVKKVEEQTGGFSKESILPKGNSDKLIPRKTKKFYWDTKKYGGFDSPIVAYSILVIADIEKGKSKKLKTVKALVGVTIMEKMTFERDPVAFLERKGYRNVQEENIIKLPKYSLFKLENGRKRLLASARELQKGNEIVLPNHLGTLLYHAKNIHKVDEPKHLDYVDKHKDEFKELLDVVSNFSKKYTLAEGNLEKIKELYAQNNGEDLKELSSSFINLLTFTAIGAPAAFKFFDKNIDRKRYTSTTEILNATLIHQSITGLYETRIDLSKLGGD

SEQ ID NO: 470 - protein, 1345 aa, Streptococcus mutans; identical to SEQ ID NO: 469
  Streptococcus mutans 11SSST2

SEQ ID NO: 471 - protein, 1345 aa, Streptococcus mutans
  Streptococcus mutans 11VS1
MKKPYSIGLDIGTNSVGWAVVTDDYKVPAKKMKVLGNTDKSHIKKNLLGALLFDSGNTAEDRRLKRTARRRYTRRRNRILYLQEIFSEEMGKVDDSFFHRLEDSFLVTEDKRGERHPIFGNLEEEVKYHENFPTIYHLRQYLADNPEKVDLRLVYLALAHIIKFRGHFLIEGKFDTRNNDVQRLFQEFLAVYDNTFENSSLQEQNVQVEEILTDKISKSAKKDRVLKLFPNEKSNGRFAEFLKLIVGNQADFKKHFELEEKAPLQFSKDTYEEELEVLLAQIGDNYAELFLSAKKLYDSILLSGILTVTDVSTKAPLSASMIQRYNEHQMDLAQLKQFIRQKLSDKYNEVFSDVSKDGYAGYIDGKTNQEAFYKYLKGLLNKIEGSGYFLDKIEREDFLRKQRTFDNGSIPHQIHLQEMRAIIRRQAEFYPFLADNQDRIEKILTFRIPYYVGPLARGKSDFAWLSRKSADKITPWNFDEIVDKESSAEAFINRMTNYDLYLPNQKVLPKHSLLYEKFTVYNELTKVKYKTEQGKTAFFDANMKQEIFDGVFKVYRKVTKDKLMDFLEKEFDEFRIVDLTGLDKENKVFNASYGTYHDLCKILDKDFLDNSKNEKILEDIVLTLTLFEDREMIRKRLENYSDLLTKEQVKKLERRHYTGWGRLSAELIHGIRNKESRKTILDYLIDDGNSNRNFMQLINDDALSFKEEIAKAQVIGETDNLNQVVSDIAGSPAIKKGILQSLKIVDELVKIMGHQPENIVVEMARENQFTKQGRRNSQQRLKGLTDSIKEFGSQILKEHPVENSQLQNDRLFLYYLQNGRDMYTGEELDIDYLSQYDIDHIIPQAFIKDNSIDNRVLTSSKENRGKSDDVPSKDVVRKMKSYWSKLLSAKLITQRKFDNLTKAERGGLTDDDKAGFIKRQLVETRQITKHVARILDERFYTETDENNKKIRQVKIVTLKSNLVSNFRKEFELYKVREINDYHHAHDAYLNAVIGKALLGVYPQLEPEFVYGDYPHFHGHKENKATAKKFFYSNIMNFFKKDDVRTDKNGEIIWKKDEHISNIKKVLSYPQVNIVKKVEEQTGGFSKESILPKGNSDKLIPRKTKKFYWDTKKYGGFDSPIVAYSILVIADIEKGKSKKLKTVKALVGVTIMEKMTFERDPVAFLERKGYRNVQEENIIKLPKYSLFKLENGRKRLLASARELQKGNEIVLPNHLGTLLYHAKNIHKVDEPKHLDYVDKHKDEFKELLDVVSNFSKKYTLAEGNLEKIKELYAQNNGEDLKELASSFINLLTFTAIGAPATFKFFDKNIDRKRYTSTTEILNATLIHQSITGLYETRIDLSKLGGD

SEQ ID NO: 472 - protein, 1345 aa, Streptococcus mutans
  Streptococcus mutans 14D
MKKPYSIGLDIGTNSVGWAVVTDDYKVPAKKMKVLGNTDKSHIKKNLLGALLFDSGNTAADRRLKRTARRRYTRRRNRILYLQEIFAEEMSKVDDSFFHRLEDSFLVTEDKRGERHPIFGNLEEEVKYHENFPTIYHLRQYLADNPEKVDLRLVYLALAHIIKFRGHFLIEGKFDTRNNDVQRLFQEFLAVYDNTFENSSLQEQNVQVEEILTDKISKSAKKDRVLKLFPNEKSNGRFAEFLKLIVGNQADFKKHFELEEKAPLQFSKDTYEEELEVLLAQIGDNYAELFLSAKKLYDSILLSGILTVTDVSTKAPLSASMIQRYNEHQMDLAQLKQFIRQKLSDKYNEVFSDVSKDGYAGYIDGKTNQEAFYKYLKGLLNKIEGSGYFLDKIEREDFLRKQRTFDNGSIPHQIHLQEMRAIIRRQAEFYPFLADNQDRIEKILTFRIPYYVGPLARGKSDFAWLSRKSADKITPWNFDEIVDKESSAEAFINRMTNYDLYLPNQKVLPKHSLLYEKFTVYNELTKVKYKTEQGKTAFFDANMKQEIFDGVFKVYRKVTKDKLMDFLEKEFDEFRIVDLTGLDKENKAFNASYGTYHDLRKILDKDFLDNSKNEKILEDIVLTLTLFEDREMIRKRLENYSDLLTKEQVKKLERRHYTGWGRLSAELIHGIRNKESRKTILDYLIDDGNSNRNFMQLINDDALSFKEEIAKAQVIGETDNLNQVVSDIAGSPAIKKGILQSLKIVDELVKIMGHQPENIVVEMARENQFTNQGRRNSQQRLKGLTDSIKEFGSQILKEHPVEHSQLQNDRLFLYYLQNGRDMYTGEELDIDYLSQYDIDHIIPQAFIKDNSIDNRVLTSSKENRGKSDDVPSKNVVRKMKSYWSKLLSAKLITQRKFDNLTKAERGGLTDDDKAGFIKRQLVETRQITKHVARILDERFHTETDENNKKIRQVKIVTLKSNLVSNFRKEFELYKVREINDYHHAHDAYLNAVIGKALLGVYPQLEPEFVYGDYPHFHGHKENKATAKKFFYSNIMNFFKKDDVRTDKNGEIIWKKDEHISNIKKVLSYPQVNIVKKVEEQTGGFSKESILPKGNSDKLIPRKTKKFYWDTKKYGGFDSPIVAYSILVIADIEKGKSKKLKTVKALVGVTIMEKMTFERDPVAFLERKGYRNVQEENIIKLPKYSLFKLENGRKRLLASARELQKGNEIVLPNHLGTLLYHAKNIHKVDEPKHLDYVDKHKDEFKELLDVVSNFSKKYTLAEGNLEKIKELYAQNNGEDLKELASSFINLLTFTAIGAPATFKFFDKNIDRKRYTSTTEILNATLIHQSITGLYETRIDLSKLGGD

SEQ ID NO: 473 - protein, 1355 aa, Streptococcus mutans
  Streptococcus mutans 15VF2
MKKSYSIGLDIGTNSVGWAVVTDDYKVPAKKMKVLGNTDKSHIKKNLLGALLFDSGNTAEDRRLKRTARRRYTRRRNRILYLQEIFSEEMGKVDDSFFHRLDESFLTDDDKNFDSHPIFGNKAEEDAYHQKFPTIYHLRKHLADSTEKADLRLVYLALAHMIKFRGHFLIEGELNAENTDVQKLFADFVGVYDRTFDDSHLSEITVDASSILTEKISKSRRLEKLINNYPKEKKNTLFGNLIALSLGLQPNFKTNFKLSEDAKLQFSKDTYEEDLEELLGKIGDDYADLFTLAKNLYDAILLSGILTADDSSTKAPLSASMIKRYAEHHEDLEKLKEFIKANKPELYHDIFKDETKNGYAGYIENGVKQDEFYKYLKNTLSKIAGSDYFLDKIEREDFLRKQRTFDNGSIPHQIHLQEMHAILRRQGDYYPFLKENQDRIEKILTFRIPYYVGPLARKNSRFAWAEYHSDEAVMPWNFDQVIDKESSAQAFIEHMTNNDLYLPNEKVLPKHSPLYEKYTVYNELTKIKYVTEIGEAKFFDANLKQEIFDGLFKHERKVTKKKLRTFLDKNFDEFRIVDIQGLDKETETFNASYATYQDLLKVIKDKVFMDNPENAEILENIVLTLTLFEDREMIKQRLAKYADVFDKKVIDQLARRHYTGWGRLSAKLLNGIRDKQSCKTIMDYLIDDAQSNRNLMQLITDDNLTFKDDIVKAQYVDNSDDLHQVVQSLAGSPAIKKGILQSLKIVDELVKVMGKEPEQIVVEMARENQTTAKGRRNSQQRYKRLKEAIKSLDRDLNHKILKEHPTDNQALQNNRLFLYYLQNGRDMYTGESLDINRLSDYDIDHVIPQAFIKDNSIDNRVLTSSKANRGKSDDVPSEDVVNRMRPFWNKLLSSGLISQRKYNNLTKKELTPDDKAGFIKRQLVETRQITKHVARMLDERFNKEFDDNNKRIRRVKIVTLKSNLVSSFRKEFELYKVREINDYHHAHDAYLNAVVVKALLVKYPKLEPEFVYGEYPKYNSYRERKTATQKMFFYSNIMNMFKSKVKLADDQIVERPMIEVNDETGEIAWDKTKHITTVKKVLSYPQVNIVKKVEEQTIGQNGGLFDDNPKSPLEVIPSKLVPLKKALNPEKYGGYQKPTTAYPILLIVDTKQLIPISVMDKKRFEQNPVKFLKDKGYQQIEKNNFVKLPKYTLVDIGNGIKRLWASSKEVHKGNQLVVSKKSQDLLYHAHHLDNDYSNEYVKNHYQQFDILFNEITSFSKKCKLGKEHIQKIEEAYSKERDSASIEELADGFIKLLGFTQLGATSPFSFLGIKLNQKQYTGKKDYLLPCMEATLIHQSITGLYETRIDLNKLGGD

SEQ ID NO: 474 - protein, 1355 aa, Streptococcus mutans; identical to SEQ ID NO: 473
  Streptococcus mutans 15VF2

SEQ ID NO: 475 - protein, 1345 aa, Streptococcus mutans
  Streptococcus mutans 1SM1
MKKPYSIGLDIGTNSVGWAVVTDDYKVPAKKMKVLGNTDKSHIKKNLLGALLFDSGNTAEDRRLKRTARRRYTRRRNRILYLQEIFSEEMGKVDDSFFHRLEDSFLVTEDKRGERHPIFGNLEEEVKYHENFPTIYHLRQYLADNPEKVDLRLVYLALAHIIKFRGHFLIEGKFDTRNNDVQRLFQEFLAVYDNTFENSSLQEQNVQVEEILTDKISKSAKKDRVLKLFPNEKSNGRFAEFLKLIVGNQADFKKHFELEEKAPLQFSKDTYEEDLEELLGKIGDDYADLFTLAKNLYDAILLSGILTADDSSTKAPLSASMIQRYNEHQMDLAQLKQFIRQKLSDKYNEVFSDVSKDGYAGYIDGKTNQEAFYKYLKGLLNKIEGSGYFLDKIEREDFLRKQRTFDNGSIPHQIHLQEMRAIIRRQAEFYPFLADNQDRIEKILTFRIPYYVGPLARGKSDFAWLSRKSADKITPWNFDEIVDKESSAEAFINRMTNYDLYLPNQKVLPKHSLLYEKFTVYNELTKVKYKTEQGKTAFFDANMKQEIFDGVFKVYRKVTKDKLMDFLEKEFDEFRIVDLTGLDKENKVFNASYGTYHDLCKILDKDFLDNSKNEKILEDIVLTLTLFEDREMIRKRLENYSDLLTKEQVKKLERRHYTGWGRLSAELIHGIRNKESRKTILDYLIDDGNSNRNFMQLINDDALSFKEEIAKAQVIGETDNLNQVVSDIAGSPAIKKGILQSLKIVDELVKIMGHQPENIVVEMARENQFTNQGRRNSQQRLKGLTDSIKEFGSQILKEHPVENSQLQNDRLFLYYLQNGRDMYTGEELDIDYLSQYDIDHIIPQAFIKDNSIDNRVLTSSKENRGKSDDVPSKDVVRKMKSYWSKLLSAKLITQRKFDNLTKAERGGLTDDDKAGFIKRQLVETRQITKHVARILDERFYTETDENNKKIRQVKIVTLKSNLVSNFRKEFELYKVREINDYHHAHDAYLNAVIGKALLGVYPQLEPEFVYGDYPHFHGHKENKATAKKFFYSNIMNFFKKDDVRTDKNGEIIWKKDEHISNIKKVLSYPQVNIVKKVEEQTGGFSKESILPKGNSDKLIPRKTKKFYWDTKKYGGFDSPIVAYSILVIADIEKGKSKKLKTVKALVGVTIMEKMTFERDPVAFLERKGYRNVQEENIIKLPKYSLFKLENGRKRLLASARELQKGNEIVLPNHLGTLLYHAKNIHKVDEPKHLDYVDKHKDEFKELLDVVSNFSKKYTLAEGNLEKIKELYAQNNGEDLKELASSFINLLTFTAIGAPATFKFFDKNIDRKRYTSTTEILNATLIHQSITGLYETRIDLSKLGGD

SEQ ID NO: 476 - protein, 1345 aa, Streptococcus mutans; identical to SEQ ID NO: 475
  Streptococcus mutans 1SM1

SEQ ID NO: 477 - protein, 1350 aa, Streptococcus mutans
  Streptococcus mutans 24
MKKPYSIGLDIGTNSVGWAVVTDDYKVPAKKMKVLGNTDKSHIEKNLLGALLFDSGNTAEDRRLKRTARRRYTRRRNRILYLQEIFSEEMGKVDDSFFHRLEDSFLVTEDKRGERHPIFGNLEEEVKYHENFPTIYHLRQYLADNPEKVDLRLVYLALAHIIKFRGHFLIEGKFDTRNNDVQRLFQEFLAVYDNTFENSSLQEQNVQVEEILTDKISKSAKKDRVLKLFPNEKSNGRFAEFLKLIVGNQADFKKHFELEEKAPLQFSKDTYEEELEVLLAQIGDNYAELFLSAKKLYDSILLSGILTVTDVSTKAPLSASMIQRYNEHQMDLTQLKQFIRQKLSDKYNEVFSDVSKDGYAGYIDGKTNQEAFYKYLKGLLNKIEGSGYFLDKIEREDFLRKQRTFDNGSIPHQIHLQEMRAIIRRQAEFYPFLADNQDRIEKILTFRIPYYVGPLARGKSDFAWLSRKSADKITPWNFDEIVDKESSAEAFINRMTNYDLYLPNQKVLPKHSLLYEKFTVYNELTKVKYKTEQGKTAFFDANMKQEIFDGVFKVYRKVTKDKLMDFLEKEFDEFRIVDLTGLDKENKAFNASYGTYHDLRKILDKDFLDNSKNEKILEDIVLTLTLFEDREMIRKRLKNYSDLLTKEQLKKLERRHYTGWGRLSAELIHGIRNKESRKTILDYLIDDGNSNRNFMQLINDDALSFKEEIAKAQVIGETDNLNQVVSDIAGSPAIKKGILQSLKIVDELVKIMGHQPENIVVEMARENQFTNQGRQNSQQRLKGLTDSIKEFGSQILKEHPVENSQLQNDRLFLYYLQNGRDMYTGEELDIDYLSQYDIDHIIPQAFIKDNSIDNRVLTSSKENRGKSDDVPSEDVVNRMRPFWNKLLSSGLISQRKYNNLTKKELTLDDKAGFIKRQLVETRQITKHVARMLDERFNKEFDDNNKRICKVKIVTLKSNLVSSFRKEFELYKVREINDYHHAHDAYLNAVVVKALLVKYSKLEPEFVYGEYPKYNSYRERKTATQKMFFYSNIMNMFKSKVKLADDQIVERPMIEVNDETGEIAWDKTKHITTVKKVLSYPQVNIVKKVEEQTIGQNGGLFDDNPKSPLEVIPSKLVPLKKALNPEKYGGYQKPTTAYPILLIVDTKQLIPISVMDKKRFEQNPVKFLKDKGYQQIEKNNFVKLPKYTLVDIGNGIKRLWASSKEVHKGNQLVVSKKSQDLLYHAHHLDNDYSNEYVKNHYQQFDILFNEITSFSKKCKLGKEHIQKIEEAYSKERDSASIEELADGFIKLLGFTQLGATSPFSFLGIKLNQKQYTGKKDYLLPCMEATLIHQSITGLYETRIDLSKLGGD

SEQ ID NO: 478 - protein, 1350 aa, Streptococcus mutans; identical to SEQ ID NO: 477
  Streptococcus mutans 24

SEQ ID NO: 479 - protein, 1345 aa, Streptococcus mutans; identical to SEQ ID NO: 472
  Streptococcus mutans 2VS1

SEQ ID NO: 480 - protein, 1345 aa, Streptococcus mutans; identical to SEQ ID NO: 472
  Streptococcus mutans 2VS1

SEQ ID NO: 481 - protein, 1345 aa, Streptococcus mutans; identical to SEQ ID NO: 471
  Streptococcus mutans 3SN1

SEQ ID NO: 482 - protein, 1345 aa, Streptococcus mutans; identical to SEQ ID NO: 471
  Streptococcus mutans 3SN1

SEQ ID NO: 483 - protein, 1345 aa, Streptococcus mutans
  Streptococcus mutans 4SM1
MKKPYSIGLDIGTNSVGWAVVTDDYKVPAKKMKVLGNTDKSHIKKNLLGALLFDSGNTAEDRRLKRTARRRYTRRRNRILYLQEIFSEEMGKVDDSFFHRLEDSFLVTEDKRGERHPIFGNLEEEVKYHENFPTIYHLRQYLADNPEKVDLRLVYLALAHIIKFRGHFLIEGKFDTRNNDVQRLFQEFLAVYDNTFENSSLQEQNVQVEEILTDKISKSAKKDRVLKLFPNEKSNGRFAEFLKLIVGNQADFKKHFELEEKAPLQFSKDTYEEDLEELLGKIGDDYADLFTLAKNLYDAILLSGILTADDSSTKAPLSASMIQRYNEHQMDLAQLKQFIRQKLSDKYNEVFSDVSKDGYAGYIDGKTNQEAFYKYLKGLLNKIEGSGYFLDKIEREDFLRKQRTFDNGSIPHQIHLQEMRAIIRRQAEFYPFLADNQDRIEKILTFRIPYYVGPLARGKSDFAWLSRKSADKITPWNFDEIVDKESSAEAFINRMTNYDLYLPNQKVLPKHSLLYEKFTVYNELTKVKYKTEQGKTAFFDANMKQEIFDGVFKVYRKVTKDKLMDFLEKEFDEFRIVDLTGLDKENKVFNASYGTYHDLCKILDKDFLDNSKNEKILEDIVLTLTLFEDREMIRKRLENYSDLLTKEQVKKLERRHYTGWGRLSAELIHGIRNKESRKTILDYLIDDGNSNRNFMQLINDDALSFKEEIAKAQVIGETDNLNQVVSDIAGSPAIKKGILQSLKIVDELVKIMGHQPENIVVEMARENQFTNQGRRNSQQRLKGLTDSIKEFGSQILKEHPVENSQLQNDRLFLYYLQNGRDMYTGEELDIDYLSQYDIDHIIPQAFIKDNSIDNRVLTSSKENRGKSDDVPSKDVVRKMKPYWSKLLSAKLITQRKFDNLTKAERGGLTDDDKAGFIKRQLVETRQITKHVARILDERFNTETDENNKKIRQVKIVTLKSNLVSNFRKEFELYKVREINDYHHAHDAYLNAVIGKALLGVYPQLEPEFVYGDYPHFHGHEENKATAKKFFYSNIMNFFKKDDVRTDKNGEIIWKKDEHISNIKKVLSYPQVNIVKKVEEQTGGFSKESILPKGNSDKLIPRKTKKFYWDTKKYGGFDSPIVAYSILVIADIEKGKSKKLKTVKALVGVTIMEKMTFERDPVAFLERKGYRNVQEENIIKLPKYSLFKLENGRKRLLASARELQKGNEIVLPNHLGTLLYHAKNIHKVDEPKHLDYVDKHKDEFKELLDVVSNFSKKYTLAEGNLEKIKELYAQNNGEDLKELASSFINLLTFTAIGAPATFKFFDKNIDRKRYTSTTEILNATLIHQSITGLYETRIDLSKLGGD

SEQ ID NO: 484 - protein, 1345 aa, Streptococcus mutans; identical to SEQ ID NO: 483
  Streptococcus mutans 4SM1

SEQ ID NO: 485 - protein, 1345 aa, Streptococcus mutans
  Streptococcus mutans 4VF1
MKKPYSIGLDIGTNSVGWAVVTDDYKVPAKKMKVLGNTDKSHIKKNLLGALLFDSGNTAEDRRLKRTARRRYTRRRNRILYLQEIFSEEMGKVDDSFFHRLEDSFLVTEDKRGERHPIFGNLEEEVKYHENFPTIYHLRQYLADNPEKVDLRLVYLALAHIIKFRGHFLIEGKFDTRNNDVQRLFQEFLAVYDNTFENSSLQEQNVQVEEILTDKISKSAKKDRVLKLFPNEKSNGRFAEFLKLIVGNQADFKKHFELEEKAPLQFSKDTYEEELEVLLAQIGDNYAELFLSAKKLYDSILLSGILTVTDVSTKAPLSASMIQRYNEHQMDLAQLKQFIRQKLSDKYNEVFSDVSKDGYAGYIDGKTNQEAFYKYLKGLLNKIEGSGYFLDKIEREDFLRKQRTFDNGSIPHQIHLQEMRAIIRRQAEFYPFLADNQDRIEKILTFRIPYYVGPLARGKSDFAWLSRKSADKITPWNFDEIVDKESSAEAFINRMTNYDLYLPNQKVLPKHSLLYEKFTVYNELTKVKYKTEQGKTAFFDANMKQEIFDGVFKVYRKVTKDKLMDFLEKEFDEFRIVDLTGLDKENKVFNASYGTYHDLCKILDKDFLDNSKNEKILEDIVLTLTLFEDREMIRKRLENYSDLLTKEQVKKLERRHYTGWGRLSAELIHGIRNKESRKTILDYLIDDGNSNRNFMQLINDDALSFKEEIAKAQVIGETDNLNQVVSDIAGSPAIKKGILQSLKIVDELVKIMGHQPENIVVEMARENQFTKQGRRNSQQRLKGLTDSIKEFGSQILKEHPVENSQLQNDRLFLYYLQNGRDMYTGEELDIDYLSQYDIDHIIPQAFIKDNSIDNRVLTSSKENRGKSDDVPSKDVVRKMKSYWSKLLSAKLITQRKFDNLTKAERGGLTDDDKAGFIKRQLVETRQITKHVARILDERFYTETDENNKKIRQVKIVTLKSNLVSNFRKEFELYKVREINDYHHAHDAYLNAVIGKALLGVYPQLEPEFVYGDYPHFHGHKENKATAKKFFYSNIMNFFKKDDVRTDRNGEIIWKKDEHISNIKKVLSYPQVNIVKKVEEQTGGFSKESILPKGNSDKLIPRKTKKFYWDTKKYGGFDSPIVAYSILVIADIEKGKSKKLKTVKALVGVTIMEKMTFERDPVAFLERKGYRNVQEENIIKLPKYSLFKLENGRKRLLASARELQKGNEIVLPNHLGTLLYHAKNIHKVDEPKHLDYVDKHKDEFKELLDVVSNFSKKYTLAEGNLEKIKELYAQNNGEDLKELASSFINLLTFTAIGAPATFKFFDKNIDRKRYTSTTEILNATLIHQSITGLYETRIDLSKLGGD

SEQ ID NO: 486 - protein, 1345 aa, Streptococcus mutans; identical to SEQ ID NO: 485
  Streptococcus mutans 4VF1

SEQ ID NO: 487 - protein, 1345 aa, Streptococcus mutans
  Streptococcus mutans 5SM3
MKKPYSIGLDIGTNSVGWAVVTDDYKVPAKKMKVLGNTDKSHIEKNLLGALLFDSGNTAEDRRLKRTARRRYTRRRNRILYLQEIFSEEMGKVDDSFFHRLEDFFLVTEDKRGERHPIFGNLEEEVKYHENFPTIYHLRQYLADNPEKVDLRLVYLALAHIIKFRGHFLIEGKFDTRNNDVQRLFQEFLAVYDNTFENSSLQEQNVQVEEILTDKISKSAKKDRVLKLFPNEKSNGRFAEFLKLIVGNQADFKKHFELEEKAPLQFSKDTYEEELEVLLAQIGDNYAELFLSAKKLYDSILLSGILTADDSSTKAPLSASMIQRYNEHQMDLAQLKQFIRQKLSDKYNEVFSDVSKDGYAGYIDGKTNQEAFYKYLKGLLNKIEGSGYFLDKIEREDFLRKQRTFDNGSIPHQIHLQEMRAIIRRQSEFYPFLADNQDRIEKILTFRIPYYVGPLARGKSDFAWLSRKSADKITPWNFDEIVDKESSAEAFINRMTNYDLYLPNQKVLPKHSLLYEKFTVYNELTKVKYKTEQGETAFFDANMKQEIFDGVFKVYRKVTKDKLMDFLEKEFDEFRIVDLTGLDKENKAFNASYGTYHDLRKILDKDFLDNSKNEKILEDIVLTLTLFEDREMIRKRLKNYSDLLTKEQLKKLERRHYTGWGRLSAELIHGIRNKESRKTILDYLIDDGNSNRNFMQLINDDALSFKEEIAKAQVIGETDNLNQVVSDIAGSPAIKKGILQSLKIVDELVKIMGHQPENIVVEMARENQFTNQGRRNSQQRLKGLTDSIKEFGSQILKEHPVENSQLQNDRLFLYYLQNGRDMYTGEELDIDYLSQYDIDHIIPQAFIKDNSIDNRVLTSSKENRGKSDDVPSKDVVRKMKPYWSKLLSAKLITQRKFDNLTKAERGGLTDDDKAGFIKRQLVETRQITKHVARILDERFNTETDENNKKIRQVKIVTLKSNLVSNFRKEFELYKVREINDYHHAHDAYLNAVIGKALLGVYPQLEPEFVYGDYPHFHGHEENKATAKKFFYSNIMNFFKKDDVRTDKNGEIIWKKDEHISNIKKVLSYPQVNIVKKVEEQTGGFSKESILPKGNSDKLIPRKTKKFYWDTKKYGGFDSPIVAYSILVIADIEKGKSKKLKTVKALVGVTIMEKMTFERDPVAFLERKGYRNVQEENIIKLPKYSLFKLENGRKRLLASARELQKGNEIVLPNHLGTLLYHAKNIHKVDEPKHLDYVDKHKDEFKELLDVVSNFSKKYTLAEGNLEKIKELYAQNNGEDLKELASSFINLLTFTAIGAPATFKFFDKNIDRKRYTSTTEILNATLIHQSITGLYETRIDLSKLGGD

SEQ ID NO: 488 - protein, 1345 aa, Streptococcus mutans; identical to SEQ ID NO: 487
  Streptococcus mutans 5SM3

SEQ ID NO: 489 - protein, 1359 aa, Streptococcus mutans
  Streptococcus mutans 66-2A
MKKPYSIGLDIGTNSVGWAVVTDDYKVPAKKMKVLGNTDKSHIKKNLLGALLFDSGNTAEDRRLKRTARRRYTRRRNRILYLQEIFAEEMMQVDESFFQRLDDSFLVEEDKRGSRYPIFGTLKEEKKYHKEFKTIYHLREKLANSTEKADLRLVYLSLAHMIKFRGHFLIEGQLKAENTNVQALFKDFVEVYDKTVEESHLSEMTVDALSILTEKVSKSRRLENLVECYPTEKKNTLFGNLIALSLGLQPNFKTNFQLSEDAKLQFSKDTYEEDLEGLLGEIGDEYADLFASAKNLYDAILLSGILAVDDNTTKAPLSASMVKRYKEHKEELAAFKRFIKEKLPKKYEEIFKDDTKNGYAGYVGADKKLRKRSGKLATEEEFYKYVKGILNKVEGADVWLDKIDREDFLRKQRTFDNGSIPHQIHLQEMHAILRRQGEHYPFLKENQDKIEKILTFRIPYYVGPLVRKGSRFAWAEYKADEKITPWNFDDILDKEKSAEKFITRMTLNDLYLPEEKVLPKHSLLYETFTVYNELTKVKYVNEQGEAKFFDANMKQEIFDHVFKENRKVTKDKLLNYLNKEFEEFRIVNLTGLDKENKVFNSSLGTYHDLRKILNKSFLDNKENEQIIEDIIQTLTLFEDREMIRQRLQKYSDIFTKAQLKKLERRHYTGWGRLSYKLINGIRDKQSNKTILGYLIDDGYSNRNFMQLINDDALSFKEEIAKAQVIGEMDGLNQVVSDIAGSPAIKKGILQSLKIVDELVKVMGHNPANIVIEMARENQTTAKGRRSSQKRYKRLEEAIKNLDHDLNHKILKEHPTDNQALQNDRLFLYYLQNGRDMYTEDPLDINRLSDYDIDHIIPQAFIKDNSIDNRVLTRSDKNRGKSDDVPSEEVVHKMKPFWSKLLSAKLITQRKFDNLTKAERGGLTDDDKAGFIKRQLVETRQITKHVARILDERFNTETDENNKKIRQVKIVTLKSNLVSNFRKEFELYKVREINDYHHAHDAYLNAVIGKALLGVYPQLEPEFVYGDYPHFHGHKENKATAKKFFYSNIMNFFKKGDVRTDKNGEIIWKKDEHISNIKKVLSYPQVNIVKKVEEQTGGFSKESILPKGNSDKLIPRKTKKFYWDTKKYGGFDSPIVAYSILVIADIEKGKSKKLKTVKALVGVTIMEKMTFERDPVAFLERKGYRNVQEENIIKLPKYSLFKLENGRKRLLASARELQKGNEIVLPNHLETLLYHAKNIHKVDEPKHLDYVDKHKDEFKELLDVVSNFSKKYTLAEGNLEKIKELYAQNNGEDLKELASSFINLLTFTAIGAPAAFKFFDKNIDRKRYTSTTEILNATLIHQSITGLYETRIDLNKLGGD

SEQ ID NO: 490 - protein, 1359 aa, Streptococcus mutans; identical to SEQ ID NO: 489
  Streptococcus mutans 66-2A

SEQ ID NO: 491 - protein, 1345 aa, Streptococcus mutans
  Streptococcus mutans 8ID3
MKKPYSIGLDIGTNSVGWAVVTDDYKVPAKKMKVLGNTDKSHIEKNLLGALLFDSGNTAEDRRLKRTARRRYTRRRNRILYLQEIFSEEMGKVDDSFFHRLEDSFLVTEDKRGERHPIFGNLEEEVKYHENFPTIYHLRQYLADNPEKVDLRLVYLALAHIIKFRGHFLIEGKFDTRNNDVQRLFQEFLAVYDNTFENSSLQEQNVQVEEILTDKISKSAKKDRVLKLFPNEKSNGRFAEFLKLIVGNQADFKKHFELEEKAPLQFSKDTYEEELEVLLAQIGDNYAELFLSAKKLYDSILLSGILTVTDVGTKAPLSASMIQRYNEHQMDLAQLKQFIRQKLSDKYNEVFSDVSKDGYAGYIDGKTNQEAFYKYLKGLLNKIEGSGYFLDKIEREDFLRKQRTFDNGSIPHQIHLQEMRAIIRRQAEFYPFLADNQDRIEKLLTFRIPYYVGPLARGKSDFAWLSRKSADKITPWNFDEIVDKESSAEAFINRMTNYDLYLPNQKVLPKHSLLYEKFTVYNELIKVKYKTEQGKTAFFDANMKQEIFDGVFKVYRKVTKDKLMDFLEKEFDEFRIVDLTGLDKENKVFNASYGTYHDLCKILDKDFLDNSKNEKILEDIVLTLTLFEDREMIRKRLENYSDLLTKEQVKKLERRHYTGWGRLSAELIHGIRNKESRKTILDYLIDDGNSNRNFMQLINDDALSFKEEIAKAQVIGETDNLNQVVSDIAGSPAIKKGILQSLKIVDELVKIMGHQPENIVVEMARENQFTNQGRRNSQQRLKGLTDSIKEFGSQILKEHPVENSQLQNDRLFLYYLQNGRDMYTGEELDIDYLSQYDIDHIIPQAFIKDNSIDNRVLTSSKENRGKSDDVPSKDVVRKMKSYWSKLLSAKLITQRKFDNLTKAERGGLTDDDKAGFIKRQLVETRQITKHVARILDERFNTETDENNKKIRQVKIVTLKSNLVSNFRKEFELYKVREINDYHHAHDAYLNAVIGKALLGVYPQLEPEFVYGDYPHFHGHKENKATAKKFFYSNIMNFFKKDDVRTDKNGEIIWKKDEHISNIKKVLSYPQVNIVKKVEEQTGGFSKESILPKGNSDKLIPRKTKKFYWDTKKYGGFDSPIVAYSILVIADIEKGKSKKLKTVKALVGVTIMEKMTFERDPVAFLERKGYRNVQEENIIKLPKYSLFKLENGRKRLLASARELQKGNEIVLPNHLGTLLYHAKNIHKVDEPKHLDYVDKHKDEFKELLDVVSNFSKKYTLAEGNLEKIKELYAQNNGEDLKELASSFINLLTFTAIGAPATFKFFDKNIDRKRYTSTTEILNATLIHQSITGLYETRIDLNKLGGD

SEQ ID NO: 492 - protein, 1345 aa, Streptococcus mutans; identical to SEQ ID NO: 491
  Streptococcus mutans 8ID3

SEQ ID NO: 493 - protein, 1345 aa, Streptococcus mutans
  Streptococcus mutans A19
MKKPYSIGLDIGTNSVGWSVVTDDYKVPAKKMKVLGNTDKSHIEKNLLGALLFDSGNTAEDRRLKRTARRRYTRRRNRILYLQEIFSEEMGKVDDSFFHRLEDSFLVTEDKRGERHPIFGNLEEEVKYHENFPTIYHLRQYLADNPEKVDLRLVYLALAHIIKFRGHFLIEGKFDTRNNDVQRLFQEFLAVYDNTFENSSLQEQNVQVEEILTDKISKSAKKDRVLKLFPNEKSNGRFAEFLKLIVGNQADFKKHFELEEKAPLQFSKDTYEEELEVLLAQIGDNYAELFLSAKKLYDSILLSGILTVTDVGTKAPLSASMIQRYNEHQMDLAQLKQFIRQKLSDKYNEVFSDVSKDGYAGYIDGKTNQEAFYKYLKGLLNKIEGSGYFLDKIEREDFLRKQRTFDNGSIPHQIHLQEMRAIIRRQAEFYPFLADNQDRIEKLLTFRIPYYVGPLARGKSDFAWLSRKSADKITPWNFDEIVDKESSAEAFINRMTNYDLYLPNQKVLPKHSLLYEKFTVYNELTKVKYKTEQGKTAFFDANMKQEIFDGVFKVYRKVTKDKLMDFLEKEFDEFRIVDLTGLDKENKVFNASYGTYHDLCKILDKDFLDNSKNEKILEDIVLTLTLFEDREMIRKRLENYSDLLTKEQVKKLERRHYTGWGRLSAELIHGIRNKESRKTILDYLIDDGNSNRNFMQLINDDALSFKEEIAKAQVIGETDNLNQVVSDIAGSPAIKKGILQSLKIVDELVKIMGHQPENIVVEMARENQFTNQGRRNSQQRLKGLTDSIKEFGSQILKEHPVENSQLQNDRLFLYYLQNGRDMYTGEELDIDYLSQYDIDHIIPQAFIKDNSIDNRVLTSSKENRGKSDDVPSKDVVRKMKSYWSKLLSAKLITQRKFDNLTKAERGGLTDDDKAGFIKRQLVETRQITKHVARILDERFNTETDENNKKIRQVKIVTLKSNLVSNFRKEFELYKVREINDYHHAHDAYLNAVIGKALLGVYPQLEPEFVYGDYPHFHGHKENKATAKKFFYSNIMNFFKKDDVRIDKNGEIIWKKDEHISNIKKVLSYPQVNIVKKVEEQTGGFSKESILPKGNSDKLIPRKTKKFYWDTKKYGGFDSPIVAYSILVIADIEKGKSKKLKTVKALVGVTIMEKMTFERDPVAFLERKGYRNVQEENIIKLPKYSLFKLENGRKRLLASARELQKGNEIVLPNHLGTLLYHAKNIHKVDEPKHLDYVDKHKDEFKELLDVVSNFSKKYTLAEGNLEKIKELYAQNNGEDLKELASSFINLLTFTAIGAPATFKFFDKNIDRKRYTSTTEILNATLIHQSITGLYETRIDLSKLGGD

SEQ ID NO: 494 - protein, 1345 aa, Streptococcus mutans; identical to SEQ ID NO: 493
  Streptococcus mutans A19

SEQ ID NO: 495 - protein, 1345 aa, Streptococcus mutans; identical to SEQ ID NO: 472
  Streptococcus mutans B

SEQ ID NO: 496 - protein, 1345 aa, Streptococcus mutans; identical to SEQ ID NO: 472
  Streptococcus mutans G123

SEQ ID NO: 497 - protein, 1345 aa, Streptococcus mutans
MKKPYSIGLDIGTNSVGWAVVTDDYKVPAKKMKVLGNTDKSHIKKNLLGALLFDSGNTAEDRRLKRTARRRYTRRRNRILYLQEIFSEEMGKVDDSFFHRLDESFLTDDDKNFDSHPIFGNKAEEDAYHQKFPTIYHLRKHLADSTEKADLRLVYLALAHMIKFRGHFLIEGELNAENTDVQKLFADFVGVYDRTFDDSHLSEITVDASSILTEKISKSRRLEKLINNYPKEKKNTLFGNLIALSLGLQPNFKTNFKLSEDAKLQFSKDTYEEELEVLLAQIGDNYAELFLSAKKLYDSILLSGILTVTDVSTKAPLSASMIQRYNEHQMDLAQLKQFIRQKLSDKYNEVFSDVSKDGYAGYIDGKTNQEAFYKYLKGLLNKIEGSGYFLDKIEREDFLRKQRTFDNGSIPHQIHLQEMRAIIRRQAEFYPFLADNQDRIEKILTFRIPYYVGPLARGKSDFAWLSRKSADKITPWNFDEIVDKESSVEAFINRMTNYDLYLPNQKVLPKHSLLYEKFTVYNELTKVKYKTEQGKTAFFDANMKQEIFDGVFKVYRKVTKDKLMDFLEKEFDEFRIVDLTGLDKENKAFNASYGTYHDLRKILDKDFLDNSKNEKILEDIVLTLTLFEDREMIRKRLKNYSDLLTKEQLKKLERRHYTGWGRLSAELIHGIRNKESRKTILDYLIDDGNSNRNFMQLINDDALSFKEEIAKAQVIGETDNLNQVVSDIAGSPAIKKGILQSLKIVDELVKIMGHQPENIVVEMARENQFTNQGRRNSQQRLKGLTDSIKEFGSQILKEHPVENSQLQNDRLFLYYLQNGRDMYTGEELDIDYLSQYDIDHIIPQAFIKDNSIDNRVLTSSKENRGKSDDVPSKDVVRKMKSYWSKLLSAKLITQRKFDNLTKGERGGLTDDDKAGFIKRQLVETRQITKHVARILDERFNTETDENNKKIRQVKIVTLKSNLVSNFRKEFELYKVREINDYHHAHDAYLNAVIGKALLGVYPQLEPEFVYGDYPHFHGHKENKATAKKFFYSNIMNFFKKDDVRTDKNGEIIWKKDEYISNIKKVLSYPQVNIVKKVEEQTGGFSKESILPKGDSDKLIPRKTKKFYWDTKKYGGFDSPIVAYSILVIADIEKGKSKKLKTVKALVGVTIMEKMTFERDPVAFLERKGYRNVQEENIIKLPKYSLFKLENGRKRLLASARELQKGNEIVLPNHLGTLLYHAKNIHKVDEPKHLDYVDKHKDEFKELLDVVSNFSKKYTLAEGNLEKIKELYAQNNGEDLKELASSFINLLTFTAIGAPATFKFFDKNIDRKRYTSTTEILNATLIHQSITGLYETRIDLSKLGGD

SEQ ID NO: 498 - protein, 1345 aa, Streptococcus mutans
MKKPYSIGLDIGTNSVGWAVVTDDYKVPDKKMKVLGNTDKSHIKKNLLGALLFDSGNTAEDRRLKRTARRRYTRRRNRILYLQEIFSEEMGKVDDSFFHRLEDSFLVTEDKRGERHPIFGNLEEEVKYHENFPTIYHLRQYLADNPEKTDLRLVYLALAHIIKFRGHFLIEGKFDTRNNDVQRLFQEFLAVYDNTFENSSLQEQNVQVEEILTDKISKSAKKDRVLKLFPNEKSNGRFAEFLKLIVGNQADFKKHFELEEKAPLQFSKDIYEEELEVLLAQIGDNYAELFLSAKKLYDSILLSGILTVTDVSTKAPLSASMIQRYNEHQMDLAQLKQFIRQKLSDKYNEVFSDVSKDGYAGYIDGKTNQEAFYKYLKGLLNKIEGSGYFLDKIEREDFLRKQRTFDNGSIPHQIHLQEMRAIIRRQAEFYPFLADNQDRIEKILTFRIPYYVGPLARGKSDFAWLSRKSADKITPWNFDEIVDKESSVEAFINRMTNYDLYLPNQKVLPKHSLLYEKFTVYNELTKVKYKTEQGKTAFFDANMKQEIFDGVFKVYRKVTKDKLMDFLEKEFDEFRIVDLTGLDKENKAFNASYGTYHDLRKILDKDFLDNSKNEKILEDIVLTLTLFEDREMIRKRLKNYSDLLTKEQLKKLERRHYTGWGRLSAELIHGIRNKESRKTILDYLIDDGNSNRNFMQLINDDALSFKEEIAKAQVIGETDNLNQVVSDIAGSPAIKKGILQSLKIVDELVKIMGHQPENIVVEMARENQFTNQGRRNSQQRLKGLTDSIKEFGSQILKEHPVENSQLQNDRLFLYYLQNGRDMYTGEELDIDYLSQYDIDHIIPQAFIKDNSIDNRVLTSSKENRGKSDDVPSKDVVRKMKSYWSKLLSAKLITQRKFDNLTKAERGGLTDDDKAGFIKRQLVETRQITKHVARILDERFYTETDENNKKIRQVKIVTLKSNLVSNFRKEFELYKVREINDYHHAHDAYLNAVIGKALLGVYPQLEPEFVYGDYPHFHGHKENKATAKKFFYSNIMNFFKKDDVRTDKNGEIIWKKDEHISNIKKVLSYPQVNIVKKVEEQTGGFSKESILPKGNSDKLIPRKTKKFYWDTKKYGGFDSPIVAYSILVIADIEKGKSKKLKTVKALVGVTIMEKMTFERDPVAFLERKGYRNVQEENIIKLPKYSLFKLENGRKRLLASARELQKGNEIVLPNHLGTLLYHAKNIHKVDEPKHLDYVDKHKDEFKELLDVVSNFSKKYTLAEGNLEKIKELYAQNNGEDLKELASSFINLLTFTAIGAPATFKFFDKNIDRKRYTSTTEILNATLIHQSITGLYETRIDLSKLGGD

SEQ ID NO: 499 - protein, 1345 aa, Streptococcus mutans
  Streptococcus mutans M21
MKKPYSIGLDIGTNSVGWAVVTDDYKVPAKKMKVLGNTDKSHIKKNLLGALLFDSGNTAEDRRLKRTARRRYTRRRNRILYLQEIFSEEMGKVDDSFFHRLEDSFLVTEDKRGERHPIFGNLEEEVKYHENFPTIYHLRQYLADNPEKTDLRLVYLALAHIIKFRGHFLIEGKFDTRNNDVQRLFQEFLAVYDNTFENSSLQEQNVQVEEILTDKISKSAKKDRVLKLFPNEKSNGRFAEFLKLIVGNQADFKKHFELEEKAPLQFSKDIYEEELEVLLAQIGDNYAELFLSAKKLYDSILLSGILTVTDVSTKAPLSASMIQRYNEHQMDLAQLKQFIRQKLSDKYNEVFSDVSKDGYAGYIDGKTNQEAFYKYLKGLLNKIEGSGYFLDKIEREDFLRKQRTFDNGSIPHQIHLQEMRAIIRRQAEFYPFLADNQDRIEKILTFRIPYYVGPLARGKSDFAWLSRKSADKITPWNFDEIVDKESSVEAFINRMTNYDLYLPNQKVLPKHSLLYEKFTVYNELTKVKYKTEQGKTAFFDANMKQEIFDGVFKVYRKVTKDKLMDFLEKEFDEFRIVDLTGLDKENKAFNASYGTYHDLRKILDKDFLDNSKNEKILEDIVLTLTLFEDREMIRKRLKNYSDLLTKEQLKKLERRHYTGWGRLSAELIHGIRNKESRKTILDYLIDDGNSNRNFMQLINDDALSFKEEIAKAQVIGETDNLNQVVSDIAGSPAIKKGILQSLKIVDELVKIMGHQPENIVVEMARENQFTNQGRRNSQQRLKGLTDSIKEFGSQILKEHPVENSQLQNDRLFLYYLQNGRDMYTGEELDIDYLSQYDIDHIIPQAFIKDNSIDNRVLTSSKENRGKSDDVPSKNVVRKMKSYWSKLLSAKLITQRKFDNLTKAERGGLTDDDKAGFIKRQLVETRQITKHVARILDERFHTETDENNKKIRQVKIVTLKSNLVSNFRKEFELYKVREINDYHHAHDAYLNAVIGKALLGVYPQLEPEFVYGDYPHFHGHKENKATAKKFFYSNIMNFFKKDDVRTDKNGEIIWKKDEHISNIKKVLSYPQVNIVKKVEEQTGGFSKESILPKGNSDKLIPRKTKKFYWDTKKYGGFDSPIVAYSILVIADIEKGKSKKLKTVKALVGVTIMEKMTFERDPVAFLERKGYRNVQEENIIKLPKYSLFKLENGRKRLLASARELQKGNEIVLPNHLGTLLYHAKNIHKVDEPKHLDYVDKHKDEFKELLDVVSNFSKKYTLAEGNLEKIKELYAQNNGEDLKELASSFINLLTFTAIGAPATFKFFDKNIDRKRYTSTTEILNATLIHQSITGLYETRIDLSKLGGD

SEQ ID NO: 500 - protein, 1345 aa, Streptococcus mutans; identical to SEQ ID NO: 499
  Streptococcus mutans M21

SEQ ID NO: 501 - protein, 1345 aa, Streptococcus mutans
  Streptococcus mutans M230
MKKPYSIGLDIGTNSVGWAVVTDDYKVPAKKMKVLGNTDKSHIKKNLLGALLFDSGNTAEDRRLKRTARRRYTRRRNRILYLQEIFSEEMGKVDDSFFHRLEDSFLVTEDKRGERHPIFGNLEEEVKYHENFPTIYHLRQYLADNPEKVDLRLVYLALAHIIKFRGHFLIEGKFDTRNNDVQRLFQEFLAVYDNTFENSSLQEQNVQVEEILTDKISKSAKKDRVLKLFPNEKSNGRFAEFLKLIVGNQADFKKHFELEEKAPLQFSKDTYEEELEVLLAQIGDNYAELFLSAKKLYDSILLSGILTVTDVSTKAPLSASMIQRYNEHQMDLAQLKQFIRQKLSDKYNEVFSDVSKDGYAGYIDGKTNQEAFYKYLKGLLNKIEGSGYFLDKIEREDFLRKQRTFDNGSIPHQIHLQEMRAIIRRQAEFYPFLADNQDRIEKILTFRIPYYVGPLARGKSDFAWLSRKSADKITPWNFDEIVDKESSAEAFINRMTNYDLYLPNQKVLPKHSLLYEKFTVYNELTKVKYKTEQGKTAFFDANMKQEIFDGVFKVYRKVTKDKLMDFLEKEFDEFRIVDLTGLDKENKVFNASYGTYHDLCKILDKDFLDNSKNEKILEDIVLTLTLFEDREMIRKRLENYSDLLTKEQVKKLERRHYTGWGRLSAELIHGIRNKESRKTILDYLIDDGNSNRNFMQLINDDALSFKEEIAKAQVIGETDNLNQVVSDIAGSPAIKKGILQSLKIVDELVKIMGHQPENIVVEMARENQFTNQGRQNSQQRLKGLTDSIKEFGSQILKEHPVENSQLQNDRLFLYYLQNGRDMYTGEELDIDYLSQYDIDHIIPQAFIKDNSIDNRVLTSSKENRGKSDDVPSEDVVRKMKSYWSKLLSAKLITQRKFDNLTKAERGGLTDDDKAGFIKRQLVETRQITKHVARILDERFYTETDENNKKIRQVKIVTLKSNLVSNFRKEFELYKVREINDYHHAHDAYLNAVIGKALLGVYPQLEPEFVYGDYPHFHGHKENKATAKKFFYSNIMNFFKKDDVRTDKNGEIIWKKDEHISNIKKVLSYPQVNIVKKVEEQTGGFSKESILPKGNSDKLIPRKTKKFYWDTKKYGGFDSPIVAYSILVIADIEKGKSKKLKTVKALVGVTIMEKMTFERDPVAFLERKGYRNVQEENIIKLPKYSLFKLENGRKRLLASARELQKGNEIVLPNHLGTLLYHAKNIHKVDEPKHLDYVDKHKDEFKELLDVVSNFSKKYTLAEGNLEKIKELYAQNNGEDLKELASSFINLLTFTAIGAPATFKFFDKNIDRKRYTSTTEILNATLIHQSITGLYETRIDLSKLGGD

SEQ ID NO: 502 - protein, 1345 aa, Streptococcus mutans; identical to SEQ ID NO: 501
  Streptococcus mutans M230

SEQ ID NO: 503 - protein, 1345 aa, Streptococcus mutans
  Streptococcus mutans M2A
MKKPYSIGLDIGTNSVGWAVVTDDYKVPAKKMKVLGNTDKSHIKKNLLGALLFDSGNTAEDRRLKRTARRRYTRRRNRILYLQEIFSEEMGKVDDSFFHRLEDSFLVTEDKRGERHPIFGNLEEEVKYHENFPTIYHLRQYLADNPEKTDLRLVYLALAHIIKFRGHFLIEGKFDTRNNDVQRLFQEFLAVYDNTFENSSLQEQNVQVEEILTDKISKSAKKDRVLKLFPNEKSNGRFAEFLKLIVGNQADFKKHFELEEKAPLQFSKDIYEEELEVLLAQIGDNYAELFLSAKKLYDSILLSGILTVTDVSTKAPLSASMIQRYNEHQMDLAQLKQFIRQKLSDKYNEVFSDVSKDGYAGYIDGKTNQEAFYKYLKGLLNKIEGSGYFLDKIEREDFLRKQRTFDNGSIPHQIHLQEMRAIIRRQAEFYPFLADNQDRIEKILTFRIPYYVGPLARGKSDFAWLSRKSADKITPWNFDEIVDKESSVEAFINRMTNYDLYLPNQKVLPKHSLLYEKFTVYNELTKVKYKTEQGKTAFFDANMKQEIFDGVFKVYRKVTKDKLMDFLEKEFDEFRIVDLTGLDKENKAFNASYGTYHDLRKILDKDFLDNSKNEKILEDIVLTLTLFEDREMIRKRLKNYSDLLTKEQLKKLERRHYTGWGRLSAELIHGIRNKESRKTILDYLIDDGNSNRNFMQLINDDALSFKEEIAKAQVIGETDNLNQVVSDIAGSPAIKKGILQSLKIVDELVKIMGHQPENIVVEMARENQFTNQGRRNSQQRLKGLTDSIKEFGSQILKEHPVENSQLQNDRLFLYYLQNGRDMYTGEELDIDYLSQYDIDHIIPQAFIKDNSIDNRVLTSSKENRGKSDDVPSKDVVRKMKSYWSKLLSAKLITQRKFDNLTKAERGGLTDDDKAGFIKRQLVETRQITKHVARILDERFNTETDENNKKIRQVKIVTLKSNLVSNFRKEFELYKVREINDYHHAHDAYLNAVIGKALLGVYPQLEPEFVYGDYPHFHGHKENKATAKKFFYSNIMNFFKKDDVRTDKNGEIIWKKDEHISNIKKVLSYPQVNIVKKVEEQTGGFSKESILPKGNSYKLIPRKTKKFYWDTKKYGGFDSPIVAYSILVIADIEKGKSKKLKTVKALVGVTIMEKMTFERDPVAFLERKGYRNVQEENIIKLPKYSLFKLENGRKRLLASARELQKGNEIVLPNHLGTLLYHAKNIHKVDEPKHLDYVDKHKDEFKELLDVVSNFSKKYTLAEGNLEKIKELYAQNNGEDLKELASSFINLLTFTAIGAPAAFKFFDKNIDRKRYTSTTEILNATLIHQSITGLYETRIDLSKLGGD

SEQ ID NO: 504 - protein, 1345 aa, Streptococcus mutans; identical to SEQ ID NO: 503
  Streptococcus mutans M2A

SEQ ID NO: 505 - protein, 1345 aa, Streptococcus mutans
  Streptococcus mutans N29
MKKPYSIGLDIGTNSVGWAVVTDDYKVPAKKMKVLGNTDKSHIKKNLLGALLFDSGNTAADRRLKRTARRRYTRRRNRILYLQEIFAEEMSKVDDSFFHRLEDSFLVTEDKRGERHPIFGNLEEEVKYHENFPTIYHLRQYLADNPEKVDLRLVYLALAHIIKFRGHFLIEGKFDTRNNDVQRLFQEFLAVYDNTFENSSLQEQNVQVEEILTDKISKSAKKDRVLKLFPNEKSNGRFAEFLKLIVGNQADFKKHFELEEKAPLQFSKDTYEEELEVLLAQIGDNYAELFLSAKKLYDSILLSGILTVTDVSTKAPLSASMIQRYNEHQMDLAQLKQFIRQKLSDKYNEVFSDVSKDGYAGYIDGKTNQEAFYKYLKGLLNKIEGSGYFLDKIEREDFLRKQRTFDNGSIPHQIHLQEMRAIIRRQAEFYPFLADNQDRIEKILTFRIPYYVGPLARGKSDFAWLSRKSADKITPWNFDEIVDKESSAEAFINRMTNYDLYLPNQKVLPKHSLLYEKFTVYNELTKVKYKTEQGKTAFFDANMKQEIFDGVFKVYRKVTKDKLMDFLEKEFDEFRIVDLTGLDKENKAFNASYGTYHDLRKILDKDFLDNSKNEKILEDIVLTLTLFEDREMIRKRLENYSDLLTKEQVKKLERRHYTGWGRLSAELIHGIRNKESRKTILDYLIDDGNSNRNFMQLINDDALSFKEEIAKAQVIGETDNLNQVVSDIAGSPAIKKGILQSLKIVDELVKIMGHQPENIVVEMARENQFTNQGRRNSQQRLKGLTDSIKEFGSQILKEHPVENSQLQNDRLFLYYLQNGRDMYTGEELDIDYLSQYDIDHIIPQAFIKDNSIDNRVLTSSKENRGKSDDVPSKNVVRKMKSYWSKLLSAKLITQRKFDNLTKAERGGLTDDDKAGFIKRQLVETRQITKHVARILDERFHTETDENNKKIRQVKIVTLKSNLVSNFRKEFELYKVREINDYHHAHDAYLNAVIGKALLGVYPQLEPEFVYGDYPHFHGHKENKATAKKFFYSNIMNFFKKDDVRTDKNGEIIWKKDEHISNIKKVLSYPQVNIVKKVEEQTGGFSKESILPKGNSDKLIPRKTKKFYWDTKKYGGFDSPIVAYSILVIADIEKGKSKKLKTVKALVGVTIMEKMTFERDPVAFLERKGYRNVQEENIIKLPKYSLFKLENGRKRLLASARELQKGNEIVLPNHLGTLLYHAKNIHKVDEPKHLDYVDKHKDEFKELLDVVSNFSKKYTLAEGNLEKIKELYAQNNGEDLKELSSSFINLLTFTAIGAPAAFKFFDKNIDRKRYTSTTEILNATLIHQSITGLYETRIDLSKLGGD

SEQ ID NO: 506 - protein, 1345 aa, Streptococcus mutans; identical to SEQ ID NO: 505
  Streptococcus mutans N29

SEQ ID NO: 507 - protein, 1345 aa, Streptococcus mutans
  Streptococcus mutans N3209
MKKPYSIGLDIGTNSVGWAVVTDDYKVPAKKMKVLGNTDKSHIKKNLLGALLFDSGNTAEDRRLKRTTRRRYTRRRNRILYLQEIFSEEMGKVDDSFFHRLEDSFLVTEDKRGERHPIFGNLEEEVKYHENFPTIYHLRQYLADNPEKTDLRLVYLALAHIIKFRGHFLIEGKFDTRNNDVQRLFQEFLAVYDNTFENSSLQEQNVQVEEILTDKISKSAKKDRVLKLFPNEKSNGCFAEFLKLIVGNQADFKKHFELEEKAPLQFSKDTYEEELEVLLAQIGDNYAELFLSAKKLYDSILLSGILTVTDVSTKAPLSASMIQRYNEHQMDLTQLKQFIRQKLSDKYNEVFSDVSKDGYAGYIDGKTNQEAFYKYLKGLLNKIEGSGYFLDKIEREDFLRKQRTFDNGSIPHQIHLQEMRAIIRRQAEFYPFLADNQDRIEKLLTFRIPYYVGPLASGKSDFAWLSRKSADKITPWNFDEIVDKESSAEAFINRMTNYDLYLPNQKVLPKHSLLYEKFTVYNELTKVKYKTEQGKTAFFDANMKQEIFDGVFKVYRKVTKDKLMDFLEKEFDEFRIVDLTGLDKENKVFNASYGTYHDLCKILDKDFLDNSKNEKILEDIVLTLTLFEDREMIRKRLENYSDLLTKEQVKKLERRHYTGWGRLSAELIHGIRNKESRKTILDYLIDDGNSNRNFMQLINDDALSFKEEIAKAQVIGETDNLNQVVSDIAGSPAIKKGILQSLKIVDELVKIMGHQPENIVVEMARENQFTNQGRRNSQQRLKGLTDSIKEFGSQILKEHPVENSQLQNDRLFLYYLQNGRDMYTGEELDIDYLSQYDIDHIIPQAFIKDNSIDNRVLTSSKENRGKSDDVPSKDVVRKMKSYWSKLLSAKLITQRKFDNLTKAERGGLTDDDKAGFIKRQLVETRQITKHVARILDERFNTETDENNKKIRQVKIVTLKSNLVSNFRKEFELYKVREINDYHHAHDAYLNAVIGKALLGVYPQLEPEFVYGDYPHFHGHKENKATAKKFFYSNIMNFFKKDDVRTDKNGEIIWKKDEHISNIKKVLSYPQVNIVKKVEEQTGGFSKESILPKGNSDKLIPRKTKKFYWDTKKYGGFDSPIVAYSILVIADIEKGKSKKLKTVKALVGVTIMEKMTFERDPVAFLERKGYRNVQEENIIKLPKYSLFKLENGRKRLLASARELQKGNEIVLPNHLGTLLYHAKNIHKVDEPKHLDYVDKHKDEFKELLDVVSNFSKKYTLAEGNLEKIKELYAQNNGEDLKELASSFINLLTFTAIGAPATFKFFDKNIDRKRYTSTTEILNATLIHQSITGLYETRIDLSKLGGD

SEQ ID NO: 508 - protein, 1345 aa, Streptococcus mutans; identical to SEQ ID NO: 507
  Streptococcus mutans N3209

SEQ ID NO: 509 - protein, 1345 aa, Streptococcus mutans
  Streptococcus mutans N66
MKKPYSIGLDIGTNSVGWAVVTDDYKVPAKKMKVLGNTDKSHIKKNLLGALLFDSGNTAEDRRLKRTARRRYTRRRNRILYLQEIFSEEMGKVDDSFFHRLEDSFLVTEDKRGERHPIFGNLEEEVKYHENFPTIYHLRQYLADNPEKTDLRLVYLALAHIIKFRGHFLIEGKFDTRNNDVQRLFQEFLAVYDNTFENSSLQEQNVQVEEILTDKISKSAKKDRVLKLFPNEKSNGRFAEFLKLIVGNQADFKKHFELEEKAPLQFSKDIYEEELEVLLAQIGDNYAELFLSAKKLYDSILLSGILTVTDVSTKAPLSASMIQRYNEHQMDLAQLKQFIRQKLSDKYNEVFSDVSKDGYAGYIDGKTNQEAFYKYLKGLLNKIEGSGYFLDKIEREDFLRKQRTFDNGSIPHQIHLQEMRAIIRRQAEFYPFLADNQDRIEKILTFRIPYYVGPLARGKSDFAWLSRKSADKITPWNFDEIVDKESSAEAFINRMTNYDLYLPNQKVLPKHSLLYEKFTVYNELTKVKYKTEQGKTAFFDANMKQEIFDGVFKVYRKVTKDKLMDFLEKEFDEFRIVDLTGLDKENKAFNASYGTYHDLRKILDKDFLDNSKNEKILEDIVLTLTLFEDREMIRKRLKNYSDLLTKEQLKKLERRHYTGWGRLSAELIHGIRNKESRKTILDYLIDDGNSNRNFMQLINDDALSFKEEIAKAQVIGETDNLNQVVSDIAGSLAIKKGILQSLKIVDELVKIMGHQPENIVVEMARENQFTNQGRRNSQQRLKGLTDSIKEFGSQILKEHPVENSQLQNDRLFLYYLQNGRDMYTGEELDIDYLSQYDIDHIIPQAFIKDNSIDNRVLTSSKENRGKSDDVPSKDVVRKMKSYWSKLLSAKLITQRKFDNLTKGERGGLTDDDKAGFIKRQLVETRQITKHVARILDERFNTETDENNKKIRQVKIVTLKSNLVSNFRKEFELYKVREINDYHHAHDAYLNAVIGKALLGVYPQLEPEFVYGDYPHFHGHKENKATAKKFFYSNIMNFFKKDDVRTDKNGEIIWKKDEYISNIKKVLSYPQVNIVKKVEEQTGGFFKESILPKGDSDKLIPRKTKKFYWDTKKYGGFDSPIVAYSILVIADIEKGKSKKLKTVKALVGVTIMEKMTFERDPVAFLERKGYRNVQEENIIKLPKYSLFKLENGRKRLLASARELQKGNEIVLPNHLGTLLYHAKNIHKVDEPKHLDYVDKHKDEFKELLDVVSNFSKKYTLAEGNLEKIKELYAQNNGEDLKELASSFINLLTFTAIGAPATFKFFDKNIDRKRYTSTTEILNATLIHQSITGLYETRIDLSKLGGD

SEQ ID NO: 510 - protein, 1345 aa, Streptococcus mutans; identical to SEQ ID NO: 509
  Streptococcus mutans N66

SEQ ID NO: 511 - protein, 1350 aa, Streptococcus mutans
  Streptococcus mutans NFSM1
MKKPYSIGLDIGTNSVGWAVVTDDYKVPAKKMTVLGNTDKSHIKKNLLGALLFDSGNTAADRRLKRTARRRYTRRRNRILYLQEIFAEEMSKVDDSFFHRLEDSFLVTEDKRGERHPIFGNLEEEVKYHENFPTIYHLRQYLADNPEKVDLRLVYLALAHIIKFRGHFLIEGKFDTRNNDVQRLFQEFLAVYDNTFENSSLQEQNVQVEEILTDKISKSAKKDRVLKLFPNEKSNGRFAEFLKLIVGNQADFKKHFELEEKTPLQFSKDTYEEELEVLLAQIGDNYAELFLSAKKLYDSILLSGILTVTDVSTKAPLSASMIQRYNEHQMDLAQLKQFIRQKLSDKYNEVFSDVSKDGYAGYIDGKTNQEAFYKYLKGLLNKIEGSGYFLDKIEREDFLRKQRTFDNGSIPHQIHLQEMRAIIRRQAEFYPFLADNQDRIEKILTFRIPYYVGPLARGKSDFAWLSRKSADKITPWNFDEIVDKESSAEAFINRMTNYDLYLPNQKVLPKHSLLYEKFTVYNELTKVKYKTEQGKTAFFDANMKQEIFDGVFKVYRKVTKDKLMDFLEKEFDEFRIVDLTGLDKENKAFNASYGTYHDLRKILDKDFLDNSKNEKILEDIVLTLTLFEDREMIRKRLENYSDLLTKEQVKKLERRHYTGWGRLSAELIHGIRNKESRKTILDYLIDDGNSNRNFMQLINDDALSFKEEIAKAQVIGETDNLNQVVSDIAGSPAIKKGILQSLKIVDELVKIMGHQPENIVVEMARENQFTNQGRRNSQQRLKGLTDSIKEFGSQILKEHPVENSQLQNDRLFLYYLQNGRDMYTGEELDIDYLSQYDIDHIIPQAFIKDNSIDNRVLTSSKENRGKSDDVPSEDVVNRMRPFWNKLLSSGLISQRKYNNLTKKELTPDDKAGFIKRQLVETRQITKHVARMLDERFNKEFDDNNKRIRRVKIVTLKSNLVSSFRKEFELYKVREINDYHHAHDAYLNAVVVKALLVKYPKLEPEFVYGEYPKYNSYRERKTATQKMFFYSNIMNMFKSKVKLADDQIVERPMIEVNDETGEIAWDKTKHITTVKKVLSYPQVNIVKKVEEQTIGQNGGLFDDNPKSPLEVIPSKLVPLKKALNPEKYGGYQKPTTAYPILLIVDTKQLIPISVMDKKRFEQNPVKFLKDKGYQQIEKNNFVKLPKYTLVDIGNGIKRLWASSKEVHKGNQLVVSKKSQDLLYHAHHLDNDYSNEYVKNHYQQFDILFNEITSFSKKCKLGKEHIQKIEEAYSKERDSASIEELADGFIKLLGFTQLGATSPFSFLGIKLNQKQYTGKKDYLLPCMEATLIHQSITGLYETRIDLSKLGGD

SEQ ID NO: 512 - protein, 1350 aa, Streptococcus mutans; identical to SEQ ID NO: 511
  Streptococcus mutans NFSM1

SEQ ID NO: 513 - protein, 1345 aa, Streptococcus mutans; identical to SEQ ID NO: 485
  Streptococcus mutans NLML1

SEQ ID NO: 514 - protein, 1338 aa, Streptococcus mutans
  Streptococcus mutans NLML4
MDLIGTNSVGWAVVTDDYKVPAKKMKVLGNTDKSHIKKNLLGALLFDSGNTAADRRLKRTARRRYTRRRNRILYLQEIFAEEMSKVDDSFFHRLEDSFLVTEDKRGERHPIFGNLEEEVKYHENFPTIYHLRQYLADNPEKVDLRLVYLALAHIIKFRGHFLIEGKFDTRNNDVQRLFQEFLAVYDNTFENSSLQEQNVQVEEILTDKISKSAKKDRVLKLFPNEKSNGRFAEFLKLIVGNQADFKKHFELEEKAPLQFSKDTYEEELEVLLAQIGDNYAELFLSAKKLYDSILLSGILTVTDVSTKAPLSASMIQRYNEHQMDLAQLKQFIRQKLSDKYNEVFSDVSKDGYAGYIDGKTNQEAFYKYLKGLLNKIEGSGYFLDKIEREDFLRKQRTFDNGSIPHQIHLQEMRAIIRRQAEFYPFLADNQDRIEKILTFRIPYYVGPLARGKSDFAWLSRKSADKITPWNFDEIVDKESSAEAFINRMTNYDLYLPNQKVLPKHSLLYEKFTVYNELTKVKYKTEQGKTAFFDANMKQEIFDGVFKVYRKVTKDKLMDFLEKEFDEFRIVDLTGLDKENKAFNASYGTYHDLRKILDKDFLDNSKNEKILEDIVLTLTLFEDREMIRKRLENYSDLLTKEQVKKLERRHYTGWGRLSAELIHGIRNKESRKTILDYLIDDGNSNRNFMQLINDDALSFKEEIAKAQVIGETDNLNQVVSDIAGSPAIKKGILQSLKIVDELVKIMGHQPENIVVEMARENQFTNQGRRNSQQRLKGLTDSIKEFGSQILKEHPVEHSQLQNDRLFLYYLQNGRDMYTGEELDIDYLSQYDIDHIIPQAFIKDNSIDNRVLTSSKENRGKSDDVPSKNVVRKMKSYWSKLLSAKLITQRKFDNLTKAERGGLTDDDKAGFIKRQLVETRQITKHVARILDERFHTETDENNKKIRQVKIVTLKSNLVSNFRKEFELYKVREINDYHHAHDAYLNAVIGKALLGVYPQLEPEFVYGDYPHFHGHKENKATAKKFFYSNIMNFFKKDDVRTDKNGEIIWKKDEHISNIKKVLSYPQVNIVKKVEEQTGGFSKESILPKGNSDKLIPRKTKKFYWDTKKYGGFDSPIVAYSILVIADIEKGKSKKLKTVKALVGVTIMEKMTFERDPVAFLERKGYRNVQEENIIKLPKYSLFKLENGRKRLLASARELQKGNEIVLPNHLGTLLYHAKNIHKVDEPKHLDYVDKHKDEFKELLDVVSNFSKKYTLAEGNLEKIKELYAQNNGEDLKELASSFINLLTFTAIGAPATFKFFDKNIDRKRYTSTTEILNATLIHQSITGLYETRIDLSKLGGD

SEQ ID NO: 515 - protein, 1338 aa, Streptococcus mutans; identical to SEQ ID NO: 514
  Streptococcus mutans NLML4

SEQ ID NO: 516 - protein, 1128 aa, Streptococcus mutans
  Streptococcus mutans NLML5
MANSKILGLDIGIASVGVGIIDKETGKIIHVNSRIFPAATADSNVERRGFRQGRRLVRRKKHRKVRLADLFLDSNLLTDFSKVSLNLNPYQLRVKGLNEELSNEELFIALKSIVSRRGISYLDDASEDSGANSSEYGKAVEENRKLLEDRTPGQIQLERFEKYGKVRGDFTVVENGENHRLINVFSTSAYKKEAERILRRQQEFNIRIADEFIEAYLTILTGKRKYYHGPGNEKSRTDYGRFRTDGTTLDNIFGILIGKCTFYPDEYRAAKASYTAQEFNLLNDLNNLTVPTETKKLSEEQKRQIIEHAKTVKTLGAPTLLKYIAKLVGCSADDIKGYRIDKSDKPEIHTFEAYRKMRTMELIKVADLSRESLDALAHILTLNTEREGIEEAIRDRFTNKEFNQEQINELVLFRKNNSSLFGKGWHNFSLKLMKELIPELYETSEEQMTILTRLGKQRVKKSSNRTNYIDEKELTEEIYNPVVAKSVRQAIKIINLATKKYGVFDNIVIEMARESNEDDEKKAIQNAQKANEDEKEAALLKAAHQFNGKEELPDSIFHGHKELLTKIRLWHQQGEKCLYTGKTIFINDLIHNPYKYEIDHILPLSLSFDDSLANKVLVLSTANQEKGQRTPFQSLDSMDGAWTYREFKAYVKGLKTLSNKKKDYLLNEEDINKNEVKQKFIERNLVDTRYSSRVVLNTLQDFYKKREFDTKISVVRGQFTSQIRRKWRIEKTRETYHHHAVDALIIAASSQLNLWKKQNNPLISYKEDQFVDPETGEILSLSDDEYKELVFKAPYDHFVDTLKSKKFEDSILFSYQVDSKYNRKISDATIYGTRKARLGKDSQEETYVLGKIKDIYSQKGYEDFIKKYKKDKTQFLMYHKDPQTFEKVIEEILKTYSDKELNEKGKEVPCNPFEKYRQENGPVRKYSKKGNGPEIKSIKYYDNKLGNHIDITPNNSHHQVVLQSLKPWRTDVYFNPKSGKYELMGLKYSDLRFEKVSGDYGISVKKYNEIKSKEGVDENSEFKFTLYKNDLILIKDTESGEQELFRFLSRTMPNQKHYVELKPYDKSKFEGHQKLMDIFGEVAKGGQCLKGLNKSNISIYKVKTDVLGNKYFIKKEGDQPQLNFKKKI

SEQ ID NO: 517 - protein, 1128 aa, Streptococcus mutans; identical to SEQ ID NO: 516
  Streptococcus mutans NLML5

SEQ ID NO: 518 - protein, 1125 aa, Streptococcus mutans
  Streptococcus mutans NLML8
MTNGKILGLDIGIASVGVGIINAKTGNVEHASSRIFPAANADNNVERRSARGGRRLIRRKKHRLKRVEDLFEKYNIDTDFSNLNLNPYQLRVKGLNEQLSNEELFAILKNIAKRRGISYLDDAEDDSVGSSDYAKAIDENRKLLKKQTPGEIQLKRLEKYGQLRGNFTIQDENGEYHRLINVFSTSDYVKEARRILETQSYYNKFITESFVEDYIKILQGKRKYYVGPGNEKSRTDYGIYRTDGETLDNLFGILIGKCGFYPEEYRAAKASYTAQEYNFLNDLNNLTVPTETKKLSTEQKYQLVDFAKTASTLEAAKLLKEIAKLVGCQVEEIKGYRLDNKDKPDLHTFEPFRKLKSNLTTIAVENLSITTLDTLAHILTLNTEREGIEEAIQKELPNIFSDEQITGIIAVRKKNSQIFGKGWHSFSIKLMKELIPELYETSEEQMTILIRLKKVKTNSKITNRTKYINEQEVTDEIYNPVVSKSIRQTVKIINAAIKKYGAFDQIVIEMPRESNEEDERKFIADLQKSNAKEKDDAMKQAALLYNGKAELPHGVFHGHKELATKIRLWYQQGERCLYSGKHIDIHDLIHNQHMFEIDHVLPLSLSFDDSLANKVLVYSWANQEKGQRTPFQALPQMASAWSFRELRDYISKQKGISKKKRDYLLTEQDINKVEVKQKFIERNLVDTRYVSRVVLNTLQDALKVMNKETKISVIRGQFTSQLRRQWRIDKSRETYHHHAVDALIIAASSQLRLWKKQNNPMFAEDKHGQKINLDTGEVLSDDAYKELVYQAPYQGFVNTISSKSFEDEILFSYQVDSKVNRKISDATIYATRQAQLGKDKKEETYVLGKIKDIYSQAGYDAFRKKYDKDKAVFLMYQKDPETWEKVIEVILRDYKELDDKGKEIGNPFERYKVKHGFVRKYSRKNKGTEIKSLKYYDNKLGNHIDITPNNSKHSVVLQSINPWRADLYFNPETTKYELMGLKYADLSFEKGTGKYSISREKYDEIKEREGISSKSEFKFTLYKNDLILVKDIGNHKELIARFNSKNDTSKHYVELKPWNKAKFDSEEELIPAFGKVAKSGQFIKGLNKPDLSIYKVKTDILGHKYYIKKEGDKPKLNFENKIKNK

SEQ ID NO: 519 - protein, 1125 aa, Streptococcus mutans; identical to SEQ ID NO: 518
  Streptococcus mutans NLML8

SEQ ID NO: 520 - protein, 1345 aa, Streptococcus mutans
  Streptococcus mutans NLML9
MKKPYSIGLDIGTNSVGWAVVTDDYKVSAKKMKVLGNTDKSHIKKNLLGALLFDSGNTAEDRRLKRTARRRYTRRRNRILYLQEIFAEEMSKVDDSFFHRLEDSFLVTEDKRGERHPIFGNLEEEVKYHENFPTIYHLRQYLADNPEKVDLRLVYLALAHIIKFRGHFLIEGKFDTRNNDVQRLFQEFLAVYDNTFENSSLQEQNVQVEEILTDKISKSAKKDRVLKLFPNEKSNGRFAEFLKLIVGNQADFKKHFELEEKAPLQFSKDTYEEELEVLLAQIGDNYAELFLSAKKLYDSILLSGILTVTDVSTKAPLSASMIQRYNEHQMDLAQLKQFIRQKLSDKYNEVFSDVSKDGYAGYIDGKTNQEAFYKYLKGLLNKIEGSGYFLDKIEREDFLRKQRTFDNGSIPHQIHLQEMRAIIRRQAEFYPFLADNQDRIEKILTFRIPYYVGPLARGKSDFAWLSRKSADKITPWNFDEIVDKESSAEAFINRMTNYDLYLPNQKVLPKHSLLYEKFTVYNELTKVKYKTEQGKTAFFDANMKQEIFDGVFKVYRKVTKDKLMDFLEKEFDEFRIVDLTGLDKENKAFNASYGTYHDLRKILDKDFLDNSKNEKILEDIVLTLTLFEDREMIRKRLENYSDLLTKEQVKKLERRHYTGWGRLSAELIHGIRNKESRKTILDYLIDDGNSNRNFMQLINDDALSFKEEIAKAQVIGETDNLNQVVSDIAGSPAIKKGILQSLKIVDELVKIMGHQPENIVVEMARENQFTNQGRRNSQQRLKGLTDSIKEFGSQILKEHPVEHSQLQNDRLFLYYLQNGRDMYTGEELDIDYLSQYDIDHIIPQAFIKDNSIDNRVLTSSKENRGKSDDVPSKNVVRKMKSYWSKLLSAKLITQRKFDNLTKAERGGLTDDDKAGFIKRQLVETRQITKHVARILDERFHTETDENNKKIRQVKIVTLKSNLVSNFRKEFELYKVREINDYHHTHDAYLNAVIGKALLGVYPQLEPEFVYGDYPHFHGHKENKATAKKFFYSNIMNFFKKDDVRTDKNGEIIWKKDEHISNIKKVLSYPQVNIVKKVEEQTGGFSKESILPKGNSDKLIPRKTKKFYWDTKKYGGFDSPIVAYSILVIADIEKGKSKKLKTVKALVGVTIMEKMTFERDPVAFLERKGYRNVQEENIIKLPKYSLFKLENGRKRLLASARELQKGNEIVLPNHLGTLLYHAKNIHKVDEPKHLDYVDKHKDEFKELLDVVSNFSKKYTLAEGNLEKIKELYAQNNGEDLKELASSFINLLTFTAIGAPATFKFFDKNIDRKRYTSTTEILNATLIHQSITGLYETRIDLSKLGGD

SEQ ID NO: 521 - protein, 1345 aa, Streptococcus mutans; identical to SEQ ID NO: 520
  Streptococcus mutans NLML9

SEQ ID NO: 522 - protein, 1355 aa, Streptococcus mutans
  Streptococcus mutans NMT4863
MKKPYSIGLDIGTNSVGWAVVTDDYKVPAKKMKVLGNTDKSHIKKNLLGALLFDSGNTAEDRRLKRTARRRYTRRRNRILYLQEIFAEEMSKVDDSFFHRLDESFLTDDDKNFDSHPIFGNKAEEDAYHQKFPTIYHLRKHLADSTEKADLRLVYLALAHMIKFRGHFLIEGELNAENTDVQKLFADFVGVYDRTFDDSHLSEITVDASSILTEKISKSRRLEKLINNYPKEKKNTLFGNLIALSLGLQPNFKTNFKLSEDAKLQFSKDTYEEDLEELLGKIGDDYADLFTLAKNLYDAILLSGILTADDSSTKAPLSASMIKRYAEHHEDLEKLKEFIKANKPELYHDIFKDETKNGYAGYIENGVKQDEFYKYLKNTLSKITGSDYFLDQIEREDFLRKQRTFDNGSIPHQIHLQEMHAILRRQGDYYPFLKENQDRIEKILTFRIPYYVGPLARKNSRFAWAEYHSDEAVTPWNFDQVIDKESSAQAFIEHMTNNDLYLPNEKVLPKHSPLYEKYTVYNELTKIKYVTEIGEAKFFDANLKQEIFDGLFKHERKVTKKKLRTFLDKNFDEFRIVDIQGLDKETETFNASYATYQDLLKVIKDKVFMDNPENAEILENIVLTLTLFEDREMIKQRLAKYADVFDKKVIDQLARRHYTGWGRLSAKLLNGIRDKQSCKTIMDYLIDDAQSNRNLMQLITDDNLTFKDDIVKAQYVDNSDDLHQVVQSLAGSPAIKKGILQSLKIVDELVKVMGKEPEQIVVEMARENQTTAKGRRNSQQRYKRLKEAIKSLDRDLNHKILKEHPTDNQALQNNRLFLYYLQNGRDMYTGESLDINRLSDYDIDHVIPQAFIKDNSIDNRVLTSSKANRGKSDDVPSEDVVNRMRPFWNKLLSSGLISQRKYNNLTKKELTLDDKAGFIKRQLVETRQITKHVARMLDERFNKEFDDNNKRIRRVKIVTLKSNLVSSFRKEFELYKVREINDYHHAHDAYLNAVVVKALLVKYPKLEPEFVYGEYPKYNSYRERKTATQKMFFYSNIMNMFKSKVKLADDQIVERPMIEVNDETGEIAWDKTKHITTVKKVLSYPQVNIVKKVEEQTIGQNGGLFDDNPKSPLEVIPSKLVPLKKALNPEKYGGYQKPTTAYPILLIVDTKQLIPISVMDKKRFEQNPVKFLKDKGYQQIEKNNFVKLPKYTLVDIGNGIKRLWASSKEVHKGNQLVVSKKSQDLLYHAHHLDNDYSNEYVKNHYQQFDILFNEITSFSKKCKLGKEHIQKIEEAYSKERDFASIEELADGFIKLLGFTQLGATSPFSFLGIKLNQKQYTGKKDYLLPCMEATLIHQSITGLYETRIDLSKLGGD

SEQ ID NO: 523 - protein, 1355 aa, Streptococcus mutans; identical to SEQ ID NO: 522
  Streptococcus mutans NMT4863

SEQ ID NO: 524 - protein, 1345 aa, Streptococcus mutans
MKKPYSIGLDIGTNSVGWAVVTDDYKVPAKKMKVLGNTDKSHIKKNLLGALLFDSGNTAADRRLKRTARRRYTRRRNRILYLQEIFAEEMSKVDDSFFHRLEDSFLVTEDKRGERHPIFGNLEEEVKYHENFPTIYHLRQYLADNPEKVDLRLVYLALAHIIKFRGHFLIEGKFDTRNNDVQRLFQEFLAVYDNTFENSSLQEQNVQVEEILTDKISKSAKKDRVLKLFPNEKSNGRFAEFLKLIVGNQADFKKHFELEEKAPLQFSKDTYEEELEVLLAQIGDNYAELFLSAKKLYDSILLSGILTVTDVSTKAPLSASMIQRYNEHQMDLAQLKQFIRQKLSDKYNEVFSDVSKDGYAGYIDGKTNQEAFYKYLKGLLNKIEGSGYFLDKIEREDFLRKQRTFDNGSIPHQIHLQEMRAIIRRQAEFYPFLADNQDRIEKILTFRIPYYVGPLARGKSDFAWLSRKSADKITPWNFDEIVDKESSAEAFINRMTNYDLYLPNQKVLPKHSLLYEKFTVYNELTKVKYKTEQGKTAFFDANMKQEIFDGVFKVYRKVTKDKLMDFLEKEFDEFRIVDLTGLDKENKAFNASYGTYHDLRKILDKDFLDNSKNEKILEDIVLTLTLFEDREMIRKRLENYSDLLTKEQVKKLERRHYTGWGRLSAELIHGIRNKESRKTILDYLIDDGNSNRNFMQLINDDALSFKEEIAKAQVIGETDNLNQVVSDIAGSPAIKKGILQSLKIVDELVKIMGHQPENIVVEMARENQFTNQGRRNSQQRLKGLTDSIKEFGSQILKEHPVKHSQLQNDRLFLYYLQNGRDMYTGEELDIDYLSQYDIDHIIPQAFIKDNSIDNRVLTSSKENRGKSDDVPSKNVVRKMKSYWSKLLSAKLITQRKFDNLTKAERGGLTDDDKAGFIKRQLVETRQITKHVARILDERFHTETDENNKKIRQVKIVTLKSNLVSNFRKEFELYKVREINDYHHAHDAYLNAVIGKALLGVYPQLEPEFVYGDYPHFHGHKENKATAKKFFYSNIMNFFKKDDVRTDKNGEIIWKKDEHISNIKKVLSYPQVNIVKKVEEQTGGFSKESILPKGNSDKLIPRKTKKFYWDTKKYGGFDSPIVAYSILVIADIEKGKSKKLKTVKALVGVTIMEKMTFERDPVAFLERKGYRNVQEENIIKLPKYSLFKLENGRKRLLASARELQKGNEIVLPNHLGTLLYHAKNIHKVDEPKHLDYVDKHKDEFKELLDVVSNFSKKYTLAEGNLEKIKELYAQNNGEDLKELASSFINLLTFTAIGAPATFKFFDKNIDRKRYTSTTEILNATLIHQSITGLYETRIDLSKLGGD

SEQ ID NO: 525 - protein, 1345 aa, Streptococcus mutans; identical to SEQ ID NO: 471
  Streptococcus mutans NV1996

SEQ ID NO: 526 - protein, 1345 aa, Streptococcus mutans
  Streptococcus mutans NVAB
MKKPYSIGLDIGTNSVGWAVVTDDYKVPAKKMKVLGNTDKSHIKKNLLGALLFDSGNTAADRRLKRTARRRYTRRRNRILYLQEIFAEEMSKVDDSFFHRLEDSFLVTEDKRGERHPIFGNLEEEVKYHENFPTIYHLRQYLADNPEKVDLRLVYLALAHIIKFRGHFLIEGKFDTRNNDVQRLFQEFLAVYDNTFENSSLQEQNVQVEEILTDKISKSAKKDRVLKLFPNEKSNGRFAEFLKLIVGNQADFKKHFELEEKAPLQFSKDTYEEELEVLLAQIGDNYAELFLSAKKLYDSILLSGILTVTDVSTKAPLSASMIQRYNEHQMDLAQLKQFIRQKLSDKYNEVFSDVSKDGYAGYIDGKTNQEAFYKYLKGLLNKIEGSGYFLDKIEREDFLRKQRTFDNGSIPHQIHLQEMRAIIRRQAEFYPFLADNQDRIEKILTFRIPYYVGPLARGKSDFAWLSRKSADKITPWNFDEIVDKESSAEAFINRMTNYDLYLPNQKVLPKHSLLYEKFTVYNELTKVKYKTEQGKTAFFDANMKQEIFDGVFKVYRKVTKDKLMDFLEKEFDEFRIVDLTGLDKENKVFNASYGTYHDLCKILDKDFLDNSKNEKILEDIVLTLTLFEDREMIRKRLENYSDLLTKEQVKKLERRHYTGWGRLSAELIHGIRNKESRKTILDYLIDDGNSNRNFMQLINDDALSFKEEIAKAQVIGETDNLNQVVSDIAGSPAIKKGILQSLKIVDELVKIMGHQPENIVVEMARENQFTKQGRRNSQQRLKGLTDSIKEFGSQILKEHPVENSQLQNDRLFLYYLQNGRDMYTGEELDIDYLSQYDIDHIIPQAFIKDNSIDNRVLTSSKENRGKSDDVPSKDVVRKMKSYWSKLLSAKLITQRKFDNLTKAERGGLTDDDKAGFIKRQLVETRQITKHVARILDERFYTETDENNKKIRQVKIVTLKSNLVSNFRKEFELYKVREINDYHHAHDAYLNAVIGKALLGVYPQLEPEFVYGDYPHFHGHKENKATAKKFFYSNIMNFFKKDDVRTDKNGEIIWKKDEHISNIKKVLSYPQVNIVKKVEEQTGGFSKESILPKGNSDKLIPRKTKKFYWDTKKYGGFDSPIVAYSILVIADIEKGKSKKLKTVKALVGVTIMEKMTFERDPVAFLERKGYRNVQEENIIKLPKYSLFKLENGRKRLLASARELQKGNEIVLPNHLGTLLYHAKNIHKVDEPKHLDYVDKHKDEFKELLDVVSNFSKKYTLAEGNLEKIKELYAQNNGEDLKELASSFINLLTFTAIGAPATFKFFDKNIDRKRYTSTTEILNATLIHQSITGLYETRIDLSKLGGD

SEQ ID NO: 527 - protein, 1345 aa, Streptococcus mutans; identical to SEQ ID NO: 526
  Streptococcus mutans NVAB

SEQ ID NO: 528 - protein, 1345 aa, Streptococcus mutans
  Streptococcus mutans R221
MKKPYSIGLDIGTNSVGWAVVTDDYKVPAKKMKVLGNTDKSHIKKNLLGALLFDSGNTAEDRRLKRTARRRYTRRRNRILYLQEIFSEEMGKVDDSFFHRLEDSFLVTEDKRGERHPIFGNLEEEVKYHENFPTIYHLRQYLADNPEKTDLRLVYLALAHIIKFRGHFLIEGKFDTRNNDVQRLFQEFLAVYDNTFENSSLQEQNVQVEEILTDKISKSAKKDRVLKLFPNEKSNGRFAEFLKLIVGNQADFKKHFELEEKAPLQFSKDIYEEELEVLLAQIGDNYAELFLSAKKLYDSILLSGILTVTDVSTKAPLSASMIQRYNEHQMDLAQLKQFIRQKLSDKYNEVFSDVSKDGYAGYIDGKTNQEAFYKYLKGLLNKIEGSGYFLDKIEREDFLRKQRTFDNGSIPHQIHLQEMRAIIRRQAEFYPFLADNQDRIEKILTFRIPYYVGPLARGKSDFAWLSRKSADKITPWNFDEIVDKESSVEAFINRMTNYDLYLPNQKVLPKHSLLYEKFTVYNELTKVKYKTEQGKTAFFDANMKQEIFDGVFKVYRKVTKDKLMDFLEKEFDEFRIVDLTGLDKENKAFNASYGTYHDLRKILDKDFLDNSKNEKILEDIVLTLTLFEDREMIRKRLKNYSDLLTKEQLKKLERRHYTGWGRLSAELIHGIRNKESRKTILDYLIDDGNSNRNFMQLINDDALSFKEEIAKAQVIGETDNLNQVVSDIAGSPAIKKGILQSLKIVDELVKIMGHQPENIVVEMARENQFTNQGRRNSQQRLKGLTDSIKEFGSQILKEHPVENSQLQNDRLFLYYLQNGRDMYTGEELDIDYLSQYDIDHIIPQAFIKDNSIDNRVLTSSKENRGKSDDVPSKDVVRKMKSYWSKLLSAKLITQRKFDNLTKAERGGLTDDDKAGFIKRQLVETRQITKHVARILDERFNTETDENNKKIRQVKIVTLKSNLVSNFRKEFELYKVREINDYHHAHDAYLNAVIGKALLGVYPQLEPEFVYGDYPHFHGHKENKATAKKFFYSNIMNFFKKDDVRTDKNGEIIWKKDEHISNIKKVLSYPQVNIVKKVEEQTGGFSKESILPKGNSDKLIPRKTKKFYWDTKKYGGFDSPIVAYSILVIADIEKGKSKKLKTVKALVGVTIMEKMTFERDPVAFLERKGYRNVQEENIIKLPKYSLFKLENGRKRLLASARELQKGNEIVLPNHLGTLLYHAKNIHKVDEPKHLDYVDKHKDEFKELLDVVSNFSKKYTLAEGNLEKIKELYAQNNGEDLKELASSFINLLTFTAIGAPATFKFFDKNIDRKRYTSTTEILNATLIHQSITGLYETRIDLNKLGGD

SEQ ID NO: 529 - protein, 1345 aa, Streptococcus mutans; identical to SEQ ID NO: 528
  Streptococcus mutans R221

SEQ ID NO: 530 - protein, 1345 aa, Streptococcus mutans
  Streptococcus mutans S1B
MKKPYSIGLDIGTNSVGWAVVTDDYKVPAKKMKVLGNTDKSHIKKNLLGALLFDSGNTAEDRRLKRTARRRYTRRRNRILYLQEIFSEEMGKVDDSFFHRLDESFLTDDDKNFDSYPIFGNKAEEDAYHQKFPTIYHLRKHLADSTEKADLRLVYLALAHMIKFRGHFLIEGELNAENTDVQKLFADFVGVYDRTFDDSHLSEITVDASSILTEKISKSRRLEKLINNYPKEKKNTLFRNLVALSLGLQPNFKTNFKLSEDAKLQFSKDTYEEDLEELLGKIGDDYADLFTLAKNLYDAILLSGILTADDSSTKAPLSASMIKRYAEHHEDLEKLKEFIKANKPELYHDIFKDETKNGYAGYIENGVKQDEFYKYLKNTLSKIAGSDYFLDKIEREDFLRKQRTFDNGSIPHQIHLQEMHAILRRQGDYYPFLKENQDRIEKILTFRIPYYVGPLARGKSDFAWLSRKSADKITPWNFDEIVDKESSVEAFINRMTNYDLYLPNQKVLPKHSLLYEKFTVYNELTKVKYKTEQGKTAFFDANMKQEIFDGVFKVYRKVTKDKLMDFLEKEFDEFRIVDLTGLDKENKAFNASYGTYHDLRKILDKDFLDNSKNEKILEDIVLTLTLFEDREMIRKRLKNYSDLLTKEQLKKLERRHYTGWGRLSAELIHGIRNKESRKTILDYLIDDGNSNRNFMQLINDDALSFKEEIAKAQVIGETDNLNQVVSDIAGSPAIKKGILQSLKIVDELVKIMGHQPENIVVEMARENQFTNQGRRNSQQRLKGLTDSIKEFGSQILKEHPVENSQLQNDRLFLYYLQNGRDMYTGEELDIDYLSQYDIDHIIPQAFIKDNSIDNRVLTSSKENRGKSDDVPSKDVVRKMKSYWSKLLSAKLITQRKFDNLTKGERGGLTDDDKAGFIKRQLVETRQITKHVARILDERFNTETDENNKKIRQVKIVTLKSNLVSNFRKEFELYKVREINDYHHAHDAYLNAVIGKALLGVYPQLEPEFVYGDYPHFHGHKENKATAKKFFYSNIMNFFKKDDVRTDKNGEIIWKKDEYISNIKKVLSYPQVNIVKKVEEQTGGFSKESILPKGDSDKLIPRKTKKFYWDTKKYGGFDSPIVAYSILVIADIEKGKSKKLKTVKALVGVTIMEKMTFERDPVAFLERKGYRNVQEENIIKLPKYSLFKLENGRKRLLASARELQKGNEIVLPNHLGTLLYHAKNIHKVDEPKHLDYVDKHKDEFKELLDVVSNFSKKYTLAEGNLEKIKELYAQNNGEDLKELASSFINLLTFTAIGAPATFKFFDKNIDRKRYTSTTEILNATLIHQSITGLYETRIDLSKLGGD

SEQ ID NO: 531 - protein, 1345 aa, Streptococcus mutans; identical to SEQ ID NO: 530
  Streptococcus mutans S1B

SEQ ID NO: 532 - protein, 1345 aa, Streptococcus mutans; identical to SEQ ID NO: 471
  Streptococcus mutans SF1

SEQ ID NO: 533 - protein, 1345 aa, Streptococcus mutans
  Streptococcus mutans SF14
MKKPYSIGLDIGTNSVGWAVVTDDYKVPAKKMKVLGNTDKSHIKKNLLGALLFDSGNTAEDRRLKRTARRRYTRRRNRILYLQEIFSEEMGKVNDSFFHRLEDSFLVTEDKRGERHPIFGNLEEEVKYHENFPTIYHLRQYLADNPEKVDLRLVYLALAHIIKFRGHFLIEGKFDTRNNDVQRLFQEFLAVYDNTFENSSLQEQNVQVEEILTDKISKSAKKDRVLKLFPNEKSNGRFAEFLKLIVGNQADFKKHFELEEKAPLQFSKDTYEEELEVLLAQIGDNYAELFLSAKKLYDSILLSGILTVTDVSTKAPLSASMIQRYNEHQMDLAQLKQFIRQKLSDKYNEVFSDVSKDGYAGYIDGKTNQEAFYKYLKGLLNKIEGSGYFLDKIEREDFLRKQRTFDNGSIPHQIHLQEMRAIIRRQAEFYPFLADNQDRIEKILTFRIPYYVGPLARGKSDFAWLSRKSADKITPWNFDEIVDKESSAEAFINRMTNYDLYLPNQKVLPKHSLLYEKFTVYNELTKVKYKTEQGKTAFFDANMKQEIFDGVFKVYRKVTKDKLMDFLEKEFDEFRIVDLTGLDKENKVFNASYGTYHDLCKILDKDFLDNSKNEKILEDIVLTLTLFEDREMIRKRLENYSDLLTKEQVKKLERRHYTGWGRLSAELIHGIRNKESRKTILDYLIDDGNSNRNFMQLINDDALSFKEEIAKAQVIGETDNLNQVVSDIAGSPAIKKGILQSLKIVDELVKIMGHQPENIVVEMARENQFTKQGRRNSQQRLKGLTDSIKEFGSQILKEHPVENSQLQNDRLFLYYLQNGRDMYTGEELDIDYLSQYDIDHIIPQAFIKDNSIDNRVLTSSKENRGKSDDVPSKDVVRKMKSYWSKLLSAKLITQRKFDNLTKAERGGLTDDDKAGFIKRQLVETRQITKHVARILDERFYTETDENNKKIRQVKIVTLKSNLVSNFRKEFELYKVREINDYHHAHDAYLNAVIGKALLGVYPQLEPEFVYGDYPHFHGHKENKATAKKFFYSNIMNFFKKDDVRTDKNGEIIWKKDEYISNIKKVLSYPQVNIVKKVEEQTGGFSKESILPKGNSDKLIPRKTKKFYWDTKKYGGFDSPIVAYSILVIADIEKGKSKKLKTVKALVGVTIMEKMTFERDPIAFLERKGYRNVQEENIIKLPKYSLFKLENGRKRLLASARELQKGNEIVLPNHLGTLLYHAKNIHKVDEPKHLDYVDKHKDEFKELLDVVSNFSKKYTLAEGNLEKIKELYAQNNGEDLKELASSFINLLTFTAIGAPAAFKFFDKNIDRKRYTSTTEILNATLIHQSITGLYETRIDLSKLGGD

SEQ ID NO: 534 - protein, 1345 aa, Streptococcus mutans; identical to SEQ ID NO: 533
  Streptococcus mutans SF14

SEQ ID NO: 535 - protein, 1345 aa, Streptococcus mutans
  Streptococcus mutans SM1
MKKPYSIGLDIGTNSVGWAVVTDDYKVPAKKMKVLGNTDKSHIKKNLLGALLFDSGNTAEDRRLKRTARRRYTRRRNRILYLQEIFSEEMGKVDDSFFHRLEDSFLVTEDKRGERHPIFGNLEEEVKYHENFPTIYHLRQYLADNPEKVDLRLVYLALAHIIKFRGHFLIEGKFDTRNNDVQKLFQEFLAVYDNTFENSSLQEQNVQVEEILTDKISKSAKKDRVLKLFPNEKSNGRFAEFLKLIVGNQADFKKHFELEEKAPLQLSKDTYEEELEVLLAQIGDNYAELFLSAKKLYDSILLSGILTVTDVSTKAPLSASMIQRYNEHQMDLAQLKQFIRQKLSDKYNEVFSDVSKDGYAGYIDGKTNQEAFYKYLKGLLNKIEGSGYFLDKIEREDFLRKQRTFDNGSIPHQIHLQEMRAIIRRQAEFYPFLADNQDRIEKILTFRIPYYVGPLARGKSDFAWLSRKSADKITPWNFDEIVDKESSVEAFINRMTNYDLYLPNQKVLPKHSLLYEKFTVYNELTKVKYKTEQGKTAFFDANMKQEIFDGVFKVYRKVTKDKLMDFLEKEFDEFRIVDLTGLDKENKAFNASYGTYHDLRKILDKDFLDNSKNEKILEDIVLTLTLFEDREMIRKRLENYSDLLTKEQVKKLERRHYTGWGRLSAELIHGIRNKESRKTLLDYLIDDGNSNRNFMQLINDDALSFKEEIAKAQVIGETDNLNQVVSDIAGSPAIKKGILQSLKIVDELVKIMGHQPENIVVEMARENQFTNQGRRNSQQRLKGLTDSIKEFGSQILKEHPVENSQLQNDRLFLYYLQNGRDMYTGEELDIDYLSQYDIDHIIPQAFIKDNSIDNRVLTSSKENRGKSDDVPSKDVVRKMKSYWSKLLSAKLITQRKFDNLTKAERGGLTDDDKAGFIKRQLVETRQITKHVARILDERFNTETDENNKKIRQVKIVTLKSNLVSNFRKEFELYKVREINDYHHAHDAYLNAVIGKALLGVYPQLEPEFVYGDYPHFHGHKENKATAKKFFYSNIMNFFKKDDVRTDKNGEIIWKKDEYISNIKKVLSYPQVNIVKKVEEQTGGFSKESILPKGNSDKLIPRKTKKFYWDTKKYGGFDSPIVAYSILVIADIEKGKSKKLKTVKALVGVTIMEKMTFERDPIAFLERKGYRNVQEENIIKLPKYSLFKLENGRKRLLASARELQKGNEIVLPNHLGTLLYHAKNIHKVDEPKHLDYVDKHKDEFKELLDVVSNFSKKYTLAEGNLEKIKELYAQNNGEDLKELASSFINLLTFTAIGAPATFKFFDKNIDRKRYTSTTEILNATLIHQSITGLYETRIDLSKLGGD

SEQ ID NO: 536 - protein, 1345 aa, Streptococcus mutans; identical to SEQ ID NO: 535
  Streptococcus mutans SM1

SEQ ID NO: 537 - protein, 1345 aa, Streptococcus mutans
  Streptococcus mutans SM4
MKKPYSIGLDIGTNSVGWAVVTDDYKVPAKKMKVLGNTDKSHIKKNLLGALLFDSGNTAEDRRLKRTARRRYTRRRNRILYLQEIFSEEMDKVDDSFFHRLEDSFLVTEDKRGERHPIFGNLEEEVKYHENFPTIYHLRQYLADNPEKVDLRLVYLALAHIIKFRGHFLIEGKFDTRNNDVQRLFQEFLAVYDNTFENSSLQEQNVQVEEILTDKISKSAKKDRVLKLFPNEKSNGRFAEFLKLIVGNQADFKKHFELEEKAPLQFSKDTYEEELEVLLAQIGDNYAELFLSAKKLYDSILLSGILTVTDVSTKAPLSASMIQRYNEHQMDLAQLKQFIRQKLSDKYNEVFSDVSKDGYAGYIDGKTNQEAFYKYLKGLLNKIEGSGYFLDKIEREDFLRKQRTFDNGSIPHQIHLQEMRAIIRRQAEFYPFLADNQDRIEKILTFRIPYYVGPLARGKSDFAWLSRKSADKITPWNFDEIVDKESSAEAFINRMTNYDLYLPNQKVLPKHSLLYEKFTVYNELTKVKYKTEQGKTAFFDANMKQEIFDGVFKVYRKVTKDKLMDFLEKEFDEFRIVDLTGLDKENKVFNASYGTYHDLCKILDKDFLDNSKNEKILEDIVLTLTLFEDREMIRKRLENYSDLLTKEQVKKLERRHYTGWGRLSAELIHGIRNKESRKTILDYLIDDGNSNRNFMQLINDDALSFKEEIAKAQVIGETDNLNQVVSDIAGSPAIKKGILQSLKIVDELVKIMGHQPENIVVEMARENQFTKQGRRNSQQRLKGLTDSIKEFGSQILKEHPVENSQLQNDRLFLYYLQNGRDMYTGEELDIDYLSQYDIDHIIPQAFIKDNSIDNRVLTSSKENRGKSDDVPSKDVVRKMKSYWSKLLSAKLITQRKFDNLTKAERGGLTDDDKAGFIKRQLVETRQITKHVARILDERFYTETDENNKKIRQVKIVTLKSNLVSNFRKEFELYKVREINDYHHAHDAYLNAVIGKALLGVYPQLEPEFVYGDYPHFHGHKENKATAKKFFYSNIMNFFKKDDVRTDKNGEIIWKKDEHISNIKKVLSYPQVNIVKKVEEQTGGFSKESILPKGNSDKLIPRKTKKFYWDTKKYGGFDSPIVAYSILVIADIEKGKSKKLKTVKALVGVTIMEKMTFERDPVAFLERKGYRNVQEENIIKLPKYSLFKLENGRKRLLASARELQKGNEIVLPNHLGTLLYHAKNIHKVDEPKHLDYVDKHKDEFKELLDVVSNFSKKYTLAEGNLEKIKELYAQNNGEDLKELASSFINLLTFTAIGAPATFKFFDKNIDRKRYTSTTEILNATLIHQSITGLYETRIDLSKLGGD

SEQ ID NO: 538 - protein, 1345 aa, Streptococcus mutans; identical to SEQ ID NO: 537
  Streptococcus mutans SM4

SEQ ID NO: 539 - protein, 1345 aa, Streptococcus mutans
  Streptococcus mutans SM6
MKKPYSIGLDIGTNSVGWAVVTDDYKVPAKKMKVLGNTDKSHIKKNLLGALLFDSGNTAEDRRLKRTARRRYTRRRNRILYLQEIFSEEMGKVDDSFFHRLEDSFLVTEDKRGERHPIFGNLEEEVKYHENFPTIYHLRQYLADNPEKTDLRLVYLALAHIIKFGGHFLIEGKFDTRNNDVQRLFQEFLAVYDNTFENSSLQEQNVQVEEILTDKISKSAKKDRVLKLFPNEKSNGRFAEFLKLIVGNQADFKKHFELEEKAPLQFSKDIYEEELEVLLAQIGDNYAELFLSAKKLYDSILLSGILTVTDVSTKAPLSASMIQRYNEHQMDLAQLKQFIRQKLSDKYNEVFSDVSKDGYAGYIDGKTNQEAFYKYLKGLLNKIEGSGYFLDKIEREDFLRKQRTFDNGSIPHQIHLQEMRAIIRRQAEFYPFLADNQDRIEKILTFRIPYYVGPLARGKSDFAWLSRKSADKITPWNFDEIVDKESSVEAFINRMTNYDLYLPNQKVLPKHSLLYEKFTVYNELTKVKYKTEQGKTAFFDANMKQEIFDGVFKVYRKVTKDKLMDFLEKEFDEFRIVDLTGLDKENKAFNASYGTYHDLRKILDKDFLDNSKNEKILEDIVLTLTLFEDREMIRKRLKNYSDLLTKEQLKKLERRHYTGWGRLSAELIHGIRNKESRKTILDYLIDDGNSNRNFMQLINDDALSFKEEIAKAQVIGETDNLNQVVSDIAGSPAIKKGILQSLKIVDELVKIMGHQPENIVVEMARENQFTNQGRRNSQQRLKGLTDSIKEFGSQILKEHPVENSQLQNDRLFLYYLQNGRDMYTGEELDIDYLSQYDIDHIIPQAFIKDNSIDNRVLTSSKENRGKSDDVPSKNVVRKMKSYWSKLLSAKLITQRKFDNLTKAERGGLTDDDKAGFIKRQLVETRQITKHVARILDERFHTETDENNKKIRQVKIVTLKSNLVSNFRKEFELYKVREINDYHHAHDAYLNAVIGKALLGVYPQLEPEFVYGDYPHFHGHKENKATAKKFFYSNIMNFFKKDDVRTDKNGEIIWKKDEHISNIKKVLSYPQVNIVKKVEEQTGGFSKESILPKGNSDKLIPRKTKKFYWDTKKYGGFDSPIVAYSILVIADIEKGKSKKLKTVKALVGVTIMEKMTFERDPVAFLERKGYRNVQEENIIKLPKYSLFKLENGRKRLLASARELQKGNEIVLPNHLGTLLYHAKNIHKVDEPKHLDYVDKHKDEFKELLDVVSNFSKKYTLAEGNLEKIKELYAQNNGEDLKELASSFINLLTFTAIGAPATFKFFDKNIDRKRYTSTTEILNATLIHQSITGLYETRIDLSKLGGD

SEQ ID NO: 540 - protein, 1345 aa, Streptococcus mutans; identical to SEQ ID NO: 539
  Streptococcus mutans SM6

SEQ ID NO: 541 - protein, 1134 aa, Streptococcus mutans
  Streptococcus mutans ST1
MANGKILGLDIGIASVGVGIIDKETGKIIHVNSRIFPAATADSNVERRGFRQGRRLVRRKKHRKVRLADLFLDSNLLTDFSKVSLNLNPYQLRVKGLNEELSNEELFIALKSIVSRRGISYLDDASEDSGANSSEYGKAVEENRKLLEDRTPGQIQLERFEKYGKVRGDFTVVENGENHRLINVFSTSAYKKEAERILRRQQEFNMRIADEFIEAYLTILTGKRKYYHGPGNEKSRTDYGRFRTDGTTLDNIFGILIGKCTFYPDEYRAAKASYTAQEFNLLNDLNNLTVPTETKKLSEEQKRQIIEHAKTVKTLGAPTLLKYIVKLVGCSADDIKGYRIDKSDKPEIHTFEAYRKMRTMELIKVDDLSRESLDALAHILTLNTEREGIEEAIRDRFTNKEFNQEQINELVLFRKNNSSLFGKGWHNFSLKLMKELIPELYETSEEQMTILTRLGKQRVKKSSNRTNYIDEKELTEEIYNPVVAKSVRQAIKIINLATKKYGVFDNIVIEMARESNEDDEKKAIQNAQKANEDEKKAALLKAAHQFNGKEELPDSIFHGHKELLTKIRLWHQQGEKCLYTGKTIFINDLIHNPYKYEIDHILPLSLSFDDSLANKVLVLSTANQEKGQRTPFQSLDSMDGAWTYREFKSYVKGLKTLSNKKKDYLLTEENIDKIEVKQKFIERNLVDTRYSSRVVLNALQDFYKERKFDTKISVVRGQFTSQLRRKWRIEKTRETYHHHAVDALIIAASSQLNLWKKQNNPLISYKEDQFVDPETGEILSLSDDEYKKLVFKAPYEHFVDTLKSKKFEDSILFSYQVDSKYNRKISGATICGTRKAQLGKDTQEETYVLGKIKDIYSQKGYEDFIKKYKKDKTQFLMYHKDPQTFEKVIEEILKTYPDKELNEKGKEVSCNPFEKYRQENGPVRKYSKKGNGPEIKSLKYYDEVLGKNIDITPKNSLNKVVLRSLNPWRTDVYFNHETRKYEFLGLKYSDLRYLKGEHRYGILIGDYKKIKDKEGIEKESEFKFTLYKNDLILIKDTAKGKEELFRFWSRTGKDNAKTFEKNKIELKPYSKSQFEKGEDTNVLGKLYASSNQLQKSFGTLENLSIYKVRTDVLGNKYFIKKEGDKPQLNFKKKL

SEQ ID NO: 542 - protein, 1134 aa, Streptococcus mutans; identical to SEQ ID NO: 541
  Streptococcus mutans ST1

SEQ ID NO: 543 - protein, 1350 aa, Streptococcus mutans
  Streptococcus mutans ST6
MKKPYSIGLDIGTNSVGWAVVTDDYKVPAKKMKVLGNTDKSHIEKNLLGALLFDSGNTAEDRRLKRTARRRYTRRRNRILYLQEIFSEEMGKVDDSFFHRLEDSFLVTEDKRGERHPIFGNLEEEVKYHENFPTIYHLRQYLADNPEKVDLRLVYLALAHIIKFRGHFLIEGKFDTRNNDVQRLFQEFLAVYDNTFENSSLQEQNVQVEEILTDKISKSAKKDRVLKLFPNEKSNGRFAEFLKLIVGNQADFKKHFELEEKAPLQFSKDTYEEELEVLLAQIGDNYAELFLSAKKLYDSILLSGILTVTDVSTKAPLSASMIQRYNEHQMDLTQLKQFIRQKLSDKYNEVFSDVSKDGYAGYIDGKTNQEAFYKYLKGLLNKIEGSGYFLDKIEREDFLRKQRTFDNGSIPHQIHLQEMRAIIRRQAEFYSFLADNQDRIEKILTFRIPYYVGPLARGKSDFAWLSRKSADKITPWNFDEIVDKESSAEAFINRMTNYDLYLPNQKVLPKHSLLYEKFTVYNELTKVKYKTEQGKTAFFDANMKQEIFDGVFKVYRKVTKDKLMDFLEKEFDEFRIVDLTGLDKENKAFNASYGTYHDLRKILDKDFLDNSKNEKILEDIVLTLTLFEDREMIRKRLENYSDLLTKEQVKKLERRHYTGWGRLSAELIHGIRNKESRKTILDYLIDDGNSNRNFMQLINDDALSFKEEIAKAQVIGETDNLNQVVSDIAGSPAIKKGILQSLKIVDELVKIMGHQPENIVVEMARENQFTNQGRRNSQQRLKGLTDSIKEFGSQILKEHPVENSQLQNDRLFLYYLQNGRDMYTGEELDIDYLSQYDIDHIIPQAFIKDNSIDNRVLTSSKENRGKSDDVPSEDVVNRMRPFWNKLLSSGLISQRKYNNLTKKELTLDDKAGFIKRQLVETRQITKHVARMLDERFNKEFDDNNKRIRKVKIVTLKSNLVSSFRKEFELYKVREINDYHHAHDAYLNAVVVKALLVKYSKLEPEFVYGEYPKYNSYRERKTATQKMFFYSNIMNMFKSKVKLADDQIVERPMIEVNDETGEIAWDKTKHITTVKKVLSYPQVNIVKKVEEQTIGQNGGLFDDNPKSPLEVIPSKLVPLKKALNPEKYGGYQKPTTAYPILLIVDTKQLIPISVMDKKRFEQNPVKFLKDKGYQQIEKNNFVKLPKYTLVDIGNGIKRLWASSKEVHKGNQLVVSKKSQDLLYHAHHLDNDYSNEYVKNHYQQFDILFNEITSFSKKCKLGKEHIQKIEEAYSKERDSASIEELADGFIKLLGFTQLGATSPFSFLGIKLNQKQYTGKKDYLLPCMEATLIHQSITGLYETRIDLSKLGGD

SEQ ID NO: 544 - protein, 1350 aa, Streptococcus mutans; identical to SEQ ID NO: 543
  Streptococcus mutans ST6

SEQ ID NO: 545 - protein, 1125 aa, Streptococcus mutans
  Streptococcus mutans U2A
MTNGKILGLDIGIASVGVGIINAKTGNVEHASSRIFPAANADNNVERRSARGGRRLIRRKKHRLKRVEDLFEKYNIDTDFSNLNLNPYQLRVKGLNEQLSNEELFAILKNIAKRRGISYLDDAEDDSVGSSDYAKAIDENRKLLKKQTPGEIQLKRLEKYGQLRGNFTIQDENGEYHRLINVFSTSDYVKEARRILETQSYYNKFITESFVEDYIKILQGKRKYYVGPGNEKSRTDYGIYRTDGETLDNLFGILIGKCGFYPEEYRAAKASYTAQEYNFLNDLNNLTVPTETKKLSTEQKYQLVDFAKTASTLGAAKLLKEIAKLVGCQVEEIKGYRLDNKDKPDLHTFEPFRKLKSNLTTIAVENLSITTLDTLAHILTLNTEREGIEEAIQKELPNIFSDEQITEIIAVRKKNSQIFGKGWHSFSIKLMKELIPELYETSEEQMTILTRLKKVKTNSKITNRTKYINEEEITDEIYNPVVSKSIRQTVKIINATIKKYGAFDQIIIEMPRESNEEDERKFIADLQKSNAKEKDDAMKQAALLYNGKDELPHDVFHGHKELATKIRLWYQQGERCLYSGKHIDIHDLIHNQHMFEIDHVLPLSLSFDDSLANKVLVYSWANQEKGQRTPFQALPQMASAWSFRELRDYISKQKGISKKKRDYLLTEQDINKVEVKQKFIERNLVDTRYVSRVVLNTLQDALKVMNKETKISVIRGQFTSQLRRQWRIDKSRETYHHHAVDALIIAASSQLRLWKKQNNPMFAEDKHGQKINLDTGEVLSDDAYKELVYQAPYQGFVNTISSKSFEDEILFSYQVDSKVNRKISDATIYATRQAQLGKDKKEETYVLGKIKDIYSQAGYDAFRKKYDKDKAVFLMYQKDPETWEKVIEVILRDYKELDDKGKEIGNPFERYKVKHGFVRKYSRKNKGTEIKSLKYYDNKLGNHIDITPNNSKHSVVLQSINPWRADLYFNPETTKYELMGLKYADLSFEKGTGKYSISREKYDEIKEREGISSKSEFKFTLYKNDLILVKDIGNHKELIARFNSKNDTSKHYVELKPWNKAKFDSEEELIPAFGKVAKSGQFIKGLNKPDLSIYKVKTDILGHKYYIKKEGDKPKLNFENKIKNK

SEQ ID NO: 546 - protein, 1125 aa, Streptococcus mutans; identical to SEQ ID NO: 545
  Streptococcus mutans U2A

SEQ ID NO: 547 - protein, 1345 aa, Streptococcus mutans
  Streptococcus mutans UA159
MKKPYSIGLDIGTNSVGWAVVTDDYKVPAKKMKVLGNTDKSHIEKNLLGALLFDSGNTAEDRRLKRTARRRYTRRRNRILYLQEIFSEEMGKVDDSFFHRLEDSFLVTEDKRGERHPIFGNLEEEVKYHENFPTIYHLRQYLADNPEKVDLRLVYLALAHIIKFRGHFLIEGKFDTRNNDVQRLFQEFLAVYDNTFENSSLQEQNVQVEEILTDKISKSAKKDRVLKLFPNEKSNGRFAEFLKLIVGNQADFKKHFELEEKAPLQFSKDTYEEELEVLLAQIGDNYAELFLSAKKLYDSILLSGILTVTDVGTKAPLSASMIQRYNEHQMDLAQLKQFIRQKLSDKYNEVFSDVSKDGYAGYIDGKTNQEAFYKYLKGLLNKIEGSGYFLDKIEREDFLRKQRTFDNGSIPHQIHLQEMRAIIRRQAEFYPFLADNQDRIEKLLTFRIPYYVGPLARGKSDFAWLSRKSADKITPWNFDEIVDKESSAEAFINRMTNYDLYLPNQKVLPKHSLLYEKFTVYNELTKVKYKTEQGKTAFFDANMKQEIFDGVFKVYRKVTKDKLMDFLEKEFDEFRIVDLTGLDKENKVFNASYGTYHDLCKILDKDFLDNSKNEKILEDIVLTLTLFEDREMIRKRLENYSDLLTKEQVKKLERRHYTGWGRLSAELIHGIRNKESRKTILDYLIDDGNSNRNFMQLINDDALSFKEEIAKAQVIGETDNLNQVVSDIAGSPAIKKGILQSLKIVDELVKIMGHQPENIVVEMARENQFTNQGRRNSQQRLKGLTDSIKEFGSQILKEHPVENSQLQNDRLFLYYLQNGRDMYTGEELDIDYLSQYDIDHIIPQAFIKDNSIDNRVLTSSKENRGKSDDVPSKDVVRKMKSYWSKLLSAKLITQRKFDNLTKAERGGLTDDDKAGFIKRQLVETRQITKHVARILDERFNTETDENNKKIRQVKIVTLKSNLVSNFRKEFELYKVREINDYHHAHDAYLNAVIGKALLGVYPQLEPEFVYGDYPHFHGHKENKATAKKFFYSNIMNFFKKDDVRTDKNGEIIWKKDEHISNIKKVLSYPQVNIVKKVEEQTGGFSKESILPKGNSDKLIPRKTKKFYWDTKKYGGFDSPIVAYSILVIADIEKGKSKKLKTVKALVGVTIMEKMTFERDPVAFLERKGYRNVQEENIIKLPKYSLFKLENGRKRLLASARELQKGNEIVLPNHLGTLLYHAKNIHKVDEPKHLDYVDKHKDEFKELLDVVSNFSKKYTLAEGNLEKIKELYAQNNGEDLKELASSFINLLTFTAIGAPATFKFFDKNIDRKRYTSTTEILNATLIHQSITGLYETRIDLNKLGGD

SEQ ID NO: 548 - protein, 1345 aa, Streptococcus mutans; identical to SEQ ID NO: 472
  Streptococcus mutans W6

SEQ ID NO: 549 - protein, 1121 aa, Streptococcus oralis
  Streptococcus oralis SK1074
MNGLVLGLDIGIASVGVGILEKNSGKIIHANSRLFPAATADNNVERRKNRQARRLNRRKKHRGVRFQDLFEDYGLLTDFSKVSINLNPYRLRVDGLNQQLTNEELFIALKNIVKRRGISYLDDASEDGGAVSSDYGKAVEENRKLLAEQTPGQIQLERFEKYGQVRGDFTVVENGEKCRLINVFSTSAYRKEAEKILRKQQEFNNQITDEFIEDYLKILTGKRKYYHGPGNEKSRTDYGRFRTDGTTLDNIFGVLIGKCTFYPNEYRASKSSYTAQEFNLLNDLNNLTVPTETKKLSEEQKKVIVEYAKEAKTLGASTLLKYIVKMIDASVDQISGYRVDVNNKPEMHTFEVYRKMQSLETISVGELSRNVLDELAHILTLNTEREGIEEAINSKLMGVFSQDQVLELVQFRKNNSSLFSKGWHNFSLKLMMELIPELYETSEEQMTILTRLGKQKSKETSKRTKYIDEKELTEEIYNPVVAKSVRQAIKIINEATKKHGIFDNIVIEMARENNEEDAKKDYIKRQKANQDEKNAAMEKAAFQYNGKKELPGNIFNGHKELATKIRLWHQQGEKCLYTGKTIPISDLIHNQYKYEIDHILPLSLSFDDSLSNKVLVHATANQEKGQRTPFQALDSMDDAWSYREFKSYVKDLKSLSNKKKDYLLTEEDISKIEVKQKFIERNLVDTRYSSRVVLNALQDFYKSHQFDTTISVVRGQFTSQLRRKWGLEKSRETYHHHAVDALIIAASSQLRLWKKQNNPLITYKEGQFVDSQTGEIISLTDDEYKELVFKAPYDHFVDTLHSKTFEDGILFSYQVDSKYNRKISDATIYATRKAKLDKDKSEETYVLGKIKDIYSQAGYDAFIKIYNKDKRKFLMYHKDPQTFEKVIEEILRTYPSKERNDKNKEVPCNPFEKYRQENGPIRKYSKKGNGPEIKCLKYYDNKLGNYIDISPDGSDNQVVLQSLKPWRTDVYFNHQTKEYELMGLKYSDLSFEKGSGKYSISNEKYNSIKRIEGVNEQSEFKFTLYKNDLILIKDSENNEQKLFRFNSRNDTAKHYVELKPYDKARFDGQQELITILGNVAKGGQCLKGLNKSNISIFKVKTDVLGKKHIIKKEGDEPKLKF

SEQ ID NO: 550 - protein, 1373 aa, Streptococcus oralis
  Streptococcus oralis SK304
MENKNYSIGLDIGTNSVGWAVITDDYKVPSKKMKVLGNTDKRFIKKNLIGALLFDEGTTAEARRLKRTARRRYTRRKNRLRYLQEIFAEEMSKVDSSFFHRLDDSFLIPEDKKGSKYPIFATLIEEKEYHKQFPTIYHLRKQLADSKEKTDLRLIYLALAHMIKYRGHFLYEDTFDIKNNDIQKIFNEFISIYNNTFEGNSLSGQNVQVEAIFTDKISKSAKRERVLKLFPDEKSTGLFSEFLKLIVGNQADFKKHFDLEEKAPLQFSRDTYDEDLENLLGQIGDDFADLFVAAKKLYDAILLSGILTVTDPSTKAPLSASMIERYENHQKDLATLKQFIKTNLPEKYDEVFSDQSKDGYAGYIDGKTTQESFYKYIKNLLSKFEGADYFLEKIEREDFLRKQRTFDNGSIPHQIHLQEMNAILRRQGEHYPFLKENKEKIEKILTFRIPYYVGPLARGNRDFAWLTRNSDQAIRPWNFEEIVDKASSAESFINKMTNYDLYLPEEKVLPKHSLLYETFAVYNELTKVKFIAEGLRDYQFLDSRQKKDIFYTLFKAEDKRKVTEKDIIQYLHTVDGYDGIELKGIEKQFNASLSTYHDLLKIIKDKEFMDDPNNEEILENIVHTLTIFEDREMIKQRLAQYDSLFDEKVIKALTRRHYTGWGKLSSKLINGIRDKQTGKTILDYLMDDGYNNRNFMQLINDDELSFKEIIKKAQVVGKTDDVKQVVQELPGSPAIKKGILQSIKLVDELVKVMGHEPESIVIEMARENQTTARGKKNSQQRYKRIEDSLKILASGLNAKILKEHPTDNIQLQNDRLFLYYLQNGRDMYTGKPLDINQLSSYDIDHIVPQAFIKDDSLDNRVLTSLKDNRGKSDNVPSLEVVEKMKTFWQQLLDSKLISYRKFNNLTKAERGGLDERDKVGFIKRQLVETRQITKHVAQILDARYNTEVNEKDKKNRTVKIITLKSNLVSNFRKEFRLYKIREINDYHHAHDAYLNAVVAKAILKKYPKLEPEFVYGDYQKYDLKRYISRSKDPKEIEKATEKYFFYSNLLNFFKEEVHYADGTIVKRENIEYSKDTGEIAWNKEKDFATIKKVLSLPQVNIVKKREVQTGGFSKESILPKGNSDKLIPRKTKDILWDTTKYGGFDSPVIAYSILLIADIEKGKAKRLKTVKTLVGITIMEKATFEKSPIAFLENKGYHNVRKENILCLPKYSLFELKNGRRRMLASAKELQKGNEIVLPVHLTTLLYHAKNIHRLDEPEHLEYIQKHRNEFKGLLNLVSEFSQKYVLADANLEKIKNLYADNEQADIEILANSFINLLTFTALGAPAAFKFFGKDVDRKRYTTVSEILNATLIHQSITGLYETRIDLSKLGED

SEQ ID NO: 551 - protein, 1134 aa, Streptococcus oralis
  Streptococcus oralis SK313
MNGLVLGLDIGIASVGVGILEKNSGKIVHASSRIFPAATADNNVERRKNRQARRLHRRKKHRGARLKDLFEYYGLLTDFSKVSINLNPYRLRVDGLDQQLTNEELFIALKNIVKRRGISYLDDASEDGGTVSSDYGKAVEENRKLLAEQTPGQIQLERFEKYGQLRGDFTVVENSEKCRLINVFSTSAYKKEAERILRKQQEFNNQITDEFIEDYLKILTGKRKYYHGPGNEKSRTDYGRFRTDGATLDNIFGILIGKCTFYPNEYRASKASYTAQEFNLLNDLNNLTVPTETKKLSEEQKKTIIEYAKSAKTLGASTLLKYIAKMIDASVDQIRGYRVDVNNKPEMHTFEVYRKMQSLETISVGELSRNILDELAHILTLNTEREGIEEAINTKLRDSFSQDQVLELVQFRKNNSSLFSKGWHNFSLKLMMELIPELYETSEEQMTILTRLGKQKSKETSKRTKYIDEKEVTEEIYNPVVAKSVRQAIKIINEATKKHGIFDNIVIEMARENNEEDAKKDYIKRQKANQDEKYAAMEKAAFQYNGKKELPDNIFHGHKELATKIRLWHQQGEKCLYTGKSIPISDLIHNQYKYEIDHILPLSLSFDDSLSNKVLVLATANQEKGQRTPFQALDSMDDAWSYREFKSYVKESKLLGNKKKEYLLTEEDISKIEVKQKFIERNLVDTRYSSRVVLNALQDFYKNHNFDTTISVVRGQFTSQLRRKWGLEKSRETYHHHAVDALIIAASSQLRLWKKQNNPLIAYKEGQFVDSQTGEIISLTDDEYKELVFKAPYDHFVDTLSSKTFEDSILFSYQVDSKFNRKISDATIYATRKAKLDKEKKEYTYTLGKIKDIYSLGTKTPSKTGFYKFLDLYNKDKSQFLMFQKDRKTWDEVIEKIMEQYRPFKEYDKAGKLVDFNPFEKYRQENGPIRKYSKKGNGPEIKSLKYYDILLGKHKNITPEGSRNTVALLSLNPWRTDVYYNMETKKYEFLGLKYADLPFEEGGAYGISTETYNELREKEGIGKNSEFKFTLYKNDLILIKDTETNCQQFFRFWSRTGKDNPKSFEKHKIELKPYEKAKFEKGEELEVLGKVPPSSNQFQKNMQIENLSIYKVKTDVLGNKHFIKKEGDKPKLKF

SEQ ID NO: 552 - protein, 1371 aa, Streptococcus oralis
  Streptococcus oralis SK610
MENKNYSIGLDIGTNSVGWSVITDDYKVPSKKMKVLGNTDKRFIKKNLIGALLFDEGTTAEARRLKRTARRRYTRRKNRLRYLQEIFAEEMSKVDSSFFHRLDDSFLIPEDKRGSKYPIFATLAEEKEYHKQFPTIYHLRKQLADSKEKTDLRLIYLALAHMIKYRGHFLYEDTFDIKNNDIQKIFSEFISIYDNTFEGSSLSGQNAQVEAIFTDKISKSAKRERVLKLFPDEKSTGLFSEFLKLIVGNQADFKKHFDLGEKAPLQFSKDTYDEDLENLLGQIGDDFADLFLVAKKLYDAILLSGILTVTDPSTKAPLSASMIERYENHQKDLAVLKQFIKNNLPEKYDEVFSDQSKDGYAGYIDGKTTQEAFYKYIKNLLSKFEGTDYFLEKIEREDFLRKQRTFDNGSIPHQIHLQEMNAILRRQGEHYPFLKDNKEKIEKILTFRIPYYVGPLARGNRDFAWLTRNSDEAIRPWNFEEIVDKASSAEDFINKMTNYDLYLPEEKVLPKHSLLYETFAVYNELTKVKFIAEGLRDYQFLDSGQKKQIVTQLFKEKRKVTEKDIIQFLHNVDGYDGIELKGIEKQFNASLSTYHDLLKIIKDKEFMDDSKNEEILENIVHTLTIFEDREMIKQRLAQYDSLFDEKVIKALIRRHYTGWGKLSAKLIDGICDKQTGNTILDYLIDDGKNNRNFMQLINDDGLSFKEITQKAQVVGKTDDVKQVVQELPGSPAIKKGILQSIKIVDELVKVMGHTPESIVIEMARENQTTARGKKNSQQRYKRIEDALKNLASGLDSNILKEHPTNNIQLQNDRLFLYYLQNGRDMYTGKPLDINQLSSYDIDHIVPQAFIKDDSLDNRVLTSLKDNRGKSDNVPSIEVVQKRKAFWQQLLDSKLISERKFNNLTKAERGGLDERDKVGFIKRQLVETRQITKHVAQILDARFNKEVNEKDKKNRTVKIITLKSNLVSNFRKEFRLYKVREINDYHHAHDAYLNAVVAKAILKKYPKLEPEFVYGDYQKYDLKRYISRSRNPKEVEKATEKYFFYSNLLNFFKEEVHYADGTIVKRENIEYSKDTGEIAWNKEKDFATIKKVLSYPQVNIVKKREVQTGGFSKESILPKGNSDKLIPRKTKDILWETTKYGGFDSPVIAYSILLIADIEKGKAKKLKTVKTLVGITIMEKAAFEENPITFLENKGYHNVRKENILCLPKYSLFELENGRRRLLASAKELQKGNEIVLPVYLTTLLYHSKNVHKLDEPEHLEYIQKHRNEFKDLLNLVSEFSQKYVLADANLEKIQNLYADNEQADIEILANSFINLLTFTALGAPAAFKFFGKDIDRKRYTTVSEILNATLIHQSITGLYETRIDLSKLGED

SEQ ID NO: 553 - protein, 1140 aa, Streptococcus parasanguinis
  Streptococcus parasanguinis F0449
MNGLVLGLDIGIASVGVGILKKDIGEIIHTNSRLFSAATADSNIERRGHRGGKRLTRRKKHRSIRLHDLFEDFGLLTDFSKVSINLNPYQLRVQGLDNQLTNEELFIALKNIVKRRGISYLDDASEDGGTVSSDYGKAVEENRKLLAEQTPGQIQLDRFEKYGQVRGDFNVVENGEKRRLINVFTTSAYSKEAERILRKQQEFNKKITDEFIEDYLTILTGKRKYYHGPGNEKSRTDYGRYTTKKDPEGKYITLDNIFGILIGKCTFYPDEYRASKASYTAQEFNLLNDLNNLTVPTETKKLSEEQKKTIIKYAKTAKTLGASTLLKYIAKLIGASVDQIHGYRIDPNKKPEMHTFETYRKMQSLETISVEELPRKVLDELAHILTLNTEREGIEEAINATLKDTFSQDQVLELVQFRKNNSSLFSKGWHSFSLKLMMELIPELYETSEEQMTILTRLGKQKSKETSKRTKYIDEKELTEEIYNPVVAKSVRQAIKIINEATKKYGIFDNIVIEMARENNEEDAKKEYIKRQKANLDEKNAAMEKAAFQYNGKKELPDNVFHGHKELATKIRLWHQQGEKCLYTGKNIPISDLIQNQYKYEIDHILPLSLSFDDSLSNKVLVLATANQEKGQRTPFQALDSMDDAWSYREFKSYVKDSKLLGNKKKEYLLTEEDISKIEVKQKFIERNLVDTRYSSRVVLNALQDFYKEHQFDTTISVVRGQFTSQLRRKWGLEKSRETYHHHAVDALIIAASSQLRLWKKQNNPLISYTEGQFVDQVTGEIISLSDDEYKELVFKAPYDHFVDTLKSKKFEDSILFSYQVDSKYNRKISDATIYATRKAKLDKENKEYTYTLGKIKDIYALGTKSPSKTGFYKFLDLYNKDKSQFLMFQKDRKTWDEVIEKIIEQYRPFKEYDENGKEVDFNPFEKYRIENGPIRKYSKKGNGPEIKSLKYYDNLLGKFVDITPSESKNPVALLSLNPWRTDVYYNTETSKYEFLGLKYADLCFEKGGAYGISEVKYNKIREKEGIGKESEFKFTLYKNDLILIKDTETNCQQIFRFWSRTGKDNPKSFEKHKIELKPYEKARFEKGEELEVLGKVPPSSNQLQKNMQIENLSIYKVKTDVLGNKHFIKKEGEEPKLKF

SEQ ID NO: 554 - protein, 1130 aa, Streptococcus pasteurianus
MTNGKILGLDIGIASVGVGIIEAKTGKVVHANSRLFSAANAENNAERRGFRGSRRLNRRKKHRVKRVRDLFEKYGIVTDFRNLNLNPYELRVKGLTEQLKNEELFAALRTISKRRGISYLDDAEDDSTGSTDYAKSIDENRRLLKNKTPGQIQLERLEKYGQLRGNFTVYDENGEAHRLINVFSTSDYEKEARKILETQADYNKKITAEFIDDYVEILTQKRKYYHGPGNEKSRTDYGRFRTDGTTLENIFGILIGKCNFYPDEYRASKASYTAQEYNFLNDLNNLKVSTETGKLSTEQKESLVEFAKNTATLGPAKLLKEIAKILDCKVDEIKGYREDDKGKPDLHTFEPYRKLKFNLESINIDDLSREVIDKLADILTLNTEREGIEDAIKRNLPNQFTEEQISEIIKVRKSQSTAFNKGWHSFSAKLMNELIPELYATSDEQMTILTRLEKFKVNKKSSKNTKTIDEKEVTDEIYNPVVAKSVRQTIKIINAAVKKYGDFDKIVIEMPRDKNADDEKKFIDKRNKENKKEKDDALKRAAYLYNSSDKLPDEVFHGNKQLETKIRLWYQQGERCLYSGKPISIQELVHNSNNFEIDHILPLSLSFDDSLANKVLVYAWTNQEKGQKTPYQVIDSMDAAWSFREMKDYVLKQKGLGKKKRDYLLTTENIDKIEVKKKFIERNLVDTRYASRVVLNSLQSALRELGKDTKVSVVRGQFTSQLRRKWKIDKSRETYHHHAVDALIIAASSQLKLWEKQDNPMFVDYGKNQVVDKQTGEILSVSDDEYKELVFQPPYQGFVNTISSKGFEDEILFSYQVDSKYNRKVSDATIYSTRKAKIGKDKKEETYVLGKIKDIYSQNGFDTFIKKYNKDKTQFLMYQKDSLTWENVIEVILRDYPTTKKSEDGKNDVKCNPFEEYRRENGLICKYSKKGKGTPIKSLKYYDKKLGNCIDITPEESRNKVILQSINPWRADVYFNPETLKYELMGLKYSDLSFEKGTGNYHISQEKYDAIKEKEGIGKKSEFKFTLYRNDLILIKDIASGEQEIYRFLSRTMPNVNHYVELKPYDKEKFDNVQELVEALGEADKVGRCIKGLNKPNISIYKVRTDVLGNKYFVKKKGDKPKLDFKNNKK

SEQ ID NO: 555 - protein, 1374 aa, Streptococcus pseudoporcinus
  Streptococcus pseudoporcinus LQ 940-04
MKKRYSYSIGLDIGTNSVGWAVINEDYKVPAKKMTVFGNTDRKTIKKNLLGTVLFDSGETAQARRLKRTNRRRYTRRRYRLCQLQNIFATEMVKVDDTFFQRLSESFFYYQDKAFDKHPIFGNSKEERAYHKTYPTIYHLRKDLADRDQKADLRLIYLALSHIIKFRGHFLIEGKLNSENTDVQKLFIALVTVYNLLFEEEPIAGETCDAKALLTAKTSKSKRLESLISEFPGQKKNGLFGNLLALALGLRPNFKSNFGLSEDAKLQITKDTYEEELDNLLAEIGDHYADLFLAAKNLSDAILLSDILTLSDENTRAPLSASMIKRYEEHQEDLALLKKLVKEQMPEKYWEIFSNAKKNGYAGYIEGKVSQEDFYRYIKPILSRLKGGDEFLAKIDRDDFLRKQRTFDNGSIPHQIHLKELHAILRRQEKYYPFLAEQKEKIEQLLCFRIPYYVGPLAKGGNSSFAWLKRRSDEPITPWNFKDVVDEEASAQAFIEGMTNYDTYLPEEKVLPKHSPLYEMFTVYNELTKVKYIAENMTKPLYLSAEQKEAIIDHLFKQTRKVTVKDLKEKYFSQIEGLENVDVTGVEGAFNASLGTYNDLLKIIKDKAFLDDEANAEILEEIVLILTLFQDEKLIEKRLAKYANLFEKSVLKKLRKRHYRGWGRLSRQLIDGMKDKASGKTILDFLKADDFANRNFIQLINDSSLDFEKLIDDAQKKAIKRESLTEAVANLAGSPAIKKGILQSLKVVDEIVKVMGHNPDNIVIEMSRENQTTAQGLKNARQRLKKIKEVHKKTGSRILEDNSERITNLTLQDNRLYLYLLQDGKDMYTGQDLDINNLSQYDIDHIIPQSFIKDNSIDNLVLTTQKANRGKSDNVPSIEVVRDMKDRVWRRQLANGAISRQKFDHLTKAERGGLADSDKARFLRRQLVETRQITKHVAQLLDSRFNSKSNQNKKLARNVKIITLKSKIVSDFRKDFGLYKLREVNNYHHAHDAYLNAVVGTALLKKYPKLEAEFVYGDYKHFDLVKLISKSDPSLGKATAKVFFYSNIMNFFKEELSLADGTLMKRPVIETNTETGEVVWDKVKDFKTIRKVLSYPQVNIVKKTEIQSGAFSKESVLSKGNSDKLIERKKGWDPKKYGGFDSPNTAYSIFVVAKVAKRKAQKLKTVKEIVGITIMEQAEYEKDNIAFLEKKGYQDIQEKLLIKLPKYSLFELENGRRRLLASANEFQKGNELALSGKYMKFLYLASRYDKLSSKIESEQQKKLFVEQHLHYFDEILDIVVKHATCYIKAENNLKKIISLYKKKEAYSINEQALNMLNLFIFTSLGAPSTFVFFDETIDRKRYTTSSDVLNGILIQQSITGLYETRIDLSRFGGD

SEQ ID NO: 556 - protein, 1368 aa, Streptococcus pyogenes
  Streptococcus pyogenes MGAS10270
MDKKYSIGLDIGTNSVGWAVITDDYKVPSKKFKVLGNTDRHSIKKNLIGALLFDSGETAEATRLKRTARRRYTRRKNRICYLQEIFSNEMAKVDDSFFHRLEESFLVEEDKKHERHPIFGNIVDEVAYHEKYPTIYHLRKKLVDSTDKADLRLIYLALAHMIKFRGHFLIEGDLNPDNSDVDKLFIQLVQTYNQLFEENPINASGVDAKAILSARLSKSRRLENLIAQLPGEKKNGLFGNLIALSLGLTPNFKSNFDLAEDAKLQLSKDTYDDDLDNLLAQIGDQYADLFLAAKNLSDAILLSDILRLNSEITKAPLSASMIKRYDEHHQDLTLLKALVRQQLPEKYKEIFFDQSKNGYAGYIDGGASQEEFYKFIKPILEKMDGTEELLAKLNREDLLRKQRTFDNGSIPHQIHLGELHAILRRQEDFYPFLKDNREKIEKILTFRIPYYVGPLARGNSRFAWMTRKSEETITPWNFEEVVDKGASAQSFIERMTNFDKNLPNEKVLPKHSLLYEYFTVYNELTKVKYVTEGMRKPAFLSGEQKKAIVDLLFKTNRKVTVKQLKEDYFKKIECFDSVEISGVEDRFNASLGTYHDLLKIIKDKDFLDNEENEDILEDIVLTLTLFEDREMIEERLKTYAHLFDDKVMKQLKRRRYTGWGRLSRKLINGIRDKQSGKTILDFLKSDGFANRNFMQLIHDDSLTFKEDIQKAQVSGQGDSLHEHIANLAGSPAIKKGILQTVKVVDELVKVMGRHKPENIVIEMARENQTTQKGQKNSRERMKRIEEGIKELGSQILKEHPVENTQLQNEKLYLYYLQNGRDMYVDQELDINRLSDYDVDHIVPQSFIKDDSIDNKVLTRSDKNRGKSDNVPSEEVVKKMKNYWRQLLNAKLITQRKFDNLTKAERGGLSELDKAGFIKRQLVETRQITKHVAQILDSRMNTKYDENDKLIREVKVITLKSKLVSDFRKDFQFYKVREINNYHHAHDAYLNAVVGTALIKKYPKLESEFVYGDYKVYDVRKMIAKSEQEIGKATAKYFFYSNIMNFFKTEITLANGEIRKRPLIETNGETGEIVWDKGRDFATVRKVLSMPQVNIVKKTEVQTGGFSKESILPKRNSDKLIARKKDWDPKKYGGFDSPTVAYSVLVVAKVEKGKSKKLKSVKELLGLTIMERSSFEKNPIDFLEAKGYKEVKKDLIIKLPKYSLFELENGRKRMLASAGELQKGNELALPSKYVNFLYLASHYEKLKGSPEDNEQKQLFVEQHKHYLDEIIEQISEFSKRVILADANLDKVLSAYNKHRDKPIREQAENIIHLFTLTNLGAPAAFKYFDTTIDRKRYTSTKEVLDATLIHQSITGLYETRIDLSQLGGD

SEQ ID NO: 557 - protein, 1371 aa, Streptococcus pyogenes
MDKKYSIGLDIGTNSVGWAVITDDYKVPSKKFKVLGNTDRHSIKKNLIGALLFDSGETAEATRLKRTARRRYTRRKNRICYLQEIFSNEMAKVDDSFFHRLEESFLVEEDKKHERHPIFGNIVDEVAYHEKYPTIYHLRKKLADSTDKADLRLIYLALAHMIKFRGHFLIEGDLNPDNSDVDKLFIQLVQTYNQLFEENPINASRVDAKAILSARLSKSRRLENLIAQLPGEKKNGLFGNLIALSLGLTPNFKSNFDLAEDAKLQLSKDTYDDDLDNLLAQIGDQYADLFLAAKNLSDATLLSDILRVNSEITKAPLSASMIKRYDEHHQDLTLLKALVRQQLPEKYKEIFFDQSKNGYAGYIDGGASQEEFYKFIKPILEKMDGTEELLAKLNREDLLRKQRTFDNGSIPHQIHLGELHAILRRQEDFYPFLKDNREKIEKILTFRIPYYVGPLARGNSRFAWMTRKSEETITPWNFEEVVDKGASAQSFIERMTNFDKNLPNEKVLPKHSLLYEYFTVYNELTKVKYVTEGMRKPAFLSGEQKKAIVDLLFKTNRKVTVKQLKEDYFKKIECFDSVEISGVEDRFNASLGTYHDLLKIIKDKDFLDNEENEDILEDIVLTLTLFEDKEMIEERLKTYAHLFDDKVMKQLKRRHYTGWGRLSRKLINGIRDKQSGKTILDFLKSDGFANRNFIQLIHDDSLTFKEAIQKAQVSGQGHSLHEQIANLAGSPAIKKGILQSVKVVDELVKVMGHKPENIVIEMARENQTTQKGQKNSRERMKRIEEGIKELGSQILKEHPVENTQLQNEKLYLYYLQNGRDMYVDQELDINRLSDYDVDHIVPQSFIKDDSIDNKVLTRSDKNRGKSDDVPSEEVVKKMKNYWRQLLNAKLITQRKFDNLTKAERGGLSELDKAGFIKRQLVETRQITKHVAQILDSRMNTKYDENDKLIREVKVITLKSKLVSDFRKDFQFYKVREINNYHHAHDAYLNAVVGTALIKKYPKLESEFVYGDYKVYDVRKMIAKSEQEIGKATAKRFFYSNIMNFFKTEITLANGEIRKRPLIETNEETGEIVWDKGRDFATVRKVLSMPQVNIVKKTEVQTGALTNESIYARGSFDKLISRKHRFESSKYGGFGSPTVTYSVLVVAKSKVQDGKVKKIKTGKELIGITLLDKLVFEKNPLKFIEDKGYGNVQIDKCIKLPKYSLFEFENGTRRMLASVMANNNSRGDLQKANEMFLPAKLVTLLYHAHKIESSKELEHEAYILDHYNDLYQLLSYIERFASLYVDVEKNISKVKELFSNIESYSISEICSSVINLLTLTASGAPADFKFLGTTIPRKRYGSPQSILSSTLIHQSITGLYETRIDLSQLGSD

SEQ ID NO: 558 - protein, 1367 aa, Streptococcus pyogenes
MDKKYSIGLDIGTNSVGWAVITDDYKVPSKKFKVLGNTDRHSIKKNLIGALLFGSGETAEATRLKRTARRRYTRRKNRICYLQEIFSNEMAKVDDSFFHRLEESFLVEEDKKHERHPIFGNIVDEVAYHEKYPTIYHLRKKLADSTDKADLRLIYLALAHMIKFRGHFLIEGDLNPDNSDVDKLFIQLVQIYNQLFEENPINASRVDAKAILSARLSKSRRLENLIAQLPGEKRNGLFGNLIALSLGLTPNFKSNFDLAEDAKLQLSKDTYDDDLDNLLAQIGDQYADLFLAAKNLSDAILLSDILRVNSEITKAPLSASMIKRYDEHHQDLTLLKALVRQQLPEKYKEIFFDQSKNGYAGYIDGGASQEEFYKFIKPILEKMDGTEELLVKLNREDLLRKQRTFDNGSIPHQIHLGELHAILRRQEDFYPFLKDNREKIEKILTFRIPYYVGPLARGNSRFAWMTRKSEETITPWNFEEVVDKGASAQSFIERMTNFDKNLPNEKVLPKHSLLYEYFTVYNELTKVKYVTEGMRKPAFLSGEQKKAIVDLLFKTNRKVTVKQLKEDYFKKIECFDSVEISGVEDRFNASLGAYHDLLKIIKDKDFLDNEENEDILEDIVLTLTLFEDRGMIEERLKTYAHLFDDKVMKQLKRRRYTGWGRLSRKLINGIRDKQSGKTILDFLKSDGFANRNFMQLIHDDSLTFKEDIQKAQVSGQGHSLHEQIANLAGSPAIKKGILQTVKIVDELVKVMGHKPENIVIEMARENQTTQKGQKNSRERMKRIEEGIKELGSQILKEHPVENTQLQNEKLYLYYLQNGRDMYVDQELDINRLSDYDVDHIVPQSFIKDDSIDNKVLTRSDKNRGKSDNVPSEEVVKKMKNYWRQLLNAKLITQRKFDNLTKAERGGLSELDKAGFIKRQLVETRQITKHVAQILDSRMNTKYDENDKLIREVKVITLKSKLVSDFRKDFQFYKVREINNYHHAHDAYLNAVVGTALIKKYPKLESEFVYGDYKVYDVRKMIAKSEQEIGKATAKYFFYSNIMNFFKTEITLANGEIRKRPLIETNGETGEIVWDKGRDFATVRKVLSMPQVNIVKKTEVQTGGFSKESILPKRNSDKLIARKKDWDPKKYGGFDSPTVAYSVLVVAKVEKGKSKKLKSVKELLGITIMERSSFEKNPIDFLEAKGYKEVKKDLIIKLPKYSLFELENGRKRMLASAGELQKGNELALPSKYVNFLYLASHYEKLKGSPEDNEQKQLFVEQHKHYLDEIIEQISEFSKRVILADANLDKVLSAYNKHRDKPIREQAENIIHLFTLTNLGAPAAFKYFDTTIDRKRYTSTKEVLDATLIHQSITGLYETRIDLSQLGGD

SEQ ID NO: 559 - protein, 1368 aa, Streptococcus sp.
MDKKYSIGLDIGTNSVGWAVITDDYKVPSKKFKVLGNTDRHSIKKNLIGALLFDSGEIAEATRLKRTARRRYTRRKNRICYLQEIFSNEMAKVDDSFFHRLEESFLVEEDKKHERHPIFGNIVDEVAYHEKYPTIYHLRKKLVDSTDKADLRLIYLALAHMIKFRGHFLIEGDLNPDNSDVDKLFIQLVQTYNQLFEENPINASGVDAKAILSARLSKSRRLENLIAQLPGEKKNGLFGNLIALSLGLTPNFKSNFDLAEDAKLQLSKDTYDDDLDNLLAQIGDQYADLFLAAKNLSDAILLSDILRLNSEITKAPLSASMIKRYDEHHQDLTLLKALVRQQLPEKYKEIFFDQSKNGYAGYIDGGASQEEFYKFIKPILEKMDGTEELLAKLNREDLLRKQRTFDNGSIPHQIHLGELHAILRRQEDFYPFLKDNREKIEKILTFRIPYYVGPLARGNSRFAWMTRKSEETITPWNFEEVVDKGASAQSFIERMTNFDKNLPNEKVLPKHSLLYEYFTVYNELTKVKYVTEGMRKPAFLSGEQKKAIVDLLFKTNRKVTVKQLKEDYFKKIECFDSVEISGVEDRFNASLGTYHDLLKIIKDKDFLDNEENEDILEDIVLTLTLFEDREMIEERLKTYAHLFDDKVMKQLKRRRYTGWGRLSRKLINGIRDKQSGKTILDFLKSDGFANRNFMQLIHDDSLTFKEDIQKAQVSGQGDSLHEHIANLAGSPAIKKGILQTVKVVDELVKVMGRHKPENIVIEMARENQTTQKGQKNSRERMKRIEEGIKELGSQILKEHPVENTQLQNEKLYLYYLQNGRDMYVDQELDINRLSDYDVDHIVPQSFIKDDSIDNKVLTRSDKNRGKSDNVPSEEVVKKMKNYWRQLLNAKLITQRKFDNLTKAERGGLSELDKAGFIKRQLVETRQITKHVAQILDSRMNTKYDENDKLIREVKVITLKSKLVSDFRKDFQFYKVREINNYHHAHDAYLNAVVGTALIKKYPKLESEFVYGDYKVYDVRKMLAKSEQEIGKATAKYFFYSNIMNFFKTEITLANGEIRKRPLIETNGETGEIVWDKGRDFATVRKVLSMPQVNIVKKTEVQTGGFSKESILPKRNSDKLIARKKDWDPKKYGGFDSPTVAYSVLVVAKVEKGKSKKLKSVKELLGITIMERSSFEKNPIDFLEAKGYKEVRKDLIIKLPKYSLFELENGRKRMLASAGELQKGNELALPSKYVNFLYLASHYEKLKGSPEDNEQKQLFVEQHKHYLDEIIEQISEFSKRVILADANLDKVLSAYNKHRDKPIREQAENIIHLFTLTNLGAPTAFKYFDTTIDRKRYTSTKEVLDATFIHQSITGLYETRIDLSQLGGD

SEQ ID NO: 560 - protein, 1368 aa, Streptococcus pyogenes
MDKKYSIGLDIGTNSVGWAVITDDYKVPSKKLKGLGNTDRHGIKKNLIGALLFDSGETAEATRLKRTARRRYTRRKNRICYLQEIFSNEMAKVDDSFFHRLEESFLVEEDKKHERHPIFGNIVDEVAYHEKYPTIYHLRKKLADSTDKVDLRLIYLALAHMIKFRGHFLIEGDLNPDNSDVDKLFIQLVQTYNQLFEENPINASRVDAKAILSARLSKSRRLENLIAQLPGEKKNGLFGNLIALSLGLTPNFKSNFDLAEDAKLQLSKDTYDDDLDNLLAQIGDQYADLFLAAKNLSDATLLSDILRVNSEITKAPLSASMIKRYDEHHQDLTLLKALVRQQLPEKYKEIFFDQSKNGYAGYIDGGASQEEFYKFIKPILEKMDGTEELLAKLNREDLLRKQRTFDNGSIPYQIHLGELHAILRRQEDFYPFLKDNREKIEKILTFRIPYYVGPLARGNSRFAWMTRKSEETITPWNFEEVVDKGASAQSFIERMTNFDKNLPNEKVLPKHSLLYEYFTVYNELTKVKYVTEGMRKPAFLSGEQKKAIVDLLFKTNRKVTVKQLKEDYFKKIECFDSVEISGVEDRFNASLGTYHDLLKIIKDKDFLDNEENEDILEDIVLTLTLFEDREMIEERLKTYAHLFDDKVMKQLKRRRYTGWGRLSRKLINGIRDKQSGKTILDFLKSDGFANRNFMQLIHDDSLTFKEDIQKAQVSGQGDSLHEHIANLAGSPAIKKGILQTVKVVDELVKVMGRHKPENIVIEMARENQTTQKGQKNSRERMKRIEEGIKELGSDILKEYPVENTQLQNEKLYLYYLQNGRDMYVDQELDINRLSDYDVDHIVPQSFLKDDSIDNKVLTRSDKNRGKSDNVPSEEVVKKMKNYWRQLLNAKLITQRKFDNLTKAERGGLSELDKVGFIKRQLVETRQITKHVAQILDSRMNTKYDENDKLIREVRVITLKSKLVSDFRKDFQFYKVREINNYHHAHDAYLNAVVGTALIKKYPKLESEFVYGDYKVYDVRKMIAKSEQEIGKATAKYFFYSNIMNFFKTEITLANGEIRKRPLIETNGETGEIVWDKGRDFATVRKVLSMPQVNIVKKTEVQTGGFSKESILPKRNSDKLIARKKDWDPKKYGGFDSPTVAYSVLVVAKVEKGKSKKLKSVKELLGITIMERSSFEKDPIDFLEAKGYKEVRKDLIIKLPKYSLFELENGRKRMLASAGELQKGNELALPSKYVNFLYLASHYEKLKGSPEDNEQKQLFVEQHKHYLDEIIEQISEFSKRVILADANLDKVLSAYNKHRDKPIREQAENIIHLFTLTNLGAPAAFKYFDTTIDRKRYTSTKEVLDATLIHQSITGLYETRIDLSQLGGD

SEQ ID NO: 561 - protein, 1368 aa, Streptococcus pyogenes
MDKKYSIGLDIGTNSVGWAVITDDYKVPSKKFKVLGNTDRHSIKKNLIGALLFDSGETAEATRLKRTARRRYTRRKNRICYLQEIFSNEMAKVDDSFFHRLEESFLVEEDKKHERHPIFGNIVDEVAYHEKYPTIYHLRKKLVDSTDKADLRLIYLALAHMIKFRGHFLIEGDLNPDNSDVDKLFIQLVQTYNQLFEENPINASGVDAKAILSARLSKSRRLENLIAQLPGEKKNGLFGNLIALSLGLTPNFKSNFDLAEDAKLQLSKDTYDDDLDNLLAQIGDQYADLFLAAKNLSDAILLSDILRVNTEITKAPLSASMIKRYDEHHQDLTLLKALVRQQLPEKYKEIFFDQSKNGYAGYIDGGASQEEFYKFIKPILEKMDGTEELLVKLNREDLLRKQRTFDNGSIPHQIHLGELHAILRRQEDFYPFLKDNREKIEKILTFRIPYYVGPLARGNSRFAWMTRKSEETITPWNFEEVVDKGASAQSFIERMTNFDKNLPNEKVLPKHSLLYEYFTVYNELTKVKYVTEGMRKPAFLSGEQKKAIVDLLFKTNRKVTVKQLKEDYFKKIECFDSVEISGVEDRFNASLGTYHDLLKIIKDKDFLDNEENEDILEDIVLTLTLFEDREMIEERLKTYAHLFDDKVMKQLKRRRYTGWGRLSRKLINGIRDKQSGKTILDFLKSDGFANRNFMQLIHDDSLTFKEDIQKAQVSGQGDSLHEHIANLAGSPAIKKGILQTVKVVDELVKVMGRHKPENIVIEMARENQTTQKGQKNSRERMKRIEEGIKELGSQILKEHPVENTQLQNEKLYLYYLQNGRDMYVDQELDINRLSDYDVDHIVPQSFLKDDSIDNKVLTRSDKNRGKSDNVPSEEVVKKMKNYWRQLLNAKLITQRKFDNLTKAERGGLSELDKAGFIKRQLVETRQITKHVAQILDSRMNTKYDENDKLIREVKVITLKSKLVSDFRKDFQFYKVREINNYHHAHDAYLNAVVGTALIKKYPKLESEFVYGDYKVYDVRKMIAKSEQEIGKATAKYFFYSNIMNFFKTEITLANGEIRKRPLIETNGETGEIVWDKGRDFATVRKVLSMPQVNIVKKTEVQTGGFSKESILPKRNSDKLIARKKDWDPKKYGGFDSPTVAYSVLVVAKVEKGKSKKLKSVKELLGITIMERSSFEKNPIDFLEAKGYKEVKKDLIIKLPKYSLFELENGRKRMLASAGELQKGNELALPSKYVNFLYLASHYEKLKGSPEDNEQKQLFVEQHKHYLDEIIEQISEFSKRVILADANLDKVLSAYNKHRDKPIREQAENIIHLFTLTNLGAPAAFKYFDTTIDRKRYTSTKEVLDATLIHQSITGLYETRIDLSQLGGD

SEQ ID NO: 562 - protein, 1368 aa, Streptococcus pyogenes
MDKKYSIGLDIGTNSVGWAVITDDYKVPSKKFKVLGNTDRHSIKKNLIGALLFDSGETAEATRLKRTARRRYTRRKNRICYLQEIFSNEMAKVDDSFFHRLEESFLVEEDKKHERHPIFGNIVDEVAYHEKYPTIYHLRKKLVDSTDKADLRLIYLALAHMIKFRGHFLIEGDLNPDNSDVDKLFIQLVQTYNQLFEENPINASGVDAKAILSARLSKSRRLENLIAQLPGEKKNGLFGNLIALSLGLTPNFKSNFDLAEDAKLQLSKDTYDDDLDNLLAQIGDQYADLFLAAKNLSDAILLSDILRLNSEITKAPLSASMIKRYDEHHQDLTLLKALVRQQLPEKYKEIFFDQSKNGYAGYIDGGASQEEFYKFIKPILEKMDGTEELLAKLNREDLLRKQRTFDNGSIPHQIHLGELHAILRRQEDFYPFLKDNREKIEKILTFRIPYYVGPLARGNSRFAWMTRKSEETITPWNFEEVVDKGASAQSFIERMTNFDKNLPNEKVLPKHSLLYEYFTVYNELTKVKYVTEGMRKPAFLSGEQKKAIVDLLFKTNRKVTVKQLKEDYFKKIECFDSVEISGVEDRFNASLGTYHDLLKIIKDKDFLDNEENEDILEDIVLTLTLFEDREMIEERLKTYAHLFDDKVMKQLKRRRYTGWGRLSRKLINGIRDKQSGKTILDFLKSDGFANRNFMQLIHDDSLTFKEDIQKAQVSGQGDSLHEHIANLAGSPAIKKGILQTVKVVDELVKVMGRHKPENIVIEMARENQTTQKGQKNSRERMKRIEEGIKELGSQILKEHPVENTQLQNEKLYLYYLQNGRDMYVDQELDINRLSDYDVDHIVPQSFIKDDSIDNKVLTRSDKNRGKSNNVPSEEVVKKMKNYWRQLLNAKLITQRKFDNLTKAERGGLSELDKAGFIKRQLVETRQITKHVAQILDSRMNTKYDENDKLIREVKVITLKSKLVSDFRKDFQFYKVREINNYHHAHDAYLNAVVGTALIKKYPKLESEFVYGDYKVYDVRKMIAKSEQEIGKATAKYFFYSNIMNFFKTEITLANGEIRKRPLIETNGETGEIVWDKGRDFATVRKVLSMPQVNIVKKTEVQTGGFSKESILPKRNSDKLIARKKDWDPKKYGGFDSPTVAYSVLVVAKVEKGKSKKLKSVKELLGITIMERSSFEKNPIDFLEAKGYKEVRKDLIVKLPKYSLFELENGRKRMLASAGELQKGNELALPSKYVNFLYLASHYEKLKGSPEDNEQKQLFVEQHKHYLDEIIEQISEFSKRVILADANLDKVLSAYNKHRDKPIREQAENIIHLFTLTNLGAPAAFKYFDTTIDRKRYTSTKEVLDATFIHQSITGLYETRIDLSQLGGD

SEQ ID NO: 563 - protein, 1368 aa, Streptococcus pyogenes
MDKKYSIGLDIGTNSVGWAVITDDYKVPSKKFKVLGNTDRHSIKKNLIGALLFDSGEIAEATRLKRTARRRYTRRKNRICYLQEIFSNEMAKVDDSFFHRLEESFLVEEDKKHERHPIFGNIVDEVAYHEKYPTIYHLRKKLVDSTDKADLRLIYLALAHMIKFRGHFLIEGDLNPDNSDVDKLFIQLVQTYNQLFEENPINASGVDAKAILSARLSKSRRLENLIAQLPGEKKNGLFGNLIALSLGLTPNFKSNFDLAEDAKLQLSKDTYDDDLDNLLAQIGDQYADLFLAAKNLSDAILLSDILRLNSEITKAPLSASMIKRYDEHHQDLTLLKALVRQQLPEKYKEIFFDQSKNGYAGYIDGGASQEEFYKFIKPILEKMDGTEELLAKLNREDLLRKQRTFDNGSIPHQIHLGELHAILRRQEDFYPFLKDNREKIEKILTFRIPYYVGPLARGNSRFAWMTRKSEETITPWNFEEVVDKGASAQSFIERMTNFDKNLPNEKVLPKHSLLYEYFTVYNELTKVKYVTEGMRKPAFLSGEQKKAIVDLLFKTNRKVTVKQLKEDYFKKIECFDSVEISGVEDRFNASLGTYHDLLKIIKDKDFLDNEENEDILEDIVLTLTLFEDREMIEERLKTYAHLFDDKVMKQLKRRRYTVWGRLSRKLINGIRDKQSGKTILDFLKSDGFANRNFMQLIHDDSLTFKEDIQKAQVSGQGDSLHEHIANLAGSPAIKKGILQTVKVVDELVKVMGRHKPENIVIEMARENQTTQKGQKNSRERMKRIEEGIKELGSQILKEHPVENTQLQNEKLYLYYLQNGRDMYVDQELDINRLSDYDVDHIVPQSFIKDDSIDNKVLTRSDKNRGKSDNVPSEEVVKKMKNYWRQLLNAKLITQRKFDNLTKAERGGLSELDKAGFIKRQLVETRQITKHVAQILDSRMNTKYDENDKLIREVKVITLKSKLVSDFRKDFQFYKVREINNYHHAHDAYLNAVVGTALIKKYPKLESEFVYGDYKVYDVRKMLAKSEQEIGKATAKYFFYSNIMNFFKTEITLANGEIRKRPLIETNGETGEIVWDKGRDFATVRKVLSMPQVNIVKKTEVQTGGFSKESILPKRNSDKLIARKKDWDPKKYGGFDSPTVAYSVLVVAKVEKGKSKKLKSVKELLGITIMERSSFEKNPIDFLEAKGYKEVRKDLIIKLPKYSLFELENGRKRMLASAGELQKGNELALPSKYVNFLYLASHYEKLKGSPEDNEQKQLFVEQHKHYLDEIIEQISEFSKRVILADANLDKVLSAYNKHRDKPIREQAENIIHLFTLTNLGAPTAFKYFDTTIDRKRYTSTKEVLDATFIHQSITGLYETRIDLSQLGGD

SEQ ID NO: 564 - protein, 1368 aa, Streptococcus pyogenes
MDKKYSIGLDIGTNSVGWAVITDDYKVPSKKFKVLGNTDRHSIKKNLIGALLFDSGETAEATRLKRTARRRYTRRKNRICYLQEIFSNEIAKVDDSFFHRLEESFLVEEDKKHERHPIFGNIVDEVAYHEKYPTIYHLRKKLADSTDKADLRLIYLALAHMIKFRGHFLIEGDLNPDNSDVDKLFIQLVQTYNQLFEENPINASRVDAKAILSARLSKSRRLENLIAQLPGEKRNGLFGNLIALSLGLTPNFKSNFDLAEDAKLQLSKDTYDDDLDNLLAQIGDQYADLFLAAKNLSDAILLSDILRVNTEITKAPLSASMIKRYDEHHQDLTLLKALVRQQLPEKYKEIFFDQSKNGYAGYIDGGASQEEFYKFIKPILEKMDGTEELLAKLNREDLLRKQRTFDNGSIPHQIHLGELHAILRRQEDFYPFLKDNREKIEKILTFRIPYYVGPLARGNSRFAWMTRKSEETITPWNFEEVVDKGASAQSFIERMTNFDKNLPNEKVLPKHSLLYEYFTVYNELTKVKYVTEGMRKPAFLSGEQKKAIVDLLFKTNRKVTVKQLKEDYFKKIECFDSVEISGVEDRFNASLGTYHDLLKIIKDKDFLDNEENEDILEDIVLTLTLFEDREMIEERLKTYAHLFDDKVMKQLKRRRYTGWGRLSRKLINGIRDKQSGKTILDFLKSDGFANRNFMQLIHDDSLTFKEDLQKAQVSGQGDSLHEHIANLAGSPAIKKGILQTVKVVDELVKVMGRHKPENIVIEMARENQTTQKGQKNSRERMKRIEEGIKELGSDILKEYPVETTQLQNEKLYLYYLQNGRDMYVDQELDINRLSDYDVDHIVPQSFLKDDSIDNKVLTRSDKNRGKSDNVPSEEVVKKMKNYWKQLLNAKLITQRKFDNLTKAERGGLSELDKAGFIKRQLVETRQITKHVAQILDSRMNTKYDENDKLIREVRVITLKSKLVSDFRKDFQFYKVREINNYHHAHDAYLNAVVGTALIKKYPKLESEFVYGDYKVYDIRKMIAKSEQEIGKATAKYFFYSNIMNFFKTEITLANGEIRKRPLIETNGETGEIVWDKGRDFATVRKVLSMPQVNIVKKTEVQTGGFSKESILPKRNSDKLIARKKDWDPKKYGGFDSPTVAYSVLVVAKVEKGKSKKLKSVKELVGITIMERSSFEKDPVDFLEAKGYKEVRKDLIIKLPKYSLFELENGRKRMLASAGELQKGNELALPSKYVNFLYLASHYEKLKGSPEDNEQKQLFVEQHKHYLDEIIEQISEFSKRVILADANLDKVLSAYNKHRDKPIREQAENIIHLFTLTNLGAPAAFKCFDTTIGRNRYKSIKEVLDATLIHQSITGLYETRIDLSQLGGD

SEQ ID NO: 565 - protein, 1368 aa, Streptococcus pyogenes [sequence omitted]

SEQ ID NO: 566 - protein, 1368 aa, Streptococcus pyogenes; identical to SEQ ID NO: 560

SEQ ID NO: 567 - protein, 1370 aa, Streptococcus ratti
  Streptococcus ratti FA-1 = DSM 20564
MKKPYSIGLDIGTNSVGWAVITDDYKVPAKKMKVLGNTDKNYIKKNLLGALLFDSGNTAEDRRLKRTARRRYTRRRNRLLYLQDIFSDEMNKVDESFFHRLEDSFLVSEDKRGDHHPIFGNVVDEVKYHEQFPTIYHLRKYLADTPEKADLRLVYLALAHMIKFRGHFLIDDPKLDVKNTDSQELFSQFLTAYDVTQEDSHLADVKINISDIITEKMNKSRKVEALLFHFPSQKKNSFFGNLVSLVFGLLPNFKTNFNLAEDAKLQLSKDSYDEDLENLLGQIGDEYTDVFVAARKLYDSILLSGILTVNDLSTKAILSASMVRRYEEHNKDLAKLKAFVKANFTHDVFKEVFSDASKNGYAGYIEGKTSQEDFYKYVKNLIGKVDGSADFIEKIDREDFLRKQRTFDNGSIPHQVHLAEMKAILRRQGEYYPFLKEHAEKIQQILTFRIPYYVGPLDRHGHSDFAWASFNSEEKVTPWNFEEIIDKNKSAQAFIERMTNQDLYLPNEKVLPKHSPLYEKYTVYNELTKIKYVTETGTAKFFDANLKQEIFDGLFKKERKVTKRKLLTFLEKNFDEFRIVDIQGLDKETETFNASYGIYQDLLKIIKDKAFMDDSENADILEDIVLTLTLFEDREMIKQRLAKYADLFDKKVIDNLARRRYTGWGRLSAKLLNGIRDKRSRKTIMDYLVDDGRSNRNLMQLITDDNLTFKDEIAKAQYSDNSDDLHQVVQDLAGSPAIKKGILQSVKIVDELVKVMGYEPEQIVVEMARENQTTAKGRRNSQQRYKRLEEAIKNLDRDLNYKILKEHPTDNQALQNDRLFLYYLQNGRDMYTGESLDINRLSDYDIDHIIPQAFIKDNSIDNRVLVSSAKNRGKSDDVPSEDVVNRMRPFWNKLLNCGLISQRKYSNLTKKELTPNDKAGFIKRQLVETRQITKHVARILDEHFNKEFDEDKKRIRKVKVVTLKSNLVSNFRKEFELYKVREINDYHHAHDAYLNAVVAKALLMKYPKLEPEFVYGEYPKYNSYRERKTATQRMFFYSNIMNMFKSKVKLADERIIERPMIEVNDETGEIAWDKTKHIATVKKVLSYPQINIVKKVEEQTGGLTNETIYPRGSFDKLLNRKNTLEASKYGGFGSPTVAYCVLVVADSKNENGKVKKLKLGSELLGITILEKNDFENNSLDFLSRKGYQGVQEKKIIKLPKYSLFEFQDGSRRMLSSVMANDNKRGDLQKANEMILPAYLVKLLYHAKHINSVGEPAHKNYINEHCSEFQDLLNYIRQFADKFVDVDKNLSKIRSLSKSMAEYSVSEICSSFVNLLTLTALGAPADFKFFGTTIPRKRYGSPQSILSATLIHQSITGLYETRIDLSKLGED

SEQ ID NO: 568 - protein, 1127 aa, Streptococcus salivarius
MSDLVLGLDIGIGSVGVGILNKVTGEIIHKNSRIFPAAQAENNVERRINRQGRRLTRRKKHRRVRLNHLFEESGLITDFTNVSINLNPYQLRVKGLTDELSNEELFIALKNMVKHRGISYLDDASDDGNSSVGDYAQIVKENSKQLETKTPGQIQLERYQKYGQLRGDFTVEEDGKKHRLINVFPTSAYRAEALRILQTQQEFNPQITDEFINSYLQILTGKRKYYHGPGNEKSRTDYGRYTTKKDSEDEYITLDNIFGILIGKCTFYPEEYRAAKASYTAQEFNLLNDLNNLTVPTETKKLSEEQKNQIITNVKNEKAMGPAKLFKYIAKLLSCDVADIKGYRIDKSDKAEIHTFEAYRKMKTLATIDIEQMERENLDKLAYVLTLNTEKEGIQEALEHEFADGTFSQEQIDELVQFRKANSSIFGKGWHSFSVKLMMELIPELYATSEEQMTILTRLGKQKTTSSSNKTKYIDEKQLTEEIYNPVAAKSVRQAIKIVNAAIKEYGDFDNIVIEMARETNEDDEKKAIQKIQKANKDEKDAAMLKAANQYNGKAELPHSVFHGHKQLATKIRLWHQQGERCLYTGKTISIHDLINNSNQFEIDHILPLSITFDDSLANKVLVYATANQEKGQRTPYQALDSMDDAWSFRELKAFVRDSKALSNKKKEYLLTEEDISKFDVRKKFIERNLVDTRYASRVVLNALQEHFRVHKTDTKVSVVRGQFTSQLRRHWGIEKTRDTYHHHAVDALIIAASSQLNLWKKQKNTLVSYSEDQLLDIETGELISDDEYKESVFKAPYQHFVDTLKSKEFEDSILFSYQVDSKFNRKISDATIYATRQAKVGKDKKDETYVLGKIKDIYSQTGYDAFIKIYKKDKSKFLMYRHDPQTFEKVIEPILENYPNKELNEKGKEVPCNPFLKYKEDHGYIRKYSKKGNGPEIKSLKYYDSKLGNHIDITPKNSNNKVVLQSVSPWRADVYFNKTTGKYEILGLKYADLKFEKGTGTYKISEEKYNDIKIKEGVDSDSEFKFTLYKNDLLLIKDTETKEQQLFRFLSRTMPNVKHYVELKPYDKQKFDDNEELIKILGIVAKGGQCKKGVSKPNISIYKIRTDVLGNQHIIKNEGDKPKLDF

SEQ ID NO: 569 - protein, 1385 aa, Streptococcus salivarius
  Streptococcus salivarius K12
MTKPYSIGLDIGTNSVGWAVITDDYKVPSKKMKVLGNTSKKYIKKNLLGALLFDSGITAEGRRLKRTARRRYTRRRNRILYLQEIFSTEMATLDDAFFQRLDDSFLVPDDKRDSKYPIFGNLVEEKVYHDEFPTIYHLRKHLADSSKKADLRLVYLALAHMIKYRGHFLIEGDFNSKNNDLQKNFQDFLDTYNAIFESDLSLENSKQLEEIVKDKISKSAKKDRILKLFPGEKNSGIFSEFLKLIVGNQADFRKYFNLDEKTSLQFSKESYDEDLETLLGHIGDDYSDVFLKAKKLYDAILLSGILTVTDNGTEAPLSSAMIMRYKEHEEDLALLKAYIRNISLETYNEVFKDNTKNGYAGYIDGKTSQEDFYVYLKRLLAGLEGADYFLEKIDREDFLRKQRTFDNGSIPYQIYLQEMRAILDKQAKFYPFLAKNKERIEKILTFRIPYYVGPLARGNSDFAWSIRKRNEKITPWNFEDVIDKESSAEAFINRMTSFDLYLPEEKVLPKHSLLYENFTVYNELTKVRFIAEGMRDYQFLDSKQKKDIVRLYFKGKRKVTDKDIIEYLHAIDGYDGIELKGIEKQFNSSLSTYHDLLNIINDKEFLDDSSNETIIEEIIHTLTMFEDREMIKQRLSKFDNIFDKSVLKKLSRRHYTGWGKLSAKLINGIRDEKSGNTILDYLIDDGVSNRNFMQLIHDDALSFKKKIKKAQIIGDKDNIKQVVKSLPGSPAIKKGILQSIKIVDELVKVMGREPESIVVEMARENQYTNQGKSNSQQRLKRLEESLKGLGSKILKENVPTRLSKIDNNALQNDRLYLYYLQNGKDMYTGEELDIDRLSNYDIDHIIPQAFLKDDSIDNKVLVSSASNRGKSDDVPSLEVVKKRKTLWYQLLKSKLISQRKFDNLTKAERGGLSQEEKAGFIQRQLVETRQITKHVARLLDERFNNKKDENNRTLRTVKIITLKSSLVSQFRKDFELYKVREINDFHHAHDAYLNAVVASALLKKYPKLEPEFVYGDYPKYNSFRERKSATEKVYFYSNIMNIFKKSIPLADGTVIDRPLIEVNEETGESVWNKVADLNTVRKVLSYSQVNIVKKVEEQNHGLDRGKPKGLFNANLSSKPKPNSKENLVGAKEYLDPKKYGGYAGISNSFAILVKGTIEKGAKKKITNVLEFQGISILDRIYYRKDKLNFLLEKGYKDIELIIELPKYSLFELSDGSRRMLASILSTNNKRGEIHKGNQIFISQKFVKLLYHAKRISSTFNENHRKYVENHKKEFEELFYYILEFNENYVGAKKNGELLKSAFQSWQNHSIDELCSSFIGPTGSERKGLFELTSRGGAADFEFLGVKIPRYRDYTPSSLLKDATLIHQSVTGLYETRIDLGKLGED

SEQ ID NO: 570 - protein, 1135 aa, Streptococcus salivarius
  Streptococcus salivarius PS4
MSDLVLGLDIGIGSVGVGILNKVTGEIIHKNSRIFPAAQAENNLERRTNRQGRRLTRRKKHRRVRLNHLFEESGLITDFTKVSINLNPYQLRVKGLTAELSNEELFIALKNMVKHRGISYLDDASDDGNSSVGDYAQIVKENSKQLETKTPGQIQLERYQKYGQLRGDFTVEEDGRKHRLINVFPTSAYHAEALRILQTQQEFNPQITDEFINSYLEILTGKRKYYHGPGNEKSRTDYGKYTTKKDAQGQYITLNNIFGILIGKCTFYPEEYRAAKASYTAQEFNLLNDLNNLTVPTETKKLSEEQKYQIITYVKNEKAMGPAKLFKYIAKLLACDIADIKGYRIDKSDKAEIHTFEAYRKMKTLETIDIEQIEREKLDKLAYVLTLNTEREGIQEALDHEFADGTFSQEQVDELVQFRKANSSIFGKGWHSFSVKLMMELIPELYATSEEQMTILTRLGKQKTTSSSNKTKYIDEKQLTEEIYNPVVAKSVRQAIKIVNAAIKKYGDFDNIVIEMARETNEDDEKKAIQKIQKANKAEKDAAMRKAANQYNGKAELPHSVFHGHKQLATKIRLWHQQGERCLYTGKTISIHDLINNPNQFEIDHILPLSITFDDSLANKVLVYATANQEKGQRTPYQALDSMDDAWSFRELKAFVRESKALSNKKKEYLLTEEDISKFDVRKKFIERNLVDTRYASRVVLNALQEHFKAHKIDTKVSVVRGQFTSQLRRHWGIDKTRDTYHHHAVDALIIAASSQLNLWKKQKNTLVSYSEDQLLDIETGELISDDEYKESVFKAPYQHFVDTLKSKEFEDSILFSYQVDSKFNRKISDATIYATRQAKVGKDKKDETYVLGKIKDIYALGTKTPSKTGFYKFLDLYNKDKSQFLVYQKDRKTWDEVIEKIMEQYRPFKESDKNGKEVDFNPFEKYRIENGPIRKYSRKGNGPEIKSLKYYASKLGNHIDITPKDSNNKVVLQSVSPWRADVYFNKTTGSYEILGLKYADLQFEKGTGTYRISEEKYNDIKKKEGVDSDSEFKFTLYKNDLLLIKDTETKEQRLFRFLSRSMPNKKHYVELKPYSKDKFEKNESLIEILGSADKSGRCIKGLAKSNLSIFKVRTDVLGNQHIIKNEGDKPKLDF

SEQ ID NO: 571 - protein, 1377 aa, Streptococcus sanguinis
  Streptococcus sanguinis SK115
MKKPYSIGLDIGTNSVGWAVITDDYKVPSKKMKVLGNTDKHFIKKNLIGALLFDEGTTAEDRRLKRTSRRRYTRRKNRLRYLQEIFSEEISKLDSSFFHRLDDSFLVPEDKRGSKYPIFATLEEEKEYHKKFPTIYHLRKHLADSKEKTDLRLIYLALAHMIKYRGHFLYEESFDIKNNDIQKIFNEFISIYDNTFEGSSLSGQNAQVEAIFTDKISKSTKRERVLKLFSDEKSTGLFSEFLKLIVGNQADFKKHFDLEEKAPLQFSKDTYDEDLENLLGQIGDGFADLFLVAKKLYDAILLSGILTVTDPSTKAPLSASMIERYENHQEDLAALKQFIKNNLSEKYAEVFSDQSKDGYAGFIDGKTTQEAFYKYIKNLLSKLEGADYFLNKIEREDFLRKQRTFDNGSIPHQIHLQEMNAILRRQGEHYLFLKENREKIEKILAFRIPYYVGPLARGNRDFAWLTRNSDQAIRPWNFEEVVDKASSAEDFINKMTNYDLYLPEEKVLPKHSLLYETFAVYNELTKVKFIAEGLRDYQFLDSGQKKQIVNQLFKDKRKVTEKDIIHYLHNVDGYDGIELKGIEKQFNASLSTYHDLLKIIKDKEFMDNPKNGEILENIIHTLTIFEDREMIKQRLAQYDTLFDEKVIKALTRRHYTGWGKLSAKLINGIRDKQTGKTILEYLIDDGDCNRNFMQLINDDGLSFKEIIQKAQVVGKTDDVKQVVQEIPGSPAIKKGILQSIKIVDELVKVMGHNPESIVIEMARENQTTAKGKKNSQQRYKRIEDALKNLAPGLDSNILKENPTDNIQLQNDRLFLYYLQNGKDMYTGKAIDINQLSNYDIDHIIPQAFIKDDSLDNRVLTSSKDNRGKSDNVPSIEVVQKRKAFWQQLLDSKLISERKFNNLTKAKRGGLDERDKVGFIKRQLVETRQITKHVAQLLDTRFNTEVNEENQKIRTVKIITLKSNLVSNFRKEFGLYKVREINDYHHAHDAYLNAVVAKAILKKYPKLEPEFVYGDYQKYDLKRYILKSKASNTIDKATEKYFFYSNLLNFFKEKVRYADGTIKKRENIEYSNDTGEIAWNKEKDFATIKKVLSLPQVNIVKKTEEQTVGQNGGLFDNNIVSKKKVVDASKLIPIKSSLSPEKYGGYARPTIAYSVLVIADIEKGKGKAKKLKRIKEIVGITIQDKKKFESNPVTYLEECGYKNINSNLIIKLPKYSLFEFNDGQRRLLASSIELQKGNELILPYHLTALLYHAQRINKISEPIHKQYVEAHQNEFKELLTTIISLSKKYIQKPNVELLLQQAFDQADKDIYQLSESFISLLKLTSFGAPGAFKFLGVEISQSSVRYKPNSQFLDTTLIHQSITGLYETRIDLSKLGED

SEQ ID NO: 572 - protein, 1392 aa, Streptococcus sanguinis
  Streptococcus sanguinis SK330
MENKNYSIGLDIGTNSVGWAVITDDYKVPSKKMKVFGNTDKHFIKKNLIGALLFDEGATAEDRRLKRTARRRYTRRKNRLRYLQEIFSEEISKLDSSFFHRLDDSFLVPKDKRGSKYPIFATLEEEKEYHKKFPTIYHLRKHLADSKEKTDLRLIYLALAHMIKYRGHFLYEESFDIKNNDIQKIFNEFISIYDNTFEGSSLSGQNAQVEAIFTDKISKSAKRERVLKLFSDEKSTSLFSEFLKLIVGNQADFKKHFDLEEKAPLQFSKDTYDEDLENLLGQIGDGFTDLFLVAKKLYDAILLSGILTVTDPSTKAPLSASMIERYESHQKDLAALKQFIKNNLPKRYNEVFSDQSKDGYAGYIDGKTTQEAFYKYIKNLLSKFEGADYFLDKIEREDFLRKQRTFDNGSIPHQIHLQEMNAILRRQGEHYPFLKENREKIEKILTFRIPYYVGPLARGNRDFAWLTRNSDQAIRPWNFEEIVDKASSAEEFINKMTNYDLYLPEEKVLPKHSLLYETFAVYNELTKVKFIAEGLRDYQFLDSGQKKQIVNQLFKEKRKVTEKDIIHYLHNVDGYDGIELKGIEKQFNASLSTYHDLLKIIKDKEFMDDPKNEEILENIVHTLTIFEDREMIKQRLAQYDSIFDEKVIKALTRRHYTGWGKLSAKLINGICDKQTGDTILDYLIDDGKINRNFMQLINDDGLSFKEIIQKAQVVGKTDDVKQVVQELPGSPAIKKGILQSIKIVDELVKVMGYAPESIVIEMARENQTTARGKKNSQQRYKRIEDSLKNLAPGLDSNILKENPTDNIQLQNDRLFLYYLQNGKDMYTGKPLDIDQLSSYDIDHIIPQAFIKDDSIDNRVLTSSKDNRGKSDNVPSLEVVQKRKAFWQQLLDSKLISERKFNNLTKAERGGLDERDKVGFIRRQLVETRQITKHVAQILDASFNTEVNEKNQKIRTVKIITLKSNLVSNFRKEFELYKVREINDYHHAHDAYLNAVVAKAILKKYPKLEPEFVYGDYQKYDLKRYISRFKPSKEIEKATEKYFFYSNLLNFFKEEVHYADGIIVKRENIEYSKDTGEIAWNKEKDFATIKKVLSYPQVNIVKKTEIQTHGLDRGKPKGLFNSNPSPKPSEDSKENLVPIKQGLDPRKYGGYAGISNSYAVLVKAIVEKGAKKQQKTILEFQGISILDKINFENNKENYLLKKRYIEILSTITLPKYSLFEFPDGTRRRLASILSTNNKRGEIHKGNELVLPGKYTTLLYHAKNINKKLEPEHLEYVEKHRNDFAKLLECVLNFNDKYVGALKNGERIRQAFTDWETVDIEKLCFSFIGPENSKNAGLFELTSQGSASDFEFLGVKIPRYRDYAPSSLLKATLIHQSITGLYETRIDLSKLGED

SEQ ID NO: 573 - protein, 1370 aa, Streptococcus sanguinis
  Streptococcus sanguinis SK353
MKKPYSIGLDIGTNSVGWAVVTDDYKVPAKKMRVFGDTDRSHIKKNLLGTLLFDDGNTAESRRLKRTARRRYTRRRNRILYLQEIFTESMNEIDESFFHRLDDSFLVPEDKRGSKYPIFATLQEEKEYHKQFPTIYHLRKQLADSKEKSDVRLIYLALAHMIKYRGHFLYEETFDIKNNDIQKIFNEFINIYDNTFEGSSLSGQNAQVEAIFTDKISKSAKRERVLKLFPDEKSTGLFSEFLKLIVGNQADFKKHFDLEEKAPLQFSKDTYDEELENLLGQIGDDFADLFLIAKKLYDAILLSGILTVTDPSTKAPLSASMIERYENHQKDLAALKQFIKNNLPEKYVEVFSDQSKDGYAGYIDGKTTQEAFYKYIKNLLSKFEGADYFLDKIEREDFLRKQRTFDNGSIPHQIHLQEMNAILRRQGEHYPFLKENREKIEKILTFRIPYYVGPLARDNRDFSWLTRNSDEPIRPWNFEEVVDKARSAEDFIHRMTNYDLYLPEEKVLPKHSLLYETFAVYNELTKVKFIAEGLRDYQFLDSGQKKQIVNQLFKEKRKVTEKDIIHYLHNVDGYDGIELKGIEKQFNANLSTYHDLLKITKDKEFMDDPKNEEILENIVHTLTIFEDREMIKQRLAQYDTLFDEKVIKALTRRHYTGWGKLSAKLINGIRDKQSGKTILDYLIDDDKINRNFMQLINDDGLSFKEIIQKAQVVGKTDDVKQVVQELPGSPAIKKGILQSIKIVDELVKVMGYALESIVIEMARENQTTARGKKNSQQRYKRIEDALKNLAPGLDSNILKENPTDNIQLKNDRLFLYYLQNGKDMYTGKPLDINQLSSYDIDHIIPQAFIKDDSIDNRVLTSSKDNRGKSDNVPSLEVVQKRKAFWQQLLDSKLISERKFNNLTKAERGGLDERDKVGFIRRQLVETQQITKNVAQILDARFNTEVKEKNQKIRTVKIITLKSNLVSNFRKEFGLYKVREINNYHHAHDAYLNAVVAKAILKKYPKLEPEFVYGDYQKYDLKKYISRFKPSKEIEKATEKYFFYSNLLNFFKEEVLYADGTIRKRENIEYSKDTGEIAWDKEKDFATIKKVLSYPQVNIVKKREVQTGGFSKESILPKGNSDKLIPRKTKDILWDTTKYGGFDSPVIAYSILLIADIEKGKAKKLKTVKTLVGITIMEKAAFEENPITFLENKGYHNVRKENILCLPKYSLFELENGRRRLLASAKELQKGNEIVLPVCLTTLLYHSKNLHKLDEPEHLEYIQKHRNEFKDLLNLVSEFSQKYILAEANLEKIKDLYADNEQADIEILANSFINLLTFTALGAPAAFKFFGKDVDRKRYTTVSEILNATLIHQSITGLYETRIDLSKLGEE

SEQ ID NO: 574 - protein, 1421 aa, Streptococcus sanguinis
  Streptococcus sanguinis SK49
MTKFNKNYSIGLDIGVSSVGYAVVTEDYRVPAFKFKVLGNTEKEKIKKNLIGSTTFVSAQPAKGTRVFRVNRRRIDRRNHRITYLRDIFQKEIEKVDKNFYRRLDESFRVLGDKSEDLQIKQPFFGDKELETAYHKKYPTIYHLRKHLADADKNSPVADIREVYMAISHILKYRGHFLTLDKINPNNINMQNSWIDFIESCQEVFDLEISDESKNIADIFKSSENRQEKVKKILPYFQQELLKKDKSIFKQLLQLLFGLKTKFKDCFELEEEPDLNFSKENYDENLENFLGSLEEDFSDVFAKLKVLRDTILLSGMLTYTGATHARFSATMVERYEEHRKDLQRFKFFIKQNLSEQDYLDIFGRKTQNGFDVDKETKGYVGYITNKMVLTNPQKQKTIQQNFYDYISGKITGIEGAEYFLNKISDGTFLRKLRTSDNGAIPNQIHAYELEKIIERQGKDYPFLLENKDKLLSILTFKIPYYVGPLAKGSNSRFAWIKRATSSDILDDNDEDTRNGKIRPWNYQKLINMDETRDAFITNLIGNDIILLNEKVLPKRSLIYEEVMLQNELTRVKYKDKYGKAHFFDSELRQNIINGLFKNNSKRVNAKSLIKYLSDNHKDLNAIEIVSGVEKGKSFNSTLKTYNDLKTIFSEELLDSEIYQKELEEIIKVITVFDDKKSIKNYLTKFFGHLEILDEEKINQLSKLRYSGWGRYSAKLLLDIRDEDTGFNLLQFLRNDEENRNLTKLISDNTLSFEPKIKDIQSKSTIEDDIFDEIKKLAGSPAIKRGILNSIKIVDELVQIIGYPPHNIVIEMARENMTTEEGQKKAKTRKTKLESALKNIENSLLENGKVPHSDEQLQSEKLYLYYLQNGKDMYTLDKTGSPAPLYLDQLDQYEVDHIIPYSFLPIDSIDNKVLTHRENNQQKLNNIPDKETVANMKPFWEKLYNAKLISQTKYQRLTTSERTPDGVLTESMKAGFIERQLVETRQIIKHVARILDNRFSDTKIITLKSQLITNFRNTFHIAKIRELNDYHHAHDAYLAVVVGQTLLKVYPKLAPELIYGHHAHFNRHEENKATLRKHLYSNIMRFFNNPDSKVSKDIWDCNRDLPIIKDVIYNSQINFVKRTMIKKGAFYNQNPVGKFNKQLAANNRYPLKTKALCLDTSIYGGYGPMNSALSIIIIAERFNEKKGKIETVKEFHDIFIIDYEKFNNNPFQFLNDTSENGFLKKNNINRVLGFYRIPKYSLMQKIDGTRMLFESKSNLHKATQFKLTKTQNELFFHMKRLLTKSNLMDLKSKSAIKESQNFILKHKEEFDNISNQLSAFSQKMLGNTTSLKNLIKGYNERKIKEIDIRDETIKYFYDNFIKMFSFVKSGAPKDINDFFDNKCTVARMRPKPDKKLLNATLIHQSITGLYETRIDLSKLGED

SEQ ID NO: 575 - protein, 1026 aa, Streptococcus sp.
  Streptococcus sp. BS35b
MNGLVLGLDIGIASVGVGILEKNSGKIIHANSRLFPAATADNNVERRKNRQARRLNRRKKHRGVRFQDLFEDYGLLTDFSKVSINLNPYRLRVDGLNQQLTNEELFIALKNIVKRRGISYLDDASEDGGAVSSDYGKAVEENRKLLAEQTPGQIQLERFEKYGQVRGDFTVVENGEKRRLINVFSTSAYRKEAEKILRKQQEFNNQITDEFIEDYLKILTGKRKYYHGPGNEKSRTDYGRFRTDGTTLDNIFGVLIGKCTFYPNEYRASKSSYTAQEFNLLNDLNNLTVPTETKKLSEEQKKVIVEYAKEAKTLGASTLLKYIVKMIDASVDQISGYRVDVNNKPEMHTFEVYRKMQSLETISVGELSRNVLDELAHILTLNTEREGIEEAINSKLMGVFSQDQVLELVQFRKNNSSLFSKGWHNFSLKLMMELIPELYETSEEQMTILTRLGKQKSKETSKRTKYIDEKELTEEIYNPVVAKSVRQAIKIINEATKKHGIFDNIVIEMARENNEEDAKKDYIKRQKANQDEKNAAMEKAAFQYNGKKELPGNIFNGHKELATKIRLWHQQGEKCLYTGKTIPISDLIHNQYKYEIDHILPLSLSFDDSLSNKVLVHATANQEKGQRTPFQALDSMDDAWSYREFKSYVKDLKSLSNKKKDYLLTEEDISKIEVKQKFIERNLVDTRYSSRVVLNALQDFYKSHQFDTTISVVRGQFTSQLRRKWGLEKSRETYHHHAVDALIIAASSQLRLWKKQNNPLITYKEGQFIDSQTGEIISLTDDEYKELVFKAPYDHFVDTLHSKTFEDGILFSYQVDSKYNRKISDATIYATRKAKLDKDKSEETYVLGKIKDIYSQAGYDAFIKIYNKDKRKFLMYHKDPQTFEKVIEEILRTYPSKERNDKNKEVPCNPFEKYRQENGPIRKYSKKGNGPEIKCLKYYDNKLGNYIDISPDGSDNQVVLQSLKPWRTDVYFNHQTKKYELMGLKYSDLSFEKGSGKYSISNEKYNSIKRIEGVNEQSEFKFTLYK

SEQ ID NO: 576 - protein, 1139 aa, Streptococcus sp.
  Streptococcus sp. C150
MSDLVLGLDIGIGSVGVGILNKVTGEIIHKNSRIFPAAQAENNLERRTNRQGRRLTRRKKHRRVRLNHLFEESGLITDFTKVSINLNPYQLRVKGLTAELSNEELFIALKNMVKHRGISYLDDASDDGNSSVGDYAQIVKENSKQLETKTPGQIQLERYQKYGQLRGDFTVEEDGRKHRLINVFPTSAYHAEALRILQTQQEFNPQITDEFINSYLEILTGKRKYYHGPGNEKSRTDYGKYTTKKDAQGQYITLNNIFGILIGKCTFYPEEYRAAKASYTAQEFNLLNDLNNLTVPTETKKLSEEQKYQIITYVKNEKAMGPAKLFKYIAKLLSCDVADIKGYRIDKSDKAEIHTFEAYRKMKTLETLDVKKMAREELDKLAYVLTLNTEREGIQEALDHEFADGTFSQEQVDELVQFRKANSSIFGKGWHSFSVKLMMELIPELYATSEEQMTILTRLGKQKTTSSSNKTKYIDEKQLTEEIYNPVVAKSVRQAIKIVNAAIKKYGDFDNIVIEMARETNEDDEKKAIQKIQKANKAEKDAAMRKAANQYNGKAELPHSVFHGHKQLATKIRLWHQQGERCLYTGKTISIHDLINNPNQFEIDHILPLSITFDDSLANKVLVYATANQEKGQRTPYQALDSMDDAWSFRELKAFVRESKALSNKKKEYLLTEEDISKFDVRKKFIERNLVDTRYASRVVLNALQEHFRTHKIDTKVSVVRGQFTSQLRRHWGIEKTRDTYHHHAVDALIIAASSQLNLWKKQKNTLVSYSEDQLLDIETGELISDDEYKESVFKAPYQHFVDTLKSKEFEDSILFSYQVDSKFNRKISDATIYATRKAKLDKEKKEYTYTLGKIKDIYALGTKTPSKTGFYKFLDLYKKDKSQFLMYQKDRRTWDEVIEKILEQYRPFKEKDKNGKEVDFNPFEKYRIENGPIRKYSRKGNGPEIKSLKYYDNLLGRFVDITPSESKNPVALLSLNPWRTDVYYNTETRKYEFLGLKYADLCFEKGGSYGISKVKYNKIREKEGIGKNSEFKFTLYKNDLILIKDTETNRQQIFRFWSRTGKDNPKSFEKHKLELKPYEKTRFEKGEELKVLGKVPPSSNRLQKNMQIENLSIYKVRTDVLGNQHIIKNEGDKPKLDF

SEQ ID NO: 577 - protein, 1377 aa, Streptococcus sp.
  Streptococcus sp. C300
MNNKPYSIGLDIGTNSVGWSVITDDYKVPSKKMKVLGNTDKRFIKKNLIGALLFDEGTTAEARRLKRTARRRYTRRKNRLRYLQEIFAEEMSKVDSSFFHRLDDSFLIPEDKRGSKYPIFATLVEEKEYHKQFPTIYHLRKQLADSKEKADLRLIYLVLAHMIKYRGHFLYEEAFDIKNNDIQKIFNEFISIYDNTFEGSSLSGQNAQVETIFTDKISKSAKRERVLKLFPDEKSTGLFSEFLKLIVGNQADFKKHFDLEEKAPLQFSKDTYDEDLENLLEQIGDDFADLFVAAKKLYDAILLSGILTVTDPSTKAPLSASMIERYENHQKDLAVLKQFIKTNLPEKYVEVFSDQSKDGYAGYIDGKTTQEAFYKYIKNLLSKFDGADYFLDKIEREVFLRKQRTFDNGSIPHQIHLQEMNTILRRQGEHYPFLKENKEKIEKILTFRIPYHVGPLARGNRDFAWLTRNSDQAIRPWNFEEIVDKASSAEDFINKMTNYDLYLPEEKVLPKHSLLYETFAVYNELTKVKFIAEGMRDYQFLDSGQKKKIINQLFKKKRKVTEDDIIDCLQKIDNYDGIELKGIEKQFNASLSTYHDILKIIRDKEFMDDPKNGDILENVIHTLTIFEDREMIKQRLAQYNSIFDEKVIKALSRKHYTGWGKLSAKLIDGIRDKQTGKTILDYLMDDGKSNRNFMQLIKDDELSFTEIIQKAQVVGDTDNLRQVVQNLPGSPAIKKGILQSIKIVDELVKVMGHAPESIVIEMARENQTTARGKKNSQQRYKRIEDSLKNLASGLDSNILKENPTDNIQLQNDRLFLYYLQNGKDMYTGEALNINQLSSYDIDHIIPQAFIKDDSLDNRVLTSSKDNRGKSDNVPSLEVVEKMKAFWQQLLDSKLISERKYNNLTKAERERGGLNELDKVGFIKRQLVETRQITKHVAQILDARFNKEVTEKNKKNRNVKIITLKSNMVSNFRKEFGLYKVREINDYHHAHDAYLNAVVAKAILKKYPKLEPEFVYGDYQKYDLKRYISRSKDPKEVEKATEKYFFYSNLLNFFKEEVHYADGTIVKRENIEYSKDTGEIAWNKEKDFATIKKVLSLPQVNIVKKTEEQTVGQNGGLFDNNIVSKKKVVDASKLIPIKSGLSPEKYGGYARPTIAYSVLVTYKQNNKIKNTMVGIPVLTKLEFERDPNLYLRNLGINNVSHVIKLVKYTVLEFKHKYGTYRRFIVSNQELKRANQIFVTTKQMKLISQYTTLDKNEHDSLLKNNQQLIQSIWNQFLEFMLATDLVNKKQYDELILTNNQTIEECRNIMNRVITTLSFTNINAGQKKIIFDDTLSLPIKRWQFTDSDKMVKKIIESTLIHQSITGLYETRIDLSKLGED

SEQ ID NO: 578 - protein, 1371 aa, Streptococcus sp.
  Streptococcus sp. F0441
MENKNYSIGLDIGTNSVGWSVITDDYKVPSKKMKVLGNTDKHFIKKNLIGALLFDEGTTAEARRLKRTARRRYTRRKNRLRYLQEIFSEEIGKVDSSFFHRLDDSFLIPEDKRGSKYPIFATLAEEKKYHKQFPTIYHLRKQLADSKEKTDLRLIYLALAHMIKYRGHFLYEEAFDIKNNDIQKIFNEFISIYNNTFEGNSLSGQNVQVEAIFTDKISKSAKRERVLKLFPDEKSTGLFSEFLKLIVGNQADFKKHFDLEEKAPLQFSRDTYDEDLENLLGQIGDDFADLFLVAKKLYDAILLSGILTVTNPSTKAPLSASMIERYENHQKDLASLKQFIKNNLPEKYDEVFSDQSEDGYAGYIDGKTTQETFYKYIKNLLSKFEGADYFLDKIEREDFLRKQRTFDNGSIPHQIHLQEMNAILRRQGEHYPFLKENKEKIEKILTFRIPYYVGPLARGNRDFAWLTRNSDQAIRPWNFEEIVDKASSAEDFINKMTNYDLYLPEEKVLPKHSLLYETFAVYNELTKVKFIAEGLRDYQFLDSGQKKQIVTQLFKEKRKVTEKDIIQFLHNVDGYDGIELKGIEKQFNASLSTYHDLLKIIKDKAFMDDAKNEAILENIVHTLTIFEDREMIKQRLAQYDSLFDEKVIKALTRRHYTGWGKLSAKLINGISDKQTGNTILDYLIDDGEINRNFMQLINDDGLSFKEIIQKAQVVGKTNDVKQVVQELPGSPAIKKGILQSIKIVDELVKVMGHAPESIVIEMARENQTTARGKKNSQQRYKRIEDSLKILASGLNSKILKEHPTDNIQLQNDRLFLYYLQNGKDMYTGEALDINQLSSCDIDHIIPQAFIKDDSLDNRVLTSSKDNRGKSDNVPSLEVVDKMKVFWQQLLDSKLISYRKFNNLTKAERGGLNELDKVGFIKRQLVETRQITKHVAQILDARFNKEVTEKDKKNRTVKIITLKSNLVSNFRKEFELYKVREINDYHHAHDAYLNAVVAKAILKKYPKLEPEFVYGDYQKYDLKRYISRSKDPKEIEKATEKYFFYSNLLNFFKEEVHYADGTIVKRENIEYSKDTGEIAWNKEKDFATIKKVLSLPQVNIVKKREVQTGGFSKESILPKGNSDKLIPRKTKDILWDTTKYGGFDSPVIAYSILLIADIEKGKAKKLKTVKTLVGITIMEKDAFEKNPIAFLENKGYHNVCKENILCLPKYSLFELENGRRRLLASAKELQKCNEIVLPVYLTTLLYHSKNVHKLDEPGHLEYIQKHRNEFKDLLNLVSEFSQKYVLADANLEKIKNLYADNEQADIEILANSFINLLTFTALGAPAAFKFFGKDVDRKRYTTVSEILNATLIHQSITGLYETRIDLSKLGED

SEQ ID NO: 579 - protein, 1121 aa, Streptococcus sp.
  Streptococcus sp. GMD6S
MNGLVLGLDIGIASVGVGILEKNSGKIIHANSRLFPAATADNNVERRKNRQARRLHRRKKHRGVRFQDLFEDYGLLTDFSKVSINLNPYRLRVDGLNQQLTNEELFIALKNIVKRRGISYLDDASEDGGTVSSDYGKAVEENRKLLAEQTPGQIQLERFEKYGQVRGDFTVVENGEKRRLINVFSTSAYRKEAERILRKQQEFNSKITDEFIEDCLKILTGKRKYYHGPGNEKSRTDYGRFRTDGTTLDNIFGILIGKCTFYPDEYRASKASYTAQEFNLLNDLNNLTVPTETKKLSEEQKKVIVEYAKEAKTLGASTLLKYIAKMIDASVDQIRGYRVDVNNKPEIHTFEAYRKMQSLETISVGELSRNVLDELAHILTLNTEREGIEEAINTKLKDSFSQDQVLELVQFRKNNSSLFSKGWHNFSLKLMMELIPELYETSEEQMTILTRLGKQKSKEISKRTKYIDEKELTEEIYNPVVAKSVRQAIKIINEATKKHGIFDNIVIEMARENNEEDAKKDYIKRQKANQDEKNAAMEKAAFQYNGKKELPDSIFHGQKELATKIRLWHQQGEKCLYTGKNIPISDLIHNQYKYEIDHILPLSLSFDDSLSNKVLVLATANQEKGQRTPFQALDSMDDAWSYREFKSYVKESKLLGNKKKEYLLTEEDISKIEVKQKFIERNLIDTRYSSRVVLNALQDFYKAHKFDTTISVVRGQFTSQLRRKWGLEKSRETYHHHAVDALIIAASSQLRLWKKQNNPLIAYKEGQFVDSETGEIISLSDDEYKELVFKAPYDHFVDTLSSKTFEDSILFSYQVDSKFNRKISDATIYATRKAKLDKEKSEETYVLGKIKDIYSQAGYDAFIKIYNKDKSKFLMYHKDPQTFEKVIEEILRTYPSKELNDKNKEIPCNPFEKYRQENGPIRKYSKKSNGPEIKSLKYYDNKLGNHIDITPESSDNQVVLQSLKPWRTDVYFNHQTKKYELMGLKYSDLSFEKGSGKYSISNQKYNSIKRIEGIDEQSEFKFTLYKNDLILIKDSENNEQKLFRFNSRNDTAKHYIELKPYDKAKFDGEQELITILGNVAKGGRCLKGLNKSNISIFKVKTDVLGKKHIIKKEGDEPKLKF

SEQ ID NO: 580 - protein, 1375 aa, Streptococcus sp.
  Streptococcus sp. M334
MSNKSYSIGLDIGTNSVGWAVITDDYKVPSKKMKVLGNTDKHFIKKNLIGALLFDEGTTAEDRRLKRTARRRYTRRKNRLRYLQEIFSQEISKVDSSFFHRLDDFFLVPEDKRGSKYPIFATLVEEKEYHKKFPTIYHLRKHLADSKEKTDLRLIYLALAHMIKYRGHFLYEESFDIKNNDIQKIFSEFISIYDNTFEGKSLSGQNAQVEAIFTDKISKSTKRERVLKLFPDEKSTGLFSEFLKLIVGNQADFKKHFDLEEKAPLQFSKDTYDEDLENLLGQIGDDFADLFLVAKKLYDAILLSGILTVKDLSTKAPLSASMIERYENHQKDLAALKQFIQNNLQEKYDEVFSDQSKDGYAGYIDGKTTQEAFYKYIKNLLSKFEGADYFLDKIEREDFLKKQRTFDNGSIPHQIHLQEMNAIIRRQGEHYPFLQENKEKIEKILTFRIPYYVGPLARGNGDFAWLTRNSDQAIRPWNFEEIVDQASSAEDFINKMTNYDLYLPEEKVLPKHSLLYETFAVYNELTKVKFIAEGLTRYQFLDKKQKKDIFDTFFKAENKRKVTEKDIIHYLHNVDGYDGIELKGIEKQFNASLSTYHDLLKIIKDKAFMDDSKNEEILENIIHTLTIFEDREMIKQRLAQYDSLFDEKVIKALTRRHYTGWGKLSAKLINGIRDKKSGKTILDYLIDDGEINRNFMQLIHDDGLSFKEIIQKAQVFGKTNDVKQVVQELPGSPAIKKGILQSIKIVDELVKVMGHAPESIVIEMARENQTTARGKKNSQQRYKRIEDSLKNLASGLDSNILKENPTDNIQLQNDRLFLYYLQNGRDMYTGKPLEINQLSNYDIDHIIPQAFIKDDSLDNRVLTSSKDNRGKSDNVPSLEVVEKMKAFWQQLLDSKLISERKFNNLTKAERERGGLNELDKVGFIKRQLVETRQITKHVAQFLDARFNKEVTEKDKKNRNVKIITLKSNLVSNFRKEFGLYKVREINDYHHAHDAYLNAVLAKAILKKYPKLEPEFVYGDYQKYDLQRYISKSREPKEVEKATQKYFFYSNLLNFFKEEVHYADGTIVKRENIEYSKDTGEIAWNKEKDFATVKKVLSLPQVNIVKKTEVQTGGFSKESILPKGNSDKLIPRKTKEILWDTTKYGGFDSPVIAYSILLIADIEKGKAKKLKTVKTLVGITIMEKATFEKNPITFLENKGYHNVRKENILCLPKYSLFELESGRRRMLASAKELQKGNEIVLPVYLTTLLYHSKNVHKLDEPEHLEYIQKHRYEFKDLLNLVSEFSQKYVLADANLEKIKNLYADNEQADIEILANSFINLLTFTALGAPAAFKFLGKDVDRKRYTTVSEILNATLIHQSITGLYETRIDLSKLGED

SEQ ID NO: 581 - protein, 1371 aa, Streptococcus sp.
  Streptococcus sp. oral taxon 056 str. F0418
MNNNNYSIGLDIGTNSVGWAVITDDYKVPSKKMRVLGNTDKRFIKKNLIGALLFDEGTTAEDRRLKRTARRRYTRRKNRLRYLQEIFAEEMSKVDSSFFHRLDDSFLVPEDKSGSKYPIFATLAEEKEYHKKFPTIYHLRKHLADSKEKADLRLIYLALAHITKYRGHFLYEEAFDIKNNDIQKIFNEFINIYDNTFEGSSLSGQNAQVEAIFTGKISKSVKREHVLKLFPDEKSTGLFSEFLKLIVGNQADFKKHFDLEEKASLQFSKDTYDEDLENLLGQIGDDFADLFLVAKKLYDAILLSGILTVTDPSTKAPLSASMIERYENHQEDLAALKQFIKNNLPEKYAEVFSDQSKDGYAGYIDGKTTQEAFYKYIKNLLSKFEGADYFLDKIEREDFLRKQRTFDNGSIPHQIHLQEMNAILRRQGEHYPLLKENKEKIEKILTFRIPYYVGPLARGNRDFAWLTRNSDQAIRPWNFEEIVDKASSAESFINKMTNYDLYLPEEKVLPKHSLLYETFAVYNELTKVKFIAEGLRDYQFFDSGQKKQIVNQLFKEKRKVTEKDIIHYLHNVDGYDGIELKGIEKQFNASLSTYHDLLKIIKDKEFMDNHKNQEILENIVHTLTIFEDREMIKQRLAQYDSIFDEKVIKALTRRHYTGWGKLSAKLINGICDKKTGKTILDYLIDDGYNNRNFMQLINDDGLSFKEIIQKAQVVGKTDDLTQVVRELSGSPAIKKGILQSIKIVDELVKIMGYAPESIVIEMARENQTTAKGKKNSQQRYKRIEDALKNLAPGLDSTISKENPTDNIQLQNDRLFLYYLQNGKDMYTGEALDINQLSSYDIDHIIPQAFIKDDSLDNRVLTSSKDNRGKSDNVPSLEVVKKRKAFWQQLLDSKLISERKFNNLTKAERGGLDERDKVGFIKRQLVETRQITKHVARILDARFNTEVSEKNQKIRSVKIITLKSNLVSNFRKEFKLYKVREINDYHHAHDAYLNAVVAKAILKKYPKLEPEFVYGDYQKYDLKRYISKSKDPKEVEKATEKYFFYSNLLNFFKEEVHYADGTIVKRENIEYSKDTGEIAWNKEKDFVTIKKVLSYPQVNIVKKREVQTGGFSKESILPKGNSDKLIPRKTKDILWDTTKYGGFDSPVIAYSILLIADIEKGKAKKLKTVKTLVGITIMEKAAFEKNPITFLENKGYHNVRKENILCLPKYSLFELENGRRRLLASAKELQKGNEIVLPVYLTTLLYHSKNVHKLDEPEHLEYIQKHRYEFKDLLNLVSEFSQKYVLAEANLEKIKSLYVDNEQADIEILANSFINLLTFTALGAPAAFKFFGKDVDRKRYTTVSEILNATLIHQSITGLYETRIDLSKLGED

SEQ ID NO: 582 - protein, 1420 aa, Streptococcus sp.
  Streptococcus sp. oral taxon 071 str. 73H25AP
MAKFNKNYSIGLDIGVSSVGYAVVTEDYRVPAFKFKVLGNTEKEKIKKNLIGSTTFVPAQSAQGTRVFRVNRRRIDRRNHRIAYLRDIFQKEIEKIDKNFYRRLDESFRVLGDKSEDIQIKQPFFGNKELETAYHKKYPTIYHLRKHLADADKNSPVADIREVYMVLSHILKYRGHFLTLGKIDPNNINMQNSWIDFIESCQDAFDLEISDESKTIAAIFKSSENRQEKVKQILSYFQQELLKKDKSIFKQLLQLLFGLKTKFKDCFELEEEPDLNFSKENYDENLENLLGALEEDFSDVFAKLKILRDTILLSSMLTYTGATHARFSATMVERYEEHRKDLQRFKSFVKQNLSEQDYLDIFGRKTPTGFDVDKETKGYVGYISNKMVLTNPQKQKTIQQNFYDYISGKITGIEGAECFLNKISDGTFLRKLRTTDNGAIPNQIHAYELEKIIERQGRDYPFLLENKDKLLSILTFKIPYYVGPLAKGNNSRFAWIKRTTSQDVLDDNDEDTRNGKIRPWNYHKLINMDETRDAFIINLIGNDIILLNEKVLPKRSLIYEEVMLQNELTRVKYKDKYGKIHFFNSELRQEIINNLFKTNSKRVSSAMLLSYLENFTNLQAVEIVSGIEKGKSLNSTLKTYNDLKTIFSEELLDSEIYQKELEEIIKVITVFDDKKSIKNYLTKYFGHLEFLNEEKINQLSKLRYTGWGRYSGKLLLGIRDEDTGFNLMQFLRNDDENRNLTQLISDTTLSFDSAIKAIQSKSTVEDDVFEEIKNLAGSPAIKRGILNSIKIVDELVQIIGYPPQNIIIEMARENMTTEEGQKKAKTRKSKLESALKNIEDSVLESGKVPHSDEQLQSEKLYLYYLQNGKDMYSLDKTGSPTPLYRDQLDQYEVDHIIPYSFLPIDSIDNKVLTHRENNQRKLNNIPDKETVANMKPFWEKLYNAKLISQTKYQRLTTSERTPDGVLTESMKAGFIERQLVETRQIIKHVARILDNRFSDTKIITLKSQLVTNFRNTFHIAKIRELNDYHHAHDAYLAVVVGQTLLKAYPKLAPELIYGHHAHFNRHEENKATLRKHLYSNIMRFFNNPDSKVSKDIWDCNRDLPIVKDVIYNSQINFVKRTMIKKGAFYNQNPVGKLNKQIAANNRYPLKTKVSSLDTSIYGGYGPMNSALSIIIIAERFNEKKGKIETVKEFHDIFIIDYEKFNNNPFQFLNNVSEEGFLKKNDLNRVLAFYRISKYSLMQKIDGTRMLFESKSNLHKVTQFKLTKTQNELFFHMKRLLTKSNLMDLKSESAIKESQNFIQTHQNEFDNIADRLSNYSQKMLGETKSLQTLINGYNERPIKQIDNNEETIRYYYDNFIKMFSFVKSGAPKDIINFFNDKYTVPRMRPKPDRKMLDATLIHQSITGLYETRIDLSKLGED

SEQ ID NO: 583 - protein, 1122 aa, Streptococcus suis
  Streptococcus suis 89/1591
MSNGKILGLDIGIASVGVGVIDAQTGEIIHASSRIFPSANAANNAERRTFRGSRRLIRRKKHRIKRLDDLFNDFHINLDGEMSTDNPYVLRVKGLSQKLTVEELYISIKNIMKRRGISYLDDAESDNEAGRSDYAKAIERNRQLLTSKTPGEIQLERLEKYGQLRGNFTIIDEEGQSQQIINVFSTSDYVKEVEKILDCQKMYHKFISDEFCDKLIELLREKRKYYVGPGNEKSRTDYGIYRTDGTTLENLFGILIGKCTFYPDQYRSSRASYTAQEFNFLNDLNNLTVPTETKKLSQEQKEFLVNYAKETSVLGAGKILQQIAKLADCKVEDIRGYRLDNKDKPELHTFETYRAMKGLVPLVDIGVLSREQLDILADILTLNTDFEGIREALKKQLPNVFDEKQVKGLASFRKSKSQLFAKGWHNLSQKIMLEVIPELYATSDEQMTILTRLGKFEKSSVAEYPSSINVDEITDEIYNPVVAKSIRQTIKIINASIKKWGEFDQIVIEMPRDRNEDEEKKRIADGQKANAKEKADSILRAAELYCAGKVLPDYVYNGHNQLATKIRLWYQQGERCIYTGQPISIHDLIHNQNQYEIDHILPLSLTFDDSLSNKVLVLATANQEKAQRTPYNYLKSATSAWSYREFKDYVTKRKGIGKKKCEYLTFEEDINGFEVRSKFIQRNLVDTRYASKVILNALQDYFKISGIQTKVSVVRGQFTSQLRHKWGIEKTRETYHHHAVDALIIAASSQLRLWKKQESPLVVDYQEGRQVDLETGEILELTDEQYKELVYQPPYQGFVNTISSSAFDNEILFSYQVDSKVNRKISDATIYATRNAQLGKDKTEGIYVLGKIKDIYTQAGYEAFLKRYTKDKTSFLMYHKDLDTWEKVIEIILRDYREYDEKGKEIGNPFERYRRENGYVKKYSRKGNGTAIKSLKYYDNKLGNHIDITPENSRNAVVLQSLKPWRTDVYFNKETGKYEFLGIKYSDLSFEKGTGEYGISQEKYDSIKIAEGVAKKSIFKFTLYKQDLLFIKDIENNFGKLLRFTSKNDTSKHYVELKPYDKNKFGTEEPLLPVLGNVAKSGQCIKGLNKSNISIYKVRTDILGYRHFIKQEGEHPQLKFKK

SEQ ID NO: 584 - protein, 1122 aa, Streptococcus suis
MSNGKILGLDIGIASVGVGVIDAQTGEIIHASSRIFPSANAANNAERRTFRGSRRLIRRKKHRIKRLDDLFNDFHINLDGEMSTDNPYVLRVKGLSQKLTVEELYISIKNIMKRRGISYLDDAESDNEAGRSDYAKAIERNRQLLTSKTPGEIQLERLEKYGQLRGNFTIIDEEGQSQQIINVFSTSDYVKEVEKILDCQKMYHKFISDEFCDKLIELLREKRKYYVGPGNEKSRTDYGIYRTDGTTLENLFGILIGKCTFYPDQYRSSRASYTAQEFNFLNDLNNLTVPTETKKLSQEQKEFLVNYAKETSVLGAGKILQQIAKLADCKVEDIRGYRLDNKDKPELHTFETYRAMKGLVPLVDIGVLSREQLDILADILTLNTDFEGIREALKKQLPNVFDEKQVKGLASFRKSKSQLFAKGWHNLSQKIMLEVIPELYATSDEQMTILTRLGKFEKSSVAEYPSSINVDEITDEIYNPVVAKSIRQTIKIINASIKKWDEFDQIVIEMPRDRNEDEEKKRIADGQKANAKEKADSILRAAELYCAGKVLPDYVYNGHNQLATKIRLWYQQGERCIYTGQPISIHDLIHNQNQYEIDHILPLSLTFDDSLSNKVLVLATANQEKAQRTPYNYLKSATSAWSYREFKDYVTKRKGIGKKKCEYLTFEEDINGFEVRSKFIQRNLVDTRYASKVILNALQDYFKISGIQTKVSVVRGQFTSQLRHKWGIEKTRETYHHHAVDALIIAASSQLRLWKKQESPLVVDYQEGRQVDLETGEILELTDEQYKELVYQPPYQGFVNTISSSAFDNEILFSYQVDSKVNRKISDATIYATRNAQLGKDKTEGIYVLGKIKDIYTQAGYEAFLKRYTKDKTSFLMYHKDLDTWEKVIEIILRDYREYDEKGKEIGNPFERYRRENGYVKKYSRKGNGTAIKSLKYYDNKLGNHIDITPENSRNAVVLQSLKPWRTDVYFNKETGKYEFLGIKYSDLSFEKGTGEYGISQEKYDSIKIAEGVAKKSIFKFTLYKQDLLFIKDIENNFGKLLRFTSKNDTSKHYVELKPYDKNKFGTEEPLLPVLGNVAKSGQCIKGLNKSNISIYKVRTDILGYRHFIKQEGEHPQLKFKK

SEQ ID NO: 585 - protein, 1381 aa, Streptococcus suis
MVKKKYAIGIDIGTNSVGWSIVTDDYKVPSKKMKVFGNTEKRYIKKNLLGTLLFDEGNTAENRRLKRTARRRYTRRRNRILYLQEIFAEEINKIDDSFFQRLDDSFLIVEDKQGSKHPIFGTLQEEKEYHKQFPTIYHLRKQLADSSQKADIRLIYLALAHIIKYRGHFLFEGDLKSENKDVQHLFNDFVEMFDKTVEGSYLSENLPNVADVLVEKVSKSRRLENILHYFPNEKKNGLFGNFLALALGLQPNFKTNFELAEDAKIQFSKETYEEDLEELLGKIGDDYADLFIATKSLYDGILLAGILSTTDSTTKAPLSSSMVNRYEEHQKDLALLKNFIHQNLSDSYKEVFNDKLKDGYAGYIEGKTTQENFYRFIKKAIEKIEGSNYFIDKIDREDFLRKQRTFDNGSIPHQIHLQEMHAIIRRQAEFYPFLVENQDKIEKILTFRIPYYVGPLARGKSEFAWLNRKSDEKIRPWNFDEMVDKETSAENFITRMTNYDRYLPDQKVLPKHSLLYEKFAVYNELTKVKFIAEGMRDYQFLDSGQKKDIVKTLFKTKRKVTAKDIKAYLENSNGYAGVELKGLEEQFNASLPTYHDLLKILRDKAFIDAEENQEILEDIVLTLTLFEDREMIRKRLEKYKDILTEEQRKKLERRHYTGWGRLSAKLINGILDKVTRKTILGYLIDDGTSNRNFMQLINDDTLSFVDEIRLAQGSGEAEDYRAEVQNLAGSPAIKKGILQSLKIVDELIEVMGYEPEHIVVEMARENQFTNQGRRNSQQRINRLENALKDFGSKILEEQKPYGVSKVNNIHLQSDRLFLYYLQNGKDMYTDEELDIDHLSEYDIDHIIPQAFIKDDSLDNKVLTKSAKNRGKSDDVPSMEIVHNRKNFWRQLLKSKLISQRKFDNLTKAERGGLTNEDKARFIQRQLVETRQITKHVARMLDTRFNTKLDEAGNRIRDPKVNIITLKSNLVSQFRKDYQLYKIREINNYHHAHDAYINAVVATALLKKYPQLAPEFVYGEYPTYNSYNSRKSATEKVLFYSNIMNFFKRIVVHSKTGEVRIRPVIEVNKETGEIVWDKKSDFRTVRKVLSYPQVNVVKKTEVQNHGLDRGKPKGFYNANLSPRPKEGSVENLVPAKQSFDTKRYGGYAGISNSYAVLVNGIIEKGKKKSKAEVTEFQGISILARKDFDKNPKQYLLNLGYKDIKSIIKLPKYSLFELENGSRRMLASILSTNNKRGEIHKGNEMYLPDKFVTLLYHAMRVNRTLEPGHKKYVETHRHVFDELLIYILEYNEKIVGAKANGKRIVEAYSARKDTDNLEELCNSFINLLNLTALGSAVDFEFLGTKIPRYRDYTPSSLLKATLIHQSVTGLYETRIDLSKLGGD

SEQ ID NO: 586 - protein, 1122 aa, Streptococcus suis; identical to SEQ ID NO: 583

SEQ ID NO: 587 - protein, 1388 aa, Streptococcus thermophilus
MTKPYSIGLDIGTNSVGWAVITDNYKVPSKKMKVLGNTSKKYIKKNLLGVLLFDSGITAEGRRLKRTARRRYTRRRNRILYLQEIFSTEMATLDDAFFQRLDDSFLVPDDKRDSKYPIFGNLVEEKVYHDEFPTIYHLRKYLADSTKKADLRLVYLALAHMIKYRGHFLIEGEFNSKNNDIQKNFQDFLDTYNAIFESDLSLENSKQLEEIVKDKISKLEKKDRILKLFPGEKNSGIFSEFLKLIVGNQADFRKCFNLDEKASLHFSKESYDEDLETLLGYIGDDYSDVFLKAKKLYDAILLSGFLTVTDNETEAPLSSAMIKRYNEHKEDLALLKEYIRNISLKTYNEVFKDDTKNGYAGYIDGKTNQEDFYVYLKNLLAEFEGADYFLEKIDREDFLRKQRTFDNGSIPYQIHLQEMRAILDKQAKFYPFLAKNKERIEKILTFRIPYYVGPLARGNSDFAWSIRKRNEKITPWNFEDVIDKESSAEAFINRMTSFDLYLPEEKVLPKHSLLYETFNVYNELTKVRFIAESMRDYQFLDSKQKKDIVRLYFKDKRKVTDKDIIEYLHAIYGYDGIELKGIEKQFNSSLSTYHDLLNIINDKEFLDDSSNEAIIEEIIHTLTIFEDREMIKQRLSKFENIFDKSVLKKLSRRHYTGWGKLSAKLINGIRDEKSGNTILDYLIDDGISNRNFMQLIHDDALSFKKKIQKAQIIGDEDKGNIKEVVKSLPGSPAIKKGILQSIKIVDELVKVMGGRKPESIVVEMARENQYTNQGKSNSQQRLKRLEKSLKELGSKILKENIPAKLSKIDNNALQNDRLYLYYLQNGKDMYTGDDLDIDRLSNYDIDHIIPQAFLKDNSIDNKVLVSSASNRGKSDDFPSLEVVKKRKTFWYQLLKSKLISQRKFDNLTKAERGGLLPEDKAGFIQRQLVETRQITKHVARLLDEKFNNKKDENNRAVRTVKIITLKSTLVSQFRKDFELYKVREINDFHHAHDAYLNAVIASALLKKYPKLEPEFVYGDYPKYNSFRERKSATEKVYFYSNIMNIFKKSISLADGRVIERPLIEVNEETGESVWNKESDLATVRRVLSYPQVNVVKKVEEQNHGLDRGKPKGLFNANLSSKPKPNSNENLVGAKEYLDPKKYGGYAGISNSFAVLVKGTIEKGAKKKITNVLEFQGISILDRINYRKDKLNFLLEKGYKDIELIIELPKYSLFELSDGSRRMLASILSTNNKRGEIHKGNQIFLSQKFVKLLYHAKRISNTINENHRKYVENHKKEFEELFYYILEFNENYVGAKKNGKLLNSAFQSWQNHSIDELCSSFIGPTGSERKGLFELTSRGSAADFEFLGVKIPRYRDYTPSSLLKDATLIHQSVTGLYETRIDLAKLGEG

SEQ ID NO: 588 - protein, 1128 aa, Streptococcus thermophilus
MSDLVLGLDIGIGSVGVGILNKVTGEIIHKNSRIFPAAQAENNLVRRTNRQGRRLTRRKKHRIVRLNRLFEESGLITDFTKISINLNPYQLRVKGLTDELSNEELFIALKNMVKHRGISYLDDASDDGNSSVGDYAQIVKENSKQLETKTPGQIQLERYQTYGQLRGDFTVEKDGKKHRLINVFPTSAYRSEALRILQTQQEFNPQITDEFINRYLEILTGKRKYYHGPGNEKSRTDYGRYRTSGETLDNIFGILIGKCTFYPEEFRAAKASYTAQEFNLLNDLNNLTVPTETKKLSKEQKNQIINYVKNEKAMGPAKLFKYIAKLLSCDVADIKGYRIDKSGKAEIHTFEAYRKMKTLETLDIEQMDRETLDKLAYVLTLNTEREGIQEALEHEFADGSFSQKQVDELVQFRKANSSIFGKGWHNFSVKLMMELIPELYETSEEQMTILTRLGKQKRLRLQIKQNISNKTKYIDEKLLTEEIYNPVVAKSVRQAIKIVNAAIKEYGDFDNIVIEMARETNEDDEKKAIQKIQKANKDEKDAAMLKAANQYNGKAELPHSVFHGHKQLATKIRLWHQQGERCLYTGKTISIHDLINNPNQFEVDHILPLSITFDDSLANKVLVYATANQEKGQRTPYQALDSMDDAWSFRELKAFVRESKTLSNKKKEYLLTEEDISKFDVRKKFIERNLVDTRYASRVVLNALQEHFRAHKIDTKVSVVRGQFTSQLRRHWGIEKTRDTYHHHAVDALIIAASSQLNLWKKQKNTLVSYSEEQLLDIETGELISDDEYKESVFKAPYQHFVDTLKSKEFEDSILFSYQVDSKFNRKISDATIYATRQAKVGKDKKDETYVLGKIKDIYTQDGYDAFMKIYKKDKSKFLMYRHDPQTFEKVIEPILENYPNKQMNEKGKEVPCNPFLKYKEEHGYIRKYSKKGNGPEIKSLKYYDSKLLGNPIDITPENSKNKVVLQSLKPWRTDVYFNKATGKYEILGLKYADLQFEKGTGTYKISQEKYNDIKKKEGVDSDSEFKFTLYKNDLLLVKDTETKEQQLFRFLSRTLPKQKHYVELKPYDKQKFEGGEALIKVLGNVANGGQCIKGLAKSNISIYKVRTDVLGNQHIIKNEGDKPKLDF

SEQ ID NO: 589 - protein, 1121 aa, Streptococcus thermophilus
MSDLVLGLDIGIGSVGVGILNKVTGEIIHKNSRIFPAAQAENNLVRRTNRQGRRLTRRKKHRIVRLNRLFEESGLITDFTKISINLNPYQLRVKGLTDELSNEELFIALKNMVKHRGISYLDDASDDGNSSVGDYAQIVKENSKQLETKTPGQIQLERYQTYGQLRGDFTVEKDGKKHRLINVFPTSAYRSEALRILQTQQEFNPQITDEFINRYLEILTGKRKYYHGPGNEKSRTDYGRYRTSGETLDNIFGILIGKCTFYPDEFRAAKASYTAQEFNLLNDLNNLTVPTETKKLSKEQKNQIINYVKNEKAMGPAKLFKYIAKLLSCDVADIKEYRIDKSGKAEIHTFEAYRKMKTLETLDIEQMDRETLDKLAYVLTLNTEREGIQEALEHEFADGSFSQKQVDELVQFRKANSSIFGKGWHNFSVKLMMELIPELYETSEEQMTILTRLGKQKTTSSSNKTKYIDEKLLTEEIYNPVVAKSVRQAIKIVNAAIKEYGDFDNIVIEMARETNEDDEKKAIQKIQKANKDEKDAAMLKAANQYNGKAELPHSVFHGHKQLATKIRLWHQQGERCLYTGKTISIHDLINNSNQFEVDHILPLSITFDDSLANKVLVYATANQEKGQRTPYQALDSMDDAWSFRELKAFVRESKTLSNKKKEYLLTEEDISKFDVRKKFIERNLVDTRYASRVVLNALQEHFRAHKIDTKVSVVRGQFTSQLRRHWGIEKTRDTYHHHAVDALIIAASIQLNLWKKQKNTLVSYSEDQLLDIETGELISDDEYKESVFKAPYQHFVDTLKSKEFEDSILFSYQVDSKFNRKISDATIYATRQAKVGKDKADETYVLGKIKDIYTQDGYDAFMKIYKKDKSKFLMYRHDPQTFEKVIEPILENYPNKQINEKGKEVPVNPFLKYKEEHGYIRKYSKKGNGPEIKSLKYYDSKLGNHIDITPKDSNNKVVLQSVSPWRADVYFNKTTGKYEILGLKYADLQFEKGTGTYKISQEKYNDIKKKEGVDSDSEFKFTLYKNDLLLVKDTETKEQQLFRFLSRTMPKQKHYVELKPYDKQKFEGGEALIKVLGNVANSGQCKKGLGKSNISIYKVRTDVLGNQHIIKNEGDKPKLDF

SEQ ID NO: 590 - protein, 1388 aa, Streptococcus thermophilus
MTKPYSIGLDIGTNSVGWAVTTDNYKVPSKKMKVLGNTSKKYIKKNLLGVLLFDSGITAEGRRLKRTARRRYTRRRNRILYLQEIFSTEMATLDDAFFQRLDDSFLVPDDKRDSKYPIFGNLVEEKAYHDEFPTIYHLRKYLADSTKKADLRLVYLALAHMIKYRGHFLIEGEFNSKNNDIQKNFQDFLDTYNAIFESDLSLENSKQLEEIVKDKISKLEKKDRILKLFPGEKNSGIFSEFLKLIVGNQADFRKCFNLDEKASLHFSKESYDEDLETLLGYIGDDYSDVFLKAKKLYDAILLSGFLTVTDNETEAPLSSAMIKRYNEHKEDLALLKEYIRNISLKTYNEVFKDDTKNGYAGYIDGKTNQEDFYVYLKKLLAEFEGADYFLEKIDREDFLRKQRTFDNGSIPYQIHLQEMRAILDKQAKFYPFLAKNKERIEKILTFRIPYYVGPLARGNSDFAWSIRKRNEKITPWNFEDVIDKESSAEAFINRMTSFDLYLPEEKVLPKHSLLYETFNVYNELTKVRFIAESMRDYQFLDSKQKKDIVRLYFKDKRKVTDKDIIEYLHAIYGYDGIELKGIEKQFNSSLSTYHDLLNIINDKEFLDDSSNEAIIEEIIHTLTIFEDREMIKQRLSKFENIFDKSVLKKLSRRHYTGWGKLSAKLINGIRDEKSGNTILDYLIDDGISNRNFMQLIHDDALSFKKKIQKAQIIGDEDKGNIKEVVKSLPGSPAIKKGILQSIKIVDELVKVMGGRKPESIVVEMARENQYTNQGKSNSQQRLKRLEKSLKELGSKILKENIPAKLSKIDNNALQNDRLYLYYLQNGKDMYTGDDLDIDRLSNYDIDHIIPQAFLKDNSIDNKVLVSSASNRGKSDDVPSLEVVKKRKTFWYQLLKSKLISQRKFDNLTKAERGGLSPEDKAGFIQRQLVETRQITKHVARLLDEKFNNKKDENNRAVRTVKIITLKSTLVSQFRKDFELYKVREINDFHHAHDAYLNAVVASALLKKYPKLEPEFVYGDYPKYNSFRERKSATEKVYFYSNIMNIFKKSISLADGRVIERPLIEVNEETGESVWNKESDLATVRRVLSYPQVNVVKKVEEQNHGLDRGKPKGLFNANLSSKPKPNSNENLVGAKEYLDPKKYGGYAGISNSFTVLVKGTIEKGAKKKITNVLEFQGISILDRINYRKDKLNFLLEKGYKDIELIIELPKYSLFELSDGSRRMLASILSTNNKRGEIHKGNQIFLSQKFVKLLYHAKRISNTINENHRKYVENHKKEFEELFYYILEFNENYVGAKKNGKLLNSAFQSWQNHSIDELCSSFIGPTGSERKGLFELTSRGSAADFEFLGVKIPRYRDYTPSSLLKDATLIHQSVTGLYETRIDLAKLGEG

SEQ ID NO: 591 - protein, 1121 aa, Streptococcus thermophilus
MSDLVLGLDIGIGSVGVGILNKVTGEIIHKNSRIFPAAQAENNLVRRTNRQGRRLARRKKHRRVRLNRLFEESGLITDFTKISINLNPYQLRVKGLTDELSNEELFIALKNMVKHRGISYLDDASDDGNSSVGDYAQIVKENSKQLETKTPGQIQLERYQTYGQLRGDFTVEKDGKKHRLINVFPTSAYRSEALRILQTQQEFNPQITDEFINRYLEILTGKRKYYHGPGNEKSRTDYGRYRTSGETLDNIFGILIGKCTFYPDEFRAAKASYTAQEFNLLNDLNNLTVPTETKKLSKEQKNQIINYVKNEKAMGPAKLFKYIAKLLSCDVADIKGYRIDKSGKAEIHTFEAYRKMKTLETLDIEQMDRETLDKLAYVLTLNTEREGIQEALEHEFADGSFSQKQVDELVQFRKANSSIFGKGWHNFSVKLMMELIPELYETSEEQMTILTRLGKQKTTSSSNKTKYIDEKLLTEEIYNPVVAKSVRQAIKIVNAAIKEYGDFDNIVIEMARETNEDDEKKAIQKIQKANKDEKDAAMLKAANQYNGKAELPHSVFHGHKQLATKIRLWHQQGERCLYTGKTISIHDLINNSNQFEVDHILPLSITFDDSLANKVLVYATANQEKGQRTPYQALDSMDDAWSFRELKAFVRESKTLSNKKKEYLLTEEDISKFDVRKKFIERNLVDTRYASRVVLNALQEHFRAHKIDTKVSVVRGQFTSQLRRHWGIEKTRDTYHHHAVDALIIAASSQLNLWKKQKNTLVSYSEDQLLDIETGELISDDEYKESVFKAPYQHFVDTLKSKEFEDSILFSYQVDSKFNRKISDATIYATRQAKVGKDKADETYVLGKIKDIYTQDGYDAFMKIYKKDKSKFLMYRHDPQTFEKVIEPILENYPNKQINEKGKEVPCNPFLKYKEEHGYIRKYSKKGNGPEIKSLKYYDSKLGNHIDITPKDSNNKVVLQSVSPWRADVYFNKTTGKYEILGLKYADLQFEKGTGTYKISQEKYNDIKKKEGVDSDSEFKFTLYKNDLLLVKDTETKEQQLFRFLSRTMPKQKHYVELKPYDKQKFEGGEALIKVLGNVANSGQCKKGLGKSNISIYKVRTDVLGNQHIIKNEGDKPKLDF

SEQ ID NO: 592 - protein, 1122 aa, Streptococcus thermophilus
MSDLVLGLDIGIGSVGVGILNKVTGEIIHKNSRIFPAAQAENNLVRRTNRQGRRLTRRKKHRIVRLNRLFEESGLITDFTKISINLNPYQLRVKGLTDELSNEELFIALKNMVKHRGISYLDDASDDGNSSVGDYAQIVKENSKQLETKTPGQIQLERYQTYGQLRGDFTVEKDGKKHRLINVFPTSAYRSEALRILQTQQEFNSQITDEFINRYLEILTGKRKYYHGPGNEKSRTDYGRYRTNGETLDNIFGILIGKCTFYPDEFRAAKASYTAQEFNLLNDLNNLTVPTETKKLSKEQKNQIINYVKNEKVMGPAKLFKYIAKLLSCDVADIKGHRIDKSGKAEIHTFEAYRKMKTLETLDIEQMDRETLDKLAYVLTLNTEREGIQEALEHEFADGSFSQKQVDELVQFRKANSSIFGKGWHNFSVKLMMELIPELYETSEEQMTILTRLGKQKTTSSSNKTKYIDEKLLTEEIYNPVVAKSVRQAIKIVNAAIKEYGDFDNIVIEMARETNEDDEKKAIQKIQKANKDEKDAAMLKAANQYNGKAELPHSVFHGHKQLATKIRLWHQQGERCLYTGKTISIHDLINNPNQFEVDHILPLSITFDDSLANKVLVYATANQEKGQRTPYQALDSMDDAWSFRELKAFVRESKTLSNKKKEYLLTEEDISKFDVRKKFIERNLVDTRYASRVVLNALQEHFRAHKIDTKVSVVRGQFTSQLRRHWGIEKTRDTYHHHAVDALIIAASSQLNLWKKQKNTLVSYSEEQLLDIETGELISDDEYKESVFKAPYQHFVDTLKSKEFEDSILFSYQVDSKFNRKISDATIYATRQAKVGKDKKDETYVLGKIKDIYTQDGYDAFMKIYKKDKSKFLMYRHDPQTFEKVIEPILENYPNKEMNEKGKEVPCNPFLKYKEEHGYIRKYSKKGNGPEIKSLKYYDSKLLGNPIDITPENSKNKVVLQSLKPWRTDVYFNKNTGKYEILGLKYADLQFEKKTGTYKISQEKYNGIMKEEGVDSDSEFKFTLYKNDLLLVKDTETKEQQLFRFLSRTMPNVKYYVELKPYSKDKFEKNESLIEILGSADKSGRCIKGLGKSNISIYKVRTDVLGNQHIIKNEGDKPKLDF

SEQ ID NO: 593 - protein, 1388 aa, Streptococcus thermophilus
MTKPYSIGLDIGTNSVGWAVITDNYKVPSKKMKVLGNTSKKYIKKNLLGVLLFDSGITAEGRRLKRTARRRYTRRRNRILYLQEIFSTEMATLDDAFFQRLDDSFLVPDDKRDSKYPIFGNLVEEKAYHDEFPTIYHLRKYLADSTKKADLRLVYLALAHMIKYRGHFLIEGEFNSKNNDIQKNFQDFLDTYNAIFESDLSLENSKQLEEIVKDKISKLEKKDRILKLFPGEKNSGIFSEFLKLIVGNQADFRKCFNLDEKASLHFSKESYDEDLETLLGYIGDDYSDVFLKAKKLYDAILLSGFLTVTDNETEAPLSSAMIKRYNEHKEDLALLKEYIRNISLKTYNEVFKDDTKNGYAGYIDGKTNQEDFYVYLKNLLAEFEGADYFLEKIDREDFLRKQRTFDNGSIPYQIHLQEMRAILDKQAKFYPFLAKNKERIEKILTFRIPYYVGPLARGNSDFAWSIRKRNEKITPWNFEDVIDKESSAEAFINRMTSFDLYLPEEKVLPKHSLLYETFNVYNELTKVRFIAESMRDYQFLDSKQKKDIVRLYFKDKRKVTDKDIIEYLHAIYGYDGIELKGIEKQFNSSLSTYHDLLNIINDKEFLDDSSNEAIIEEIIHTLTIFEDREMIKQRLSKFENIFDKSVLKKLSRRHYTGWGKLSAKLINGIRDEKSGNTILDYLIDDGISNRNFMQLIHDDALSFKKKIQKAQIIGDEDKGNIKEVVKSLPGSPAIKKGILQSIKIVDELVKVMGGRKPESIVVEMARENQYTNQGKSNSQQRLKRLEKSLKELGSKILKENIPAKLSKIDNNALQNDRLYLYYLQNGKDMYTGDDLDIDRLSNYDIDHIIPQAFLKDNSIDNKVLVSSASNRGKSDDFPSLEVVKKRKTFWYQLLKSKLISQRKFDNLTKAERGGLLPEDKAGFIQRQLVETRQITKHVARLLDEKFNNKKDENNRAVRTVKIITLKSTLVSQFRKDFELYKVREINDFHHAHDAYLNAVIASALLKKYPKLEPEFVYGDYPKYNSFRERKSATEKVYFYSNIMNIFKKSISLADGRVIERPLIEVNEETGESVWNKESDLATVRRVLSYPQVNVVKKVEEQNHGLDRGKPKGLFNANLSSKPKPNSNENLVGAKEYLDPKKYGGYAGISNSFAVLVKGTIEKGAKKKITNVLEFQGISILDRINYRKDKLNFLLEKGYKDIELIIELPKYSLFELSDGSRRMLASILSTNNKRGEIHKGNQIFLSQKFVKLLYHAKRISNTINENHRKYVENHKKEFEELFYYILEFNENYVGAKKNGKLLNSAFQSWQNHSIDELCSSFIGPTGSERKGLFELTSRGSAADFEFLGVKIPRYRDYTPSSLLKDATLIHQSVTGLYETRIDLAKLGEG

SEQ ID NO: 594 - protein, 1121 aa, Streptococcus thermophilus
MSDLVLGLDIGIGSVGVGILNKVTGEIIHKNSRIFPAAQAENNLVRRTNRQGRRLTRRKKHRRVRLNRLFEESGLITDFTKISINLNPYQLRVKGLTDELSNEELFIALKNMVKHRGISYLDDASDDGNSSVGDYAQIVKENSKQLETKTPGQIQLERYQTYGQLRGDFTVEKDGKKHRLINVFPTSAYRSEALRILQTQQEFNPQITDEFVNRYLEILTGKRKYYHGPGNEKSRTDYGRYRTNGETLDNIFGILIGKCTFYPEEFRAAKASYTAQEFNLLNDLNNLTVPTETKKLSKEQKNQIINYVKNEKAMGPAKLFKYIAKLLSCDVADIKGYRIDKSGKAEIHTFEAYRKMKTLETLDIEQMDRETLDKLAYVLTLNTEREGIQEALEHEFADGSFSQKQVDELVQFRKANSSIFGKGWHNFSVKLMMELIPELYETSEEQMTILKRLGKQKTTSSSNKTKYIDEKLLTEEIYNPVVAKSIRQAIKIVNAAIKEYGDFDNIVIEMARETNEDDEKKAIQKIQKANKDEKDAAMLKAANQYNGKAELPHSVFHGHKQLATKIRLWHQQGERCLYTGKTISIHDLINNPNQFEVDHILPLSITFDDSLANKVLVYATANQEKGQRTPYQALDSMDDAWSFRELKAFVRESKTLSNKKKEYLLTEEDISKFDVRKKFIERNLVDTRYASRVVLNALQEHFRAHKIDTKVSVVRGQFTSQLRRHWGIEKTRDTYHHHAVDALIIAASSQLNLWKKQKNTLVSYSEDQLLDIETGELISDDEYKESVFKAPYQHFVDTLKSKEFEDSILFSYQVDSKFNRKISDATIYATRQAKVGKDKKDETYVLGKIKDIYTQDGYDAFMKIYKKDKSKFLMYRHDPQTFEKVIEPILENYPNKEMNEKGKEVPCNPFLKYKEEHGYIRKYSKKGNDPEIKSLKYYDSKLGNHIDITPKDSNNKVVLQSVSPWRADVYFNKTTGKYEILGLKYADLQFEKGTGTYKISQEKYNDIKKKEGVDSDSEFKFTLYKNDLLLVKDTETKEQQLFRFLSRTMPKQKHYVELKPYDKQKFEGGEALIKVLGNVANSGQCKKGLGKSNISIYKVRTDVLGNQHIIKNEGDKPKLDF

SEQ ID NO: 595 - protein, 1122 aa, Streptococcus thermophilus
  Streptococcus thermophilus MTCC 5460
MSDLVLGLDIGIGSVGVGILNKVTGEIIHKNSRIFPAAQAENNVERRTNRQGRRLTRRKKHRRVRLNRLFEESGLITDFTKISINLNPYQLRVRGLTDELSNEELFIALKNMVKHRGISYLDDASDDGNSSVGDYAQIVKENSKQLETKTPGQIQLERYQTYGQLRGDFTVEKDGKKHRLINVFPTSAYRSEALRILQTQQEFNSQITDEFINRYLEILTGKRKYYHGPGNEKSRTDYGRYRTSGETLDNIFGILIGKCTFYPEEFRAAKASYTAQEFNLLNDLNNLTVPTETKKLSKEQKNQIINYVKNEKAMGPAKLFKYIAKLLSCDVADIKGYRIDKSGKAEIHTFEAYRKMKTLETLDIEQMDRETLDKLAYVLTLNTEREGIQEALEHEFADGSFSQKQVDELVQFRKASSSIFGKGWHNFSVKLMMELIPELYETSEEQMTILTRLGKQKTTSSSNKTKYIDEKLLTEEIYNPVVAKSVRQAIKIVNAAIKEYGDFDNIVIEMARETNEDDEKKAIQKIQKANKDEKDAAMLKAANQYNGKAELPHSVFHGHKQLATKIRLWHQQGERCLYTGKTISIHDLINNPNQFEVDHILPLSITFDDSLANKVLVYATANQEKGQRTPYQALDSMDDAWSFRELKAFVRESKTLSNKKKEYLLTEEDISKFDVRKKFIERNLVDTRYASRVVLNALQEHFRAHKIDTKVSVVRGQFTSQLRRHWGIEKTRDTYHHHAVDALIIAASSQLNLWKKQKNTLVSYSEDQLLDIETGELISDDEYKESVFKAPYQHFVDTLKSKEFEDSILFSYQVDSKFNRKLSDATIYATRQAKVGKDKKDETYVLGKIKDIYTQDGYDAFMKIYKKDKSKFLMYRHDPQTFEKVIEPILENYPNKEMNEKGKEVPCNPFLKYKEEHGYIRKYSKKGNGPEIKSLKYYDSKLLGNPIDITPENSKNKVVLQSLKPWRADVYFNKTTGKYEILGLKYADLQFEKKTGTYKISQEKYNGIMKEEGVDSDSEFKFTLYKNDLLLVKDTETKEQQLFRFLSRTMPNVKYYVELKPYSKDKFEKNESLIEILGSADKSGRCIKGLGKSNISIYKVRTDVLGNQHIIKNEGDKPKLDF

SEQ ID NO: 596 - protein, 1121 aa, Streptococcus thermophilus
MSDLVLGLDIGIGSVGVGILNKVTGEIIHKNSRIFPAAQAENNLVRRTNRQGRRLTRRKKHRIVRLNRLFEESGLITDFTKISINLNPYQLRVKGLTDELSNEELFIALKNMVKHRGISYLDDASDDGNSSVGDYAQIVKENSKQLETKTPGQIQLERYQTYGQLRGDFTVEKDGKKHRLINVFPTSAYRSEALRILQTQQEFNPQITDEFINRYLEILTGKRKYYHGPGNEKSRTDYGRYRTSGETLDNIFGILIGKCTFYPDEFRAAKASYTAQEFNLLNDLNNLTVPTETKKLSKEQKNQIINYVKNEKAMGPAKLFKYIAKLLSCDVADIKGYRIDKSGKAEIHTFEAYRKMKTLETLDIEQMDRETLDKLAYVLTLNTEREGIQEALEHEFADGSFSQKQVDELVQFRKANSSIFGKGWHNFSVKLMMELIPELYETSEEQMTILTRLGKQKTTSSSNKTKYIDEKLLTEEIYNPVVAKSVRQAIKIVNAAIKEYGDFDNIVIEMARETNEDDEKKAIQKIQKANKDEKDAAMLKAANQYNGKAELPHSVFHGHKQLATKIRLWHQQGERCLYTGKTISIHDLINNSNQFEVDHILPLSITFDDSLANKVLVYATANQEKGQRTPYQALDSMDDAWSFRELKAFVRESKTLSNKKKEYLLTEEDISKFDVRKKFIERNLVDTRYASRVVLNALQEHFRAHKIDTKVSVVRGQFTSQLRRHWGIEKTRDTYHHHAVDALIIAASSQLNLWKKQKNTLVSYSEDQLLDIETGELISDDEYKESVFKAPYQHFVDTLKSKEFEDSILFSYQVDSKFNRKISDATIYATRQAKVGKDKADETYVLGKIKDIYTQDGYDAFMKIYKKDKSKFLMYRHDPQTFEKVIEPILENYPNKQMNEKGKEVPCNPFLKYKEEHGYIRKYSKKGNGPEIKSLKYYDSKLGNHIDITPKDSNNKVVLQSVSPWRADIYFNNTTGKYEILGLKYADLQFEKGTGTYKISQEKYNDIKKKEGVDSDSEFKFTLYKNDLLLVKETETKEQQLFRFLSRTMPKQKHYVELKPYDKQKFEGGEALIKVLGNVANGGQCIKGLGKSNISIYKVRTDVLGNQHIIKNEGDKPKLDF

SEQ ID NO: 597 - protein, 1388 aa, Streptococcus thermophilus
MTKPYSIGLDIGTNSVGWAVITDNYKVPSKKMKVLGNTSKKYIKKNLLGVLLFDSGITAEGRRLKRTARRRYTRRRNRILYLQEIFSTEMATLDDAFFQRLDDSFLVPDDKRDSKYPIFGNLVEEKAYHDEFPTIYHLRKYLADSTKKADLRLVYLALAHMIKYRGHFLIEGEFNSKNNDIQKNFQDFLDTYNAIFESDLSLENSKQLEEIVKDKISKLEKKDRILKLFPGEKNSGIFSEFLKLIVGNQADFRKCFNLDEKASLHFSKESYDEDLETLLGYIGDDYSDVFLKAKKLYDAILLSGFLTVTDNETEAPLSSAMIKRYNEHKEDLALLKEYIRNISLKTYNEVFKDDTKNGYAGYIDGKTNQEDFYVYLKNLLAEFEGADYFLEKIDREDFLRKQRTFDNGSIPYQIHLQEMRAILDKQAKFYPFLAKNKERIEKILTFRIPYYVGPLARGNSDFAWSIRKRNEKITPWNFEDVIDKESSAEAFINRMTSFDLYLPEEKVLPKHSLLYETFNVYNELTKVRFIAESMRDYQFLDSKQKKDIVRLYFKDKRKVTDKDIIEYLHAIYGYDGIELKGIEKQFNSSLSTYHDLLNIINDKEFLDDSSNEAIIEEIIHTLTIFEDREMIKQRLSKFENIFDKSVLKKLSRRHYTGWGKLSAKLINGIRDEKSGNTILDYLIDDGISNRNFMQLIHDDALSFKKKIQKAQIIGDEDKGNIKEVVKSLPGSPAIKKGILQSIKIVDELVKVMGGRKPESIVVEMARENQYTNQGKSNSQQRLKRLEKSLKELGSKILKENIPAKLSKIDNNALQNDRLYLYYLQNGKDMYTGDDLDIDRLSNYDIDHIIPQAFLKDNSIDNKVLVSSASNRGKSDDFPSLEVVKKRKTFWYQLLKSKLISQRKFDNLTKAERGGLLPEDKAGFIQRQLVETRQITKHVARLLDEKFNNKKDENNRAVRTVKIITLKSTLVSQFRKDFELYKVCEINDFHHAHDAYLNAVIASALLKKYPKLEPEFVYGDYPKYNSFRERKSATEKVYFYSNIMNIFKKSISLADGRVIERPLIEVNEETGESVWNKESDLATVRRVLSYPQVNVVKKVEEQNHGLDRGKPKGLFNANLSSKPKPNSNENLVGAKEYLDPKKYGGYAGISNSFAVLVKGTIEKGAKKKITNVLEFQGISILDRINYRKDKLNFLLEKGYKDIELIIELPKYSLFELSDGSRRMLASILSTNNKRGEIHKGNQIFLSQKFVKLLYHAKRISNTINENHRKYVENHKKEFEELFYYILEFNENYVGAKKNGKLLNSAFQSWQNHSIDELCSSFIGPTGSERKGLFELTSRGSAADFEFLGVKIPRYRDYTPSSLLKDATLIHQSVTGLYETRIDLAKLGEG

SEQ ID NO: 598 - protein, 1128 aa, Streptococcus vestibularis
  Streptococcus vestibularis ATCC 49124
MSDLVLGLDIGIGSVGVGILNKVTGEIIHKNSRIFPAAQAENNVERRTNRQGRRLTRRKKHRRVRLNHLFEESGLITDFTKVSINLNPYQLRVKGLIDELSNEELFIALKNMVKHRGISYLDDASDDGNSSVGDYAQIVKENSKQLETKTPGQIQLERYQKYGQLRGDFTVEEDGKKHRLINVFPTSAYRSEALRILQTQKEFNPQITDEFINRYLEILTGKRKYYHGPGNEKSRTDYGRYTTKKDSENEYITLDNIFGILIGKCTFYPEEYRAAKASYTAQEFNLLNDLNNLTVPTETKKLSEEQKNQIINYVKNEKAMGPAKLFKYIAKLLSCDVADIKGYRIDKSDKAEIHTFEAYRKMKTLETIDFEKMSRDQLDKLAYVLTLNTEREGIQEALDHEFADGNFSQEQIDELVQFRKANSSIFGKGWHNFSVKLMMELIPELYATSEEQMTILTRLGKQKTTSSSNKTKYIDEKLLTEEIYNPVVAKSVRQAIKIVNAAIKEYGDFDNIVIEMARETNEDDEKKAIQKIQKANKDEKDAAMLKAANQYNGRAELPHSVFHGHKQLATKIRLWHQQGERCLYTGKTISIHDLINNPNQFEIDHILPLSITFDDSLANKVLVYATANQEKGQRTPYQALDSMDDAWSFRELKAFVRESKSLSNKKKEYLLTEEDISRFDVRKKFIERNLVDTRYASRVVLNALQEHFRAHKTDTKVSVVRGQFTSQLRRHWGIEKTRDTYHHHAVDALIIAASSQLNLWKKQKNTLVNYSENQLLDIETGELISDDEYKESVFKAPYQHFVDTLKSKEFEDSILFSYQVDSKFNRKISDATIYATRQAKVGKDKKDETYVLGKIKDIYSQTGYDAFIKIYQKDKSKFLMYRHDPQTFEKVIEPILENYPNKEMNEKGKEVPCNPFLKYKEEHGDYIRKYSKKGNGPEIKSLKYYDSKLGNHIDITPKDSNNKVVLQSVSPWRADVYFNKTTGKYEILGLKYADLQFEKGTGTYKISQEKYNVIKKKEGVDSDSEFKFTLYKNDLLLIKDTETKEQQLFRFLSRTKPNVKHYVELKPYDKQKFEGNESLINVLGAVAKGGQCQKGINKPNISIYKVRTDVLGNQHIIKNEGDKPKLDF

SEQ ID NO: 599 - protein, 1084 aa, Subdoligranulum sp.
  Subdoligranulum sp. 4_3_54A2FAA
MKNTLYGIGLDIGVASVGWAVVGLNGTGEPVGLHRLGVRIFDKAEQPKTGESLAAPRRMARGMRRRLRRKALRRADVYALLERSGLSTREELAQMFEAGGLEDIYALRTRALDEPVGKAEFSRILLHLAQRRGFKSNRRTASDGEDGRLLAAVNENRRRMAQGGWRTVGEMLYRHEAFALHKRNKADDYLSTVGRDMVAEEASILFERQRAMGCSWAAPELQAEYLSILLRQRSFDEGPGGNSPYGGNQVEKMVGRCTFEPDEPRAAKAAYSFEYFSLLQKLNHIRLAENGETRPLTQPQRQQLLSLAHKTPDISLARIRKELALPETVQFNGVRCRANETLEESEKKEKFACLPAYHKMRKALDGVVKGRISSLSISQRDAAATALSLYKNEDTLRAKLTEAGFQAPEIDALAGLTGFSKFGHLSLKACRKLIPHLEQGLTYDQACTAAGYDFKGHGAGERAFTLPAAAPEMEQITSPVVRRAVAQTIKVVNGIIREMDASPAWVRIELARELSKTFGERQEMDRSMRENAAQNERLMQELRDTFHLLSPTGQDLVKYRLWKEQDGVCAYSLRRLDVERLFEPGYVDVDHIVPYSLSFDDRRSNKVLVLSSENRQKGNRLPLQYLQGKRREDFIVWTNSSVHDYRKRQNLLREKLSGDEAEGFRQRNLQDTQHMARFLYNYISDHLAFAQSEALGKKRVFAVSGAVTSHLRKRWGLSKVRADGDLHHALDAAVVACTTDGMIRRISGYYGHIEGEYLQDADGAGSQHARTKERFPAPWPRFRDELIVRLSEQPAEPLLDINPEFYCEYGTEHIRPVFVSRMPRRKVTGPGHKETIKGAAAADEGLLTVRKALTELKLDKDGEIKDYYMPSSDTLLYEALKAQLRRFGGDGKKAFAEPFYKPKADGTPGPLVRKVKTTEKATLTVPVHGGAASNDTMVRVDVFLVPGDGYYWVPVYTADTLKPELPNRAVVQGKPYSEWKEMREEDFIFSLYPNDLVYVEHKSGLKFTLQNADSTLEKTRTQTSAFAYFVSGSISTASITIRTHDNAYGIPSLGVKTLKTFHKYQVDVLGNVFPVHKETRQKFR

SEQ ID NO: 600 - protein, 1422 aa, Sutterella wadsworthensis
  Sutterella wadsworthensis 3_1_45B
MTQSERRFSCSIGIDMGAKYTGVFYALFDREELPTNLNSKAMTLVMPETGPRYVQAQRTAVRHRLRGQKRYTLARKLAFLVVDDMIKKQEKRLTDEEWKRGREALSGLLKRRGYSRPNADGEDLTPLENVRADVFAAHPAFSTYFSEVRSLAEQWEEFTANISNVEKFLGDPNIPADKEFIEFAVAEGLIDKTEKKAYQSALSTLRANANVLTGLRQMGHKPRSEYFKAIEADLKKDSRLAKINEAFGGAERLARLLGNLSNLQLRAERWYFNAPDIMKDRGWEPDRFKKTLVRAFKFFHPAKDQNKQHLELIKQIENSEDIIETLCTLDPNRTIPPYEDQNNRRPPLDQTLLLSPEKLTRQYGEIWKTWSARLTSAEPTLAPAAEILERSTDRKSRVAVNGHEPLPTLAYQLSYALQRAFDRSKALDPYALRALAAGSKSNKLTSARTALENCIGGQNVKTFLDCARRYYREADDAKVGLWFDNADGLLERSDLHPPMKKKILPLLVANILQTDETTGQKFLDEIWRKQIKGRETVASRCARIETVRKSFGGGFNIAYNTAQYREVNKLPRNAQDKELLTIRDRVAETADFIAANLGLSDEQKRKFANPFSLAQFYTLIETEVSGFSATTLAVHLENAWRMTIKDAVINGETVRAAQCSRLPAETARPFDGLVRRLVDRQAWEIAKRVSTDIQSKVDFSNGIVDVSIFVEENKFEFSASVADLKKNKRVKDKMLSEAEKLETRWLIKNERIKKASRGTCPYTGDRLAEGGEIDHILPRSLIKDARGIVFNAEPNLIYASSRGNQLKKNQRYSLSDLKANYRNEIFKTSNIAAITAEIEDVVTKLQQTHRLKFFDLLNEHEQDCVRHALFLDDGSEARDAVLELLATQRRTRVNGTQIWMIKNLANKIREELQNWCKTTNNRLHFQAAATNVSDAKNLRLKLAQNQPDFEKPDIQPIASHSIDALCSFAVGSADAERDQNGFDYLDGKTVLGLYPQSCEVIHLQAKPQEEKSHFDSVAIFKEGIYAEQFLPIFTLNEKIWIGYETLNAKGERCGAIEVSGKQPKELLEMLAPFFNKPVGDLSAHATYRILKKPAYEFLAKAALQPLSAEEKRLAALLDALRYCTSRKSLMSLFMAANGKSLKKREDVLKPKLFQLKVELKGEKSFKLNGSLTLPVKQDWLRICDSPELADAFGKPCSADELTSKLARIWKRPVMRDLAHAPVRREFSLPAIDNPSGGFRIRRTNLFGNELYQVHAINAKKYRGFASAGSNVDWSKGILFNELQHENLTECGGRFITSADVTPMSEWRKVVAEDNLSIWIAPGTEGRRYVRVETTFIQASHWFEQSVENWAITSPLSLPASFKVDKPAEFQKAVGTELSELLGQPRSEIFIENVGNAKHIRFWYIVVSSNKKMNESYNNVSKS

SEQ ID NO: 601 - protein, 1049 aa, Tistrella mobilis
MINERLTFGIDLGIGSCGWAVLRHADAAGEPGVIEGLGSWCFDVPETSKERIPTNQVRRSNRLLRRVIRRRRNRMAEIRRLFHAQGLLPSADEDALKRPRLDPWELRARGLDQCLSAEEFAVALGHIARHRGFRSSAKRKAANTSGEDSKMLSALLVTRERTARYRTVGEMFARDPEYSARRRNRDGIFDRTVARDDLIHEVGKLFEAQRARGSAFASPDLEADFNAIAFRQAEMQDSERLVGNCPFERDEKRAARWAPSFERFRLLTRLINLRIATAEGERRFTPEDLARVSAELGATAKLPVSRVRALIGLLPDERFTTIRVEDEDRDIVARTGEAAPGTWRLRKTLGEALWAEMQARPDQLDAIAHVLSFFEATAKIRSELDRLGLPAAVIEALDRGLEDGAFAKFKGAGHISAKACRNLLPHLQQGHRYDQACRLAGYDHAASTLSHTAQVVSKAGFNALVTELGESIANPIARKALTEGLKQIRAMCARWGLPGAIHIELAREVGNSIEKRRELESQRETTTKRRQTERDEIRGLLALEDVDDDTLLRYRLWKEQGGKCLYTGKDIHVRQLIATDNSVQVDHILPWSRFGDDSFNNKTLCLASANQRKRGQTPWEWFSLTGTPEAWEVFASRVETSKDLRGFKKRNLLLKNADEVAQRFRSRNLNDTRYAARLLAEAAKLFYPAGDRQEKDGRRRVLTRPGPLTAALRHAWGLESLKKADGKRVSDDRHHALDALAVAAISEREVQRLTRSFQEWEQQGLARPLRHVAPPWPGFRGDVLAAYAQAFVARPERRRARGKGHDASIRQVVGEGPEAQVFERRGLADLKEADLDRVKDPERNQAIIEAVRAWILAGRPADAPPRSPRGDVIVKLRTAPAKKIKPAVPVRGGTADRGDMVRIDVFTRPNRKGRDEWYLVPIYPHQVMNRKAWPHPPMRSVVAYKDEAGWTEIGAEHSFRFSLYPRSYVQLVKSNGDVIEGYLVSMDRSTGAFRVFVHNNPAEMAKGIGAKTLLNLRKFNVDRFGVRTEVKSEVRTWHGEVCTSPVPPD

SEQ ID NO: 602 - protein, 1395 aa, Treponema denticola
  Treponema denticola AL-2
MKKEIKDYFLGLDVGTGSVGWAVTDTDYKLLKANRKDLWGMRCFETAETAEVRRLHRGARRRIERRKKRIKLLQELFSQEIAKIDEGFFQRMKESPFYAEDKTILQENALFNDKDFTDKTYHKAYPTINHLIKAWIENKVKPDPRLLYLACHNIIKKRGHFLFEGDFDSENQFDTSIQALFEYLREDMEVDIDADSQKVKEILKDSSLKNSEKQSRLNKILGLKPSDKQKKAITNLISGNKINFADLYDNPDLKDAEKNSISFSKDDFDALSDDLASILGDSFELLLKAKAVYNCSVLSKVIGDEQYLSFAKVKIYEKHKTDLTKLKAVIKKHFPNNYKKVFGYNQDNESKNNYSGYVGVCKTKNKKLVINNSVNQEDFYKFLKPILSAKSEIKEVNDILAEIETGNFLPKQISKSNAEIPYQLRKMELEKILSNAEKHFSFLKQKDEKGLSHSEKIIMLLTFKIPYYIGPINDNHKKSFPDRCWVVKKEKSPSGKTTPWNFFDHIDKEKTAEEFITSRTNFCTYLIGESVLPKNSLLYSEYTVLNEINNLQIIIDGKNICDTKLKQKIYEDLFKKYKKITQKQISTFIKHEGICNKTDEVIILGIDKECTSSLKSYIELKNIFGKQVDEISTKNMLEEIIRWATIYDEGEGKTILKTKIKAEYGKYCSDEQIKKILNLKFSGWGRLSRKFLETVTSEMPGFSEPVNIITAMRETQNNLMELLSSEFKFTENIKKINSGFEDAEKQFSYDGLVKPLFLSPSVKKMLWQTLKLVKEISHITQAPPKKIFIEMAKGAELEPARTKTRLKILQDLYSSCKNDADAFSSEIQYLSGKIENEDNLRLRSDKLYLYYTQLGKCMYCGKPIEIGHVFDTSNYDIDHIYPQSKIKDDSISNRVLVCSSCNKNKEDKYPLKSEIQSKQRGFWNFLQRNNFISLEKLNRLTRTTPISDDETAKFIARQLVETRQATKVAAKVLEKMFPETKIVYSKAETVSMFRNKFDIIKCREINDFHHAHDAYLNIVVGNVYNTKFTNNPWNFIKEKRDNPKIADTYNYYKVFDYDVKRNNITAWEKGKTIITVKDMLKRNTPIYTRQAACKKGGLFDQTIMKKGLGQHPLKKEGPFSNISKYGGYNKVSAAYYTLIEYEEKGNKIRSLETIPLYLVKDIQKDQDVLKSYLTDLLGKKEFKILVPKIKINSLLKINGFPCHITGKTNDSFLLRPAVQFCCSNDEVLYFKKIIRFSEIRSQREKIGKTISPYEDLSFRSYIKENLCKKTKNDEIGEKEFYDLLQKKNLEIYDMLLTKHKDTIYKKRPNSATIDILVKGKEKFKSLIIENQFEVILEILKLFSATRNVSELQHIGGSKYSGVAKIGNKISSLDNCILIYQSITGIFEKRIDLLKV

SEQ ID NO: 603 - protein, 1395 aa, Treponema denticola
  Treponema denticola ASLM
MKKEIKDYFLGLDVGTGSVGWAVTDTDYKLLKANRKDLWGMRCFETAETAEVRRLHRGARRRIERRKKRIKLLQELFSQEIAKIDEGFFQRMKESPLYAEDKTILQENTLFNDKDFTDKTYHKAYPTINHLIKAWIENKVKPDPRLLYLACHNIIKKRGHFLFEGDFDSENQFDTSIQALFEYLREDMEVDIDADSQKVKEILKDSSLKNSEKQSRLNKMLGLKPSDKQKKAITNLISGNKINFADLYDNPDLKDAEKNSISFSKDDFDALSDDLASILGDSFELLLKAKAVYNCSVLSKVIGDEQYLSFAKVKIYEKHKTDLTKLKNVIKKHFPKDYKKVFGYNKNEKNNNNYSGYVGVCKTKSKKLIINNSVNQEDFYKFLKTILSAKSEIKEVNDILTEIETGTFLPKQISKSNAEIPYQLRKMELEKILSNAEKHFSFLKQKDEKGLSHSEKIIMLLTFKIPYYIGPINDNHKKSFPDRCWVVKKEKSPSGKTTPWNFFDHIDKEKTAEEFITSRTNFCTYLIGESVLPKNSLLYSEYTVLNEINNLQIIIDGKNICDTKLKQKIYEELFKKYKKITQKQISTFIKHEGICNKTDEVIILGIDKECTSSLKSYIELKNIFGKQVDEISTKNMLEEIIRWATIYDEGEGKTILKTKIKAEYGKYCSDEQIKKILNLKFSGWGRLSRKFLETVTSEMPGFSEPVNIITAMRETQNNLMELLSSEFKFTENIKKINSGFEDVEKQFSYDGLVKPLFLSPSVKKMLWQTLKLVKEISHITQAPPKKIFIEMAKGAELDPVRTKTRLKILQDLYNNCKNDADAFSSEIKDLSGKIENEDNLRLRSDKLYLYYTQLGKCMYCGKPIEIGHVFDTSNYDIDHIYPQSKIKDDSISNRVLVCSSCNKNKEDKYPLKAEIQSKQRGFWNFLQRNNFISLEKFNRLTRATPISDDETAKFIARQLVETRQATKVAARVLEKMFPETKIVYSKAETVSMFRNKFDIVKCREINDFHHAHDAYLNIVVGNVYNTKFTNNLWNFIKEKRDNPKIADTYNYYKVFDYDVKRNNITAWEKGKTIITVKDMLKRNTPIYTRQAACKKGGLFDQTIMKKGLGQHPLKKEGPFSNISKYGGYNKVSAAYYTLIEYEEKGNKIRSLETIPLYLVKDIQKDQDVLKSYLTDLLGKKEFKILVPKIKINSLLKINGFPCHITGKTNDSFLLRPAVQFCCSNDEVLYFKKIIRFSEIRSQREKIGKTISPYEDLSFRSYIKENLCKKTKNDEIGEKEFYDLLQKKNLEIYDMLLTKHKDTIYKKRPNSATIDILVKGKEKFKSLIIENQFEVILEILKLFSATRNVSDLQHIGGSKYSGVAKIGNKISSLDNCILIYQSITGIFEKRIDLLKV

SEQ ID NO: 604 - protein, 1395 aa, Treponema denticola
  Treponema denticola ATCC 35405
MKKEIKDYFLGLDVGTGSVGWAVTDTDYKLLKANRKDLWGMRCFETAETAEVRRLHRGARRRIERRKKRIKLLQELFSQEIAKTDEGFFQRMKESPFYAEDKTILQENTLFNDKDFADKTYHKAYPTINHLIKAWIENKVKPDPRLLYLACHNIIKKRGHFLFEGDFDSENQFDTSIQALFEYLREDMEVDIDADSQKVKEILKDSSLKNSEKQSRLNKILGLKPSDKQKKAITNLISGNKINFADLYDNPDLKDAEKNSISFSKDDFDALSDDLASILGDSFELLLKAKAVYNCSVLSKVIGDEQYLSFAKVKIYEKHKTDLTKLKNVIKKHFPKDYKKVFGYNKNEKNNNNYSGYVGVCKTKSKKLIINNSVNQEDFYKFLKTILSAKSEIKEVNDILTEIETGTFLPKQISKSNAEIPYQLRKMELEKILSNAEKHFSFLKQKDEKGLSHSEKIIMLLTFKIPYYIGPINDNHKKFFPDRCWVVKKEKSPSGKTTPWNFFDHIDKEKTAEAFITSRTNFCTYLVGESVLPKSSLLYSEYTVLNEINNLQIIIDGKNICDIKLKQKIYEDLFKKYKKITQKQISTFIKHEGICNKTDEVIILGIDKECTSSLKSYIELKNIFGKQVDEISTKNMLEEIIRWATIYDEGEGKTILKTKIKAEYGKYCSDEQIKKILNLKFSGWGRLSRKFLETVTSEMPGFSEPVNIITAMRETQNNLMELLSSEFTFTENIKKINSGFEDAEKQFSYDGLVKPLFLSPSVKKMLWQTLKLVKEISHITQAPPKKIFIEMAKGAELEPARTKTRLKILQDLYNNCKNDADAFSSEIKDLSGKIENEDNLRLRSDKLYLYYTQLGKCMYCGKPIEIGHVFDTSNYDIDHIYPQSKIKDDSISNRVLVCSSCNKNKEDKYPLKSEIQSKQRGFWNFLQRNNFISLEKLNRLTRATPISDDETAKFIARQLVETRQATKVAAKVLEKMFPETKIVYSKAETVSMFRNKFDIVKCREINDFHHAHDAYLNIVVGNVYNTKFTNNPWNFIKEKRDNPKIADTYNYYKVFDYDVKRNNITAWEKGKTIITVKDMLKRNTPIYTRQAACKKGELFNQTIMKKGLGQHPLKKEGPFSNISKYGGYNKVSAAYYTLIEYEEKGNKIRSLETIPLYLVKDIQKDQDVLKSYLTDLLGKKEFKILVPKIKINSLLKINGFPCHITGKTNDSFLLRPAVQFCCSNNEVLYFKKIIRFSEIRSQREKIGKTISPYEDLSFRSYIKENLWKKTKNDEIGEKEFYDLLQKKNLEIYDMLLTKHKDTIYKKRPNSATIDILVKGKEKFKSLIIENQFEVILEILKLFSATRNVSDLQHIGGSKYSGVAKIGNKISSLDNCILIYQSITGIFEKRIDLLKV

SEQ ID NO: 605 - protein, 1395 aa, Treponema denticola
  Treponema denticola H1-T
MKKEIKDYFLGLDVGTGSVGWAVTDTDYKLLKANRKDLWGMRCFETAETAEVRRLHRGARRRIERRKKRIKLLQELFSQEIAKIDEGFFQRMKESPFYAEDKTILQENALFNDKDFTDKTYHKAYPTINHLIKAWIENKVKPDPRLLYLACHNIIKKRGHFLFEGDFDSENQFDTSIQALFEYLREDMEVDIDADSQKVKEILKDSSLKNSEKQSRLNKILGLKPSDKQKKAITNLISGNKINFADLYDNPDLKDAEKNSISFSKDDFDALSDDLASILGDSFELLLKAKAVYNCSVLSKVIGDEQYLSFAKVKIYEKHKTDLTKLKAVIKKHFPNNYKKVFGYNQDNESKNNYSGYVGVCKTKNKKLVINNSVNQEDFYKFLKPILSAKSEIKEVNDILAEIETGNFLPKQISKSNAEIPYQLRKMELEKILSNAEKHFSFLKQKDEKGLSHSEKIIMLLTFKIPYYIGPINDNHKKSFPDRCWVVKKEKSPSGKTTPWNFFDHIDKEKTAEEFITSRTNFCTYLIGESVLPKNSLLYSEYTVLNEINNLQIIIDGKNICDTKLKQKIYEDLFKKYKKITQKQISTFIKHEGICNKTDEVIILGIDKECTSSLKSYIELKNIFGKQVDEISTKNMLEEIIRWATIYDEGEGKTILKTKIKAEYGKYCSDEQIKKILNLKFSGWGRLSRKFLETVTSEMPGFSEPVNIITAMRETQNNLMELLSSEFKFTENIKKINSGFEDAEKQFSYDGLVKPLFLSPSVKKMLWQTLKLVKEISHITQAPPKKIFIEMAKGAELEPARTKTRLKILQDLYSSCKNDADAFSSEIQYLSGKIENEDNLRLRSDKLYLYYTQLGKCMYCGKPIEIGHVFDTSNYDIDHIYPQSKIKDDSISNRVLVCSSCNKNKEDKYPLKSEIQSKQRGFWNFLQRNNFISLEKLNRLTRTTPISDDETAKFIARQLVETRQATKVAAKVLEKMFPETKIVYSKAETVSMFRNKFDIIKCREINDFHHAHDAYLNIVVGNVYNTKFTNNPWNFIKEKRDNPKIADTYNYYKVFDYDVKRNNITAWEKGKTIITVKDMLKRNTPIYTRQAACKKGELFNQTIMKKGLGQHPLKKEGPFSNISKYGGYNKVSAAYYTLIEYEEKVNKIRSLETIPLYLVKDIQKDQDVLKSYLTDLLGKKEIKILVPKIKINSLLKINGFPCHITGKTGDSFVLRPAVQFCCSNDEVLYFKKIIRFNEIRSQREKMGKTISPYEDLSFRSYIKENLCKKTKADEIGEKEFYDLLQKKNLEIYDMLLTKHKDTIYNKRPNSTTLGMLTKGRYEFINLKPKDQIIVMLEILKLFCTTREAIDLGLIKGKPAAGVATLGKKISNLDNCILIYQSITGIFEKRIDLLKV

SEQ ID NO: 606 - protein, 1395 aa, Treponema denticola
  Treponema denticola H-22
MKKEIKDYFLGLDVGTGSVGWAVTDTDYKLLKANRKDLWGMRCFETAETAEVRRLHRGARRRIERRKKRIKLLQELFSQEIAKIDEGFFQRMKESPFYAEDKTILQENTLFNDKDFTDKTYHKAYPTINHLIKAWIENKVKPDPRLLYLACHNIIKKRGHFLFEGDFDSENQFDTSIQALFEYLREDMEVDIDADSQKVKEILKDSSLKNSEKQSRLNKILGLKPSDKQKKAITNLISGNKINFADLYDNPDLKDAEKNSISFSKDDFDALSDDLASILGDSFELLLKAKAVYNCSVLSKVIGDEQYLSFAKVKIYEKHKTDLTKLKNVIKKHFPKDYKKVFGYNKNEKNNNNYSGYVGVCKTKSKKLIINNSVNQEDFYKFLKTILSAKSEIKEVNDILTEIETGTFLPKQISKSNAEIPYQLRKMELEKILSNAEKHFSFLKQKDEKGLSHSEKIIMLLTFKIPYYIGPINDNHKKSFPDRCWVIKKEKSPSGKTTPWNFFDHIDKDKTAEAFITSRTNFCTYLVGESVLPKSSLLYSEYTVLNEINNLQIIIDGKNICDIKLKQKIYEELFKKYKKITQKQISTFIKHEGICNKTDEVIILGIDKECTSSLKSYIELKNIFGKQVDEISTKNMLEEIIRWATIYDEGEGKTILKTKIKAEYGKYCSDEQIKKILNLKFSGWGRLSRKFLETVTSEMPGFSEPVNIITAMRETQNNLMELLSSEFKFTENIKKINSGFEDAEKQFSYNGLVKPLFLSPSVKKMLWQTLKLVKEISHITQAPPKKIFIEMAKGAELEPARTKTRLKILQDLYNNCKNDADAFSSEIKDLSGKIENEDNLRLRSDKLYLYYTQLGKCMYCGKPIEIGHVFDTSNYDIDHIYPQSKIKDDSISNRVLVCSSCNKNKEDKYPLKSEIQSKQRGFWNFLQRNNFISLEKLNRLTRTTPISDDETAKFIARQLVETRQATKVAAKVLEKMFPETKIVYSKAETVSMFRNKFDIIKCREINDFHHAHDAYLNIVVGNVYNTKFTNNPWNFIKEKRDNPKIADTYNYYKVFDYDVKRNNITAWEKGKTIITVKDMLKRNTPIYTRQAACKKGGLFDQTIMKKGLGQHPLKKEGAFSNISKYGGYNKVSAAYYTLIEYEEKGNKIRSLETIPLYLVKDIQKDQDVLKSYLTDLLGKKEIKILVPKIKINSLLKINGFPCHITGKTGDSFVLRPAVQFCCSNDEVLYFKKIIRFNEIRSQREKMGKTISPYEDLSFRSYIKENLCKKTKADEIGEKEFYDLLQKKNLEIYDMLLTKHKDTIYNKRPNSTTLGMLTKGRYEFINLKPKDQIIVMLEILKLFCTTREAIDLGLIKGKPAAGVATLGKKISNPDNCILIYQSITGIFEKRIDLLKV

SEQ ID NO: 607 - protein, 1395 aa, Treponema denticola
  Treponema denticola OTK
MKKEIKDYFLGLDVGTGSVGWAVTDTDYKLLKANRKDLWGMRCFETAETAEVRRLHRGARRRIERRKKRIKLLQELFSQEIAKIDEGFFQRMKESPLYAEDKTILQENTLFNDKDFTDKTYHKAYPTINHLIKAWIENKVKPDPRLLYLACHNIIKKRGHFLFEGDFDSENQFDTSIQALFEYLREDMELDIDADSQKVKEILKDSSLKNSEKQSRLNKMLGLKPSDKQKKAITNLISGNKINFADLYDNPDLKDAEKNSISFSKDDFDALSDDLASILGDSFELLLKAKAVYNCSVLSKVIGDEQYLSFAKVKIYEKHKTDLTKLKNVIKKHFPKDYKKVFGYNKNEKNNNNYSAYVGVCKITHKKLVIKNSASQEDFYKFLKTILSAKSEIKEVNDILTEIETGTFLPKQISKSNAEIPYQLRKMELEKILSNAEKHFSFLKQKDEKGLSHSEKIIMLLTFKIPYYIGPINDNHKKSFPDRCWVVKKEKSPSGKTTPWNFFDHIDKEKTAEEFITSRTNFCTYLIGESVLPKSSLLYSEYTVLNEINNLQIIIDGKNICDIKLKQKIYEELFKKYKKITQKQISTFIKHEGICNKTDEVIILGIDKECTSSLKSYIELKNIFGKQVDEISTKNMLEEIIRWATIYDEGEGKTILKTKIKAEYGKYCSDEQIKKILNLKFSGWGRLSRKFLETVTSEMPGFSEPVNIITAMRETQNNLMELLSSEFKFTENIKKINSGFEDAEKQFSYNGLVKPLFLSPSVKKMLWQTLKLVKEISHITQAPPKKIFIEMAKGAELEPARTKTRLKILQDLYSSCKNDADAFSSEIQYLSGKIENEDNLRLRSDKLYLYYTQLGKCMYCGKPIEIGHVFDTSNYDIDHIYPQSKIKDDSISNRVLVCSSCNKNKEDKYPLKAEIQSKQRGFWNFLQRNNFISLEKLNRLTRTSPISDDETAKFIARQLVETRQATKVAAKVLEKMFPETKIVYSKAETVSMFRNKFDIIKCREINDFHHAHDAYLNIVVGNVYNTKFTNNPWNFIKEKRDNPKIADTYNYYKVFDYDVKRNNITAWEKGKTIITVKDMLKRNTPIYTRQAACKKGELFNQTIMKKGLGQHPLKKEGPLSNISKYGGYNKVSAAYYTLIEYEEKGSKIRSLETIPLYLVKDIQKNKDGLKSYLTDQIGKKEIKILIPKIKINSLLKINGFPCHITGKMGEAFVLRPAVQFCCSNDEALYFKKIIRFNEIRKQREKMGKTISPYEDLSFRSYIKDNLCKKTKADEIEEKEFYDLLQKKNLEIYDMLLTKHKDTIYKKRPNSATIDILVKGKEKFKSLIIENQFEVILEILKLFSATRNVSDLQHIGGSKNAGNARVGNKISSLDNCILIYQSITGIFEKRIDLLKI

SEQ ID NO: 608 - protein, 1395 aa, Treponema denticola
  Treponema denticola SP37
MKKEIKDYFLGLDVGTGSVGWAVTDTDYKLLKANRKDLWGMRCFETAETAEVRRLHRGARRRIERRKKRIKLLQELFSQEIAKTDEGFFQRMKESPFYAEDKTILQENALFNDRDFTDKTYHKAYPTINHLIKAWIENKVKPDPRLLYLACHNIIKKRGHFLFEGDFDSENQFDTSIQALFEYLREDMEVDIDADSQKVKEILKDSSLKNSEKQSRLNKMLGLKPSDKQKKAITNLISGNKINFADLYDNPDLKDAEKNSISFSKDDFDALSDDLASILGDSFELLLKAKAVYNCSVLSKVIGDEQYLSFAKVKIYEKHKTDLTKLKNVIKKHFPNDYKKVFGYNKNEKNNNNYSAYVGVCKTKSKKLVINNTVNQEDFYKFLKPILLAKSEIKEVNDILTEIETGTFLPKQISKSNAEIPYQLRKMELEKILSNAEKHFSFLKQKDEKGLSHSEKIIMLLTFKIPYYIGPINDNHKKSFPDRCWVIKKEKSPSGKTTPWNFFDHIDKDKTAEAFITSRTNFCTYLVGESVLPKNSLLYSEYTVLNEINNLQIIIDGKNICDIKLKQKIYEELFKKYKKITQKQISTFIKHEGICNKTDEVIILGIDKECTSSLKSYIELKNIFGKQVDEISTKNMLEEIIRWATIYDEGEGKTILKTKIKAEYGKYCSDEQIKKILNLKFSGWGRLSRKFLETVTSEMPGFSEPVNIITAMRETQNNLMELLSSEFKFTENIKKINSGFEDVEKQFSYDSLVKPLFLSPSVKKMLWQTLKLVKEISHITQAPPKKIFIEMAKGAELDPVRTKTRLKILQDLYNNCKNDADAFSSEIKDLSGKIENEDNLRLRSDKLYLYYTQLGKCMYCGKPIEIGHVFDTSNYDIDHIYPQSKIKDDSISNRVLVCSSCNKNKEDKYPLKAEIQSKQRGFWNFLQRNNFISLEKLNRLTRTSPISDDETAKFIARQLVETRQATKVAAKVLEKMFPETKIVYSKAETVSMFRNKFDIIKCREINDFHHAHDAYLNIVVGNVYNTKFTNNPWNFIKEKRDNPKIADTYNYYKVFDYDVKRNNITAWEKGKTIITVKDMLKRNTPIYTRQAACKKGELFNQTIMKKGLGQHPLKKEGPLSNISKYGGYNKVSAAYYTLIEYEEKGSKIRSLETIPLYLVKDIQKNKDGLKSYLTDQIGKKEIKILIPKIKINSLLKINGFPCHITGKMGEAFVLRPAVQFCCSNDEALYFKKIIRFNEIRKQREKMGKTISPYEDLSFRSYIKDNLCKKTKADEIEEKEFYDLLQKKNLEIYDMLLTKHKDTIYKKRPNSATIDILVKGKEKFKSLIIENQFEVILEILKLFSATRNVSDLQHIGGSKNAGNARVGNKISSLDNCILIYQSITGIFEKRIDLLKI

SEQ ID NO: 609 - protein, 1062 aa, Treponema sp.
  Treponema sp. JC4
MIMKLEKWRLGLDLGTNSIGWSVFSLDKDNSVQDLIDMGVRIFSDGRDPKTKEPLAVARRTARSQRKLIYRRKLRRKQVFKFLQEQGLFPKTKEECMTLKSLNPYELRIKALDEKLEPYELGRALFNLAVRRGFKSNRKDGSREEVSEKKSPDEIKTQADMQTHLEKAIKENGCRTITEFLYKNQGENGGIRFAPGRMTYYPTRKMYEEEFNLIRSKQEKYYPQVDWDDIYKAIFYQRPLKPQQRGYCIYENDKERTFKAMPCSQKLRILQDIGNLAYYEGGSKKRVELNDNQDKVLYELLNSKDKVTFDQMRKALCLADSNSFNLEENRDFLIGNPTAVKMRSKNRFGKLWDEIPLEEQDLIIETIITADEDDAVYEVIKKYDLTQEQRDFIVKNTILQSGTSMLCKEVSEKLVKRLEEIADLKYHEAVESLGYKFADQTVEKYDLLPYYGKVLPGSTMEIDLSAPETNPEKHYGKISNPTVHVALNQTRVVVNALIKEYGKPSQIAIELSRDLKNNVEKKAEIARKQNQRAKENIAINDTISALYHTAFPGKSFYPNRNDRMKYRLWSELGLGNKCIYCGKGISGAELFTKEIEIEHILPFSRTLLDAESNLTVAHSSCNAFKAERSPFEAFGTNPSGYSWQEIIQRANQLKNTSKKNKFSPNAMDSFEKDSSFIARQLSDNQYIAKAALRYLKCLVENPSDVWTTNGSMTKLLRDKWEMDSILCRKFTEKEVALLGLKPEQIGNYKKNRFDHRHHAIDAVVIGLTDRSMVQKLATKNSHKGNRIEIPEFPILRSDLIEKVKNIVVSFKPDHGAEGKLSKETLLGKIKLHGKETFVCRENIVSLSEKNLDDIVDEKIKSKVKDYVAKHKGQKIEAVLSDFSKENGIKKVRCVNRVQTPIEITSGKISRYLSPEDYFAAVIWEIPGEKKTFKAQYIRRNEVEKNSKGLNVVKPAVLENGKPHPAAKQVCLLHKDDYLEFSDKGKMYFCRIAGYAATNNKLDIRPVYAVSYCADWINSTNETMLTGYWKPTPTQNWVSVNVLFDKQKARLVTVSPIGRVFRK

SEQ ID NO: 610 - protein, 1011 aa, Unknown
  Description of Unknown: uncultured delta proteobacterium HF0070_07E19 polypeptide
MSSKAIDSLEQLDLFKPQEYTLGLDLGIKSIGWAILSGERIANAGVYLFETAEELNSTGNKLISKAAERGRKRRIRRMLDRKARRGRHIRYLLEREGLPTDELEEVVVHQSNRTLWDVRAEAVERKLTKQELAAVLFHLVRHRGYFPNTKKLPPDDESDSADEEQGKINRATSRLREELKASDCKTIGQFLAQNRDRQRNREGDYSNLMARKLVFEEALQILAFQRKQGHELSKDFEKTYLDVLMGQRSGRSPKLGNCSLIPSELRAPSSAPSTEWFKFLQNLGNLQISNAYREEWSIDAPRRAQIIDACSQRSTSSYWQIRRDFQIPDEYRFNLVNYERRDPDVDLQEYLQQQERKTLANFRNWKQLEKIIGTGHPIQTLDEAARLITLIKDDEKLSDQLADLLPEASDKAITQLCELDFTTAAKISLEAMYRILPHMNQGMGFFDACQQESLPEIGVPPAGDRVPPFDEMYNPVVNRVLSQSRKLINAVIDEYGMPAKIRVELARDLGKGRELRERIKLDQLDKSKQNDQRAEDFRAEFQQAPRGDQSLRYRLWKEQNCTCPYSGRMIPVNSVLSEDTQIDHILPISQSFDNSLSNKVLCFTEENAQKSNRTPFEYLDAADFQRLEAISGNWPEAKRNKLLHKSFGKVAEEWKSRALNDTRYLTSALADHLRHHLPDSKIQTVNGRITGYLRKQWGLEKDRDKHTHHAVDAIVVACTTPAIVQQVTLYHQDIRRYKKLGEKRPTPWPETFRQDVLDVEEEIFITRQPKKVSGGIQTKDTLRKHRSKPDRQRVALTKVKLADLERLVEKDASNRNLYEHLKQCLEESGDQPTKAFKAPFYMPSGPEAKQRPILSKVTLLREKPEPPKQLTELSGGRRYDSMAQGRLDIYRYKPGGKRKDEYRVVLQRMIDLMRGEENVHVFQKGVPYDQGPEIEQNYTFLFSLYFDDLVEFQRSADSEVIRGYYRTFNIANGQLKISTYLEGRQDFDFFGANRLAHFAKVQVNLLGKVIK

SEQ ID NO: 611 - protein, 1032 aa, Unknown
  Description of Unknown: uncultured Termite group 1 bacterium phylotype Rs-D17 polypeptide
MLYHIANHRGTDSVRSFLEYDDDKIKENTLTAKIAKETKKVIDAKKYRTFGEYLYKGKIEKFQQNIRKKVSNRKTPANKNKEFAVTRDVIIKETEKILASQKQYYTYILTDEYIKKIKDAISYQTEKLIPESGYCPYFKDEKRLPRSHKLNEYRRMYEALNNAKYFDPVLDENTGEILSYQEKEFSREEKKILFDEVLLKGMELTESGAKKLLYHLPDGCEVQLQGRDKTTQKIKGYALVDLEASPFWLRLSQQQQDEFLYDWNSLPLEKLKPKLTNYYSLTESEVDETFQEIKLPSNYASVGKKAMEILLTYIKDGCSYTEALEKAVSEGKLKVDKQTMIYDSLPYYGKILKESTQKLIGKAFSKQFADRNYKEPDTNKNEREFGKIANPVVHQTLNELRKLINEIITVFGKKPLEIGLETTRELKKSKKNREYLSKQQNKNEYARNRIYKEYIEPHLSQIKSRQENPSKYISKFELLEEQNFICPFCSEKITPDDIINSKVDVEHIFPIEESEDITKNNLVIAHNECNADKGKKSPFDAFGDKTSGKYRWNCILHNAQKNLPHKVWRFYQGSLEKFLENKPMSRRFGTDNSYISKIAARYLACLFNDPYHSEIFCIKSSLIAQLRIAWDLNSIMVPLVKNILSEKELEEFKISKNKKIRIDNRHHALDAIVIAYANRGYHNFLNRIHAKEYKINYREKSWLSKILLPPLNRDLEDFKISVKDSIEKANVSIKHDHNTNGSLVKATAYKVYYSGAGEYIITTSKNVEEISFKEKEDPKDTLYRALCKFECRDIDIKDEKLIKKLKYNSTLYKKVQNNLSKAKQELEQDNKKTEEEGKKSQKITEVRIYKKACSLVKGQYIQCGSRLKDKFFAVKEPTEIKTGLGYDTGDNLFLDLYYDKTGKLCGEIIRKVNFNRNKPNYQKEGYTLFERIYQSDILEVDTSEDRISLKNKTGSAPSDRTFIKVNTFTEVNAYFDGKRDKIQIFFGNLLKSSFKNDSFFISSMQKYNVRKVILTSLGIIKYRSQILKNKEV

SEQ ID NO: 612 - protein, 1398 aa, Veillonella atypica
  Veillonella atypica ACS-134-V-Col7a
METQTSNQLITSHLKDYPKQDYFVGLDIGTNSVGWAVTNTSYELLKFHSHKMWGSRLFEEGESAVTRRGFRSMRRRLERRKLRLKLLEELFADAMAQVDSTFFIRLHESKYHYEDKTTGHSSKHILFIDEDYTDQDYFTEYPTIYHLRKDLMENGTDDIRKLFLAVHHILKYRGNFLYEGATFNSNAFTFEDVLKQALVNITFNCFDTNSAISSISNILMESGKTKSDKAKAIERLVDTYTVFDEVNTPDKPQKEQVKEDKKTLKAFANLVLGLSANLIDLFGSVEDIDDDLKKLQIVGDTYDEKRDELAKVWGDEIHIIDDCKSVYDAIILMSIKEPGLTISQSKVKAFDKHKEDLVILKSLLKLDRNVYNEMFKSDKKGLHNYVHYIKQGRTEETSCSREDFYKYTKKIVEGLADSKDKEYILNEIELQTLLPLQRIKDNGVIPYQLHLEELKVILDKCGPKFPFLHTVSDGFSVTEKLIKMLEFRIPYYVGPLNTHHNIDNGGFSWAVRKQAGRVTPWNFEEKIDREKSAAAFIKNLTNKCTYLFGEDVLPKSSLLYSEFMLLNELNNVRIDGKALAQGVKQHLIDSIFKQDHKKMTKNRIELFLKDNNYITKKHKPEITGLDGEIKNDLTSYRDMVRILGNNFDVSMAEDIITDITIFGESKKMLRQTLRNKFGSQLNDETIKKLSKLRYRDWGRLSKKLLKGIDGCDKAGNGAPKTIIELMRNDSYNLMEILGDKFSFMECIEEENAKLAQGQVVNPHDIIDELALSPAVKRAVWQALRIVDEVAHIKKALPSRIFVEVARTNKSEKKKKDSRQKRLSDLYSAIKKDDVLQSGLQDKEFGALKSGLANYDDAALRSKKLYLYYTQMGRCAYTGNIIDLNQLNTDNYDIDHIYPRSLTKDDSFDNLVLCERTANAKKSDIYPIDNRIQTKQKPFWAFLKHQGLISERKYERLTRIAPLTADDLSGFIARQLVETNQSVKATTTLLRRLYPDIDVVFVKAENVSDFRHNNNFIKVRSLNHHHHAKDAYLNIVVGNVYHEKFTRNFRLFFKKNGANRTYNLAKMFNYDVICTNAQDGKAWDVKTSMNTVKKMMASNDVRVTRRLLEQSGALADATIYKASVAAKAKDGAYIGMKTKYSVFADVTKYGGMTKIKNAYSIIVQYTGKKGEEIKEIVPLPIYLINRNATDIELIDYVKSVIPKAKDISIKYRKLCINQLVKVNGFYYYLGGKTNDKIYIDNAIELVVPHDIATYIKLLDKYDLLRKENKTLKASSITTSIYNINTSTVVSLSNKVGIDVFDYFMSKLRTPLYMKMKGNKVDELSSTGRSKFIKMTLEEQSIYLLEVLNLLTNSKTTFDVKPLGITGSRSTIGVKIHNLDEFKIINESITGLYSNEVTIV

SEQ ID NO: 613 - protein, 1398 aa, Veillonella parvula
  Veillonella parvula ATCC 17745
METQASNQLISSHLKGYPIKDYFVGLDIGTSSVGWAVTNKAYELLKFRSHKMWGSRLFDEGESAVARRGFRSMRRRLERRKLRLKLLEELFADAMAQVDPTFFMRLRESKYHYEDKTTGHSSKHILFIDKNYNDQDYFKEYPTVYHLRSELMKSGTDDIRKLFLAVHHILKYRGNFLYEGATFDSNASTLDDVIKQALENITFNCFDCNSAISSIGQILMEAGKTKSDKAKAIEHLVDTYIATDTVDTSSKTQKDQVKEDKKRLKAFANLVLGLNASLIDLFGSVEELEEDLKKLQITGDTYDDKRDELAKAWSDEIYIIDDCKSVYDAIILLSIKEPGLTISESKVKAFNKHKDDLAILKSLLKSDRSIYNTMFKVDEKGLHNYVHYIKQGRTEETSCNREDFYKYTKKIVEGLSDSKDKEYILSQIELQILLPLQRIKDNGVIPYQLHLEELKAILAKCGPKFPFLNEVADGFSVAEKLIKMLEFRIPYYVGPLNTHHNVDNGGFAWAVRKASGRVTPWNFDDKIDREKSAAAFIKNLTNKCTYLLGEDVLPKSSLLYSEFMLLNELNNVRIDGKPLEKVVKEHLIEAVFKQDHKKMTKNRIEQFLKDNGYISETHKHEITGLDGEIKNDLASYRDMVRILGDGFDRSMAEEIITDITIFGESKKMLRETLRKKFASCLDDEAIKKLTKLRYRDWGRLSQKLLNGIEGCDKAGDGTPETIIILMRNFSYNLMELLGDKFSFMERIQEINAKLTEGQIVNPHDIIDDLALSPAVKRAVWQALRIVDEVAHIKKALPARIFVEVTRSNKNEKKKKDSRQKRLSDLYAAIKKDDVLLNGLNNEIFGELKSSLAKYDDAALRSKKLYLYYTQMGRCAYTGEIIELSLLNTDNYDIDHIYPRSLTKDDSFDNLVLCKRTANAQKSDAYPISEEIQKTQKPFWTFLKQQGLISERKYERLTRITPLTADDLSGFIARQLVETNQSVKAATTLLRRLYPGVDVVFVKAENVTDFRHDNNFIKVRSLNHHHHAKDAYLNIVVGNVYHERFTRNFRAFFKKNGANRTYNLAKMFNYDVNCTNAKDGKAWDVKTSMDTVKKMMDSNDVRVTKRLLEQTGALADATIYKATVAGKAKDGAYIGMKTKSSVFADVSKYGGMTKIKNAYSIIVQYTGKKGEVIKEIVPLPIYLTNRNTTDQDLINYVASIIPQAKDISIIYGKLCINQLVKVNGFYYYLGGKTNSKFCIDNAIQVIVSNEWIPYLKVLEKFNNMRKDNKDLKANVVSTRALDNKHTIEVRIVEEKNIEFFDYLVSKLKMPIYQKMKGNKAAELSEKGYGLFKKMSLEEQSIHLIELLNLLTNQKTTFEVKPLGITASRSTVGSKISNQDEFKVINESITGLYSNEVTIV

SEQ ID NO: 614 - protein, 1395 aa, Veillonella sp.
  Veillonella sp. 6_1_27
METQASNQLISSHLKGYPIKDYFVGLDIGTSSVGWAVTNKAYELLKFRSHKMWGSRLFDEGESAVARRGFRSMRRRLERRKLRLKLLEELFADAMAQVDPTFFMRLRESKYHYEDKTTGHSSKHILFIDKNYTDQDYYKEYPTIYHLRVALMKSGTDDIRKLFLAVHHILKYRGNFLYEGATFDSNASTLDDVLKQALENITFNCFDSSAAIGSIGQILMELGKTKSDKAKAIERLVDTYIITDEVDTSGKTQKEQVKEDKKRLKSFANLVLGLSASLTDLFGSVEDLDEDLKKLQIIGDTYDERRDDLAKVWGDEIHIIDDCKSVYDAIILMSIKEPGLTISESKVKAFKKHKDDLAILKSLLKSDRSIYNTMFKVDEKGLHNYVHYIKQGRTEETSCNREDFYKYTKKVVEGLPDSKDKEYILSEIELQTLLPLQRIKDNGVIPYQLHLEELKVILAKCGPKFPFLNEVADGFSVAEKLIKMLEFRIPYYVGPLNTHHNVDNGGFAWAVRKASGRVTPWNFDDKIDREKSAAAFIKNLTNKCTYLLGEDVLPKSSLLYSEFMLLNELNNVRIDGKPLEKAVKEHLIEAVFKQDHKKMTKNRIEQFLKDNNYIPEKHKPEITGLDGEIKNDLASYRDMVRILGNNFDLSMAEEIITDITIFGESKKMLRETLRNKFSSRLDDEAIKKLSKLRYRDWGRLSRKLLNVIEGCDKAGDGTPETIIILMRNFSYNLMELLGDKFSFMERIQEINAKLIEGQIVNPHDIIDDLALSPAVKRAVWQALRIVDEIVHIKKTLPARIFVEVTRSNKAEKKKKDSRQKRLSDLYAAIKKDDALLSGLTNEEFGGLKSGLAKYDDAALRSKKLYLYYTQMGRCAYTGEVIDLSQLNTDNYDIDHIYPRSLTKDDSFDNLVLCKRTANAQKSDTYPISKEIQKAQKAFWIFLKQQGLISERKYERLTRITPLTADDLSGFIARQLVETNQSVKAATTLLRRLYPGVDVVFVKAENVTDFRHDNDFIKVRSLNHHHHAKDAYLNIVVGNVYHERFTRNFRAFFKKNGANRTYNLAKMFNYDVKCTNAKDGKAWAVKTSMDTVKKMMDSNDVRVTKRVYEQKGQLSDINLTKASKVKADIYLPIKANDPIMSQNMKYGGYSDIKNAYYTIIEYSDKKNNSIKAFIPIPIFIATKTLTKQALLEYIKTVLPKANNLRIIYKKVYNDQLLKIDGFNYYLGGRSNDRFCIDNAIQLIVPLEIQFYIKLVEKFTAIISENKNIALKASSVKSRNPINNQVENITLEYTQKLFDYLVSKFNELIYLKMRGNKLTDVNNIGRKQFIKLSLEERCKALAELLNIFTNMNKKLSLSTINVSASRKVVNFKISSLDEFKIVNESITGLYSHEITIV

SEQ ID NO: 615 - protein, 1120 aa, Veillonella sp.
  Veillonella sp. oral taxon 780 str. F0422
MGFKANLVNLFTDEDIEVILPEEKEFKSINLHEGIYEDVRDAYEDAWGDRFAIVDQCKVLHDIIVISSIIKPGQSLSEAKIESYNQHKEDLVLLKSVLKEDRKLYDDMFVVDTDKGTNYVKYTKQGVNGNTSATQEEFYKYVRKVVSVLPETEHTRRIVQKLEEGTFLPLQRISKNGVVPYQLHKEELVRILDKATVNFPFLNKVENGLTVADKIISILEFKIPYYVGPLNPTHSIENGGFAWVVRKEAGQVLPWNFEQKVDVQASAVKFIENLTNKCTYLIDQDVLPKYSLLYAEFSLLNELNNIRVNDKPLPADVKQAFIRDHFISLQDSKTATKKVVAKYLVDNNYVSQPPIITGMDQQIATKLTSHRDMTRILGEHFDHAMAEDIIRYITIFGESKDMLRQVLKNYYGDRLTTEQIKKLGKLTYTGWGRLSKKFLSDIWGMKKNDDDAEAGTIIEHMREGQENLMQLLSSSYSFIDVVQEYVTNVLGEKEKTAFEMLEDLSLSPMVKRSVWQTLRILDEIVSIRKELPKKIFVEVARTNKADKKRTQSRKALLEELYKQIKDEDVHVLQQELESKEDSALNSKKLYLYFTQMGRCMYSGRRIDIHELFTDKYDIDHIYPRSLTKDDSWHNIVLVEKQLNAEKTDRFPILSAIQSKQKGFWKLLWDRGFISEKKYDRLVRTTDLTDEELNQFINRQMVSTNQSVKAVTTLLHQLYPETEVVFSKAENVSDFRHDYDFVKVRSINHHHHAKDAYLNIVVGNVYHEKFTKNFLSFAKQKGTRRTYNLTKIFEYEIKLTEESKKVIWDPNIHMDIVKKMMKSNDVRVTQRAVPQKGGLSDETIYKKGIAKRGVYLPLKSSDERVRDVEKYGGRTSITISEYIILNIRDTSDQDRIEIFSLPLYIAGKKDIHKAIEEAYLSTCKKPASVVDIQILYRGLYIGSKVNINGFTYYMGGKTGSNVSIDSAVDVVMDITSSVYIKLLEKVAIKKIENPKTFRIENIKTSYNHKEVTVSKEQNIALYQELLKKLDTPLFSKMKGNKLEEFRTVGFDTFIALSLEEQASVLLEVLNVLTNFKTKRDITKIGMTSSRSTLGINISNTEQFSVITTSITGLYEQEIKIK

SEQ ID NO: 616 - protein, 1068 aa, Verminephrobacter eiseniae
MNKAVAYRLALDLGSTSLGWAIFRLNEAREPTAIIRAGVRIFSDGRNANSEPLAVHRRVARAMRRRRDRLLKRKKRMHDQLVQHGFFPAEVAERKELERLNPYQLRAKGLHEALTPGEFARALFHINQRRGFKSNRKTDRKDNDSGALKQAISELRKRIQDSDCATAGEWFWKERMQQKPEGVRGQWVRARYRKTPSTTDEGKKRIGYDLYVDRAMVEQEFDALWAAQAALQPGLFTEAARAELKDTLLYQRDLRPVKPGRCTLLPAEERAPLALPSTQRFRILQEVNNLRLLDEALREVPLNLAQRDAVVSALEGKKELSFAAIRKLLTLSGKFNLEDEKRAELKGNATSVILARKDLFGDAWAGFDAAVQDEIVWRLVSQESEGALIAWLQQHTGVDGVCAEAIVNTRLPDGYGRLSRKALERIVPALQREVCTYDKAVQAAGFAHHSDLGFDFDYAEDEVQQVGEHTIASTGEVQAQYAFKQLPYYGKALQRHVAFGSGDAKDHEEKCYGKIANPTVHIGLNQVRTVVNALIRRYGHPTEVVVELARDLKQSREQKQQTQREQADNQKRNEDIRKRIAPILETSPERVRDRDIKKWILWEELNKKDIADRHCPYSGERISATMLLSEAVEIEHILPFSRTLDDSLNNRTVAMRRANRIKGDRTPWEARADFEAQGWRYEAILQRAEGMPPRKRYRFAEDGYQRWLGKDRNFLARALNDTSYLSRLAANYLRLVCPQGVRVIPGQMTDKLRGKFGLNSVLGLDGKKNRNDHRHHAVDACVIGVTDQGLMQRFANASKQARENGLTRLVQDMLLPWWPSYYDHVERAVRHIRVSHRPDHGFEGAMMKGTAHGIREDGIREDGRIKQRPKAKGSADHKTITLIPIDEPRQLARHGVDAEGKPLPYKGYASGSNYCIEITKNGKGKWEGQVISTFDAYRIKAAADAAARAGQVISTVEADSIVRKSGWERLRGAQSQNGQPLVMRLVIGDSVRMEVDGRDEVMRVVKMSGKEMVFAPVREANVDKRNNMPDEQDPFTYTYKRADQLRKAKARQVTISPIGELRDPGFKG

SEQ ID NO: 617 - protein, 1440 aa, Weeksella virosa
MKTILGLDLGTNSIGWALVEQDFENKQGLILGMGSRIIPMDAGIIGKFAEGSSISQTAERTGYRSIRRLRERHLLRRERLHRVLNILKFLPEHYAAEIDFEKRFGQFLAETEPKLAWKKNAEGKFEFLFQRSFDEMVADFKANGQDIKIPYDWTIYYLRKKALTQKISPQELAWIILNFNQKRGYYQLRGEEEEENPNKKVEFYSLKIVDVVADEQPNKKGDTWYSLHLENGWVYRRSSKIPLYDWKDKVRDFIVTTDINEDGSEKLDKDGEVKRSFRAPKEDDWTLIKKKTEQEIEQFNQTVGSYIYEALLDNPTQKIRGKLVRTIERKFYKSELKKILEKQIELQPELFTEDLYNACARELYRRNVAHQQQLSSRDFVYLFLNDIIFYQRPLRSQKSLISNCSLEFRTIKDKDGNGQIIYLKAIPKSNPYYQEFRVWQWLYNLKIFTKEDDKDVTNQFINKVEDLEALFEFLMNQKEVNHTDILTYLIEPIVKSKYPNAKGKAFKDELKKELKKYRWNYVYDADKDESKSYPMNETRYELRKRLDKVENVPADFMTRKIEQHLWHIIYSVTDKIEFEKALKSFANKYDLHQESFVENFKRFKPFDSDYGTYSEKAIKKLLPLMRVGKYWSWDIIDDKTKTRIGKIITGEYDETIKNRVREKAIDLTEENHFQGLQLWLAQYIVYDRHSEADIAGKWNSVADLEQYLSEFKQHSLRNPIVEQVITETLRVVRDIWKQYGKGAKDYFDEIHIELGREMKNTAEERKRLSSIISENETTNLRIRAILEELMYDENMENVRPYSPMQQEALKIYEDGVLSSSVEIPEDIEKISKKSEPTKSEIQRYKLWLEQKYRSPYTGRPIPLSKLFTPAYQIEHIIPQARFFDDGFSNKVICESEVNALKDKMLGLEFIQNYYGQKVTTSFGEVTILTEDAYKAFVKEHYDKNRSKRNKLLLEEIPEKMIDRQMNDTRYISKYISKVLSNLVRGEKDDEGVNSKNIIPGNGKITGILKQDWGLNDVWNDLILPRFERMNQLTNSTDFTAWNEKHQKFLPSVPLELSKGFQKKRIDHRHHALDALIIACATRDHVNLLNNKHAKSRNERYDLQHKLRHTTPWQDKEGKVRTKFTEFKKPWETFTQDTKKELEKIVVNFKQNLRVINKATNYYEKIVDGKKVMFKQEGVNWAIRKPMHKETVSGKIDLPRVKVSKGKILTATRKSLDTSFNAKTILSITDTGIQKILLNYLKAKGNPELAFSPEGIEEMNQNISLYNDGKPHQPILKVRVFEQGSKFPLGETGNKTTKYVEAAKGTNLFFGVYEDNQGKRSYDTIPLNIVIERQKQGLNSVPETNEKGHRLLFSLSPNDLVYVPIEGEVFDETNPDVNRIYKVVSFSGSQMFCVRQDVATSIVYKLEFSSLNKMERTIDGIMIKEICIKLKVDRLGNISKA

SEQ ID NO: 618 - protein, 1409 aa, Wolinella succinogenes
MLVSPISVDLGGKNTGFFSFTDSLDNSQSGTVIYDESFVLSQVGRRSKRHSKRNNLRNKLVKRLFLLILQEHHGLSIDVLPDEIRGLFNKRGYTYAGFELDEKKKDALESDTLKEFLSEKLQSIDRDSDVEDFLNQIASNAESFKDYKKGFEAVFASATHSPNKKLELKDELKSEYGENAKELLAGLRVTKEILDEFDKQENQGNLPRAKYFEELGEYIATNEKVKSFFDSNSLKLTDMTKLIGNISNYQLKELRRYFNDKEMEKGDIWIPNKLHKITERFVRSWHPKNDADRQRRAELMKDLKSKEIMELLTTTEPVMTIPPYDDMNNRGAVKCQTLRLNEEYLDKHLPNWRDIAKRLNHGKFNDDLADSTVKGYSEDSTLLHRLLDTSKEIDIYELRGKKPNELLVKTLGQSDANRLYGFAQNYYELIRQKVRAGIWVPVKNKDDSLNLEDNSNMLKRCNHNPPHKKNQIHNLVAGILGVKLDEAKFAEFEKELWSAKVGNKKLSAYCKNIEELRKTHGNTFKIDIEELRKKDPAELSKEEKAKLRLTDDVILNEWSQKIANFFDIDDKHRQRFNNLFSMAQLHTVIDTPRSGFSSTCKRCTAENRFRSETAFYNDETGEFHKKATATCQRLPADTQRPFSGKIERYIDKLGYELAKIKAKELEGMEAKEIKVPIILEQNAFEYEESLRKSKTGSNDRVINSKKDRDGKKLAKAKENAEDRLKDKDKRIKAFSSGICPYCGDTIGDDGEIDHILPRSHTLKIYGTVFNPEGNLIYVHQKCNQAKADSIYKLSDIKAGVSAQWIEEQVANIKGYKTFSVLSAEQQKAFRYALFLQNDNEAYKKVVDWLRTDQSARVNGTQKYLAKKIQEKLTKMLPNKHLSFEFILADATEVSELRRQYARQNPLLAKAEKQAPSSHAIDAVMAFVARYQKVFKDGTPPNADEVAKLAMLDSWNPASNEPLTKGLSTNQKIEKMIKSGDYGQKNMREVFGKSIFGENAIGERYKPIVVQEGGYYIGYPATVKKGYELKNCKVVTSKNDIAKLEKIIKNQDLISLKENQYIKIFSINKQTISELSNRYFNMNYKNLVERDKEIVGLLEFIVENCRYYTKKVDVKFAPKYIHETKYPFYDDWRRFDEAWRYLQENQNKTSSKDRFVIDKSSLNEYYQPDKNEYKLDVDTQPIWDDFCRWYFLDRYKTANDKKSIRIKARKTFSLLAESGVQGKVFRAKRKIPTGYAYQALPMDNNVIAGDYANILLEANSKTLSLVPKSGISIEKQLDKKLDVIKKTDVRGLAIDNNSFFNADFDTHGIRLIVENTSVKVGNFPISAIDKSAKRMIFRALFEKEKGKRKKKTTISFKESGPVQDYLKVFLKKIVKIQLRTDGSISNIVVRKNAADFTLSFRSEHIQKLLK

SEQ ID NO: 619 - protein, 1059 aa, Wolinella succinogenes
MIERILGVDLGISSLGWAIVEYDKDDEAANRIIDCGVRLFTAAETPKKKESPNKARREARGIRRVLNRRRVRMNMIKKLFLRAGLIQDVDLDGEGGMFYSKANRADVWELRHDGLYRLLKGDELARVLIHIAKHRGYKFIGDDEADEESGKVKKAGVVLRQNFEAAGCRTVGEWLWRERGANGKKRNKHGDYEISIHRDLLVEEVEAIFVAQQEMRSTIATDALKAAYREIAFFVRPMQRIEKMVGHCTYFPEERRAPKSAPTAEKFIAISKFFSTVIIDNEGWEQKIIERKTLEELLDFAVSREKVEFRHLRKFLDLSDNEIFKGLHYKGKPKTAKKREATLFDPNEPTELEFDKVEAEKKAWISLRGAAKLREALGNEFYGRFVALGKHADEATKILTYYKDEGQKRRELTKLPLEAEMVERLVKIGFSDFLKLSLKAIRDILPAMESGARYDEAVLMLGVPHKEKSAILPPLNKTDIDILNPTVIRAFAQFRKVANALVRKYGAFDRVHFELAREINTKGEIEDIKESQRKNEKERKEAADWIAETSFQVPLTRKNILKKRLYIQQDGRCAYTGDVIELERLFDEGYCEIDHILPRSRSADDSFANKVLCLARANQQKTDRTPYEWFGHDAARWNAFETRTSAPSNRVRTGKGKIDRLLKKNFDENSEMAFKDRNLNDTRYMARAIKTYCEQYWVFKNSHTKAPVQVRSGKLTSVLRYQWGLESKDRESHTHHAVDAIIIAFSTQGMVQKLSEYYRFKETHREKERPKLAVPLANFRDAVEEATRIENTETVKEGVEVKRLLISRPPRARVTGQAHEQTAKPYPRIKQVKNKKKWRLAPIDEEKFESFKADRVASANQKNFYETSTIPRVDVYHKKGKFHLVPIYLHEMVLNELPNLSLGTNPEAMDENFFKFSIFKDDLISIQTQGTPKKPAKIIMGYFKNMHGANMVLSSINNSPCEGFTCTPVSMDKKHKDKCKLCPEENRIAGRCLQGFLDYWSQEGLRPPRKEFECDQGVKFALDVKKYQIDPLGYYYEVKQEKRLGTIPQMRSAKKLVKK

SEQ ID NO: 620 - protein, 1388 aa, Zunongwangia profunda
MKRILGLDLGTNSIGWALVNEAENEKEISKIIKLGVRVNPLTIDEKTNFEKGRPLSTNADRTLKRGARRNLQRYKLRRENLIEILIDNHIITKETPLTEIGKGTTYQTLSLRAKAVRERIDLEDFAKVLLAINKKRGYKSSRKASNDEEGQAIDGMAIAKELYERGITPGQYVLELLENDRKYIPDFYRSDLKQEFNKIWNNQKTFYPEILTDELFKELDGKNKSQTWAICQKPFNIKGIKRITKGREKTIENYHWRVKGLSGKLNLEKLAIILQEINNDINQSSGYLGGISDKSKKLYLNKETVGEFLYKQIAKNPHTSLKNQVFYRHDYLDEFEQIWKTQSNFNANLTDELKQEIRDVIIFYQRKIKSQKSLISFCQFESWEQEYFDKETGKTKTRTVGRRVIPKSSPLFQEFKIWQNLNHLVFTNSETDEKIEIKEVEQEIRKELFEELNLRGDLNPNDLLKILRSQFKIGKLSNWKCNFEKIEGNRTNAALFNIYQKISDFEGYGIDWNKSNAKKIRKELKATFPEIGIDASILEFDAYKKQLTNQSSYELWHLLYSAEEDFKISEQDKLIYGNSSVSLKKKLHLKFGFNPEYAKMLANLSLMSDYGNLSAKAIKKILPYLEDGHLYSEACRLAGYNHSKSLTAEELEKFEPKAKLDLLKKNSLRNPVVEKILNQMVNVVNQVIDTYGKPDGVRIELARELKKSAKERAEMTKGIADGTRRNEEIKKIITQKFGIPNPTKSDLVRYRLWQELESRGYKDIFTDKYISPDKIFSSEIDIEHIIPKALLFDDSFSNKTLSFRNVNLKKANRTALDFITQDYQSNVEAYKERVETWNKDNHISKGKRNKLLMSLKDIPDGFIERDLRNSQYIARKAKRMLYEVFPNEVLATSGSITDKLRSDWDLINVMKELNLPKYKALGLTEYEERLDKGTEELFKHEVIKDWTKRNDHRHHAMDALAVAFTTHNHIQYINNLNARKDITQDNHPIIKNIENLITEVNSKGKRVFKAPMSSFRESAKEQIEAILVSFKNKNKVVTKNINQTKKEGGFNYQNAKTPRGQLHKETIYGKSKQPLEKPVKINNRFCKKQVGLIINFKEQEAVLHHLKKYDNNEKIAFSNKTLKSDPIQVNGSPLREVKIFEEIFTIRKDINPDNFKTQKHLDKIIDKGIKEVMKKRLEEYNGDFKTAFSDLDKNPIWLNQSKGITIKRATISGVTNAEPLHQAKDHLGNIILDDNGKEIPIDYVSTGNNHHVAIYQDESGNLQEEVVSFYEAVIRKNQDQPIIKKRHPKGWKFLFTMKQNEMFVFSSENFNPSEIDLLDEKNAAIISPNLFRVQKIATKNYMFRHHLETEVTNNLDFTYRHFQATEWLRNLCKVRIDHIGRIVQIGEY

SEQ ID NO: 621-631 - skipped (11 entries)

SEQ ID NO: 632 - RNA, 22 nt, Homo sapiens
ugcucagguugcacagcuggga

SEQ ID NO: 633 - RNA, 22 nt, Homo sapiens
ucccagcugugcaaccugagca

SEQ ID NO: 634 - RNA, 22 nt, Homo sapiens
ucagguguggaaacugaggcag

SEQ ID NO: 635 - RNA, 22 nt, Homo sapiens
cugccucaguuuccacaccuga

SEQ ID NO: 636 - RNA, 22 nt, Homo sapiens
caaaaccgcgauuacucuugca

SEQ ID NO: 637 - RNA, 22 nt, Homo sapiens
ugcaagaguaaucgcgguuuug

SEQ ID NO: 638 - RNA, 21 nt, Homo sapiens
aaaaguaauugugguuuuugc

SEQ ID NO: 639 - RNA, 21 nt, Homo sapiens
gcaaaaaccacaauuacuuuu

SEQ ID NO: 640 - RNA, 21 nt, Homo sapiens
aaaaacugcaaucacuuuugc

SEQ ID NO: 641 - RNA, 21 nt, Homo sapiens
gcaaaagugauugcaguuuuu

SEQ ID NO: 642 - RNA, 22 nt, Homo sapiens
caaaagugauugugguuuuugc

SEQ ID NO: 643 - RNA, 22 nt, Homo sapiens
gcaaaaaccacaaucacuuuug

SEQ ID NO: 644 - RNA, 22 nt, Homo sapiens
agcaguguuuguuuugcccaca

SEQ ID NO: 645 - RNA, 22 nt, Homo sapiens
ugugggcaaaacaaacacugcu

SEQ ID NO: 646 - RNA, 22 nt, Homo sapiens
ucgggcgcaagagcacugcagu

SEQ ID NO: 647 - RNA, 22 nt, Homo sapiens
acugcagugcucuugcgcccga

SEQ ID NO: 648 - RNA, 21 nt, Homo sapiens
acacuuguugggaugaccugc

SEQ ID NO: 649 - RNA, 21 nt, Homo sapiens
gcaggucaucccaacaagugu

SEQ ID NO: 650 - RNA, 24 nt, Homo sapiens
aggagcuauccacuccaggugucc

SEQ ID NO: 651 - RNA, 24 nt, Homo sapiens
ggacaccuggaguggauagcuccu

SEQ ID NO: 652 - RNA, 23 nt, Homo sapiens
ccagagcagccugcgguaacagu

SEQ ID NO: 653 - RNA, 23 nt, Homo sapiens
acuguuaccgcaggcugcucugg

SEQ ID NO: 654 - RNA, 22 nt, Homo sapiens
aguugccagggcugccuuuggu

SEQ ID NO: 655 - RNA, 22 nt, Homo sapiens
accaaaggcagcccuggcaacu

SEQ ID NO: 656 - RNA, 21 nt, Homo sapiens
uagaccaucuuucuagaguau

SEQ ID NO: 657 - RNA, 21 nt, Homo sapiens
auacucuagaaagauggucua

SEQ ID NO: 658 - RNA, 22 nt, Homo sapiens
agcucuagaaagauuguugacc

SEQ ID NO: 659 - RNA, 22 nt, Homo sapiens
ggucaacaaucuuucuagagcu

SEQ ID NO: 660 - RNA, 21 nt, Homo sapiens
gggacuaggaugcagaccucc

SEQ ID NO: 661 - RNA, 21 nt, Homo sapiens
ggaggucugcauccuaguccc

SEQ ID NO: 662 - RNA, 23 nt, Homo sapiens
aggucugcauucaaauccccaga

SEQ ID NO: 663 - RNA, 23 nt, Homo sapiens
ucuggggauuugaaugcagaccu

SEQ ID NO: 664 - RNA, 20 nt, Homo sapiens
cauuacagcacagccauucu

SEQ ID NO: 665 - RNA, 20 nt, Homo sapiens
agaauggcugugcuguaaug

SEQ ID NO: 666 - RNA, 21 nt, Homo sapiens
ucuggcugugcuguaaugcag

SEQ ID NO: 667 - RNA, 21 nt, Homo sapiens
cugcauuacagcacagccaga

SEQ ID NO: 668 - RNA, 21 nt, Homo sapiens
ugacuucuaccucuuccaaag

SEQ ID NO: 669 - RNA, 21 nt, Homo sapiens
cuuuggaagagguagaaguca

SEQ ID NO: 670 - RNA, 22 nt, Homo sapiens
uuggaauaggggauaucucagc

SEQ ID NO: 671 - RNA, 22 nt, Homo sapiens
gcugagauauccccuauuccaa

SEQ ID NO: 672 - RNA, 22 nt, Homo sapiens
ucguaucagagauuccagacac

SEQ ID NO: 673 - RNA, 22 nt, Homo sapiens
gugucuggaaucucugauacga

SEQ ID NO: 674 - RNA, 23 nt, Homo sapiens
acugggaugucacugaauauggu

SEQ ID NO: 675 - RNA, 23 nt, Homo sapiens
accauauucagugacaucccagu

SEQ ID NO: 676 - RNA, 22 nt, Homo sapiens
caaaguccuuccuauuuuuccc

SEQ ID NO: 677 - RNA, 22 nt, Homo sapiens
gggaaaaauaggaaggacuuug

SEQ ID NO: 678 - RNA, 21 nt, Homo sapiens
gaagaauaggagggacuuugu

SEQ ID NO: 679 - RNA, 21 nt, Homo sapiens
acaaagucccuccuauucuuc

SEQ ID NO: 680 - RNA, 22 nt, Homo sapiens
ugggccaugcauuucuagaacu

SEQ ID NO: 681 - RNA, 22 nt, Homo sapiens
aguucuagaaaugcauggccca

SEQ ID NO: 682 - RNA, 21 nt, Homo sapiens
ucuagaaaugcaugacccacc

SEQ ID NO: 683 - RNA, 21 nt, Homo sapiens
ggugggucaugcauuucuaga

SEQ ID NO: 684 - RNA, 22 nt, Homo sapiens
uuccacugccacuaccuaauuu

SEQ ID NO: 685 - RNA, 22 nt, Homo sapiens
aaauuagguaguggcaguggaa

SEQ ID NO: 686 - RNA, 21 nt, Homo sapiens
auuagguaguggcaguggaac

SEQ ID NO: 687 - RNA, 21 nt, Homo sapiens
guuccacugccacuaccuaau

SEQ ID NO: 688 - RNA, 21 nt, Homo sapiens
caccgacucugucuccugcag

SEQ ID NO: 689 - RNA, 21 nt, Homo sapiens
cugcaggagacagagucggug

SEQ ID NO: 690 - RNA, 22 nt, Homo sapiens
cagcaggggagagagaggaguc

SEQ ID NO: 691 - RNA, 22 nt, Homo sapiens
gacuccucucucuccccugcug

SEQ ID NO: 692 - RNA, 22 nt, Homo sapiens
uuccagcccuucuaaugguagg

SEQ ID NO: 693 - RNA, 22 nt, Homo sapiens
ccuaccauuagaagggcuggaa

SEQ ID NO: 694 - RNA, 22 nt, Homo sapiens
uaccauuagaagagcuggaaga

SEQ ID NO: 695 - RNA, 22 nt, Homo sapiens
ucuuccagcucuucuaauggua

SEQ ID NO: 696 - RNA, 21 nt, Homo sapiens
ucaagugucaucugucccuag

SEQ ID NO: 697 - RNA, 21 nt, Homo sapiens
cuagggacagaugacacuuga

SEQ ID NO: 698 - RNA, 23 nt, Homo sapiens
uuugggauugacgccacaugucu

SEQ ID NO: 699 - RNA, 23 nt, Homo sapiens
agacauguggcgucaaucccaaa

SEQ ID NO: 700 - RNA, 21 nt, Homo sapiens
cugccuguucuuccacuccag

SEQ ID NO: 701 - RNA, 21 nt, Homo sapiens
cuggaguggaagaacaggcag

SEQ ID NO: 702 - RNA, 23 nt, Homo sapiens
uauggaguggacuuucagcuggc

SEQ ID NO: 703 - RNA, 23 nt, Homo sapiens
gccagcugaaaguccacuccaua

SEQ ID NO: 704 - RNA, 22 nt, Homo sapiens
ccucaccaucccuucugccugc

SEQ ID NO: 705 - RNA, 22 nt, Homo sapiens
gcaggcagaagggauggugagg

SEQ ID NO: 706 - RNA, 23 nt, Homo sapiens
caggcagaaguggggcugacagg

SEQ ID NO: 707 - RNA, 23 nt, Homo sapiens
ccugucagccccacuucugccug

SEQ ID NO: 708 - RNA, 20 nt, Homo sapiens
ucucuucaucuaccccccag

SEQ ID NO: 709 - RNA, 20 nt, Homo sapiens
cugggggguagaugaagaga

SEQ ID NO: 710 - RNA, 21 nt, Homo sapiens
uuggaggguguggaagacauc

SEQ ID NO: 711 - RNA, 21 nt, Homo sapiens
gaugucuuccacacccuccaa

SEQ ID NO: 712 - RNA, 22 nt, Homo sapiens
cugccagccccguuccagggca

SEQ ID NO: 713 - RNA, 22 nt, Homo sapiens
ugcccuggaacggggcuggcag

SEQ ID NO: 714 - RNA, 23 nt, Homo sapiens
acaaaguacagcauuagccuuag

SEQ ID NO: 715 - RNA, 23 nt, Homo sapiens
cuaaggcuaaugcuguacuuugu

SEQ ID NO: 716 - RNA, 23 nt, Homo sapiens
aaaggucauuguaagguuaaugc

SEQ ID NO: 717 - RNA, 23 nt, Homo sapiens
gcauuaaccuuacaaugaccuuu

SEQ ID NO: 718 - RNA, 22 nt, Homo sapiens
ugaggcuaaugcacuacuucac

SEQ ID NO: 719 - RNA, 22 nt, Homo sapiens
gugaaguagugcauuagccuca

SEQ ID NO: 720 - RNA, 24 nt, Homo sapiens
uauagagagcaggaagauuaaugu

SEQ ID NO: 721 - RNA, 24 nt, Homo sapiens
acauuaaucuuccugcucucuaua

SEQ ID NO: 722 - RNA, 23 nt, Homo sapiens
gugcuucaucguaauuaaccuua

SEQ ID NO: 723 - RNA, 23 nt, Homo sapiens
uaagguuaauuacgaugaagcac

SEQ ID NO: 724 - RNA, 24 nt, Homo sapiens
guggaaagcaugcauccagggugu

SEQ ID NO: 725 - RNA, 24 nt, Homo sapiens
acacccuggaugcaugcuuuccac

SEQ ID NO: 726 - RNA, 22 nt, Homo sapiens
agacacauuuggagagggaacc

SEQ ID NO: 727 - RNA, 22 nt, Homo sapiens
gguucccucuccaaaugugucu

SEQ ID NO: 728 - RNA, 22 nt, Homo sapiens
uucccuuugucauccuaugccu

SEQ ID NO: 729 - RNA, 22 nt, Homo sapiens
aggcauaggaugacaaagggaa

SEQ ID NO: 730 - RNA, 21 nt, Homo sapiens
gcugggaaggcaaagggacgu

SEQ ID NO: 731 - RNA, 21 nt, Homo sapiens
acgucccuuugccuucccagc

SEQ ID NO: 732 - RNA, 21 nt, Homo sapiens
uaccacaggguagaaccacgg

SEQ ID NO: 733 - RNA, 21 nt, Homo sapiens
ccgugguucuacccuguggua

SEQ ID NO: 734 - RNA, 22 nt, Homo sapiens
ggcuggagcgagugcaguggug

SEQ ID NO: 735 - RNA, 22 nt, Homo sapiens
caccacugcacucgcuccagcc

SEQ ID NO: 736 - RNA, 18 nt, Homo sapiens
ccaggcucugcaguggga

SEQ ID NO: 737 - RNA, 18 nt, Homo sapiens
ucccacugcagagccugg

SEQ ID NO: 738 - RNA, 22 nt, Homo sapiens
cugggaggugugauauuguggu

SEQ ID NO: 739 - RNA, 22 nt, Homo sapiens
accacaauaucacaccucccag

SEQ ID NO: 740 - RNA, 22 nt, Homo sapiens
gggaggugugaucucacacucg

SEQ ID NO: 741 - RNA, 22 nt, Homo sapiens
cgagugugagaucacaccuccc

SEQ ID NO: 742 - RNA, 22 nt, Homo sapiens
ugugauaucaugguuccuggga

SEQ ID NO: 743 - RNA, 22 nt, Homo sapiens
ucccaggaaccaugauaucaca

SEQ ID NO: 744 - RNA, 22 nt, Homo sapiens
ugugauaucgugcuuccuggga

SEQ ID NO: 745 - RNA, 22 nt, Homo sapiens
ucccaggaagcacgauaucaca

SEQ ID NO: 746 - RNA, 18 nt, Homo sapiens
ggugggcuucccggaggg

SEQ ID NO: 747 - RNA, 18 nt, Homo sapiens
cccuccgggaagcccacc

SEQ ID NO: 748 - RNA, 18 nt, Homo sapiens
cacugcaggacucagcag

SEQ ID NO: 749 - RNA, 18 nt, Homo sapiens
cugcugaguccugcagug

SEQ ID NO: 750 - RNA, 17 nt, Homo sapiens
ugagggaggagacugca

SEQ ID NO: 751 - RNA, 17 nt, Homo sapiens
ugcagucuccucccuca

SEQ ID NO: 752 - RNA, 18 nt, Homo sapiens
gaggcugaaggaagaugg

SEQ ID NO: 753 - RNA, 18 nt, Homo sapiens
ccaucuuccuucagccuc

SEQ ID NO: 754 - RNA, 22 nt, Homo sapiens
gucacugaugucuguagcugag

SEQ ID NO: 755 - RNA, 22 nt, Homo sapiens
cucagcuacagacaucagugac

SEQ ID NO: 756 - RNA, 22 nt, Homo sapiens
accugucuguggaaaggagcua

SEQ ID NO: 757 - RNA, 22 nt, Homo sapiens
uagcuccuuuccacagacaggu

SEQ ID NO: 758 - RNA, 22 nt, Homo sapiens
agaguuaacucaaaauggacua

SEQ ID NO: 759 - RNA, 22 nt, Homo sapiens
uaguccauuuugaguuaacucu

SEQ ID NO: 760 - RNA, 22 nt, Homo sapiens
uguugggauucagcaggaccau

SEQ ID NO: 761 - RNA, 22 nt, Homo sapiens
augguccugcugaaucccaaca

SEQ ID NO: 762 - RNA, 17 nt, Homo sapiens
gaagauggacguacuuu

SEQ ID NO: 763 - RNA, 17 nt, Homo sapiens
aaaguacguccaucuuc

SEQ ID NO: 764 - RNA, 21 nt, Homo sapiens
ucugaauagagucugaagagu

SEQ ID NO: 765 - RNA, 21 nt, Homo sapiens
acucuucagacucuauucaga

SEQ ID NO: 766 - RNA, 22 nt, Homo sapiens
caaggagacgggaacauggagc

SEQ ID NO: 767 - RNA, 22 nt, Homo sapiens
gcuccauguucccgucuccuug

SEQ ID NO: 768 - RNA, 20 nt, Homo sapiens
aaaagcugggcugagaggcg

SEQ ID NO: 769 - RNA, 20 nt, Homo sapiens
cgccucucagcccagcuuuu

SEQ ID NO: 770 - RNA, 18 nt, Homo sapiens
aggcuggagugagcggag

SEQ ID NO: 771 - RNA, 18 nt, Homo sapiens
cuccgcucacuccagccu

SEQ ID NO: 772 - RNA, 22 nt, Homo sapiens
gcgacucugaaaacuagaaggu

SEQ ID NO: 773 - RNA, 22 nt, Homo sapiens
accuucuaguuuucagagucgc

SEQ ID NO: 774 - RNA, 20 nt, Homo sapiens
aaagacucugcaagaugccu

SEQ ID NO: 775 - RNA, 20 nt, Homo sapiens
aggcaucuugcagagucuuu

SEQ ID NO: 776 - RNA, 21 nt, Homo sapiens
acaggagugggggugggacau

SEQ ID NO: 777 - RNA, 21 nt, Homo sapiens
augucccacccccacuccugu

SEQ ID NO: 778 - RNA, 21 nt, Homo sapiens
cgucccaccccccacuccugu

SEQ ID NO: 779 - RNA, 21 nt, Homo sapiens
acaggaguggggggugggacg

SEQ ID NO: 780 - RNA, 18 nt, Homo sapiens
aggagaaguaaaguagaa

SEQ ID NO: 781 - RNA, 18 nt, Homo sapiens
uucuacuuuacuucuccu

SEQ ID NO: 782 - RNA, 22 nt, Homo sapiens
auggccagagcucacacagagg

SEQ ID NO: 783 - RNA, 22 nt, Homo sapiens
ccucugugugagcucuggccau

SEQ ID NO: 784 - RNA, 21 nt, Homo sapiens
ugggcucaggguacaaagguu

SEQ ID NO: 785 - RNA, 21 nt, Homo sapiens
aaccuuuguacccugagccca

SEQ ID NO: 786 - RNA, 21 nt, Homo sapiens
cacaggcuuagaaaagacagu

SEQ ID NO: 787 - RNA, 21 nt, Homo sapiens
acugucuuuucuaagccugug

SEQ ID NO: 788 - RNA, 22 nt, Homo sapiens
gugacugauaccuuggaggcau

SEQ ID NO: 789 - RNA, 22 nt, Homo sapiens
augccuccaagguaucagucac

SEQ ID NO: 790 - RNA, 22 nt, Homo sapiens
ugucguggggcuugcuggcuug

SEQ ID NO: 791 - RNA, 22 nt, Homo sapiens
caagccagcaagccccacgaca

SEQ ID NO: 792 - RNA, 17 nt, Homo sapiens
acagggaggagauugua

SEQ ID NO: 793 - RNA, 17 nt, Homo sapiens
uacaaucuccucccugu

SEQ ID NO: 794 - RNA, 17 nt, Homo sapiens
gccggacaagagggagg

SEQ ID NO: 795 - RNA, 17 nt, Homo sapiens
ccucccucuuguccggc

SEQ ID NO: 796 - RNA, 17 nt, Homo sapiens
uuggaggcguggguuuu

SEQ ID NO: 797 - RNA, 17 nt, Homo sapiens
aaaacccacgccuccaa

SEQ ID NO: 798 - RNA, 18 nt, Homo sapiens
cucgaguuggaagaggcg

SEQ ID NO: 799 - RNA, 18 nt, Homo sapiens
cgccucuuccaacucgag

SEQ ID NO: 800 - RNA, 21 nt, Homo sapiens
cacggcaaaagaaacaaucca

SEQ ID NO: 801 - RNA, 21 nt, Homo sapiens
uggauuguuucuuuugccgug

SEQ ID NO: 802 - RNA, 22 nt, Homo sapiens
agauuguuucuuuugccgugca

SEQ ID NO: 803 - RNA, 22 nt, Homo sapiens
ugcacggcaaaagaaacaaucu

SEQ ID NO: 804 - RNA, 17 nt, Homo sapiens
ggugggggcuguuguuu

SEQ ID NO: 805 - RNA, 17 nt, Homo sapiens
aaacaacagcccccacc

SEQ ID NO: 806 - RNA, 20 nt, Homo sapiens
ggcuccuuggucuaggggua

SEQ ID NO: 807 - RNA, 20 nt, Homo sapiens
uaccccuagaccaaggagcc

SEQ ID NO: 808 - RNA, 22 nt, Homo sapiens
cgucccggggcugcgcgaggca

SEQ ID NO: 809 - RNA, 22 nt, Homo sapiens
ugccucgcgcagccccgggacg

SEQ ID NO: 810 - RNA, 22 nt, Homo sapiens
uggggauuuggagaagugguga

SEQ ID NO: 811 - RNA, 22 nt, Homo sapiens
ucaccacuucuccaaaucccca

SEQ ID NO: 812 - RNA, 17 nt, Homo sapiens
ugguagagcugaggaca

SEQ ID NO: 813 - RNA, 17 nt, Homo sapiens
uguccucagcucuacca

SEQ ID NO: 814 - RNA, 23 nt, Homo sapiens
uugaauucuuggccuuaagugau

SEQ ID NO: 815 - RNA, 23 nt, Homo sapiens
aucacuuaaggccaagaauucaa

SEQ ID NO: 816 - RNA, 20 nt, Homo sapiens
gagcuuggucuguagcgguu

SEQ ID NO: 817 - RNA, 20 nt, Homo sapiens
aaccgcuacagaccaagcuc

SEQ ID NO: 818 - RNA, 20 nt, Homo sapiens
ggauccgagucacggcacca

SEQ ID NO: 819 - RNA, 20 nt, Homo sapiens
uggugccgugacucggaucc

SEQ ID NO: 820 - RNA, 17 nt, Homo sapiens
aggguguguguguuuuu

SEQ ID NO: 821 - RNA, 17 nt, Homo sapiens
aaaaacacacacacccu

SEQ ID NO: 822 - RNA, 17 nt, Homo sapiens
ccugguggcuuccuuuu

SEQ ID NO: 823 - RNA, 17 nt, Homo sapiens
aaaaggaagccaccagg

SEQ ID NO: 824 - RNA, 22 nt, Homo sapiens
ucacaagguauugacuggcgua

SEQ ID NO: 825 - RNA, 22 nt, Homo sapiens
uacgccagucaauaccuuguga

SEQ ID NO: 826 - RNA, 19 nt, Homo sapiens
agagguagguguggaagaa

SEQ ID NO: 827 - RNA, 19 nt, Homo sapiens
uucuuccacaccuaccucu

SEQ ID NO: 828 - RNA, 22 nt, Homo sapiens
ccaggaggcggaggagguggag

SEQ ID NO: 829 - RNA, 22 nt, Homo sapiens
cuccaccuccuccgccuccugg

SEQ ID NO: 830 - RNA, 22 nt, Homo sapiens
auagugguugugaauuuaccuu

SEQ ID NO: 831 - RNA, 22 nt, Homo sapiens
aagguaaauucacaaccacuau

SEQ ID NO: 832 - RNA, 23 nt, Homo sapiens
gauugagacuaguagggcuaggc

SEQ ID NO: 833 - RNA, 23 nt, Homo sapiens
gccuagcccuacuagucucaauc

SEQ ID NO: 834 - RNA, 23 nt, Homo sapiens
ugacacggaggguggcuugggaa

SEQ ID NO: 835 - RNA, 23 nt, Homo sapiens
uucccaagccacccuccguguca

SEQ ID NO: 836 - RNA, 17 nt, Homo sapiens
gagacugggguggggcc

SEQ ID NO: 837 - RNA, 17 nt, Homo sapiens
ggccccaccccagucuc

SEQ ID NO: 838 - RNA, 21 nt, Homo sapiens
aagguuuggauagaugcaaua

SEQ ID NO: 839 - RNA, 21 nt, Homo sapiens
uauugcaucuauccaaaccuu

SEQ ID NO: 840 - RNA, 22 nt, Homo sapiens
cucaaguagucugaccagggga

SEQ ID NO: 841 - RNA, 22 nt, Homo sapiens
uccccuggucagacuacuugag

SEQ ID NO: 842 - RNA, 18 nt, Homo sapiens
gggugcgggccggcgggg

SEQ ID NO: 843 - RNA, 18 nt, Homo sapiens
ccccgccggcccgcaccc

SEQ ID NO: 844 - RNA, 18 nt, Homo sapiens
agagcagaaggaugagau

SEQ ID NO: 845 - RNA, 18 nt, Homo sapiens
aucucauccuucugcucu

SEQ ID NO: 846 - RNA, 21 nt, Homo sapiens
uggcaaacguggaagccgaga

SEQ ID NO: 847 - RNA, 21 nt, Homo sapiens
ucucggcuuccacguuugcca

SEQ ID NO: 848 - RNA, 18 nt, Homo sapiens
ggugggggguguuguuuu

SEQ ID NO: 849 - RNA, 18 nt, Homo sapiens
aaaacaacaccccccacc

SEQ ID NO: 850 - RNA, 22 nt, Homo sapiens
cuagugcucuccguuacaagua

SEQ ID NO: 851 - RNA, 22 nt, Homo sapiens
uacuuguaacggagagcacuag

SEQ ID NO: 852 - RNA, 22 nt, Homo sapiens
caagggaccaagcauucauuau

SEQ ID NO: 853 - RNA, 22 nt, Homo sapiens
auaaugaaugcuuggucccuug

SEQ ID NO: 854 - RNA, 22 nt, Homo sapiens
caggaaggauuuagggacaggc

SEQ ID NO: 855 - RNA, 22 nt, Homo sapiens
gccugucccuaaauccuuccug

SEQ ID NO: 856 - RNA, 22 nt, Homo sapiens
cuauuaaggacauuugugauuc

SEQ ID NO: 857 - RNA, 22 nt, Homo sapiens
gaaucacaaauguccuuaauag

SEQ ID NO: 858 - RNA, 22 nt, Homo sapiens
auuaaggacauuugugauugau

SEQ ID NO: 859 - RNA, 22 nt, Homo sapiens
aucaaucacaaauguccuuaau

SEQ ID NO: 860 - RNA, 17 nt, Homo sapiens
gaggcugagcugaggag

SEQ ID NO: 861 - RNA, 17 nt, Homo sapiens
cuccucagcucagccuc

SEQ ID NO: 862 - RNA, 22 nt, Homo sapiens
cgcgcggccgugcucggagcag

SEQ ID NO: 863 - RNA, 22 nt, Homo sapiens
cugcuccgagcacggccgcgcg

SEQ ID NO: 864 - RNA, 21 nt, Homo sapiens
agccaaguggaaguuacuuua

SEQ ID NO: 865 - RNA, 21 nt, Homo sapiens
uaaaguaacuuccacuuggcu

SEQ ID NO: 866 - RNA, 17 nt, Homo sapiens
ggagugggcuggugguu

SEQ ID NO: 867 - RNA, 17 nt, Homo sapiens
aaccaccagcccacucc

SEQ ID NO: 868 - RNA, 22 nt, Homo sapiens
uuucuauuucucaguggggcuc

SEQ ID NO: 869 - RNA, 22 nt, Homo sapiens
gagccccacugagaaauagaaa

SEQ ID NO: 870 - RNA, 22 nt, Homo sapiens
aacccagugggcuauggaaaug

SEQ ID NO: 871 - RNA, 22 nt, Homo sapiens
cauuuccauagcccacuggguu

SEQ ID NO: 872 - RNA, 17 nt, Homo sapiens
gggguggucuguuguug

SEQ ID NO: 873 - RNA, 17 nt, Homo sapiens
caacaacagaccacccc

SEQ ID NO: 874 - RNA, 20 nt, Homo sapiens
aaaaggcgggagaagcccca

SEQ ID NO: 875 - RNA, 20 nt, Homo sapiens
uggggcuucucccgccuuuu

SEQ ID NO: 876 - RNA, 20 nt, Homo sapiens
uaacggccgcgguacccuaa

SEQ ID NO: 877 - RNA, 20 nt, Homo sapiens
uuaggguaccgcggccguua

SEQ ID NO: 878 - RNA, 17 nt, Homo sapiens
gcugggcgaggcuggca

SEQ ID NO: 879 - RNA, 17 nt, Homo sapiens
ugccagccucgcccagc

SEQ ID NO: 880 - RNA, 19 nt, Homo sapiens
agagcuggcugaagggcag

SEQ ID NO: 881 - RNA, 19 nt, Homo sapiens
cugcccuucagccagcucu

SEQ ID NO: 882 - RNA, 18 nt, Homo sapiens
agggggcgggcuccggcg

SEQ ID NO: 883 - RNA, 18 nt, Homo sapiens
cgccggagcccgcccccu

SEQ ID NO: 884 - RNA, 22 nt, Homo sapiens
ucugguaagagauuugggcaua

SEQ ID NO: 885 - RNA, 22 nt, Homo sapiens
uaugcccaaaucucuuaccaga

SEQ ID NO: 886 - RNA, 22 nt, Homo sapiens
aauguggacuggugugaccaaa

SEQ ID NO: 887 - RNA, 22 nt, Homo sapiens
uuuggucacaccaguccacauu

SEQ ID NO: 888 - RNA, 17 nt, Homo sapiens
ggggcugggcgcgcgcc

SEQ ID NO: 889 - RNA, 17 nt, Homo sapiens
ggcgcgcgcccagcccc

SEQ ID NO: 890 - RNA, 21 nt, Homo sapiens
agaaggccuuuccaucucugu

SEQ ID NO: 891 - RNA, 21 nt, Homo sapiens
acagagauggaaaggccuucu

SEQ ID NO: 892 - RNA, 22 nt, Homo sapiens
ccagacuguggcugaccagagg

SEQ ID NO: 893 - RNA, 22 nt, Homo sapiens
ccucuggucagccacagucugg

SEQ ID NO: 894 - RNA, 21 nt, Homo sapiens
aauguaaacaggcuuuuugcu

SEQ ID NO: 895 - RNA, 21 nt, Homo sapiens
agcaaaaagccuguuuacauu

SEQ ID NO: 896 - RNA, 22 nt, Homo sapiens
gaggaaacugaagcugagaggg

SEQ ID NO: 897 - RNA, 22 nt, Homo sapiens
cccucucagcuucaguuuccuc

SEQ ID NO: 898 - RNA, 17 nt, Homo sapiens
cuccgggacggcugggc

SEQ ID NO: 899 - RNA, 17 nt, Homo sapiens
gcccagccgucccggag

SEQ ID NO: 900 - RNA, 22 nt, Homo sapiens
ugggcuggcagggcaagugcug

SEQ ID NO: 901 - RNA, 22 nt, Homo sapiens
cagcacuugcccugccagccca

SEQ ID NO: 902 - RNA, 17 nt, Homo sapiens
aagacugagaggaggga

SEQ ID NO: 903 - RNA, 17 nt, Homo sapiens
ucccuccucucagucuu

SEQ ID NO: 904 - RNA, 17 nt, Homo sapiens
ugagguaguaguuucuu

SEQ ID NO: 905 - RNA, 17 nt, Homo sapiens
aagaaacuacuaccuca

SEQ ID NO: 906 - RNA, 21 nt, Homo sapiens
uaugugaccucggaugaauca

SEQ ID NO: 907 - RNA, 21 nt, Homo sapiens
ugauucauccgaggucacaua

SEQ ID NO: 908 - RNA, 22 nt, Homo sapiens
gcugaugaugauggugcugaag

SEQ ID NO: 909 - RNA, 22 nt, Homo sapiens
cuucagcaccaucaucaucagc

SEQ ID NO: 910 - RNA, 22 nt, Homo sapiens
uuuaagcaggaaauagaauuua

SEQ ID NO: 911 - RNA, 22 nt, Homo sapiens
uaaauucuauuuccugcuuaaa

SEQ ID NO: 912 - RNA, 22 nt, Homo sapiens
ugugacaauagagaugaacaug

SEQ ID NO: 913 - RNA, 22 nt, Homo sapiens
cauguucaucucuauugucaca

SEQ ID NO: 914 - RNA, 18 nt, Homo sapiens
aggcugggcugggacgga

SEQ ID NO: 915 - RNA, 18 nt, Homo sapiens
uccgucccagcccagccu

SEQ ID NO: 916 - RNA, 20 nt, Homo sapiens
aaauggguggucugaggcaa

SEQ ID NO: 917 - RNA, 20 nt, Homo sapiens
uugccucagaccacccauuu

SEQ ID NO: 918 - RNA, 20 nt, Homo sapiens
cuggguugggcugggcuggg

SEQ ID NO: 919 - RNA, 20 nt, Homo sapiens
cccagcccagcccaacccag

SEQ ID NO: 920 - RNA, 17 nt, Homo sapiens
gcggggcugggcgcgcg

SEQ ID NO: 921 - RNA, 17 nt, Homo sapiens
cgcgcgcccagccccgc

SEQ ID NO: 922 - RNA, 22 nt, Homo sapiens
acuaaaggauauagaagguuuu

SEQ ID NO: 923 - RNA, 22 nt, Homo sapiens
aaaaccuucuauauccuuuagu

SEQ ID NO: 924 - RNA, 22 nt, Homo sapiens
ugagggaguaggauguaugguu

SEQ ID NO: 925 - RNA, 22 nt, Homo sapiens
aaccauacauccuacucccuca

SEQ ID NO: 926 - RNA, 22 nt, Homo sapiens
gaagaacuguugcauuugcccu

SEQ ID NO: 927 - RNA, 22 nt, Homo sapiens
agggcaaaugcaacaguucuuc

SEQ ID NO: 928 - RNA, 22 nt, Homo sapiens
cagggccucacuguaucgccca

SEQ ID NO: 929 - RNA, 22 nt, Homo sapiens
ugggcgauacagugaggcccug

SEQ ID NO: 930 - RNA, 22 nt, Homo sapiens
agacugacggcuggaggcccau

SEQ ID NO: 931 - RNA, 22 nt, Homo sapiens
augggccuccagccgucagucu

SEQ ID NO: 932 - RNA, 18 nt, Homo sapiens
acaggcaggauuggggaa

SEQ ID NO: 933 - RNA, 18 nt, Homo sapiens
uuccccaauccugccugu

SEQ ID NO: 934 - RNA, 22 nt, Homo sapiens
aggacuggacucccggcagccc

SEQ ID NO: 935 - RNA, 22 nt, Homo sapiens
gggcugccgggaguccaguccu

SEQ ID NO: 936 - RNA, 17 nt, Homo sapiens
gggagaagggucggggc

SEQ ID NO: 937 - RNA, 17 nt, Homo sapiens
gccccgacccuucuccc

SEQ ID NO: 938 - RNA, 25 nt, Homo sapiens
aaauaugaugaaacucacagcugag

SEQ ID NO: 939 - RNA, 25 nt, Homo sapiens
cucagcugugaguuucaucauauuu

SEQ ID NO: 940 - RNA, 26 nt, Homo sapiens
gcucagggaugauaacugugcugaga

SEQ ID NO: 941 - RNA, 26 nt, Homo sapiens
ucucagcacaguuaucaucccugagc

SEQ ID NO: 942 - RNA, 18 nt, Homo sapiens
cagcagugcgcagggcug

SEQ ID NO: 943 - RNA, 18 nt, Homo sapiens
cagcccugcgcacugcug

SEQ ID NO: 944 - RNA, 22 nt, Homo sapiens
gcuaaggaaguccugugcucag

SEQ ID NO: 945 - RNA, 22 nt, Homo sapiens
cugagcacaggacuuccuuagc

SEQ ID NO: 946 - RNA, 21 nt, Homo sapiens
ugacucugccuguaggccggu

SEQ ID NO: 947 - RNA, 21 nt, Homo sapiens
accggccuacaggcagaguca

SEQ ID NO: 948 - RNA, 21 nt, Homo sapiens
gaccgagagggccucggcugu

SEQ ID NO: 949 - RNA, 21 nt, Homo sapiens
acagccgaggcccucucgguc

SEQ ID NO: 950 - RNA, 21 nt, Homo sapiens
ggggggaugugcaugcugguu

SEQ ID NO: 951 - RNA, 21 nt, Homo sapiens
aaccagcaugcacaucccccc

SEQ ID NO: 952 - RNA, 22 nt, Homo sapiens
uggucugcaaagagaugacugu

SEQ ID NO: 953 - RNA, 22 nt, Homo sapiens
acagucaucucuuugcagacca

SEQ ID NO: 954 - RNA, 22 nt, Homo sapiens
ucauuauauguaugaucuggac

SEQ ID NO: 955 - RNA, 22 nt, Homo sapiens
guccagaucauacauauaauga

SEQ ID NO: 956 - RNA, 18 nt, Homo sapiens
cccagcaggacgggagcg

SEQ ID NO: 957 - RNA, 18 nt, Homo sapiens
cgcucccguccugcuggg

SEQ ID NO: 958 - RNA, 17 nt, Homo sapiens
auggagaaggcuucuga

SEQ ID NO: 959 - RNA, 17 nt, Homo sapiens
ucagaagccuucuccau

SEQ ID NO: 960 - RNA, 17 nt, Homo sapiens
ccccggggagcccggcg

SEQ ID NO: 961 - RNA, 17 nt, Homo sapiens
cgccgggcuccccgggg

SEQ ID NO: 962 - RNA, 22 nt, Homo sapiens
uggaaggagguugccggacgcu

SEQ ID NO: 963 - RNA, 22 nt, Homo sapiens
agcguccggcaaccuccuucca

SEQ ID NO: 964 - RNA, 17 nt, Homo sapiens
ggauggaggaggggucu

SEQ ID NO: 965 - RNA, 17 nt, Homo sapiens
agaccccuccuccaucc

SEQ ID NO: 966 - RNA, 17 nt, Homo sapiens
guggaccuggcugggac

SEQ ID NO: 967 - RNA, 17 nt, Homo sapiens
gucccagccagguccac

SEQ ID NO: 968 - RNA, 21 nt, Homo sapiens
ucgugcauauaucuaccacau

SEQ ID NO: 969 - RNA, 21 nt, Homo sapiens
augugguagauauaugcacga

SEQ ID NO: 970 - RNA, 21 nt, Homo sapiens
ugugguagauauaugcacgau

SEQ ID NO: 971 - RNA, 21 nt, Homo sapiens
aucgugcauauaucuaccaca

SEQ ID NO: 972 - RNA, 22 nt, Homo sapiens
ugagccgagcugagcuuagcug

SEQ ID NO: 973 - RNA, 22 nt, Homo sapiens
cagcuaagcucagcucggcuca

SEQ ID NO: 974 - RNA, 22 nt, Homo sapiens
gagcuuggaugagcugggcuga

SEQ ID NO: 975 - RNA, 22 nt, Homo sapiens
ucagcccagcucauccaagcuc

SEQ ID NO: 976 - RNA, 22 nt, Homo sapiens
gcugaacugggcugagcugggc

SEQ ID NO: 977 - RNA, 22 nt, Homo sapiens
gcccagcucagcccaguucagc

SEQ ID NO: 978 - RNA, 21 nt, Homo sapiens
uuaguccugccuguagguuua

SEQ ID NO: 979 - RNA, 21 nt, Homo sapiens
uaaaccuacaggcaggacuaa

SEQ ID NO: 980 - RNA, 20 nt, Homo sapiens
uugggcugggcuggguuggg

SEQ ID NO: 981 - RNA, 20 nt, Homo sapiens
cccaacccagcccagcccaa

SEQ ID NO: 982 - RNA, 20 nt, Homo sapiens
uaggaugggggugagaggug

SEQ ID NO: 983 - RNA, 20 nt, Homo sapiens
caccucucacccccauccua

SEQ ID NO: 984 - RNA, 22 nt, Homo sapiens
aaaaguaauuguggauuuugcu

SEQ ID NO: 985 - RNA, 22 nt, Homo sapiens
agcaaaauccacaauuacuuuu

SEQ ID NO: 986 - RNA, 22 nt, Homo sapiens
caaaaaccggcaauuacuuuug

SEQ ID NO: 987 - RNA, 22 nt, Homo sapiens
caaaaguaauugccgguuuuug

SEQ ID NO: 988 - RNA, 22 nt, Homo sapiens
gaaaacgacaaugacuuuugca

SEQ ID NO: 989 - RNA, 22 nt, Homo sapiens
ugcaaaagucauugucguuuuc

SEQ ID NO: 990 - RNA, 21 nt, Homo sapiens
caaaaacugcaauuacuuuca

SEQ ID NO: 991 - RNA, 21 nt, Homo sapiens
ugaaaguaauugcaguuuuug

SEQ ID NO: 992 - RNA, 21 nt, Homo sapiens
aaagguaauugugguuucugc

SEQ ID NO: 993 - RNA, 21 nt, Homo sapiens
gcagaaaccacaauuaccuuu

SEQ ID NO: 994 - RNA, 22 nt, Homo sapiens
caaaaacugcaguuacuuuugc

SEQ ID NO: 995 - RNA, 22 nt, Homo sapiens
gcaaaaguaacugcaguuuuug

SEQ ID NO: 996 - RNA, 20 nt, Homo sapiens
aaaagugauugcaguguuug

SEQ ID NO: 997 - RNA, 20 nt, Homo sapiens
caaacacugcaaucacuuuu

SEQ ID NO: 998 - RNA, 22 nt, Homo sapiens
aaagguaauugcaguuuuuccc

SEQ ID NO: 999 - RNA, 22 nt, Homo sapiens
gggaaaaacugcaauuaccuuu

SEQ ID NO: 1000 - RNA, 21 nt, Homo sapiens
uaaaaacugcaauuacuuuua

SEQ ID NO: 1001 - RNA, 21 nt, Homo sapiens
uaaaaguaauugcaguuuuua

SEQ ID NO: 1002 - RNA, 23 nt, Homo sapiens
ugcaaaaguaauugcaguuuuug

SEQ ID NO: 1003 - RNA, 23 nt, Homo sapiens
caaaaacugcaauuacuuuugca

SEQ ID NO: 1004 - RNA, 21 nt, Homo sapiens
aaaaguaacugcgguuuuuga

SEQ ID NO: 1005 - RNA, 21 nt, Homo sapiens
ucaaaaaccgcaguuacuuuu

SEQ ID NO: 1006 - RNA, 22 nt, Homo sapiens
aacggcaaugacuuuuguacca

SEQ ID NO: 1007 - RNA, 22 nt, Homo sapiens
ugguacaaaagucauugccguu

SEQ ID NO: 1008 - RNA, 22 nt, Homo sapiens
caaaaacugcaguuacuuuugu

SEQ ID NO: 1009 - RNA, 22 nt, Homo sapiens
acaaaaguaacugcaguuuuug

SEQ ID NO: 1010 - RNA, 22 nt, Homo sapiens
aaaaguaauugcgguuuuugcc

SEQ ID NO: 1011 - RNA, 22 nt, Homo sapiens
ggcaaaaaccgcaauuacuuuu

SEQ ID NO: 1012 - RNA, 20 nt, Homo sapiens
aaaaggcauugugguuuuug

SEQ ID NO: 1013 - RNA, 20 nt, Homo sapiens
caaaaaccacaaugccuuuu

SEQ ID NO: 1014 - RNA, 23 nt, Homo sapiens
cggcccgggcugcugcuguuccu

SEQ ID NO: 1015 - RNA, 23 nt, Homo sapiens
aggaacagcagcagcccgggccg

SEQ ID NO: 1016 - RNA, 20 nt, Homo sapiens
agagguauagggcaugggaa

SEQ ID NO: 1017 - RNA, 20 nt, Homo sapiens
uucccaugcccuauaccucu

SEQ ID NO: 1018 - RNA, 22 nt, Homo sapiens
uuccuaugcauauacuucuuug

SEQ ID NO: 1019 - RNA, 22 nt, Homo sapiens
caaagaaguauaugcauaggaa

SEQ ID NO: 1020 - RNA, 22 nt, Homo sapiens
aucauagaggaaaauccauguu

SEQ ID NO: 1021 - RNA, 22 nt, Homo sapiens
aacauggauuuuccucuaugau

SEQ ID NO: 1022 - RNA, 22 nt, Homo sapiens
cguggauauuccuucuauguuu

SEQ ID NO: 1023 - RNA, 22 nt, Homo sapiens
aaacauagaaggaauauccacg

SEQ ID NO: 1024 - RNA, 22 nt, Homo sapiens
ugaguauuacauggccaaucuc

SEQ ID NO: 1025 - RNA, 22 nt, Homo sapiens
gagauuggccauguaauacuca

SEQ ID NO: 1026 - RNA, 21 nt, Homo sapiens
cuuccgccccgccgggcgucg

SEQ ID NO: 1027 - RNA, 21 nt, Homo sapiens
cgacgcccggcggggcggaag

SEQ ID NO: 1028 - RNA, 22 nt, Homo sapiens
uagcuuaucagacugauguuga

SEQ ID NO: 1029 - RNA, 22 nt, Homo sapiens
ucaacaucagucugauaagcua

SEQ ID NO: 1030 - RNA, 22 nt, Homo sapiens
cacuagauugugagcuccugga

SEQ ID NO: 1031 - RNA, 22 nt, Homo sapiens
uccaggagcucacaaucuagug

SEQ ID NO: 1032 - RNA, 22 nt, Homo sapiens
aaggagcucacagucuauugag

SEQ ID NO: 1033 - RNA, 22 nt, Homo sapiens
cucaauagacugugagcuccuu

SEQ ID NO: 1034 - RNA, 22 nt, Homo sapiens
uacgucaucguugucaucguca

SEQ ID NO: 1035 - RNA, 22 nt, Homo sapiens
ugacgaugacaacgaugacgua

SEQ ID NO: 1036 - RNA, 22 nt, Homo sapiens
cacgcucaugcacacacccaca

SEQ ID NO: 1037 - RNA, 22 nt, Homo sapiens
ugugggugugugcaugagcgug

SEQ ID NO: 1038 - RNA, 21 nt, Homo sapiens
caacaccagucgaugggcugu

SEQ ID NO: 1039 - RNA, 21 nt, Homo sapiens
acagcccaucgacugguguug

SEQ ID NO: 1040 - RNA, 22 nt, Homo sapiens
uucaccaccuucuccacccagc

SEQ ID NO: 1041 - RNA, 22 nt, Homo sapiens
gcuggguggagaagguggugaa

SEQ ID NO: 1042 - RNA, 23 nt, Homo sapiens
cggguagagagggcagugggagg

SEQ ID NO: 1043 - RNA, 23 nt, Homo sapiens
ccucccacugcccucucuacccg

SEQ ID NO: 1044 - RNA, 18 nt, Homo sapiens
aauccuugcuaccugggu

SEQ ID NO: 1045 - RNA, 18 nt, Homo sapiens
acccagguagcaaggauu

SEQ ID NO: 1046 - RNA, 22 nt, Homo sapiens
caauuuagugugugugauauuu

SEQ ID NO: 1047 - RNA, 22 nt, Homo sapiens
aaauaucacacacacuaaauug

SEQ ID NO: 1048 - RNA, 22 nt, Homo sapiens
uauugcacauuacuaaguugca

SEQ ID NO: 1049 - RNA, 22 nt, Homo sapiens
ugcaacuuaguaaugugcaaua

SEQ ID NO: 1050 - RNA, 22 nt, Homo sapiens
ccuauucuugauuacuuguuuc

SEQ ID NO: 1051 - RNA, 22 nt, Homo sapiens
gaaacaaguaaucaagaauagg

SEQ ID NO: 1052 - RNA, 22 nt, Homo sapiens
uucaaguaauccaggauaggcu

SEQ ID NO: 1053 - RNA, 22 nt, Homo sapiens
agccuauccuggauuacuugaa

SEQ ID NO: 1054 - RNA, 23 nt, Homo sapiens
ccaguuaccgcuuccgcuaccgc

SEQ ID NO: 1055 - RNA, 23 nt, Homo sapiens
gcgguagcggaagcgguaacugg

SEQ ID NO: 1056 - RNA, 21 nt, Homo sapiens
gauuucaguggagugaaguuc

SEQ ID NO: 1057 - RNA, 21 nt, Homo sapiens
gaacuucacuccacugaaauc

SEQ ID NO: 1058 - RNA, 22 nt, Homo sapiens
uccuucauuccaccggagucug

SEQ ID NO: 1059 - RNA, 22 nt, Homo sapiens
cagacuccgguggaaugaagga

SEQ ID NO: 1060 - RNA, 23 nt, Homo sapiens
aaaauggugcccuagugacuaca

SEQ ID NO: 1061 - RNA, 23 nt, Homo sapiens
uguagucacuagggcaccauuuu

SEQ ID NO: 1062 - RNA, 21 nt, Homo sapiens
caagucacuagugguuccguu

SEQ ID NO: 1063 - RNA, 21 nt, Homo sapiens
aacggaaccacuagugacuug

SEQ ID NO: 1064 - RNA, 22 nt, Homo sapiens
ccaguauuaacugugcugcuga

SEQ ID NO: 1065 - RNA, 22 nt, Homo sapiens
ucagcagcacaguuaauacugg

SEQ ID NO: 1066 - RNA, 23 nt, Homo sapiens
ucccccaggugugauucugauuu

SEQ ID NO: 1067 - RNA, 23 nt, Homo sapiens
aaaucagaaucacaccuggggga

SEQ ID NO: 1068 - RNA, 22 nt, Homo sapiens
aaaagcuggguugagagggcga

SEQ ID NO: 1069 - RNA, 22 nt, Homo sapiens
ucgcccucucaacccagcuuuu

SEQ ID NO: 1070 - RNA, 22 nt, Homo sapiens
uggacggagaacugauaagggu

SEQ ID NO: 1071 - RNA, 22 nt, Homo sapiens
acccuuaucaguucuccgucca

SEQ ID NO: 1072 - RNA, 22 nt, Homo sapiens
uggugggccgcagaacaugugc

SEQ ID NO: 1073 - RNA, 22 nt, Homo sapiens
gcacauguucugcggcccacca

SEQ ID NO: 1074 - RNA, 22 nt, Homo sapiens
agugccugcuaugugccaggca

SEQ ID NO: 1075 - RNA, 22 nt, Homo sapiens
ugccuggcacauagcaggcacu

SEQ ID NO: 1076 - RNA, 22 nt, Homo sapiens
cuuggcaccuagcaagcacuca

SEQ ID NO: 1077 - RNA, 22 nt, Homo sapiens
ugagugcuugcuaggugccaag

SEQ ID NO: 1078 - RNA, 23 nt, Homo sapiens
uuauugcuuaagaauacgcguag

SEQ ID NO: 1079 - RNA, 23 nt, Homo sapiens
cuacgcguauucuuaagcaauaa

SEQ ID NO: 1080 - RNA, 22 nt, Homo sapiens
uugcauagucacaaaagugauc

SEQ ID NO: 1081 - RNA, 22 nt, Homo sapiens
gaucacuuuugugacuaugcaa

SEQ ID NO: 1082 - RNA, 22 nt, Homo sapiens
gugaauuaccgaagggccauaa

SEQ ID NO: 1083 - RNA, 22 nt, Homo sapiens
uuauggcccuucgguaauucac

SEQ ID NO: 1084 - RNA, 22 nt, Homo sapiens
uauggcacugguagaauucacu

SEQ ID NO: 1085 - RNA, 22 nt, Homo sapiens
agugaauucuaccagugccaua

SEQ ID NO: 1086 - RNA, 22 nt, Homo sapiens
ugauauguuugauauauuaggu

SEQ ID NO: 1087 - RNA, 22 nt, Homo sapiens
accuaauauaucaaacauauca

SEQ ID NO: 1088 - RNA, 21 nt, Homo sapiens
ugauauguuugauauuggguu

SEQ ID NO: 1089 - RNA, 21 nt, Homo sapiens
aacccaauaucaaacauauca

SEQ ID NO: 1090 - RNA, 18 nt, Homo sapiens
agcaggugcggggcggcg

SEQ ID NO: 1091 - RNA, 18 nt, Homo sapiens
cgccgccccgcaccugcu

SEQ ID NO: 1092 - RNA, 21 nt, Homo sapiens
cagugcaaguguagaugccga

SEQ ID NO: 1093 - RNA, 21 nt, Homo sapiens
ucggcaucuacacuugcacug

SEQ ID NO: 1094 - RNA, 22 nt, Homo sapiens
uauguaauaugguccacaucuu

SEQ ID NO: 1095 - RNA, 22 nt, Homo sapiens
aagauguggaccauauuacaua

SEQ ID NO: 1096 - RNA, 21 nt, Homo sapiens
aauauaacacagauggccugu

SEQ ID NO: 1097 - RNA, 21 nt, Homo sapiens
acaggccaucuguguuauauu

SEQ ID NO: 1098 - RNA, 22 nt, Homo sapiens
aucgggaaugucguguccgccc

SEQ ID NO: 1099 - RNA, 22 nt, Homo sapiens
gggcggacacgacauucccgau

SEQ ID NO: 1100 - RNA, 23 nt, Homo sapiens
aaugacacgaucacucccguuga

SEQ ID NO: 1101 - RNA, 23 nt, Homo sapiens
ucaacgggagugaucgugucauu

SEQ ID NO: 1102 - RNA, 22 nt, Homo sapiens
uacucaggagaguggcaaucac

SEQ ID NO: 1103 - RNA, 22 nt, Homo sapiens
gugauugccacucuccugagua

SEQ ID NO: 1104 - RNA, 23 nt, Homo sapiens
uggaagacuagugauuuuguugu

SEQ ID NO: 1105 - RNA, 23 nt, Homo sapiens
acaacaaaaucacuagucuucca

SEQ ID NO: 1106 - RNA, 22 nt, Homo sapiens
auaaagcuagauaaccgaaagu

SEQ ID NO: 1107 - RNA, 22 nt, Homo sapiens
acuuucgguuaucuagcuuuau

SEQ ID NO: 1108 - RNA, 23 nt, Homo sapiens
ucuuugguuaucuagcuguauga

SEQ ID NO: 1109 - RNA, 23 nt, Homo sapiens
ucauacagcuagauaaccaaaga

SEQ ID NO: 1110 - RNA, 22 nt, Homo sapiens
acaggugagguucuugggagcc

SEQ ID NO: 1111 - RNA, 22 nt, Homo sapiens
ggcucccaagaaccucaccugu

SEQ ID NO: 1112 - RNA, 24 nt, Homo sapiens
ucccugagacccuuuaaccuguga

SEQ ID NO: 1113 - RNA, 24 nt, Homo sapiens
ucacagguuaaagggucucaggga

SEQ ID NO: 1114 - RNA, 22 nt, Homo sapiens
caacaaaucccagucuaccuaa

SEQ ID NO: 1115 - RNA, 22 nt, Homo sapiens
uuagguagacugggauuuguug

SEQ ID NO: 1116 - RNA, 22 nt, Homo sapiens
cguguucacagcggaccuugau

SEQ ID NO: 1117 - RNA, 22 nt, Homo sapiens
aucaagguccgcugugaacacg

SEQ ID NO: 1118 - RNA, 20 nt, Homo sapiens
uaaggcacgcggugaaugcc

SEQ ID NO: 1119 - RNA, 20 nt, Homo sapiens
ggcauucaccgcgugccuua

SEQ ID NO: 1120 - RNA, 22 nt, Homo sapiens
aacacaccugguuaaccucuuu

SEQ ID NO: 1121 - RNA, 22 nt, Homo sapiens
aaagagguuaaccagguguguu

SEQ ID NO: 1122 - RNA, 22 nt, Homo sapiens
uaacagucuacagccauggucg

SEQ ID NO: 1123 - RNA, 22 nt, Homo sapiens
cgaccauggcuguagacuguua

SEQ ID NO: 1124 - RNA, 22 nt, Homo sapiens
accguggcuuucgauuguuacu

SEQ ID NO: 1125 - RNA, 22 nt, Homo sapiens
aguaacaaucgaaagccacggu

SEQ ID NO: 1126 - RNA, 21 nt, Homo sapiens
uaacagucuccagucacggcc

SEQ ID NO: 1127 - RNA, 21 nt, Homo sapiens
ggccgugacuggagacuguua

SEQ ID NO: 1128 - RNA, 23 nt, Homo sapiens
accuuggcucuagacugcuuacu

SEQ ID NO: 1129 - RNA, 23 nt, Homo sapiens
aguaagcagucuagagccaaggu

SEQ ID NO: 1130 - RNA, 23 nt, Homo sapiens
ucucacacagaaaucgcacccgu

SEQ ID NO: 1131 - RNA, 23 nt, Homo sapiens
acgggugcgauuucugugugaga

SEQ ID NO: 1132 - RNA, 22 nt, Homo sapiens
ugguugaccauagaacaugcgc

SEQ ID NO: 1133 - RNA, 22 nt, Homo sapiens
gcgcauguucuauggucaacca

SEQ ID NO: 1134 - RNA, 23 nt, Homo sapiens
caguaacaaagauucauccuugu

SEQ ID NO: 1135 - RNA, 23 nt, Homo sapiens
acaaggaugaaucuuuguuacug

SEQ ID NO: 1136 - RNA, 22 nt, Homo sapiens
agaguugagucuggacgucccg

SEQ ID NO: 1137 - RNA, 22 nt, Homo sapiens
cgggacguccagacucaacucu

SEQ ID NO: 1138 - RNA, 22 nt, Homo sapiens
agaauuguggcuggacaucugu

SEQ ID NO: 1139 - RNA, 22 nt, Homo sapiens
acagauguccagccacaauucu

SEQ ID NO: 1140 - RNA, 21 nt, Homo sapiens
ugauuguccaaacgcaauucu

SEQ ID NO: 1141 - RNA, 21 nt, Homo sapiens
agaauugcguuuggacaauca

SEQ ID NO: 1142 - RNA, 22 nt, Homo sapiens
uauagggauuggagccguggcg

SEQ ID NO: 1143 - RNA, 22 nt, Homo sapiens
cgccacggcuccaaucccuaua

SEQ ID NO: 1144 - RNA, 23 nt, Homo sapiens
uauggcuuuuuauuccuauguga

SEQ ID NO: 1145 - RNA, 23 nt, Homo sapiens
ucacauaggaauaaaaagccaua

SEQ ID NO: 1146 - RNA, 22 nt, Homo sapiens
auguagggcuaaaagccauggg

SEQ ID NO: 1147 - RNA, 22 nt, Homo sapiens
cccauggcuuuuagcccuacau

SEQ ID NO: 1148 - RNA, 23 nt, Homo sapiens
uauggcuuuucauuccuauguga

SEQ ID NO: 1149 - RNA, 23 nt, Homo sapiens
ucacauaggaaugaaaagccaua

SEQ ID NO: 1150 - RNA, 22 nt, Homo sapiens
aaccaucgaccguugaguggac

SEQ ID NO: 1151 - RNA, 22 nt, Homo sapiens
guccacucaacggucgaugguu

SEQ ID NO: 1152 - RNA, 22 nt, Homo sapiens
aacauucaaccugucggugagu

SEQ ID NO: 1153 - RNA, 22 nt, Homo sapiens
acucaccgacagguugaauguu

SEQ ID NO: 1154 - RNA, 25 nt, Homo sapiens
cuuccagacgcuccgccccacgucg

SEQ ID NO: 1155 - RNA, 25 nt, Homo sapiens
cgacguggggcggagcgucuggaag

SEQ ID NO: 1156 - RNA, 24 nt, Homo sapiens
aacaacaaaaucacuagucuucca

SEQ ID NO: 1157 - RNA, 24 nt, Homo sapiens
uggaagacuagugauuuuguuguu

SEQ ID NO: 1158 - RNA, 22 nt, Homo sapiens
agguagacugggauuuguuguu

SEQ ID NO: 1159 - RNA, 22 nt, Homo sapiens
aacaacaaaucccagucuaccu

SEQ ID NO: 1160 - RNA, 22 nt, Homo sapiens
aaacaccauugucacacuccac

SEQ ID NO: 1161 - RNA, 22 nt, Homo sapiens
guggagugugacaaugguguuu

SEQ ID NO: 1162 - RNA, 23 nt, Homo sapiens
uuuagugugauaauggcguuuga

SEQ ID NO: 1163 - RNA, 23 nt, Homo sapiens
ucaaacgccauuaucacacuaaa

SEQ ID NO: 1164 - RNA, 22 nt, Homo sapiens
uauggaaagacuuugccacucu

SEQ ID NO: 1165 - RNA, 22 nt, Homo sapiens
agaguggcaaagucuuuccaua

SEQ ID NO: 1166 - RNA, 21 nt, Homo sapiens
aguggcaaagucuuuccauau

SEQ ID NO: 1167 - RNA, 21 nt, Homo sapiens
auauggaaagacuuugccacu

SEQ ID NO: 1168 - RNA, 22 nt, Homo sapiens
cagcccggaucccagcccacuu

SEQ ID NO: 1169 - RNA, 22 nt, Homo sapiens
aagugggcugggauccgggcug

SEQ ID NO: 1170 - RNA, 20 nt, Homo sapiens
guggguuggggcgggcucug

SEQ ID NO: 1171 - RNA, 20 nt, Homo sapiens
cagagcccgccccaacccac

SEQ ID NO: 1172 - RNA, 23 nt, Homo sapiens
uucgggcuggccugcugcuccgg

SEQ ID NO: 1173 - RNA, 23 nt, Homo sapiens
ccggagcagcaggccagcccgaa

SEQ ID NO: 1174 - RNA, 21 nt, Homo sapiens
ugugcagcaggccaaccgaga

SEQ ID NO: 1175 - RNA, 21 nt, Homo sapiens
ucucgguuggccugcugcaca

SEQ ID NO: 1176 - RNA, 22 nt, Homo sapiens
cagggcaggaagaaguggacaa

SEQ ID NO: 1177 - RNA, 22 nt, Homo sapiens
uuguccacuucuuccugcccug

SEQ ID NO: 1178 - RNA, 22 nt, Homo sapiens
guccacuucugccugcccugcc

SEQ ID NO: 1179 - RNA, 22 nt, Homo sapiens
ggcagggcaggcagaaguggac

SEQ ID NO: 1180 - RNA, 22 nt, Homo sapiens
uuuggacagaaaacacgcaggu

SEQ ID NO: 1181 - RNA, 22 nt, Homo sapiens
accugcguguuuucuguccaaa

SEQ ID NO: 1182 - RNA, 20 nt, Homo sapiens
ccugcguguuuucuguccaa

SEQ ID NO: 1183 - RNA, 20 nt, Homo sapiens
uuggacagaaaacacgcagg

SEQ ID NO: 1184 - RNA, 22 nt, Homo sapiens
ugccgcccucucgcugcucuag

SEQ ID NO: 1185 - RNA, 22 nt, Homo sapiens
cuagagcagcgagagggcggca

SEQ ID NO: 1186 - RNA, 23 nt, Homo sapiens
gagggcagcguggguguggcgga

SEQ ID NO: 1187 - RNA, 23 nt, Homo sapiens
uccgccacacccacgcugcccuc

SEQ ID NO: 1188 - RNA, 22 nt, Homo sapiens
aggagcuagccaggcauaugca

SEQ ID NO: 1189 - RNA, 22 nt, Homo sapiens
ugcauaugccuggcuagcuccu

SEQ ID NO: 1190 - RNA, 20 nt, Homo sapiens
auaugccuggcuagcuccuc

SEQ ID NO: 1191 - RNA, 20 nt, Homo sapiens
gaggagcuagccaggcauau

SEQ ID NO: 1192 - RNA, 19 nt, Homo sapiens
cggcgcgaccggcccgggg

SEQ ID NO: 1193 - RNA, 19 nt, Homo sapiens
ccccgggccggucgcgccg

SEQ ID NO: 1194 - RNA, 21 nt, Homo sapiens
ucuugaagucagaacccgcaa

SEQ ID NO: 1195 - RNA, 21 nt, Homo sapiens
uugcggguucugacuucaaga

SEQ ID NO: 1196 - RNA, 22 nt, Homo sapiens
aacucguguucaaagccuuuag

SEQ ID NO: 1197 - RNA, 22 nt, Homo sapiens
cuaaaggcuuugaacacgaguu

SEQ ID NO: 1198 - RNA, 23 nt, Homo sapiens
ccuggacaccgcucagccggccg

SEQ ID NO: 1199 - RNA, 23 nt, Homo sapiens
cggccggcugagcgguguccagg

SEQ ID NO: 1200 - RNA, 21 nt, Homo sapiens
acucggcugcgguggacaagu

SEQ ID NO: 1201 - RNA, 21 nt, Homo sapiens
acuuguccaccgcagccgagu

SEQ ID NO: 1202 - RNA, 20 nt, Homo sapiens
ucacucucaccuugcuuugc

SEQ ID NO: 1203 - RNA, 20 nt, Homo sapiens
gcaaagcaaggugagaguga

SEQ ID NO: 1204 - RNA, 22 nt, Homo sapiens
uugcuaaguaggcugagauuga

SEQ ID NO: 1205 - RNA, 22 nt, Homo sapiens
ucaaucucagccuacuuagcaa

SEQ ID NO: 1206 - RNA, 22 nt, Homo sapiens
cacccccuguuuccuggcccac

SEQ ID NO: 1207 - RNA, 22 nt, Homo sapiens
gugggccaggaaacagggggug

SEQ ID NO: 1208 - RNA, 23 nt, Homo sapiens
ugggccagggagcagcugguggg

SEQ ID NO: 1209 - RNA, 23 nt, Homo sapiens
cccaccagcugcucccuggccca

SEQ ID NO: 1210 - RNA, 24 nt, Homo sapiens
ugcccaugccauacuuuugccuca

SEQ ID NO: 1211 - RNA, 24 nt, Homo sapiens
ugaggcaaaaguauggcaugggca

SEQ ID NO: 1212 - RNA, 22 nt, Homo sapiens
auggcaucguccccugguggcu

SEQ ID NO: 1213 - RNA, 22 nt, Homo sapiens
agccaccaggggacgaugccau

SEQ ID NO: 1214 - RNA, 22 nt, Homo sapiens
gacacaugaccauaaaugcuaa

SEQ ID NO: 1215 - RNA, 22 nt, Homo sapiens
uuagcauuuauggucauguguc

SEQ ID NO: 1216 - RNA, 23 nt, Homo sapiens
uggagagagaaaagagacagaag

SEQ ID NO: 1217 - RNA, 23 nt, Homo sapiens
cuucugucucuuuucucucucca

SEQ ID NO: 1218 - RNA, 22 nt, Homo sapiens
agacaguaguucuugccugguu

SEQ ID NO: 1219 - RNA, 22 nt, Homo sapiens
aaccaggcaagaacuacugucu

SEQ ID NO: 1220 - RNA, 19 nt, Homo sapiens
accaggcaagaaauauugu

SEQ ID NO: 1221 - RNA, 19 nt, Homo sapiens
acaauauuucuugccuggu

SEQ ID NO: 1222 - RNA, 21 nt, Homo sapiens
auugucccucucccuucccag

SEQ ID NO: 1223 - RNA, 21 nt, Homo sapiens
cugggaagggagagggacaau

SEQ ID NO: 1224 - RNA, 22 nt, Homo sapiens
acugggaagaggagcugaggga

SEQ ID NO: 1225 - RNA, 22 nt, Homo sapiens
ucccucagcuccucuucccagu

SEQ ID NO: 1226 - RNA, 23 nt, Homo sapiens
gaagauggugcugugcugaggaa

SEQ ID NO: 1227 - RNA, 23 nt, Homo sapiens
uuccucagcacagcaccaucuuc

SEQ ID NO: 1228 - RNA, 20 nt, Homo sapiens
ugugggacugcaaaugggag

SEQ ID NO: 1229 - RNA, 20 nt, Homo sapiens
cucccauuugcagucccaca

SEQ ID NO: 1230 - RNA, 21 nt, Homo sapiens
ucugaggccugccucucccca

SEQ ID NO: 1231 - RNA, 21 nt, Homo sapiens
uggggagaggcaggccucaga

SEQ ID NO: 1232 - RNA, 24 nt, Homo sapiens
ugggcgaggggugggcucucagag

SEQ ID NO: 1233 - RNA, 24 nt, Homo sapiens
cucugagagcccaccccucgccca

SEQ ID NO: 1234 - RNA, 21 nt, Homo sapiens
agguagaaugaggccugacau

SEQ ID NO: 1235 - RNA, 21 nt, Homo sapiens
augucaggccucauucuaccu

SEQ ID NO: 1236 - RNA, 19 nt, Homo sapiens
ucaggccucuuucuaccuu

SEQ ID NO: 1237 - RNA, 19 nt, Homo sapiens
aagguagaaagaggccuga

SEQ ID NO: 1238 - RNA, 20 nt, Homo sapiens
cggggugggugaggucgggc

SEQ ID NO: 1239 - RNA, 20 nt, Homo sapiens
gcccgaccucacccaccccg

SEQ ID NO: 1240 - RNA, 22 nt, Homo sapiens
guucuguuaacccauccccuca

SEQ ID NO: 1241 - RNA, 22 nt, Homo sapiens
ugaggggauggguuaacagaac

SEQ ID NO: 1242 - RNA, 22 nt, Homo sapiens
aggggacugguuaauagaacua

SEQ ID NO: 1243 - RNA, 22 nt, Homo sapiens
uaguucuauuaaccaguccccu

SEQ ID NO: 1244 - RNA, 23 nt, Homo sapiens
uggaguuaaggguugcuuggaga

SEQ ID NO: 1245 - RNA, 23 nt, Homo sapiens
ucuccaagcaacccuuaacucca

SEQ ID NO: 1246 - RNA, 22 nt, Homo sapiens
ucucugagcaaggcuuaacacc

SEQ ID NO: 1247 - RNA, 22 nt, Homo sapiens
gguguuaagccuugcucagaga

SEQ ID NO: 1248 - RNA, 22 nt, Homo sapiens
ugugggaucuggaggcaucugg

SEQ ID NO: 1249 - RNA, 22 nt, Homo sapiens
ccagaugccuccagaucccaca

SEQ ID NO: 1250 - RNA, 21 nt, Homo sapiens
acccucgucagguccccgggg

SEQ ID NO: 1251 - RNA, 21 nt, Homo sapiens
ccccggggaccugacgagggu

SEQ ID NO: 1252 - RNA, 22 nt, Homo sapiens
caccggggauggcagagggucg

SEQ ID NO: 1253 - RNA, 22 nt, Homo sapiens
cgacccucugccauccccggug

SEQ ID NO: 1254 - RNA, 23 nt, Homo sapiens
ugggcugagggcaggaggccugu

SEQ ID NO: 1255 - RNA, 23 nt, Homo sapiens
acaggccuccugcccucagccca

SEQ ID NO: 1256 - RNA, 23 nt, Homo sapiens
aauguggaaguggucugaggcau

SEQ ID NO: 1257 - RNA, 23 nt, Homo sapiens
augccucagaccacuuccacauu

SEQ ID NO: 1258 - RNA, 23 nt, Homo sapiens
gugaguguggauccuggaggaau

SEQ ID NO: 1259 - RNA, 23 nt, Homo sapiens
auuccuccaggauccacacucac

SEQ ID NO: 1260 - RNA, 22 nt, Homo sapiens
uuucuucuuagacauggcaacg

SEQ ID NO: 1261 - RNA, 22 nt, Homo sapiens
cguugccaugucuaagaagaaa

SEQ ID NO: 1262 - RNA, 22 nt, Homo sapiens
cugccaugucuaagaagaaaac

SEQ ID NO: 1263 - RNA, 22 nt, Homo sapiens
guuuucuucuuagacauggcag

SEQ ID NO: 1264 - RNA, 22 nt, Homo sapiens
uuucuucuuagacauggcagcu

SEQ ID NO: 1265 - RNA, 22 nt, Homo sapiens
agcugccaugucuaagaagaaa

SEQ ID NO: 1266 - RNA, 19 nt, Homo sapiens
uugccaugucuaagaagaa

SEQ ID NO: 1267 - RNA, 19 nt, Homo sapiens
uucuucuuagacauggcaa

SEQ ID NO: 1268 - RNA, 23 nt, Homo sapiens
ugcagcucugguggaaaauggag

SEQ ID NO: 1269 - RNA, 23 nt, Homo sapiens
cuccauuuuccaccagagcugca

SEQ ID NO: 1270 - RNA, 22 nt, Homo sapiens
caggauccacagagcuagucca

SEQ ID NO: 1271 - RNA, 22 nt, Homo sapiens
uggacuagcucuguggauccug

SEQ ID NO: 1272 - RNA, 22 nt, Homo sapiens
aacuagcucuguggauccugac

SEQ ID NO: 1273 - RNA, 22 nt, Homo sapiens
gucaggauccacagagcuaguu

SEQ ID NO: 1274 - RNA, 22 nt, Homo sapiens
aaagauggacaauuggcuaaau

SEQ ID NO: 1275 - RNA, 22 nt, Homo sapiens
auuuagccaauuguccaucuuu

SEQ ID NO: 1276 - RNA, 24 nt, Homo sapiens
agcugagcuccauggacgugcagu

SEQ ID NO: 1277 - RNA, 24 nt, Homo sapiens
acugcacguccauggagcucagcu

SEQ ID NO: 1278 - RNA, 22 nt, Homo sapiens
cuuccggucugugagccccguc

SEQ ID NO: 1279 - RNA, 22 nt, Homo sapiens
gacggggcucacagaccggaag

SEQ ID NO: 1280 - RNA, 22 nt, Homo sapiens
uggggugcccacuccgcaaguu

SEQ ID NO: 1281 - RNA, 22 nt, Homo sapiens
aacuugcggagugggcacccca

SEQ ID NO: 1282 - RNA, 26 nt, Homo sapiens
cucggccgcggcgcguagcccccgcc

SEQ ID NO: 1283 - RNA, 26 nt, Homo sapiens
ggcgggggcuacgcgccgcggccgag

SEQ ID NO: 1284 - RNA, 23 nt, Homo sapiens
cugggggacgcgugagcgcgagc

SEQ ID NO: 1285 - RNA, 23 nt, Homo sapiens
gcucgcgcucacgcgucccccag

SEQ ID NO: 1286 - RNA, 21 nt, Homo sapiens
cauacaaucugacauguauuu

SEQ ID NO: 1287 - RNA, 21 nt, Homo sapiens
aaauacaugucagauuguaug

SEQ ID NO: 1288 - RNA, 21 nt, Homo sapiens
auacaugucagauuguaugcc

SEQ ID NO: 1289 - RNA, 21 nt, Homo sapiens
ggcauacaaucugacauguau

SEQ ID NO: 1290 - RNA, 21 nt, Homo sapiens
ucccuccuucuguccccacag

SEQ ID NO: 1291 - RNA, 21 nt, Homo sapiens
cuguggggacagaaggaggga

SEQ ID NO: 1292 - RNA, 22 nt, Homo sapiens
acuggggagcagaaggagaacc

SEQ ID NO: 1293 - RNA, 22 nt, Homo sapiens
gguucuccuucugcuccccagu

SEQ ID NO: 1294 - RNA, 23 nt, Homo sapiens
gaaaauccuuuuuguuuuuccag

SEQ ID NO: 1295 - RNA, 23 nt, Homo sapiens
cuggaaaaacaaaaaggauuuuc

SEQ ID NO: 1296 - RNA, 23 nt, Homo sapiens
agggaaaaaaaaaaggauuuguc

SEQ ID NO: 1297 - RNA, 23 nt, Homo sapiens
gacaaauccuuuuuuuuuucccu

SEQ ID NO: 1298 - RNA, 22 nt, Homo sapiens
uguguccgggaaguggaggagg

SEQ ID NO: 1299 - RNA, 22 nt, Homo sapiens
ccuccuccacuucccggacaca

SEQ ID NO: 1300 - RNA, 22 nt, Homo sapiens
ugaaguuacaucauggucgcuu

SEQ ID NO: 1301 - RNA, 22 nt, Homo sapiens
aagcgaccaugauguaacuuca

SEQ ID NO: 1302 - RNA, 22 nt, Homo sapiens
aagcgaccaugauguaacuuca

SEQ ID NO: 1303 - RNA, 22 nt, Homo sapiens
ugaaguuacaucauggucgcuu

SEQ ID NO: 1304 - RNA, 21 nt, Homo sapiens
uuagugcauagucuuuggucu

SEQ ID NO: 1305 - RNA, 21 nt, Homo sapiens
agaccaaagacuaugcacuaa

SEQ ID NO: 1306 - RNA, 22 nt, Homo sapiens
accgaagacugugcgcuaaucu

SEQ ID NO: 1307 - RNA, 22 nt, Homo sapiens
agauuagcgcacagucuucggu

SEQ ID NO: 1308 - RNA, 21 nt, Homo sapiens
uuacacagcuggacagaggca

SEQ ID NO: 1309 - RNA, 21 nt, Homo sapiens
ugccucuguccagcuguguaa

SEQ ID NO: 1310 - RNA, 22 nt, Homo sapiens
uccaggcaggagccggacugga

SEQ ID NO: 1311 - RNA, 22 nt, Homo sapiens
uccaguccggcuccugccugga

SEQ ID NO: 1312 - RNA, 21 nt, Homo sapiens
cugggcucgggacgcgcggcu

SEQ ID NO: 1313 - RNA, 21 nt, Homo sapiens
agccgcgcgucccgagcccag

SEQ ID NO: 1314 - RNA, 22 nt, Homo sapiens
ggggcugugauugaccagcagg

SEQ ID NO: 1315 - RNA, 22 nt, Homo sapiens
ccugcuggucaaucacagcccc

SEQ ID NO: 1316 - RNA, 22 nt, Homo sapiens
cacuguuucaccacuggcucuu

SEQ ID NO: 1317 - RNA, 22 nt, Homo sapiens
aagagccaguggugaaacagug

SEQ ID NO: 1318 - RNA, 21 nt, Homo sapiens
gagccaguggugagacaguga

SEQ ID NO: 1319 - RNA, 21 nt, Homo sapiens
ucacugucucaccacuggcuc

SEQ ID NO: 1320 - RNA, 22 nt, Homo sapiens
aagguauuguucagacuuauga

SEQ ID NO: 1321 - RNA, 22 nt, Homo sapiens
ucauaagucugaacaauaccuu

SEQ ID NO: 1322 - RNA, 22 nt, Homo sapiens
ucugugauagagauucuuugcu

SEQ ID NO: 1323 - RNA, 22 nt, Homo sapiens
agcaaagaaucucuaucacaga

SEQ ID NO: 1324 - RNA, 21 nt, Homo sapiens
ucugaauuguaagaguuguua

SEQ ID NO: 1325 - RNA, 21 nt, Homo sapiens
uaacaacucuuacaauucaga

SEQ ID NO: 1326 - RNA, 23 nt, Homo sapiens
agaacucuugcagucuuagaugu

SEQ ID NO: 1327 - RNA, 23 nt, Homo sapiens
acaucuaagacugcaagaguucu

SEQ ID NO: 1328 - RNA, 22 nt, Homo sapiens
aacgggaaugcaggcuguaucu

SEQ ID NO: 1329 - RNA, 22 nt, Homo sapiens
agauacagccugcauucccguu

SEQ ID NO: 1330 - RNA, 23 nt, Homo sapiens
ucugaguuccuggagccuggucu

SEQ ID NO: 1331 - RNA, 23 nt, Homo sapiens
agaccaggcuccaggaacucaga

SEQ ID NO: 1332 - RNA, 23 nt, Homo sapiens
uggagauccagugcucgcccgau

SEQ ID NO: 1333 - RNA, 23 nt, Homo sapiens
aucgggcgagcacuggaucucca

SEQ ID NO: 1334 - RNA, 22 nt, Homo sapiens
uguugcaagucgguggagacgu

SEQ ID NO: 1335 - RNA, 22 nt, Homo sapiens
acgucuccaccgacuugcaaca

SEQ ID NO: 1336 - RNA, 22 nt, Homo sapiens
cucucuacugacuugcaacaua

SEQ ID NO: 1337 - RNA, 22 nt, Homo sapiens
uauguugcaagucaguagagag

SEQ ID NO: 1338 - RNA, 22 nt, Homo sapiens
ucucccuuccugcccuggcuag

SEQ ID NO: 1339 - RNA, 22 nt, Homo sapiens
cuagccagggcaggaagggaga

SEQ ID NO: 1340 - RNA, 26 nt, Homo sapiens
cccagggcuuggaguggggcaagguu

SEQ ID NO: 1341 - RNA, 26 nt, Homo sapiens
aaccuugccccacuccaagcccuggg

SEQ ID NO: 1342 - RNA, 23 nt, Homo sapiens
uaucugcugggcuuucugguguu

SEQ ID NO: 1343 - RNA, 23 nt, Homo sapiens
aacaccagaaagcccagcagaua

SEQ ID NO: 1344 - RNA, 21 nt, Homo sapiens
uggcuguuggagggggcaggc

SEQ ID NO: 1345 - RNA, 21 nt, Homo sapiens
gccugcccccuccaacagcca

SEQ ID NO: 1346 - RNA, 22 nt, Homo sapiens
cagcccuccucccgcacccaaa

SEQ ID NO: 1347 - RNA, 22 nt, Homo sapiens
uuugggugcgggaggagggcug

SEQ ID NO: 1348 - RNA, 22 nt, Homo sapiens
uaggggcagcagaggaccuggg

SEQ ID NO: 1349 - RNA, 22 nt, Homo sapiens
cccagguccucugcugccccua

SEQ ID NO: 1350 - RNA, 22 nt, Homo sapiens
uugaggagacauggugggggcc

SEQ ID NO: 1351 - RNA, 22 nt, Homo sapiens
ggcccccaccaugucuccucaa

SEQ ID NO: 1352 - RNA, 21 nt, Homo sapiens
gcagcccagcugaggccucug

SEQ ID NO: 1353 - RNA, 21 nt, Homo sapiens
cagaggccucagcugggcugc

SEQ ID NO: 1354 - RNA, 22 nt, Homo sapiens
gagcaggcgaggcugggcugaa

SEQ ID NO: 1355 - RNA, 22 nt, Homo sapiens
uucagcccagccucgccugcuc

SEQ ID NO: 1356 - RNA, 23 nt, Homo sapiens
ccagccacggacugagagugcau

SEQ ID NO: 1357 - RNA, 23 nt, Homo sapiens
augcacucucaguccguggcugg

SEQ ID NO: 1358 - RNA, 23 nt, Homo sapiens
guccuccaggccaugagcugcgg

SEQ ID NO: 1359 - RNA, 23 nt, Homo sapiens
ccgcagcucauggccuggaggac

SEQ ID NO: 1360 - RNA, 22 nt, Homo sapiens
ucaggcaguguggguaucagau

SEQ ID NO: 1361 - RNA, 22 nt, Homo sapiens
aucugauacccacacugccuga

SEQ ID NO: 1362 - RNA, 23 nt, Homo sapiens
ugagaguggaauucacaguauuu

SEQ ID NO: 1363 - RNA, 23 nt, Homo sapiens
aaauacugugaauuccacucuca

SEQ ID NO: 1364 - RNA, 23 nt, Homo sapiens
auacugugaauuucacugucaca

SEQ ID NO: 1365 - RNA, 23 nt, Homo sapiens
ugugacagugaaauucacaguau

SEQ ID NO: 1366 - RNA, 21 nt, Homo sapiens
caaauggacaggauaacaccu

SEQ ID NO: 1367 - RNA, 21 nt, Homo sapiens
agguguuauccuguccauuug

SEQ ID NO: 1368 - RNA, 22 nt, Homo sapiens
agguguuauccuauccauuugc

SEQ ID NO: 1369 - RNA, 22 nt, Homo sapiens
gcaaauggauaggauaacaccu

SEQ ID NO: 1370 - RNA, 22 nt, Homo sapiens
ugaucucaccgcugccuccuuc

SEQ ID NO: 1371 - RNA, 22 nt, Homo sapiens
gaaggaggcagcggugagauca

SEQ ID NO: 1372 - RNA, 22 nt, Homo sapiens
caggaggcagugggcgagcagg

SEQ ID NO: 1373 - RNA, 22 nt, Homo sapiens
ccugcucgcccacugccuccug

SEQ ID NO: 1374 - RNA, 22 nt, Homo sapiens
ugcaagacggauacugucaucu

SEQ ID NO: 1375 - RNA, 22 nt, Homo sapiens
agaugacaguauccgucuugca

SEQ ID NO: 1376 - RNA, 24 nt, Homo sapiens
ugucagugacuccugccccuuggu

SEQ ID NO: 1377 - RNA, 24 nt, Homo sapiens
accaaggggcaggagucacugaca

SEQ ID NO: 1378 - RNA, 22 nt, Homo sapiens
agggggcgcagucacugacgug

SEQ ID NO: 1379 - RNA, 22 nt, Homo sapiens
cacgucagugacugcgcccccu

SEQ ID NO: 1380 - RNA, 23 nt, Homo sapiens
ucaaaauguagaggaagacccca

SEQ ID NO: 1381 - RNA, 23 nt, Homo sapiens
uggggucuuccucuacauuuuga

SEQ ID NO: 1382 - RNA, 22 nt, Homo sapiens
aauuuacucugcaaucuucucc

SEQ ID NO: 1383 - RNA, 22 nt, Homo sapiens
ggagaagauugcagaguaaauu

SEQ ID NO: 1384 - RNA, 22 nt, Homo sapiens
agaagauugcagaguaaguucc

SEQ ID NO: 1385 - RNA, 22 nt, Homo sapiens
ggaacuuacucugcaaucuucu

SEQ ID NO: 1386 - RNA, 26 nt, Homo sapiens
cacaggacugacuccucaccccagug

SEQ ID NO: 1387 - RNA, 26 nt, Homo sapiens
cacuggggugaggagucaguccugug

SEQ ID NO: 1388 - RNA, 22 nt, Homo sapiens
ucuggggaugaggacagugugu

SEQ ID NO: 1389 - RNA, 22 nt, Homo sapiens
acacacuguccucauccccaga

SEQ ID NO: 1390 - RNA, 20 nt, Homo sapiens
augggugauggguguggugu

SEQ ID NO: 1391 - RNA, 20 nt, Homo sapiens
acaccacacccaucacccau

SEQ ID NO: 1392 - RNA, 22 nt, Homo sapiens
uuggccaccacaccuaccccuu

SEQ ID NO: 1393 - RNA, 22 nt, Homo sapiens
aagggguaggugugguggccaa

SEQ ID NO: 1394 - RNA, 22 nt, Homo sapiens
uguaguuguauuguauugccac

SEQ ID NO: 1395 - RNA, 22 nt, Homo sapiens
guggcaauacaauacaacuaca

SEQ ID NO: 1396 - RNA, 23 nt, Homo sapiens
uagcaauacaguacaaauauagu

SEQ ID NO: 1397 - RNA, 23 nt, Homo sapiens
acuauauuuguacuguauugcua

SEQ ID NO: 1398 - RNA, 22 nt, Homo sapiens
ucagucacauaucuagugucua

SEQ ID NO: 1399 - RNA, 22 nt, Homo sapiens
uagacacuagauaugugacuga

SEQ ID NO: 1400 - RNA, 22 nt, Homo sapiens
gacacuaggcaugugagugauu

SEQ ID NO: 1401 - RNA, 22 nt, Homo sapiens
aaucacucacaugccuaguguc

SEQ ID NO: 1402 - RNA, 22 nt, Homo sapiens
ucaaucacuugguaauugcugu

SEQ ID NO: 1403 - RNA, 22 nt, Homo sapiens
acagcaauuaccaagugauuga

SEQ ID NO: 1404 - RNA, 25 nt, Homo sapiens
agcggggaggaagugggcgcugcuu

SEQ ID NO: 1405 - RNA, 25 nt, Homo sapiens
aagcagcgcccacuuccuccccgcu

SEQ ID NO: 1406 - RNA, 22 nt, Homo sapiens
agcccgccccagccgagguucu

SEQ ID NO: 1407 - RNA, 22 nt, Homo sapiens
agaaccucggcuggggcgggcu

SEQ ID NO: 1408 - RNA, 23 nt, Homo sapiens
gccccggcgcgggcggguucugg

SEQ ID NO: 1409 - RNA, 23 nt, Homo sapiens
ccagaacccgcccgcgccggggc

SEQ ID NO: 1410 - RNA, 22 nt, Homo sapiens
agcaaggcggcaucucucugau

SEQ ID NO: 1411 - RNA, 22 nt, Homo sapiens
aucagagagaugccgccuugcu

SEQ ID NO: 1412 - RNA, 21 nt, Homo sapiens
agagaugccgccuugcuccuu

SEQ ID NO: 1413 - RNA, 21 nt, Homo sapiens
aaggagcaaggcggcaucucu

SEQ ID NO: 1414 - RNA, 23 nt, Homo sapiens
uugaagaggaggugcucuguagc

SEQ ID NO: 1415 - RNA, 23 nt, Homo sapiens
gcuacagagcaccuccucuucaa

SEQ ID NO: 1416 - RNA, 22 nt, Homo sapiens
acaacagugacuugcucuccaa

SEQ ID NO: 1417 - RNA, 22 nt, Homo sapiens
uuggagagcaagucacuguugu

SEQ ID NO: 1418 - RNA, 18 nt, Homo sapiens
gggugagggcaggugguu

SEQ ID NO: 1419 - RNA, 18 nt, Homo sapiens
aaccaccugcccucaccc

SEQ ID NO: 1420 - RNA, 18 nt, Homo sapiens
cgugucuucuggcuugau

SEQ ID NO: 1421 - RNA, 18 nt, Homo sapiens
aucaagccagaagacacg

SEQ ID NO: 1422 - RNA, 23 nt, Homo sapiens
ugcaucaggccagaagacaugag

SEQ ID NO: 1423 - RNA, 23 nt, Homo sapiens
cucaugucuucuggccugaugca

SEQ ID NO: 1424 - RNA, 21 nt, Homo sapiens
aaugagagaccuguacuguau

SEQ ID NO: 1425 - RNA, 21 nt, Homo sapiens
auacaguacaggucucucauu

SEQ ID NO: 1426 - RNA, 22 nt, Homo sapiens
uccaguacaggucucucauuuc

SEQ ID NO: 1427 - RNA, 22 nt, Homo sapiens
gaaaugagagaccuguacugga

SEQ ID NO: 1428 - RNA, 22 nt, Homo sapiens
ugggauccagacagugggagaa

SEQ ID NO: 1429 - RNA, 22 nt, Homo sapiens
uucucccacugucuggauccca

SEQ ID NO: 1430 - RNA, 22 nt, Homo sapiens
uucucccacuaccaggcuccca

SEQ ID NO: 1431 - RNA, 22 nt, Homo sapiens
ugggagccugguagugggagaa

SEQ ID NO: 1432 - RNA, 22 nt, Homo sapiens
ccaaccuagguggucagaguug

SEQ ID NO: 1433 - RNA, 22 nt, Homo sapiens
caacucugaccaccuagguugg

SEQ ID NO: 1434 - RNA, 22 nt, Homo sapiens
aacucugaccccuuagguugau

SEQ ID NO: 1435 - RNA, 22 nt, Homo sapiens
aucaaccuaaggggucagaguu

SEQ ID NO: 1436 - RNA, 23 nt, Homo sapiens
gugccaccuuaacugcagccaau

SEQ ID NO: 1437 - RNA, 23 nt, Homo sapiens
auuggcugcaguuaagguggcac

SEQ ID NO: 1438 - RNA, 22 nt, Homo sapiens
aaguuggcugcaguuaaggugg

SEQ ID NO: 1439 - RNA, 22 nt, Homo sapiens
ccaccuuaacugcagccaacuu

SEQ ID NO: 1440 - RNA, 22 nt, Homo sapiens
aagggggaaggaaacauggaga

SEQ ID NO: 1441 - RNA, 22 nt, Homo sapiens
ucuccauguuuccuucccccuu

SEQ ID NO: 1442 - RNA, 22 nt, Homo sapiens
uccauguuuccuucccccuucu

SEQ ID NO: 1443 - RNA, 22 nt, Homo sapiens
agaagggggaaggaaacaugga

SEQ ID NO: 1444 - RNA, 21 nt, Homo sapiens
acacauggguggcuguggccu

SEQ ID NO: 1445 - RNA, 21 nt, Homo sapiens
aggccacagccacccaugugu

SEQ ID NO: 1446 - RNA, 22 nt, Homo sapiens
uaggccacagccacccaugugu

SEQ ID NO: 1447 - RNA, 22 nt, Homo sapiens
acacauggguggcuguggccua

SEQ ID NO: 1448 - RNA, 21 nt, Homo sapiens
agcuguaccugaaaccaagca

SEQ ID NO: 1449 - RNA, 21 nt, Homo sapiens
ugcuugguuucagguacagcu

SEQ ID NO: 1450 - RNA, 22 nt, Homo sapiens
ucacaaaucuauaauaugcagg

SEQ ID NO: 1451 - RNA, 22 nt, Homo sapiens
ccugcauauuauagauuuguga

SEQ ID NO: 1452 - RNA, 21 nt, Homo sapiens
ugcuuaaguuguaccaaguau

SEQ ID NO: 1453 - RNA, 21 nt, Homo sapiens
auacuugguacaacuuaagca

SEQ ID NO: 1454 - RNA, 22 nt, Homo sapiens
ccuggcauauuugguauaacuu

SEQ ID NO: 1455 - RNA, 22 nt, Homo sapiens
aaguuauaccaaauaugccagg

SEQ ID NO: 1456 - RNA, 22 nt, Homo sapiens
ugagggcuccaggugacggugg

SEQ ID NO: 1457 - RNA, 22 nt, Homo sapiens
ccaccgucaccuggagcccuca

SEQ ID NO: 1458 - RNA, 22 nt, Homo sapiens
accugccagcaccucccugcag

SEQ ID NO: 1459 - RNA, 22 nt, Homo sapiens
cugcagggaggugcuggcaggu

SEQ ID NO: 1460 - RNA, 23 nt, Homo sapiens
ggcaggagggcugugccagguug

SEQ ID NO: 1461 - RNA, 23 nt, Homo sapiens
caaccuggcacagcccuccugcc

SEQ ID NO: 1462 - RNA, 22 nt, Homo sapiens
cccucucuggcuccuccccaaa

SEQ ID NO: 1463 - RNA, 22 nt, Homo sapiens
uuuggggaggagccagagaggg

SEQ ID NO: 1464 - RNA, 24 nt, Homo sapiens
ugggggagccaugagauaagagca

SEQ ID NO: 1465 - RNA, 24 nt, Homo sapiens
ugcucuuaucucauggcuccccca

SEQ ID NO: 1466 - RNA, 21 nt, Homo sapiens
guaccuucugguucagcuagu

SEQ ID NO: 1467 - RNA, 21 nt, Homo sapiens
acuagcugaaccagaagguac

SEQ ID NO: 1468 - RNA, 23 nt, Homo sapiens
aacugaaccaggagugagcuucg

SEQ ID NO: 1469 - RNA, 23 nt, Homo sapiens
cgaagcucacuccugguucaguu

SEQ ID NO: 1470 - RNA, 22 nt, Homo sapiens
uggggaaggcgucagugucggg

SEQ ID NO: 1471 - RNA, 22 nt, Homo sapiens
cccgacacugacgccuucccca

SEQ ID NO: 1472 - RNA, 21 nt, Homo sapiens
agacccugcagccuucccacc

SEQ ID NO: 1473 - RNA, 21 nt, Homo sapiens
ggugggaaggcugcagggucu

SEQ ID NO: 1474 - RNA, 22 nt, Homo sapiens
acccagguucccucuggccgca

SEQ ID NO: 1475 - RNA, 22 nt, Homo sapiens
ugcggccagagggaaccugggu

SEQ ID NO: 1476 - RNA, 23 nt, Homo sapiens
agggccagaggagccuggagugg

SEQ ID NO: 1477 - RNA, 23 nt, Homo sapiens
ccacuccaggcuccucuggcccu

SEQ ID NO: 1478 - RNA, 22 nt, Homo sapiens
auagugggaagcuggcagauuc

SEQ ID NO: 1479 - RNA, 22 nt, Homo sapiens
gaaucugccagcuucccacuau

SEQ ID NO: 1480 - RNA, 21 nt, Homo sapiens
aucugccagcuuccacagugg

SEQ ID NO: 1481 - RNA, 21 nt, Homo sapiens
ccacuguggaagcuggcagau

SEQ ID NO: 1482 - RNA, 25 nt, Homo sapiens
caugcugaccucccuccugccccag

SEQ ID NO: 1483 - RNA, 25 nt, Homo sapiens
cuggggcaggagggaggucagcaug

SEQ ID NO: 1484 - RNA, 23 nt, Homo sapiens
ugggaggggagaggcagcaagca

SEQ ID NO: 1485 - RNA, 23 nt, Homo sapiens
ugcuugcugccucuccccuccca

SEQ ID NO: 1486 - RNA, 22 nt, Homo sapiens
ucauuuaucuguugggaagcua

SEQ ID NO: 1487 - RNA, 22 nt, Homo sapiens
uagcuucccaacagauaaauga

SEQ ID NO: 1488 - RNA, 23 nt, Homo sapiens
cuggcggagcccauuccaugcca

SEQ ID NO: 1489 - RNA, 23 nt, Homo sapiens
uggcauggaaugggcuccgccag

SEQ ID NO: 1490 - RNA, 22 nt, Homo sapiens
cacacaaguggcccccaacacu

SEQ ID NO: 1491 - RNA, 22 nt, Homo sapiens
aguguugggggccacuugugug

SEQ ID NO: 1492 - RNA, 22 nt, Homo sapiens
ugcugggggccacaugagugug

SEQ ID NO: 1493 - RNA, 22 nt, Homo sapiens
cacacucauguggcccccagca

SEQ ID NO: 1494 - RNA, 21 nt, Homo sapiens
gcccugaccuguccuguucug

SEQ ID NO: 1495 - RNA, 21 nt, Homo sapiens
cagaacaggacaggucagggc

SEQ ID NO: 1496 - RNA, 23 nt, Homo sapiens
uguagagcagggagcaggaagcu

SEQ ID NO: 1497 - RNA, 23 nt, Homo sapiens
agcuuccugcucccugcucuaca

SEQ ID NO: 1498 - RNA, 22 nt, Homo sapiens
ccaccaggucuagcauugggau

SEQ ID NO: 1499 - RNA, 22 nt, Homo sapiens
aucccaaugcuagaccuggugg

SEQ ID NO: 1500 - RNA, 22 nt, Homo sapiens
aaucccaaugcuagacccggug

SEQ ID NO: 1501 - RNA, 22 nt, Homo sapiens
caccgggucuagcauugggauu

SEQ ID NO: 1502 - RNA, 22 nt, Homo sapiens
gcugcgggcugcggucagggcg

SEQ ID NO: 1503 - RNA, 22 nt, Homo sapiens
cgcccugaccgcagcccgcagc

SEQ ID NO: 1504 - RNA, 21 nt, Homo sapiens
aaaggugcucaaauuagacau

SEQ ID NO: 1505 - RNA, 21 nt, Homo sapiens
augucuaauuugagcaccuuu

SEQ ID NO: 1506 - RNA, 22 nt, Homo sapiens
ccuaauuugaacaccuucggua

SEQ ID NO: 1507 - RNA, 22 nt, Homo sapiens
uaccgaagguguucaaauuagg

SEQ ID NO: 1508 - RNA, 19 nt, Homo sapiens
aggcagguuaucugggcug

SEQ ID NO: 1509 - RNA, 19 nt, Homo sapiens
cagcccagauaaccugccu

SEQ ID NO: 1510 - RNA, 20 nt, Homo sapiens
augcgaggaugcugacagug

SEQ ID NO: 1511 - RNA, 20 nt, Homo sapiens
cacugucagcauccucgcau

SEQ ID NO: 1512 - RNA, 22 nt, Homo sapiens
ugaaacuggagcgccuggagga

SEQ ID NO: 1513 - RNA, 22 nt, Homo sapiens
uccuccaggcgcuccaguuuca

SEQ ID NO: 1514 - RNA, 22 nt, Homo sapiens
accagcgcguuuucaguuucau

SEQ ID NO: 1515 - RNA, 22 nt, Homo sapiens
augaaacugaaaacgcgcuggu

SEQ ID NO: 1516 - RNA, 25 nt, Homo sapiens
aagggaggaggagcggaggggcccu

SEQ ID NO: 1517 - RNA, 25 nt, Homo sapiens
agggccccuccgcuccuccucccuu

SEQ ID NO: 1518 - RNA, 22 nt, Homo sapiens
gcccgagaggauccgucccugc

SEQ ID NO: 1519 - RNA, 22 nt, Homo sapiens
gcagggacggauccucucgggc

SEQ ID NO: 1520 - RNA, 22 nt, Homo sapiens
aggacugauccucucgggcagg

SEQ ID NO: 1521 - RNA, 22 nt, Homo sapiens
ccugcccgagaggaucaguccu

SEQ ID NO: 1522 - RNA, 23 nt, Homo sapiens
ucaggcaaagggauauuuacaga

SEQ ID NO: 1523 - RNA, 23 nt, Homo sapiens
ucuguaaauaucccuuugccuga

SEQ ID NO: 1524 - RNA, 21 nt, Homo sapiens
uuucugucuuuucugguccag

SEQ ID NO: 1525 - RNA, 21 nt, Homo sapiens
cuggaccagaaaagacagaaa

SEQ ID NO: 1526 - RNA, 23 nt, Homo sapiens
uggccggaugggacaggaggcau

SEQ ID NO: 1527 - RNA, 23 nt, Homo sapiens
augccuccugucccauccggcca

SEQ ID NO: 1528 - RNA, 23 nt, Homo sapiens
ucuaaagacuagacuucgcuaug

SEQ ID NO: 1529 - RNA, 23 nt, Homo sapiens
cauagcgaagucuagucuuuaga

SEQ ID NO: 1530 - RNA, 23 nt, Homo sapiens
uggcccggcgacgucucacgguc

SEQ ID NO: 1531 - RNA, 23 nt, Homo sapiens
gaccgugagacgucgccgggcca

SEQ ID NO: 1532 - RNA, 23 nt, Homo sapiens
ugaguggggcucccgggacggcg

SEQ ID NO: 1533 - RNA, 23 nt, Homo sapiens
cgccgucccgggagccccacuca

SEQ ID NO: 1534 - RNA, 21 nt, Homo sapiens
agcggugcuccugcgggccga

SEQ ID NO: 1535 - RNA, 21 nt, Homo sapiens
ucggcccgcaggagcaccgcu

SEQ ID NO: 1536 - RNA, 23 nt, Homo sapiens
ccggucccaggagaaccugcaga

SEQ ID NO: 1537 - RNA, 23 nt, Homo sapiens
ucugcagguucuccugggaccgg

SEQ ID NO: 1538 - RNA, 22 nt, Homo sapiens
aaggcccgggcuuuccucccag

SEQ ID NO: 1539 - RNA, 22 nt, Homo sapiens
cugggaggaaagcccgggccuu

SEQ ID NO: 1540 - RNA, 22 nt, Homo sapiens
agggaaggaggcuuggucuuag

SEQ ID NO: 1541 - RNA, 22 nt, Homo sapiens
cuaagaccaagccuccuucccu

SEQ ID NO: 1542 - RNA, 21 nt, Homo sapiens
gagguuuggggaggauuugcu

SEQ ID NO: 1543 - RNA, 21 nt, Homo sapiens
agcaaauccuccccaaaccuc

SEQ ID NO: 1544 - RNA, 20 nt, Homo sapiens
cgccccuccugcccccacag

SEQ ID NO: 1545 - RNA, 20 nt, Homo sapiens
cugugggggcaggaggggcg

SEQ ID NO: 1546 - RNA, 22 nt, Homo sapiens
ugcggggacaggccagggcauc

SEQ ID NO: 1547 - RNA, 22 nt, Homo sapiens
gaugcccuggccuguccccgca

SEQ ID NO: 1548 - RNA, 22 nt, Homo sapiens
ccugacccacccccucccgcag

SEQ ID NO: 1549 - RNA, 22 nt, Homo sapiens
cugcgggagggggugggucagg

SEQ ID NO: 1550 - RNA, 22 nt, Homo sapiens
cucgggcggaggugguugagug

SEQ ID NO: 1551 - RNA, 22 nt, Homo sapiens
cacucaaccaccuccgcccgag

SEQ ID NO: 1552 - RNA, 24 nt, Homo sapiens
agaggacccguagcugcuagaagg

SEQ ID NO: 1553 - RNA, 24 nt, Homo sapiens
ccuucuagcagcuacggguccucu

SEQ ID NO: 1554 - RNA, 22 nt, Homo sapiens
uuguggaucucaaggaugugcu

SEQ ID NO: 1555 - RNA, 22 nt, Homo sapiens
agcacauccuugagauccacaa

SEQ ID NO: 1556 - RNA, 22 nt, Homo sapiens
uucucuuucuuuagccuugugu

SEQ ID NO: 1557 - RNA, 22 nt, Homo sapiens
acacaaggcuaaagaaagagaa

SEQ ID NO: 1558 - RNA, 22 nt, Homo sapiens
caaggccaaaggaagagaacag

SEQ ID NO: 1559 - RNA, 22 nt, Homo sapiens
cuguucucuuccuuuggccuug

SEQ ID NO: 1560 - RNA, 23 nt, Homo sapiens
augcggaccuggguuagcggagu

SEQ ID NO: 1561 - RNA, 23 nt, Homo sapiens
acuccgcuaacccagguccgcau

SEQ ID NO: 1562 - RNA, 22 nt, Homo sapiens
agccaggcucugaagggaaagu

SEQ ID NO: 1563 - RNA, 22 nt, Homo sapiens
acuuucccuucagagccuggcu

SEQ ID NO: 1564 - RNA, 22 nt, Homo sapiens
uuucccuucagagccuggcuuu

SEQ ID NO: 1565 - RNA, 22 nt, Homo sapiens
aaagccaggcucugaagggaaa

SEQ ID NO: 1566 - RNA, 22 nt, Homo sapiens
ccagagaugguugccuuccuau

SEQ ID NO: 1567 - RNA, 22 nt, Homo sapiens
auaggaaggcaaccaucucugg

SEQ ID NO: 1568 - RNA, 23 nt, Homo sapiens
cagggaggcgcucacucucugcu

SEQ ID NO: 1569 - RNA, 23 nt, Homo sapiens
agcagagagugagcgccucccug

SEQ ID NO: 1570 - RNA, 22 nt, Homo sapiens
caugacgucacagaggcuucgc

SEQ ID NO: 1571 - RNA, 22 nt, Homo sapiens
gcgaagccucugugacgucaug

SEQ ID NO: 1572 - RNA, 23 nt, Homo sapiens
aggccucugugacgucacggugu

SEQ ID NO: 1573 - RNA, 23 nt, Homo sapiens
acaccgugacgucacagaggccu

SEQ ID NO: 1574 - RNA, 23 nt, Homo sapiens
ugccccaccugcugaccacccuc

SEQ ID NO: 1575 - RNA, 23 nt, Homo sapiens
gaggguggucagcagguggggca

SEQ ID NO: 1576 - RNA, 23 nt, Homo sapiens
gugagugggagccgguggggcug

SEQ ID NO: 1577 - RNA, 23 nt, Homo sapiens
cagccccaccggcucccacucac

SEQ ID NO: 1578 - RNA, 21 nt, Homo sapiens
uaggacuagauguuggaauua

SEQ ID NO: 1579 - RNA, 21 nt, Homo sapiens
uaauuccaacaucuaguccua

SEQ ID NO: 1580 - RNA, 22 nt, Homo sapiens
aaauucauguucaaucuaaacc

SEQ ID NO: 1581 - RNA, 22 nt, Homo sapiens
gguuuagauugaacaugaauuu

SEQ ID NO: 1582 - RNA, 22 nt, Homo sapiens
uuuagauugaacaugaaguuag

SEQ ID NO: 1583 - RNA, 22 nt, Homo sapiens
cuaacuucauguucaaucuaaa

SEQ ID NO: 1584 - RNA, 21 nt, Homo sapiens
gagggcaugcgcacuuugucc

SEQ ID NO: 1585 - RNA, 21 nt, Homo sapiens
ggacaaagugcgcaugcccuc

SEQ ID NO: 1586 - RNA, 21 nt, Homo sapiens
acaaggugugcaugccugacc

SEQ ID NO: 1587 - RNA, 21 nt, Homo sapiens
ggucaggcaugcacaccuugu

SEQ ID NO: 1588 - RNA, 22 nt, Homo sapiens
cuucugaucaagauuuguggug

SEQ ID NO: 1589 - RNA, 22 nt, Homo sapiens
caccacaaaucuugaucagaag

SEQ ID NO: 1590 - RNA, 21 nt, Homo sapiens
ccaaaucuugaucagaagccu

SEQ ID NO: 1591 - RNA, 21 nt, Homo sapiens
aggcuucugaucaagauuugg

SEQ ID NO: 1592 - RNA, 24 nt, Homo sapiens
aggcaggggcuggugcugggcggg

SEQ ID NO: 1593 - RNA, 24 nt, Homo sapiens
cccgcccagcaccagccccugccu

SEQ ID NO: 1594 - RNA, 21 nt, Homo sapiens
cgccugcccagcccuccugcu

SEQ ID NO: 1595 - RNA, 21 nt, Homo sapiens
agcaggagggcugggcaggcg

SEQ ID NO: 1596 - RNA, 22 nt, Homo sapiens
uuaacuccuuucacacccaugg

SEQ ID NO: 1597 - RNA, 22 nt, Homo sapiens
ccaugggugugaaaggaguuaa

SEQ ID NO: 1598 - RNA, 21 nt, Homo sapiens
uggauguggaaggaguuaucu

SEQ ID NO: 1599 - RNA, 21 nt, Homo sapiens
agauaacuccuuccacaucca

SEQ ID NO: 1600 - RNA, 22 nt, Homo sapiens
ugagugauugauagcuauguuc

SEQ ID NO: 1601 - RNA, 22 nt, Homo sapiens
gaacauagcuaucaaucacuca

SEQ ID NO: 1602 - RNA, 21 nt, Homo sapiens
auagcaauugcucuuuuggaa

SEQ ID NO: 1603 - RNA, 21 nt, Homo sapiens
uuccaaaagagcaauugcuau

SEQ ID NO: 1604 - RNA, 21 nt, Homo sapiens
ucugaaagagcaguugguguu

SEQ ID NO: 1605 - RNA, 21 nt, Homo sapiens
aacaccaacugcucuuucaga

SEQ ID NO: 1606 - RNA, 23 nt, Homo sapiens
cgcgggcgcuccuggccgccgcc

SEQ ID NO: 1607 - RNA, 23 nt, Homo sapiens
ggcggcggccaggagcgcccgcg

SEQ ID NO: 1608 - RNA, 20 nt, Homo sapiens
ccaggagauccagagagaau

SEQ ID NO: 1609 - RNA, 20 nt, Homo sapiens
auucucucuggaucuccugg

SEQ ID NO: 1610 - RNA, 22 nt, Homo sapiens
auucucucuggaucccauggau

SEQ ID NO: 1611 - RNA, 22 nt, Homo sapiens
auccaugggauccagagagaau

SEQ ID NO: 1612 - RNA, 22 nt, Homo sapiens
ucugccauccucccuccccuac

SEQ ID NO: 1613 - RNA, 22 nt, Homo sapiens
guaggggagggaggauggcaga

SEQ ID NO: 1614 - RNA, 24 nt, Homo sapiens
ggugggauggagagaagguaugag

SEQ ID NO: 1615 - RNA, 24 nt, Homo sapiens
cucauaccuucucuccaucccacc

SEQ ID NO: 1616 - RNA, 18 nt, Homo sapiens
ugagaugacacuguagcu

SEQ ID NO: 1617 - RNA, 18 nt, Homo sapiens
agcuacagugucaucuca

SEQ ID NO: 1618 - RNA, 21 nt, Homo sapiens
agcagacuugaccuacaauua

SEQ ID NO: 1619 - RNA, 21 nt, Homo sapiens
uaauuguaggucaagucugcu

SEQ ID NO: 1620 - RNA, 22 nt, Homo sapiens
cagaacaggagcauagaaaggc

SEQ ID NO: 1621 - RNA, 22 nt, Homo sapiens
gccuuucuaugcuccuguucug

SEQ ID NO: 1622 - RNA, 22 nt, Homo sapiens
uuaauuuuuuguuucggucacu

SEQ ID NO: 1623 - RNA, 22 nt, Homo sapiens
agugaccgaaacaaaaaauuaa

SEQ ID NO: 1624 - RNA, 23 nt, Homo sapiens
cuugccauccugguccacugcau

SEQ ID NO: 1625 - RNA, 23 nt, Homo sapiens
augcaguggaccaggauggcaag

SEQ ID NO: 1626 - RNA, 22 nt, Homo sapiens
guggaccaggauggcaagggcu

SEQ ID NO: 1627 - RNA, 22 nt, Homo sapiens
agcccuugccauccugguccac

SEQ ID NO: 1628 - RNA, 22 nt, Homo sapiens
auaccucaucuagaaugcugua

SEQ ID NO: 1629 - RNA, 22 nt, Homo sapiens
uacagcauucuagaugagguau

SEQ ID NO: 1630 - RNA, 22 nt, Homo sapiens
uucuagaugagagauauauaua

SEQ ID NO: 1631 - RNA, 22 nt, Homo sapiens
uauauauaucucucaucuagaa

SEQ ID NO: 1632 - RNA, 22 nt, Homo sapiens
ucuucuuccuuugcagaguuga

SEQ ID NO: 1633 - RNA, 22 nt, Homo sapiens
ucaacucugcaaaggaagaaga

SEQ ID NO: 1634 - RNA, 22 nt, Homo sapiens
aauucuguaaaggaagaagagg

SEQ ID NO: 1635 - RNA, 22 nt, Homo sapiens
ccucuucuuccuuuacagaauu

SEQ ID NO: 1636 - RNA, 22 nt, Homo sapiens
uaggagggaauaguaaaagcag

SEQ ID NO: 1637 - RNA, 22 nt, Homo sapiens
cugcuuuuacuauucccuccua

SEQ ID NO: 1638 - RNA, 22 nt, Homo sapiens
acccuugagccugaucccuagc

SEQ ID NO: 1639 - RNA, 22 nt, Homo sapiens
gcuagggaucaggcucaagggu

SEQ ID NO: 1640 - RNA, 22 nt, Homo sapiens
aauguuggaauccucgcuagag

SEQ ID NO: 1641 - RNA, 22 nt, Homo sapiens
cucuagcgaggauuccaacauu

SEQ ID NO: 1642 - RNA, 21 nt, Homo sapiens
uagcggggauuccaauauugg

SEQ ID NO: 1643 - RNA, 21 nt, Homo sapiens
ccaauauuggaauccccgcua

SEQ ID NO: 1644 - RNA, 22 nt, Homo sapiens
ugauugucuucauaucuagaac

SEQ ID NO: 1645 - RNA, 22 nt, Homo sapiens
guucuagauaugaagacaauca

SEQ ID NO: 1646 - RNA, 22 nt, Homo sapiens
uucuggauaugaagacaaucaa

SEQ ID NO: 1647 - RNA, 22 nt, Homo sapiens
uugauugucuucauauccagaa

SEQ ID NO: 1648 - RNA, 23 nt, Homo sapiens
ccccgguguuggggcgcgucugc

SEQ ID NO: 1649 - RNA, 23 nt, Homo sapiens
gcagacgcgccccaacaccgggg

SEQ ID NO: 1650 - RNA, 21 nt, Homo sapiens
ggcgcgcccagcucccgggcu

SEQ ID NO: 1651 - RNA, 21 nt, Homo sapiens
agcccgggagcugggcgcgcc

SEQ ID NO: 1652 - RNA, 20 nt, Homo sapiens
ugaggagaugcugggacuga

SEQ ID NO: 1653 - RNA, 20 nt, Homo sapiens
ucagucccagcaucuccuca

SEQ ID NO: 1654 - RNA, 21 nt, Homo sapiens
agagucggcgacgccgccagc

SEQ ID NO: 1655 - RNA, 21 nt, Homo sapiens
gcuggcggcgucgccgacucu

SEQ ID NO: 1656 - RNA, 22 nt, Homo sapiens
ugaagccagcucuggucugggc

SEQ ID NO: 1657 - RNA, 22 nt, Homo sapiens
gcccagaccagagcuggcuuca

SEQ ID NO: 1658 - RNA, 22 nt, Homo sapiens
ugagaccaggacuggaugcacc

SEQ ID NO: 1659 - RNA, 22 nt, Homo sapiens
ggugcauccaguccuggucuca

SEQ ID NO: 1660 - RNA, 24 nt, Homo sapiens
gaugcgccgcccacugccccgcgc

SEQ ID NO: 1661 - RNA, 24 nt, Homo sapiens
gcgcggggcagugggcggcgcauc

SEQ ID NO: 1662 - RNA, 22 nt, Homo sapiens
gcggggguggcggcggcauccc

SEQ ID NO: 1663 - RNA, 22 nt, Homo sapiens
gggaugccgccgccacccccgc

SEQ ID NO: 1664 - RNA, 22 nt, Homo sapiens
uuacggaccagcuaagggaggc

SEQ ID NO: 1665 - RNA, 22 nt, Homo sapiens
gccucccuuagcugguccguaa

SEQ ID NO: 1666 - RNA, 21 nt, Homo sapiens
cacacauagcagguguauaua

SEQ ID NO: 1667 - RNA, 21 nt, Homo sapiens
uauauacaccugcuaugugug

SEQ ID NO: 1668 - RNA, 22 nt, Homo sapiens
guauacaccugauauguguaug

SEQ ID NO: 1669 - RNA, 22 nt, Homo sapiens
cauacacauaucagguguauac

SEQ ID NO: 1670 - RNA, 22 nt, Homo sapiens
ugaaugguaaagcgaugucaca

SEQ ID NO: 1671 - RNA, 22 nt, Homo sapiens
ugugacaucgcuuuaccauuca

SEQ ID NO: 1672 - RNA, 20 nt, Homo sapiens
aucgcuuuaccauucauguu

SEQ ID NO: 1673 - RNA, 20 nt, Homo sapiens
aacaugaaugguaaagcgau

SEQ ID NO: 1674 - RNA, 18 nt, Homo sapiens
uggauaugaugacugaaa

SEQ ID NO: 1675 - RNA, 18 nt, Homo sapiens
uuucagucaucauaucca

SEQ ID NO: 1676 - RNA, 18 nt, Homo sapiens
cggugagcgcucgcuggc

SEQ ID NO: 1677 - RNA, 18 nt, Homo sapiens
gccagcgagcgcucaccg

SEQ ID NO: 1678 - RNA, 23 nt, Homo sapiens
ucugcacugugaguuggcuggcu

SEQ ID NO: 1679 - RNA, 23 nt, Homo sapiens
agccagccaacucacagugcaga

SEQ ID NO: 1680 - RNA, 24 nt, Homo sapiens
acauccugcuccacagggcagagg

SEQ ID NO: 1681 - RNA, 24 nt, Homo sapiens
ccucugcccuguggagcaggaugu

SEQ ID NO: 1682 - RNA, 22 nt, Homo sapiens
ucuggcuaucucacgagacugu

SEQ ID NO: 1683 - RNA, 22 nt, Homo sapiens
acagucucgugagauagccaga

SEQ ID NO: 1684 - RNA, 22 nt, Homo sapiens
auauuauuagccacuucuggau

SEQ ID NO: 1685 - RNA, 22 nt, Homo sapiens
auccagaaguggcuaauaauau

SEQ ID NO: 1686 - RNA, 21 nt, Homo sapiens
agaaguggcuaauaauauuga

SEQ ID NO: 1687 - RNA, 21 nt, Homo sapiens
ucaauauuauuagccacuucu

SEQ ID NO: 1688 - RNA, 22 nt, Homo sapiens
uaaaguggcagaguauagacac

SEQ ID NO: 1689 - RNA, 22 nt, Homo sapiens
gugucuauacucugccacuuua

SEQ ID NO: 1690 - RNA, 22 nt, Homo sapiens
ugucuauacucugucacuuuac

SEQ ID NO: 1691 - RNA, 22 nt, Homo sapiens
guaaagugacagaguauagaca

SEQ ID NO: 1692 - RNA, 21 nt, Homo sapiens
ucucaguaaguggcacucugu

SEQ ID NO: 1693 - RNA, 21 nt, Homo sapiens
acagagugccacuuacugaga

SEQ ID NO: 1694 - RNA, 21 nt, Homo sapiens
gacagagugccacuuacugaa

SEQ ID NO: 1695 - RNA, 21 nt, Homo sapiens
uucaguaaguggcacucuguc

SEQ ID NO: 1696 - RNA, 22 nt, Homo sapiens
aacucacgaaguauaccgaagu

SEQ ID NO: 1697 - RNA, 22 nt, Homo sapiens
acuucgguauacuucgugaguu

SEQ ID NO: 1698 - RNA, 22 nt, Homo sapiens
uucgguauacuuugugaauugg

SEQ ID NO: 1699 - RNA, 22 nt, Homo sapiens
ccaauucacaaaguauaccgaa

SEQ ID NO: 1700 - RNA, 22 nt, Homo sapiens
acuggcaugcugcauuuauaua

SEQ ID NO: 1701 - RNA, 22 nt, Homo sapiens
uauauaaaugcagcaugccagu

SEQ ID NO: 1702 - RNA, 22 nt, Homo sapiens
aucuaaaugcagcaugccaguc

SEQ ID NO: 1703 - RNA, 22 nt, Homo sapiens
gacuggcaugcugcauuuagau

SEQ ID NO: 1704 - RNA, 19 nt, Homo sapiens
cauccguccgucuguccac

SEQ ID NO: 1705 - RNA, 19 nt, Homo sapiens
guggacagacggacggaug

SEQ ID NO: 1706 - RNA, 21 nt, Homo sapiens
aguggaccgaggaaggaagga

SEQ ID NO: 1707 - RNA, 21 nt, Homo sapiens
uccuuccuuccucgguccacu

SEQ ID NO: 1708 - RNA, 22 nt, Homo sapiens
uacacaagaaaaccaaggcuca

SEQ ID NO: 1709 - RNA, 22 nt, Homo sapiens
ugagccuugguuuucuugugua

SEQ ID NO: 1710 - RNA, 21 nt, Homo sapiens
uaacauaauaguguggauuga

SEQ ID NO: 1711 - RNA, 21 nt, Homo sapiens
ucaauccacacuauuauguua

SEQ ID NO: 1712 - RNA, 21 nt, Homo sapiens
ugcuuaaccuugcccucgaaa

SEQ ID NO: 1713 - RNA, 21 nt, Homo sapiens
uuucgagggcaagguuaagca

SEQ ID NO: 1714 - RNA, 21 nt, Homo sapiens
uuggacgguaagguuaagcaa

SEQ ID NO: 1715 - RNA, 21 nt, Homo sapiens
uugcuuaaccuuaccguccaa

SEQ ID NO: 1716 - RNA, 21 nt, Homo sapiens
aaaagcaucaggaaguaccca

SEQ ID NO: 1717 - RNA, 21 nt, Homo sapiens
uggguacuuccugaugcuuuu

SEQ ID NO: 1718 - RNA, 21 nt, Homo sapiens
gcaggacaggcagaaguggau

SEQ ID NO: 1719 - RNA, 21 nt, Homo sapiens
auccacuucugccuguccugc

SEQ ID NO: 1720 - RNA, 22 nt, Homo sapiens
cagggcuggcagugacaugggu

SEQ ID NO: 1721 - RNA, 22 nt, Homo sapiens
acccaugucacugccagcccug

SEQ ID NO: 1722 - RNA, 22 nt, Homo sapiens
auuucccugccauucccuuggc

SEQ ID NO: 1723 - RNA, 22 nt, Homo sapiens
gccaagggaauggcagggaaau

SEQ ID NO: 1724 - RNA, 22 nt, Homo sapiens
uggcggcgguaguuaugggcuu

SEQ ID NO: 1725 - RNA, 22 nt, Homo sapiens
aagcccauaacuaccgccgcca

SEQ ID NO: 1726 - RNA, 22 nt, Homo sapiens
gcucccucuagggucgcucgga

SEQ ID NO: 1727 - RNA, 22 nt, Homo sapiens
uccgagcgacccuagagggagc

SEQ ID NO: 1728 - RNA, 22 nt, Homo sapiens
ugggaacuuaguagagguuuaa

SEQ ID NO: 1729 - RNA, 22 nt, Homo sapiens
uuaaaccucuacuaaguuccca

SEQ ID NO: 1730 - RNA, 21 nt, Homo sapiens
uggggcuagugaugcaggacg

SEQ ID NO: 1731 - RNA, 21 nt, Homo sapiens
cguccugcaucacuagcccca

SEQ ID NO: 1732 - RNA, 22 nt, Homo sapiens
gcugacagcagggcuggccgcu

SEQ ID NO: 1733 - RNA, 22 nt, Homo sapiens
agcggccagcccugcugucagc

SEQ ID NO: 1734 - RNA, 21 nt, Homo sapiens
auuggacugcugauggcccgu

SEQ ID NO: 1735 - RNA, 21 nt, Homo sapiens
acgggccaucagcaguccaau

SEQ ID NO: 1736 - RNA, 22 nt, Homo sapiens
aggccaucagcaguccaaugaa

SEQ ID NO: 1737 - RNA, 22 nt, Homo sapiens
uucauuggacugcugauggccu

SEQ ID NO: 1738 - RNA, 22 nt, Homo sapiens
uuggacagaaaacacgcaggaa

SEQ ID NO: 1739 - RNA, 22 nt, Homo sapiens
uuccugcguguuuucuguccaa

SEQ ID NO: 1740 - RNA, 20 nt, Homo sapiens
ccugcguguuuucuguccaa

SEQ ID NO: 1741 - RNA, 20 nt, Homo sapiens
uuggacagaaaacacgcagg

SEQ ID NO: 1742 - RNA, 22 nt, Homo sapiens
ugagacaggcuuaugcugcuau

SEQ ID NO: 1743 - RNA, 22 nt, Homo sapiens
auagcagcauaagccugucuca

SEQ ID NO: 1744 - RNA, 22 nt, Homo sapiens
auagcagcaugaaccugucuca

SEQ ID NO: 1745 - RNA, 22 nt, Homo sapiens
ugagacagguucaugcugcuau

SEQ ID NO: 1746 - RNA, 20 nt, Homo sapiens
gagacagguucaugcugcua

SEQ ID NO: 1747 - RNA, 20 nt, Homo sapiens
uagcagcaugaaccugucuc

SEQ ID NO: 1748 - RNA, 21 nt, Homo sapiens
auagcagcauaagccugucuc

SEQ ID NO: 1749 - RNA, 21 nt, Homo sapiens
gagacaggcuuaugcugcuau

SEQ ID NO: 1750 - RNA, 22 nt, Homo sapiens
uguguggauccuggaggaggca

SEQ ID NO: 1751 - RNA, 22 nt, Homo sapiens
ugccuccuccaggauccacaca

SEQ ID NO: 1752 - RNA, 22 nt, Homo sapiens
agacaucaagaucagucccaaa

SEQ ID NO: 1753 - RNA, 22 nt, Homo sapiens
uuugggacugaucuugaugucu

SEQ ID NO: 1754 - RNA, 22 nt, Homo sapiens
uuugggacugaucuugaugucu

SEQ ID NO: 1755 - RNA, 22 nt, Homo sapiens
agacaucaagaucagucccaaa

SEQ ID NO: 1756 - RNA, 22 nt, Homo sapiens
aaggaaccagaaaaugagaagu

SEQ ID NO: 1757 - RNA, 22 nt, Homo sapiens
acuucucauuuucugguuccuu

SEQ ID NO: 1758 - RNA, 22 nt, Homo sapiens
ucuggccuugacuugacucuuu

SEQ ID NO: 1759 - RNA, 22 nt, Homo sapiens
aaagagucaagucaaggccaga

SEQ ID NO: 1760 - RNA, 23 nt, Homo sapiens
ucaaggccagaggucccacagca

SEQ ID NO: 1761 - RNA, 23 nt, Homo sapiens
ugcugugggaccucuggccuuga

SEQ ID NO: 1762 - RNA, 21 nt, Homo sapiens
acuccaguuuuaguucucuug

SEQ ID NO: 1763 - RNA, 21 nt, Homo sapiens
caagagaacuaaaacuggagu

SEQ ID NO: 1764 - RNA, 22 nt, Homo sapiens
aagagaacugaaaguggagccu

SEQ ID NO: 1765 - RNA, 22 nt, Homo sapiens
aggcuccacuuucaguucucuu

SEQ ID NO: 1766 - RNA, 22 nt, Homo sapiens
uaagggguguauggcagaugca

SEQ ID NO: 1767 - RNA, 22 nt, Homo sapiens
ugcaucugccauacaccccuua

SEQ ID NO: 1768 - RNA, 21 nt, Homo sapiens
uuucagauaacaguauuacau

SEQ ID NO: 1769 - RNA, 21 nt, Homo sapiens
auguaauacuguuaucugaaa

SEQ ID NO: 1770 - RNA, 22 nt, Homo sapiens
aagcaauacuguuaccugaaau

SEQ ID NO: 1771 - RNA, 22 nt, Homo sapiens
auuucagguaacaguauugcuu

SEQ ID NO: 1772 - RNA, 22 nt, Homo sapiens
uacuaacugcagauucaaguga

SEQ ID NO: 1773 - RNA, 22 nt, Homo sapiens
ucacuugaaucugcaguuagua

SEQ ID NO: 1774 - RNA, 21 nt, Homo sapiens
auugccuaacaugugccagaa

SEQ ID NO: 1775 - RNA, 21 nt, Homo sapiens
uucuggcacauguuaggcaau

SEQ ID NO: 1776 - RNA, 22 nt, Homo sapiens
ucugguauguaguagguaauaa

SEQ ID NO: 1777 - RNA, 22 nt, Homo sapiens
uuauuaccuacuacauaccaga

SEQ ID NO: 1778 - RNA, 22 nt, Homo sapiens
aguugccuuuuuguucccaugc

SEQ ID NO: 1779 - RNA, 22 nt, Homo sapiens
gcaugggaacaaaaaggcaacu

SEQ ID NO: 1780 - RNA, 21 nt, Homo sapiens
auaggcaccaaaaagcaacaa

SEQ ID NO: 1781 - RNA, 21 nt, Homo sapiens
uuguugcuuuuuggugccuau

SEQ ID NO: 1782 - RNA, 22 nt, Homo sapiens
ccugcaacuuugccugaucaga

SEQ ID NO: 1783 - RNA, 22 nt, Homo sapiens
ucugaucaggcaaaguugcagg

SEQ ID NO: 1784 - RNA, 22 nt, Homo sapiens
ugaucaggcaaaauugcagacu

SEQ ID NO: 1785 - RNA, 22 nt, Homo sapiens
agucugcaauuuugccugauca

SEQ ID NO: 1786 - RNA, 22 nt, Homo sapiens
uuguggcuggucaugaggcuaa

SEQ ID NO: 1787 - RNA, 22 nt, Homo sapiens
uuagccucaugaccagccacaa

SEQ ID NO: 1788 - RNA, 21 nt, Homo sapiens
uuagucucaugaucagacaca

SEQ ID NO: 1789 - RNA, 21 nt, Homo sapiens
ugugucugaucaugagacuaa

SEQ ID NO: 1790 - RNA, 22 nt, Homo sapiens
aaagauagacaauuggcuaaau

SEQ ID NO: 1791 - RNA, 22 nt, Homo sapiens
auuuagccaauugucuaucuuu

SEQ ID NO: 1792 - RNA, 22 nt, Homo sapiens
uuagccaauuguccaucuuuag

SEQ ID NO: 1793 - RNA, 22 nt, Homo sapiens
cuaaagauggacaauuggcuaa

SEQ ID NO: 1794 - RNA, 22 nt, Homo sapiens
ucugugagaccaaagaacuacu

SEQ ID NO: 1795 - RNA, 22 nt, Homo sapiens
aguaguucuuuggucucacaga

SEQ ID NO: 1796 - RNA, 22 nt, Homo sapiens
uuguucuuuggucuuucagcca

SEQ ID NO: 1797 - RNA, 22 nt, Homo sapiens
uggcugaaagaccaaagaacaa

SEQ ID NO: 1798 - RNA, 23 nt, Homo sapiens
cgggcuguccggaggggucggcu

SEQ ID NO: 1799 - RNA, 23 nt, Homo sapiens
agccgaccccuccggacagcccg

SEQ ID NO: 1800 - RNA, 23 nt, Homo sapiens
ucuguauucuccuuugccugcag

SEQ ID NO: 1801 - RNA, 23 nt, Homo sapiens
cugcaggcaaaggagaauacaga

SEQ ID NO: 1802 - RNA, 23 nt, Homo sapiens
uacauggauggaaaccuucaagc

SEQ ID NO: 1803 - RNA, 23 nt, Homo sapiens
gcuugaagguuuccauccaugua

SEQ ID NO: 1804 - RNA, 22 nt, Homo sapiens
uauggagguucuagaccauguu

SEQ ID NO: 1805 - RNA, 22 nt, Homo sapiens
aacauggucuagaaccuccaua

SEQ ID NO: 1806 - RNA, 22 nt, Homo sapiens
gggaccauccugccugcugugg

SEQ ID NO: 1807 - RNA, 22 nt, Homo sapiens
ccacagcaggcaggaugguccc

SEQ ID NO: 1808 - RNA, 22 nt, Homo sapiens
ucagcaggcaggcuggugcagc

SEQ ID NO: 1809 - RNA, 22 nt, Homo sapiens
gcugcaccagccugccugcuga

SEQ ID NO: 1810 - RNA, 22 nt, Homo sapiens
ucaccugaccucccaugccugu

SEQ ID NO: 1811 - RNA, 22 nt, Homo sapiens
acaggcaugggaggucagguga

SEQ ID NO: 1812 - RNA, 22 nt, Homo sapiens
caggcacgggagcucaggugag

SEQ ID NO: 1813 - RNA, 22 nt, Homo sapiens
cucaccugagcucccgugccug

SEQ ID NO: 1814 - RNA, 21 nt, Homo sapiens
ugaguguugucuacgagggca

SEQ ID NO: 1815 - RNA, 21 nt, Homo sapiens
ugcccucguagacaacacuca

SEQ ID NO: 1816 - RNA, 21 nt, Homo sapiens
acugacaggagagcauuuuga

SEQ ID NO: 1817 - RNA, 21 nt, Homo sapiens
ucaaaaugcucuccugucagu

SEQ ID NO: 1818 - RNA, 22 nt, Homo sapiens
ugaccugggacucggacagcug

SEQ ID NO: 1819 - RNA, 22 nt, Homo sapiens
cagcuguccgagucccagguca

SEQ ID NO: 1820 - RNA, 22 nt, Homo sapiens
ucucaggaguaaagacagaguu

SEQ ID NO: 1821 - RNA, 22 nt, Homo sapiens
aacucugucuuuacuccugaga

SEQ ID NO: 1822 - RNA, 22 nt, Homo sapiens
aacucugucuucacucaugagu

SEQ ID NO: 1823 - RNA, 22 nt, Homo sapiens
acucaugagugaagacagaguu

SEQ ID NO: 1824 - RNA, 22 nt, Homo sapiens
uggggcggagcuuccggaggcc

SEQ ID NO: 1825 - RNA, 22 nt, Homo sapiens
ggccuccggaagcuccgcccca

SEQ ID NO: 1826 - RNA, 22 nt, Homo sapiens
caaucagcaaguauacugcccu

SEQ ID NO: 1827 - RNA, 22 nt, Homo sapiens
agggcaguauacuugcugauug

SEQ ID NO: 1828 - RNA, 22 nt, Homo sapiens
uggcagugucuuagcugguugu

SEQ ID NO: 1829 - RNA, 22 nt, Homo sapiens
acaaccagcuaagacacugcca

SEQ ID NO: 1830 - RNA, 22 nt, Homo sapiens
ccaauauuggcugugcugcucc

SEQ ID NO: 1831 - RNA, 22 nt, Homo sapiens
ggagcagcacagccaauauugg

SEQ ID NO: 1832 - RNA, 21 nt, Homo sapiens
uagcagcacagaaauauuggc

SEQ ID NO: 1833 - RNA, 21 nt, Homo sapiens
gccaauauuucugugcugcua

SEQ ID NO: 1834 - RNA, 21 nt, Homo sapiens
uaauuuuauguauaagcuagu

SEQ ID NO: 1835 - RNA, 21 nt, Homo sapiens
acuagcuuauacauaaaauua

SEQ ID NO: 1836 - RNA, 22 nt, Homo sapiens
gagcuuauucauaaaagugcag

SEQ ID NO: 1837 - RNA, 22 nt, Homo sapiens
cugcacuuuuaugaauaagcuc

SEQ ID NO: 1838 - RNA, 22 nt, Homo sapiens
aagacgggaggaaagaagggag

SEQ ID NO: 1839 - RNA, 22 nt, Homo sapiens
cucccuucuuuccucccgucuu

SEQ ID NO: 1840 - RNA, 22 nt, Homo sapiens
cagugguuuuacccuaugguag

SEQ ID NO: 1841 - RNA, 22 nt, Homo sapiens
cuaccauaggguaaaaccacug

SEQ ID NO: 1842 - RNA, 22 nt, Homo sapiens
auucuaauuucuccacgucuuu

SEQ ID NO: 1843 - RNA, 22 nt, Homo sapiens
aaagacguggagaaauuagaau

SEQ ID NO: 1844 - RNA, 22 nt, Homo sapiens
aaccagcaccccaacuuuggac

SEQ ID NO: 1845 - RNA, 22 nt, Homo sapiens
guccaaaguuggggugcugguu

SEQ ID NO: 1846 - RNA, 24 nt, Homo sapiens
aaagacauaggauagagucaccuc

SEQ ID NO: 1847 - RNA, 24 nt, Homo sapiens
gaggugacucuauccuaugucuuu

SEQ ID NO: 1848 - RNA, 22 nt, Homo sapiens
uaacugguugaacaacugaacc

SEQ ID NO: 1849 - RNA, 22 nt, Homo sapiens
gguucaguuguucaaccaguua

SEQ ID NO: 1850 - RNA, 20 nt, Homo sapiens
cgugccacccuuuuccccag

SEQ ID NO: 1851 - RNA, 20 nt, Homo sapiens
cuggggaaaaggguggcacg

SEQ ID NO: 1852 - RNA, 17 nt, Homo sapiens
guggggccaggcggugg

SEQ ID NO: 1853 - RNA, 17 nt, Homo sapiens
ccaccgccuggccccac

SEQ ID NO: 1854 - RNA, 22 nt, Homo sapiens
aaaagcuggguugagagggcaa

SEQ ID NO: 1855 - RNA, 22 nt, Homo sapiens
uugcccucucaacccagcuuuu

SEQ ID NO: 1856 - RNA, 22 nt, Homo sapiens
gguccagaggggagauagguuc

SEQ ID NO: 1857 - RNA, 22 nt, Homo sapiens
gaaccuaucuccccucuggacc

SEQ ID NO: 1858 - RNA, 23 nt, Homo sapiens
uagccuucagaucuugguguuuu

SEQ ID NO: 1859 - RNA, 23 nt, Homo sapiens
aaaacaccaagaucugaaggcua

SEQ ID NO: 1860 - RNA, 23 nt, Homo sapiens
ccacuuggaucugaaggcugccc

SEQ ID NO: 1861 - RNA, 23 nt, Homo sapiens
gggcagccuucagauccaagugg

SEQ ID NO: 1862 - RNA, 22 nt, Homo sapiens
ugugcgcagggagaccucuccc

SEQ ID NO: 1863 - RNA, 22 nt, Homo sapiens
gggagaggucucccugcgcaca

SEQ ID NO: 1864 - RNA, 22 nt, Homo sapiens
ugucuacuacuggagacacugg

SEQ ID NO: 1865 - RNA, 22 nt, Homo sapiens
ccagugucuccaguaguagaca

SEQ ID NO: 1866 - RNA, 21 nt, Homo sapiens
aaggcagggcccccgcucccc

SEQ ID NO: 1867 - RNA, 21 nt, Homo sapiens
ggggagcgggggcccugccuu

SEQ ID NO: 1868 - RNA, 21 nt, Homo sapiens
cugacuguugccguccuccag

SEQ ID NO: 1869 - RNA, 21 nt, Homo sapiens
cuggaggacggcaacagucag

SEQ ID NO: 1870 - RNA, 25 nt, Homo sapiens
aaaaaccacaauuacuuuugcacca

SEQ ID NO: 1871 - RNA, 25 nt, Homo sapiens
uggugcaaaaguaauugugguuuuu

SEQ ID NO: 1872 - RNA, 23 nt, Homo sapiens
caaaaaccgcaauuacuuuugca

SEQ ID NO: 1873 - RNA, 23 nt, Homo sapiens
ugcaaaaguaauugcgguuuuug

SEQ ID NO: 1874 - RNA, 22 nt, Homo sapiens
augugccugagggaguaagaca

SEQ ID NO: 1875 - RNA, 22 nt, Homo sapiens
ugucuuacucccucaggcacau

SEQ ID NO: 1876 - RNA, 20 nt, Homo sapiens
ucuuacucccucaggcacug

SEQ ID NO: 1877 - RNA, 20 nt, Homo sapiens
cagugccugagggaguaaga

SEQ ID NO: 1878 - RNA, 22 nt, Homo sapiens
agacacauuuggagagggaccc

SEQ ID NO: 1879 - RNA, 22 nt, Homo sapiens
gggucccucuccaaaugugucu

SEQ ID NO: 1880 - RNA, 22 nt, Homo sapiens
gguucccucuccaaaugugucu

SEQ ID NO: 1881 - RNA, 22 nt, Homo sapiens
agacacauuuggagagggaacc

SEQ ID NO: 1882 - RNA, 21 nt, Homo sapiens
aaaauuucuuucacuacuuag

SEQ ID NO: 1883 - RNA, 21 nt, Homo sapiens
cuaaguagugaaagaaauuuu

SEQ ID NO: 1884 - RNA, 21 nt, Homo sapiens
uuagugaaggcuauuuuaauu

SEQ ID NO: 1885 - RNA, 21 nt, Homo sapiens
aauuaaaauagccuucacuaa

SEQ ID NO: 1886 - RNA, 20 nt, Homo sapiens
acuguaaacgcuuucugaug

SEQ ID NO: 1887 - RNA, 20 nt, Homo sapiens
caucagaaagcguuuacagu

SEQ ID NO: 1888 - RNA, 22 nt, Homo sapiens
gcaugugaugaagcaaaucagu

SEQ ID NO: 1889 - RNA, 22 nt, Homo sapiens
acugauuugcuucaucacaugc

SEQ ID NO: 1890 - RNA, 24 nt, Homo sapiens
caaagugaugaguaauacuggcug

SEQ ID NO: 1891 - RNA, 24 nt, Homo sapiens
cagccaguauuacucaucacuuug

SEQ ID NO: 1892 - RNA, 20 nt, Homo sapiens
gaaucggaaaggaggcgccg

SEQ ID NO: 1893 - RNA, 20 nt, Homo sapiens
cggcgccuccuuuccgauuc

SEQ ID NO: 1894 - RNA, 21 nt, Homo sapiens
uugugaagaaagaaauucuua

SEQ ID NO: 1895 - RNA, 21 nt, Homo sapiens
uaagaauuucuuucuucacaa

SEQ ID NO: 1896 - RNA, 22 nt, Homo sapiens
aggaggcaucuugagaaaugga

SEQ ID NO: 1897 - RNA, 22 nt, Homo sapiens
uccauuucucaagaugccuccu

SEQ ID NO: 1898 - RNA, 24 nt, Homo sapiens
acaaaaaaaaaagcccaacccuuc

SEQ ID NO: 1899 - RNA, 24 nt, Homo sapiens
gaaggguugggcuuuuuuuuuugu

SEQ ID NO: 1900 - RNA, 22 nt, Homo sapiens
uguuguacuuuuuuuuuuguuc

SEQ ID NO: 1901 - RNA, 22 nt, Homo sapiens
gaacaaaaaaaaaaguacaaca

SEQ ID NO: 1902 - RNA, 21 nt, Homo sapiens
ucucucggcuccucgcggcuc

SEQ ID NO: 1903 - RNA, 21 nt, Homo sapiens
gagccgcgaggagccgagaga

SEQ ID NO: 1904 - RNA, 23 nt, Homo sapiens
cgagggcauuucaugaugcaggc

SEQ ID NO: 1905 - RNA, 23 nt, Homo sapiens
gccugcaucaugaaaugcccucg

SEQ ID NO: 1906 - RNA, 22 nt, Homo sapiens
augaagugcacucaugauaugu

SEQ ID NO: 1907 - RNA, 22 nt, Homo sapiens
acauaucaugagugcacuucau

SEQ ID NO: 1908 - RNA, 22 nt, Homo sapiens
ugucuacauuaaugaaaagagc

SEQ ID NO: 1909 - RNA, 22 nt, Homo sapiens
gcucuuuucauuaauguagaca

SEQ ID NO: 1910 - RNA, 22 nt, Homo sapiens
ucacccugcaucccgcacccag

SEQ ID NO: 1911 - RNA, 22 nt, Homo sapiens
cugggugcgggaugcaggguga

SEQ ID NO: 1912 - RNA, 22 nt, Homo sapiens
gugggcugggcugggcugggcc

SEQ ID NO: 1913 - RNA, 22 nt, Homo sapiens
ggcccagcccagcccagcccac

SEQ ID NO: 1914 - RNA, 20 nt, Homo sapiens
cgcgggucggggucugcagg

SEQ ID NO: 1915 - RNA, 20 nt, Homo sapiens
ccugcagaccccgacccgcg

SEQ ID NO: 1916 - RNA, 21 nt, Homo sapiens
ucaccugagcucccgugccug

SEQ ID NO: 1917 - RNA, 21 nt, Homo sapiens
caggcacgggagcucagguga

SEQ ID NO: 1918 - RNA, 20 nt, Homo sapiens
aggcaugggaggucagguga

SEQ ID NO: 1919 - RNA, 20 nt, Homo sapiens
ucaccugaccucccaugccu

SEQ ID NO: 1920 - RNA, 23 nt, Homo sapiens
caucagcacccuauguccuuucu

SEQ ID NO: 1921 - RNA, 23 nt, Homo sapiens
agaaaggacauagggugcugaug

SEQ ID NO: 1922 - RNA, 22 nt, Homo sapiens
aaagacauaguugcaagauggg

SEQ ID NO: 1923 - RNA, 22 nt, Homo sapiens
cccaucuugcaacuaugucuuu

SEQ ID NO: 1924 - RNA, 22 nt, Homo sapiens
uuugugaccugguccacuaacc

SEQ ID NO: 1925 - RNA, 22 nt, Homo sapiens
gguuaguggaccaggucacaaa

SEQ ID NO: 1926 - RNA, 22 nt, Homo sapiens
gaugguugaccagagagcacac

SEQ ID NO: 1927 - RNA, 22 nt, Homo sapiens
gugugcucucuggucaaccauc

SEQ ID NO: 1928 - RNA, 20 nt, Homo sapiens
aaaagcuggguugagagggu

SEQ ID NO: 1929 - RNA, 20 nt, Homo sapiens
acccucucaacccagcuuuu

SEQ ID NO: 1930 - RNA, 21 nt, Homo sapiens
cacaagguauugguauuaccu

SEQ ID NO: 1931 - RNA, 21 nt, Homo sapiens
agguaauaccaauaccuugug

SEQ ID NO: 1932 - RNA, 22 nt, Homo sapiens
uaguaccaguaccuuguguuca

SEQ ID NO: 1933 - RNA, 22 nt, Homo sapiens
ugaacacaagguacugguacua

SEQ ID NO: 1934 - RNA, 22 nt, Homo sapiens
aguauucuguaccagggaaggu

SEQ ID NO: 1935 - RNA, 22 nt, Homo sapiens
accuucccugguacagaauacu

SEQ ID NO: 1936 - RNA, 22 nt, Homo sapiens
uggcaguguauuguuagcuggu

SEQ ID NO: 1937 - RNA, 22 nt, Homo sapiens
accagcuaacaauacacugcca

SEQ ID NO: 1938 - RNA, 22 nt, Homo sapiens
uauacaagggcaagcucucugu

SEQ ID NO: 1939 - RNA, 22 nt, Homo sapiens
acagagagcuugcccuuguaua

SEQ ID NO: 1940 - RNA, 22 nt, Homo sapiens
agcgagguugcccuuuguauau

SEQ ID NO: 1941 - RNA, 22 nt, Homo sapiens
auauacaaagggcaaccucgcu

SEQ ID NO: 1942 - RNA, 22 nt, Homo sapiens
caaucacuaacuccacugccau

SEQ ID NO: 1943 - RNA, 22 nt, Homo sapiens
auggcaguggaguuagugauug

SEQ ID NO: 1944 - RNA, 23 nt, Homo sapiens
uaggcagugucauuagcugauug

SEQ ID NO: 1945 - RNA, 23 nt, Homo sapiens
caaucagcuaaugacacugccua

SEQ ID NO: 1946 - RNA, 22 nt, Homo sapiens
cagccacaacuacccugccacu

SEQ ID NO: 1947 - RNA, 22 nt, Homo sapiens
aguggcaggguaguuguggcug

SEQ ID NO: 1948 - RNA, 22 nt, Homo sapiens
aggcaguguauuguuagcuggc

SEQ ID NO: 1949 - RNA, 22 nt, Homo sapiens
gccagcuaacaauacacugccu

SEQ ID NO: 1950 - RNA, 22 nt, Homo sapiens
aaucacuaaccacacggccagg

SEQ ID NO: 1951 - RNA, 22 nt, Homo sapiens
ccuggccgugugguuagugauu

SEQ ID NO: 1952 - RNA, 23 nt, Homo sapiens
aggcaguguaguuagcugauugc

SEQ ID NO: 1953 - RNA, 23 nt, Homo sapiens
gcaaucagcuaacuacacugccu

SEQ ID NO: 1954 - RNA, 20 nt, Homo sapiens
guccgcucggcgguggccca

SEQ ID NO: 1955 - RNA, 20 nt, Homo sapiens
ugggccaccgccgagcggac

SEQ ID NO: 1956 - RNA, 23 nt, Homo sapiens
gaacgccuguucuugccaggugg

SEQ ID NO: 1957 - RNA, 23 nt, Homo sapiens
ccaccuggcaagaacaggcguuc

SEQ ID NO: 1958 - RNA, 19 nt, Homo sapiens
aagugugcagggcacuggu

SEQ ID NO: 1959 - RNA, 19 nt, Homo sapiens
accagugcccugcacacuu

SEQ ID NO: 1960 - RNA, 21 nt, Homo sapiens
aggggugcuaucugugauuga

SEQ ID NO: 1961 - RNA, 21 nt, Homo sapiens
ucaaucacagauagcaccccu

SEQ ID NO: 1962 - RNA, 22 nt, Homo sapiens
cuuucagucagauguuugcugc

SEQ ID NO: 1963 - RNA, 22 nt, Homo sapiens
gcagcaaacaucugacugaaag

SEQ ID NO: 1964 - RNA, 22 nt, Homo sapiens
uguaaacauccccgacuggaag

SEQ ID NO: 1965 - RNA, 22 nt, Homo sapiens
cuuccagucggggauguuuaca

SEQ ID NO: 1966 - RNA, 22 nt, Homo sapiens
uguaaacauccucgacuggaag

SEQ ID NO: 1967 - RNA, 22 nt, Homo sapiens
cuuccagucgaggauguuuaca

SEQ ID NO: 1968 - RNA, 22 nt, Homo sapiens
agaaguaauugcgguuuugcca

SEQ ID NO: 1969 - RNA, 22 nt, Homo sapiens
uggcaaaaccgcaauuacuucu

SEQ ID NO: 1970 - RNA, 22 nt, Homo sapiens
caaaacuggcaauuacuuuugc

SEQ ID NO: 1971 - RNA, 22 nt, Homo sapiens
gcaaaaguaauugccaguuuug

SEQ ID NO: 1972 - RNA, 22 nt, Homo sapiens
aaaaguaauugcgaguuuuacc

SEQ ID NO: 1973 - RNA, 22 nt, Homo sapiens
gguaaaacucgcaauuacuuuu

SEQ ID NO: 1974 - RNA, 22 nt, Homo sapiens
caagaaccucaguugcuuuugu

SEQ ID NO: 1975 - RNA, 22 nt, Homo sapiens
acaaaagcaacugagguucuug

SEQ ID NO: 1976 - RNA, 22 nt, Homo sapiens
caaaaaucucaauuacuuuugc

SEQ ID NO: 1977 - RNA, 22 nt, Homo sapiens
gcaaaaguaauugagauuuuug

SEQ ID NO: 1978 - RNA, 22 nt, Homo sapiens
caaaaaccacaguuucuuuugc

SEQ ID NO: 1979 - RNA, 22 nt, Homo sapiens
gcaaaagaaacugugguuuuug

SEQ ID NO: 1980 - RNA, 22 nt, Homo sapiens
aaaaguaauugugguuuuugcc

SEQ ID NO: 1981 - RNA, 22 nt, Homo sapiens
ggcaaaaaccacaauuacuuuu

SEQ ID NO: 1982 - RNA, 21 nt, Homo sapiens
ugacaacuauggaugagcucu

SEQ ID NO: 1983 - RNA, 21 nt, Homo sapiens
agagcucauccauaguuguca

SEQ ID NO: 1984 - RNA, 21 nt, Homo sapiens
aacaggugacugguuagacaa

SEQ ID NO: 1985 - RNA, 21 nt, Homo sapiens
uugucuaaccagucaccuguu

SEQ ID NO: 1986 - RNA, 21 nt, Homo sapiens
aaaacggugagauuuuguuuu

SEQ ID NO: 1987 - RNA, 21 nt, Homo sapiens
aaaacaaaaucucaccguuuu

SEQ ID NO: 1988 - RNA, 21 nt, Homo sapiens
gcuaguccugacucagccagu

SEQ ID NO: 1989 - RNA, 21 nt, Homo sapiens
acuggcugagucaggacuagc

SEQ ID NO: 1990 - RNA, 21 nt, Homo sapiens
aggguaagcugaaccucugau

SEQ ID NO: 1991 - RNA, 21 nt, Homo sapiens
aucagagguucagcuuacccu

SEQ ID NO: 1992 - RNA, 22 nt, Homo sapiens
auauuaccauuagcucaucuuu

SEQ ID NO: 1993 - RNA, 22 nt, Homo sapiens
aaagaugagcuaaugguaauau

SEQ ID NO: 1994 - RNA, 22 nt, Homo sapiens
gaugagcucauuguaauaugag

SEQ ID NO: 1995 - RNA, 22 nt, Homo sapiens
cucauauuacaaugagcucauc

SEQ ID NO: 1996 - RNA, 19 nt, Homo sapiens
agguugacauacguuuccc

SEQ ID NO: 1997 - RNA, 19 nt, Homo sapiens
gggaaacguaugucaaccu

SEQ ID NO: 1998 - RNA, 20 nt, Homo sapiens
auguauaaauguauacacac

SEQ ID NO: 1999 - RNA, 20 nt, Homo sapiens
guguguauacauuuauacau

SEQ ID NO: 2000 - RNA, 24 nt, Homo sapiens
cugaagugauguguaacugaucag

SEQ ID NO: 2001 - RNA, 24 nt, Homo sapiens
cugaucaguuacacaucacuucag

SEQ ID NO: 2002 - RNA, 22 nt, Homo sapiens
aagauguggaaaaauuggaauc

SEQ ID NO: 2003 - RNA, 22 nt, Homo sapiens
gauuccaauuuuuccacaucuu

SEQ ID NO: 2004 - RNA, 21 nt, Homo sapiens
uagauaaaauauugguaccug

SEQ ID NO: 2005 - RNA, 21 nt, Homo sapiens
cagguaccaauauuuuaucua

SEQ ID NO: 2006 - RNA, 21 nt, Homo sapiens
cuucuugugcucuaggauugu

SEQ ID NO: 2007 - RNA, 21 nt, Homo sapiens
acaauccuagagcacaagaag

SEQ ID NO: 2008 - RNA, 22 nt, Homo sapiens
uaugcauuguauuuuuaggucc

SEQ ID NO: 2009 - RNA, 22 nt, Homo sapiens
ggaccuaaaaauacaaugcaua

SEQ ID NO: 2010 - RNA, 21 nt, Homo sapiens
uuuccauaggugaugagucac

SEQ ID NO: 2011 - RNA, 21 nt, Homo sapiens
gugacucaucaccuauggaaa

SEQ ID NO: 2012 - RNA, 21 nt, Homo sapiens
uuggccacaauggguuagaac

SEQ ID NO: 2013 - RNA, 21 nt, Homo sapiens
guucuaacccauuguggccaa

SEQ ID NO: 2014 - RNA, 22 nt, Homo sapiens
ugugucacucgaugaccacugu

SEQ ID NO: 2015 - RNA, 22 nt, Homo sapiens
acaguggucaucgagugacaca

SEQ ID NO: 2016 - RNA, 23 nt, Homo sapiens
acuuacagacaagagccuugcuc

SEQ ID NO: 2017 - RNA, 23 nt, Homo sapiens
gagcaaggcucuugucuguaagu

SEQ ID NO: 2018 - RNA, 19 nt, Homo sapiens
aggcugcggaauucaggac

SEQ ID NO: 2019 - RNA, 19 nt, Homo sapiens
guccugaauuccgcagccu

SEQ ID NO: 2020 - RNA, 23 nt, Homo sapiens
uaaaucccauggugccuucuccu

SEQ ID NO: 2021 - RNA, 23 nt, Homo sapiens
aggagaaggcaccaugggauuua

SEQ ID NO: 2022 - RNA, 21 nt, Homo sapiens
aaacuacugaaaaucaaagau

SEQ ID NO: 2023 - RNA, 21 nt, Homo sapiens
aucuuugauuuucaguaguuu

SEQ ID NO: 2024 - RNA, 21 nt, Homo sapiens
guucaaauccagaucuauaac

SEQ ID NO: 2025 - RNA, 21 nt, Homo sapiens
guuauagaucuggauuugaac

SEQ ID NO: 2026 - RNA, 19 nt, Homo sapiens
ccgguuccagucccuggag

SEQ ID NO: 2027 - RNA, 19 nt, Homo sapiens
cuccagggacuggaaccgg

SEQ ID NO: 2028 - RNA, 20 nt, Homo sapiens
aggguguuucucucaucucu

SEQ ID NO: 2029 - RNA, 20 nt, Homo sapiens
agagaugagagaaacacccu

SEQ ID NO: 2030 - RNA, 24 nt, Homo sapiens
gaccuggacauguuugugcccagu

SEQ ID NO: 2031 - RNA, 24 nt, Homo sapiens
acugggcacaaacauguccagguc

SEQ ID NO: 2032 - RNA, 20 nt, Homo sapiens
auggagauagauauagaaau

SEQ ID NO: 2033 - RNA, 20 nt, Homo sapiens
auuucuauaucuaucuccau

SEQ ID NO: 2034 - RNA, 19 nt, Homo sapiens
agcugucugaaaaugucuu

SEQ ID NO: 2035 - RNA, 19 nt, Homo sapiens
aagacauuuucagacagcu

SEQ ID NO: 2036 - RNA, 21 nt, Homo sapiens
agaccuggcccagaccucagc

SEQ ID NO: 2037 - RNA, 21 nt, Homo sapiens
gcugaggucugggccaggucu

SEQ ID NO: 2038 - RNA, 23 nt, Homo sapiens
acuugggcacugaaacaaugucc

SEQ ID NO: 2039 - RNA, 23 nt, Homo sapiens
ggacauuguuucagugcccaagu

SEQ ID NO: 2040 - RNA, 24 nt, Homo sapiens
acugggggcuuucgggcucugcgu

SEQ ID NO: 2041 - RNA, 24 nt, Homo sapiens
acgcagagcccgaaagcccccagu

SEQ ID NO: 2042 - RNA, 23 nt, Homo sapiens
aucgcugcgguugcgagcgcugu

SEQ ID NO: 2043 - RNA, 23 nt, Homo sapiens
acagcgcucgcaaccgcagcgau

SEQ ID NO: 2044 - RNA, 22 nt, Homo sapiens
gucccucuccaaaugugucuug

SEQ ID NO: 2045 - RNA, 22 nt, Homo sapiens
caagacacauuuggagagggac

SEQ ID NO: 2046 - RNA, 22 nt, Homo sapiens
acuuguaugcuagcucagguag

SEQ ID NO: 2047 - RNA, 22 nt, Homo sapiens
cuaccugagcuagcauacaagu

SEQ ID NO: 2048 - RNA, 22 nt, Homo sapiens
uuuaggauaagcuugacuuuug

SEQ ID NO: 2049 - RNA, 22 nt, Homo sapiens
caaaagucaagcuuauccuaaa

SEQ ID NO: 2050 - RNA, 21 nt, Homo sapiens
guguugaaacaaucucuacug

SEQ ID NO: 2051 - RNA, 21 nt, Homo sapiens
caguagagauuguuucaacac

SEQ ID NO: 2052 - RNA, 22 nt, Homo sapiens
uaugucugcugaccaucaccuu

SEQ ID NO: 2053 - RNA, 22 nt, Homo sapiens
aaggugauggucagcagacaua

SEQ ID NO: 2054 - RNA, 22 nt, Homo sapiens
ggggcuggggccggggccgagc

SEQ ID NO: 2055 - RNA, 22 nt, Homo sapiens
gcucggccccggccccagcccc

SEQ ID NO: 2056 - RNA, 22 nt, Homo sapiens
ugagguaguagguuguaugguu

SEQ ID NO: 2057 - RNA, 22 nt, Homo sapiens
aaccauacaaccuacuaccuca

SEQ ID NO: 2058 - RNA, 21 nt, Homo sapiens
gugucuuuugcucugcaguca

SEQ ID NO: 2059 - RNA, 21 nt, Homo sapiens
ugacugcagagcaaaagacac

SEQ ID NO: 2060 - RNA, 24 nt, Homo sapiens
ccccgggaacgucgagacuggagc

SEQ ID NO: 2061 - RNA, 24 nt, Homo sapiens
gcuccagucucgacguucccgggg

SEQ ID NO: 2062 - RNA, 22 nt, Homo sapiens
acccgucccguucguccccgga

SEQ ID NO: 2063 - RNA, 22 nt, Homo sapiens
uccggggacgaacgggacgggu

SEQ ID NO: 2064 - RNA, 22 nt, Homo sapiens
augggugaauuuguagaaggau

SEQ ID NO: 2065 - RNA, 22 nt, Homo sapiens
auccuucuacaaauucacccau

SEQ ID NO: 2066 - RNA, 22 nt, Homo sapiens
cuggacugagccgugcuacugg

SEQ ID NO: 2067 - RNA, 22 nt, Homo sapiens
ccaguagcacggcucaguccag

SEQ ID NO: 2068 - RNA, 22 nt, Homo sapiens
cuggacugagccaugcuacugg

SEQ ID NO: 2069 - RNA, 22 nt, Homo sapiens
ccaguagcauggcucaguccag

SEQ ID NO: 2070 - RNA, 22 nt, Homo sapiens
uacguagauauauauguauuuu

SEQ ID NO: 2071 - RNA, 22 nt, Homo sapiens
aaaauacauauauaucuacgua

SEQ ID NO: 2072 - RNA, 24 nt, Homo sapiens
aaauauauauauauauguacguau

SEQ ID NO: 2073 - RNA, 22 nt, Homo sapiens
gcucuuuucauuaauguagaca

SEQ ID NO: 2074 - RNA, 22 nt, Homo sapiens
ugcuggaucagugguucgaguc

SEQ ID NO: 2075 - RNA, 22 nt, Homo sapiens
gacucgaaccacugauccagca

SEQ ID NO: 2076 - RNA, 19 nt, Homo sapiens
uggauuuuuggaucaggga

SEQ ID NO: 2077 - RNA, 19 nt, Homo sapiens
ucccugauccaaaaaucca

SEQ ID NO: 2078 - RNA, 22 nt, Homo sapiens
uuauaaagcaaugagacugauu

SEQ ID NO: 2079 - RNA, 22 nt, Homo sapiens
aaucagucucauugcuuuauaa

SEQ ID NO: 2080 - RNA, 23 nt, Homo sapiens
uagugcaauauugcuuauagggu

SEQ ID NO: 2081 - RNA, 23 nt, Homo sapiens
acccuauaagcaauauugcacua

SEQ ID NO: 2082 - RNA, 22 nt, Homo sapiens
acccuaucaauauugucucugc

SEQ ID NO: 2083 - RNA, 22 nt, Homo sapiens
gcagagacaauauugauagggu

SEQ ID NO: 2084 - RNA, 17 nt, Homo sapiens
uaagugcuuccaugcuu

SEQ ID NO: 2085 - RNA, 17 nt, Homo sapiens
aagcauggaagcacuua

SEQ ID NO: 2086 - RNA, 22 nt, Homo sapiens
ucggccugaccacccaccccac

SEQ ID NO: 2087 - RNA, 22 nt, Homo sapiens
gugggguggguggucaggccga

SEQ ID NO: 2088 - RNA, 21 nt, Homo sapiens
ggggggggggggggggggccg

SEQ ID NO: 2089 - RNA, 21 nt, Homo sapiens
cggcccccccccccccccccc

SEQ ID NO: 2090 - RNA, 22 nt, Homo sapiens
cuauacgaccugcugccuuucu

SEQ ID NO: 2091 - RNA, 22 nt, Homo sapiens
agaaaggcagcaggucguauag

SEQ ID NO: 2092 - RNA, 22 nt, Homo sapiens
agagguaguagguugcauaguu

SEQ ID NO: 2093 - RNA, 22 nt, Homo sapiens
aacuaugcaaccuacuaccucu

SEQ ID NO: 2094 - RNA, 22 nt, Homo sapiens
ccgcacuguggguacuugcugc

SEQ ID NO: 2095 - RNA, 22 nt, Homo sapiens
gcagcaaguacccacagugcgg

SEQ ID NO: 2096 - RNA, 21 nt, Homo sapiens
uaaagugcugacagugcagau

SEQ ID NO: 2097 - RNA, 21 nt, Homo sapiens
aucugcacugucagcacuuua

SEQ ID NO: 2098 - RNA, 22 nt, Homo sapiens
aacuggaucaauuauaggagug

SEQ ID NO: 2099 - RNA, 22 nt, Homo sapiens
cacuccuauaauugauccaguu

SEQ ID NO: 2100 - RNA, 26 nt, Homo sapiens
aaguaguugguuuguaugagaugguu

SEQ ID NO: 2101 - RNA, 26 nt, Homo sapiens
aaccaucucauacaaaccaacuacuu

SEQ ID NO: 2102 - RNA, 21 nt, Homo sapiens
aagugaucuaaaggccuacau

SEQ ID NO: 2103 - RNA, 21 nt, Homo sapiens
auguaggccuuuagaucacuu

SEQ ID NO: 2104 - RNA, 22 nt, Homo sapiens
ucagaugaucuaaaggccuaua

SEQ ID NO: 2105 - RNA, 22 nt, Homo sapiens
uauaggccuuuagaucaucuga

SEQ ID NO: 2106 - RNA, 21 nt, Homo sapiens
uaggccuuuagaucacuuaaa

SEQ ID NO: 2107 - RNA, 21 nt, Homo sapiens
uuuaagugaucuaaaggccua

SEQ ID NO: 2108 - RNA, 21 nt, Homo sapiens
acucuagcugccaaaggcgcu

SEQ ID NO: 2109 - RNA, 21 nt, Homo sapiens
agcgccuuuggcagcuagagu

SEQ ID NO: 2110 - RNA, 22 nt, Homo sapiens
agaaggaaauugaauucauuua

SEQ ID NO: 2111 - RNA, 22 nt, Homo sapiens
uaaaugaauucaauuuccuucu

SEQ ID NO: 2112 - RNA, 21 nt, Homo sapiens
agagaagaagaucagccugca

SEQ ID NO: 2113 - RNA, 21 nt, Homo sapiens
ugcaggcugaucuucuucucu

SEQ ID NO: 2114 - RNA, 24 nt, Homo sapiens
agccuggaagcuggagccugcagu

SEQ ID NO: 2115 - RNA, 24 nt, Homo sapiens
acugcaggcuccagcuuccaggcu

SEQ ID NO: 2116 - RNA, 23 nt, Homo sapiens
aggaugagcaaagaaaguagauu

SEQ ID NO: 2117 - RNA, 23 nt, Homo sapiens
aaucuacuuucuuugcucauccu

SEQ ID NO: 2118 - RNA, 22 nt, Homo sapiens
aaccacuuucuuugcucaucca

SEQ ID NO: 2119 - RNA, 22 nt, Homo sapiens
uggaugagcaaagaaagugguu

SEQ ID NO: 2120 - RNA, 22 nt, Homo sapiens
cggaugagcaaagaaagugguu

SEQ ID NO: 2121 - RNA, 22 nt, Homo sapiens
aaccacuuucuuugcucauccg

SEQ ID NO: 2122 - RNA, 22 nt, Homo sapiens
aggcauugacuucucacuagcu

SEQ ID NO: 2123 - RNA, 22 nt, Homo sapiens
agcuagugagaagucaaugccu

SEQ ID NO: 2124 - RNA, 21 nt, Homo sapiens
agugaaugauggguucugacc

SEQ ID NO: 2125 - RNA, 21 nt, Homo sapiens
ggucagaacccaucauucacu

SEQ ID NO: 2126 - RNA, 21 nt, Homo sapiens
aguuaggauuaggucguggaa

SEQ ID NO: 2127 - RNA, 21 nt, Homo sapiens
uuccacgaccuaauccuaacu

SEQ ID NO: 2128 - RNA, 19 nt, Homo sapiens
auggauaaggcuuuggcuu

SEQ ID NO: 2129 - RNA, 19 nt, Homo sapiens
aagccaaagccuuauccau

SEQ ID NO: 2130 - RNA, 22 nt, Homo sapiens
augguacccuggcauacugagu

SEQ ID NO: 2131 - RNA, 22 nt, Homo sapiens
acucaguaugccaggguaccau

SEQ ID NO: 2132 - RNA, 23 nt, Homo sapiens
caagucuuauuugagcaccuguu

SEQ ID NO: 2133 - RNA, 23 nt, Homo sapiens
aacaggugcucaaauaagacuug

SEQ ID NO: 2134 - RNA, 22 nt, Homo sapiens
caggauguggucaaguguuguu

SEQ ID NO: 2135 - RNA, 22 nt, Homo sapiens
aacaacacuugaccacauccug

SEQ ID NO: 2136 - RNA, 23 nt, Homo sapiens
ccucagggcuguagaacagggcu

SEQ ID NO: 2137 - RNA, 23 nt, Homo sapiens
agcccuguucuacagcccugagg

SEQ ID NO: 2138 - RNA, 21 nt, Homo sapiens
ccuguugaaguguaaucccca

SEQ ID NO: 2139 - RNA, 21 nt, Homo sapiens
uggggauuacacuucaacagg

SEQ ID NO: 2140 - RNA, 18 nt, Homo sapiens
cgggcguggugguggggg

SEQ ID NO: 2141 - RNA, 18 nt, Homo sapiens
cccccaccaccacgcccg

SEQ ID NO: 2142 - RNA, 20 nt, Homo sapiens
cgggcgugguggugggggug

SEQ ID NO: 2143 - RNA, 20 nt, Homo sapiens
cacccccaccaccacgcccg

SEQ ID NO: 2144 - RNA, 23 nt, Homo sapiens
cuggagauauggaagagcugugu

SEQ ID NO: 2145 - RNA, 23 nt, Homo sapiens
acacagcucuuccauaucuccag

SEQ ID NO: 2146 - RNA, 26 nt, Homo sapiens
gaugaugauggcagcaaauucugaaa

SEQ ID NO: 2147 - RNA, 26 nt, Homo sapiens
uuucagaauuugcugccaucaucauc

SEQ ID NO: 2148 - RNA, 25 nt, Homo sapiens
gggcgacaaagcaagacucuuucuu

SEQ ID NO: 2149 - RNA, 25 nt, Homo sapiens
aagaaagagucuugcuuugucgccc

SEQ ID NO: 2150 - RNA, 25 nt, Homo sapiens
gaacccaugagguugaggcugcagu

SEQ ID NO: 2151 - RNA, 25 nt, Homo sapiens
acugcagccucaaccucauggguuc

SEQ ID NO: 2152 - RNA, 17 nt, Homo sapiens
gugggggagaggcuguc

SEQ ID NO: 2153 - RNA, 17 nt, Homo sapiens
gacagccucucccccac

SEQ ID NO: 2154 - RNA, 20 nt, Homo sapiens
uaaagagcccuguggagaca

SEQ ID NO: 2155 - RNA, 20 nt, Homo sapiens
ugucuccacagggcucuuua

SEQ ID NO: 2156 - RNA, 22 nt, Homo sapiens
uaguacugugcauaucaucuau

SEQ ID NO: 2157 - RNA, 22 nt, Homo sapiens
auagaugauaugcacaguacua

SEQ ID NO: 2158 - RNA, 20 nt, Homo sapiens
ucguuugccuuuuucugcuu

SEQ ID NO: 2159 - RNA, 20 nt, Homo sapiens
aagcagaaaaaggcaaacga

SEQ ID NO: 2160 - RNA, 21 nt, Homo sapiens
uggacugcccugaucuggaga

SEQ ID NO: 2161 - RNA, 21 nt, Homo sapiens
ucuccagaucagggcagucca

SEQ ID NO: 2162 - RNA, 22 nt, Homo sapiens
uggguggucuggagauuugugc

SEQ ID NO: 2163 - RNA, 22 nt, Homo sapiens
gcacaaaucuccagaccaccca

SEQ ID NO: 2164 - RNA, 22 nt, Homo sapiens
ugugagguuggcauuguugucu

SEQ ID NO: 2165 - RNA, 22 nt, Homo sapiens
agacaacaaugccaaccucaca

SEQ ID NO: 2166 - RNA, 17 nt, Homo sapiens
uucaaguaauucaggug

SEQ ID NO: 2167 - RNA, 17 nt, Homo sapiens
caccugaauuacuugaa

SEQ ID NO: 2168 - RNA, 22 nt, Homo sapiens
uucuggaauucugugugaggga

SEQ ID NO: 2169 - RNA, 22 nt, Homo sapiens
ucccucacacagaauuccagaa

SEQ ID NO: 2170 - RNA, 22 nt, Homo sapiens
uuuucaacucuaaugggagaga

SEQ ID NO: 2171 - RNA, 22 nt, Homo sapiens
ucucucccauuagaguugaaaa

SEQ ID NO: 2172 - RNA, 18 nt, Homo sapiens
acguuggcucugguggug

SEQ ID NO: 2173 - RNA, 18 nt, Homo sapiens
caccaccagagccaacgu

SEQ ID NO: 2174 - RNA, 22 nt, Homo sapiens
ccaccuccccugcaaacgucca

SEQ ID NO: 2175 - RNA, 22 nt, Homo sapiens
uggacguuugcaggggaggugg

SEQ ID NO: 2176 - RNA, 22 nt, Homo sapiens
acucggcguggcgucggucgug

SEQ ID NO: 2177 - RNA, 22 nt, Homo sapiens
cacgaccgacgccacgccgagu

SEQ ID NO: 2178 - RNA, 21 nt, Homo sapiens
ucgaccggaccucgaccggcu

SEQ ID NO: 2179 - RNA, 21 nt, Homo sapiens
agccggucgagguccggucga

SEQ ID NO: 2180 - RNA, 22 nt, Homo sapiens
ugagaacugaauuccauaggcu

SEQ ID NO: 2181 - RNA, 22 nt, Homo sapiens
agccuauggaauucaguucuca

SEQ ID NO: 2182 - RNA, 22 nt, Homo sapiens
aaucauacacgguugaccuauu

SEQ ID NO: 2183 - RNA, 22 nt, Homo sapiens
aauaggucaaccguguaugauu

SEQ ID NO: 2184 - RNA, 22 nt, Homo sapiens
uagguuauccguguugccuucg

SEQ ID NO: 2185 - RNA, 22 nt, Homo sapiens
cgaaggcaacacggauaaccua

SEQ ID NO: 2186 - RNA, 21 nt, Homo sapiens
ccaguccugugccugccgccu

SEQ ID NO: 2187 - RNA, 21 nt, Homo sapiens
aggcggcaggcacaggacugg

SEQ ID NO: 2188 - RNA, 22 nt, Homo sapiens
ucugcccccuccgcugcugcca

SEQ ID NO: 2189 - RNA, 22 nt, Homo sapiens
uggcagcagcggagggggcaga

SEQ ID NO: 2190 - RNA, 22 nt, Homo sapiens
ggaggggucccgcacugggagg

SEQ ID NO: 2191 - RNA, 22 nt, Homo sapiens
ccucccagugcgggaccccucc

SEQ ID NO: 2192 - RNA, 22 nt, Homo sapiens
cccugugcccggcccacuucug

SEQ ID NO: 2193 - RNA, 22 nt, Homo sapiens
cagaagugggccgggcacaggg

SEQ ID NO: 2194 - RNA, 20 nt, Homo sapiens
ccccagggcgacgcggcggg

SEQ ID NO: 2195 - RNA, 20 nt, Homo sapiens
cccgccgcgucgcccugggg

SEQ ID NO: 2196 - RNA, 22 nt, Homo sapiens
accuugccuugcugcccgggcc

SEQ ID NO: 2197 - RNA, 22 nt, Homo sapiens
ggcccgggcagcaaggcaaggu

SEQ ID NO: 2198 - RNA, 21 nt, Homo sapiens
auuugugcuuggcucugucac

SEQ ID NO: 2199 - RNA, 21 nt, Homo sapiens
gugacagagccaagcacaaau

SEQ ID NO: 2200 - RNA, 22 nt, Homo sapiens
auuguccuugcuguuuggagau

SEQ ID NO: 2201 - RNA, 22 nt, Homo sapiens
aucuccaaacagcaaggacaau

SEQ ID NO: 2202 - RNA, 21 nt, Homo sapiens
auccccagauacaauggacaa

SEQ ID NO: 2203 - RNA, 21 nt, Homo sapiens
uuguccauuguaucuggggau

SEQ ID NO: 2204 - RNA, 23 nt, Homo sapiens
cagugcaauaguauugucaaagc

SEQ ID NO: 2205 - RNA, 23 nt, Homo sapiens
gcuuugacaauacuauugcacug

SEQ ID NO: 2206 - RNA, 22 nt, Homo sapiens
gcucugacuuuauugcacuacu

SEQ ID NO: 2207 - RNA, 22 nt, Homo sapiens
aguagugcaauaaagucagagc

SEQ ID NO: 2208 - RNA, 23 nt, Homo sapiens
uaagugcuuccauguuuuaguag

SEQ ID NO: 2209 - RNA, 23 nt, Homo sapiens
cuacuaaaacauggaagcacuua

SEQ ID NO: 2210 - RNA, 22 nt, Homo sapiens
acuuuaacauggaagugcuuuc

SEQ ID NO: 2211 - RNA, 22 nt, Homo sapiens
gaaagcacuuccauguuaaagu

SEQ ID NO: 2212 - RNA, 23 nt, Homo sapiens
uaagugcuuccauguuucagugg

SEQ ID NO: 2213 - RNA, 23 nt, Homo sapiens
ccacugaaacauggaagcacuua

SEQ ID NO: 2214 - RNA, 22 nt, Homo sapiens
uuuaacauggggguaccugcug

SEQ ID NO: 2215 - RNA, 22 nt, Homo sapiens
cagcagguacccccauguuaaa

SEQ ID NO: 2216 - RNA, 23 nt, Homo sapiens
uaagugcuuccauguuugagugu

SEQ ID NO: 2217 - RNA, 23 nt, Homo sapiens
acacucaaacauggaagcacuua

SEQ ID NO: 2218 - RNA, 22 nt, Homo sapiens
acuuuaacauggaggcacuugc

SEQ ID NO: 2219 - RNA, 22 nt, Homo sapiens
gcaagugccuccauguuaaagu

SEQ ID NO: 2220 - RNA, 22 nt, Homo sapiens
aauugcacuuuagcaaugguga

SEQ ID NO: 2221 - RNA, 22 nt, Homo sapiens
ucaccauugcuaaagugcaauu

SEQ ID NO: 2222 - RNA, 22 nt, Homo sapiens
acuguugcuaauaugcaacucu

SEQ ID NO: 2223 - RNA, 22 nt, Homo sapiens
agaguugcauauuagcaacagu

SEQ ID NO: 2224 - RNA, 23 nt, Homo sapiens
agcucggucugaggccccucagu

SEQ ID NO: 2225 - RNA, 23 nt, Homo sapiens
acugaggggccucagaccgagcu

SEQ ID NO: 2226 - RNA, 22 nt, Homo sapiens
aaaaacugagacuacuuuugca

SEQ ID NO: 2227 - RNA, 22 nt, Homo sapiens
ugcaaaaguagucucaguuuuu

SEQ ID NO: 2228 - RNA, 19 nt, Homo sapiens
aaaaacuguaauuacuuuu

SEQ ID NO: 2229 - RNA, 19 nt, Homo sapiens
aaaaguaauuacaguuuuu

SEQ ID NO: 2230 - RNA, 22 nt, Homo sapiens
aaaacuguaauuacuuuuguac

SEQ ID NO: 2231 - RNA, 22 nt, Homo sapiens
guacaaaaguaauuacaguuuu

SEQ ID NO: 2232 - RNA, 23 nt, Homo sapiens
ugcaaaaguaauugcaguuuuug

SEQ ID NO: 2233 - RNA, 23 nt, Homo sapiens
caaaaacugcaauuacuuuugca

SEQ ID NO: 2234 - RNA, 23 nt, Homo sapiens
caaaaaccgcaauuacuuuugca

SEQ ID NO: 2235 - RNA, 23 nt, Homo sapiens
ugcaaaaguaauugcgguuuuug

SEQ ID NO: 2236 - RNA, 22 nt, Homo sapiens
aaaaguaaucgcgguuuuuguc

SEQ ID NO: 2237 - RNA, 22 nt, Homo sapiens
gacaaaaaccgcgauuacuuuu

SEQ ID NO: 2238 - RNA, 22 nt, Homo sapiens
aaaaguacuugcggauuuugcu

SEQ ID NO: 2239 - RNA, 22 nt, Homo sapiens
agcaaaauccgcaaguacuuuu

SEQ ID NO: 2240 - RNA, 22 nt, Homo sapiens
aaaaguauuugcggguuuuguc

SEQ ID NO: 2241 - RNA, 22 nt, Homo sapiens
gacaaaacccgcaaauacuuuu

SEQ ID NO: 2242 - RNA, 21 nt, Homo sapiens
caaagguauuugugguuuuug

SEQ ID NO: 2243 - RNA, 21 nt, Homo sapiens
caaaaaccacaaauaccuuug

SEQ ID NO: 2244 - RNA, 22 nt, Homo sapiens
ccaaaacugcaguuacuuuugc

SEQ ID NO: 2245 - RNA, 22 nt, Homo sapiens
gcaaaaguaacugcaguuuugg

SEQ ID NO: 2246 - RNA, 22 nt, Homo sapiens
aaaaguaauugcgguuuuugcc

SEQ ID NO: 2247 - RNA, 22 nt, Homo sapiens
ggcaaaaaccgcaauuacuuuu

SEQ ID NO: 2248 - RNA, 22 nt, Homo sapiens
uagcaaaaacugcaguuacuuu

SEQ ID NO: 2249 - RNA, 22 nt, Homo sapiens
aaaguaacugcaguuuuugcua

SEQ ID NO: 2250 - RNA, 20 nt, Homo sapiens
ggagguugggaagggcagag

SEQ ID NO: 2251 - RNA, 20 nt, Homo sapiens
cucugcccuucccaaccucc

SEQ ID NO: 2252 - RNA, 18 nt, Homo sapiens
ugaggcgggggggcgagc

SEQ ID NO: 2253 - RNA, 18 nt, Homo sapiens
gcucgcccccccgccuca

SEQ ID NO: 2254 - RNA, 20 nt, Homo sapiens
agagaugaagcgggggggcg

SEQ ID NO: 2255 - RNA, 20 nt, Homo sapiens
cgcccccccgcuucaucucu

SEQ ID NO: 2256 - RNA, 24 nt, Homo sapiens
ggaggccgggguggggcggggcgg

SEQ ID NO: 2257 - RNA, 24 nt, Homo sapiens
ccgccccgccccaccccggccucc

SEQ ID NO: 2258 - RNA, 19 nt, Homo sapiens
ggggagcgaggggcggggc

SEQ ID NO: 2259 - RNA, 19 nt, Homo sapiens
gccccgccccucgcucccc

SEQ ID NO: 2260 - RNA, 23 nt, Homo sapiens
uauucauuuauccccagccuaca

SEQ ID NO: 2261 - RNA, 23 nt, Homo sapiens
uguaggcuggggauaaaugaaua

SEQ ID NO: 2262 - RNA, 24 nt, Homo sapiens
acuggcuagggaaaaugauuggau

SEQ ID NO: 2263 - RNA, 24 nt, Homo sapiens
auccaaucauuuucccuagccagu

SEQ ID NO: 2264 - RNA, 22 nt, Homo sapiens
uucauuugccucccagccuaca

SEQ ID NO: 2265 - RNA, 22 nt, Homo sapiens
uguaggcugggaggcaaaugaa

SEQ ID NO: 2266 - RNA, 24 nt, Homo sapiens
ugggcuaagggagaugauugggua

SEQ ID NO: 2267 - RNA, 24 nt, Homo sapiens
uacccaaucaucucccuuagccca

SEQ ID NO: 2268 - RNA, 22 nt, Homo sapiens
acuccagccccacagccucagc

SEQ ID NO: 2269 - RNA, 22 nt, Homo sapiens
gcugaggcuguggggcuggagu

SEQ ID NO: 2270 - RNA, 22 nt, Homo sapiens
aggaggaauuggugcuggucuu

SEQ ID NO: 2271 - RNA, 22 nt, Homo sapiens
aagaccagcaccaauuccuccu

SEQ ID NO: 2272 - RNA, 22 nt, Homo sapiens
aggcagcgggguguaguggaua

SEQ ID NO: 2273 - RNA, 22 nt, Homo sapiens
uauccacuacaccccgcugccu

SEQ ID NO: 2274 - RNA, 22 nt, Homo sapiens
uccauuacacuacccugccucu

SEQ ID NO: 2275 - RNA, 22 nt, Homo sapiens
agaggcaggguaguguaaugga

SEQ ID NO: 2276 - RNA, 22 nt, Homo sapiens
acugcugagcuagcacuucccg

SEQ ID NO: 2277 - RNA, 22 nt, Homo sapiens
cgggaagugcuagcucagcagu

SEQ ID NO: 2278 - RNA, 23 nt, Homo sapiens
caaagugcuguucgugcagguag

SEQ ID NO: 2279 - RNA, 23 nt, Homo sapiens
cuaccugcacgaacagcacuuug

SEQ ID NO: 2280 - RNA, 23 nt, Homo sapiens
cacccggcugugugcacaugugc

SEQ ID NO: 2281 - RNA, 23 nt, Homo sapiens
gcacaugugcacacagccgggug

SEQ ID NO: 2282 - RNA, 23 nt, Homo sapiens
agcuucuuuacagugcugccuug

SEQ ID NO: 2283 - RNA, 23 nt, Homo sapiens
caaggcagcacuguaaagaagcu

SEQ ID NO: 2284 - RNA, 23 nt, Homo sapiens
agcagcauuguacagggcuauga

SEQ ID NO: 2285 - RNA, 23 nt, Homo sapiens
ucauagcccuguacaaugcugcu

SEQ ID NO: 2286 - RNA, 17 nt, Homo sapiens
ccugagaaaagggccaa

SEQ ID NO: 2287 - RNA, 17 nt, Homo sapiens
uuggcccuuuucucagg

SEQ ID NO: 2288 - RNA, 19 nt, Homo sapiens
ggccacugagucagcacca

SEQ ID NO: 2289 - RNA, 19 nt, Homo sapiens
uggugcugacucaguggcc

SEQ ID NO: 2290 - RNA, 18 nt, Homo sapiens
agggcauguccagggggu

SEQ ID NO: 2291 - RNA, 18 nt, Homo sapiens
acccccuggacaugcccu

SEQ ID NO: 2292 - RNA, 23 nt, Homo sapiens
gccuggagcuacuccaccaucuc

SEQ ID NO: 2293 - RNA, 23 nt, Homo sapiens
gagaugguggaguagcuccaggc

SEQ ID NO: 2294 - RNA, 17 nt, Homo sapiens
caguguucagagaugga

SEQ ID NO: 2295 - RNA, 17 nt, Homo sapiens
uccaucucugaacacug

SEQ ID NO: 2296 - RNA, 18 nt, Homo sapiens
aucugaccugaugaaggu

SEQ ID NO: 2297 - RNA, 18 nt, Homo sapiens
accuucaucaggucagau

SEQ ID NO: 2298 - RNA, 18 nt, Homo sapiens
ccagagguggggacugag

SEQ ID NO: 2299 - RNA, 18 nt, Homo sapiens
cucaguccccaccucugg

SEQ ID NO: 2300 - RNA, 17 nt, Homo sapiens
ccccgccaccgccuugg

SEQ ID NO: 2301 - RNA, 17 nt, Homo sapiens
ccaaggcgguggcgggg

SEQ ID NO: 2302 - RNA, 22 nt, Homo sapiens
caguugggucuaggggucagga

SEQ ID NO: 2303 - RNA, 22 nt, Homo sapiens
uccugaccccuagacccaacug

SEQ ID NO: 2304 - RNA, 19 nt, Homo sapiens
cuuggggcauggaguccca

SEQ ID NO: 2305 - RNA, 19 nt, Homo sapiens
ugggacuccaugccccaag

SEQ ID NO: 2306 - RNA, 16 nt, Homo sapiens
aggaaacagggaccca

SEQ ID NO: 2307 - RNA, 16 nt, Homo sapiens
ugggucccuguuuccu

SEQ ID NO: 2308 - RNA, 17 nt, Homo sapiens
gacauucagacuaccug

SEQ ID NO: 2309 - RNA, 17 nt, Homo sapiens
cagguagucugaauguc

SEQ ID NO: 2310 - RNA, 18 nt, Homo sapiens
auucuaagugccuuggcc

SEQ ID NO: 2311 - RNA, 18 nt, Homo sapiens
ggccaaggcacuuagaau

SEQ ID NO: 2312 - RNA, 17 nt, Homo sapiens
acucagucauggucauu

SEQ ID NO: 2313 - RNA, 17 nt, Homo sapiens
aaugaccaugacugagu

SEQ ID NO: 2314 - RNA, 19 nt, Homo sapiens
cugugggcucagcucuggg

SEQ ID NO: 2315 - RNA, 19 nt, Homo sapiens
cccagagcugagcccacag

SEQ ID NO: 2316 - RNA, 16 nt, Homo sapiens
cuaggaggccuuggcc

SEQ ID NO: 2317 - RNA, 16 nt, Homo sapiens
ggccaaggccuccuag

SEQ ID NO: 2318 - RNA, 16 nt, Homo sapiens
uccagcucgguggcac

SEQ ID NO: 2319 - RNA, 16 nt, Homo sapiens
gugccaccgagcugga

SEQ ID NO: 2320 - RNA, 21 nt, Homo sapiens
ggcuccuccucucaggaugug

SEQ ID NO: 2321 - RNA, 21 nt, Homo sapiens
cacauccugagaggaggagcc

SEQ ID NO: 2322 - RNA, 21 nt, Homo sapiens
gcaggcacagacagcccuggc

SEQ ID NO: 2323 - RNA, 21 nt, Homo sapiens
gccagggcugucugugccugc

SEQ ID NO: 2324 - RNA, 20 nt, Homo sapiens
ucagggagucaggggagggc

SEQ ID NO: 2325 - RNA, 20 nt, Homo sapiens
gcccuccccugacucccuga

SEQ ID NO: 2326 - RNA, 19 nt, Homo sapiens
gggggaagaaaaggugggg

SEQ ID NO: 2327 - RNA, 19 nt, Homo sapiens
ccccaccuuuucuuccccc

SEQ ID NO: 2328 - RNA, 18 nt, Homo sapiens
cauucaacuagugauugu

SEQ ID NO: 2329 - RNA, 18 nt, Homo sapiens
acaaucacuaguugaaug

SEQ ID NO: 2330 - RNA, 18 nt, Homo sapiens
cagcagucccucccccug

SEQ ID NO: 2331 - RNA, 18 nt, Homo sapiens
cagggggagggacugcug

SEQ ID NO: 2332 - RNA, 17 nt, Homo sapiens
ccaauuaccacuucuuu

SEQ ID NO: 2333 - RNA, 17 nt, Homo sapiens
aaagaagugguaauugg

SEQ ID NO: 2334 - RNA, 17 nt, Homo sapiens
cucagugacucaugugc

SEQ ID NO: 2335 - RNA, 17 nt, Homo sapiens
gcacaugagucacugag

SEQ ID NO: 2336 - RNA, 21 nt, Homo sapiens
gcaguucugagcacaguacac

SEQ ID NO: 2337 - RNA, 21 nt, Homo sapiens
guguacugugcucagaacugc

SEQ ID NO: 2338 - RNA, 18 nt, Homo sapiens
cuaggggguuugcccuug

SEQ ID NO: 2339 - RNA, 18 nt, Homo sapiens
caagggcaaacccccuag

SEQ ID NO: 2340 - RNA, 16 nt, Homo sapiens
cucuccucccggcuuc

SEQ ID NO: 2341 - RNA, 16 nt, Homo sapiens
gaagccgggaggagag

SEQ ID NO: 2342 - RNA, 21 nt, Homo sapiens
gaguguaguucugagcagagc

SEQ ID NO: 2343 - RNA, 21 nt, Homo sapiens
gcucugcucagaacuacacuc

SEQ ID NO: 2344 - RNA, 18 nt, Homo sapiens
gggucccggggagggggg

SEQ ID NO: 2345 - RNA, 18 nt, Homo sapiens
ccccccuccccgggaccc

SEQ ID NO: 2346 - RNA, 18 nt, Homo sapiens
uaaaauuugcauccagga

SEQ ID NO: 2347 - RNA, 18 nt, Homo sapiens
uccuggaugcaaauuuua

SEQ ID NO: 2348 - RNA, 17 nt, Homo sapiens
uggggcucagcgaguuu

SEQ ID NO: 2349 - RNA, 17 nt, Homo sapiens
aaacucgcugagcccca

SEQ ID NO: 2350 - RNA, 18 nt, Homo sapiens
gggcucacaucaccccau

SEQ ID NO: 2351 - RNA, 18 nt, Homo sapiens
auggggugaugugagccc

SEQ ID NO: 2352 - RNA, 18 nt, Homo sapiens
gcggcgaguccgacucau

SEQ ID NO: 2353 - RNA, 18 nt, Homo sapiens
augagucggacucgccgc

SEQ ID NO: 2354 - RNA, 17 nt, Homo sapiens
accccacuccugguacc

SEQ ID NO: 2355 - RNA, 17 nt, Homo sapiens
gguaccaggaguggggu

SEQ ID NO: 2356 - RNA, 19 nt, Homo sapiens
ucucccuugagggcacuuu

SEQ ID NO: 2357 - RNA, 19 nt, Homo sapiens
aaagugcccucaagggaga

SEQ ID NO: 2358 - RNA, 17 nt, Homo sapiens
uugucugcugaguuucc

SEQ ID NO: 2359 - RNA, 17 nt, Homo sapiens
ggaaacucagcagacaa

SEQ ID NO: 2360 - RNA, 19 nt, Homo sapiens
gcauugugcagggcuauca

SEQ ID NO: 2361 - RNA, 19 nt, Homo sapiens
ugauagcccugcacaaugc

SEQ ID NO: 2362 - RNA, 19 nt, Homo sapiens
ugcccuccuuucuucccuc

SEQ ID NO: 2363 - RNA, 19 nt, Homo sapiens
gagggaagaaaggagggca

SEQ ID NO: 2364 - RNA, 16 nt, Homo sapiens
uucagcaggaacagcu

SEQ ID NO: 2365 - RNA, 16 nt, Homo sapiens
agcuguuccugcugaa

SEQ ID NO: 2366 - RNA, 18 nt, Homo sapiens
ccccugggccggccuugg

SEQ ID NO: 2367 - RNA, 18 nt, Homo sapiens
ccaaggccggcccagggg

SEQ ID NO: 2368 - RNA, 17 nt, Homo sapiens
cagccugacaggaacag

SEQ ID NO: 2369 - RNA, 17 nt, Homo sapiens
cuguuccugucaggcug

SEQ ID NO: 2370 - RNA, 17 nt, Homo sapiens
gggagucuacagcaggg

SEQ ID NO: 2371 - RNA, 17 nt, Homo sapiens
cccugcuguagacuccc

SEQ ID NO: 2372 - RNA, 18 nt, Homo sapiens
cagugcaauguuuuccuu

SEQ ID NO: 2373 - RNA, 18 nt, Homo sapiens
aaggaaaacauugcacug

SEQ ID NO: 2374 - RNA, 17 nt, Homo sapiens
augugggcucaggcuca

SEQ ID NO: 2375 - RNA, 17 nt, Homo sapiens
ugagccugagcccacau

SEQ ID NO: 2376 - RNA, 16 nt, Homo sapiens
ugccuuccugucugug

SEQ ID NO: 2377 - RNA, 16 nt, Homo sapiens
cacagacaggaaggca

SEQ ID NO: 2378 - RNA, 22 nt, Homo sapiens
cugggacaggaggaggaggcag

SEQ ID NO: 2379 - RNA, 22 nt, Homo sapiens
cugccuccuccuccugucccag

SEQ ID NO: 2380 - RNA, 18 nt, Homo sapiens
gcuggugacaugagaggc

SEQ ID NO: 2381 - RNA, 18 nt, Homo sapiens
gccucucaugucaccagc

SEQ ID NO: 2382 - RNA, 18 nt, Homo sapiens
ugggagcuggacuacuuc

SEQ ID NO: 2383 - RNA, 18 nt, Homo sapiens
gaaguaguccagcuccca

SEQ ID NO: 2384 - RNA, 20 nt, Homo sapiens
ucccacuacuucacuuguga

SEQ ID NO: 2385 - RNA, 20 nt, Homo sapiens
ucacaagugaaguaguggga

SEQ ID NO: 2386 - RNA, 18 nt, Homo sapiens
ccaguguggcucagcgag

SEQ ID NO: 2387 - RNA, 18 nt, Homo sapiens
cucgcugagccacacugg

SEQ ID NO: 2388 - RNA, 17 nt, Homo sapiens
uucugagcugaggacag

SEQ ID NO: 2389 - RNA, 17 nt, Homo sapiens
cuguccucagcucagaa

SEQ ID NO: 2390 - RNA, 17 nt, Homo sapiens
ccggcauguccagggca

SEQ ID NO: 2391 - RNA, 17 nt, Homo sapiens
ugcccuggacaugccgg

SEQ ID NO: 2392 - RNA, 18 nt, Homo sapiens
ccuagacaccuccaguuc

SEQ ID NO: 2393 - RNA, 18 nt, Homo sapiens
gaacuggaggugucuagg

SEQ ID NO: 2394 - RNA, 17 nt, Homo sapiens
uggagagaaaggcagua

SEQ ID NO: 2395 - RNA, 17 nt, Homo sapiens
uacugccuuucucucca

SEQ ID NO: 2396 - RNA, 19 nt, Homo sapiens
aauguuuuuuccuguuucc

SEQ ID NO: 2397 - RNA, 19 nt, Homo sapiens
ggaaacaggaaaaaacauu

SEQ ID NO: 2398 - RNA, 18 nt, Homo sapiens
ucccuggaguuucuucuu

SEQ ID NO: 2399 - RNA, 18 nt, Homo sapiens
aagaagaaacuccaggga

SEQ ID NO: 2400 - RNA, 18 nt, Homo sapiens
cuggagucuaggauucca

SEQ ID NO: 2401 - RNA, 18 nt, Homo sapiens
uggaauccuagacuccag

SEQ ID NO: 2402 - RNA, 16 nt, Homo sapiens
gcagcauucauguccc

SEQ ID NO: 2403 - RNA, 16 nt, Homo sapiens
gggacaugaaugcugc

SEQ ID NO: 2404 - RNA, 18 nt, Homo sapiens
gaaagagagcugagugug

SEQ ID NO: 2405 - RNA, 18 nt, Homo sapiens
cacacucagcucucuuuc

SEQ ID NO: 2406 - RNA, 19 nt, Homo sapiens
ggccuuguuccugucccca

SEQ ID NO: 2407 - RNA, 19 nt, Homo sapiens
uggggacaggaacaaggcc

SEQ ID NO: 2408 - RNA, 20 nt, Homo sapiens
agcccccuggccccaaaccc

SEQ ID NO: 2409 - RNA, 20 nt, Homo sapiens
ggguuuggggccagggggcu

SEQ ID NO: 2410 - RNA, 18 nt, Homo sapiens
cucugggaaaugggacag

SEQ ID NO: 2411 - RNA, 18 nt, Homo sapiens
cugucccauuucccagag

SEQ ID NO: 2412 - RNA, 18 nt, Homo sapiens
ccgcuuucugagcuggac

SEQ ID NO: 2413 - RNA, 18 nt, Homo sapiens
guccagcucagaaagcgg

SEQ ID NO: 2414 - RNA, 17 nt, Homo sapiens
ggugaggcuagcuggug

SEQ ID NO: 2415 - RNA, 17 nt, Homo sapiens
caccagcuagccucacc

SEQ ID NO: 2416 - RNA, 17 nt, Homo sapiens
acauugccagggaguuu

SEQ ID NO: 2417 - RNA, 17 nt, Homo sapiens
aaacucccuggcaaugu

SEQ ID NO: 2418 - RNA, 17 nt, Homo sapiens
cacuguggguacaugcu

SEQ ID NO: 2419 - RNA, 17 nt, Homo sapiens
agcauguacccacagug

SEQ ID NO: 2420 - RNA, 17 nt, Homo sapiens
ucccugagcaaagccac

SEQ ID NO: 2421 - RNA, 17 nt, Homo sapiens
guggcuuugcucaggga

SEQ ID NO: 2422 - RNA, 18 nt, Homo sapiens
gggauucuguagcuuccu

SEQ ID NO: 2423 - RNA, 18 nt, Homo sapiens
aggaagcuacagaauccc

SEQ ID NO: 2424 - RNA, 21 nt, Homo sapiens
uuagcgguggaccgcccugcg

SEQ ID NO: 2425 - RNA, 21 nt, Homo sapiens
cgcagggcgguccaccgcuaa

SEQ ID NO: 2426 - RNA, 21 nt, Homo sapiens
cugugggcucagcgcgugggg

SEQ ID NO: 2427 - RNA, 21 nt, Homo sapiens
ccccacgcgcugagcccacag

SEQ ID NO: 2428 - RNA, 18 nt, Homo sapiens
cagccccacagccucaga

SEQ ID NO: 2429 - RNA, 18 nt, Homo sapiens
ucugaggcuguggggcug

SEQ ID NO: 2430 - RNA, 20 nt, Homo sapiens
cccugagacccuaaccuuaa

SEQ ID NO: 2431 - RNA, 20 nt, Homo sapiens
uuaagguuagggucucaggg

SEQ ID NO: 2432 - RNA, 18 nt, Homo sapiens
uugcacuugucucaguga

SEQ ID NO: 2433 - RNA, 18 nt, Homo sapiens
ucacugagacaagugcaa

SEQ ID NO: 2434 - RNA, 20 nt, Homo sapiens
uguuccucugucucccagac

SEQ ID NO: 2435 - RNA, 20 nt, Homo sapiens
gucugggagacagaggaaca

SEQ ID NO: 2436 - RNA, 19 nt, Homo sapiens
ggcuugcaugggggacugg

SEQ ID NO: 2437 - RNA, 19 nt, Homo sapiens
ccagucccccaugcaagcc

SEQ ID NO: 2438 - RNA, 17 nt, Homo sapiens
ccaguuuucccaggauu

SEQ ID NO: 2439 - RNA, 17 nt, Homo sapiens
aauccugggaaaacugg

SEQ ID NO: 2440 - RNA, 19 nt, Homo sapiens
ccugagacccuaguuccac

SEQ ID NO: 2441 - RNA, 19 nt, Homo sapiens
guggaacuagggucucagg

SEQ ID NO: 2442 - RNA, 19 nt, Homo sapiens
ccucagaucagagccuugc

SEQ ID NO: 2443 - RNA, 19 nt, Homo sapiens
gcaaggcucugaucugagg

SEQ ID NO: 2444 - RNA, 22 nt, Homo sapiens
cauugcacuugucucggucuga

SEQ ID NO: 2445 - RNA, 22 nt, Homo sapiens
ucagaccgagacaagugcaaug

SEQ ID NO: 2446 - RNA, 21 nt, Homo sapiens
aggcggagacuugggcaauug

SEQ ID NO: 2447 - RNA, 21 nt, Homo sapiens
caauugcccaagucuccgccu

SEQ ID NO: 2448 - RNA, 22 nt, Homo sapiens
ccuauucuugguuacuugcacg

SEQ ID NO: 2449 - RNA, 22 nt, Homo sapiens
cgugcaaguaaccaagaauagg

SEQ ID NO: 2450 - RNA, 19 nt, Homo sapiens
aauggauuuuuggagcagg

SEQ ID NO: 2451 - RNA, 19 nt, Homo sapiens
ccugcuccaaaaauccauu

SEQ ID NO: 2452 - RNA, 22 nt, Homo sapiens
ugcggggcuagggcuaacagca

SEQ ID NO: 2453 - RNA, 22 nt, Homo sapiens
ugcuguuagcccuagccccgca

SEQ ID NO: 2454 - RNA, 22 nt, Homo sapiens
aaaaguaauugcggauuuugcc

SEQ ID NO: 2455 - RNA, 22 nt, Homo sapiens
ggcaaaauccgcaauuacuuuu

SEQ ID NO: 2456 - RNA, 22 nt, Homo sapiens
caaaaguaauuguggauuuugu

SEQ ID NO: 2457 - RNA, 22 nt, Homo sapiens
acaaaauccacaauuacuuuug

SEQ ID NO: 2458 - RNA, 23 nt, Homo sapiens
uaagugcuuccauguuuugguga

SEQ ID NO: 2459 - RNA, 23 nt, Homo sapiens
ucaccaaaacauggaagcacuua

SEQ ID NO: 2460 - RNA, 23 nt, Homo sapiens
acuuaaacguggauguacuugcu

SEQ ID NO: 2461 - RNA, 23 nt, Homo sapiens
agcaaguacauccacguuuaagu

SEQ ID NO: 2462 - RNA, 21 nt, Homo sapiens
cuauacaaucuacugucuuuc

SEQ ID NO: 2463 - RNA, 21 nt, Homo sapiens
gaaagacaguagauuguauag

SEQ ID NO: 2464 - RNA, 22 nt, Homo sapiens
ugagguaguagguuguauaguu

SEQ ID NO: 2465 - RNA, 22 nt, Homo sapiens
aacuauacaaccuacuaccuca

SEQ ID NO: 2466 - RNA, 22 nt, Homo sapiens
cuguacagccuccuagcuuucc

SEQ ID NO: 2467 - RNA, 22 nt, Homo sapiens
ggaaagcuaggaggcuguacag

SEQ ID NO: 2468 - RNA, 20 nt, Homo sapiens
caccaggcauuguggucucc

SEQ ID NO: 2469 - RNA, 20 nt, Homo sapiens
ggagaccacaaugccuggug

SEQ ID NO: 2470 - RNA, 23 nt, Homo sapiens
ugaguaccgccaugucuguuggg

SEQ ID NO: 2471 - RNA, 23 nt, Homo sapiens
cccaacagacauggcgguacuca

SEQ ID NO: 2472 - RNA, 22 nt, Homo sapiens
uacccagagcaugcagugugaa

SEQ ID NO: 2473 - RNA, 22 nt, Homo sapiens
uucacacugcaugcucugggua

SEQ ID NO: 2474 - RNA, 22 nt, Homo sapiens
aagugcugucauagcugagguc

SEQ ID NO: 2475 - RNA, 22 nt, Homo sapiens
gaccucagcuaugacagcacuu

SEQ ID NO: 2476 - RNA, 23 nt, Homo sapiens
cacucagccuugagggcacuuuc

SEQ ID NO: 2477 - RNA, 23 nt, Homo sapiens
gaaagugcccucaaggcugagug

SEQ ID NO: 2478 - RNA, 22 nt, Homo sapiens
ucgacagcacgacacugccuuc

SEQ ID NO: 2479 - RNA, 22 nt, Homo sapiens
gaaggcagugucgugcugucga

SEQ ID NO: 2480 - RNA, 22 nt, Homo sapiens
uagguaguuuccuguuguuggg

SEQ ID NO: 2481 - RNA, 22 nt, Homo sapiens
cccaacaacaggaaacuaccua

SEQ ID NO: 2482 - RNA, 21 nt, Homo sapiens
uacaguacugugauaacugaa

SEQ ID NO: 2483 - RNA, 21 nt, Homo sapiens
uucaguuaucacaguacugua

SEQ ID NO: 2484 - RNA, 22 nt, Homo sapiens
caguuaucacagugcugaugcu

SEQ ID NO: 2485 - RNA, 22 nt, Homo sapiens
agcaucagcacugugauaacug

SEQ ID NO: 2486 - RNA, 23 nt, Homo sapiens
ugugcaaaucuaugcaaaacuga

SEQ ID NO: 2487 - RNA, 23 nt, Homo sapiens
ucaguuuugcauagauuugcaca

SEQ ID NO: 2488 - RNA, 22 nt, Homo sapiens
aguuuugcauaguugcacuaca

SEQ ID NO: 2489 - RNA, 22 nt, Homo sapiens
uguagugcaacuaugcaaaacu

SEQ ID NO: 2490 - RNA, 23 nt, Homo sapiens
aguuuugcagguuugcauccagc

SEQ ID NO: 2491 - RNA, 23 nt, Homo sapiens
gcuggaugcaaaccugcaaaacu

SEQ ID NO: 2492 - RNA, 22 nt, Homo sapiens
aguuuugcagguuugcauuuca

SEQ ID NO: 2493 - RNA, 22 nt, Homo sapiens
ugaaaugcaaaccugcaaaacu

SEQ ID NO: 2494 - RNA, 23 nt, Homo sapiens
ugugcaaauccaugcaaaacuga

SEQ ID NO: 2495 - RNA, 23 nt, Homo sapiens
ucaguuuugcauggauuugcaca

SEQ ID NO: 2496 - RNA, 23 nt, Homo sapiens
uacugcaucaggaacugauugga

SEQ ID NO: 2497 - RNA, 23 nt, Homo sapiens
uccaaucaguuccugaugcagua

SEQ ID NO: 2498 - RNA, 22 nt, Homo sapiens
augguuccgucaagcaccaugg

SEQ ID NO: 2499 - RNA, 22 nt, Homo sapiens
ccauggugcuugacggaaccau

SEQ ID NO: 2500 - RNA, 21 nt, Homo sapiens
agcuacaucuggcuacugggu

SEQ ID NO: 2501 - RNA, 21 nt, Homo sapiens
acccaguagccagauguagcu

SEQ ID NO: 2502 - RNA, 22 nt, Homo sapiens
cucaguagccaguguagauccu

SEQ ID NO: 2503 - RNA, 22 nt, Homo sapiens
aggaucuacacuggcuacugag

SEQ ID NO: 2504 - RNA, 22 nt, Homo sapiens
uuaucagaaucuccagggguac

SEQ ID NO: 2505 - RNA, 22 nt, Homo sapiens
guaccccuggagauucugauaa

SEQ ID NO: 2506 - RNA, 23 nt, Homo sapiens
aucaacagacauuaauugggcgc

SEQ ID NO: 2507 - RNA, 23 nt, Homo sapiens
gcgcccaauuaaugucuguugau

SEQ ID NO: 2508 - RNA, 21 nt, Homo sapiens
caaaacgugaggcgcugcuau

SEQ ID NO: 2509 - RNA, 21 nt, Homo sapiens
auagcagcgccucacguuuug

SEQ ID NO: 2510 - RNA, 22 nt, Homo sapiens
cagcagcaauucauguuuugaa

SEQ ID NO: 2511 - RNA, 22 nt, Homo sapiens
uucaaaacaugaauugcugcug

SEQ ID NO: 2512 - RNA, 18 nt, Homo sapiens
uucacagggaggugucau

SEQ ID NO: 2513 - RNA, 18 nt, Homo sapiens
augacaccucccugugaa

SEQ ID NO: 2514 - RNA, 20 nt, Homo sapiens
gcggagagagaauggggagc

SEQ ID NO: 2515 - RNA, 20 nt, Homo sapiens
gcuccccauucucucuccgc

SEQ ID NO: 2516 - RNA, 21 nt, Homo sapiens
ccugcgagucuccggcggugg

SEQ ID NO: 2517 - RNA, 21 nt, Homo sapiens
ccaccgccggagacucgcagg

SEQ ID NO: 2518 - RNA, 21 nt, Homo sapiens
gggcuagggccugcugccccc

SEQ ID NO: 2519 - RNA, 21 nt, Homo sapiens
gggggcagcaggcccuagccc

SEQ ID NO: 2520 - RNA, 19 nt, Homo sapiens
uucugcugccggccaaggc

SEQ ID NO: 2521 - RNA, 19 nt, Homo sapiens
gccuuggccggcagcagaa

SEQ ID NO: 2522 - RNA, 22 nt, Homo sapiens
uccucaucacacugcaccuuag

SEQ ID NO: 2523 - RNA, 22 nt, Homo sapiens
cuaaggugcagugugaugagga

SEQ ID NO: 2524 - RNA, 20 nt, Homo sapiens
gguagugaguuaucagcuac

SEQ ID NO: 2525 - RNA, 20 nt, Homo sapiens
guagcugauaacucacuacc

SEQ ID NO: 2526 - RNA, 20 nt, Homo sapiens
gauauucagaggcuaggugg

SEQ ID NO: 2527 - RNA, 20 nt, Homo sapiens
ccaccuagccucugaauauc

SEQ ID NO: 2528 - RNA, 21 nt, Homo sapiens
acggcccaggcggcauuggug

SEQ ID NO: 2529 - RNA, 21 nt, Homo sapiens
caccaaugccgccugggccgu

SEQ ID NO: 2530 - RNA, 21 nt, Homo sapiens
agcaugacagaggagaggugg

SEQ ID NO: 2531 - RNA, 21 nt, Homo sapiens
ccaccucuccucugucaugcu

SEQ ID NO: 2532 - RNA, 21 nt, Homo sapiens
gggaagagcuguacggccuuc

SEQ ID NO: 2533 - RNA, 21 nt, Homo sapiens
gaaggccguacagcucuuccc

SEQ ID NO: 2534 - RNA, 19 nt, Homo sapiens
ccgccugagcuagcugugg

SEQ ID NO: 2535 - RNA, 19 nt, Homo sapiens
ccacagcuagcucaggcgg

SEQ ID NO: 2536 - RNA, 24 nt, Homo sapiens
uuggaagcuuggaccaacuagcug

SEQ ID NO: 2537 - RNA, 24 nt, Homo sapiens
cagcuaguugguccaagcuuccaa

SEQ ID NO: 2538 - RNA, 19 nt, Homo sapiens
ucuagugcgggcguucccg

SEQ ID NO: 2539 - RNA, 19 nt, Homo sapiens
cgggaacgcccgcacuaga

SEQ ID NO: 2540 - RNA, 24 nt, Homo sapiens
aggagcagugccggccaaggcgcc

SEQ ID NO: 2541 - RNA, 24 nt, Homo sapiens
ggcgccuuggccggcacugcuccu

SEQ ID NO: 2542 - RNA, 19 nt, Homo sapiens
gaauacgucugguugaucc

SEQ ID NO: 2543 - RNA, 19 nt, Homo sapiens
ggaucaaccagacguauuc

SEQ ID NO: 2544 - RNA, 20 nt, Homo sapiens
cuuauaucagaggcuguggg

SEQ ID NO: 2545 - RNA, 20 nt, Homo sapiens
cccacagccucugauauaag

SEQ ID NO: 2546 - RNA, 20 nt, Homo sapiens
uuccgccagucgguggccgg

SEQ ID NO: 2547 - RNA, 20 nt, Homo sapiens
ccggccaccgacuggcggaa

SEQ ID NO: 2548 - RNA, 19 nt, Homo sapiens
aaggggcugggggagcaca

SEQ ID NO: 2549 - RNA, 19 nt, Homo sapiens
ugugcucccccagccccuu

SEQ ID NO: 2550 - RNA, 23 nt, Homo sapiens
agguugggaucgguugcaaugcu

SEQ ID NO: 2551 - RNA, 23 nt, Homo sapiens
agcauugcaaccgaucccaaccu

SEQ ID NO: 2552 - RNA, 22 nt, Homo sapiens
ggguggggauuuguugcauuac

SEQ ID NO: 2553 - RNA, 22 nt, Homo sapiens
guaaugcaacaaauccccaccc

SEQ ID NO: 2554 - RNA, 22 nt, Homo sapiens
uauugcacuugucccggccugu

SEQ ID NO: 2555 - RNA, 22 nt, Homo sapiens
acaggccgggacaagugcaaua

SEQ ID NO: 2556 - RNA, 22 nt, Homo sapiens
uauugcacucgucccggccucc

SEQ ID NO: 2557 - RNA, 22 nt, Homo sapiens
ggaggccgggacgagugcaaua

SEQ ID NO: 2558 - RNA, 22 nt, Homo sapiens
agggacgggacgcggugcagug

SEQ ID NO: 2559 - RNA, 22 nt, Homo sapiens
cacugcaccgcgucccgucccu

SEQ ID NO: 2560 - RNA, 21 nt, Homo sapiens
aucacauugccagggauuucc

SEQ ID NO: 2561 - RNA, 21 nt, Homo sapiens
ggaaaucccuggcaaugugau

SEQ ID NO: 2562 - RNA, 22 nt, Homo sapiens
gggguuccuggggaugggauuu

SEQ ID NO: 2563 - RNA, 22 nt, Homo sapiens
aaaucccauccccaggaacccc

SEQ ID NO: 2564 - RNA, 22 nt, Homo sapiens
acugcagugaaggcacuuguag

SEQ ID NO: 2565 - RNA, 22 nt, Homo sapiens
cuacaagugccuucacugcagu

SEQ ID NO: 2566 - RNA, 23 nt, Homo sapiens
agcuacauugucugcuggguuuc

SEQ ID NO: 2567 - RNA, 23 nt, Homo sapiens
gaaacccagcagacaauguagcu

SEQ ID NO: 2568 - RNA, 22 nt, Homo sapiens
accuggcauacaauguagauuu

SEQ ID NO: 2569 - RNA, 22 nt, Homo sapiens
aaaucuacauuguaugccaggu

SEQ ID NO: 2570 - RNA, 22 nt, Homo sapiens
ucguaccgugaguaauaaugcg

SEQ ID NO: 2571 - RNA, 22 nt, Homo sapiens
cgcauuauuacucacgguacga

SEQ ID NO: 2572 - RNA, 21 nt, Homo sapiens
cauuauuacuuuugguacgcg

SEQ ID NO: 2573 - RNA, 21 nt, Homo sapiens
cgcguaccaaaaguaauaaug

SEQ ID NO: 2574 - RNA, 23 nt, Homo sapiens
uacuccagagggcgucacucaug

SEQ ID NO: 2575 - RNA, 23 nt, Homo sapiens
caugagugacgcccucuggagua

SEQ ID NO: 2576 - RNA, 21 nt, Homo sapiens
ucccacguuguggcccagcag

SEQ ID NO: 2577 - RNA, 21 nt, Homo sapiens
cugcugggccacaacguggga

SEQ ID NO: 2578 - RNA, 23 nt, Homo sapiens
ccucaccaccccuucugccugca

SEQ ID NO: 2579 - RNA, 23 nt, Homo sapiens
ugcaggcagaagggguggugagg

SEQ ID NO: 2580 - RNA, 24 nt, Homo sapiens
cugcaggcagaaguggggcugaca

SEQ ID NO: 2581 - RNA, 24 nt, Homo sapiens
ugucagccccacuucugccugcag

SEQ ID NO: 2582 - RNA, 21 nt, Homo sapiens
ccaaaccagucgugccugugg

SEQ ID NO: 2583 - RNA, 21 nt, Homo sapiens
ccacaggcacgacugguuugg

SEQ ID NO: 2584 - RNA, 22 nt, Homo sapiens
cucaaaccggcugugccugugg

SEQ ID NO: 2585 - RNA, 22 nt, Homo sapiens
ccacaggcacagccgguuugag

SEQ ID NO: 2586 - RNA, 21 nt, Homo sapiens
acaggcacgacugguuuggca

SEQ ID NO: 2587 - RNA, 21 nt, Homo sapiens
ugccaaaccagucgugccugu

SEQ ID NO: 2588 - RNA, 22 nt, Homo sapiens
uccgaacucuccauuccucugc

SEQ ID NO: 2589 - RNA, 22 nt, Homo sapiens
gcagaggaauggagaguucgga

SEQ ID NO: 2590 - RNA, 20 nt, Homo sapiens
ugggaauggggguaagggcc

SEQ ID NO: 2591 - RNA, 20 nt, Homo sapiens
ggcccuuacccccauuccca

SEQ ID NO: 2592 - RNA, 22 nt, Homo sapiens
aggcgauguggggauguagaga

SEQ ID NO: 2593 - RNA, 22 nt, Homo sapiens
ucucuacauccccacaucgccu

SEQ ID NO: 2594 - RNA, 21 nt, Homo sapiens
uaguggucagagggcuuauga

SEQ ID NO: 2595 - RNA, 21 nt, Homo sapiens
ucauaagcccucugaccacua

SEQ ID NO: 2596 - RNA, 22 nt, Homo sapiens
ucugacaucagugauucuccug

SEQ ID NO: 2597 - RNA, 22 nt, Homo sapiens
caggagaaucacugaugucaga

SEQ ID NO: 2598 - RNA, 22 nt, Homo sapiens
cgcgccugcaggaacugguaga

SEQ ID NO: 2599 - RNA, 22 nt, Homo sapiens
ucuaccaguuccugcaggcgcg

SEQ ID NO: 2600 - RNA, 23 nt, Homo sapiens
ugggcaggggcuuauuguaggag

SEQ ID NO: 2601 - RNA, 23 nt, Homo sapiens
cuccuacaauaagccccugccca

SEQ ID NO: 2602 - RNA, 22 nt, Homo sapiens
ugcaggggucgggugggccagg

SEQ ID NO: 2603 - RNA, 22 nt, Homo sapiens
ccuggcccacccgaccccugca

SEQ ID NO: 2604 - RNA, 20 nt, Homo sapiens
aggcgcacccgaccacaugc

SEQ ID NO: 2605 - RNA, 20 nt, Homo sapiens
gcauguggucgggugcgccu

SEQ ID NO: 2606 - RNA, 22 nt, Homo sapiens
auaguccgaguaacgucggggc

SEQ ID NO: 2607 - RNA, 22 nt, Homo sapiens
gccccgacguuacucggacuau

SEQ ID NO: 2608 - RNA, 23 nt, Homo sapiens
cugggcccgcggcgggcgugggg

SEQ ID NO: 2609 - RNA, 23 nt, Homo sapiens
ccccacgcccgccgcgggcccag

SEQ ID NO: 2610 - RNA, 21 nt, Homo sapiens
uacuuggaaaggcaucaguug

SEQ ID NO: 2611 - RNA, 21 nt, Homo sapiens
caacugaugccuuuccaagua

SEQ ID NO: 2612 - RNA, 22 nt, Homo sapiens
ugcaacgaaccugagccacuga

SEQ ID NO: 2613 - RNA, 22 nt, Homo sapiens
ucaguggcucagguucguugca

SEQ ID NO: 2614 - RNA, 22 nt, Homo sapiens
ugcaacuuaccugagucauuga

SEQ ID NO: 2615 - RNA, 22 nt, Homo sapiens
ucaaugacucagguaaguugca

SEQ ID NO: 2616 - RNA, 21 nt, Homo sapiens
cacuguguccuuucugcguag

SEQ ID NO: 2617 - RNA, 21 nt, Homo sapiens
cuacgcagaaaggacacagug

SEQ ID NO: 2618 - RNA, 22 nt, Homo sapiens
cacuggcuccuuucuggguaga

SEQ ID NO: 2619 - RNA, 22 nt, Homo sapiens
ucuacccagaaaggagccagug

SEQ ID NO: 2620 - RNA, 22 nt, Homo sapiens
cacuguuuccuuucugagugga

SEQ ID NO: 2621 - RNA, 22 nt, Homo sapiens
uccacucagaaaggaaacagug

SEQ ID NO: 2622 - RNA, 21 nt, Homo sapiens
uauucagaaaggugccaguca

SEQ ID NO: 2623 - RNA, 21 nt, Homo sapiens
ugacuggcaccuuucugaaua

SEQ ID NO: 2624 - RNA, 20 nt, Homo sapiens
auuccuagaaauuguucaua

SEQ ID NO: 2625 - RNA, 20 nt, Homo sapiens
uaugaacaauuucuaggaau

SEQ ID NO: 2626 - RNA, 22 nt, Homo sapiens
uaauacugucugguaaaaccgu

SEQ ID NO: 2627 - RNA, 22 nt, Homo sapiens
acgguuuuaccagacaguauua

SEQ ID NO: 2628 - RNA, 22 nt, Homo sapiens
ugaaacauacacgggaaaccuc

SEQ ID NO: 2629 - RNA, 22 nt, Homo sapiens
gagguuucccguguauguuuca

SEQ ID NO: 2630 - RNA, 22 nt, Homo sapiens
cuauacaaccuacugccuuccc

SEQ ID NO: 2631 - RNA, 22 nt, Homo sapiens
gggaaggcaguagguuguauag

SEQ ID NO: 2632 - RNA, 22 nt, Homo sapiens
ugagguaguagguugugugguu

SEQ ID NO: 2633 - RNA, 22 nt, Homo sapiens
aaccacacaaccuacuaccuca

SEQ ID NO: 2634 - RNA, 22 nt, Homo sapiens
uaacacugucugguaacgaugu

SEQ ID NO: 2635 - RNA, 22 nt, Homo sapiens
acaucguuaccagacaguguua

SEQ ID NO: 2636 - RNA, 22 nt, Homo sapiens
caucuuaccggacagugcugga

SEQ ID NO: 2637 - RNA, 22 nt, Homo sapiens
uccagcacuguccgguaagaug

SEQ ID NO: 2638 - RNA, 22 nt, Homo sapiens
uaauacugccugguaaugauga

SEQ ID NO: 2639 - RNA, 22 nt, Homo sapiens
ucaucauuaccaggcaguauua

SEQ ID NO: 2640 - RNA, 22 nt, Homo sapiens
caucuuacugggcagcauugga

SEQ ID NO: 2641 - RNA, 22 nt, Homo sapiens
uccaaugcugcccaguaagaug

SEQ ID NO: 2642 - RNA, 23 nt, Homo sapiens
uaauacugccggguaaugaugga

SEQ ID NO: 2643 - RNA, 23 nt, Homo sapiens
uccaucauuacccggcaguauua

SEQ ID NO: 2644 - RNA, 22 nt, Homo sapiens
cgucuuacccagcaguguuugg

SEQ ID NO: 2645 - RNA, 22 nt, Homo sapiens
ccaaacacugcuggguaagacg

SEQ ID NO: 2646 - RNA, 22 nt, Homo sapiens
uccagcaucagugauuuuguug

SEQ ID NO: 2647 - RNA, 22 nt, Homo sapiens
caacaaaaucacugaugcugga

SEQ ID NO: 2648 - RNA, 20 nt, Homo sapiens
uacaguauagaugauguacu

SEQ ID NO: 2649 - RNA, 20 nt, Homo sapiens
aguacaucaucuauacugua

SEQ ID NO: 2650 - RNA, 22 nt, Homo sapiens
ggauaucaucauauacuguaag

SEQ ID NO: 2651 - RNA, 22 nt, Homo sapiens
cuuacaguauaugaugauaucc

SEQ ID NO: 2652 - RNA, 21 nt, Homo sapiens
cggggcagcucaguacaggau

SEQ ID NO: 2653 - RNA, 21 nt, Homo sapiens
auccuguacugagcugccccg

SEQ ID NO: 2654 - RNA, 21 nt, Homo sapiens
uccuucugcuccgucccccag

SEQ ID NO: 2655 - RNA, 21 nt, Homo sapiens
cugggggacggagcagaagga

SEQ ID NO: 2656 - RNA, 21 nt, Homo sapiens
cgggggcggggccgaagcgcg

SEQ ID NO: 2657 - RNA, 21 nt, Homo sapiens
cgcgcuucggccccgcccccg

SEQ ID NO: 2658 - RNA, 21 nt, Homo sapiens
uccugcgcgucccagaugccc

SEQ ID NO: 2659 - RNA, 21 nt, Homo sapiens
gggcaucugggacgcgcagga

SEQ ID NO: 2660 - RNA, 22 nt, Homo sapiens
caucagaauucauggaggcuag

SEQ ID NO: 2661 - RNA, 22 nt, Homo sapiens
cuagccuccaugaauucugaug

SEQ ID NO: 2662 - RNA, 22 nt, Homo sapiens
agcuuccaugacuccugaugga

SEQ ID NO: 2663 - RNA, 22 nt, Homo sapiens
uccaucaggagucauggaagcu

SEQ ID NO: 2664 - RNA, 21 nt, Homo sapiens
ugacagcgcccugccuggcuc

SEQ ID NO: 2665 - RNA, 21 nt, Homo sapiens
gagccaggcagggcgcuguca

SEQ ID NO: 2666 - RNA, 24 nt, Homo sapiens
agcgcgggcugagcgcugccaguc

SEQ ID NO: 2667 - RNA, 24 nt, Homo sapiens
gacuggcagcgcucagcccgcgcu

SEQ ID NO: 2668 - RNA, 22 nt, Homo sapiens
cugggaggugugauaucguggu

SEQ ID NO: 2669 - RNA, 22 nt, Homo sapiens
accacgauaucacaccucccag

SEQ ID NO: 2670 - RNA, 22 nt, Homo sapiens
ugugauaucaugguuccuggga

SEQ ID NO: 2671 - RNA, 22 nt, Homo sapiens
ucccaggaaccaugauaucaca

SEQ ID NO: 2672 - RNA, 22 nt, Homo sapiens
aggugcuccaggcuggcucaca

SEQ ID NO: 2673 - RNA, 22 nt, Homo sapiens
ugugagccagccuggagcaccu

SEQ ID NO: 2674 - RNA, 22 nt, Homo sapiens
gagcaauguagguagacuguuu

SEQ ID NO: 2675 - RNA, 22 nt, Homo sapiens
aaacagucuaccuacauugcuc

SEQ ID NO: 2676 - RNA, 22 nt, Homo sapiens
uguccucuagggccugcagucu

SEQ ID NO: 2677 - RNA, 22 nt, Homo sapiens
agacugcaggcccuagaggaca

SEQ ID NO: 2678 - RNA, 20 nt, Homo sapiens
aaaggcauaaaaccaagaca

SEQ ID NO: 2679 - RNA, 20 nt, Homo sapiens
ugucuugguuuuaugccuuu

SEQ ID NO: 2680 - RNA, 21 nt, Homo sapiens
uaacgcauaauauggacaugu

SEQ ID NO: 2681 - RNA, 21 nt, Homo sapiens
acauguccauauuaugcguua

SEQ ID NO: 2682 - RNA, 22 nt, Homo sapiens
uugaggaaaagauggucuuauu

SEQ ID NO: 2683 - RNA, 22 nt, Homo sapiens
aauaagaccaucuuuuccucaa

SEQ ID NO: 2684 - RNA, 26 nt, Homo sapiens
aagaggaagaaauggcugguucucag

SEQ ID NO: 2685 - RNA, 26 nt, Homo sapiens
cugagaaccagccauuucuuccucuu

SEQ ID NO: 2686 - RNA, 20 nt, Homo sapiens
gcucggacugagcagguggg

SEQ ID NO: 2687 - RNA, 20 nt, Homo sapiens
cccaccugcucaguccgagc

SEQ ID NO: 2688 - RNA, 21 nt, Homo sapiens
acagggccgcagauggagacu

SEQ ID NO: 2689 - RNA, 21 nt, Homo sapiens
agucuccaucugcggcccugu

SEQ ID NO: 2690 - RNA, 21 nt, Homo sapiens
gcagagaacaaaggacucagu

SEQ ID NO: 2691 - RNA, 21 nt, Homo sapiens
acugaguccuuuguucucugc

SEQ ID NO: 2692 - RNA, 22 nt, Homo sapiens
acugauuaucuuaacucucuga

SEQ ID NO: 2693 - RNA, 22 nt, Homo sapiens
ucagagaguuaagauaaucagu

SEQ ID NO: 2694 - RNA, 23 nt, Homo sapiens
ucucugaguaccauaugccuugu

SEQ ID NO: 2695 - RNA, 23 nt, Homo sapiens
acaaggcauaugguacucagaga

SEQ ID NO: 2696 - RNA, 22 nt, Homo sapiens
aacuaguaauguuggauuaggg

SEQ ID NO: 2697 - RNA, 22 nt, Homo sapiens
cccuaauccaacauuacuaguu

SEQ ID NO: 2698 - RNA, 22 nt, Homo sapiens
auauguauaugugacugcuacu

SEQ ID NO: 2699 - RNA, 22 nt, Homo sapiens
aguagcagucacauauacauau

SEQ ID NO: 2700 - RNA, 21 nt, Homo sapiens
uggccaaaaagcaggcagaga

SEQ ID NO: 2701 - RNA, 21 nt, Homo sapiens
ucucugccugcuuuuuggcca

SEQ ID NO: 2702 - RNA, 22 nt, Homo sapiens
ggaggaaccuuggagcuucggc

SEQ ID NO: 2703 - RNA, 22 nt, Homo sapiens
gccgaagcuccaagguuccucc

SEQ ID NO: 2704 - RNA, 23 nt, Homo sapiens
gaggcugaugugaguagaccacu

SEQ ID NO: 2705 - RNA, 23 nt, Homo sapiens
aguggucuacucacaucagccuc

SEQ ID NO: 2706 - RNA, 21 nt, Homo sapiens
cuguccuaagguuguugaguu

SEQ ID NO: 2707 - RNA, 21 nt, Homo sapiens
aacucaacaaccuuaggacag

SEQ ID NO: 2708 - RNA, 21 nt, Homo sapiens
ucuucaaccucaggacuugca

SEQ ID NO: 2709 - RNA, 21 nt, Homo sapiens
ugcaaguccugagguugaaga

SEQ ID NO: 2710 - RNA, 22 nt, Homo sapiens
ugugauaucaugguuccuggga

SEQ ID NO: 2711 - RNA, 22 nt, Homo sapiens
ucccaggaaccaugauaucaca

SEQ ID NO: 2712 - RNA, 22 nt, Homo sapiens
cugggaggugugauauuguggu

SEQ ID NO: 2713 - RNA, 22 nt, Homo sapiens
accacaauaucacaccucccag

SEQ ID NO: 2714 - RNA, 22 nt, Homo sapiens
cagguagauauuugauaggcau

SEQ ID NO: 2715 - RNA, 22 nt, Homo sapiens
augccuaucaaauaucuaccug

SEQ ID NO: 2716 - RNA, 21 nt, Homo sapiens
gccuaucacauaucugccugu

SEQ ID NO: 2717 - RNA, 21 nt, Homo sapiens
acaggcagauaugugauaggc

SEQ ID NO: 2718 - RNA, 20 nt, Homo sapiens
gggcuggggcgcggggaggu

SEQ ID NO: 2719 - RNA, 20 nt, Homo sapiens
accuccccgcgccccagccc

SEQ ID NO: 2720 - RNA, 18 nt, Homo sapiens
ugcuuccuuucagagggu

SEQ ID NO: 2721 - RNA, 18 nt, Homo sapiens
acccucugaaaggaagca

SEQ ID NO: 2722 - RNA, 21 nt, Homo sapiens
ugaguuggccaucugagugag

SEQ ID NO: 2723 - RNA, 21 nt, Homo sapiens
cucacucagauggccaacuca

SEQ ID NO: 2724 - RNA, 23 nt, Homo sapiens
aacauucauuguugucggugggu

SEQ ID NO: 2725 - RNA, 23 nt, Homo sapiens
acccaccgacaacaaugaauguu

SEQ ID NO: 2726 - RNA, 21 nt, Homo sapiens
ucacagugaaccggucucuuu

SEQ ID NO: 2727 - RNA, 21 nt, Homo sapiens
aaagagaccgguucacuguga

SEQ ID NO: 2728 - RNA, 22 nt, Homo sapiens
caacaaaucacagucugccaua

SEQ ID NO: 2729 - RNA, 22 nt, Homo sapiens
uauggcagacugugauuuguug

SEQ ID NO: 2730 - RNA, 21 nt, Homo sapiens
cucacugaacaaugaaugcaa

SEQ ID NO: 2731 - RNA, 21 nt, Homo sapiens
uugcauucauuguucagugag

SEQ ID NO: 2732 - RNA, 23 nt, Homo sapiens
aacauucauugcugucggugggu

SEQ ID NO: 2733 - RNA, 23 nt, Homo sapiens
acccaccgacagcaaugaauguu

SEQ ID NO: 2734 - RNA, 22 nt, Homo sapiens
accaucgaccguugauuguacc

SEQ ID NO: 2735 - RNA, 22 nt, Homo sapiens
gguacaaucaacggucgauggu

SEQ ID NO: 2736 - RNA, 23 nt, Homo sapiens
aacauucaacgcugucggugagu

SEQ ID NO: 2737 - RNA, 23 nt, Homo sapiens
acucaccgacagcguugaauguu

SEQ ID NO: 2738 - RNA, 22 nt, Homo sapiens
accacugaccguugacuguacc

SEQ ID NO: 2739 - RNA, 22 nt, Homo sapiens
gguacagucaacggucaguggu

SEQ ID NO: 2740 - RNA, 22 nt, Homo sapiens
cuguugccacuaaccucaaccu

SEQ ID NO: 2741 - RNA, 22 nt, Homo sapiens
agguugagguuaguggcaacag

SEQ ID NO: 2742 - RNA, 22 nt, Homo sapiens
auaagacgagcaaaaagcuugu

SEQ ID NO: 2743 - RNA, 22 nt, Homo sapiens
acaagcuuuuugcucgucuuau

SEQ ID NO: 2744 - RNA, 22 nt, Homo sapiens
auaagacgaacaaaagguuugu

SEQ ID NO: 2745 - RNA, 22 nt, Homo sapiens
acaaaccuuuuguucgucuuau

SEQ ID NO: 2746 - RNA, 21 nt, Homo sapiens
agggagggacgggggcugugc

SEQ ID NO: 2747 - RNA, 21 nt, Homo sapiens
gcacagcccccgucccucccu

SEQ ID NO: 2748 - RNA, 23 nt, Homo sapiens
ucuggcuccgugucuucacuccc

SEQ ID NO: 2749 - RNA, 23 nt, Homo sapiens
gggagugaagacacggagccaga

SEQ ID NO: 2750 - RNA, 22 nt, Homo sapiens
uggaauguaaagaaguauguau

SEQ ID NO: 2751 - RNA, 22 nt, Homo sapiens
auacauacuucuuuacauucca

SEQ ID NO: 2752 - RNA, 22 nt, Homo sapiens
aacaucacagcaagucugugcu

SEQ ID NO: 2753 - RNA, 22 nt, Homo sapiens
agcacagacuugcugugauguu

SEQ ID NO: 2754 - RNA, 21 nt, Homo sapiens
uuaagacuugcagugauguuu

SEQ ID NO: 2755 - RNA, 21 nt, Homo sapiens
aaacaucacugcaagucuuaa

SEQ ID NO: 2756 - RNA, 22 nt, Homo sapiens
aacaucacugcaagucuuaaca

SEQ ID NO: 2757 - RNA, 22 nt, Homo sapiens
uguuaagacuugcagugauguu

SEQ ID NO: 2758 - RNA, 21 nt, Homo sapiens
acagacuugcugugauguuca

SEQ ID NO: 2759 - RNA, 21 nt, Homo sapiens
ugaacaucacagcaagucugu

SEQ ID NO: 2760 - RNA, 22 nt, Homo sapiens
aaaccguuaccauuacugaguu

SEQ ID NO: 2761 - RNA, 22 nt, Homo sapiens
aacucaguaaugguaacgguuu

SEQ ID NO: 2762 - RNA, 22 nt, Homo sapiens
uagcaagagaaccauuaccauu

SEQ ID NO: 2763 - RNA, 22 nt, Homo sapiens
aaugguaaugguucucuugcua

SEQ ID NO: 2764 - RNA, 23 nt, Homo sapiens
ugaggggcagagagcgagacuuu

SEQ ID NO: 2765 - RNA, 23 nt, Homo sapiens
aaagucucgcucucugccccuca

SEQ ID NO: 2766 - RNA, 22 nt, Homo sapiens
caagcucgcuucuaugggucug

SEQ ID NO: 2767 - RNA, 22 nt, Homo sapiens
cagacccauagaagcgagcuug

SEQ ID NO: 2768 - RNA, 22 nt, Homo sapiens
aacccguagauccgaucuugug

SEQ ID NO: 2769 - RNA, 22 nt, Homo sapiens
cacaagaucggaucuacggguu

SEQ ID NO: 2770 - RNA, 22 nt, Homo sapiens
caagcucgugucuguggguccg

SEQ ID NO: 2771 - RNA, 22 nt, Homo sapiens
cggacccacagacacgagcuug

SEQ ID NO: 2772 - RNA, 22 nt, Homo sapiens
cacccguagaaccgaccuugcg

SEQ ID NO: 2773 - RNA, 22 nt, Homo sapiens
cgcaaggucgguucuacgggug

SEQ ID NO: 2774 - RNA, 23 nt, Homo sapiens
uggagacgcggcccuguuggagu

SEQ ID NO: 2775 - RNA, 23 nt, Homo sapiens
acuccaacagggccgcgucucca

SEQ ID NO: 2776 - RNA, 23 nt, Homo sapiens
ucuacagugcacgugucuccagu

SEQ ID NO: 2777 - RNA, 23 nt, Homo sapiens
acuggagacacgugcacuguaga

SEQ ID NO: 2778 - RNA, 22 nt, Homo sapiens
caaauucguaucuaggggaaua

SEQ ID NO: 2779 - RNA, 22 nt, Homo sapiens
uauuccccuagauacgaauuug

SEQ ID NO: 2780 - RNA, 23 nt, Homo sapiens
uacccuguagauccgaauuugug

SEQ ID NO: 2781 - RNA, 23 nt, Homo sapiens
cacaaauucggaucuacagggua

SEQ ID NO: 2782 - RNA, 23 nt, Homo sapiens
ccugcagcgacuugauggcuucc

SEQ ID NO: 2783 - RNA, 23 nt, Homo sapiens
ggaagccaucaagucgcugcagg

SEQ ID NO: 2784 - RNA, 22 nt, Homo sapiens
ucagugcacuacagaacuuugu

SEQ ID NO: 2785 - RNA, 22 nt, Homo sapiens
acaaaguucuguagugcacuga

SEQ ID NO: 2786 - RNA, 22 nt, Homo sapiens
aaaguucugagacacuccgacu

SEQ ID NO: 2787 - RNA, 22 nt, Homo sapiens
agucggagugucucagaacuuu

SEQ ID NO: 2788 - RNA, 22 nt, Homo sapiens
ccuguucuccauuacuuggcuc

SEQ ID NO: 2789 - RNA, 22 nt, Homo sapiens
gagccaaguaauggagaacagg

SEQ ID NO: 2790 - RNA, 21 nt, Homo sapiens
uucaaguaauucaggauaggu

SEQ ID NO: 2791 - RNA, 21 nt, Homo sapiens
accuauccugaauuacuugaa

SEQ ID NO: 2792 - RNA, 22 nt, Homo sapiens
gcccugaacgaggggucuggag

SEQ ID NO: 2793 - RNA, 22 nt, Homo sapiens
cuccagaccccucguucagggc

SEQ ID NO: 2794 - RNA, 22 nt, Homo sapiens
gcugacuccuaguccagggcuc

SEQ ID NO: 2795 - RNA, 22 nt, Homo sapiens
gagcccuggacuaggagucagc

SEQ ID NO: 2796 - RNA, 22 nt, Homo sapiens
aucacacaaaggcaacuuuugu

SEQ ID NO: 2797 - RNA, 22 nt, Homo sapiens
acaaaaguugccuuugugugau

SEQ ID NO: 2798 - RNA, 22 nt, Homo sapiens
agagguugcccuuggugaauuc

SEQ ID NO: 2799 - RNA, 22 nt, Homo sapiens
gaauucaccaagggcaaccucu

SEQ ID NO: 2800 - RNA, 21 nt, Homo sapiens
gguagauuuuccuucuauggu

SEQ ID NO: 2801 - RNA, 21 nt, Homo sapiens
accauagaaggaaaaucuacc

SEQ ID NO: 2802 - RNA, 21 nt, Homo sapiens
aucauagaggaaaauccacgu

SEQ ID NO: 2803 - RNA, 21 nt, Homo sapiens
acguggauuuuccucuaugau

SEQ ID NO: 2804 - RNA, 22 nt, Homo sapiens
guagauucuccuucuaugagua

SEQ ID NO: 2805 - RNA, 22 nt, Homo sapiens
uacucauagaaggagaaucuac

SEQ ID NO: 2806 - RNA, 22 nt, Homo sapiens
cugguacaggccugggggacag

SEQ ID NO: 2807 - RNA, 22 nt, Homo sapiens
cugucccccaggccuguaccag

SEQ ID NO: 2808 - RNA, 22 nt, Homo sapiens
ucucccaacccuuguaccagug

SEQ ID NO: 2809 - RNA, 22 nt, Homo sapiens
cacugguacaaggguugggaga

SEQ ID NO: 2810 - RNA, 22 nt, Homo sapiens
acggguuaggcucuugggagcu

SEQ ID NO: 2811 - RNA, 22 nt, Homo sapiens
agcucccaagagccuaacccgu

SEQ ID NO: 2812 - RNA, 22 nt, Homo sapiens
ucacaagucaggcucuugggac

SEQ ID NO: 2813 - RNA, 22 nt, Homo sapiens
gucccaagagccugacuuguga

SEQ ID NO: 2814 - RNA, 22 nt, Homo sapiens
aacccguagauccgaacuugug

SEQ ID NO: 2815 - RNA, 22 nt, Homo sapiens
cacaaguucggaucuacggguu

SEQ ID NO: 2816 - RNA, 21 nt, Homo sapiens
cuguacaggccacugccuugc

SEQ ID NO: 2817 - RNA, 21 nt, Homo sapiens
gcaaggcaguggccuguacag

SEQ ID NO: 2818 - RNA, 22 nt, Homo sapiens
ugagguaguaguuuguacaguu

SEQ ID NO: 2819 - RNA, 22 nt, Homo sapiens
aacuguacaaacuacuaccuca

SEQ ID NO: 2820 - RNA, 22 nt, Homo sapiens
ucccugagacccuaacuuguga

SEQ ID NO: 2821 - RNA, 22 nt, Homo sapiens
ucacaaguuagggucucaggga

SEQ ID NO: 2822 - RNA, 22 nt, Homo sapiens
caagcuuguaucuauagguaug

SEQ ID NO: 2823 - RNA, 22 nt, Homo sapiens
cauaccuauagauacaagcuug

SEQ ID NO: 2824 - RNA, 23 nt, Homo sapiens
aaagugcugcgacauuugagcgu

SEQ ID NO: 2825 - RNA, 23 nt, Homo sapiens
acgcucaaaugucgcagcacuuu

SEQ ID NO: 2826 - RNA, 22 nt, Homo sapiens
uuuagagacggggucuugcucu

SEQ ID NO: 2827 - RNA, 22 nt, Homo sapiens
agagcaagaccccgucucuaaa

SEQ ID NO: 2828 - RNA, 24 nt, Homo sapiens
uggcccugacugaagaccagcagu

SEQ ID NO: 2829 - RNA, 24 nt, Homo sapiens
acugcuggucuucagucagggcca

SEQ ID NO: 2830 - RNA, 21 nt, Homo sapiens
gcgacccauacuugguuucag

SEQ ID NO: 2831 - RNA, 21 nt, Homo sapiens
cugaaaccaaguaugggucgc

SEQ ID NO: 2832 - RNA, 22 nt, Homo sapiens
gaaaucaagcgugggugagacc

SEQ ID NO: 2833 - RNA, 22 nt, Homo sapiens
ggucucacccacgcuugauuuc

SEQ ID NO: 2834 - RNA, 21 nt, Homo sapiens
cccugggccucugcuccccag

SEQ ID NO: 2835 - RNA, 21 nt, Homo sapiens
cuggggagcagaggcccaggg

SEQ ID NO: 2836 - RNA, 24 nt, Homo sapiens
uggggagcugaggcucugggggug

SEQ ID NO: 2837 - RNA, 24 nt, Homo sapiens
cacccccagagccucagcucccca

SEQ ID NO: 2838 - RNA, 20 nt, Homo sapiens
ggggagcuguggaagcagua

SEQ ID NO: 2839 - RNA, 20 nt, Homo sapiens
uacugcuuccacagcucccc

SEQ ID NO: 2840 - RNA, 25 nt, Homo sapiens
cuagugagggacagaaccaggauuc

SEQ ID NO: 2841 - RNA, 25 nt, Homo sapiens
gaauccugguucugucccucacuag

SEQ ID NO: 2842 - RNA, 20 nt, Homo sapiens
agagucuugugaugucuugc

SEQ ID NO: 2843 - RNA, 20 nt, Homo sapiens
gcaagacaucacaagacucu

SEQ ID NO: 2844 - RNA, 23 nt, Homo sapiens
gcagcagagaauaggacuacguc

SEQ ID NO: 2845 - RNA, 23 nt, Homo sapiens
gacguaguccuauucucugcugc

SEQ ID NO: 2846 - RNA, 23 nt, Homo sapiens
ugagcgccucgacgacagagccg

SEQ ID NO: 2847 - RNA, 23 nt, Homo sapiens
cggcucugucgucgaggcgcuca

SEQ ID NO: 2848 - RNA, 23 nt, Homo sapiens
ucccuguccuccaggagcucacg

SEQ ID NO: 2849 - RNA, 23 nt, Homo sapiens
cgugagcuccuggaggacaggga

SEQ ID NO: 2850 - RNA, 22 nt, Homo sapiens
cuauacggccuccuagcuuucc

SEQ ID NO: 2851 - RNA, 22 nt, Homo sapiens
ggaaagcuaggaggccguauag

SEQ ID NO: 2852 - RNA, 22 nt, Homo sapiens
ugagguaggagguuguauaguu

SEQ ID NO: 2853 - RNA, 22 nt, Homo sapiens
aacuauacaaccuccuaccuca

SEQ ID NO: 2854 - RNA, 22 nt, Homo sapiens
cugcgcaagcuacugccuugcu

SEQ ID NO: 2855 - RNA, 22 nt, Homo sapiens
agcaaggcaguagcuugcgcag

SEQ ID NO: 2856 - RNA, 22 nt, Homo sapiens
ugagguaguaguuugugcuguu

SEQ ID NO: 2857 - RNA, 22 nt, Homo sapiens
aacagcacaaacuacuaccuca

SEQ ID NO: 2858 - RNA, 22 nt, Homo sapiens
ugcccuguggacucaguucugg

SEQ ID NO: 2859 - RNA, 22 nt, Homo sapiens
ccagaacugaguccacagggca

SEQ ID NO: 2860 - RNA, 21 nt, Homo sapiens
ugguucuagacuugccaacua

SEQ ID NO: 2861 - RNA, 21 nt, Homo sapiens
uaguuggcaagucuagaacca

SEQ ID NO: 2862 - RNA, 23 nt, Homo sapiens
ugucugcccgcaugccugccucu

SEQ ID NO: 2863 - RNA, 23 nt, Homo sapiens
agaggcaggcaugcgggcagaca

SEQ ID NO: 2864 - RNA, 22 nt, Homo sapiens
aaaaguaauugcggucuuuggu

SEQ ID NO: 2865 - RNA, 22 nt, Homo sapiens
accaaagaccgcaauuacuuuu

SEQ ID NO: 2866 - RNA, 18 nt, Homo sapiens
ucgaggagcucacagucu

SEQ ID NO: 2867 - RNA, 18 nt, Homo sapiens
agacugugagcuccucga

SEQ ID NO: 2868 - RNA, 22 nt, Homo sapiens
cuauacaaucuauugccuuccc

SEQ ID NO: 2869 - RNA, 22 nt, Homo sapiens
gggaaggcaauagauuguauag

SEQ ID NO: 2870 - RNA, 22 nt, Homo sapiens
cuauacagucuacugucuuucc

SEQ ID NO: 2871 - RNA, 22 nt, Homo sapiens
ggaaagacaguagacuguauag

SEQ ID NO: 2872 - RNA, 22 nt, Homo sapiens
ugagguaguagauuguauaguu

SEQ ID NO: 2873 - RNA, 22 nt, Homo sapiens
aacuauacaaucuacuaccuca

SEQ ID NO: 2874 - RNA, 22 nt, Homo sapiens
aaaaguaauugugguuuuggcc

SEQ ID NO: 2875 - RNA, 22 nt, Homo sapiens
ggccaaaaccacaauuacuuuu

SEQ ID NO: 2876 - RNA, 22 nt, Homo sapiens
aaaaguaauugcgguuuuugcc

SEQ ID NO: 2877 - RNA, 22 nt, Homo sapiens
ggcaaaaaccgcaauuacuuuu

SEQ ID NO: 2878 - RNA, 22 nt, Homo sapiens
ccucugaaauucaguucuucag

SEQ ID NO: 2879 - RNA, 22 nt, Homo sapiens
cugaagaacugaauuucagagg

SEQ ID NO: 2880 - RNA, 22 nt, Homo sapiens
ugagaacugaauuccauggguu

SEQ ID NO: 2881 - RNA, 22 nt, Homo sapiens
aacccauggaauucaguucuca

SEQ ID NO: 2882 - RNA, 22 nt, Homo sapiens
acagcaggcacagacaggcagu

SEQ ID NO: 2883 - RNA, 22 nt, Homo sapiens
acugccugucugugccugcugu

SEQ ID NO: 2884 - RNA, 22 nt, Homo sapiens
ugccugucuacacuugcugugc

SEQ ID NO: 2885 - RNA, 22 nt, Homo sapiens
gcacagcaaguguagacaggca

SEQ ID NO: 2886 - RNA, 22 nt, Homo sapiens
uagcaccaucugaaaucgguua

SEQ ID NO: 2887 - RNA, 22 nt, Homo sapiens
uaaccgauuucagauggugcua

SEQ ID NO: 2888 - RNA, 22 nt, Homo sapiens
acugauuucuuuugguguucag

SEQ ID NO: 2889 - RNA, 22 nt, Homo sapiens
cugaacaccaaaagaaaucagu

SEQ ID NO: 2890 - RNA, 24 nt, Homo sapiens
gcugguuucauauggugguuuaga

SEQ ID NO: 2891 - RNA, 24 nt, Homo sapiens
ucuaaaccaccauaugaaaccagc

SEQ ID NO: 2892 - RNA, 22 nt, Homo sapiens
cugguuucacaugguggcuuag

SEQ ID NO: 2893 - RNA, 22 nt, Homo sapiens
cuaagccaccaugugaaaccag

SEQ ID NO: 2894 - RNA, 23 nt, Homo sapiens
uagcaccauuugaaaucaguguu

SEQ ID NO: 2895 - RNA, 23 nt, Homo sapiens
aacacugauuucaaauggugcua

SEQ ID NO: 2896 - RNA, 22 nt, Homo sapiens
uagcaccauuugaaaucgguua

SEQ ID NO: 2897 - RNA, 22 nt, Homo sapiens
uaaccgauuucaaauggugcua

SEQ ID NO: 2898 - RNA, 22 nt, Homo sapiens
ugaccgauuucuccugguguuc

SEQ ID NO: 2899 - RNA, 22 nt, Homo sapiens
gaacaccaggagaaaucgguca

SEQ ID NO: 2900 - RNA, 23 nt, Homo sapiens
ugucacucggcucggcccacuac

SEQ ID NO: 2901 - RNA, 23 nt, Homo sapiens
guagugggccgagccgagugaca

SEQ ID NO: 2902 - RNA, 22 nt, Homo sapiens
cugccaauuccauaggucacag

SEQ ID NO: 2903 - RNA, 22 nt, Homo sapiens
cugugaccuauggaauuggcag

SEQ ID NO: 2904 - RNA, 21 nt, Homo sapiens
cugaccuaugaauugacagcc

SEQ ID NO: 2905 - RNA, 21 nt, Homo sapiens
ggcugucaauucauaggucag

SEQ ID NO: 2906 - RNA, 20 nt, Homo sapiens
acugccccaggugcugcugg

SEQ ID NO: 2907 - RNA, 20 nt, Homo sapiens
ccagcagcaccuggggcagu

SEQ ID NO: 2908 - RNA, 22 nt, Homo sapiens
aacgccauuaucacacuaaaua

SEQ ID NO: 2909 - RNA, 22 nt, Homo sapiens
uauuuagugugauaauggcguu

SEQ ID NO: 2910 - RNA, 22 nt, Homo sapiens
cuuucagucggauguuugcagc

SEQ ID NO: 2911 - RNA, 22 nt, Homo sapiens
gcugcaaacauccgacugaaag

SEQ ID NO: 2912 - RNA, 22 nt, Homo sapiens
aauugcacgguauccaucugua

SEQ ID NO: 2913 - RNA, 22 nt, Homo sapiens
uacagauggauaccgugcaauu

SEQ ID NO: 2914 - RNA, 22 nt, Homo sapiens
cggguggaucacgaugcaauuu

SEQ ID NO: 2915 - RNA, 22 nt, Homo sapiens
aaauugcaucgugauccacccg

SEQ ID NO: 2916 - RNA, 22 nt, Homo sapiens
cugggagguggauguuuacuuc

SEQ ID NO: 2917 - RNA, 22 nt, Homo sapiens
gaaguaaacauccaccucccag

SEQ ID NO: 2918 - RNA, 22 nt, Homo sapiens
uguaaacauccuacacucagcu

SEQ ID NO: 2919 - RNA, 22 nt, Homo sapiens
agcugaguguaggauguuuaca

SEQ ID NO: 2920 - RNA, 22 nt, Homo sapiens
cugggagaggguuguuuacucc

SEQ ID NO: 2921 - RNA, 22 nt, Homo sapiens
ggaguaaacaacccucucccag

SEQ ID NO: 2922 - RNA, 22 nt, Homo sapiens
cugggagaaggcuguuuacucu

SEQ ID NO: 2923 - RNA, 22 nt, Homo sapiens
agaguaaacagccuucucccag

SEQ ID NO: 2924 - RNA, 23 nt, Homo sapiens
uguaaacauccuacacucucagc

SEQ ID NO: 2925 - RNA, 23 nt, Homo sapiens
gcugagaguguaggauguuuaca

SEQ ID NO: 2926 - RNA, 22 nt, Homo sapiens
uuuuucauuauugcuccugacc

SEQ ID NO: 2927 - RNA, 22 nt, Homo sapiens
ggucaggagcaauaaugaaaaa

SEQ ID NO: 2928 - RNA, 23 nt, Homo sapiens
ucaagagcaauaacgaaaaaugu

SEQ ID NO: 2929 - RNA, 23 nt, Homo sapiens
acauuuuucguuauugcucuuga

SEQ ID NO: 2930 - RNA, 23 nt, Homo sapiens
caaagugcuuacagugcagguag

SEQ ID NO: 2931 - RNA, 23 nt, Homo sapiens
cuaccugcacuguaagcacuuug

SEQ ID NO: 2932 - RNA, 22 nt, Homo sapiens
ggauuccuggaaauacuguucu

SEQ ID NO: 2933 - RNA, 22 nt, Homo sapiens
agaacaguauuuccaggaaucc

SEQ ID NO: 2934 - RNA, 23 nt, Homo sapiens
guccaguuuucccaggaaucccu

SEQ ID NO: 2935 - RNA, 23 nt, Homo sapiens
agggauuccugggaaaacuggac

SEQ ID NO: 2936 - RNA, 22 nt, Homo sapiens
acugcauuaugagcacuuaaag

SEQ ID NO: 2937 - RNA, 22 nt, Homo sapiens
cuuuaagugcucauaaugcagu

SEQ ID NO: 2938 - RNA, 23 nt, Homo sapiens
uaaagugcuuauagugcagguag

SEQ ID NO: 2939 - RNA, 23 nt, Homo sapiens
cuaccugcacuauaagcacuuua

SEQ ID NO: 2940 - RNA, 22 nt, Homo sapiens
gaggguuggguggaggcucucc

SEQ ID NO: 2941 - RNA, 22 nt, Homo sapiens
ggagagccuccacccaacccuc

SEQ ID NO: 2942 - RNA, 22 nt, Homo sapiens
cugugcgugugacagcggcuga

SEQ ID NO: 2943 - RNA, 22 nt, Homo sapiens
ucagccgcugucacacgcacag

SEQ ID NO: 2944 - RNA, 22 nt, Homo sapiens
ccaguggggcugcuguuaucug

SEQ ID NO: 2945 - RNA, 22 nt, Homo sapiens
cagauaacagcagccccacugg

SEQ ID NO: 2946 - RNA, 22 nt, Homo sapiens
uguaacagcaacuccaugugga

SEQ ID NO: 2947 - RNA, 22 nt, Homo sapiens
uccacauggaguugcuguuaca

SEQ ID NO: 2948 - RNA, 22 nt, Homo sapiens
ucacaguggucucugggauuau

SEQ ID NO: 2949 - RNA, 22 nt, Homo sapiens
auaaucccagagaccacuguga

SEQ ID NO: 2950 - RNA, 22 nt, Homo sapiens
uaaucucagcuggcaacuguga

SEQ ID NO: 2951 - RNA, 22 nt, Homo sapiens
ucacaguugccagcugagauua

SEQ ID NO: 2952 - RNA, 22 nt, Homo sapiens
cagugccucggcagugcagccc

SEQ ID NO: 2953 - RNA, 22 nt, Homo sapiens
gggcugcacugccgaggcacug

SEQ ID NO: 2954 - RNA, 20 nt, Homo sapiens
gugcauugcuguugcauugc

SEQ ID NO: 2955 - RNA, 20 nt, Homo sapiens
gcaaugcaacagcaaugcac

SEQ ID NO: 2956 - RNA, 19 nt, Homo sapiens
acuggacuuggaggcagaa

SEQ ID NO: 2957 - RNA, 19 nt, Homo sapiens
uucugccuccaaguccagu

SEQ ID NO: 2958 - RNA, 25 nt, Homo sapiens
acuggacuuggagucagaagagugg

SEQ ID NO: 2959 - RNA, 25 nt, Homo sapiens
ccacucuucugacuccaaguccagu

SEQ ID NO: 2960 - RNA, 20 nt, Homo sapiens
acuggacuuggagucagaaa

SEQ ID NO: 2961 - RNA, 20 nt, Homo sapiens
uuucugacuccaaguccagu

SEQ ID NO: 2962 - RNA, 19 nt, Homo sapiens
acuggacuuggagucagga

SEQ ID NO: 2963 - RNA, 19 nt, Homo sapiens
uccugacuccaaguccagu

SEQ ID NO: 2964 - RNA, 20 nt, Homo sapiens
acuggacuuggagccagaag

SEQ ID NO: 2965 - RNA, 20 nt, Homo sapiens
cuucuggcuccaaguccagu

SEQ ID NO: 2966 - RNA, 20 nt, Homo sapiens
acugggcuuggagucagaag

SEQ ID NO: 2967 - RNA, 20 nt, Homo sapiens
cuucugacuccaagcccagu

SEQ ID NO: 2968 - RNA, 21 nt, Homo sapiens
acuggacuuggugucagaugg

SEQ ID NO: 2969 - RNA, 21 nt, Homo sapiens
ccaucugacaccaaguccagu

SEQ ID NO: 2970 - RNA, 21 nt, Homo sapiens
acuggacuaggagucagaagg

SEQ ID NO: 2971 - RNA, 21 nt, Homo sapiens
ccuucugacuccuaguccagu

SEQ ID NO: 2972 - RNA, 19 nt, Homo sapiens
acuggauuuggagccagaa

SEQ ID NO: 2973 - RNA, 19 nt, Homo sapiens
uucuggcuccaaauccagu

SEQ ID NO: 2974 - RNA, 20 nt, Homo sapiens
aggaauguuccuucuuugcc

SEQ ID NO: 2975 - RNA, 20 nt, Homo sapiens
ggcaaagaaggaacauuccu

SEQ ID NO: 2976 - RNA, 21 nt, Homo sapiens
ucagugcaugacagaacuugg

SEQ ID NO: 2977 - RNA, 21 nt, Homo sapiens
ccaaguucugucaugcacuga

SEQ ID NO: 2978 - RNA, 20 nt, Homo sapiens
ucacaccugccucgcccccc

SEQ ID NO: 2979 - RNA, 20 nt, Homo sapiens
ggggggcgaggcagguguga

SEQ ID NO: 2980 - RNA, 21 nt, Homo sapiens
gugggcgggggcaggugugug

SEQ ID NO: 2981 - RNA, 21 nt, Homo sapiens
cacacaccugcccccgcccac

SEQ ID NO: 2982 - RNA, 22 nt, Homo sapiens
acgcccuucccccccuucuuca

SEQ ID NO: 2983 - RNA, 22 nt, Homo sapiens
ugaagaagggggggaagggcgu

SEQ ID NO: 2984 - RNA, 22 nt, Homo sapiens
uugcauauguaggaugucccau

SEQ ID NO: 2985 - RNA, 22 nt, Homo sapiens
augggacauccuacauaugcaa

SEQ ID NO: 2986 - RNA, 23 nt, Homo sapiens
guuugcacgggugggccuugucu

SEQ ID NO: 2987 - RNA, 23 nt, Homo sapiens
agacaaggcccacccgugcaaac

SEQ ID NO: 2988 - RNA, 22 nt, Homo sapiens
gacuauagaacuuucccccuca

SEQ ID NO: 2989 - RNA, 22 nt, Homo sapiens
ugagggggaaaguucuauaguc

SEQ ID NO: 2990 - RNA, 21 nt, Homo sapiens
agggggaaaguucuauagucc

SEQ ID NO: 2991 - RNA, 21 nt, Homo sapiens
ggacuauagaacuuucccccu

SEQ ID NO: 2992 - RNA, 21 nt, Homo sapiens
cuuuuugcggucugggcuugc

SEQ ID NO: 2993 - RNA, 21 nt, Homo sapiens
gcaagcccagaccgcaaaaag

SEQ ID NO: 2994 - RNA, 21 nt, Homo sapiens
ucuuguguucucuagaucagu

SEQ ID NO: 2995 - RNA, 21 nt, Homo sapiens
acugaucuagagaacacaaga

SEQ ID NO: 2996 - RNA, 23 nt, Homo sapiens
cccaguguucagacuaccuguuc

SEQ ID NO: 2997 - RNA, 23 nt, Homo sapiens
gaacagguagucugaacacuggg

SEQ ID NO: 2998 - RNA, 22 nt, Homo sapiens
acaguagucugcacauugguua

SEQ ID NO: 2999 - RNA, 22 nt, Homo sapiens
uaaccaaugugcagacuacugu

SEQ ID NO: 3000 - RNA, 22 nt, Homo sapiens
acaguagucugcacauugguua

SEQ ID NO: 3001 - RNA, 22 nt, Homo sapiens
uaaccaaugugcagacuacugu

SEQ ID NO: 3002 - RNA, 23 nt, Homo sapiens
cccaguguuuagacuaucuguuc

SEQ ID NO: 3003 - RNA, 23 nt, Homo sapiens
gaacagauagucuaaacacuggg

SEQ ID NO: 3004 - RNA, 22 nt, Homo sapiens
uggagugugacaaugguguuug

SEQ ID NO: 3005 - RNA, 22 nt, Homo sapiens
caaacaccauugucacacucca

SEQ ID NO: 3006 - RNA, 22 nt, Homo sapiens
ugcccuaaaugccccuucuggc

SEQ ID NO: 3007 - RNA, 22 nt, Homo sapiens
gccagaaggggcauuuagggca

SEQ ID NO: 3008 - RNA, 23 nt, Homo sapiens
uaaggugcaucuagugcaguuag

SEQ ID NO: 3009 - RNA, 23 nt, Homo sapiens
cuaacugcacuagaugcaccuua

SEQ ID NO: 3010 - RNA, 22 nt, Homo sapiens
cuccuauaugaugccuuucuuc

SEQ ID NO: 3011 - RNA, 22 nt, Homo sapiens
gaagaaaggcaucauauaggag

SEQ ID NO: 3012 - RNA, 21 nt, Homo sapiens
gaacggcuucauacaggaguu

SEQ ID NO: 3013 - RNA, 21 nt, Homo sapiens
aacuccuguaugaagccguuc

SEQ ID NO: 3014 - RNA, 22 nt, Homo sapiens
ugugacugguugaccagagggg

SEQ ID NO: 3015 - RNA, 22 nt, Homo sapiens
ccccucuggucaaccagucaca

SEQ ID NO: 3016 - RNA, 23 nt, Homo sapiens
acugcccuaagugcuccuucugg

SEQ ID NO: 3017 - RNA, 23 nt, Homo sapiens
ccagaaggagcacuuagggcagu

SEQ ID NO: 3018 - RNA, 23 nt, Homo sapiens
uaaggugcaucuagugcagauag

SEQ ID NO: 3019 - RNA, 23 nt, Homo sapiens
cuaucugcacuagaugcaccuua

SEQ ID NO: 3020 - RNA, 22 nt, Homo sapiens
cagugcaaugaugaaagggcau

SEQ ID NO: 3021 - RNA, 22 nt, Homo sapiens
augcccuuucaucauugcacug

SEQ ID NO: 3022 - RNA, 21 nt, Homo sapiens
acucuuucccuguugcacuac

SEQ ID NO: 3023 - RNA, 21 nt, Homo sapiens
guagugcaacagggaaagagu

SEQ ID NO: 3024 - RNA, 24 nt, Homo sapiens
uuuggcaaugguagaacucacacu

SEQ ID NO: 3025 - RNA, 24 nt, Homo sapiens
agugugaguucuaccauugccaaa

SEQ ID NO: 3026 - RNA, 21 nt, Homo sapiens
agggcccccccucaauccugu

SEQ ID NO: 3027 - RNA, 21 nt, Homo sapiens
acaggauugagggggggcccu

SEQ ID NO: 3028 - RNA, 22 nt, Homo sapiens
cagugcaauguuaaaagggcau

SEQ ID NO: 3029 - RNA, 22 nt, Homo sapiens
augcccuuuuaacauugcacug

SEQ ID NO: 3030 - RNA, 22 nt, Homo sapiens
uucacauugugcuacugucugc

SEQ ID NO: 3031 - RNA, 22 nt, Homo sapiens
gcagacaguagcacaaugugaa

SEQ ID NO: 3032 - RNA, 22 nt, Homo sapiens
ucggauccgucugagcuuggcu

SEQ ID NO: 3033 - RNA, 22 nt, Homo sapiens
agccaagcucagacggauccga

SEQ ID NO: 3034 - RNA, 22 nt, Homo sapiens
cugaagcucagagggcucugau

SEQ ID NO: 3035 - RNA, 22 nt, Homo sapiens
aucagagcccucugagcuucag

SEQ ID NO: 3036 - RNA, 22 nt, Homo sapiens
ccucuuccccuugucucuccag

SEQ ID NO: 3037 - RNA, 22 nt, Homo sapiens
cuggagagacaaggggaagagg

SEQ ID NO: 3038 - RNA, 22 nt, Homo sapiens
ugagugacaggggaaaugggga

SEQ ID NO: 3039 - RNA, 22 nt, Homo sapiens
uccccauuuccccugucacuca

SEQ ID NO: 3040 - RNA, 22 nt, Homo sapiens
ucaggacacuucugaacuugga

SEQ ID NO: 3041 - RNA, 22 nt, Homo sapiens
uccaaguucagaaguguccuga

SEQ ID NO: 3042 - RNA, 22 nt, Homo sapiens
caguucagaaguguuccugagu

SEQ ID NO: 3043 - RNA, 22 nt, Homo sapiens
acucaggaacacuucugaacug

SEQ ID NO: 3044 - RNA, 21 nt, Homo sapiens
uuucccuuuccauccuggcag

SEQ ID NO: 3045 - RNA, 21 nt, Homo sapiens
cugccaggauggaaagggaaa

SEQ ID NO: 3046 - RNA, 21 nt, Homo sapiens
uugccagggcaggagguggaa

SEQ ID NO: 3047 - RNA, 21 nt, Homo sapiens
uuccaccuccugcccuggcaa

SEQ ID NO: 3048 - RNA, 21 nt, Homo sapiens
agagauugguagaaaucaggu

SEQ ID NO: 3049 - RNA, 21 nt, Homo sapiens
accugauuucuaccaaucucu

SEQ ID NO: 3050 - RNA, 23 nt, Homo sapiens
aaucggacccauuuaaaccggag

SEQ ID NO: 3051 - RNA, 23 nt, Homo sapiens
cuccgguuuaaauggguccgauu

SEQ ID NO: 3052 - RNA, 24 nt, Homo sapiens
ucugggcacaggcggauggacagg

SEQ ID NO: 3053 - RNA, 24 nt, Homo sapiens
ccuguccauccgccugugcccaga

SEQ ID NO: 3054 - RNA, 21 nt, Homo sapiens
ccagugacugagcuggagcca

SEQ ID NO: 3055 - RNA, 21 nt, Homo sapiens
uggcuccagcucagucacugg

SEQ ID NO: 3056 - RNA, 22 nt, Homo sapiens
aggauaggaagaaugaagugcu

SEQ ID NO: 3057 - RNA, 22 nt, Homo sapiens
agcacuucauucuuccuauccu

SEQ ID NO: 3058 - RNA, 22 nt, Homo sapiens
aggagaguggauuccagguggu

SEQ ID NO: 3059 - RNA, 22 nt, Homo sapiens
accaccuggaauccacucuccu

SEQ ID NO: 3060 - RNA, 22 nt, Homo sapiens
uccuccucuaccucaucccagu

SEQ ID NO: 3061 - RNA, 22 nt, Homo sapiens
acugggaugagguagaggagga

SEQ ID NO: 3062 - RNA, 22 nt, Homo sapiens
ugagggguuuggaaugggaugg

SEQ ID NO: 3063 - RNA, 22 nt, Homo sapiens
ccaucccauuccaaaccccuca

SEQ ID NO: 3064 - RNA, 21 nt, Homo sapiens
auccaguucucugagggggcu

SEQ ID NO: 3065 - RNA, 21 nt, Homo sapiens
agcccccucagagaacuggau

SEQ ID NO: 3066 - RNA, 22 nt, Homo sapiens
aaccccuaaggcaacuggaugg

SEQ ID NO: 3067 - RNA, 22 nt, Homo sapiens
ccauccaguugccuuagggguu

SEQ ID NO: 3068 - RNA, 21 nt, Homo sapiens
ucauccucgucucccucccag

SEQ ID NO: 3069 - RNA, 21 nt, Homo sapiens
cugggagggagacgaggauga

SEQ ID NO: 3070 - RNA, 22 nt, Homo sapiens
agggaaggggacgaggguuggg

SEQ ID NO: 3071 - RNA, 22 nt, Homo sapiens
cccaacccucguccccuucccu

SEQ ID NO: 3072 - RNA, 23 nt, Homo sapiens
aagaagagacugagucaucgaau

SEQ ID NO: 3073 - RNA, 23 nt, Homo sapiens
auucgaugacucagucucuucuu

SEQ ID NO: 3074 - RNA, 23 nt, Homo sapiens
caauggcacaaacucauucuuga

SEQ ID NO: 3075 - RNA, 23 nt, Homo sapiens
ucaagaaugaguuugugccauug

SEQ ID NO: 3076 - RNA, 21 nt, Homo sapiens
acugaauccucuuuuccucag

SEQ ID NO: 3077 - RNA, 21 nt, Homo sapiens
cugaggaaaagaggauucagu

SEQ ID NO: 3078 - RNA, 22 nt, Homo sapiens
ugggaugagggauugaagugga

SEQ ID NO: 3079 - RNA, 22 nt, Homo sapiens
uccacuucaaucccucauccca

SEQ ID NO: 3080 - RNA, 22 nt, Homo sapiens
caggccauauugugcugccuca

SEQ ID NO: 3081 - RNA, 22 nt, Homo sapiens
ugaggcagcacaauauggccug

SEQ ID NO: 3082 - RNA, 22 nt, Homo sapiens
uagcagcacauaaugguuugug

SEQ ID NO: 3083 - RNA, 22 nt, Homo sapiens
cacaaaccauuaugugcugcua

SEQ ID NO: 3084 - RNA, 22 nt, Homo sapiens
cgaaucauuauuugcugcucua

SEQ ID NO: 3085 - RNA, 22 nt, Homo sapiens
uagagcagcaaauaaugauucg

SEQ ID NO: 3086 - RNA, 22 nt, Homo sapiens
uagcagcacaucaugguuuaca

SEQ ID NO: 3087 - RNA, 22 nt, Homo sapiens
uguaaaccaugaugugcugcua

SEQ ID NO: 3088 - RNA, 22 nt, Homo sapiens
ccaauauuacugugcugcuuua

SEQ ID NO: 3089 - RNA, 22 nt, Homo sapiens
uaaagcagcacaguaauauugg

SEQ ID NO: 3090 - RNA, 22 nt, Homo sapiens
cuagguauggucccagggaucc

SEQ ID NO: 3091 - RNA, 22 nt, Homo sapiens
ggaucccugggaccauaccuag

SEQ ID NO: 3092 - RNA, 20 nt, Homo sapiens
guguguggaaaugcuucugc

SEQ ID NO: 3093 - RNA, 20 nt, Homo sapiens
gcagaagcauuuccacacac

SEQ ID NO: 3094 - RNA, 22 nt, Homo sapiens
gugugcggaaaugcuucugcua

SEQ ID NO: 3095 - RNA, 22 nt, Homo sapiens
uagcagaagcauuuccgcacac

SEQ ID NO: 3096 - RNA, 23 nt, Homo sapiens
agcagcauuguacagggcuauca

SEQ ID NO: 3097 - RNA, 23 nt, Homo sapiens
ugauagcccuguacaaugcugcu

SEQ ID NO: 3098 - RNA, 22 nt, Homo sapiens
aacuggcccucaaagucccgcu

SEQ ID NO: 3099 - RNA, 22 nt, Homo sapiens
agcgggacuuugagggccaguu

SEQ ID NO: 3100 - RNA, 22 nt, Homo sapiens
cgggguuuugagggcgagauga

SEQ ID NO: 3101 - RNA, 22 nt, Homo sapiens
ucaucucgcccucaaaaccccg

SEQ ID NO: 3102 - RNA, 21 nt, Homo sapiens
gcagggacagcaaaggggugc

SEQ ID NO: 3103 - RNA, 21 nt, Homo sapiens
gcaccccuuugcugucccugc

SEQ ID NO: 3104 - RNA, 22 nt, Homo sapiens
uucccuuugucauccuucgccu

SEQ ID NO: 3105 - RNA, 22 nt, Homo sapiens
aggcgaaggaugacaaagggaa

SEQ ID NO: 3106 - RNA, 23 nt, Homo sapiens
auggccaaaacugcaguuauuuu

SEQ ID NO: 3107 - RNA, 23 nt, Homo sapiens
aaaauaacugcaguuuuggccau

SEQ ID NO: 3108 - RNA, 25 nt, Homo sapiens
aaaaaccacaauuacuuuugcacca

SEQ ID NO: 3109 - RNA, 25 nt, Homo sapiens
uggugcaaaaguaauugugguuuuu

SEQ ID NO: 3110 - RNA, 21 nt, Homo sapiens
caaaagugaucgugguuuuug

SEQ ID NO: 3111 - RNA, 21 nt, Homo sapiens
caaaaaccacgaucacuuuug

SEQ ID NO: 3112 - RNA, 23 nt, Homo sapiens
caaagacugcaauuacuuuugcg

SEQ ID NO: 3113 - RNA, 23 nt, Homo sapiens
cgcaaaaguaauugcagucuuug

SEQ ID NO: 3114 - RNA, 23 nt, Homo sapiens
aaaaguaacugcgguuuuugccu

SEQ ID NO: 3115 - RNA, 23 nt, Homo sapiens
aggcaaaaaccgcaguuacuuuu

SEQ ID NO: 3116 - RNA, 22 nt, Homo sapiens
ugccuggaacauaguagggacu

SEQ ID NO: 3117 - RNA, 22 nt, Homo sapiens
agucccuacuauguuccaggca

SEQ ID NO: 3118 - RNA, 21 nt, Homo sapiens
auaggacucauauagugccag

SEQ ID NO: 3119 - RNA, 21 nt, Homo sapiens
cuggcacuauaugaguccuau

SEQ ID NO: 3120 - RNA, 20 nt, Homo sapiens
agacacuauacgagucauau

SEQ ID NO: 3121 - RNA, 20 nt, Homo sapiens
auaugacucguauagugucu

SEQ ID NO: 3122 - RNA, 23 nt, Homo sapiens
ugugacugcauuaugaaaauucu

SEQ ID NO: 3123 - RNA, 23 nt, Homo sapiens
agaauuuucauaaugcagucaca

SEQ ID NO: 3124 - RNA, 20 nt, Homo sapiens
uggcuuuuaacuuugauggc

SEQ ID NO: 3125 - RNA, 20 nt, Homo sapiens
gccaucaaaguuaaaagcca

SEQ ID NO: 3126 - RNA, 21 nt, Homo sapiens
cacagcaaguguagacaggca

SEQ ID NO: 3127 - RNA, 21 nt, Homo sapiens
ugccugucuacacuugcugug

SEQ ID NO: 3128 - RNA, 21 nt, Homo sapiens
ccugucugugccugcuguaca

SEQ ID NO: 3129 - RNA, 21 nt, Homo sapiens
uguacagcaggcacagacagg

SEQ ID NO: 3130 - RNA, 22 nt, Homo sapiens
uaaauagaguaggcaaaggaca

SEQ ID NO: 3131 - RNA, 22 nt, Homo sapiens
uguccuuugccuacucuauuua

SEQ ID NO: 3132 - RNA, 22 nt, Homo sapiens
uccuuugccuauucuauuuaag

SEQ ID NO: 3133 - RNA, 22 nt, Homo sapiens
cuuaaauagaauaggcaaagga

SEQ ID NO: 3134 - RNA, 22 nt, Homo sapiens
guugggacaagaggacggucuu

SEQ ID NO: 3135 - RNA, 22 nt, Homo sapiens
aagaccguccucuugucccaac

SEQ ID NO: 3136 - RNA, 17 nt, Homo sapiens
cagagaauuguuuaauc

SEQ ID NO: 3137 - RNA, 17 nt, Homo sapiens
gauuaaacaauucucug

SEQ ID NO: 3138 - RNA, 20 nt, Homo sapiens
uagaggaagcuguggagaga

SEQ ID NO: 3139 - RNA, 20 nt, Homo sapiens
ucucuccacagcuuccucua

SEQ ID NO: 3140 - RNA, 22 nt, Homo sapiens
uccccuucugcaggccugcugg

SEQ ID NO: 3141 - RNA, 22 nt, Homo sapiens
ccagcaggccugcagaagggga

SEQ ID NO: 3142 - RNA, 23 nt, Homo sapiens
aucagggcuuguggaaugggaag

SEQ ID NO: 3143 - RNA, 23 nt, Homo sapiens
cuucccauuccacaagcccugau

SEQ ID NO: 3144 - RNA, 23 nt, Homo sapiens
ucuggcaaguaaaaaacucucau

SEQ ID NO: 3145 - RNA, 23 nt, Homo sapiens
augagaguuuuuuacuugccaga

SEQ ID NO: 3146 - RNA, 23 nt, Homo sapiens
ucgaggacugguggaagggccuu

SEQ ID NO: 3147 - RNA, 23 nt, Homo sapiens
aaggcccuuccaccaguccucga

SEQ ID NO: 3148 - RNA, 24 nt, Homo sapiens
uggguagagaaggagcucagagga

SEQ ID NO: 3149 - RNA, 24 nt, Homo sapiens
uccucugagcuccuucucuaccca

SEQ ID NO: 3150 - RNA, 22 nt, Homo sapiens
uaaagaacucuuaaaacccaau

SEQ ID NO: 3151 - RNA, 22 nt, Homo sapiens
auuggguuuuaagaguucuuua

SEQ ID NO: 3152 - RNA, 23 nt, Homo sapiens
ugauggauaaaagacuacauauu

SEQ ID NO: 3153 - RNA, 23 nt, Homo sapiens
aauauguagucuuuuauccauca

SEQ ID NO: 3154 - RNA, 22 nt, Homo sapiens
ugccuaggcugagacugcagug

SEQ ID NO: 3155 - RNA, 22 nt, Homo sapiens
cacugcagucucagccuaggca

SEQ ID NO: 3156 - RNA, 22 nt, Homo sapiens
uggcccaaccuauucaguuagu

SEQ ID NO: 3157 - RNA, 22 nt, Homo sapiens
acuaacugaauagguugggcca

SEQ ID NO: 3158 - RNA, 23 nt, Homo sapiens
cugacugaauagguagggucauu

SEQ ID NO: 3159 - RNA, 23 nt, Homo sapiens
aaugacccuaccuauucagucag

SEQ ID NO: 3160 - RNA, 24 nt, Homo sapiens
ucuguagccugggagcaauggggu

SEQ ID NO: 3161 - RNA, 24 nt, Homo sapiens
accccauugcucccaggcuacaga

SEQ ID NO: 3162 - RNA, 23 nt, Homo sapiens
uaggagcucaacagaugccuguu

SEQ ID NO: 3163 - RNA, 23 nt, Homo sapiens
aacaggcaucuguugagcuccua

SEQ ID NO: 3164 - RNA, 19 nt, Homo sapiens
gagggcggguggaggagga

SEQ ID NO: 3165 - RNA, 19 nt, Homo sapiens
uccuccuccacccgcccuc

SEQ ID NO: 3166 - RNA, 25 nt, Homo sapiens
auaacauuguaaagcgcuucuuucg

SEQ ID NO: 3167 - RNA, 25 nt, Homo sapiens
cgaaagaagcgcuuuacaauguuau

SEQ ID NO: 3168 - RNA, 24 nt, Homo sapiens
agauauuuugaguguuuggaauug

SEQ ID NO: 3169 - RNA, 24 nt, Homo sapiens
caauuccaaacacucaaaauaucu

SEQ ID NO: 3170 - RNA, 22 nt, Homo sapiens
aacuccaaacacucaaaacuca

SEQ ID NO: 3171 - RNA, 22 nt, Homo sapiens
ugaguuuugaguguuuggaguu

SEQ ID NO: 3172 - RNA, 22 nt, Homo sapiens
caugcuaggauagaaagaaugg

SEQ ID NO: 3173 - RNA, 22 nt, Homo sapiens
ccauucuuucuauccuagcaug

SEQ ID NO: 3174 - RNA, 24 nt, Homo sapiens
gguugggcagugaggaggguguga

SEQ ID NO: 3175 - RNA, 24 nt, Homo sapiens
ucacacccuccucacugcccaacc

SEQ ID NO: 3176 - RNA, 22 nt, Homo sapiens
uggaaaaaacuggugugugcuu

SEQ ID NO: 3177 - RNA, 22 nt, Homo sapiens
aagcacacaccaguuuuuucca

SEQ ID NO: 3178 - RNA, 22 nt, Homo sapiens
cuggggagauccucgagguugg

SEQ ID NO: 3179 - RNA, 22 nt, Homo sapiens
ccaaccucgaggaucuccccag

SEQ ID NO: 3180 - RNA, 22 nt, Homo sapiens
caaccucgacgaucuccucagc

SEQ ID NO: 3181 - RNA, 22 nt, Homo sapiens
gcugaggagaucgucgagguug

SEQ ID NO: 3182 - RNA, 21 nt, Homo sapiens
ugaggagaucgucgagguugg

SEQ ID NO: 3183 - RNA, 21 nt, Homo sapiens
ccaaccucgacgaucuccuca

SEQ ID NO: 3184 - RNA, 22 nt, Homo sapiens
caaccucgaggaucuccccagc

SEQ ID NO: 3185 - RNA, 22 nt, Homo sapiens
gcuggggagauccucgagguug

SEQ ID NO: 3186 - RNA, 21 nt, Homo sapiens
gguggggcaaugggaucaggu

SEQ ID NO: 3187 - RNA, 21 nt, Homo sapiens
accugaucccauugccccacc

SEQ ID NO: 3188 - RNA, 23 nt, Homo sapiens
ggggaaagcgaguagggacauuu

SEQ ID NO: 3189 - RNA, 23 nt, Homo sapiens
aaaugucccuacucgcuuucccc

SEQ ID NO: 3190 - RNA, 22 nt, Homo sapiens
cagaaggggaguugggagcaga

SEQ ID NO: 3191 - RNA, 22 nt, Homo sapiens
ucugcucccaacuccccuucug

SEQ ID NO: 3192 - RNA, 21 nt, Homo sapiens
ccaggcucugcagugggaacu

SEQ ID NO: 3193 - RNA, 21 nt, Homo sapiens
aguucccacugcagagccugg

SEQ ID NO: 3194 - RNA, 21 nt, Homo sapiens
cucccacuuccagaucuuucu

SEQ ID NO: 3195 - RNA, 21 nt, Homo sapiens
agaaagaucuggaagugggag

SEQ ID NO: 3196 - RNA, 22 nt, Homo sapiens
aaagaucuggaagugggagaca

SEQ ID NO: 3197 - RNA, 22 nt, Homo sapiens
ugucucccacuuccagaucuuu

SEQ ID NO: 3198 - RNA, 22 nt, Homo sapiens
cugcccuagucuagcugaagcu

SEQ ID NO: 3199 - RNA, 22 nt, Homo sapiens
agcuucagcuagacuagggcag

SEQ ID NO: 3200 - RNA, 22 nt, Homo sapiens
uucagccaggcuagugcagucu

SEQ ID NO: 3201 - RNA, 22 nt, Homo sapiens
agacugcacuagccuggcugaa

SEQ ID NO: 3202 - RNA, 22 nt, Homo sapiens
uaggauuacaagugucggccac

SEQ ID NO: 3203 - RNA, 22 nt, Homo sapiens
guggccgacacuuguaauccua

SEQ ID NO: 3204 - RNA, 22 nt, Homo sapiens
agagcugagacuagaaagccca

SEQ ID NO: 3205 - RNA, 22 nt, Homo sapiens
ugggcuuucuagucucagcucu

SEQ ID NO: 3206 - RNA, 22 nt, Homo sapiens
ggcuuucuagucucagcucucc

SEQ ID NO: 3207 - RNA, 22 nt, Homo sapiens
ggagagcugagacuagaaagcc

SEQ ID NO: 3208 - RNA, 23 nt, Homo sapiens
cugauaagaacagaggcccagau

SEQ ID NO: 3209 - RNA, 23 nt, Homo sapiens
aucugggccucuguucuuaucag

SEQ ID NO: 3210 - RNA, 21 nt, Homo sapiens
ucccuaccccuccacucccca

SEQ ID NO: 3211 - RNA, 21 nt, Homo sapiens
uggggaguggagggguaggga

SEQ ID NO: 3212 - RNA, 23 nt, Homo sapiens
uuagggaguagaaggguggggag

SEQ ID NO: 3213 - RNA, 23 nt, Homo sapiens
cuccccacccuucuacucccuaa

SEQ ID NO: 3214 - RNA, 22 nt, Homo sapiens
uauaaaaugagggcaguaagac

SEQ ID NO: 3215 - RNA, 22 nt, Homo sapiens
gucuuacugcccucauuuuaua

SEQ ID NO: 3216 - RNA, 22 nt, Homo sapiens
ugugacuuuaagggaaauggcg

SEQ ID NO: 3217 - RNA, 22 nt, Homo sapiens
cgccauuucccuuaaagucaca

SEQ ID NO: 3218 - RNA, 22 nt, Homo sapiens
agguggaugcaaugugaccuca

SEQ ID NO: 3219 - RNA, 22 nt, Homo sapiens
ugaggucacauugcauccaccu

SEQ ID NO: 3220 - RNA, 23 nt, Homo sapiens
cgcagacaaugccuacuggccua

SEQ ID NO: 3221 - RNA, 23 nt, Homo sapiens
uaggccaguaggcauugucugcg

SEQ ID NO: 3222 - RNA, 17 nt, Homo sapiens
gaguucuacagucagac

SEQ ID NO: 3223 - RNA, 17 nt, Homo sapiens
gucugacuguagaacuc

SEQ ID NO: 3224 - RNA, 22 nt, Homo sapiens
uaggacugugcuuggcacauag

SEQ ID NO: 3225 - RNA, 22 nt, Homo sapiens
cuaugugccaagcacaguccua

SEQ ID NO: 3226 - RNA, 22 nt, Homo sapiens
cugggguucugagacagacagu

SEQ ID NO: 3227 - RNA, 22 nt, Homo sapiens
acugucugucucagaaccccag

SEQ ID NO: 3228 - RNA, 22 nt, Homo sapiens
aaaggaggaaauaggcaggcca

SEQ ID NO: 3229 - RNA, 22 nt, Homo sapiens
uggccugccuauuuccuccuuu

SEQ ID NO: 3230 - RNA, 22 nt, Homo sapiens
ugcccugccuguuuucuccuuu

SEQ ID NO: 3231 - RNA, 22 nt, Homo sapiens
aaaggagaaaacaggcagggca

SEQ ID NO: 3232 - RNA, 23 nt, Homo sapiens
uagugaguuagagaugcagagcc

SEQ ID NO: 3233 - RNA, 23 nt, Homo sapiens
ggcucugcaucucuaacucacua

SEQ ID NO: 3234 - RNA, 19 nt, Homo sapiens
acuggccugggacuaccgg

SEQ ID NO: 3235 - RNA, 19 nt, Homo sapiens
ccgguagucccaggccagu

SEQ ID NO: 3236 - RNA, 21 nt, Homo sapiens
ugcacggcacuggggacacgu

SEQ ID NO: 3237 - RNA, 21 nt, Homo sapiens
acguguccccagugccgugca

SEQ ID NO: 3238 - RNA, 23 nt, Homo sapiens
uguguacacacgugccaggcgcu

SEQ ID NO: 3239 - RNA, 23 nt, Homo sapiens
agcgccuggcacguguguacaca

SEQ ID NO: 3240 - RNA, 17 nt, Homo sapiens
ggggcgcggccggaucg

SEQ ID NO: 3241 - RNA, 17 nt, Homo sapiens
cgauccggccgcgcccc

SEQ ID NO: 3242 - RNA, 22 nt, Homo sapiens
agaaggggugaaauuuaaacgu

SEQ ID NO: 3243 - RNA, 22 nt, Homo sapiens
acguuuaaauuucaccccuucu

SEQ ID NO: 3244 - RNA, 19 nt, Homo sapiens
aucgggcccucggcgccgg

SEQ ID NO: 3245 - RNA, 19 nt, Homo sapiens
ccggcgccgagggcccgau

SEQ ID NO: 3246 - RNA, 17 nt, Homo sapiens
gcuucuguaguguaguc

SEQ ID NO: 3247 - RNA, 17 nt, Homo sapiens
gacuacacuacagaagc

SEQ ID NO: 3248 - RNA, 22 nt, Homo sapiens
gccucucucggagucgcucgga

SEQ ID NO: 3249 - RNA, 22 nt, Homo sapiens
uccgagcgacuccgagagaggc

SEQ ID NO: 3250 - RNA, 23 nt, Homo sapiens
aaagucucgcucucugccccuca

SEQ ID NO: 3251 - RNA, 23 nt, Homo sapiens
ugaggggcagagagcgagacuuu

SEQ ID NO: 3252 - RNA, 24 nt, Homo sapiens
ugaggggccucagaccgagcuuuu

SEQ ID NO: 3253 - RNA, 24 nt, Homo sapiens
aaaagcucggucugaggccccuca

SEQ ID NO: 3254 - RNA, 23 nt, Homo sapiens
agaagaaggcggucggucugcgg

SEQ ID NO: 3255 - RNA, 23 nt, Homo sapiens
ccgcagaccgaccgccuucuucu

SEQ ID NO: 3256 - RNA, 20 nt, Homo sapiens
uuggccauggggcugcgcgg

SEQ ID NO: 3257 - RNA, 20 nt, Homo sapiens
ccgcgcagccccauggccaa

SEQ ID NO: 3258 - RNA, 23 nt, Homo sapiens
ccugggcagcguguggcugaagg

SEQ ID NO: 3259 - RNA, 23 nt, Homo sapiens
ccuucagccacacgcugcccagg

SEQ ID NO: 3260 - RNA, 23 nt, Homo sapiens
agaggcuuugugcggauacgggg

SEQ ID NO: 3261 - RNA, 23 nt, Homo sapiens
ccccguauccgcacaaagccucu

SEQ ID NO: 3262 - RNA, 21 nt, Homo sapiens
cccuugggucugaugggguag

SEQ ID NO: 3263 - RNA, 21 nt, Homo sapiens
cuaccccaucagacccaaggg

SEQ ID NO: 3264 - RNA, 25 nt, Homo sapiens
ugccccaucugugcccuggguagga

SEQ ID NO: 3265 - RNA, 25 nt, Homo sapiens
uccuacccagggcacagauggggca

SEQ ID NO: 3266 - RNA, 23 nt, Homo sapiens
uguggaagguagacggccagaga

SEQ ID NO: 3267 - RNA, 23 nt, Homo sapiens
ucucuggccgucuaccuuccaca

SEQ ID NO: 3268 - RNA, 20 nt, Homo sapiens
ucuggccagcuacgucccca

SEQ ID NO: 3269 - RNA, 20 nt, Homo sapiens
uggggacguagcuggccaga

SEQ ID NO: 3270 - RNA, 23 nt, Homo sapiens
uggggacguagcuggccagacag

SEQ ID NO: 3271 - RNA, 23 nt, Homo sapiens
cugucuggccagcuacgucccca

SEQ ID NO: 3272 - RNA, 22 nt, Homo sapiens
cucucuggccgucuaccuucca

SEQ ID NO: 3273 - RNA, 22 nt, Homo sapiens
uggaagguagacggccagagag

SEQ ID NO: 3274 - RNA, 23 nt, Homo sapiens
ucugggagguuguagcaguggaa

SEQ ID NO: 3275 - RNA, 23 nt, Homo sapiens
uuccacugcuacaaccucccaga

SEQ ID NO: 3276 - RNA, 22 nt, Homo sapiens
uccugcguaggaucugaggagu

SEQ ID NO: 3277 - RNA, 22 nt, Homo sapiens
acuccucagauccuacgcagga

SEQ ID NO: 3278 - RNA, 22 nt, Homo sapiens
agcucugcugcucacuggcagu

SEQ ID NO: 3279 - RNA, 22 nt, Homo sapiens
acugccagugagcagcagagcu

SEQ ID NO: 3280 - RNA, 21 nt, Homo sapiens
ggccagccaccaggagggcug

SEQ ID NO: 3281 - RNA, 21 nt, Homo sapiens
cagcccuccugguggcuggcc

SEQ ID NO: 3282 - RNA, 17 nt, Homo sapiens
cgcgccgggcccggguu

SEQ ID NO: 3283 - RNA, 17 nt, Homo sapiens
aacccgggcccggcgcg

SEQ ID NO: 3284 - RNA, 23 nt, Homo sapiens
ggaggcgcaggcucggaaaggcg

SEQ ID NO: 3285 - RNA, 23 nt, Homo sapiens
cgccuuuccgagccugcgccucc

SEQ ID NO: 3286 - RNA, 22 nt, Homo sapiens
guggaguccuggggaauggaga

SEQ ID NO: 3287 - RNA, 22 nt, Homo sapiens
ucuccauuccccaggacuccac

SEQ ID NO: 3288 - RNA, 23 nt, Homo sapiens
agggacugccuuaggagaaaguu

SEQ ID NO: 3289 - RNA, 23 nt, Homo sapiens
aacuuucuccuaaggcagucccu

SEQ ID NO: 3290 - RNA, 17 nt, Homo sapiens
gggauaugaagaaaaau

SEQ ID NO: 3291 - RNA, 17 nt, Homo sapiens
auuuuucuucauauccc

SEQ ID NO: 3292 - RNA, 22 nt, Homo sapiens
uggaagggagaagagcuuuaau

SEQ ID NO: 3293 - RNA, 22 nt, Homo sapiens
auuaaagcucuucucccuucca

SEQ ID NO: 3294 - RNA, 22 nt, Homo sapiens
acuuuccucacucccgugaagu

SEQ ID NO: 3295 - RNA, 22 nt, Homo sapiens
acuucacgggagugaggaaagu

SEQ ID NO: 3296 - RNA, 21 nt, Homo sapiens
uucgcgggcgaaggcaaaguc

SEQ ID NO: 3297 - RNA, 21 nt, Homo sapiens
gacuuugccuucgcccgcgaa

SEQ ID NO: 3298 - RNA, 22 nt, Homo sapiens
caucuggcauccgucacacaga

SEQ ID NO: 3299 - RNA, 22 nt, Homo sapiens
ucugugugacggaugccagaug

SEQ ID NO: 3300 - RNA, 22 nt, Homo sapiens
ugagggacagaugccagaagca

SEQ ID NO: 3301 - RNA, 22 nt, Homo sapiens
ugcuucuggcaucugucccuca

SEQ ID NO: 3302 - RNA, 22 nt, Homo sapiens
aaacuaaucucuacacugcugc

SEQ ID NO: 3303 - RNA, 22 nt, Homo sapiens
gcagcaguguagagauuaguuu

SEQ ID NO: 3304 - RNA, 22 nt, Homo sapiens
gcaguaguguagagauugguuu

SEQ ID NO: 3305 - RNA, 22 nt, Homo sapiens
aaaccaaucucuacacuacugc

SEQ ID NO: 3306 - RNA, 21 nt, Homo sapiens
gcugcaccggagacuggguaa

SEQ ID NO: 3307 - RNA, 21 nt, Homo sapiens
uuacccagucuccggugcagc

SEQ ID NO: 3308 - RNA, 21 nt, Homo sapiens
uacccagucuccggugcagcc

SEQ ID NO: 3309 - RNA, 21 nt, Homo sapiens
ggcugcaccggagacugggua

SEQ ID NO: 3310 - RNA, 24 nt, Homo sapiens
uguggacagugagguagagggagu

SEQ ID NO: 3311 - RNA, 24 nt, Homo sapiens
acucccucuaccucacuguccaca

SEQ ID NO: 3312 - RNA, 22 nt, Homo sapiens
agcuuuugggaauucagguagu

SEQ ID NO: 3313 - RNA, 22 nt, Homo sapiens
acuaccugaauucccaaaagcu

SEQ ID NO: 3314 - RNA, 21 nt, Homo sapiens
accugaauuaccaaaagcuuu

SEQ ID NO: 3315 - RNA, 21 nt, Homo sapiens
aaagcuuuugguaauucaggu

SEQ ID NO: 3316 - RNA, 22 nt, Homo sapiens
auauaccuguucggucucuuua

SEQ ID NO: 3317 - RNA, 22 nt, Homo sapiens
uaaagagaccgaacagguauau

SEQ ID NO: 3318 - RNA, 22 nt, Homo sapiens
aggggaccaaagagauauauag

SEQ ID NO: 3319 - RNA, 22 nt, Homo sapiens
cuauauaucucuuugguccccu

SEQ ID NO: 3320 - RNA, 23 nt, Homo sapiens
uuuguauggauauguguguguau

SEQ ID NO: 3321 - RNA, 23 nt, Homo sapiens
auacacacacauauccauacaaa

SEQ ID NO: 3322 - RNA, 22 nt, Homo sapiens
uguguuagaauaggggcaauaa

SEQ ID NO: 3323 - RNA, 22 nt, Homo sapiens
uuauugccccuauucuaacaca

SEQ ID NO: 3324 - RNA, 22 nt, Homo sapiens
auugccucuguucuaacacaag

SEQ ID NO: 3325 - RNA, 22 nt, Homo sapiens
cuuguguuagaacagaggcaau

SEQ ID NO: 3326 - RNA, 22 nt, Homo sapiens
aagggcuuccucucugcaggac

SEQ ID NO: 3327 - RNA, 22 nt, Homo sapiens
guccugcagagaggaagcccuu

SEQ ID NO: 3328 - RNA, 21 nt, Homo sapiens
ccugcagagaggaagcccuuc

SEQ ID NO: 3329 - RNA, 21 nt, Homo sapiens
gaagggcuuccucucugcagg

SEQ ID NO: 3330 - RNA, 22 nt, Homo sapiens
aggauuucagaaauacuggugu

SEQ ID NO: 3331 - RNA, 22 nt, Homo sapiens
acaccaguauuucugaaauccu

SEQ ID NO: 3332 - RNA, 24 nt, Homo sapiens
agauguauggaaucuguauauauc

SEQ ID NO: 3333 - RNA, 24 nt, Homo sapiens
gauauauacagauuccauacaucu

SEQ ID NO: 3334 - RNA, 22 nt, Homo sapiens
cggggagagaacgcagugacgu

SEQ ID NO: 3335 - RNA, 22 nt, Homo sapiens
acgucacugcguucucuccccg

SEQ ID NO: 3336 - RNA, 19 nt, Homo sapiens
uggggcggagcuuccggag

SEQ ID NO: 3337 - RNA, 19 nt, Homo sapiens
cuccggaagcuccgcccca

SEQ ID NO: 3338 - RNA, 21 nt, Homo sapiens
ucacgcggagagauggcuuug

SEQ ID NO: 3339 - RNA, 21 nt, Homo sapiens
caaagccaucucuccgcguga

SEQ ID NO: 3340 - RNA, 22 nt, Homo sapiens
caggcgucugucuacguggcuu

SEQ ID NO: 3341 - RNA, 22 nt, Homo sapiens
aagccacguagacagacgccug

SEQ ID NO: 3342 - RNA, 22 nt, Homo sapiens
caccuugcgcuacucaggucug

SEQ ID NO: 3343 - RNA, 22 nt, Homo sapiens
cagaccugaguagcgcaaggug

SEQ ID NO: 3344 - RNA, 22 nt, Homo sapiens
aaucugagaaggcgcacaaggu

SEQ ID NO: 3345 - RNA, 22 nt, Homo sapiens
accuugugcgccuucucagauu

SEQ ID NO: 3346 - RNA, 22 nt, Homo sapiens
aaggccuuucugaaccuucaga

SEQ ID NO: 3347 - RNA, 22 nt, Homo sapiens
ucugaagguucagaaaggccuu

SEQ ID NO: 3348 - RNA, 22 nt, Homo sapiens
gugacaucacauauacggcagc

SEQ ID NO: 3349 - RNA, 22 nt, Homo sapiens
gcugccguauaugugaugucac

SEQ ID NO: 3350 - RNA, 24 nt, Homo sapiens
ucagaacaaaugccgguucccaga

SEQ ID NO: 3351 - RNA, 24 nt, Homo sapiens
ucugggaaccggcauuuguucuga

SEQ ID NO: 3352 - RNA, 22 nt, Homo sapiens
ugagaaccacgucugcucugag

SEQ ID NO: 3353 - RNA, 22 nt, Homo sapiens
cucagagcagacgugguucuca

SEQ ID NO: 3354 - RNA, 17 nt, Homo sapiens
ucauauugcuucuuucu

SEQ ID NO: 3355 - RNA, 17 nt, Homo sapiens
agaaagaagcaauauga

SEQ ID NO: 3356 - RNA, 22 nt, Homo sapiens
ugugacagauugauaacugaaa

SEQ ID NO: 3357 - RNA, 22 nt, Homo sapiens
uuucaguuaucaaucugucaca

SEQ ID NO: 3358 - RNA, 23 nt, Homo sapiens
uggaguccaggaaucugcauuuu

SEQ ID NO: 3359 - RNA, 23 nt, Homo sapiens
aaaaugcagauuccuggacucca

SEQ ID NO: 3360 - RNA, 22 nt, Homo sapiens
aagcccuuaccccaaaaaguau

SEQ ID NO: 3361 - RNA, 22 nt, Homo sapiens
auacuuuuugggguaagggcuu

SEQ ID NO: 3362 - RNA, 22 nt, Homo sapiens
aagcccuuaccccaaaaagcau

SEQ ID NO: 3363 - RNA, 22 nt, Homo sapiens
augcuuuuugggguaagggcuu

SEQ ID NO: 3364 - RNA, 22 nt, Homo sapiens
uggaauguaaggaagugugugg

SEQ ID NO: 3365 - RNA, 22 nt, Homo sapiens
ccacacacuuccuuacauucca

SEQ ID NO: 3366 - RNA, 22 nt, Homo sapiens
cuuaucagauuguauuguaauu

SEQ ID NO: 3367 - RNA, 22 nt, Homo sapiens
aauuacaauacaaucugauaag

SEQ ID NO: 3368 - RNA, 22 nt, Homo sapiens
uuauaauacaaccugauaagug

SEQ ID NO: 3369 - RNA, 22 nt, Homo sapiens
cacuuaucagguuguauuauaa

SEQ ID NO: 3370 - RNA, 22 nt, Homo sapiens
cuuagcagguuguauuaucauu

SEQ ID NO: 3371 - RNA, 22 nt, Homo sapiens
aaugauaauacaaccugcuaag

SEQ ID NO: 3372 - RNA, 22 nt, Homo sapiens
auauaauacaaccugcuaagug

SEQ ID NO: 3373 - RNA, 22 nt, Homo sapiens
cacuuagcagguuguauuauau

SEQ ID NO: 3374 - RNA, 22 nt, Homo sapiens
cacuuagcagguuguauuauau

SEQ ID NO: 3375 - RNA, 22 nt, Homo sapiens
auauaauacaaccugcuaagug

SEQ ID NO: 3376 - RNA, 22 nt, Homo sapiens
auaauacaaccugcuaagugcu

SEQ ID NO: 3377 - RNA, 22 nt, Homo sapiens
agcacuuagcagguuguauuau

SEQ ID NO: 3378 - RNA, 22 nt, Homo sapiens
uuugguccccuucaaccagcug

SEQ ID NO: 3379 - RNA, 22 nt, Homo sapiens
cagcugguugaaggggaccaaa

SEQ ID NO: 3380 - RNA, 22 nt, Homo sapiens
uuugguccccuucaaccagcua

SEQ ID NO: 3381 - RNA, 22 nt, Homo sapiens
uagcugguugaaggggaccaaa

SEQ ID NO: 3382 - RNA, 22 nt, Homo sapiens
uguaaacauccuugacuggaag

SEQ ID NO: 3383 - RNA, 22 nt, Homo sapiens
cuuccagucaaggauguuuaca

SEQ ID NO: 3384 - RNA, 22 nt, Homo sapiens
ugucaguuugucaaauacccca

SEQ ID NO: 3385 - RNA, 22 nt, Homo sapiens
ugggguauuugacaaacugaca

SEQ ID NO: 3386 - RNA, 22 nt, Homo sapiens
cguguauuugacaagcugaguu

SEQ ID NO: 3387 - RNA, 22 nt, Homo sapiens
aacucagcuugucaaauacacg

SEQ ID NO: 3388 - RNA, 21 nt, Homo sapiens
uucacaguggcuaaguuccgc

SEQ ID NO: 3389 - RNA, 21 nt, Homo sapiens
gcggaacuuagccacugugaa

SEQ ID NO: 3390 - RNA, 22 nt, Homo sapiens
agggcuuagcugcuugugagca

SEQ ID NO: 3391 - RNA, 22 nt, Homo sapiens
ugcucacaagcagcuaagcccu

SEQ ID NO: 3392 - RNA, 21 nt, Homo sapiens
aucacauugccagggauuacc

SEQ ID NO: 3393 - RNA, 21 nt, Homo sapiens
gguaaucccuggcaaugugau

SEQ ID NO: 3394 - RNA, 22 nt, Homo sapiens
uggguuccuggcaugcugauuu

SEQ ID NO: 3395 - RNA, 22 nt, Homo sapiens
aaaucagcaugccaggaaccca

SEQ ID NO: 3396 - RNA, 22 nt, Homo sapiens
cuuucagucggauguuuacagc

SEQ ID NO: 3397 - RNA, 22 nt, Homo sapiens
gcuguaaacauccgacugaaag

SEQ ID NO: 3398 - RNA, 22 nt, Homo sapiens
ugccuacugagcugauaucagu

SEQ ID NO: 3399 - RNA, 22 nt, Homo sapiens
acugauaucagcucaguaggca

SEQ ID NO: 3400 - RNA, 22 nt, Homo sapiens
ugccuacugagcugaaacacag

SEQ ID NO: 3401 - RNA, 22 nt, Homo sapiens
cuguguuucagcucaguaggca

SEQ ID NO: 3402 - RNA, 22 nt, Homo sapiens
uggcucaguucagcaggaacag

SEQ ID NO: 3403 - RNA, 22 nt, Homo sapiens
cuguuccugcugaacugagcca

SEQ ID NO: 3404 - RNA, 21 nt, Homo sapiens
uucacaguggcuaaguucugc

SEQ ID NO: 3405 - RNA, 21 nt, Homo sapiens
gcagaacuuagccacugugaa

SEQ ID NO: 3406 - RNA, 22 nt, Homo sapiens
agagcuuagcugauuggugaac

SEQ ID NO: 3407 - RNA, 22 nt, Homo sapiens
guucaccaaucagcuaagcucu

SEQ ID NO: 3408 - RNA, 23 nt, Homo sapiens
uguaguguuuccuacuuuaugga

SEQ ID NO: 3409 - RNA, 23 nt, Homo sapiens
uccauaaaguaggaaacacuaca

SEQ ID NO: 3410 - RNA, 21 nt, Homo sapiens
cauaaaguagaaagcacuacu

SEQ ID NO: 3411 - RNA, 21 nt, Homo sapiens
aguagugcuuucuacuuuaug

SEQ ID NO: 3412 - RNA, 22 nt, Homo sapiens
ugaaggucuacugugugccagg

SEQ ID NO: 3413 - RNA, 22 nt, Homo sapiens
ccuggcacacaguagaccuuca

SEQ ID NO: 3414 - RNA, 22 nt, Homo sapiens
uuguacaugguaggcuuucauu

SEQ ID NO: 3415 - RNA, 22 nt, Homo sapiens
aaugaaagccuaccauguacaa

SEQ ID NO: 3416 - RNA, 21 nt, Homo sapiens
cuggauggcuccuccaugucu

SEQ ID NO: 3417 - RNA, 21 nt, Homo sapiens
agacauggaggagccauccag

SEQ ID NO: 3418 - RNA, 23 nt, Homo sapiens
ucuuggaguaggucauugggugg

SEQ ID NO: 3419 - RNA, 23 nt, Homo sapiens
ccacccaaugaccuacuccaaga

SEQ ID NO: 3420 - RNA, 22 nt, Homo sapiens
cucaucugcaaagaaguaagug

SEQ ID NO: 3421 - RNA, 22 nt, Homo sapiens
cacuuacuucuuugcagaugag

SEQ ID NO: 3422 - RNA, 22 nt, Homo sapiens
aacuguuugcagaggaaacuga

SEQ ID NO: 3423 - RNA, 22 nt, Homo sapiens
ucaguuuccucugcaaacaguu

SEQ ID NO: 3424 - RNA, 22 nt, Homo sapiens
cuugguucagggagggucccca

SEQ ID NO: 3425 - RNA, 22 nt, Homo sapiens
uggggacccucccugaaccaag

SEQ ID NO: 3426 - RNA, 22 nt, Homo sapiens
aggaccuucccugaaccaagga

SEQ ID NO: 3427 - RNA, 22 nt, Homo sapiens
uccuugguucagggaagguccu

SEQ ID NO: 3428 - RNA, 21 nt, Homo sapiens
accuccugugugcauggauua

SEQ ID NO: 3429 - RNA, 21 nt, Homo sapiens
uaauccaugcacacaggaggu

SEQ ID NO: 3430 - RNA, 22 nt, Homo sapiens
uacccauugcauaucggaguug

SEQ ID NO: 3431 - RNA, 22 nt, Homo sapiens
caacuccgauaugcaaugggua

SEQ ID NO: 3432 - RNA, 18 nt, Homo sapiens
aaagcuggguugagaagg

SEQ ID NO: 3433 - RNA, 18 nt, Homo sapiens
ccuucucaacccagcuuu

SEQ ID NO: 3434 - RNA, 20 nt, Homo sapiens
gguauccguuuggggauggu

SEQ ID NO: 3435 - RNA, 20 nt, Homo sapiens
accauccccaaacggauacc

SEQ ID NO: 3436 - RNA, 22 nt, Homo sapiens
gaaggcagcagugcuccccugu

SEQ ID NO: 3437 - RNA, 22 nt, Homo sapiens
acaggggagcacugcugccuuc

SEQ ID NO: 3438 - RNA, 22 nt, Homo sapiens
ucagugcaucacagaacuuugu

SEQ ID NO: 3439 - RNA, 22 nt, Homo sapiens
acaaaguucugugaugcacuga

SEQ ID NO: 3440 - RNA, 22 nt, Homo sapiens
aaguucuguuauacacucaggc

SEQ ID NO: 3441 - RNA, 22 nt, Homo sapiens
gccugaguguauaacagaacuu

SEQ ID NO: 3442 - RNA, 22 nt, Homo sapiens
cuggcccucucugcccuuccgu

SEQ ID NO: 3443 - RNA, 22 nt, Homo sapiens
acggaagggcagagagggccag

SEQ ID NO: 3444 - RNA, 21 nt, Homo sapiens
cuagacugaagcuccuugagg

SEQ ID NO: 3445 - RNA, 21 nt, Homo sapiens
ccucaaggagcuucagucuag

SEQ ID NO: 3446 - RNA, 21 nt, Homo sapiens
ucgaggagcucacagucuagu

SEQ ID NO: 3447 - RNA, 21 nt, Homo sapiens
acuagacugugagcuccucga

SEQ ID NO: 3448 - RNA, 21 nt, Homo sapiens
cacauuacacggucgaccucu

SEQ ID NO: 3449 - RNA, 21 nt, Homo sapiens
agaggucgaccguguaaugug

SEQ ID NO: 3450 - RNA, 22 nt, Homo sapiens
aggugguccguggcgcguucgc

SEQ ID NO: 3451 - RNA, 22 nt, Homo sapiens
gcgaacgcgccacggaccaccu

SEQ ID NO: 3452 - RNA, 23 nt, Homo sapiens
cgcauccccuagggcauuggugu

SEQ ID NO: 3453 - RNA, 23 nt, Homo sapiens
acaccaaugcccuaggggaugcg

SEQ ID NO: 3454 - RNA, 20 nt, Homo sapiens
ccucugggcccuuccuccag

SEQ ID NO: 3455 - RNA, 20 nt, Homo sapiens
cuggaggaagggcccagagg

SEQ ID NO: 3456 - RNA, 23 nt, Homo sapiens
ccuaguagguguccaguaagugu

SEQ ID NO: 3457 - RNA, 23 nt, Homo sapiens
acacuuacuggacaccuacuagg

SEQ ID NO: 3458 - RNA, 21 nt, Homo sapiens
acggugcuggauguggccuuu

SEQ ID NO: 3459 - RNA, 21 nt, Homo sapiens
aaaggccacauccagcaccgu

SEQ ID NO: 3460 - RNA, 23 nt, Homo sapiens
ucagcaccaggauauuguuggag

SEQ ID NO: 3461 - RNA, 23 nt, Homo sapiens
cuccaacaauauccuggugcuga

SEQ ID NO: 3462 - RNA, 23 nt, Homo sapiens
ucaacaaaaucacugaugcugga

SEQ ID NO: 3463 - RNA, 23 nt, Homo sapiens
uccagcaucagugauuuuguuga

SEQ ID NO: 3464 - RNA, 22 nt, Homo sapiens
aacaauauccuggugcugagug

SEQ ID NO: 3465 - RNA, 22 nt, Homo sapiens
cacucagcaccaggauauuguu

SEQ ID NO: 3466 - RNA, 23 nt, Homo sapiens
ggcagguucucacccucucuagg

SEQ ID NO: 3467 - RNA, 23 nt, Homo sapiens
ccuagagagggugagaaccugcc

SEQ ID NO: 3468 - RNA, 23 nt, Homo sapiens
gacacgggcgacagcugcggccc

SEQ ID NO: 3469 - RNA, 23 nt, Homo sapiens
gggccgcagcugucgcccguguc

SEQ ID NO: 3470 - RNA, 21 nt, Homo sapiens
auguaugugugcaugugcaug

SEQ ID NO: 3471 - RNA, 21 nt, Homo sapiens
caugcacaugcacacauacau

SEQ ID NO: 3472 - RNA, 22 nt, Homo sapiens
uauacaagggcagacucucucu

SEQ ID NO: 3473 - RNA, 22 nt, Homo sapiens
agagagagucugcccuuguaua

SEQ ID NO: 3474 - RNA, 20 nt, Homo sapiens
ggcggcggcggaggcggggg

SEQ ID NO: 3475 - RNA, 20 nt, Homo sapiens
cccccgccuccgccgccgcc

SEQ ID NO: 3476 - RNA, 22 nt, Homo sapiens
gcaggugcucacuuguccuccu

SEQ ID NO: 3477 - RNA, 22 nt, Homo sapiens
aggaggacaagugagcaccugc

SEQ ID NO: 3478 - RNA, 19 nt, Homo sapiens
ggggccuggcggugggcgg

SEQ ID NO: 3479 - RNA, 19 nt, Homo sapiens
ccgcccaccgccaggcccc

SEQ ID NO: 3480 - RNA, 22 nt, Homo sapiens
gcccaaaggugaauuuuuuggg

SEQ ID NO: 3481 - RNA, 22 nt, Homo sapiens
cccaaaaaauucaccuuugggc

SEQ ID NO: 3482 - RNA, 22 nt, Homo sapiens
caaagaauucuccuuuugggcu

SEQ ID NO: 3483 - RNA, 22 nt, Homo sapiens
agcccaaaaggagaauucuuug

SEQ ID NO: 3484 - RNA, 22 nt, Homo sapiens
cugcaauguaagcacuucuuac

SEQ ID NO: 3485 - RNA, 22 nt, Homo sapiens
guaagaagugcuuacauugcag

SEQ ID NO: 3486 - RNA, 23 nt, Homo sapiens
aaaagugcuuacagugcagguag

SEQ ID NO: 3487 - RNA, 23 nt, Homo sapiens
cuaccugcacuguaagcacuuuu

SEQ ID NO: 3488 - RNA, 22 nt, Homo sapiens
acuguaguaugggcacuuccag

SEQ ID NO: 3489 - RNA, 22 nt, Homo sapiens
cuggaagugcccauacuacagu

SEQ ID NO: 3490 - RNA, 23 nt, Homo sapiens
caaagugcucauagugcagguag

SEQ ID NO: 3491 - RNA, 23 nt, Homo sapiens
cuaccugcacuaugagcacuuug

SEQ ID NO: 3492 - RNA, 23 nt, Homo sapiens
gggguauuguuuccgcugccagg

SEQ ID NO: 3493 - RNA, 23 nt, Homo sapiens
ccuggcagcggaaacaauacccc

SEQ ID NO: 3494 - RNA, 23 nt, Homo sapiens
uagcagcgggaacaguucugcag

SEQ ID NO: 3495 - RNA, 23 nt, Homo sapiens
cugcagaacuguucccgcugcua

SEQ ID NO: 3496 - RNA, 21 nt, Homo sapiens
cgagccucaagcaagggacuu

SEQ ID NO: 3497 - RNA, 21 nt, Homo sapiens
aagucccuugcuugaggcucg

SEQ ID NO: 3498 - RNA, 22 nt, Homo sapiens
uagucccuuccuugaagcgguc

SEQ ID NO: 3499 - RNA, 22 nt, Homo sapiens
gaccgcuucaaggaagggacua

SEQ ID NO: 3500 - RNA, 21 nt, Homo sapiens
acuggacuuggagucagaagg

SEQ ID NO: 3501 - RNA, 21 nt, Homo sapiens
ccuucugacuccaaguccagu

SEQ ID NO: 3502 - RNA, 22 nt, Homo sapiens
cuccugacuccagguccugugu

SEQ ID NO: 3503 - RNA, 22 nt, Homo sapiens
acacaggaccuggagucaggag

SEQ ID NO: 3504 - RNA, 22 nt, Homo sapiens
uuuguucguucggcucgcguga

SEQ ID NO: 3505 - RNA, 22 nt, Homo sapiens
ucacgcgagccgaacgaacaaa

SEQ ID NO: 3506 - RNA, 22 nt, Homo sapiens
acggauguuugagcaugugcua

SEQ ID NO: 3507 - RNA, 22 nt, Homo sapiens
uagcacaugcucaaacauccgu

SEQ ID NO: 3508 - RNA, 23 nt, Homo sapiens
ucaaaugcucagacuccuguggu

SEQ ID NO: 3509 - RNA, 23 nt, Homo sapiens
accacaggagucugagcauuuga

SEQ ID NO: 3510 - RNA, 22 nt, Homo sapiens
cggcaacaagaaacugccugag

SEQ ID NO: 3511 - RNA, 22 nt, Homo sapiens
cucaggcaguuucuuguugccg

SEQ ID NO: 3512 - RNA, 22 nt, Homo sapiens
uagguaguuucauguuguuggg

SEQ ID NO: 3513 - RNA, 22 nt, Homo sapiens
cccaacaacaugaaacuaccua

SEQ ID NO: 3514 - RNA, 22 nt, Homo sapiens
caauguuuccacagugcaucac

SEQ ID NO: 3515 - RNA, 22 nt, Homo sapiens
gugaugcacuguggaaacauug

SEQ ID NO: 3516 - RNA, 21 nt, Homo sapiens
gugcauuguaguugcauugca

SEQ ID NO: 3517 - RNA, 21 nt, Homo sapiens
ugcaaugcaacuacaaugcac

SEQ ID NO: 3518 - RNA, 18 nt, Homo sapiens
aucccaccucugccacca

SEQ ID NO: 3519 - RNA, 18 nt, Homo sapiens
ugguggcagaggugggau

SEQ ID NO: 3520 - RNA, 19 nt, Homo sapiens
aucccaccacugccaccau

SEQ ID NO: 3521 - RNA, 19 nt, Homo sapiens
augguggcaguggugggau

SEQ ID NO: 3522 - RNA, 22 nt, Homo sapiens
accuuccucuccaugggucuuu

SEQ ID NO: 3523 - RNA, 22 nt, Homo sapiens
aaagacccauggagaggaaggu

SEQ ID NO: 3524 - RNA, 22 nt, Homo sapiens
aaagacccauugaggagaaggu

SEQ ID NO: 3525 - RNA, 22 nt, Homo sapiens
accuucuccucaaugggucuuu

SEQ ID NO: 3526 - RNA, 21 nt, Homo sapiens
aauguagagauugaucaaaau

SEQ ID NO: 3527 - RNA, 21 nt, Homo sapiens
auuuugaucaaucucuacauu

SEQ ID NO: 3528 - RNA, 23 nt, Homo sapiens
acggaauauguauacggaauaua

SEQ ID NO: 3529 - RNA, 23 nt, Homo sapiens
uauauuccguauacauauuccgu

SEQ ID NO: 3530 - RNA, 24 nt, Homo sapiens
agagcucacagcuguccuucucua

SEQ ID NO: 3531 - RNA, 24 nt, Homo sapiens
uagagaaggacagcugugagcucu

SEQ ID NO: 3532 - RNA, 22 nt, Homo sapiens
aucaaauaaggacuagucugca

SEQ ID NO: 3533 - RNA, 22 nt, Homo sapiens
ugcagacuaguccuuauuugau

SEQ ID NO: 3534 - RNA, 23 nt, Homo sapiens
augagacucauguaaaacaucuu

SEQ ID NO: 3535 - RNA, 23 nt, Homo sapiens
aagauguuuuacaugagucucau

SEQ ID NO: 3536 - RNA, 21 nt, Homo sapiens
auggaauguauauacggaaua

SEQ ID NO: 3537 - RNA, 21 nt, Homo sapiens
uauuccguauauacauuccau

SEQ ID NO: 3538 - RNA, 22 nt, Homo sapiens
auuguagaaccuaagauuggcc

SEQ ID NO: 3539 - RNA, 22 nt, Homo sapiens
ggccaaucuuagguucuacaau

SEQ ID NO: 3540 - RNA, 22 nt, Homo sapiens
caucucuaaggaacucccccaa

SEQ ID NO: 3541 - RNA, 22 nt, Homo sapiens
uugggggaguuccuuagagaug

SEQ ID NO: 3542 - RNA, 23 nt, Homo sapiens
uauggggcuucuguagagauuuc

SEQ ID NO: 3543 - RNA, 23 nt, Homo sapiens
gaaaucucuacagaagccccaua

SEQ ID NO: 3544 - RNA, 20 nt, Homo sapiens
ccguguuucccccacgcuuu

SEQ ID NO: 3545 - RNA, 20 nt, Homo sapiens
aaagcgugggggaaacacgg

SEQ ID NO: 3546 - RNA, 15 nt, Homo sapiens
aggagauccuggguu

SEQ ID NO: 3547 - RNA, 15 nt, Homo sapiens
aacccaggaucuccu

SEQ ID NO: 3548 - RNA, 22 nt, Homo sapiens
cucgugggcucuggccacggcc

SEQ ID NO: 3549 - RNA, 22 nt, Homo sapiens
ggccguggccagagcccacgag

SEQ ID NO: 3550 - RNA, 22 nt, Homo sapiens
caguggccagagcccugcagug

SEQ ID NO: 3551 - RNA, 22 nt, Homo sapiens
cacugcagggcucuggccacug

SEQ ID NO: 3552 - RNA, 22 nt, Homo sapiens
cugcagaguuuguacggaccgg

SEQ ID NO: 3553 - RNA, 22 nt, Homo sapiens
ccgguccguacaaacucugcag

SEQ ID NO: 3554 - RNA, 20 nt, Homo sapiens
uccguacaaacucugcugug

SEQ ID NO: 3555 - RNA, 20 nt, Homo sapiens
cacagcagaguuuguacgga

SEQ ID NO: 3556 - RNA, 22 nt, Homo sapiens
cuuccccccaguaaucuucauc

SEQ ID NO: 3557 - RNA, 22 nt, Homo sapiens
gaugaagauuacuggggggaag

SEQ ID NO: 3558 - RNA, 23 nt, Homo sapiens
ugaggauauggcagggaagggga

SEQ ID NO: 3559 - RNA, 23 nt, Homo sapiens
uccccuucccugccauauccuca

SEQ ID NO: 3560 - RNA, 23 nt, Homo sapiens
uuuugcaugacccugggaguagg

SEQ ID NO: 3561 - RNA, 23 nt, Homo sapiens
ccuacucccagggucaugcaaaa

SEQ ID NO: 3562 - RNA, 22 nt, Homo sapiens
gacucacucacaggauugugca

SEQ ID NO: 3563 - RNA, 22 nt, Homo sapiens
ugcacaauccugugagugaguc

SEQ ID NO: 3564 - RNA, 22 nt, Homo sapiens
acacagugcuucauccacuacu

SEQ ID NO: 3565 - RNA, 22 nt, Homo sapiens
aguaguggaugaagcacugugu

SEQ ID NO: 3566 - RNA, 22 nt, Homo sapiens
uaguggaugaugcacucugugc

SEQ ID NO: 3567 - RNA, 22 nt, Homo sapiens
gcacagagugcaucauccacua

SEQ ID NO: 3568 - RNA, 21 nt, Homo sapiens
ugaugauacagguggagguag

SEQ ID NO: 3569 - RNA, 21 nt, Homo sapiens
cuaccuccaccuguaucauca

SEQ ID NO: 3570 - RNA, 22 nt, Homo sapiens
cuacuucuaccuguguuaucau

SEQ ID NO: 3571 - RNA, 22 nt, Homo sapiens
augauaacacagguagaaguag

SEQ ID NO: 3572 - RNA, 22 nt, Homo sapiens
ugcgacauuggaaguaguauca

SEQ ID NO: 3573 - RNA, 22 nt, Homo sapiens
ugauacuacuuccaaugucgca

SEQ ID NO: 3574 - RNA, 21 nt, Homo sapiens
uuagaccuaguacacguccuu

SEQ ID NO: 3575 - RNA, 21 nt, Homo sapiens
aaggacguguacuaggucuaa

SEQ ID NO: 3576 - RNA, 22 nt, Homo sapiens
uuuccuacccuaccugaagacu

SEQ ID NO: 3577 - RNA, 22 nt, Homo sapiens
agucuucagguaggguaggaaa

SEQ ID NO: 3578 - RNA, 22 nt, Homo sapiens
aucuguaagagaaaguaaauga

SEQ ID NO: 3579 - RNA, 22 nt, Homo sapiens
ucauuuacuuucucuuacagau

SEQ ID NO: 3580 - RNA, 24 nt, Homo sapiens
cccggacaggcguucgugcgacgu

SEQ ID NO: 3581 - RNA, 24 nt, Homo sapiens
acgucgcacgaacgccuguccggg

SEQ ID NO: 3582 - RNA, 23 nt, Homo sapiens
accuggacccagcguagacaaag

SEQ ID NO: 3583 - RNA, 23 nt, Homo sapiens
cuuugucuacgcuggguccaggu

SEQ ID NO: 3584 - RNA, 22 nt, Homo sapiens
accaagucugcgucauccucuc

SEQ ID NO: 3585 - RNA, 22 nt, Homo sapiens
gagaggaugacgcagacuuggu

SEQ ID NO: 3586 - RNA, 23 nt, Homo sapiens
aguggaugauggagacucgguac

SEQ ID NO: 3587 - RNA, 23 nt, Homo sapiens
guaccgagucuccaucauccacu

SEQ ID NO: 3588 - RNA, 24 nt, Homo sapiens
guuccacacugacacugcagaagu

SEQ ID NO: 3589 - RNA, 24 nt, Homo sapiens
acuucugcagugucaguguggaac

SEQ ID NO: 3590 - RNA, 24 nt, Homo sapiens
ccugcuggucaggaguggauacug

SEQ ID NO: 3591 - RNA, 24 nt, Homo sapiens
caguauccacuccugaccagcagg

SEQ ID NO: 3592 - RNA, 23 nt, Homo sapiens
gagggucuugggagggaugugac

SEQ ID NO: 3593 - RNA, 23 nt, Homo sapiens
gucacaucccucccaagacccuc

SEQ ID NO: 3594 - RNA, 22 nt, Homo sapiens
auauacagggggagacucuuau

SEQ ID NO: 3595 - RNA, 22 nt, Homo sapiens
auaagagucucccccuguauau

SEQ ID NO: 3596 - RNA, 22 nt, Homo sapiens
auauacagggggagacucucau

SEQ ID NO: 3597 - RNA, 22 nt, Homo sapiens
augagagucucccccuguauau

SEQ ID NO: 3598 - RNA, 21 nt, Homo sapiens
agaggauacccuuuguauguu

SEQ ID NO: 3599 - RNA, 21 nt, Homo sapiens
aacauacaaaggguauccucu

SEQ ID NO: 3600 - RNA, 22 nt, Homo sapiens
ucuacaaaggaaagcgcuuucu

SEQ ID NO: 3601 - RNA, 22 nt, Homo sapiens
agaaagcgcuuuccuuuguaga

SEQ ID NO: 3602 - RNA, 22 nt, Homo sapiens
ucaaaacugaggggcauuuucu

SEQ ID NO: 3603 - RNA, 22 nt, Homo sapiens
agaaaaugccccucaguuuuga

SEQ ID NO: 3604 - RNA, 24 nt, Homo sapiens
uucuccaaaagaaagcacuuucug

SEQ ID NO: 3605 - RNA, 24 nt, Homo sapiens
cagaaagugcuuucuuuuggagaa

SEQ ID NO: 3606 - RNA, 23 nt, Homo sapiens
uucucgaggaaagaagcacuuuc

SEQ ID NO: 3607 - RNA, 23 nt, Homo sapiens
gaaagugcuucuuuccucgagaa

SEQ ID NO: 3608 - RNA, 22 nt, Homo sapiens
ccucuagauggaagcacugucu

SEQ ID NO: 3609 - RNA, 22 nt, Homo sapiens
agacagugcuuccaucuagagg

SEQ ID NO: 3610 - RNA, 22 nt, Homo sapiens
aucgugcaucccuuuagagugu

SEQ ID NO: 3611 - RNA, 22 nt, Homo sapiens
acacucuaaagggaugcacgau

SEQ ID NO: 3612 - RNA, 22 nt, Homo sapiens
aucgugcaucccuuuagagugu

SEQ ID NO: 3613 - RNA, 22 nt, Homo sapiens
acacucuaaagggaugcacgau

SEQ ID NO: 3614 - RNA, 22 nt, Homo sapiens
aucgugcauccuuuuagagugu

SEQ ID NO: 3615 - RNA, 22 nt, Homo sapiens
acacucuaaaaggaugcacgau

SEQ ID NO: 3616 - RNA, 22 nt, Homo sapiens
caaagcgcuccccuuuagaggu

SEQ ID NO: 3617 - RNA, 22 nt, Homo sapiens
accucuaaaggggagcgcuuug

SEQ ID NO: 3618 - RNA, 23 nt, Homo sapiens
caaagcgcuucucuuuagagugu

SEQ ID NO: 3619 - RNA, 23 nt, Homo sapiens
acacucuaaagagaagcgcuuug

SEQ ID NO: 3620 - RNA, 23 nt, Homo sapiens
ucucuggagggaagcacuuucug

SEQ ID NO: 3621 - RNA, 23 nt, Homo sapiens
cagaaagugcuucccuccagaga

SEQ ID NO: 3622 - RNA, 21 nt, Homo sapiens
gaaagcgcuucucuuuagagg

SEQ ID NO: 3623 - RNA, 21 nt, Homo sapiens
ccucuaaagagaagcgcuuuc

SEQ ID NO: 3624 - RNA, 22 nt, Homo sapiens
cucuagagggaagcacuuucuc

SEQ ID NO: 3625 - RNA, 22 nt, Homo sapiens
gagaaagugcuucccucuagag

SEQ ID NO: 3626 - RNA, 22 nt, Homo sapiens
aaagugcauccuuuuagagugu

SEQ ID NO: 3627 - RNA, 22 nt, Homo sapiens
acacucuaaaaggaugcacuuu

SEQ ID NO: 3628 - RNA, 22 nt, Homo sapiens
cucuagagggaagcgcuuucug

SEQ ID NO: 3629 - RNA, 22 nt, Homo sapiens
cagaaagcgcuucccucuagag

SEQ ID NO: 3630 - RNA, 22 nt, Homo sapiens
caaagugccucccuuuagagug

SEQ ID NO: 3631 - RNA, 22 nt, Homo sapiens
cacucuaaagggaggcacuuug

SEQ ID NO: 3632 - RNA, 22 nt, Homo sapiens
aagugccuccuuuuagaguguu

SEQ ID NO: 3633 - RNA, 22 nt, Homo sapiens
aacacucuaaaaggaggcacuu

SEQ ID NO: 3634 - RNA, 22 nt, Homo sapiens
uucuccaaaagggagcacuuuc

SEQ ID NO: 3635 - RNA, 22 nt, Homo sapiens
gaaagugcucccuuuuggagaa

SEQ ID NO: 3636 - RNA, 22 nt, Homo sapiens
aaagugcuucccuuuggacugu

SEQ ID NO: 3637 - RNA, 22 nt, Homo sapiens
acaguccaaagggaagcacuuu

SEQ ID NO: 3638 - RNA, 21 nt, Homo sapiens
cuccagagggaaguacuuucu

SEQ ID NO: 3639 - RNA, 21 nt, Homo sapiens
agaaaguacuucccucuggag

SEQ ID NO: 3640 - RNA, 22 nt, Homo sapiens
acaaagugcuucccuuuagagu

SEQ ID NO: 3641 - RNA, 22 nt, Homo sapiens
acucuaaagggaagcacuuugu

SEQ ID NO: 3642 - RNA, 22 nt, Homo sapiens
cuacaaagggaagcacuuucuc

SEQ ID NO: 3643 - RNA, 22 nt, Homo sapiens
gagaaagugcuucccuuuguag

SEQ ID NO: 3644 - RNA, 22 nt, Homo sapiens
gaaggcgcuucccuuuagagcg

SEQ ID NO: 3645 - RNA, 22 nt, Homo sapiens
cgcucuaaagggaagcgccuuc

SEQ ID NO: 3646 - RNA, 21 nt, Homo sapiens
cuccagagggaugcacuuucu

SEQ ID NO: 3647 - RNA, 21 nt, Homo sapiens
agaaagugcaucccucuggag

SEQ ID NO: 3648 - RNA, 22 nt, Homo sapiens
cucuagagggaagcacuuucug

SEQ ID NO: 3649 - RNA, 22 nt, Homo sapiens
cagaaagugcuucccucuagag

SEQ ID NO: 3650 - RNA, 22 nt, Homo sapiens
gaaagugcuuccuuuuagaggc

SEQ ID NO: 3651 - RNA, 22 nt, Homo sapiens
gccucuaaaaggaagcacuuuc

SEQ ID NO: 3652 - RNA, 23 nt, Homo sapiens
cucuugagggaagcacuuucugu

SEQ ID NO: 3653 - RNA, 23 nt, Homo sapiens
acagaaagugcuucccucaagag

SEQ ID NO: 3654 - RNA, 22 nt, Homo sapiens
acuggacuuagggucagaaggc

SEQ ID NO: 3655 - RNA, 22 nt, Homo sapiens
gccuucugacccuaaguccagu

SEQ ID NO: 3656 - RNA, 22 nt, Homo sapiens
aaacaaacauggugcacuucuu

SEQ ID NO: 3657 - RNA, 22 nt, Homo sapiens
aagaagugcaccauguuuguuu

SEQ ID NO: 3658 - RNA, 22 nt, Homo sapiens
gaaguugcccauguuauuuucg

SEQ ID NO: 3659 - RNA, 22 nt, Homo sapiens
cgaaaauaacaugggcaacuuc

SEQ ID NO: 3660 - RNA, 21 nt, Homo sapiens
aaucauucacggacaacacuu

SEQ ID NO: 3661 - RNA, 21 nt, Homo sapiens
aaguguuguccgugaaugauu

SEQ ID NO: 3662 - RNA, 22 nt, Homo sapiens
gaaguuguucgugguggauucg

SEQ ID NO: 3663 - RNA, 22 nt, Homo sapiens
cgaauccaccacgaacaacuuc

SEQ ID NO: 3664 - RNA, 23 nt, Homo sapiens
ccuccguguuaccuguccucuag

SEQ ID NO: 3665 - RNA, 23 nt, Homo sapiens
cuagaggacagguaacacggagg

SEQ ID NO: 3666 - RNA, 23 nt, Homo sapiens
ugaggauggauagcaaggaagcc

SEQ ID NO: 3667 - RNA, 23 nt, Homo sapiens
ggcuuccuugcuauccauccuca

SEQ ID NO: 3668 - RNA, 22 nt, Homo sapiens
uucagaucccagcggugccucu

SEQ ID NO: 3669 - RNA, 22 nt, Homo sapiens
agaggcaccgcugggaucugaa

SEQ ID NO: 3670 - RNA, 19 nt, Homo sapiens
guccuaggaggcuccucug

SEQ ID NO: 3671 - RNA, 19 nt, Homo sapiens
cagaggagccuccuaggac

SEQ ID NO: 3672 - RNA, 21 nt, Homo sapiens
caauucucaaaggagccuccc

SEQ ID NO: 3673 - RNA, 21 nt, Homo sapiens
gggaggcuccuuugagaauug

SEQ ID NO: 3674 - RNA, 21 nt, Homo sapiens
guuggggugcaggggucugcu

SEQ ID NO: 3675 - RNA, 21 nt, Homo sapiens
agcagaccccugcaccccaac

SEQ ID NO: 3676 - RNA, 22 nt, Homo sapiens
uuuccggcucgcgugggugugu

SEQ ID NO: 3677 - RNA, 22 nt, Homo sapiens
acacacccacgcgagccggaaa

SEQ ID NO: 3678 - RNA, 23 nt, Homo sapiens
ugagugugugugugugagugugu

SEQ ID NO: 3679 - RNA, 23 nt, Homo sapiens
acacacucacacacacacacuca

SEQ ID NO: 3680 - RNA, 22 nt, Homo sapiens
agugggaggccagggcacggca

SEQ ID NO: 3681 - RNA, 22 nt, Homo sapiens
ugccgugcccuggccucccacu

SEQ ID NO: 3682 - RNA, 20 nt, Homo sapiens
ugagcccuguccucccgcag

SEQ ID NO: 3683 - RNA, 20 nt, Homo sapiens
cugcgggaggacagggcuca

SEQ ID NO: 3684 - RNA, 23 nt, Homo sapiens
aagugccgccaucuuuugagugu

SEQ ID NO: 3685 - RNA, 23 nt, Homo sapiens
acacucaaaagauggcggcacuu

SEQ ID NO: 3686 - RNA, 20 nt, Homo sapiens
acucaaacugugggggcacu

SEQ ID NO: 3687 - RNA, 20 nt, Homo sapiens
agugcccccacaguuugagu

SEQ ID NO: 3688 - RNA, 23 nt, Homo sapiens
aagugcccccacaguuugagugc

SEQ ID NO: 3689 - RNA, 23 nt, Homo sapiens
gcacucaaacugugggggcacuu

SEQ ID NO: 3690 - RNA, 22 nt, Homo sapiens
acucaaaagauggcggcacuuu

SEQ ID NO: 3691 - RNA, 22 nt, Homo sapiens
aaagugccgccaucuuuugagu

SEQ ID NO: 3692 - RNA, 22 nt, Homo sapiens
aaaccuguguuguucaagaguc

SEQ ID NO: 3693 - RNA, 22 nt, Homo sapiens
gacucuugaacaacacagguuu

SEQ ID NO: 3694 - RNA, 22 nt, Homo sapiens
acaguagagggaggaaucgcag

SEQ ID NO: 3695 - RNA, 22 nt, Homo sapiens
cugcgauuccucccucuacugu

SEQ ID NO: 3696 - RNA, 22 nt, Homo sapiens
gugaaauguuuaggaccacuag

SEQ ID NO: 3697 - RNA, 22 nt, Homo sapiens
cuagugguccuaaacauuucac

SEQ ID NO: 3698 - RNA, 23 nt, Homo sapiens
uugaacuguuaagaaccacugga

SEQ ID NO: 3699 - RNA, 23 nt, Homo sapiens
uccagugguucuuaacaguucaa

SEQ ID NO: 3700 - RNA, 22 nt, Homo sapiens
uagugguccuaaacauuucaca

SEQ ID NO: 3701 - RNA, 22 nt, Homo sapiens
ugugaaauguuuaggaccacua

SEQ ID NO: 3702 - RNA, 21 nt, Homo sapiens
ugcaggaccaagaugagcccu

SEQ ID NO: 3703 - RNA, 21 nt, Homo sapiens
agggcucaucuugguccugca

SEQ ID NO: 3704 - RNA, 21 nt, Homo sapiens
cucccacaugcaggguuugca

SEQ ID NO: 3705 - RNA, 21 nt, Homo sapiens
ugcaaacccugcaugugggag

SEQ ID NO: 3706 - RNA, 21 nt, Homo sapiens
caucccuugcaugguggaggg

SEQ ID NO: 3707 - RNA, 21 nt, Homo sapiens
cccuccaccaugcaagggaug

SEQ ID NO: 3708 - RNA, 22 nt, Homo sapiens
aaaaugaaaugagcccagccca

SEQ ID NO: 3709 - RNA, 22 nt, Homo sapiens
ugggcugggcucauuucauuuu

SEQ ID NO: 3710 - RNA, 21 nt, Homo sapiens
agccgcggggaucgccgaggg

SEQ ID NO: 3711 - RNA, 21 nt, Homo sapiens
cccucggcgauccccgcggcu

SEQ ID NO: 3712 - RNA, 19 nt, Homo sapiens
agggaccugagugucuaag

SEQ ID NO: 3713 - RNA, 19 nt, Homo sapiens
cuuagacacucaggucccu

SEQ ID NO: 3714 - RNA, 19 nt, Homo sapiens
aggugugucuguagagucc

SEQ ID NO: 3715 - RNA, 19 nt, Homo sapiens
ggacucuacagacacaccu

SEQ ID NO: 3716 - RNA, 24 nt, Homo sapiens
cauagcccggucgcugguacauga

SEQ ID NO: 3717 - RNA, 24 nt, Homo sapiens
ucauguaccagcgaccgggcuaug

SEQ ID NO: 3718 - RNA, 18 nt, Homo sapiens
cggcuggaggugugagga

SEQ ID NO: 3719 - RNA, 18 nt, Homo sapiens
uccucacaccuccagccg

SEQ ID NO: 3720 - RNA, 18 nt, Homo sapiens
cuaagaaguugacugaag

SEQ ID NO: 3721 - RNA, 18 nt, Homo sapiens
cuucagucaacuucuuag

SEQ ID NO: 3722 - RNA, 19 nt, Homo sapiens
gacuggacaagcugaggaa

SEQ ID NO: 3723 - RNA, 19 nt, Homo sapiens
uuccucagcuuguccaguc

SEQ ID NO: 3724 - RNA, 21 nt, Homo sapiens
gcuugucgcugcgguguugcu

SEQ ID NO: 3725 - RNA, 21 nt, Homo sapiens
agcaacaccgcagcgacaagc

SEQ ID NO: 3726 - RNA, 17 nt, Homo sapiens
ggcgggugcgggggugg

SEQ ID NO: 3727 - RNA, 17 nt, Homo sapiens
ccacccccgcacccgcc

SEQ ID NO: 3728 - RNA, 21 nt, Homo sapiens
ugugucccauuauuggugauu

SEQ ID NO: 3729 - RNA, 21 nt, Homo sapiens
aaucaccaauaaugggacaca

SEQ ID NO: 3730 - RNA, 22 nt, Homo sapiens
uuuaagaaaacaccauggagau

SEQ ID NO: 3731 - RNA, 22 nt, Homo sapiens
aucuccaugguguuuucuuaaa

SEQ ID NO: 3732 - RNA, 22 nt, Homo sapiens
gcuauuucacgacaccaggguu

SEQ ID NO: 3733 - RNA, 22 nt, Homo sapiens
aacccuggugucgugaaauagc

SEQ ID NO: 3734 - RNA, 23 nt, Homo sapiens
agcugguguugugaaucaggccg

SEQ ID NO: 3735 - RNA, 23 nt, Homo sapiens
cggccugauucacaacaccagcu

SEQ ID NO: 3736 - RNA, 21 nt, Homo sapiens
aauaauacaugguugaucuuu

SEQ ID NO: 3737 - RNA, 21 nt, Homo sapiens
aaagaucaaccauguauuauu

SEQ ID NO: 3738 - RNA, 22 nt, Homo sapiens
agaucgaccguguuauauucgc

SEQ ID NO: 3739 - RNA, 22 nt, Homo sapiens
gcgaauauaacacggucgaucu

SEQ ID NO: 3740 - RNA, 22 nt, Homo sapiens
aaucaugugcagugccaauaug

SEQ ID NO: 3741 - RNA, 22 nt, Homo sapiens
cauauuggcacugcacaugauu

SEQ ID NO: 3742 - RNA, 23 nt, Homo sapiens
uuuggcacuagcacauuuuugcu

SEQ ID NO: 3743 - RNA, 23 nt, Homo sapiens
agcaaaaaugugcuagugccaaa

SEQ ID NO: 3744 - RNA, 22 nt, Homo sapiens
uccuguacugagcugccccgag

SEQ ID NO: 3745 - RNA, 22 nt, Homo sapiens
cucggggcagcucaguacagga

SEQ ID NO: 3746 - RNA, 22 nt, Homo sapiens
gcuacuucacaacaccagggcc

SEQ ID NO: 3747 - RNA, 22 nt, Homo sapiens
ggcccugguguugugaaguagc

SEQ ID NO: 3748 - RNA, 22 nt, Homo sapiens
caucaucgucucaaaugagucu

SEQ ID NO: 3749 - RNA, 22 nt, Homo sapiens
agacucauuugagacgaugaug

SEQ ID NO: 3750 - RNA, 23 nt, Homo sapiens
acuccauuuguuuugaugaugga

SEQ ID NO: 3751 - RNA, 23 nt, Homo sapiens
uccaucaucaaaacaaauggagu

SEQ ID NO: 3752 - RNA, 22 nt, Homo sapiens
cuccuacauauuagcauuaaca

SEQ ID NO: 3753 - RNA, 22 nt, Homo sapiens
uguuaaugcuaauauguaggag

SEQ ID NO: 3754 - RNA, 23 nt, Homo sapiens
uuaaugcuaaucgugauaggggu

SEQ ID NO: 3755 - RNA, 23 nt, Homo sapiens
accccuaucacgauuagcauuaa

SEQ ID NO: 3756 - RNA, 22 nt, Homo sapiens
agaucagaaggugauuguggcu

SEQ ID NO: 3757 - RNA, 22 nt, Homo sapiens
agccacaaucaccuucugaucu

SEQ ID NO: 3758 - RNA, 22 nt, Homo sapiens
uacugcagacguggcaaucaug

SEQ ID NO: 3759 - RNA, 22 nt, Homo sapiens
caugauugccacgucugcagua

SEQ ID NO: 3760 - RNA, 21 nt, Homo sapiens
guuagggccaacaucucuugg

SEQ ID NO: 3761 - RNA, 21 nt, Homo sapiens
ccaagagauguuggcccuaac

SEQ ID NO: 3762 - RNA, 21 nt, Homo sapiens
aacauagaggaaauuccacgu

SEQ ID NO: 3763 - RNA, 21 nt, Homo sapiens
acguggaauuuccucuauguu

SEQ ID NO: 3764 - RNA, 21 nt, Homo sapiens
gguggauauuccuucuauguu

SEQ ID NO: 3765 - RNA, 21 nt, Homo sapiens
aacauagaaggaauauccacc

SEQ ID NO: 3766 - RNA, 23 nt, Homo sapiens
ucauagcccuguacaaugcugcu

SEQ ID NO: 3767 - RNA, 23 nt, Homo sapiens
agcagcauuguacagggcuauga

SEQ ID NO: 3768 - RNA, 22 nt, Homo sapiens
uaacacugucugguaaagaugg

SEQ ID NO: 3769 - RNA, 22 nt, Homo sapiens
ccaucuuuaccagacaguguua

SEQ ID NO: 3770 - RNA, 22 nt, Homo sapiens
caucuuccaguacaguguugga

SEQ ID NO: 3771 - RNA, 22 nt, Homo sapiens
uccaacacuguacuggaagaug

SEQ ID NO: 3772 - RNA, 22 nt, Homo sapiens
aacuggccuacaaagucccagu

SEQ ID NO: 3773 - RNA, 22 nt, Homo sapiens
acugggacuuuguaggccaguu

SEQ ID NO: 3774 - RNA, 22 nt, Homo sapiens
ugggucuuugcgggcgagauga

SEQ ID NO: 3775 - RNA, 22 nt, Homo sapiens
ucaucucgcccgcaaagaccca

SEQ ID NO: 3776 - RNA, 21 nt, Homo sapiens
augaccuaugaauugacagac

SEQ ID NO: 3777 - RNA, 21 nt, Homo sapiens
gucugucaauucauaggucau

SEQ ID NO: 3778 - RNA, 22 nt, Homo sapiens
aagcugccaguugaagaacugu

SEQ ID NO: 3779 - RNA, 22 nt, Homo sapiens
acaguucuucaacuggcagcuu

SEQ ID NO: 3780 - RNA, 22 nt, Homo sapiens
aguucuucaguggcaagcuuua

SEQ ID NO: 3781 - RNA, 22 nt, Homo sapiens
uaaagcuugccacugaagaacu

SEQ ID NO: 3782 - RNA, 22 nt, Homo sapiens
acagauucgauucuaggggaau

SEQ ID NO: 3783 - RNA, 22 nt, Homo sapiens
auuccccuagaaucgaaucugu

SEQ ID NO: 3784 - RNA, 23 nt, Homo sapiens
uacccuguagaaccgaauuugug

SEQ ID NO: 3785 - RNA, 23 nt, Homo sapiens
cacaaauucgguucuacagggua

SEQ ID NO: 3786 - RNA, 22 nt, Homo sapiens
uagcagcacguaaauauuggcg

SEQ ID NO: 3787 - RNA, 22 nt, Homo sapiens
cgccaauauuuacgugcugcua

SEQ ID NO: 3788 - RNA, 21 nt, Homo sapiens
ugagaugaagcacuguagcuc

SEQ ID NO: 3789 - RNA, 21 nt, Homo sapiens
gagcuacagugcuucaucuca

SEQ ID NO: 3790 - RNA, 22 nt, Homo sapiens
ggugcagugcugcaucucuggu

SEQ ID NO: 3791 - RNA, 22 nt, Homo sapiens
accagagaugcagcacugcacc

SEQ ID NO: 3792 - RNA, 21 nt, Homo sapiens
uugcucacuguucuucccuag

SEQ ID NO: 3793 - RNA, 21 nt, Homo sapiens
cuagggaagaacagugagcaa

SEQ ID NO: 3794 - RNA, 18 nt, Homo sapiens
cagggucagcugagcaug

SEQ ID NO: 3795 - RNA, 18 nt, Homo sapiens
caugcucagcugacccug

SEQ ID NO: 3796 - RNA, 21 nt, Homo sapiens
aagcauucuuucauugguugg

SEQ ID NO: 3797 - RNA, 21 nt, Homo sapiens
ccaaccaaugaaagaaugcuu

SEQ ID NO: 3798 - RNA, 21 nt, Homo sapiens
ccgucgccgccacccgagccg

SEQ ID NO: 3799 - RNA, 21 nt, Homo sapiens
cggcucggguggcggcgacgg

SEQ ID NO: 3800 - RNA, 27 nt, Homo sapiens
cacuguaggugauggugagagugggca

SEQ ID NO: 3801 - RNA, 27 nt, Homo sapiens
ugcccacucucaccaucaccuacagug

SEQ ID NO: 3802 - RNA, 23 nt, Homo sapiens
gggaugguagaccggugacgugc

SEQ ID NO: 3803 - RNA, 23 nt, Homo sapiens
gcacgucaccggucuaccauccc

SEQ ID NO: 3804 - RNA, 21 nt, Homo sapiens
uaggacacauggucuacuucu

SEQ ID NO: 3805 - RNA, 21 nt, Homo sapiens
agaaguagaccauguguccua

SEQ ID NO: 3806 - RNA, 22 nt, Homo sapiens
cuccugagccauucugagccuc

SEQ ID NO: 3807 - RNA, 22 nt, Homo sapiens
gaggcucagaauggcucaggag

SEQ ID NO: 3808 - RNA, 21 nt, Homo sapiens
gugccagcugcagugggggag

SEQ ID NO: 3809 - RNA, 21 nt, Homo sapiens
cucccccacugcagcuggcac

SEQ ID NO: 3810 - RNA, 21 nt, Homo sapiens
cccggagccaggaugcagcuc

SEQ ID NO: 3811 - RNA, 21 nt, Homo sapiens
gagcugcauccuggcuccggg

SEQ ID NO: 3812 - RNA, 21 nt, Homo sapiens
ucguggccuggucuccauuau

SEQ ID NO: 3813 - RNA, 21 nt, Homo sapiens
auaauggagaccaggccacga

SEQ ID NO: 3814 - RNA, 20 nt, Homo sapiens
ucugcaggguuugcuuugag

SEQ ID NO: 3815 - RNA, 20 nt, Homo sapiens
cucaaagcaaacccugcaga

SEQ ID NO: 3816 - RNA, 21 nt, Homo sapiens
uguucauguagauguuuaagc

SEQ ID NO: 3817 - RNA, 21 nt, Homo sapiens
gcuuaaacaucuacaugaaca

SEQ ID NO: 3818 - RNA, 18 nt, Homo sapiens
ucagcuggcccucauuuc

SEQ ID NO: 3819 - RNA, 18 nt, Homo sapiens
gaaaugagggccagcuga

SEQ ID NO: 3820 - RNA, 21 nt, Homo sapiens
uggcagggaggcugggagggg

SEQ ID NO: 3821 - RNA, 21 nt, Homo sapiens
ccccucccagccucccugcca

SEQ ID NO: 3822 - RNA, 20 nt, Homo sapiens
ucacuguucagacaggcgga

SEQ ID NO: 3823 - RNA, 20 nt, Homo sapiens
uccgccugucugaacaguga

SEQ ID NO: 3824 - RNA, 21 nt, Homo sapiens
ccccaccuccucucuccucag

SEQ ID NO: 3825 - RNA, 21 nt, Homo sapiens
cugaggagagaggaggugggg

SEQ ID NO: 3826 - RNA, 19 nt, Homo sapiens
gugaggacucgggaggugg

SEQ ID NO: 3827 - RNA, 19 nt, Homo sapiens
ccaccucccgaguccucac

SEQ ID NO: 3828 - RNA, 22 nt, Homo sapiens
ugagccccugugccgcccccag

SEQ ID NO: 3829 - RNA, 22 nt, Homo sapiens
cugggggcggcacaggggcuca

SEQ ID NO: 3830 - RNA, 22 nt, Homo sapiens
guggguacggcccagugggggg

SEQ ID NO: 3831 - RNA, 22 nt, Homo sapiens
ccccccacugggccguacccac

SEQ ID NO: 3832 - RNA, 22 nt, Homo sapiens
ucaccagcccuguguucccuag

SEQ ID NO: 3833 - RNA, 22 nt, Homo sapiens
cuagggaacacagggcugguga

SEQ ID NO: 3834 - RNA, 26 nt, Homo sapiens
gugagggcaugcaggccuggaugggg

SEQ ID NO: 3835 - RNA, 26 nt, Homo sapiens
ccccauccaggccugcaugcccucac

SEQ ID NO: 3836 - RNA, 23 nt, Homo sapiens
cucucaccacugcccucccacag

SEQ ID NO: 3837 - RNA, 23 nt, Homo sapiens
cugugggagggcaguggugagag

SEQ ID NO: 3838 - RNA, 24 nt, Homo sapiens
guggguaggguuugggggagagcg

SEQ ID NO: 3839 - RNA, 24 nt, Homo sapiens
cgcucucccccaaacccuacccac

SEQ ID NO: 3840 - RNA, 20 nt, Homo sapiens
gugucugggcggacagcugc

SEQ ID NO: 3841 - RNA, 20 nt, Homo sapiens
gcagcuguccgcccagacac

SEQ ID NO: 3842 - RNA, 20 nt, Homo sapiens
cuuccucgucugucugcccc

SEQ ID NO: 3843 - RNA, 20 nt, Homo sapiens
ggggcagacagacgaggaag

SEQ ID NO: 3844 - RNA, 23 nt, Homo sapiens
gugagugggagccccagugugug

SEQ ID NO: 3845 - RNA, 23 nt, Homo sapiens
cacacacuggggcucccacucac

SEQ ID NO: 3846 - RNA, 27 nt, Homo sapiens
accuucuuguauaagcacugugcuaaa

SEQ ID NO: 3847 - RNA, 27 nt, Homo sapiens
uuuagcacagugcuuauacaagaaggu

SEQ ID NO: 3848 - RNA, 22 nt, Homo sapiens
ggcgacaaaacgagacccuguc

SEQ ID NO: 3849 - RNA, 22 nt, Homo sapiens
gacagggucucguuuugucgcc

SEQ ID NO: 3850 - RNA, 22 nt, Homo sapiens
uugcuugaacccaggaagugga

SEQ ID NO: 3851 - RNA, 22 nt, Homo sapiens
uccacuuccuggguucaagcaa

SEQ ID NO: 3852 - RNA, 19 nt, Homo sapiens
ggagauggagguugcagug

SEQ ID NO: 3853 - RNA, 19 nt, Homo sapiens
cacugcaaccuccaucucc

SEQ ID NO: 3854 - RNA, 21 nt, Homo sapiens
accacugcacuccagccugag

SEQ ID NO: 3855 - RNA, 21 nt, Homo sapiens
cucaggcuggagugcaguggu

SEQ ID NO: 3856 - RNA, 22 nt, Homo sapiens
ggugguugaggcugcaguaagu

SEQ ID NO: 3857 - RNA, 22 nt, Homo sapiens
acuuacugcagccucaaccacc

SEQ ID NO: 3858 - RNA, 17 nt, Homo sapiens
ucgccuccuccucuccc

SEQ ID NO: 3859 - RNA, 17 nt, Homo sapiens
gggagaggaggaggcga

SEQ ID NO: 3860 - RNA, 22 nt, Homo sapiens
ucuauacagacccuggcuuuuc

SEQ ID NO: 3861 - RNA, 22 nt, Homo sapiens
gaaaagccagggucuguauaga

SEQ ID NO: 3862 - RNA, 22 nt, Homo sapiens
ucugggcaacaaagugagaccu

SEQ ID NO: 3863 - RNA, 22 nt, Homo sapiens
aggucucacuuuguugcccaga

SEQ ID NO: 3864 - RNA, 21 nt, Homo sapiens
gaucucacuuuguugcccagg

SEQ ID NO: 3865 - RNA, 21 nt, Homo sapiens
ccugggcaacaaagugagauc

SEQ ID NO: 3866 - RNA, 20 nt, Homo sapiens
ucgcgccccggcucccguuc

SEQ ID NO: 3867 - RNA, 20 nt, Homo sapiens
gaacgggagccggggcgcga

SEQ ID NO: 3868 - RNA, 25 nt, Homo sapiens
ugggaacggguuccggcagacgcug

SEQ ID NO: 3869 - RNA, 25 nt, Homo sapiens
cagcgucugccggaacccguuccca

SEQ ID NO: 3870 - RNA, 21 nt, Homo sapiens
uuaggccgcagaucuggguga

SEQ ID NO: 3871 - RNA, 21 nt, Homo sapiens
ucacccagaucugcggccuaa

SEQ ID NO: 3872 - RNA, 22 nt, Homo sapiens
aauaggccacggaucugggcaa

SEQ ID NO: 3873 - RNA, 22 nt, Homo sapiens
uugcccagauccguggccuauu

SEQ ID NO: 3874 - RNA, 21 nt, Homo sapiens
cacccagaucugcggccuaau

SEQ ID NO: 3875 - RNA, 21 nt, Homo sapiens
auuaggccgcagaucugggug

SEQ ID NO: 3876 - RNA, 22 nt, Homo sapiens
uuagggcccuggcuccaucucc

SEQ ID NO: 3877 - RNA, 22 nt, Homo sapiens
ggagauggagccagggcccuaa

SEQ ID NO: 3878 - RNA, 22 nt, Homo sapiens
uucauucggcuguccagaugua

SEQ ID NO: 3879 - RNA, 22 nt, Homo sapiens
uacaucuggacagccgaaugaa

SEQ ID NO: 3880 - RNA, 24 nt, Homo sapiens
uugcagcugccugggagugacuuc

SEQ ID NO: 3881 - RNA, 24 nt, Homo sapiens
gaagucacucccaggcagcugcaa

SEQ ID NO: 3882 - RNA, 21 nt, Homo sapiens
uugggacauacuuaugcuaaa

SEQ ID NO: 3883 - RNA, 21 nt, Homo sapiens
uuuagcauaaguaugucccaa

SEQ ID NO: 3884 - RNA, 22 nt, Homo sapiens
ucucacuguagccucgaacccc

SEQ ID NO: 3885 - RNA, 22 nt, Homo sapiens
gggguucgaggcuacagugaga

SEQ ID NO: 3886 - RNA, 22 nt, Homo sapiens
uuugaggcuacagugagaugug

SEQ ID NO: 3887 - RNA, 22 nt, Homo sapiens
cacaucucacuguagccucaaa

SEQ ID NO: 3888 - RNA, 18 nt, Homo sapiens
cagggaggugaaugugau

SEQ ID NO: 3889 - RNA, 18 nt, Homo sapiens
aucacauucaccucccug

SEQ ID NO: 3890 - RNA, 19 nt, Homo sapiens
gaugaugcugcugaugcug

SEQ ID NO: 3891 - RNA, 19 nt, Homo sapiens
cagcaucagcagcaucauc

SEQ ID NO: 3892 - RNA, 24 nt, Homo sapiens
ccagacagaauucuaugcacuuuc

SEQ ID NO: 3893 - RNA, 24 nt, Homo sapiens
gaaagugcauagaauucugucugg

SEQ ID NO: 3894 - RNA, 22 nt, Homo sapiens
cuccuggggcccgcacucucgc

SEQ ID NO: 3895 - RNA, 22 nt, Homo sapiens
gcgagagugcgggccccaggag

SEQ ID NO: 3896 - RNA, 21 nt, Homo sapiens
cuccguuugccuguuucgcug

SEQ ID NO: 3897 - RNA, 21 nt, Homo sapiens
cagcgaaacaggcaaacggag

SEQ ID NO: 3898 - RNA, 22 nt, Homo sapiens
cucggcgcggggcgcgggcucc

SEQ ID NO: 3899 - RNA, 22 nt, Homo sapiens
ggagcccgcgccccgcgccgag

SEQ ID NO: 3900 - RNA, 21 nt, Homo sapiens
gcccuccgcccgugcaccccg

SEQ ID NO: 3901 - RNA, 21 nt, Homo sapiens
cggggugcacgggcggagggc

SEQ ID NO: 3902 - RNA, 22 nt, Homo sapiens
gcccgcguguggagccaggugu

SEQ ID NO: 3903 - RNA, 22 nt, Homo sapiens
acaccuggcuccacacgcgggc

SEQ ID NO: 3904 - RNA, 22 nt, Homo sapiens
aaaaccgucuaguuacaguugu

SEQ ID NO: 3905 - RNA, 22 nt, Homo sapiens
acaacuguaacuagacgguuuu

SEQ ID NO: 3906 - RNA, 18 nt, Homo sapiens
uccagugcccuccucucc

SEQ ID NO: 3907 - RNA, 18 nt, Homo sapiens
ggagaggagggcacugga

SEQ ID NO: 3908 - RNA, 18 nt, Homo sapiens
ugaggcaguagauugaau

SEQ ID NO: 3909 - RNA, 18 nt, Homo sapiens
auucaaucuacugccuca

SEQ ID NO: 3910 - RNA, 22 nt, Homo sapiens
aggggcuggcuuuccucugguc

SEQ ID NO: 3911 - RNA, 22 nt, Homo sapiens
gaccagaggaaagccagccccu

SEQ ID NO: 3912 - RNA, 22 nt, Homo sapiens
uggagagaaaggcaguuccuga

SEQ ID NO: 3913 - RNA, 22 nt, Homo sapiens
ucaggaacugccuuucucucca

SEQ ID NO: 3914 - RNA, 22 nt, Homo sapiens
ucgugucuuguguugcagccgg

SEQ ID NO: 3915 - RNA, 22 nt, Homo sapiens
ccggcugcaacacaagacacga

SEQ ID NO: 3916 - RNA, 22 nt, Homo sapiens
ggcuacaacacaggacccgggc

SEQ ID NO: 3917 - RNA, 22 nt, Homo sapiens
gcccggguccuguguuguagcc

SEQ ID NO: 3918 - RNA, 21 nt, Homo sapiens
cggcggggacggcgauugguc

SEQ ID NO: 3919 - RNA, 21 nt, Homo sapiens
gaccaaucgccguccccgccg

SEQ ID NO: 3920 - RNA, 22 nt, Homo sapiens
cgcaggggccgggugcucaccg

SEQ ID NO: 3921 - RNA, 22 nt, Homo sapiens
cggugagcacccggccccugcg

SEQ ID NO: 3922 - RNA, 21 nt, Homo sapiens
ugagugccggugccugcccug

SEQ ID NO: 3923 - RNA, 21 nt, Homo sapiens
cagggcaggcaccggcacuca

SEQ ID NO: 3924 - RNA, 22 nt, Homo sapiens
gcugcgcuuggauuucgucccc

SEQ ID NO: 3925 - RNA, 22 nt, Homo sapiens
ggggacgaaauccaagcgcagc

SEQ ID NO: 3926 - RNA, 23 nt, Homo sapiens
caacggaaucccaaaagcagcug

SEQ ID NO: 3927 - RNA, 23 nt, Homo sapiens
cagcugcuuuugggauuccguug

SEQ ID NO: 3928 - RNA, 22 nt, Homo sapiens
ucaggccaggcacaguggcuca

SEQ ID NO: 3929 - RNA, 22 nt, Homo sapiens
ugagccacugugccuggccuga

SEQ ID NO: 3930 - RNA, 19 nt, Homo sapiens
accgugcaaagguagcaua

SEQ ID NO: 3931 - RNA, 19 nt, Homo sapiens
uaugcuaccuuugcacggu

SEQ ID NO: 3932 - RNA, 20 nt, Homo sapiens
ccuccugcccuccuugcugu

SEQ ID NO: 3933 - RNA, 20 nt, Homo sapiens
acagcaaggagggcaggagg

SEQ ID NO: 3934 - RNA, 20 nt, Homo sapiens
uguuuugauaacaguaaugu

SEQ ID NO: 3935 - RNA, 20 nt, Homo sapiens
acauuacuguuaucaaaaca

SEQ ID NO: 3936 - RNA, 23 nt, Homo sapiens
guguuaauuaaaccucuauuuac

SEQ ID NO: 3937 - RNA, 23 nt, Homo sapiens
guaaauagagguuuaauuaacac

SEQ ID NO: 3938 - RNA, 23 nt, Homo sapiens
cuguaauauaaauuuaauuuauu

SEQ ID NO: 3939 - RNA, 23 nt, Homo sapiens
aauaaauuaaauuuauauuacag

SEQ ID NO: 3940 - RNA, 22 nt, Homo sapiens
uuggggaaacggccgcugagug

SEQ ID NO: 3941 - RNA, 22 nt, Homo sapiens
cacucagcggccguuuccccaa

SEQ ID NO: 3942 - RNA, 21 nt, Homo sapiens
ccucccaugccaagaacuccc

SEQ ID NO: 3943 - RNA, 21 nt, Homo sapiens
gggaguucuuggcaugggagg

SEQ ID NO: 3944 - RNA, 21 nt, Homo sapiens
gguucuuagcauaggaggucu

SEQ ID NO: 3945 - RNA, 21 nt, Homo sapiens
agaccuccuaugcuaagaacc

SEQ ID NO: 3946 - RNA, 21 nt, Homo sapiens
uguucucuuugccaaggacag

SEQ ID NO: 3947 - RNA, 21 nt, Homo sapiens
cuguccuuggcaaagagaaca

SEQ ID NO: 3948 - RNA, 22 nt, Homo sapiens
aaaucucugcaggcaaauguga

SEQ ID NO: 3949 - RNA, 22 nt, Homo sapiens
ucacauuugccugcagagauuu

SEQ ID NO: 3950 - RNA, 22 nt, Homo sapiens
caugguucugucaagcaccgcg

SEQ ID NO: 3951 - RNA, 22 nt, Homo sapiens
cgcggugcuugacagaaccaug

SEQ ID NO: 3952 - RNA, 21 nt, Homo sapiens
uugugcuugaucuaaccaugu

SEQ ID NO: 3953 - RNA, 21 nt, Homo sapiens
acaugguuagaucaagcacaa

SEQ ID NO: 3954 - RNA, 22 nt, Homo sapiens
ucugcaagugucagaggcgagg

SEQ ID NO: 3955 - RNA, 22 nt, Homo sapiens
ccucgccucugacacuugcaga

SEQ ID NO: 3956 - RNA, 22 nt, Homo sapiens
gagagcaguguguguugccugg

SEQ ID NO: 3957 - RNA, 22 nt, Homo sapiens
ccaggcaacacacacugcucuc

SEQ ID NO: 3958 - RNA, 22 nt, Homo sapiens
aucacauugccagugauuaccc

SEQ ID NO: 3959 - RNA, 22 nt, Homo sapiens
ggguaaucacuggcaaugugau

SEQ ID NO: 3960 - RNA, 22 nt, Homo sapiens
agcagaggcagagaggcucagg

SEQ ID NO: 3961 - RNA, 22 nt, Homo sapiens
ccugagccucucugccucugcu

SEQ ID NO: 3962 - RNA, 23 nt, Homo sapiens
ugaggcucuguuagccuuggcuc

SEQ ID NO: 3963 - RNA, 23 nt, Homo sapiens
gagccaaggcuaacagagccuca

SEQ ID NO: 3964 - RNA, 22 nt, Homo sapiens
uaucauggaguugguaaagcac

SEQ ID NO: 3965 - RNA, 22 nt, Homo sapiens
gugcuuuaccaacuccaugaua

SEQ ID NO: 3966 - RNA, 22 nt, Homo sapiens
guuuuaccaccuccaggagacu

SEQ ID NO: 3967 - RNA, 22 nt, Homo sapiens
agucuccuggaggugguaaaac

SEQ ID NO: 3968 - RNA, 22 nt, Homo sapiens
cgccucuucagcgcugucuucc

SEQ ID NO: 3969 - RNA, 22 nt, Homo sapiens
ggaagacagcgcugaagaggcg

SEQ ID NO: 3970 - RNA, 23 nt, Homo sapiens
caggcagugacuguucagacguc

SEQ ID NO: 3971 - RNA, 23 nt, Homo sapiens
gacgucugaacagucacugccug

SEQ ID NO: 3972 - RNA, 23 nt, Homo sapiens
agaauugcguuuggacaaucagu

SEQ ID NO: 3973 - RNA, 23 nt, Homo sapiens
acugauuguccaaacgcaauucu

SEQ ID NO: 3974 - RNA, 22 nt, Homo sapiens
agauguccagccacaauucucg

SEQ ID NO: 3975 - RNA, 22 nt, Homo sapiens
cgagaauuguggcuggacaucu

SEQ ID NO: 3976 - RNA, 24 nt, Homo sapiens
agcagaagcagggagguucuccca

SEQ ID NO: 3977 - RNA, 24 nt, Homo sapiens
ugggagaaccucccugcuucugcu

SEQ ID NO: 3978 - RNA, 22 nt, Homo sapiens
uaugugggaugguaaaccgcuu

SEQ ID NO: 3979 - RNA, 22 nt, Homo sapiens
aagcgguuuaccaucccacaua

SEQ ID NO: 3980 - RNA, 22 nt, Homo sapiens
ugguuuaccgucccacauacau

SEQ ID NO: 3981 - RNA, 22 nt, Homo sapiens
auguaugugggacgguaaacca

SEQ ID NO: 3982 - RNA, 23 nt, Homo sapiens
cagugcaaugauauugucaaagc

SEQ ID NO: 3983 - RNA, 23 nt, Homo sapiens
gcuuugacaauaucauugcacug

SEQ ID NO: 3984 - RNA, 17 nt, Homo sapiens
uaauugcuuccauguuu

SEQ ID NO: 3985 - RNA, 17 nt, Homo sapiens
aaacauggaagcaauua

SEQ ID NO: 3986 - RNA, 23 nt, Homo sapiens
uugccacacugcaacaccuuaca

SEQ ID NO: 3987 - RNA, 23 nt, Homo sapiens
uguaagguguugcaguguggcaa

SEQ ID NO: 3988 - RNA, 21 nt, Homo sapiens
ucuggcuguuguggugugcaa

SEQ ID NO: 3989 - RNA, 21 nt, Homo sapiens
uugcacaccacaacagccaga

SEQ ID NO: 3990 - RNA, 22 nt, Homo sapiens
gauaucagcucaguaggcaccg

SEQ ID NO: 3991 - RNA, 22 nt, Homo sapiens
cggugccuacugagcugauauc

SEQ ID NO: 3992 - RNA, 21 nt, Homo sapiens
guuccugcugaacugagccag

SEQ ID NO: 3993 - RNA, 21 nt, Homo sapiens
cuggcucaguucagcaggaac

SEQ ID NO: 3994 - RNA, 20 nt, Homo sapiens
auauggguuuacuaguuggu

SEQ ID NO: 3995 - RNA, 20 nt, Homo sapiens
accaacuaguaaacccauau

SEQ ID NO: 3996 - RNA, 22 nt, Homo sapiens
ugcuaugccaacauauugccau

SEQ ID NO: 3997 - RNA, 22 nt, Homo sapiens
auggcaauauguuggcauagca

SEQ ID NO: 3998 - RNA, 21 nt, Homo sapiens
aggcaagaugcuggcauagcu

SEQ ID NO: 3999 - RNA, 21 nt, Homo sapiens
agcuaugccagcaucuugccu

SEQ ID NO: 4000 - RNA, 18 nt, Homo sapiens
cggggcggcaggggccuc

SEQ ID NO: 4001 - RNA, 18 nt, Homo sapiens
gaggccccugccgccccg

SEQ ID NO: 4002 - RNA, 19 nt, Homo sapiens
aaaagcuggguugagagga

SEQ ID NO: 4003 - RNA, 19 nt, Homo sapiens
uccucucaacccagcuuuu

SEQ ID NO: 4004 - RNA, 22 nt, Homo sapiens
cccaauacacggucgaccucuu

SEQ ID NO: 4005 - RNA, 22 nt, Homo sapiens
aagaggucgaccguguauuggg

SEQ ID NO: 4006 - RNA, 23 nt, Homo sapiens
agguuguccguggugaguucgca

SEQ ID NO: 4007 - RNA, 23 nt, Homo sapiens
ugcgaacucaccacggacaaccu

SEQ ID NO: 4008 - RNA, 23 nt, Homo sapiens
gcaaagcacacggccugcagaga

SEQ ID NO: 4009 - RNA, 23 nt, Homo sapiens
ucucugcaggccgugugcuuugc

SEQ ID NO: 4010 - RNA, 22 nt, Homo sapiens
ucucugggccugugucuuaggc

SEQ ID NO: 4011 - RNA, 22 nt, Homo sapiens
gccuaagacacaggcccagaga

SEQ ID NO: 4012 - RNA, 21 nt, Homo sapiens
gccccugggccuauccuagaa

SEQ ID NO: 4013 - RNA, 21 nt, Homo sapiens
uucuaggauaggcccaggggc

SEQ ID NO: 4014 - RNA, 22 nt, Homo sapiens
uccgucucaguuacuuuauagc

SEQ ID NO: 4015 - RNA, 22 nt, Homo sapiens
gcuauaaaguaacugagacgga

SEQ ID NO: 4016 - RNA, 22 nt, Homo sapiens
aacacaccuauucaaggauuca

SEQ ID NO: 4017 - RNA, 22 nt, Homo sapiens
ugaauccuugaauagguguguu

SEQ ID NO: 4018 - RNA, 24 nt, Homo sapiens
aauccuuggaaccuaggugugagu

SEQ ID NO: 4019 - RNA, 24 nt, Homo sapiens
acucacaccuagguuccaaggauu

SEQ ID NO: 4020 - RNA, 22 nt, Homo sapiens
uaaugccccuaaaaauccuuau

SEQ ID NO: 4021 - RNA, 22 nt, Homo sapiens
auaaggauuuuuaggggcauua

SEQ ID NO: 4022 - RNA, 23 nt, Homo sapiens
agggacuuuugggggcagaugug

SEQ ID NO: 4023 - RNA, 23 nt, Homo sapiens
cacaucugcccccaaaagucccu

SEQ ID NO: 4024 - RNA, 22 nt, Homo sapiens
uaaugccccuaaaaauccuuau

SEQ ID NO: 4025 - RNA, 22 nt, Homo sapiens
auaaggauuuuuaggggcauua

SEQ ID NO: 4026 - RNA, 22 nt, Homo sapiens
agggacuuucaggggcagcugu

SEQ ID NO: 4027 - RNA, 22 nt, Homo sapiens
acagcugccccugaaagucccu

SEQ ID NO: 4028 - RNA, 24 nt, Homo sapiens
gaaaaugaugaguagugacugaug

SEQ ID NO: 4029 - RNA, 24 nt, Homo sapiens
caucagucacuacucaucauuuuc

SEQ ID NO: 4030 - RNA, 23 nt, Homo sapiens
ugagcaccacacaggccgggcgc

SEQ ID NO: 4031 - RNA, 23 nt, Homo sapiens
gcgcccggccuguguggugcuca

SEQ ID NO: 4032 - RNA, 21 nt, Homo sapiens
gcuggucugcguggugcucgg

SEQ ID NO: 4033 - RNA, 21 nt, Homo sapiens
ccgagcaccacgcagaccagc

SEQ ID NO: 4034 - RNA, 22 nt, Homo sapiens
gccugcugggguggaaccuggu

SEQ ID NO: 4035 - RNA, 22 nt, Homo sapiens
accagguuccaccccagcaggc

SEQ ID NO: 4036 - RNA, 23 nt, Homo sapiens
gaagugcuucgauuuuggggugu

SEQ ID NO: 4037 - RNA, 23 nt, Homo sapiens
acaccccaaaaucgaagcacuuc

SEQ ID NO: 4038 - RNA, 22 nt, Homo sapiens
acucaaaaugggggcgcuuucc

SEQ ID NO: 4039 - RNA, 22 nt, Homo sapiens
ggaaagcgcccccauuuugagu

SEQ ID NO: 4040 - RNA, 22 nt, Homo sapiens
uauguaacaugguccacuaacu

SEQ ID NO: 4041 - RNA, 22 nt, Homo sapiens
aguuaguggaccauguuacaua

SEQ ID NO: 4042 - RNA, 21 nt, Homo sapiens
ugguagacuauggaacguagg

SEQ ID NO: 4043 - RNA, 21 nt, Homo sapiens
ccuacguuccauagucuacca

SEQ ID NO: 4044 - RNA, 22 nt, Homo sapiens
uguagauacgagcaccagccac

SEQ ID NO: 4045 - RNA, 22 nt, Homo sapiens
guggcuggugcucguaucuaca

SEQ ID NO: 4046 - RNA, 23 nt, Homo sapiens
acaggcggcuguagcaauggggg

SEQ ID NO: 4047 - RNA, 23 nt, Homo sapiens
cccccauugcuacagccgccugu

SEQ ID NO: 4048 - RNA, 22 nt, Homo sapiens
aauucccuuguagauaacccgg

SEQ ID NO: 4049 - RNA, 22 nt, Homo sapiens
ccggguuaucuacaagggaauu

SEQ ID NO: 4050 - RNA, 22 nt, Homo sapiens
uacgcgcagaccacaggauguc

SEQ ID NO: 4051 - RNA, 22 nt, Homo sapiens
gacauccuguggucugcgcgua

SEQ ID NO: 4052 - RNA, 22 nt, Homo sapiens
uuacacacaacugaggaucaua

SEQ ID NO: 4053 - RNA, 22 nt, Homo sapiens
uaugauccucaguuguguguaa

SEQ ID NO: 4054 - RNA, 23 nt, Homo sapiens
uagcccccaggcuucacuuggcg

SEQ ID NO: 4055 - RNA, 23 nt, Homo sapiens
cgccaagugaagccugggggcua

SEQ ID NO: 4056 - RNA, 23 nt, Homo sapiens
agggcauaggagaggguugauau

SEQ ID NO: 4057 - RNA, 23 nt, Homo sapiens
auaucaacccucuccuaugcccu

SEQ ID NO: 4058 - RNA, 22 nt, Homo sapiens
gaauguugcucggugaaccccu

SEQ ID NO: 4059 - RNA, 22 nt, Homo sapiens
agggguucaccgagcaacauuc

SEQ ID NO: 4060 - RNA, 23 nt, Homo sapiens
agguuacccgagcaacuuugcau

SEQ ID NO: 4061 - RNA, 23 nt, Homo sapiens
augcaaaguugcucggguaaccu

SEQ ID NO: 4062 - RNA, 22 nt, Homo sapiens
uauguaacacgguccacuaacc

SEQ ID NO: 4063 - RNA, 22 nt, Homo sapiens
gguuaguggaccguguuacaua

SEQ ID NO: 4064 - RNA, 21 nt, Homo sapiens
uaguagaccguauagcguacg

SEQ ID NO: 4065 - RNA, 21 nt, Homo sapiens
cguacgcuauacggucuacua

SEQ ID NO: 4066 - RNA, 23 nt, Homo sapiens
acuucaccugguccacuagccgu

SEQ ID NO: 4067 - RNA, 23 nt, Homo sapiens
acggcuaguggaccaggugaagu

SEQ ID NO: 4068 - RNA, 18 nt, Homo sapiens
guguucucugauggacag

SEQ ID NO: 4069 - RNA, 18 nt, Homo sapiens
cuguccaucagagaacac

SEQ ID NO: 4070 - RNA, 22 nt, Homo sapiens
caggucgucuugcagggcuucu

SEQ ID NO: 4071 - RNA, 22 nt, Homo sapiens
agaagcccugcaagacgaccug

SEQ ID NO: 4072 - RNA, 21 nt, Homo sapiens
ugucuugcaggccgucaugca

SEQ ID NO: 4073 - RNA, 21 nt, Homo sapiens
ugcaugacggccugcaagaca

SEQ ID NO: 4074 - RNA, 22 nt, Homo sapiens
aucaugaugggcuccucggugu

SEQ ID NO: 4075 - RNA, 22 nt, Homo sapiens
acaccgaggagcccaucaugau

SEQ ID NO: 4076 - RNA, 23 nt, Homo sapiens
uugcuaguugcacuccucucugu

SEQ ID NO: 4077 - RNA, 23 nt, Homo sapiens
acagagaggagugcaacuagcaa

SEQ ID NO: 4078 - RNA, 25 nt, Homo sapiens
uaggcaguguauugcuagcggcugu

SEQ ID NO: 4079 - RNA, 25 nt, Homo sapiens
acagccgcuagcaauacacugccua

SEQ ID NO: 4080 - RNA, 22 nt, Homo sapiens
auuggggacauuuugcauucau

SEQ ID NO: 4081 - RNA, 22 nt, Homo sapiens
augaaugcaaaauguccccaau

SEQ ID NO: 4082 - RNA, 22 nt, Homo sapiens
uuuugcgauguguuccuaauau

SEQ ID NO: 4083 - RNA, 22 nt, Homo sapiens
auauuaggaacacaucgcaaaa

SEQ ID NO: 4084 - RNA, 22 nt, Homo sapiens
uugggaucauuuugcauccaua

SEQ ID NO: 4085 - RNA, 22 nt, Homo sapiens
uauggaugcaaaaugaucccaa

SEQ ID NO: 4086 - RNA, 22 nt, Homo sapiens
uuuugcaauauguuccugaaua

SEQ ID NO: 4087 - RNA, 22 nt, Homo sapiens
uauucaggaacauauugcaaaa

SEQ ID NO: 4088 - RNA, 21 nt, Homo sapiens
gcaguccaugggcauauacac

SEQ ID NO: 4089 - RNA, 21 nt, Homo sapiens
guguauaugcccauggacugc

SEQ ID NO: 4090 - RNA, 22 nt, Homo sapiens
uaugugccuuuggacuacaucg

SEQ ID NO: 4091 - RNA, 22 nt, Homo sapiens
cgauguaguccaaaggcacaua

SEQ ID NO: 4092 - RNA, 23 nt, Homo sapiens
auacacauacacgcaacacacau

SEQ ID NO: 4093 - RNA, 23 nt, Homo sapiens
auguguguugcguguauguguau

SEQ ID NO: 4094 - RNA, 23 nt, Homo sapiens
uugcaugucagauuguaauuccc

SEQ ID NO: 4095 - RNA, 23 nt, Homo sapiens
gggaauuacaaucugacaugcaa

SEQ ID NO: 4096 - RNA, 21 nt, Homo sapiens
ucacuccucuccucccgucuu

SEQ ID NO: 4097 - RNA, 21 nt, Homo sapiens
aagacgggaggagaggaguga

SEQ ID NO: 4098 - RNA, 22 nt, Homo sapiens
ucaggcucaguccccucccgau

SEQ ID NO: 4099 - RNA, 22 nt, Homo sapiens
aucgggaggggacugagccuga

SEQ ID NO: 4100 - RNA, 22 nt, Homo sapiens
gucauacacggcucuccucucu

SEQ ID NO: 4101 - RNA, 22 nt, Homo sapiens
agagaggagagccguguaugac

SEQ ID NO: 4102 - RNA, 22 nt, Homo sapiens
agaggcuggccgugaugaauuc

SEQ ID NO: 4103 - RNA, 22 nt, Homo sapiens
gaauucaucacggccagccucu

SEQ ID NO: 4104 - RNA, 22 nt, Homo sapiens
aaucauacagggacauccaguu

SEQ ID NO: 4105 - RNA, 22 nt, Homo sapiens
aacuggaugucccuguaugauu

SEQ ID NO: 4106 - RNA, 22 nt, Homo sapiens
aaucguacagggucauccacuu

SEQ ID NO: 4107 - RNA, 22 nt, Homo sapiens
aaguggaugacccuguacgauu

SEQ ID NO: 4108 - RNA, 21 nt, Homo sapiens
uugaaaggcuauuucuugguc

SEQ ID NO: 4109 - RNA, 21 nt, Homo sapiens
gaccaagaaauagccuuucaa

SEQ ID NO: 4110 - RNA, 21 nt, Homo sapiens
cccagauaauggcacucucaa

SEQ ID NO: 4111 - RNA, 21 nt, Homo sapiens
uugagagugccauuaucuggg

SEQ ID NO: 4112 - RNA, 22 nt, Homo sapiens
caaccuggaggacuccaugcug

SEQ ID NO: 4113 - RNA, 22 nt, Homo sapiens
cagcauggaguccuccagguug

SEQ ID NO: 4114 - RNA, 20 nt, Homo sapiens
ccauggaucuccaggugggu

SEQ ID NO: 4115 - RNA, 20 nt, Homo sapiens
acccaccuggagauccaugg

SEQ ID NO: 4116 - RNA, 22 nt, Homo sapiens
cuuaugcaagauucccuucuac

SEQ ID NO: 4117 - RNA, 22 nt, Homo sapiens
guagaagggaaucuugcauaag

SEQ ID NO: 4118 - RNA, 22 nt, Homo sapiens
aguggggaacccuuccaugagg

SEQ ID NO: 4119 - RNA, 22 nt, Homo sapiens
ccucauggaaggguuccccacu

SEQ ID NO: 4120 - RNA, 23 nt, Homo sapiens
aggaccugcgggacaagauucuu

SEQ ID NO: 4121 - RNA, 23 nt, Homo sapiens
aagaaucuugucccgcagguccu

SEQ ID NO: 4122 - RNA, 22 nt, Homo sapiens
caaaccacacugugguguuaga

SEQ ID NO: 4123 - RNA, 22 nt, Homo sapiens
ucuaacaccacagugugguuug

SEQ ID NO: 4124 - RNA, 21 nt, Homo sapiens
cagcagcacacugugguuugu

SEQ ID NO: 4125 - RNA, 21 nt, Homo sapiens
acaaaccacagugugcugcug

SEQ ID NO: 4126 - RNA, 23 nt, Homo sapiens
uuucaagccagggggcguuuuuc

SEQ ID NO: 4127 - RNA, 23 nt, Homo sapiens
gaaaaacgcccccuggcuugaaa

SEQ ID NO: 4128 - RNA, 20 nt, Homo sapiens
ucacuaccugacaauacagu

SEQ ID NO: 4129 - RNA, 20 nt, Homo sapiens
acuguauugucagguaguga

SEQ ID NO: 4130 - RNA, 21 nt, Homo sapiens
ugcuguauugucagguaguga

SEQ ID NO: 4131 - RNA, 21 nt, Homo sapiens
ucacuaccugacaauacagca

SEQ ID NO: 4132 - RNA, 22 nt, Homo sapiens
uucugccucuguccagguccuu

SEQ ID NO: 4133 - RNA, 22 nt, Homo sapiens
aaggaccuggacagaggcagaa

SEQ ID NO: 4134 - RNA, 24 nt, Homo sapiens
agggcuggacucagcggcggagcu

SEQ ID NO: 4135 - RNA, 24 nt, Homo sapiens
agcuccgccgcugaguccagcccu

SEQ ID NO: 4136 - RNA, 21 nt, Homo sapiens
ugacugccucacugaccacuu

SEQ ID NO: 4137 - RNA, 21 nt, Homo sapiens
aaguggucagugaggcaguca

SEQ ID NO: 4138 - RNA, 24 nt, Homo sapiens
aauuugguuucugaggcacuuagu

SEQ ID NO: 4139 - RNA, 24 nt, Homo sapiens
acuaagugccucagaaaccaaauu

SEQ ID NO: 4140 - RNA, 21 nt, Homo sapiens
uacuuuucuagguuguugggg

SEQ ID NO: 4141 - RNA, 21 nt, Homo sapiens
ccccaacaaccuagaaaagua

SEQ ID NO: 4142 - RNA, 23 nt, Homo sapiens
ucacaacaaccuugcaggguaga

SEQ ID NO: 4143 - RNA, 23 nt, Homo sapiens
ucuacccugcaagguuguuguga

SEQ ID NO: 4144 - RNA, 22 nt, Homo sapiens
cuuggauuuuccugggccucag

SEQ ID NO: 4145 - RNA, 22 nt, Homo sapiens
cugaggcccaggaaaauccaag

SEQ ID NO: 4146 - RNA, 22 nt, Homo sapiens
ugaggacagggcaaauucacga

SEQ ID NO: 4147 - RNA, 22 nt, Homo sapiens
ucgugaauuugcccuguccuca

SEQ ID NO: 4148 - RNA, 22 nt, Homo sapiens
aucauaugaaccaaacucuaau

SEQ ID NO: 4149 - RNA, 22 nt, Homo sapiens
auuagaguuugguucauaugau

SEQ ID NO: 4150 - RNA, 22 nt, Homo sapiens
uagagucuggcugauaugguuu

SEQ ID NO: 4151 - RNA, 22 nt, Homo sapiens
aaaccauaucagccagacucua

SEQ ID NO: 4152 - RNA, 21 nt, Homo sapiens
ccugugcucccagggccucgc

SEQ ID NO: 4153 - RNA, 21 nt, Homo sapiens
gcgaggcccugggagcacagg

SEQ ID NO: 4154 - RNA, 22 nt, Homo sapiens
ugaggcccuuggggcacagugg

SEQ ID NO: 4155 - RNA, 22 nt, Homo sapiens
ccacugugccccaagggccuca

SEQ ID NO: 4156 - RNA, 22 nt, Homo sapiens
uccuaaaucugaaaguccaaaa

SEQ ID NO: 4157 - RNA, 22 nt, Homo sapiens
uuuuggacuuucagauuuagga

SEQ ID NO: 4158 - RNA, 24 nt, Homo sapiens
uuggacuuuuucagauuuggggau

SEQ ID NO: 4159 - RNA, 24 nt, Homo sapiens
auccccaaaucugaaaaaguccaa

SEQ ID NO: 4160 - RNA, 22 nt, Homo sapiens
augcaccugggcaaggauucug

SEQ ID NO: 4161 - RNA, 22 nt, Homo sapiens
cagaauccuugcccaggugcau

SEQ ID NO: 4162 - RNA, 23 nt, Homo sapiens
uaauccuugcuaccugggugaga

SEQ ID NO: 4163 - RNA, 23 nt, Homo sapiens
ucucacccagguagcaaggauua

SEQ ID NO: 4164 - RNA, 22 nt, Homo sapiens
uuuugugucucccauuccccag

SEQ ID NO: 4165 - RNA, 22 nt, Homo sapiens
cuggggaaugggagacacaaaa

SEQ ID NO: 4166 - RNA, 22 nt, Homo sapiens
agggggauggcagagcaaaauu

SEQ ID NO: 4167 - RNA, 22 nt, Homo sapiens
aauuuugcucugccaucccccu

SEQ ID NO: 4168 - RNA, 22 nt, Homo sapiens
gugcauggcuguauauauaaca

SEQ ID NO: 4169 - RNA, 22 nt, Homo sapiens
uguuauauauacagccaugcac

SEQ ID NO: 4170 - RNA, 21 nt, Homo sapiens
uauauauacagccaugcacuc

SEQ ID NO: 4171 - RNA, 21 nt, Homo sapiens
gagugcauggcuguauauaua

SEQ ID NO: 4172 - RNA, 22 nt, Homo sapiens
aaugcacccgggcaaggauucu

SEQ ID NO: 4173 - RNA, 22 nt, Homo sapiens
agaauccuugcccgggugcauu

SEQ ID NO: 4174 - RNA, 22 nt, Homo sapiens
aauccuuugucccugggugaga

SEQ ID NO: 4175 - RNA, 22 nt, Homo sapiens
ucucacccagggacaaaggauu

SEQ ID NO: 4176 - RNA, 22 nt, Homo sapiens
aaugcaccugggcaaggauuca

SEQ ID NO: 4177 - RNA, 22 nt, Homo sapiens
ugaauccuugcccaggugcauu

SEQ ID NO: 4178 - RNA, 21 nt, Homo sapiens
auccuugcuaucugggugcua

SEQ ID NO: 4179 - RNA, 21 nt, Homo sapiens
uagcacccagauagcaaggau

SEQ ID NO: 4180 - RNA, 22 nt, Homo sapiens
agacccuggucugcacucuauc

SEQ ID NO: 4181 - RNA, 22 nt, Homo sapiens
gauagagugcagaccagggucu

SEQ ID NO: 4182 - RNA, 21 nt, Homo sapiens
uugcagcugcgguuguaaggu

SEQ ID NO: 4183 - RNA, 21 nt, Homo sapiens
accuuacaaccgcagcugcaa

SEQ ID NO: 4184 - RNA, 22 nt, Homo sapiens
cgucaacacuugcugguuuccu

SEQ ID NO: 4185 - RNA, 22 nt, Homo sapiens
aggaaaccagcaaguguugacg

SEQ ID NO: 4186 - RNA, 22 nt, Homo sapiens
gggagccaggaaguauugaugu

SEQ ID NO: 4187 - RNA, 22 nt, Homo sapiens
acaucaauacuuccuggcuccc

SEQ ID NO: 4188 - RNA, 21 nt, Homo sapiens
uaaggcacccuucugaguaga

SEQ ID NO: 4189 - RNA, 21 nt, Homo sapiens
ucuacucagaagggugccuua

SEQ ID NO: 4190 - RNA, 22 nt, Homo sapiens
uauucaggaagguguuacuuaa

SEQ ID NO: 4191 - RNA, 22 nt, Homo sapiens
uuaaguaacaccuuccugaaua

SEQ ID NO: 4192 - RNA, 21 nt, Homo sapiens
uuuugcaccuuuuggagugaa

SEQ ID NO: 4193 - RNA, 21 nt, Homo sapiens
uucacuccaaaaggugcaaaa

SEQ ID NO: 4194 - RNA, 23 nt, Homo sapiens
ugauuguagccuuuuggaguaga

SEQ ID NO: 4195 - RNA, 23 nt, Homo sapiens
ucuacuccaaaaggcuacaauca

SEQ ID NO: 4196 - RNA, 23 nt, Homo sapiens
ggguuuguagcuuugcuggcaug

SEQ ID NO: 4197 - RNA, 23 nt, Homo sapiens
caugccagcaaagcuacaaaccc

SEQ ID NO: 4198 - RNA, 23 nt, Homo sapiens
cagggcucagggauuggauggag

SEQ ID NO: 4199 - RNA, 23 nt, Homo sapiens
cuccauccaaucccugagcccug

SEQ ID NO: 4200 - RNA, 23 nt, Homo sapiens
augcuacucggaaaucccacuga

SEQ ID NO: 4201 - RNA, 23 nt, Homo sapiens
ucagugggauuuccgaguagcau

SEQ ID NO: 4202 - RNA, 21 nt, Homo sapiens
gugggauuucugaguagcauc

SEQ ID NO: 4203 - RNA, 21 nt, Homo sapiens
gaugcuacucagaaaucccac

SEQ ID NO: 4204 - RNA, 23 nt, Homo sapiens
ccggggcagauugguguagggug

SEQ ID NO: 4205 - RNA, 23 nt, Homo sapiens
cacccuacaccaaucugccccgg

SEQ ID NO: 4206 - RNA, 23 nt, Homo sapiens
acggagacgacaagacugugcug

SEQ ID NO: 4207 - RNA, 23 nt, Homo sapiens
cagcacagucuugucgucuccgu

SEQ ID NO: 4208 - RNA, 22 nt, Homo sapiens
aauccacgcugagcuuggcauc

SEQ ID NO: 4209 - RNA, 22 nt, Homo sapiens
gaugccaagcucagcguggauu

SEQ ID NO: 4210 - RNA, 23 nt, Homo sapiens
aggaaaugaggcuggcuaggagc

SEQ ID NO: 4211 - RNA, 23 nt, Homo sapiens
gcuccuagccagccucauuuccu

SEQ ID NO: 4212 - RNA, 22 nt, Homo sapiens
ugauugguacgucuguggguag

SEQ ID NO: 4213 - RNA, 22 nt, Homo sapiens
cuacccacagacguaccaauca

SEQ ID NO: 4214 - RNA, 22 nt, Homo sapiens
aaucagugaaugccuugaaccu

SEQ ID NO: 4215 - RNA, 22 nt, Homo sapiens
agguucaaggcauucacugauu

SEQ ID NO: 4216 - RNA, 21 nt, Homo sapiens
uuacaggcgugaaccaccgcg

SEQ ID NO: 4217 - RNA, 21 nt, Homo sapiens
cgcggugguucacgccuguaa

SEQ ID NO: 4218 - RNA, 21 nt, Homo sapiens
uacugcagacaguggcaauca

SEQ ID NO: 4219 - RNA, 21 nt, Homo sapiens
ugauugccacugucugcagua

SEQ ID NO: 4220 - RNA, 21 nt, Homo sapiens
guuucaccauguuggucaggc

SEQ ID NO: 4221 - RNA, 21 nt, Homo sapiens
gccugaccaacauggugaaac

SEQ ID NO: 4222 - RNA, 23 nt, Homo sapiens
uaaauuucaccuuucugagaagg

SEQ ID NO: 4223 - RNA, 23 nt, Homo sapiens
ccuucucagaaaggugaaauuua

SEQ ID NO: 4224 - RNA, 22 nt, Homo sapiens
uucacaaggaggugucauuuau

SEQ ID NO: 4225 - RNA, 22 nt, Homo sapiens
auaaaugacaccuccuugugaa

SEQ ID NO: 4226 - RNA, 23 nt, Homo sapiens
uaaauuucaccuuucugagaaga

SEQ ID NO: 4227 - RNA, 23 nt, Homo sapiens
ucuucucagaaaggugaaauuua

SEQ ID NO: 4228 - RNA, 22 nt, Homo sapiens
uucucaaggaggugucguuuau

SEQ ID NO: 4229 - RNA, 22 nt, Homo sapiens
auaaacgacaccuccuugagaa

SEQ ID NO: 4230 - RNA, 21 nt, Homo sapiens
auugacacuucugugaguaga

SEQ ID NO: 4231 - RNA, 21 nt, Homo sapiens
ucuacucacagaagugucaau

SEQ ID NO: 4232 - RNA, 23 nt, Homo sapiens
uacucuggagagugacaaucaug

SEQ ID NO: 4233 - RNA, 23 nt, Homo sapiens
caugauugucacucuccagagua

SEQ ID NO: 4234 - RNA, 21 nt, Homo sapiens
auugacaccucugugagugga

SEQ ID NO: 4235 - RNA, 21 nt, Homo sapiens
uccacucacagaggugucaau

SEQ ID NO: 4236 - RNA, 22 nt, Homo sapiens
uucucaagagggaggcaaucau

SEQ ID NO: 4237 - RNA, 22 nt, Homo sapiens
augauugccucccucuugagaa

SEQ ID NO: 4238 - RNA, 22 nt, Homo sapiens
gagugccuucuuuuggagcguu

SEQ ID NO: 4239 - RNA, 22 nt, Homo sapiens
aacgcuccaaaagaaggcacuc

SEQ ID NO: 4240 - RNA, 18 nt, Homo sapiens
ugcuuccuuucagagggu

SEQ ID NO: 4241 - RNA, 18 nt, Homo sapiens
acccucugaaaggaagca

SEQ ID NO: 4242 - RNA, 22 nt, Homo sapiens
aucuggagguaagaagcacuuu

SEQ ID NO: 4243 - RNA, 22 nt, Homo sapiens
aaagugcuucuuaccuccagau

SEQ ID NO: 4244 - RNA, 22 nt, Homo sapiens
gaaagcgcuucccuuugcugga

SEQ ID NO: 4245 - RNA, 22 nt, Homo sapiens
uccagcaaagggaagcgcuuuc

SEQ ID NO: 4246 - RNA, 20 nt, Homo sapiens
cugcaaagggaagcccuuuc

SEQ ID NO: 4247 - RNA, 20 nt, Homo sapiens
gaaagggcuucccuuugcag

SEQ ID NO: 4248 - RNA, 21 nt, Homo sapiens
caaagcgcuucccuuuggagc

SEQ ID NO: 4249 - RNA, 21 nt, Homo sapiens
gcuccaaagggaagcgcuuug

SEQ ID NO: 4250 - RNA, 22 nt, Homo sapiens
cucuagagggaagcacuuucug

SEQ ID NO: 4251 - RNA, 22 nt, Homo sapiens
cagaaagugcuucccucuagag

SEQ ID NO: 4252 - RNA, 21 nt, Homo sapiens
aaagcgcuucccuucagagug

SEQ ID NO: 4253 - RNA, 21 nt, Homo sapiens
cacucugaagggaagcgcuuu

SEQ ID NO: 4254 - RNA, 22 nt, Homo sapiens
cucuagagggaagcgcuuucug

SEQ ID NO: 4255 - RNA, 22 nt, Homo sapiens
cagaaagcgcuucccucuagag

SEQ ID NO: 4256 - RNA, 22 nt, Homo sapiens
aaagugcauccuuuuagagguu

SEQ ID NO: 4257 - RNA, 22 nt, Homo sapiens
aaccucuaaaaggaugcacuuu

SEQ ID NO: 4258 - RNA, 22 nt, Homo sapiens
cucuagagggaagcgcuuucug

SEQ ID NO: 4259 - RNA, 22 nt, Homo sapiens
cagaaagcgcuucccucuagag

SEQ ID NO: 4260 - RNA, 22 nt, Homo sapiens
aaagugcaucuuuuuagaggau

SEQ ID NO: 4261 - RNA, 22 nt, Homo sapiens
auccucuaaaaagaugcacuuu

SEQ ID NO: 4262 - RNA, 22 nt, Homo sapiens
cucuagagggaagcgcuuucug

SEQ ID NO: 4263 - RNA, 22 nt, Homo sapiens
cagaaagcgcuucccucuagag

SEQ ID NO: 4264 - RNA, 21 nt, Homo sapiens
aaagugcuuccuuuuagaggg

SEQ ID NO: 4265 - RNA, 21 nt, Homo sapiens
cccucuaaaaggaagcacuuu

SEQ ID NO: 4266 - RNA, 22 nt, Homo sapiens
aaagugcuuccuuuuagagggu

SEQ ID NO: 4267 - RNA, 22 nt, Homo sapiens
acccucuaaaaggaagcacuuu

SEQ ID NO: 4268 - RNA, 22 nt, Homo sapiens
cucuagagggaagcacuuucug

SEQ ID NO: 4269 - RNA, 22 nt, Homo sapiens
cagaaagugcuucccucuagag

SEQ ID NO: 4270 - RNA, 22 nt, Homo sapiens
aaagugcuucucuuuggugggu

SEQ ID NO: 4271 - RNA, 22 nt, Homo sapiens
acccaccaaagagaagcacuuu

SEQ ID NO: 4272 - RNA, 20 nt, Homo sapiens
cuacaaagggaagcccuuuc

SEQ ID NO: 4273 - RNA, 20 nt, Homo sapiens
gaaagggcuucccuuuguag

SEQ ID NO: 4274 - RNA, 21 nt, Homo sapiens
aaagugcuuccuuuuugaggg

SEQ ID NO: 4275 - RNA, 21 nt, Homo sapiens
cccucaaaaaggaagcacuuu

SEQ ID NO: 4276 - RNA, 22 nt, Homo sapiens
aagugcuuccuuuuagaggguu

SEQ ID NO: 4277 - RNA, 22 nt, Homo sapiens
aacccucuaaaaggaagcacuu

SEQ ID NO: 4278 - RNA, 24 nt, Homo sapiens
acaaagugcuucccuuuagagugu

SEQ ID NO: 4279 - RNA, 24 nt, Homo sapiens
acacucuaaagggaagcacuuugu

SEQ ID NO: 4280 - RNA, 22 nt, Homo sapiens
aacgcacuucccuuuagagugu

SEQ ID NO: 4281 - RNA, 22 nt, Homo sapiens
acacucuaaagggaagugcguu

SEQ ID NO: 4282 - RNA, 22 nt, Homo sapiens
aaaaugguucccuuuagagugu

SEQ ID NO: 4283 - RNA, 22 nt, Homo sapiens
acacucuaaagggaaccauuuu

SEQ ID NO: 4284 - RNA, 22 nt, Homo sapiens
cucuagagggaagcgcuuucug

SEQ ID NO: 4285 - RNA, 22 nt, Homo sapiens
cagaaagcgcuucccucuagag

SEQ ID NO: 4286 - RNA, 23 nt, Homo sapiens
gaacgcgcuucccuauagagggu

SEQ ID NO: 4287 - RNA, 23 nt, Homo sapiens
acccucuauagggaagcgcguuc

SEQ ID NO: 4288 - RNA, 22 nt, Homo sapiens
cucuagagggaagcgcuuucug

SEQ ID NO: 4289 - RNA, 22 nt, Homo sapiens
cagaaagcgcuucccucuagag

SEQ ID NO: 4290 - RNA, 21 nt, Homo sapiens
gaaggcgcuucccuuuggagu

SEQ ID NO: 4291 - RNA, 21 nt, Homo sapiens
acuccaaagggaagcgccuuc

SEQ ID NO: 4292 - RNA, 20 nt, Homo sapiens
cugcaaagggaagcccuuuc

SEQ ID NO: 4293 - RNA, 20 nt, Homo sapiens
gaaagggcuucccuuugcag

SEQ ID NO: 4294 - RNA, 22 nt, Homo sapiens
ccucccacacccaaggcuugca

SEQ ID NO: 4295 - RNA, 22 nt, Homo sapiens
ugcaagccuugggugugggagg

SEQ ID NO: 4296 - RNA, 22 nt, Homo sapiens
caugccuugaguguaggaccgu

SEQ ID NO: 4297 - RNA, 22 nt, Homo sapiens
acgguccuacacucaaggcaug

SEQ ID NO: 4298 - RNA, 22 nt, Homo sapiens
aucauacaaggacaauuucuuu

SEQ ID NO: 4299 - RNA, 22 nt, Homo sapiens
aaagaaauuguccuuguaugau

SEQ ID NO: 4300 - RNA, 22 nt, Homo sapiens
ggagaaauuauccuuggugugu

SEQ ID NO: 4301 - RNA, 22 nt, Homo sapiens
acacaccaaggauaauuucucc

SEQ ID NO: 4302 - RNA, 22 nt, Homo sapiens
uggugggcacagaaucuggacu

SEQ ID NO: 4303 - RNA, 22 nt, Homo sapiens
aguccagauucugugcccacca

SEQ ID NO: 4304 - RNA, 25 nt, Homo sapiens
aaaggauucugcugucggucccacu

SEQ ID NO: 4305 - RNA, 25 nt, Homo sapiens
agugggaccgacagcagaauccuuu

SEQ ID NO: 4306 - RNA, 23 nt, Homo sapiens
ucggggaucaucaugucacgaga

SEQ ID NO: 4307 - RNA, 23 nt, Homo sapiens
ucucgugacaugaugauccccga

SEQ ID NO: 4308 - RNA, 22 nt, Homo sapiens
aaacauucgcggugcacuucuu

SEQ ID NO: 4309 - RNA, 22 nt, Homo sapiens
aagaagugcaccgcgaauguuu

SEQ ID NO: 4310 - RNA, 22 nt, Homo sapiens
auucugcauuuuuagcaaguuc

SEQ ID NO: 4311 - RNA, 22 nt, Homo sapiens
gaacuugcuaaaaaugcagaau

SEQ ID NO: 4312 - RNA, 22 nt, Homo sapiens
accugagguugugcauuucuaa

SEQ ID NO: 4313 - RNA, 22 nt, Homo sapiens
uuagaaaugcacaaccucaggu

SEQ ID NO: 4314 - RNA, 22 nt, Homo sapiens
ucagcaaacauuuauugugugc

SEQ ID NO: 4315 - RNA, 22 nt, Homo sapiens
gcacacaauaaauguuugcuga

SEQ ID NO: 4316 - RNA, 22 nt, Homo sapiens
ucaguaaauguuuauuagauga

SEQ ID NO: 4317 - RNA, 22 nt, Homo sapiens
ucaucuaauaaacauuuacuga

SEQ ID NO: 4318 - RNA, 22 nt, Homo sapiens
agcuacaguuacuuuugcacca

SEQ ID NO: 4319 - RNA, 22 nt, Homo sapiens
uggugcaaaaguaacuguagcu

SEQ ID NO: 4320 - RNA, 20 nt, Homo sapiens
uaaaaacugcaauuacuuuc

SEQ ID NO: 4321 - RNA, 20 nt, Homo sapiens
gaaaguaauugcaguuuuua

SEQ ID NO: 4322 - RNA, 23 nt, Homo sapiens
ugcaaaaguaauugcaguuuuug

SEQ ID NO: 4323 - RNA, 23 nt, Homo sapiens
caaaaacugcaauuacuuuugca

SEQ ID NO: 4324 - RNA, 22 nt, Homo sapiens
aaagaccgugacuacuuuugca

SEQ ID NO: 4325 - RNA, 22 nt, Homo sapiens
ugcaaaaguagucacggucuuu

SEQ ID NO: 4326 - RNA, 22 nt, Homo sapiens
agaaguaacuacgguuuuugca

SEQ ID NO: 4327 - RNA, 22 nt, Homo sapiens
ugcaaaaaccguaguuacuucu

SEQ ID NO: 4328 - RNA, 19 nt, Homo sapiens
aaaaaccacaauuacuuuu

SEQ ID NO: 4329 - RNA, 19 nt, Homo sapiens
aaaaguaauugugguuuuu

SEQ ID NO: 4330 - RNA, 19 nt, Homo sapiens
aaaaguaauugcggucuuu

SEQ ID NO: 4331 - RNA, 19 nt, Homo sapiens
aaagaccgcaauuacuuuu

SEQ ID NO: 4332 - RNA, 22 nt, Homo sapiens
caaaaacugcaauuacuuuugc

SEQ ID NO: 4333 - RNA, 22 nt, Homo sapiens
gcaaaaguaauugcaguuuuug

SEQ ID NO: 4334 - RNA, 22 nt, Homo sapiens
gaaaguaauugcuguuuuugcc

SEQ ID NO: 4335 - RNA, 22 nt, Homo sapiens
ggcaaaaacagcaauuacuuuc

SEQ ID NO: 4336 - RNA, 21 nt, Homo sapiens
uaaaacugcaguuauuuuugc

SEQ ID NO: 4337 - RNA, 21 nt, Homo sapiens
gcaaaaauaacugcaguuuua

SEQ ID NO: 4338 - RNA, 21 nt, Homo sapiens
aaaaguaauugcaguuuuugc

SEQ ID NO: 4339 - RNA, 21 nt, Homo sapiens
gcaaaaacugcaauuacuuuu

SEQ ID NO: 4340 - RNA, 22 nt, Homo sapiens
uaaaacccacaauuauguuugu

SEQ ID NO: 4341 - RNA, 22 nt, Homo sapiens
acaaacauaauuguggguuuua

SEQ ID NO: 4342 - RNA, 22 nt, Homo sapiens
aaaaguaauugcggguuuugcc

SEQ ID NO: 4343 - RNA, 22 nt, Homo sapiens
ggcaaaacccgcaauuacuuuu

SEQ ID NO: 4344 - RNA, 21 nt, Homo sapiens
caaaaccgcaguaacuuuugu

SEQ ID NO: 4345 - RNA, 21 nt, Homo sapiens
acaaaaguuacugcgguuuug

SEQ ID NO: 4346 - RNA, 22 nt, Homo sapiens
aaaaguuauugcgguuuuggcu

SEQ ID NO: 4347 - RNA, 22 nt, Homo sapiens
agccaaaaccgcaauaacuuuu

SEQ ID NO: 4348 - RNA, 21 nt, Homo sapiens
uggcaguuacuuuugcaccag

SEQ ID NO: 4349 - RNA, 21 nt, Homo sapiens
cuggugcaaaaguaacugcca

SEQ ID NO: 4350 - RNA, 21 nt, Homo sapiens
aaaaguaauugcgguuuuugc

SEQ ID NO: 4351 - RNA, 21 nt, Homo sapiens
gcaaaaaccgcaauuacuuuu

SEQ ID NO: 4352 - RNA, 20 nt, Homo sapiens
aaaacugcaguuacuuuugc

SEQ ID NO: 4353 - RNA, 20 nt, Homo sapiens
gcaaaaguaacugcaguuuu

SEQ ID NO: 4354 - RNA, 18 nt, Homo sapiens
aaaaguacuugcggauuu

SEQ ID NO: 4355 - RNA, 18 nt, Homo sapiens
aaauccgcaaguacuuuu

SEQ ID NO: 4356 - RNA, 20 nt, Homo sapiens
gugcaaaagucaucacgguu

SEQ ID NO: 4357 - RNA, 20 nt, Homo sapiens
aaccgugaugacuuuugcac

SEQ ID NO: 4358 - RNA, 22 nt, Homo sapiens
gcuggugcaaaaguaauggcgg

SEQ ID NO: 4359 - RNA, 22 nt, Homo sapiens
ccgccauuacuuuugcaccagc

SEQ ID NO: 4360 - RNA, 22 nt, Homo sapiens
aaaaguaaucacuguuuuugcc

SEQ ID NO: 4361 - RNA, 22 nt, Homo sapiens
ggcaaaaacagugauuacuuuu

SEQ ID NO: 4362 - RNA, 20 nt, Homo sapiens
agugccugagggaguaagag

SEQ ID NO: 4363 - RNA, 20 nt, Homo sapiens
cucuuacucccucaggcacu

SEQ ID NO: 4364 - RNA, 22 nt, Homo sapiens
ugucuuacucccucaggcacau

SEQ ID NO: 4365 - RNA, 22 nt, Homo sapiens
augugccugagggaguaagaca

SEQ ID NO: 4366 - RNA, 23 nt, Homo sapiens
agugccugagggaguaagagccc

SEQ ID NO: 4367 - RNA, 23 nt, Homo sapiens
gggcucuuacucccucaggcacu

SEQ ID NO: 4368 - RNA, 21 nt, Homo sapiens
gcgacccacucuugguuucca

SEQ ID NO: 4369 - RNA, 21 nt, Homo sapiens
uggaaaccaagagugggucgc

SEQ ID NO: 4370 - RNA, 22 nt, Homo sapiens
uuagcuuaaggaguaccagauc

SEQ ID NO: 4371 - RNA, 22 nt, Homo sapiens
gaucugguacuccuuaagcuaa

SEQ ID NO: 4372 - RNA, 21 nt, Homo sapiens
uaugguacuccuuaagcuaac

SEQ ID NO: 4373 - RNA, 21 nt, Homo sapiens
guuagcuuaaggaguaccaua

SEQ ID NO: 4374 - RNA, 19 nt, Homo sapiens
ugagcugcuguaccaaaau

SEQ ID NO: 4375 - RNA, 19 nt, Homo sapiens
auuuugguacagcagcuca

SEQ ID NO: 4376 - RNA, 22 nt, Homo sapiens
cacauaugaagugagccagcac

SEQ ID NO: 4377 - RNA, 22 nt, Homo sapiens
gugcuggcucacuucauaugug

SEQ ID NO: 4378 - RNA, 22 nt, Homo sapiens
ugcuggcucauuucauaugugu

SEQ ID NO: 4379 - RNA, 22 nt, Homo sapiens
acacauaugaaaugagccagca

SEQ ID NO: 4380 - RNA, 22 nt, Homo sapiens
uuccaugccuccuagaaguucc

SEQ ID NO: 4381 - RNA, 22 nt, Homo sapiens
ggaacuucuaggaggcauggaa

SEQ ID NO: 4382 - RNA, 22 nt, Homo sapiens
agccuuccaggagaaauggaga

SEQ ID NO: 4383 - RNA, 22 nt, Homo sapiens
ucuccauuucuccuggaaggcu

SEQ ID NO: 4384 - RNA, 22 nt, Homo sapiens
uaaaacuuuaagugugccuagg

SEQ ID NO: 4385 - RNA, 22 nt, Homo sapiens
ccuaggcacacuuaaaguuuua

SEQ ID NO: 4386 - RNA, 22 nt, Homo sapiens
uaggcacacuuaaaguuauagc

SEQ ID NO: 4387 - RNA, 22 nt, Homo sapiens
gcuauaacuuuaagugugccua

SEQ ID NO: 4388 - RNA, 22 nt, Homo sapiens
gaauauggguauauuaguuugg

SEQ ID NO: 4389 - RNA, 22 nt, Homo sapiens
ccaaacuaauauacccauauuc

SEQ ID NO: 4390 - RNA, 22 nt, Homo sapiens
aaacuaauauacccauauucug

SEQ ID NO: 4391 - RNA, 22 nt, Homo sapiens
cagaauauggguauauuaguuu

SEQ ID NO: 4392 - RNA, 22 nt, Homo sapiens
uaguucuucccuuugcccaauu

SEQ ID NO: 4393 - RNA, 22 nt, Homo sapiens
aauugggcaaagggaagaacua

SEQ ID NO: 4394 - RNA, 22 nt, Homo sapiens
cagggaaaugggaagaacuaga

SEQ ID NO: 4395 - RNA, 22 nt, Homo sapiens
ucuaguucuucccauuucccug

SEQ ID NO: 4396 - RNA, 22 nt, Homo sapiens
cugaauagcugggacuacaggu

SEQ ID NO: 4397 - RNA, 22 nt, Homo sapiens
accuguagucccagcuauucag

SEQ ID NO: 4398 - RNA, 22 nt, Homo sapiens
ugaaguaccagcuacucgagag

SEQ ID NO: 4399 - RNA, 22 nt, Homo sapiens
cucucgaguagcugguacuuca

SEQ ID NO: 4400 - RNA, 22 nt, Homo sapiens
cagagugacaagcugguuaaag

SEQ ID NO: 4401 - RNA, 22 nt, Homo sapiens
cuuuaaccagcuugucacucug

SEQ ID NO: 4402 - RNA, 22 nt, Homo sapiens
uauccagcuuguuacuauaugc

SEQ ID NO: 4403 - RNA, 22 nt, Homo sapiens
gcauauaguaacaagcuggaua

SEQ ID NO: 4404 - RNA, 21 nt, Homo sapiens
gccccgggcagugugaucauc

SEQ ID NO: 4405 - RNA, 21 nt, Homo sapiens
gaugaucacacugcccggggc

SEQ ID NO: 4406 - RNA, 18 nt, Homo sapiens
auggucaccuccgggacu

SEQ ID NO: 4407 - RNA, 18 nt, Homo sapiens
agucccggaggugaccau

SEQ ID NO: 4408 - RNA, 19 nt, Homo sapiens
aagucccacuaaugccagc

SEQ ID NO: 4409 - RNA, 19 nt, Homo sapiens
gcuggcauuagugggacuu

SEQ ID NO: 4410 - RNA, 21 nt, Homo sapiens
acuggcauuagugggacuuuu

SEQ ID NO: 4411 - RNA, 21 nt, Homo sapiens
aaaagucccacuaaugccagu

SEQ ID NO: 4412 - RNA, 23 nt, Homo sapiens
ugcacauggcaaccuagcuccca

SEQ ID NO: 4413 - RNA, 23 nt, Homo sapiens
ugggagcuagguugccaugugca

SEQ ID NO: 4414 - RNA, 21 nt, Homo sapiens
ggcugggugcucuugugcagu

SEQ ID NO: 4415 - RNA, 21 nt, Homo sapiens
acugcacaagagcacccagcc

SEQ ID NO: 4416 - RNA, 21 nt, Homo sapiens
uaaaguaaauaugcaccaaaa

SEQ ID NO: 4417 - RNA, 21 nt, Homo sapiens
uuuuggugcauauuuacuuua

SEQ ID NO: 4418 - RNA, 21 nt, Homo sapiens
aauaaaguucauguauggcaa

SEQ ID NO: 4419 - RNA, 21 nt, Homo sapiens
uugccauacaugaacuuuauu

SEQ ID NO: 4420 - RNA, 21 nt, Homo sapiens
uugccauacauagacuuuauu

SEQ ID NO: 4421 - RNA, 21 nt, Homo sapiens
aauaaagucuauguauggcaa

SEQ ID NO: 4422 - RNA, 21 nt, Homo sapiens
auacccauagcuuagcuccca

SEQ ID NO: 4423 - RNA, 21 nt, Homo sapiens
ugggagcuaagcuauggguau

SEQ ID NO: 4424 - RNA, 21 nt, Homo sapiens
ugggagcuaagcuauggguau

SEQ ID NO: 4425 - RNA, 21 nt, Homo sapiens
auacccauagcuuagcuccca

SEQ ID NO: 4426 - RNA, 22 nt, Homo sapiens
caaaguuuaagauccuugaagu

SEQ ID NO: 4427 - RNA, 22 nt, Homo sapiens
acuucaaggaucuuaaacuuug

SEQ ID NO: 4428 - RNA, 22 nt, Homo sapiens
aucaaggaucuuaaacuuugcc

SEQ ID NO: 4429 - RNA, 22 nt, Homo sapiens
ggcaaaguuuaagauccuugau

SEQ ID NO: 4430 - RNA, 20 nt, Homo sapiens
aaaguagcuguaccauuugc

SEQ ID NO: 4431 - RNA, 20 nt, Homo sapiens
gcaaaugguacagcuacuuu

SEQ ID NO: 4432 - RNA, 19 nt, Homo sapiens
aggcacggugucagcaggc

SEQ ID NO: 4433 - RNA, 19 nt, Homo sapiens
gccugcugacaccgugccu

SEQ ID NO: 4434 - RNA, 19 nt, Homo sapiens
gggcgccugugaucccaac

SEQ ID NO: 4435 - RNA, 19 nt, Homo sapiens
guugggaucacaggcgccc

SEQ ID NO: 4436 - RNA, 23 nt, Homo sapiens
aguauguucuuccaggacagaac

SEQ ID NO: 4437 - RNA, 23 nt, Homo sapiens
guucuguccuggaagaacauacu

SEQ ID NO: 4438 - RNA, 22 nt, Homo sapiens
gagaaaugcuggacuaaucugc

SEQ ID NO: 4439 - RNA, 22 nt, Homo sapiens
gcagauuaguccagcauuucuc

SEQ ID NO: 4440 - RNA, 22 nt, Homo sapiens
agaaaggguggcaauaccucuu

SEQ ID NO: 4441 - RNA, 22 nt, Homo sapiens
aagagguauugccacccuuucu

SEQ ID NO: 4442 - RNA, 22 nt, Homo sapiens
agguauugccacccuuucuagu

SEQ ID NO: 4443 - RNA, 22 nt, Homo sapiens
acuagaaaggguggcaauaccu

SEQ ID NO: 4444 - RNA, 22 nt, Homo sapiens
guagcaccuugcaggauaaggu

SEQ ID NO: 4445 - RNA, 22 nt, Homo sapiens
accuuauccugcaaggugcuac

SEQ ID NO: 4446 - RNA, 24 nt, Homo sapiens
uacagaugcagauucucugacuuc

SEQ ID NO: 4447 - RNA, 24 nt, Homo sapiens
gaagucagagaaucugcaucugua

SEQ ID NO: 4448 - RNA, 20 nt, Homo sapiens
aacucuagccugagcaacag

SEQ ID NO: 4449 - RNA, 20 nt, Homo sapiens
cuguugcucaggcuagaguu

SEQ ID NO: 4450 - RNA, 22 nt, Homo sapiens
acagcccagcaguuaucacggg

SEQ ID NO: 4451 - RNA, 22 nt, Homo sapiens
cccgugauaacugcugggcugu

SEQ ID NO: 4452 - RNA, 21 nt, Homo sapiens
uaucguaucguauuguauugu

SEQ ID NO: 4453 - RNA, 21 nt, Homo sapiens
acaauacaauacgauacgaua

SEQ ID NO: 4454 - RNA, 22 nt, Homo sapiens
uuagaacguuuuagggucaaau

SEQ ID NO: 4455 - RNA, 22 nt, Homo sapiens
auuugacccuaaaacguucuaa

SEQ ID NO: 4456 - RNA, 22 nt, Homo sapiens
uaacaaacaccuguaaaacagc

SEQ ID NO: 4457 - RNA, 22 nt, Homo sapiens
gcuguuuuacagguguuuguua

SEQ ID NO: 4458 - RNA, 22 nt, Homo sapiens
agcauacaccuguaguccuaga

SEQ ID NO: 4459 - RNA, 22 nt, Homo sapiens
ucuaggacuacagguguaugcu

SEQ ID NO: 4460 - RNA, 21 nt, Homo sapiens
aguuaaugaauccuggaaagu

SEQ ID NO: 4461 - RNA, 21 nt, Homo sapiens
acuuuccaggauucauuaacu

SEQ ID NO: 4462 - RNA, 21 nt, Homo sapiens
ucagcuacuaccucuauuagg

SEQ ID NO: 4463 - RNA, 21 nt, Homo sapiens
ccuaauagagguaguagcuga

SEQ ID NO: 4464 - RNA, 22 nt, Homo sapiens
uugcucugagcuccgagaaagc

SEQ ID NO: 4465 - RNA, 22 nt, Homo sapiens
gcuuucucggagcucagagcaa

SEQ ID NO: 4466 - RNA, 22 nt, Homo sapiens
caaauaauaccacagugggugu

SEQ ID NO: 4467 - RNA, 22 nt, Homo sapiens
acacccacugugguauuauuug

SEQ ID NO: 4468 - RNA, 20 nt, Homo sapiens
aauaauaucacaguaggugu

SEQ ID NO: 4469 - RNA, 20 nt, Homo sapiens
acaccuacugugauauuauu

SEQ ID NO: 4470 - RNA, 22 nt, Homo sapiens
aauaauaucacaguagguguac

SEQ ID NO: 4471 - RNA, 22 nt, Homo sapiens
guacaccuacugugauauuauu

SEQ ID NO: 4472 - RNA, 22 nt, Homo sapiens
gcaguggcucugaaaugaacuc

SEQ ID NO: 4473 - RNA, 22 nt, Homo sapiens
gaguucauuucagagccacugc

SEQ ID NO: 4474 - RNA, 21 nt, Homo sapiens
cagaucaugggacugucucag

SEQ ID NO: 4475 - RNA, 21 nt, Homo sapiens
cugagacagucccaugaucug

SEQ ID NO: 4476 - RNA, 22 nt, Homo sapiens
acuccaagaagaaucuagacag

SEQ ID NO: 4477 - RNA, 22 nt, Homo sapiens
cugucuagauucuucuuggagu

SEQ ID NO: 4478 - RNA, 22 nt, Homo sapiens
cucauuuaaguagucugaugcc

SEQ ID NO: 4479 - RNA, 22 nt, Homo sapiens
ggcaucagacuacuuaaaugag

SEQ ID NO: 4480 - RNA, 22 nt, Homo sapiens
ucaaguaguuucaugauaaagg

SEQ ID NO: 4481 - RNA, 22 nt, Homo sapiens
ccuuuaucaugaaacuacuuga

SEQ ID NO: 4482 - RNA, 22 nt, Homo sapiens
ugggggagugcagugauugugg

SEQ ID NO: 4483 - RNA, 22 nt, Homo sapiens
ccacaaucacugcacuccccca

SEQ ID NO: 4484 - RNA, 22 nt, Homo sapiens
uccugucuuuccuuguuggagc

SEQ ID NO: 4485 - RNA, 22 nt, Homo sapiens
gcuccaacaaggaaagacagga

SEQ ID NO: 4486 - RNA, 22 nt, Homo sapiens
uaaugcauuaaauuauugaagg

SEQ ID NO: 4487 - RNA, 22 nt, Homo sapiens
ccuucaauaauuuaaugcauua

SEQ ID NO: 4488 - RNA, 19 nt, Homo sapiens
uuauugucacguucugauu

SEQ ID NO: 4489 - RNA, 19 nt, Homo sapiens
aaucagaacgugacaauaa

SEQ ID NO: 4490 - RNA, 22 nt, Homo sapiens
ugagucagcaacauaucccaug

SEQ ID NO: 4491 - RNA, 22 nt, Homo sapiens
caugggauauguugcugacuca

SEQ ID NO: 4492 - RNA, 18 nt, Homo sapiens
aggagaagucgggaaggu

SEQ ID NO: 4493 - RNA, 18 nt, Homo sapiens
accuucccgacuucuccu

SEQ ID NO: 4494 - RNA, 22 nt, Homo sapiens
cgaaaacagcaauuaccuuugc

SEQ ID NO: 4495 - RNA, 22 nt, Homo sapiens
gcaaagguaauugcuguuuucg

SEQ ID NO: 4496 - RNA, 22 nt, Homo sapiens
uuaggccaucaucccauuaugc

SEQ ID NO: 4497 - RNA, 22 nt, Homo sapiens
gcauaaugggaugauggccuaa

SEQ ID NO: 4498 - RNA, 23 nt, Homo sapiens
uguuucggggcucauggccugug

SEQ ID NO: 4499 - RNA, 23 nt, Homo sapiens
cacaggccaugagccccgaaaca

SEQ ID NO: 4500 - RNA, 22 nt, Homo sapiens
aaagguaauugcaguuuuuccc

SEQ ID NO: 4501 - RNA, 22 nt, Homo sapiens
gggaaaaacugcaauuaccuuu

SEQ ID NO: 4502 - RNA, 22 nt, Homo sapiens
uucuggauaacaugcugaagcu

SEQ ID NO: 4503 - RNA, 22 nt, Homo sapiens
agcuucagcauguuauccagaa

SEQ ID NO: 4504 - RNA, 22 nt, Homo sapiens
acguuugaaugcuguacaaggc

SEQ ID NO: 4505 - RNA, 22 nt, Homo sapiens
gccuuguacagcauucaaacgu

SEQ ID NO: 4506 - RNA, 20 nt, Homo sapiens
augagcgacugugccugacc

SEQ ID NO: 4507 - RNA, 20 nt, Homo sapiens
ggucaggcacagucgcucau

SEQ ID NO: 4508 - RNA, 19 nt, Homo sapiens
gagccaguuggacaggagc

SEQ ID NO: 4509 - RNA, 19 nt, Homo sapiens
gcuccuguccaacuggcuc

SEQ ID NO: 4510 - RNA, 23 nt, Homo sapiens
uucauuugguauaaaccgcgauu

SEQ ID NO: 4511 - RNA, 23 nt, Homo sapiens
aaucgcgguuuauaccaaaugaa

SEQ ID NO: 4512 - RNA, 22 nt, Homo sapiens
uugagaaugaugaaucauuagg

SEQ ID NO: 4513 - RNA, 22 nt, Homo sapiens
ccuaaugauucaucauucucaa

SEQ ID NO: 4514 - RNA, 23 nt, Homo sapiens
uuacaguuguucaaccaguuacu

SEQ ID NO: 4515 - RNA, 23 nt, Homo sapiens
aguaacugguugaacaacuguaa

SEQ ID NO: 4516 - RNA, 21 nt, Homo sapiens
caaagaggaaggucccauuac

SEQ ID NO: 4517 - RNA, 21 nt, Homo sapiens
guaaugggaccuuccucuuug

SEQ ID NO: 4518 - RNA, 22 nt, Homo sapiens
ucaguuccaggccaaccaggcu

SEQ ID NO: 4519 - RNA, 22 nt, Homo sapiens
agccugguuggccuggaacuga

SEQ ID NO: 4520 - RNA, 22 nt, Homo sapiens
uuaugguuugccugggacugag

SEQ ID NO: 4521 - RNA, 22 nt, Homo sapiens
cucagucccaggcaaaccauaa

SEQ ID NO: 4522 - RNA, 19 nt, Homo sapiens
ugggcguaucuguaugcua

SEQ ID NO: 4523 - RNA, 19 nt, Homo sapiens
uagcauacagauacgccca

SEQ ID NO: 4524 - RNA, 20 nt, Homo sapiens
agaccauggguucucauugu

SEQ ID NO: 4525 - RNA, 20 nt, Homo sapiens
acaaugagaacccauggucu

SEQ ID NO: 4526 - RNA, 22 nt, Homo sapiens
uugugucaauaugcgaugaugu

SEQ ID NO: 4527 - RNA, 22 nt, Homo sapiens
acaucaucgcauauugacacaa

SEQ ID NO: 4528 - RNA, 19 nt, Homo sapiens
ugucucugcugggguuucu

SEQ ID NO: 4529 - RNA, 19 nt, Homo sapiens
agaaaccccagcagagaca

SEQ ID NO: 4530 - RNA, 25 nt, Homo sapiens
aggcaccagccaggcauugcucagc

SEQ ID NO: 4531 - RNA, 25 nt, Homo sapiens
gcugagcaaugccuggcuggugccu

SEQ ID NO: 4532 - RNA, 21 nt, Homo sapiens
gaagugugccguggugugucu

SEQ ID NO: 4533 - RNA, 21 nt, Homo sapiens
agacacaccacggcacacuuc

SEQ ID NO: 4534 - RNA, 21 nt, Homo sapiens
aagccugcccggcuccucggg

SEQ ID NO: 4535 - RNA, 21 nt, Homo sapiens
cccgaggagccgggcaggcuu

SEQ ID NO: 4536 - RNA, 20 nt, Homo sapiens
guugugucaguuuaucaaac

SEQ ID NO: 4537 - RNA, 20 nt, Homo sapiens
guuugauaaacugacacaac

SEQ ID NO: 4538 - RNA, 22 nt, Homo sapiens
uggucuaggauuguuggaggag

SEQ ID NO: 4539 - RNA, 22 nt, Homo sapiens
cuccuccaacaauccuagacca

SEQ ID NO: 4540 - RNA, 22 nt, Homo sapiens
cacacacugcaauuacuuuugc

SEQ ID NO: 4541 - RNA, 22 nt, Homo sapiens
gcaaaaguaauugcagugugug

SEQ ID NO: 4542 - RNA, 25 nt, Homo sapiens
aggggugguguugggacagcuccgu

SEQ ID NO: 4543 - RNA, 25 nt, Homo sapiens
acggagcugucccaacaccaccccu

SEQ ID NO: 4544 - RNA, 21 nt, Homo sapiens
ugagcuaaaugugugcuggga

SEQ ID NO: 4545 - RNA, 21 nt, Homo sapiens
ucccagcacacauuuagcuca

SEQ ID NO: 4546 - RNA, 23 nt, Homo sapiens
gcgaggaccccucggggucugac

SEQ ID NO: 4547 - RNA, 23 nt, Homo sapiens
gucagaccccgagggguccucgc

SEQ ID NO: 4548 - RNA, 25 nt, Homo sapiens
gcugggcagggcuucugagcuccuu

SEQ ID NO: 4549 - RNA, 25 nt, Homo sapiens
aaggagcucagaagcccugcccagc

SEQ ID NO: 4550 - RNA, 20 nt, Homo sapiens
gggaaaaggaagggggagga

SEQ ID NO: 4551 - RNA, 20 nt, Homo sapiens
uccucccccuuccuuuuccc

SEQ ID NO: 4552 - RNA, 20 nt, Homo sapiens
gcggaaggcggagcggcgga

SEQ ID NO: 4553 - RNA, 20 nt, Homo sapiens
uccgccgcuccgccuuccgc

SEQ ID NO: 4554 - RNA, 18 nt, Homo sapiens
gugaaggcccggcggaga

SEQ ID NO: 4555 - RNA, 18 nt, Homo sapiens
ucuccgccgggccuucac

SEQ ID NO: 4556 - RNA, 19 nt, Homo sapiens
ugagggagugggugggagg

SEQ ID NO: 4557 - RNA, 19 nt, Homo sapiens
ccucccacccacucccuca

SEQ ID NO: 4558 - RNA, 19 nt, Homo sapiens
acuggaauuggagucaaaa

SEQ ID NO: 4559 - RNA, 19 nt, Homo sapiens
uuuugacuccaauuccagu

SEQ ID NO: 4560 - RNA, 19 nt, Homo sapiens
ugagggaguuggguguaua

SEQ ID NO: 4561 - RNA, 19 nt, Homo sapiens
uauacacccaacucccuca

SEQ ID NO: 4562 - RNA, 19 nt, Homo sapiens
ugagggaguggauuguaug

SEQ ID NO: 4563 - RNA, 19 nt, Homo sapiens
cauacaauccacucccuca

SEQ ID NO: 4564 - RNA, 19 nt, Homo sapiens
ggcuggucagaugggagug

SEQ ID NO: 4565 - RNA, 19 nt, Homo sapiens
cacucccaucugaccagcc

SEQ ID NO: 4566 - RNA, 19 nt, Homo sapiens
agcagggcuggggauugca

SEQ ID NO: 4567 - RNA, 19 nt, Homo sapiens
ugcaauccccagcccugcu

SEQ ID NO: 4568 - RNA, 19 nt, Homo sapiens
ugagggaggagguugggua

SEQ ID NO: 4569 - RNA, 19 nt, Homo sapiens
uacccaaccuccucccuca

SEQ ID NO: 4570 - RNA, 19 nt, Homo sapiens
ugaggugguaggauguaga

SEQ ID NO: 4571 - RNA, 19 nt, Homo sapiens
ucuacauccuaccaccuca

SEQ ID NO: 4572 - RNA, 22 nt, Homo sapiens
uccgagccugggucucccucuu

SEQ ID NO: 4573 - RNA, 22 nt, Homo sapiens
aagagggagacccaggcucgga

SEQ ID NO: 4574 - RNA, 22 nt, Homo sapiens
ggggguccccggugcucggauc

SEQ ID NO: 4575 - RNA, 22 nt, Homo sapiens
gauccgagcaccggggaccccc

SEQ ID NO: 4576 - RNA, 22 nt, Homo sapiens
agucauuggaggguuugagcag

SEQ ID NO: 4577 - RNA, 22 nt, Homo sapiens
cugcucaaacccuccaaugacu

SEQ ID NO: 4578 - RNA, 19 nt, Homo sapiens
cagcaggaggugaggggag

SEQ ID NO: 4579 - RNA, 19 nt, Homo sapiens
cuccccucaccuccugcug

SEQ ID NO: 4580 - RNA, 22 nt, Homo sapiens
acucaaaacccuucagugacuu

SEQ ID NO: 4581 - RNA, 22 nt, Homo sapiens
aagucacugaaggguuuugagu

SEQ ID NO: 4582 - RNA, 22 nt, Homo sapiens
agacuucccauuugaagguggc

SEQ ID NO: 4583 - RNA, 22 nt, Homo sapiens
gccaccuucaaaugggaagucu

SEQ ID NO: 4584 - RNA, 23 nt, Homo sapiens
aaacucuacuuguccuucugagu

SEQ ID NO: 4585 - RNA, 23 nt, Homo sapiens
acucagaaggacaaguagaguuu

SEQ ID NO: 4586 - RNA, 21 nt, Homo sapiens
ggcuagcaacagcgcuuaccu

SEQ ID NO: 4587 - RNA, 21 nt, Homo sapiens
agguaagcgcuguugcuagcc

SEQ ID NO: 4588 - RNA, 21 nt, Homo sapiens
acagucugcugagguuggagc

SEQ ID NO: 4589 - RNA, 21 nt, Homo sapiens
gcuccaaccucagcagacugu

SEQ ID NO: 4590 - RNA, 23 nt, Homo sapiens
aucccuugcaggggcuguugggu

SEQ ID NO: 4591 - RNA, 23 nt, Homo sapiens
acccaacagccccugcaagggau

SEQ ID NO: 4592 - RNA, 22 nt, Homo sapiens
gugagucucuaagaaaagagga

SEQ ID NO: 4593 - RNA, 22 nt, Homo sapiens
uccucuuuucuuagagacucac

SEQ ID NO: 4594 - RNA, 21 nt, Homo sapiens
ucuaguaagaguggcagucga

SEQ ID NO: 4595 - RNA, 21 nt, Homo sapiens
ucgacugccacucuuacuaga

SEQ ID NO: 4596 - RNA, 22 nt, Homo sapiens
augcugacauauuuacuagagg

SEQ ID NO: 4597 - RNA, 22 nt, Homo sapiens
ccucuaguaaauaugucagcau

SEQ ID NO: 4598 - RNA, 22 nt, Homo sapiens
guucucccaacguaagcccagc

SEQ ID NO: 4599 - RNA, 22 nt, Homo sapiens
gcugggcuuacguugggagaac

SEQ ID NO: 4600 - RNA, 21 nt, Homo sapiens
uggguuuacguugggagaacu

SEQ ID NO: 4601 - RNA, 21 nt, Homo sapiens
aguucucccaacguaaaccca

SEQ ID NO: 4602 - RNA, 19 nt, Homo sapiens
gugucugcuuccuguggga

SEQ ID NO: 4603 - RNA, 19 nt, Homo sapiens
ucccacaggaagcagacac

SEQ ID NO: 4604 - RNA, 23 nt, Homo sapiens
cuaauaguaucuaccacaauaaa

SEQ ID NO: 4605 - RNA, 23 nt, Homo sapiens
uuuauugugguagauacuauuag

SEQ ID NO: 4606 - RNA, 23 nt, Homo sapiens
ugugcuugcucgucccgcccgca

SEQ ID NO: 4607 - RNA, 23 nt, Homo sapiens
ugcgggcgggacgagcaagcaca

SEQ ID NO: 4608 - RNA, 25 nt, Homo sapiens
agggaucgcgggcggguggcggccu

SEQ ID NO: 4609 - RNA, 25 nt, Homo sapiens
aggccgccacccgcccgcgaucccu

SEQ ID NO: 4610 - RNA, 21 nt, Homo sapiens
augauccaggaaccugccucu

SEQ ID NO: 4611 - RNA, 21 nt, Homo sapiens
agaggcagguuccuggaucau

SEQ ID NO: 4612 - RNA, 19 nt, Homo sapiens
aguguggcuuucuuagagc

SEQ ID NO: 4613 - RNA, 19 nt, Homo sapiens
gcucuaagaaagccacacu

SEQ ID NO: 4614 - RNA, 19 nt, Homo sapiens
ucuaggcugguacugcuga

SEQ ID NO: 4615 - RNA, 19 nt, Homo sapiens
ucagcaguaccagccuaga

SEQ ID NO: 4616 - RNA, 19 nt, Homo sapiens
aagcagcugccucugaggc

SEQ ID NO: 4617 - RNA, 19 nt, Homo sapiens
gccucagaggcagcugcuu

SEQ ID NO: 4618 - RNA, 21 nt, Homo sapiens
guggcugcacucacuuccuuc

SEQ ID NO: 4619 - RNA, 21 nt, Homo sapiens
gaaggaagugagugcagccac

SEQ ID NO: 4620 - RNA, 21 nt, Homo sapiens
aggaggcagcgcucucaggac

SEQ ID NO: 4621 - RNA, 21 nt, Homo sapiens
guccugagagcgcugccuccu

SEQ ID NO: 4622 - RNA, 21 nt, Homo sapiens
aauggcgccacuaggguugug

SEQ ID NO: 4623 - RNA, 21 nt, Homo sapiens
cacaacccuaguggcgccauu

SEQ ID NO: 4624 - RNA, 25 nt, Homo sapiens
caacccuaggagagggugccauuca

SEQ ID NO: 4625 - RNA, 25 nt, Homo sapiens
ugaauggcacccucuccuaggguug

SEQ ID NO: 4626 - RNA, 22 nt, Homo sapiens
auaauacaugguuaaccucuuu

SEQ ID NO: 4627 - RNA, 22 nt, Homo sapiens
aaagagguuaaccauguauuau

SEQ ID NO: 4628 - RNA, 21 nt, Homo sapiens
aauauuauacagucaaccucu

SEQ ID NO: 4629 - RNA, 21 nt, Homo sapiens
agagguugacuguauaauauu

SEQ ID NO: 4630 - RNA, 25 nt, Homo sapiens
ggcggagggaaguagguccguuggu

SEQ ID NO: 4631 - RNA, 25 nt, Homo sapiens
accaacggaccuacuucccuccgcc

SEQ ID NO: 4632 - RNA, 24 nt, Homo sapiens
ugccugggucucuggccugcgcgu

SEQ ID NO: 4633 - RNA, 24 nt, Homo sapiens
acgcgcaggccagagacccaggca

SEQ ID NO: 4634 - RNA, 22 nt, Homo sapiens
aggcggggcgccgcgggaccgc

SEQ ID NO: 4635 - RNA, 22 nt, Homo sapiens
gcggucccgcggcgccccgccu

SEQ ID NO: 4636 - RNA, 22 nt, Homo sapiens
gguggcccggccgugccugagg

SEQ ID NO: 4637 - RNA, 22 nt, Homo sapiens
ccucaggcacggccgggccacc

SEQ ID NO: 4638 - RNA, 20 nt, Homo sapiens
accaggaggcugaggccccu

SEQ ID NO: 4639 - RNA, 20 nt, Homo sapiens
aggggccucagccuccuggu

SEQ ID NO: 4640 - RNA, 20 nt, Homo sapiens
gucccugaguguauguggug

SEQ ID NO: 4641 - RNA, 20 nt, Homo sapiens
caccacauacacucagggac

SEQ ID NO: 4642 - RNA, 21 nt, Homo sapiens
uccgguucucagggcuccacc

SEQ ID NO: 4643 - RNA, 21 nt, Homo sapiens
gguggagcccugagaaccgga

SEQ ID NO: 4644 - RNA, 23 nt, Homo sapiens
aggaagcccuggaggggcuggag

SEQ ID NO: 4645 - RNA, 23 nt, Homo sapiens
cuccagccccuccagggcuuccu

SEQ ID NO: 4646 - RNA, 20 nt, Homo sapiens
cuguaugcccucaccgcuca

SEQ ID NO: 4647 - RNA, 20 nt, Homo sapiens
ugagcggugagggcauacag

SEQ ID NO: 4648 - RNA, 23 nt, Homo sapiens
uggugcggagagggcccacagug

SEQ ID NO: 4649 - RNA, 23 nt, Homo sapiens
cacugugggcccucuccgcacca

SEQ ID NO: 4650 - RNA, 22 nt, Homo sapiens
caacuagacugugagcuucuag

SEQ ID NO: 4651 - RNA, 22 nt, Homo sapiens
cuagaagcucacagucuaguug

SEQ ID NO: 4652 - RNA, 23 nt, Homo sapiens
aaggagcuuacaaucuagcuggg

SEQ ID NO: 4653 - RNA, 23 nt, Homo sapiens
cccagcuagauuguaagcuccuu

SEQ ID NO: 4654 - RNA, 22 nt, Homo sapiens
gggacccagggagagacguaag

SEQ ID NO: 4655 - RNA, 22 nt, Homo sapiens
cuuacgucucucccuggguccc

SEQ ID NO: 4656 - RNA, 22 nt, Homo sapiens
gcagagugcaaacaauuuugac

SEQ ID NO: 4657 - RNA, 22 nt, Homo sapiens
gucaaaauuguuugcacucugc

SEQ ID NO: 4658 - RNA, 20 nt, Homo sapiens
cggcucugggucugugggga

SEQ ID NO: 4659 - RNA, 20 nt, Homo sapiens
uccccacagacccagagccg

SEQ ID NO: 4660 - RNA, 22 nt, Homo sapiens
gcagcagggugaaacugacaca

SEQ ID NO: 4661 - RNA, 22 nt, Homo sapiens
ugugucaguuucacccugcugc

SEQ ID NO: 4662 - RNA, 21 nt, Homo sapiens
uggaggagaaggaaggugaug

SEQ ID NO: 4663 - RNA, 21 nt, Homo sapiens
caucaccuuccuucuccucca

SEQ ID NO: 4664 - RNA, 23 nt, Homo sapiens
ucugcucauaccccaugguuucu

SEQ ID NO: 4665 - RNA, 23 nt, Homo sapiens
agaaaccaugggguaugagcaga

SEQ ID NO: 4666 - RNA, 23 nt, Homo sapiens
ugcaccaugguugucugagcaug

SEQ ID NO: 4667 - RNA, 23 nt, Homo sapiens
caugcucagacaaccauggugca

SEQ ID NO: 4668 - RNA, 23 nt, Homo sapiens
cugggaucuccggggucuugguu

SEQ ID NO: 4669 - RNA, 23 nt, Homo sapiens
aaccaagaccccggagaucccag

SEQ ID NO: 4670 - RNA, 22 nt, Homo sapiens
ugagaccucuggguucugagcu

SEQ ID NO: 4671 - RNA, 22 nt, Homo sapiens
agcucagaacccagaggucuca

SEQ ID NO: 4672 - RNA, 23 nt, Homo sapiens
uccaguaccacgugucagggcca

SEQ ID NO: 4673 - RNA, 23 nt, Homo sapiens
uggcccugacacgugguacugga

SEQ ID NO: 4674 - RNA, 22 nt, Homo sapiens
ggagacugaugaguucccggga

SEQ ID NO: 4675 - RNA, 22 nt, Homo sapiens
ucccgggaacucaucagucucc

SEQ ID NO: 4676 - RNA, 21 nt, Homo sapiens
gcaggaacuugugagucuccu

SEQ ID NO: 4677 - RNA, 21 nt, Homo sapiens
aggagacucacaaguuccugc

SEQ ID NO: 4678 - RNA, 22 nt, Homo sapiens
cugcccuggcccgagggaccga

SEQ ID NO: 4679 - RNA, 22 nt, Homo sapiens
ucggucccucgggccagggcag

SEQ ID NO: 4680 - RNA, 21 nt, Homo sapiens
ccuggaaacacugagguugug

SEQ ID NO: 4681 - RNA, 21 nt, Homo sapiens
cacaaccucaguguuuccagg

SEQ ID NO: 4682 - RNA, 22 nt, Homo sapiens
uauaccucaguuuuaucaggug

SEQ ID NO: 4683 - RNA, 22 nt, Homo sapiens
caccugauaaaacugagguaua

SEQ ID NO: 4684 - RNA, 22 nt, Homo sapiens
uggugguuuacaaaguaauuca

SEQ ID NO: 4685 - RNA, 22 nt, Homo sapiens
ugaauuacuuuguaaaccacca

SEQ ID NO: 4686 - RNA, 22 nt, Homo sapiens
uggauuucuuugugaaucacca

SEQ ID NO: 4687 - RNA, 22 nt, Homo sapiens
uggugauucacaaagaaaucca

SEQ ID NO: 4688 - RNA, 21 nt, Homo sapiens
uccucuucucccuccucccag

SEQ ID NO: 4689 - RNA, 21 nt, Homo sapiens
cugggaggagggagaagagga

SEQ ID NO: 4690 - RNA, 20 nt, Homo sapiens
guagaggagauggcgcaggg

SEQ ID NO: 4691 - RNA, 20 nt, Homo sapiens
cccugcgccaucuccucuac

SEQ ID NO: 4692 - RNA, 22 nt, Homo sapiens
gugaacgggcgccaucccgagg

SEQ ID NO: 4693 - RNA, 22 nt, Homo sapiens
ccucgggauggcgcccguucac

SEQ ID NO: 4694 - RNA, 22 nt, Homo sapiens
gacugacaccucuuugggugaa

SEQ ID NO: 4695 - RNA, 22 nt, Homo sapiens
uucacccaaagaggugucaguc

SEQ ID NO: 4696 - RNA, 21 nt, Homo sapiens
uacucaaaaagcugucaguca

SEQ ID NO: 4697 - RNA, 21 nt, Homo sapiens
ugacugacagcuuuuugagua

SEQ ID NO: 4698 - RNA, 21 nt, Homo sapiens
uuaauaucggacaaccauugu

SEQ ID NO: 4699 - RNA, 21 nt, Homo sapiens
acaaugguuguccgauauuaa

SEQ ID NO: 4700 - RNA, 22 nt, Homo sapiens
auccgcgcucugacucucugcc

SEQ ID NO: 4701 - RNA, 22 nt, Homo sapiens
ggcagagagucagagcgcggau

SEQ ID NO: 4702 - RNA, 20 nt, Homo sapiens
gugagucaggguggggcugg

SEQ ID NO: 4703 - RNA, 20 nt, Homo sapiens
ccagccccacccugacucac

SEQ ID NO: 4704 - RNA, 22 nt, Homo sapiens
ugcccuuaaaggugaacccagu

SEQ ID NO: 4705 - RNA, 22 nt, Homo sapiens
acuggguucaccuuuaagggca

SEQ ID NO: 4706 - RNA, 22 nt, Homo sapiens
ucuucucuguuuuggccaugug

SEQ ID NO: 4707 - RNA, 22 nt, Homo sapiens
cacauggccaaaacagagaaga

SEQ ID NO: 4708 - RNA, 22 nt, Homo sapiens
aaauuauuguacaucggaugag

SEQ ID NO: 4709 - RNA, 22 nt, Homo sapiens
cucauccgauguacaauaauuu

SEQ ID NO: 4710 - RNA, 22 nt, Homo sapiens
uucaacggguauuuauugagca

SEQ ID NO: 4711 - RNA, 22 nt, Homo sapiens
ugcucaauaaauacccguugaa

SEQ ID NO: 4712 - RNA, 22 nt, Homo sapiens
cuauacaacuuacuacuuuccc

SEQ ID NO: 4713 - RNA, 22 nt, Homo sapiens
gggaaaguaguaaguuguauag

SEQ ID NO: 4714 - RNA, 22 nt, Homo sapiens
ugagguaguaaguuguauuguu

SEQ ID NO: 4715 - RNA, 22 nt, Homo sapiens
aacaauacaacuuacuaccuca

SEQ ID NO: 4716-4733 - skipped (18 entries)

SEQ ID NO: 4734 - DNA, 3131 bp, Adeno-associated virus
gcggccgcgaattcgcccttggctgcgtcaactggaccaatgagaactttcccttcaatgattgcgtcgacaagatggtgatctggtgggaggagggcaagatgacggccaaggtcgtggagtccgccaaggccattctcggcggcagcaaggtgcgcgtggaccaaaagtgcaagtcgtccgcccagatcgaccccacccccgtgatcgtcacctccaacaccaacatgtgcgccgtgattgacgggaacagcaccaccttcgagcaccagcagcctctccaggaccggatgtttaagttcgaactcacccgccgtctggagcacgactttggcaaggtgacaaagcaggaagtcaaagagttcttccgctgggccagtgatcacgtgaccgaggtggcgcatgagttttacgtcagaaagggcggagccagcaaaagacccgcccccgatgacgcggataaaagcgagcccaagcgggcctgcccctcagtcgcggatccatcgacgtcagacgcggaaggagctccggtggactttgccgacaggtaccaaaacaaatgttctcgtcacgcgggcatgcttcagatgctgtttccctgcaaaacgtgcgagagaatgaatcggaatttcaacatttgcttcacacacggggtcagagactgctcagagtgtttccccggcgtgtcagaatctcaaccggtcgtcagaaagaggacgtatcggaaactccgtgcgattcatcatctgctggggcgggctcccgagattgcttgctcggcctgcgatctggtcaacgtggacctggatgactgtgtttctgagcaataaatgacttaaaccaggtatggctgccgatggttatcttccagattggctcgaggacaacctctctgagggcattcgcgagtggtgggcgctgaaacctggagccccgaagcccaaagccaaccagcaaaagcaggacgacggccggggtctggtgcttcctggctacaagtacctcggacccttcaacggactcgacaagggggagcccgtcaacgcggcggacgcagcggccctcgagcacgacaaggcttacgaccagcagctgcaggcgggtgacaatccgtacctgcggtataaccacgccgacgccgagtttcaggagcgtctgcaagaagatacgtcttttgggggcaacctcgggcgagcagtcttccaggccaagaagcgggttctcgaacctctcggtctggttgaggaaggcgctaagacggctcctggaaagaagagaccggtagagccatcaccccagcgttctccagactcctctacgggcatcggcaagaaaggccaacagcccgccagaaaaagactcaattttggtcagactggcgactcagagtcagttccagaccctcaacctctcggagaacctccagcagcgccctctggtgtgggacctaatacaatggctgcaggcggtggcgcaccaatggcagacaataacgaaggcgccgacggagtgggtagttcctcgggaaattggcattgcgattccacatggctgggcgacagagtcatcaccaccagcacccgaacctgggccctgcccacctacaacaaccacctctacaagcaaatctccaacgggacatcgggaggagccaccaacgacaacacctacttcggctacagcaccccctgggggtattttgactttaacagattccactgccacctttcaccacgtgactggcagcgactcatcaacaacaactggggattccgacccaagagactcagcttcaagctcttcaacatccaggtcaaggaggtcacgcagaatgaaggcaccaagaccatcgccaataacctcaccagcaccatccaggtgtttacggactcggagtaccagctgccgtacgttctcggctctgtccaccagggctgcctgcctccgttcccggcggacgtgttcatgattccccagtacggctacctaacactcaacaacggtagtcaggccgtgggacgctcctccttctactgcctggaatactttccttcgcagatgctgagaaccggcaacaacttccagtttacttacaccttcgaggacgtgcctttccacagcagctacgcccacagctagagcttggaccggctgatgaatcctctgattgaccagtacctgtactacttgtctcggactcaaacaacaggaggcacggcaaatacgcagactctgggcttcagccaaggtgggcctaatacaatggccaatcaggcaaagaactggctgccaggaccctgttaccgccaacaacgcgtctcaacgacaaccgggcaaaacaacaatagcaactttgcctggactgctgggaccaaataccatctgaatggaagaaattcattggctaatcctggcatcgctatggcaacacacaaagacgacgaggagcgtttttttcccagtaacgggatcctgatttttggcaaacaaaatgctgccagagacaatgcggattacagcgatgtcatgctcaccagcgaggaagaaatcaaaaccactaaccctgtggctacagaggaatacggtatcgtggcagataacttgcagcagcaaaacacggctcctcaaattggaactgtcaacagccagggggccttacccggtatggtctggcagaaccgggacgtgtacctgcagggtcccatctgggccaagattcctcacacggacggcaacttccacccgtctccgctgatgggcggctttggcctgaaacatcctccgcctcagatcctgatcaagaacacgcctgtacctgcggatcctccgaccaccttcaaccagtcaaagctgaactctttcatcacgcaatacagcaccggacaggtcagcgtggaaattgaatgggagctgcagaaggaaaacagcaagcgctggaaccccgagatccagtacacctccaactactacaaatctataagtgtggactttgctgttaatacagaaggcgtgtactctgaaccccgccccattggcacccgttacctcacccgtaatctgtaattgcctgttaatcaataaaccggttgattcgtttcagttgaactttggtctctgcgaagggcgaattc

SEQ ID NO: 4735 - protein, 728 aa, Adeno-associated virus
MAADGYLPDWLEDNLSEGIREWWDLKPGAPKPKANQQKQDDGRGLVLPGYKYLGPFNGLDKGEPVNEADAAALEHDKAYDKQLEQGDNPYLKYNHADAEFQERLQEDTSFGGNLGRAVFQAKKRVLEPLGLVEEGAKTAPGKKRPIESPDSSTGIGKKGQQPAKKKLNFGQTGDSESVPDPQPLGEPPAAPSGLGSGTMAAGGGAPMADNNEGADGVGNASGNWHCDSTWLGDRVITTSTRTWALPTYNNHLYKQISSQSGATNDNHFFGYSTPWGYFDFNRFHCHFSPRDWQRLINNNWGFRPRKLRFKLFNIQVKEVTTNDGVTTIANNLTSTIQVFSDSEYQLPYVLGSAHQGCLPPFPADVFMIPQYGYLTLNNGSQSMGRSSFYCLEYFPSQMLRTGNNFEFSYTFEEVPFHSSYAHSQSLDRLMNPLIDQYLYYLARTQSTTGSTRELQFHQAGPNTMAEQSKNWLPGPCYRQQRLSKNIDSNNNSNFAWTGATKYHLNGRNSLTNPGVAMATNKDDEGQFFPINGVLVFGKTGAANKTTLENVLMTSEEEIKTTNPVATEEYGVVSSNLQSSTAGPQTQTVNSQGALPGMVWQNRDVYLQGPIWAKIPHTDGNFHPSPLMGGFGLKHPPPQILIKNTPVPANPPGVFTPALFASFITQYSTGQVSVEIEWELQKENSKRWNPEIQYTSNYAKSNNVEFAVNNEGVYTEPRPIGTRYLTRNL

SEQ ID NO: 4736 - protein, 644 aa, Adeno-associated virus
  MOD_RES (434)..(434): Any amino acid
KAYDQQLKAGDNPYLRYNHADAEFQERLQEDTSFGGNLGRAVFQAKKRVLEPLGLVETPAKTAPGKKRPVDSPDSTSGIGKKGQQPAKKRLNFGQTGDSESVPDPQPIGEPPAGPSGLGSGTMAAGGGAPMADNNEGADGVGNASGNWHCDSTWLGDRVITTSTRTWALPTYNNHLYKQISSQSAGSTNDNVYFGYSTPWGYFDFNRFHCHFSPRDWQRLINNNWGFRPKKLNFKLFNIQVKEVTTNDGVTTIANNLTSTVQVFSDSEYQLPYVLGSAHQGCLPPFPADVFMIPQYGYLTLNNGSQSVGRSSFYCLEYFPSQMLRTGNNFTFSYTFEDVPFHSSYAHSQSLDRLMNPLIDQYLYYLARTQSNAGGTAGNRELQFYQGGPTTMAEQAKNWLPGPCFRQQRVSKTLDQNNNSNFAWTGATKYHLNXRNSLVNPGVAMATHKDDEERFFPSSGVLIFGKTGAANKTTLENVLMTNEEEIRPTNPVATEEYGIVSSNLQAASTAAQTQVVNNQGALPGMVWQNRDVYLQGPIWAKIPHTDGNFHPSPLMGGFGLKHPPPQILIKNTPVPANPPEVFTPAKFASFITQYSTGQVSVEIEWELQKENSKRWNPEIQYTSNFDKQTGVDFAVDSQGVYSEP

SEQ ID NO: 4737 - DNA, 1933 bp, Adeno-associated virus
caaggcctacgaccagcagctcaaagcgggtgacaatccgtacctgcggtataaccacgccgacgccgagtttcaggagtgtcttcaagaagatacgtcttttgggggcaacctcgggcgagcagtcttccaggccaaaaagcgggttctcgaacctcttggtctggttgagacgccagctaagacggcacctggaaagaagcgaccggtagactcgccagactccacctcgggcatcggcaagaaaggccagcagcccgcgaaaaagagactcaactttgggcagactggcgactcagagtcagtccccgaccctcaaccaatcggagaaccaccagcaggcccctctggtctgggatctggtacaatggttgcaggcggtggcgcaccaatggctgacaataacgagggcgccgacggagtgggtaatgcctcaggaaattggcattgcgattccacatggctgggcgacagagtcatcaccaccagcacccgaacctgggccctgcccacctacaacaaccacctctacaagcaaatctccagtcagtcagcagggagcaccaacgataacgtctatttcggctacagcaccccctgggggtattttgacttcaacagattccattgccacttctcaccacgtgactggcagcgacttatcaacaacaactggggattccggcccaagaagctcaacttcaagctcttcaacatccaggtcaaggaggtcacgacgaatgacggtgtcacaaccatcgctaataaccttaccagcacggttcaggtcttttcggactcggaatatcaactgccgtacgtcctcggctccgcgcaccagggctgcctgcctccgttcccggcagacgtgttcatgattccgcagtacggatacctgactctgaacaatggcagccaatcggtaggccgttcctccttctactgcctggagtactttccttctcagatgctgagaacgggcaacaacttcacctttagctacaccttcgaggacgtgcctttccacagcagctacgcgcacagccagagtctggaccggctgatgaatcccctcatcgaccagtacctgtactacttggccagaacacagagcaacgcaggaggtactgctggcaatcgggaactgcagttttatcagggcggacctaccaccatggccgaacaagcaaagaactggctgcccggaccttgcttccggcaacagagagtatccaagacgctggatcaaaataacaacagcaactttgcctggactggtgccacaaaataccatttaaatggaagaaattcattggttaatcccggtgtcgccatggcaacccacaaggacgacgaggaacgcttctccccttcgagcggagttctaatttttggcaaaactggagcagctaataaaactacattagaaaacgtgctcatgacaaatgaagaagaaattcgtcctaccaacccggtagctaccgaggaatacgggattgtaagcagcaacttgcaggcggctagcaccgcagcccagacacaagttgttaacaaccagggagccttacctggcatggtctggcagaaccgggacgtgtacctgcaaggtcccatttgggccaagattcctcacacggacggcaactttcacccgtctcctctaatgggtggctttggactgaaacacccgcctccccagatcctgatcaaaaacacgccggtacctgctaatcctccagaagtgtttactcctgccaagtttgcttccttcatcacgcagtacagcaccgggcaagtcagcgttgagatcgagtgggagctgcagaaagagaacagcaagcgctggaacccagagattcagtacacctccaactttgacaaacagactggagtggactttgctgttgacagccagggtgtttactctgagcct

SEQ ID NO: 4738 - protein, 644 aa, Adeno-associated virus
KAYDQQLKAGDNPYLRYNHADAEFQECLQEDTSFGGNLGRAVFQAKKRVLEPLGLVETPAKTAPGKKRPVDSPDSTSGIGKKGQQPAKKRLNFGQTGDSESVPDPQPIGEPPAGPSGLGSGTMVAGGGAPMADNNEGADGVGNASGNWHCDSTWLGDRVITTSTRTWALPTYNNHLYKQISSQSAGSTNDNVYFGYSTPWGYFDFNRFHCHFSPRDWQRLINNNWGFRPKKLNFKLFNIQVKEVTTNDGVTTIANNLTSTVQVFSDSEYQLPYVLGSAHQGCLPPFPADVFMIPQYGYLTLNNGSQSVGRSSFYCLEYFPSQMLRTGNNFTFSYTFEDVPFHSSYAHSQSLDRLMNPLIDQYLYYLARTQSNAGGTAGNRELQFYQGGPTTMAEQAKNWLPGPCFRQQRVSKTLDQNNNSNFAWTGATKYHLNGRNSLVNPGVAMATHKDDEERFSPSSGVLIFGKTGAANKTTLENVLMTNEEEIRPTNPVATEEYGIVSSNLQAASTAAQTQVVNNQGALPGMVWQNRDVYLQGPIWAKIPHTDGNFHPSPLMGGFGLKHPPPQILIKNTPVPANPPEVFTPAKFASFITQYSTGQVSVEIEWELQKENSKRWNPEIQYTSNFDKQTGVDFAVDSQGVYSEP

SEQ ID NO: 4739 - DNA, 1933 bp, Adeno-associated virus
caaggcctacgaccagcagctcaaagcgggtgacaatccgtacctgcggtataaccacgccgacgccgagtttcaggagcgtcttcaagaagatacgtcttttgggggcaacctcgggcgagcagtcttccaggccaaaaagcgggttctcgaacctcttggtctggttgagacgccagctaagacggcacctggaaagaagcgaccggtagactcgccagactccacctcgggcatcggcaagaaaggccagcagcccgcgaaaaagagactcaactttgggcagactggcgactcagagccagtccccgaccctcaaccaatcggagaaccaccagcaggcccctctggtctgggatctggtacaatggctgcaggcggtggcgcaccaatggctgacaataacgagggcgccgacggagtgggtaatgcctcaggaaattggcattgcgattccacacggctgggcgacagagtcatcaccaccagcacccgaacctgggccctgcccacctacaacaaccacctctacaagcaaatctccagtcagtcagcagggagcaccaacgataacgtctatttcggctacagcaccccctgggggtattttgacttcaacagattccattgccacttctcaccacgtgactggcagcgacttatcaacaacaactggggattccggcccaagaagctcaacttcaagctcttcaacatccaggtcaaggaggtcacgacgaatgacggcgtcacaaccatcgctaataaccttaccagcacggttcaggtcttttcggactcggaatatcaactgccgtacgtcctcggctccgcgcaccagggctgcctgcctccgttcccggcagacgtgttcatgattccgcagtacggatacctgactctgaacaatggcagccaatcggtaggccgttcctccttctactgcctggagtactttccttctcagatgctgagaacgggcaacaacttcacctttagctacaccttcgaggacgtgcctttccacagcagctacgcgcacagccagagtctgggccggctgatgaatcccctcatcgaccagtacctgtactacttggccagaacacagagcaacgcaggaggtactgctggcaatcgggaactgcagttttatcagggcggacctaccaccatggccgaacaagcaaagaactggctgcccggaccttgcttccggcaacagagagtatccaagacgctggatcaaaataacaacagcaactttgcctggactggtgccacaaaataccatttaaatggaagaaattcattggttaatcccggtgtcgccatggcaacccacaaggacgacgaggaacgcttcttcccttcgagcggagttctaatttttggcaaaactggagcagctaataaaactacattagaaaacgtgctcatgacaaatgaagaagaaattcgtcctaccaacccggtagctaccgaggaatacgggattgtaagcagcaacttgcaggcggctagcaccgcagcccagacacaagttgttaacaaccagggagccttacctggcatggtctggcagaaccgggacgtgtacctgcaaggtcccatttgggccaagattcctcacacggacggcaactttcacccgtctcctctaatgggtggctttggactgaaacacccgcctccccagatcctgatcaaaaacacaccggtacctgctaatcctccagaagtgtttactcctgccaagtttgcttccttcatcacgcagtacagcaccgggcaagtcagcgttgagatcgaatgggagctgcagaaagagaacagcaagcgctggaacccagagattcagtacacctccaactttgacaaacagactggagtggactttgctgttgacagccagggtgtttactctgagcct

SEQ ID NO: 4740 - protein, 644 aa, Adeno-associated virus
KAYDQQLKAGDNPYLRYNHADAEFQERLQEDTSFGGNLGRAVFQAKKRVLEPLGLVETPAKTAPGKKRPVDSPDSTSGIGKKGQQPAKKRLNFGQTGDSEPVPDPQPIGEPPAGPSGLGSGTMAAGGGAPMADNNEGADGVGNASGNWHCDSTRLGDRVITTSTRTWALPTYNNHLYKQISSQSAGSTNDNVYFGYSTPWGYFDFNRFHCHFSPRDWQRLINNNWGFRPKKLNFKLFNIQVKEVTTNDGVTTIANNLTSTVQVFSDSEYQLPYVLGSAHQGCLPPFPADVFMIPQYGYLTLNNGSQSVGRSSFYCLEYFPSQMLRTGNNFTFSYTFEDVPFHSSYAHSQSLGRLMNPLIDQYLYYLARTQSNAGGTAGNRELQFYQGGPTTMAEQAKNWLPGPCFRQQRVSKTLDQNNNSNFAWTGATKYHLNGRNSLVNPGVAMATHKDDEERFFPSSGVLIFGKTGAANKTTLENVLMTNEEEIRPTNPVATEEYGIVSSNLQAASTAAQTQVVNNQGALPGMVWQNRDVYLQGPIWAKIPHTDGNFHPSPLMGGFGLKHPPPQILIKNTPVPANPPEVFTPAKFASFITQYSTGQVSVEIEWELQKENSKRWNPEIQYTSNFDKQTGVDFAVDSQGVYSEP

SEQ ID NO: 4741 - DNA, 1933 bp, Adeno-associated virus; identical to SEQ ID NO: 4739

SEQ ID NO: 4742 - protein, 644 aa, Adeno-associated virus; identical to SEQ ID NO: 4740

SEQ ID NO: 4743 - DNA, 1933 bp, Adeno-associated virus
caaggcctacgaccagcagctcaaagcgggtgacaatccgtacctgcggtataaccacgccgacgccgagtttcaggagcgtcttcaagaagatacgtcttttgggggcaacctcgggcgagcagtcttccaggccaaaaagcgggttctcgaacctcttggtctggttgagacgccagctaagacggcacctggaaagaagcgaccggtagactcgccagactccacctcgggcatcggcaagaaaggccagcagcccgcgaaaaagagactcaactttgggcagactggcgactcagagtcagtccccgaccctcaaccaatcggagaaccaccagcaggcccctctggtctgggatctggtacaatggctgcaggcggtggcgcaccaatggctgacaatagcgagggcgccgacggagtgggtaatgcctcaggaaattggcattgcgattccacatggctgggcgacagagtcatcaccaccagcacccgaacctgggccctgcccacctacaacaaccacctctacaagcaaatctccagtcagtcagcagggagcaccaacgataacgtctatttcggctacagcaccccctgggggtattttgacttcaacagattccattgccacttctcaccacgtgactggcagcgacttatcaacaacaactggggattccggcccaagaagctcaacttcaagctcttcaacatccaggtcaaggaggtcacgacgaatgacggtgtcacaaccatcgctaataaccttaccagcacggttcaggtcttttcggactcggaatatcaactgccgtacgtcctcggctccgcgcaccagggctgcctgcctccgttcccggcagacgtgttcatgattccgcagtacggatacctgactctgaacaatggcagccaatcggtaggccgttcctccttctactgcctggagtactttccttctcagatgctgagaacgggcaacaacttcacctttagctacaccttcgaggacgtgcctttccacagcagctacgcgcacagccagagtctggaccggctgatgaatcccctcatcgaccagtacctgtactacttggccagaacacagagcaacgcaggaggtactgctggcaatcgggaactgcagttttatcagggcggacctaccaccatggccgaacaagcaaagaactggctgcccggaccttgcttccggcaacagagagtatccaagacgctggatcaaaataacaacagcaactttgcctggactggtgccacaaaataccatttaaatggaagaaattcattggttaatcccggtgtcgccatggcaacccacaaggacgacgaggaacgcttcttcccttcgagcggagttctaatttttggcaaaactggagcagctaataaaactacattagaaaacgtgctcatgacaaatgaagaagaaattcgtcctaccaacccggtagctaccgaggaatacgggattgtaagcagcaacttgcaggcggctagcaccgcagcccagacacaagttgttaacaaccagggagccttacctggcatggtctggcagaaccgggacgtgtacctgcaaggtcccatttgggccaagattcctcacacggacggcaactttcacccgtctcctctaatgggtggctttggactgaaacacccgcctccccagatcctgatcaaaaacacaccggtacctgctaatcctccagaagtgtttactcctgccaagcttgcttccttcatcacgcagtacagcaccgggcaagtcagcgttgagatcgagtgggagctgcagaaagagaacagcaagcgctggaacccagagattcagtacacctccaactttgacaaacagactggagtggactttgctgttgacagccagggtgtttactctgagcct

SEQ ID NO: 4744 - protein, 644 aa, Adeno-associated virus
KAYDQQLKAGDNPYLRYNHADAEFQERLQEDTSFGGNLGRAVFQAKKRVLEPLGLVETPAKTAPGKKRPVDSPDSTSGIGKKGQQPAKKRLNFGQTGDSESVPDPQPIGEPPAGPSGLGSGTMAAGGGAPMADNSEGADGVGNASGNWHCDSTWLGDRVITTSTRTWALPTYNNHLYKQISSQSAGSTNDNVYFGYSTPWGYFDFNRFHCHFSPRDWQRLINNNWGFRPKKLNFKLFNIQVKEVTTNDGVTTIANNLTSTVQVFSDSEYQLPYVLGSAHQGCLPPFPADVFMIPQYGYLTLNNGSQSVGRSSFYCLEYFPSQMLRTGNNFTFSYTFEDVPFHSSYAHSQSLDRLMNPLIDQYLYYLARTQSNAGGTAGNRELQFYQGGPTTMAEQAKNWLPGPCFRQQRVSKTLDQNNNSNFAWTGATKYHLNGRNSLVNPGVAMATHKDDEERFFPSSGVLIFGKTGAANKTTLENVLMTNEEEIRPTNPVATEEYGIVSSNLQAASTAAQTQVVNNQGALPGMVWQNRDVYLQGPIWAKIPHTDGNFHPSPLMGGFGLKHPPPQILIKNTPVPANPPEVFTPAKLASFITQYSTGQVSVEIEWELQKENSKRWNPEIQYTSNFDKQTGVDFAVDSQGVYSEP

SEQ ID NO: 4745 - DNA, 1933 bp, Adeno-associated virus
caaggcctacgaccagcagctcaaagcgggtgacaatccgtacctgcggtataaccacgccgacgccgagtttcaggagcgtcttcaagaagatacgtcttttgggggcaacctcgggcgagcagtcttccaggccaaaaagcgggttctcgaacctcttggtctggttgagacgccagctaagacggcacctggaaagaagcgaccggtagactcgccagactccacctcgggcatcggcaagaaaggccagcagcccgcgaaaaagagactcaactttgggcagactggcgactcagagtcagtccccgaccctcaaccaatcggagaaccaccagcaggcccctctggtctgggatctggtacaatggctgcaggcggtggcgcaccaatggctgacaataacgagggcgccgacggagtgggtaatgcctcaggaaattggcattgcgattccacatggctgggcgacagagtcatcaccaccagcacccgaacctgggccctgcccacctacaacaaccacctctacaagcaaatctccagtcagtcagcagggagcaccaacgataacgtctatttcggctacagcaccccctgggggtattttgacttcaacagattccattgccacttctcaccacgtgactggcagcgacttatcaacaacaactggggattccggcccaagaagctcaacttcaagctcttcaacatccaggtcaaggaggtcacgacgaatgacggcgtcacaaccatcgctaataaccttaccagcacggttcaggtcttttcggacccggaatatcaactgccgtacgtcctcggctccgcgcaccagggctgcctgcctccgttcccggcagacgtgttcatgattccgcagtacggatacctgactctgaacaatggcagccaatcggtaggccgttcctccttctactgcctggagtactttccttctcagatgctgagaacgggcaacaacttcacctttagctacaccttcgaggacgtgcctttccacagcagctacgcgcacagccagagtctggaccggctgatgaatcccctcatcgaccagtacctgtactacttggccagaacacagagcaacgcaggaggtactgctggcaatcgggaactgcagttttatcagggcggacctaccaccatggccgaacaagcaaagaactggctgcccggaccttgcttccggcaacagagagtatccaagacgctggatcaaaataacaacagcaactttgcctggactggtgccacaaaataccatttaaatggaagaaattcattggttaatcccggtgtcgccatggcaacccacaaggacgacgaggaacgcttcttcccttcgagcggagttctaatttttggcaaaactggagcagctaataaaactacattagaaaacgtgctcatgacaaatgaagaagaaattcgtcctaccaacccggtagctaccgaggaatacgggattgtaagcagcaacttgcaggcggctagcaccgcagcccagacacaagttgttaacaaccagggagccttacctggcatggtctggcagaaccgggacgtgtacctgcaaggtcccatttgggccaagattcctcacacggacggcaactttcacccgtctcctctaatgggtggctttggactgaaacacccgcctccccagatcctgatcaaaaacacaccggtacctgctaatcctccagaagtgtttactcctgccaagattgcttccttcatcacgcagtacagcaccgggcaagtcagcgttgagatcgagtgggagctgcagaaagagaacagcaagcgctggaacccagagattcagtacacctccaactttgacaaacagactggagtggactttgctgttgacagccagggtgtttactctgagcct

SEQ ID NO: 4746 - protein, 644 aa, Adeno-associated virus
KAYDQQLKAGDNPYLRYNHADAEFQERLQEDTSFGGNLGRAVFQAKKRVLEPLGLVETPAKTAPGKKRPVDSPDSTSGIGKKGQQPAKKRLNFGQTGDSESVPDPQPIGEPPAGPSGLGSGTMAAGGGAPMADNNEGADGVGNASGNWHCDSTWLGDRVITTSTRTWALPTYNNHLYKQISSQSAGSTNDNVYFGYSTPWGYFDFNRFHCHFSPRDWQRLINNNWGFRPKKLNFKLFNIQVKEVTTNDGVTTIANNLTSTVQVFSDPEYQLPYVLGSAHQGCLPPFPADVFMIPQYGYLTLNNGSQSVGRSSFYCLEYFPSQMLRTGNNFTFSYTFEDVPFHSSYAHSQSLDRLMNPLIDQYLYYLARTQSNAGGTAGNRELQFYQGGPTTMAEQAKNWLPGPCFRQQRVSKTLDQNNNSNFAWTGATKYHLNGRNSLVNPGVAMATHKDDEERFFPSSGVLIFGKTGAANKTTLENVLMTNEEEIRPTNPVATEEYGIVSSNLQAASTAAQTQVVNNQGALPGMVWQNRDVYLQGPIWAKIPHTDGNFHPSPLMGGFGLKHPPPQILIKNTPVPANPPEVFTPAKIASFITQYSTGQVSVEIEWELQKENSKRWNPEIQYTSNFDKQTGVDFAVDSQGVYSEP

SEQ ID NO: 4747 - protein, 728 aa, Adeno-associated virus
MAADGYLPDWLEDNLSEGIREWWDLKPGAPKPKANQQKQDDGRGLVLPGYKYLRPFNGLDKGEPVNEADAAALEHDKAYDKQLEQGDNPYLKYNHADAEFQERLQEDTSFGGNLGRAVFQAKKRVLEPLGLVEEVAKTAPGKKRPIESPDSSTGIGKKGQQPAKKKLNFGQTGDSESVPDPQPLGEPPAAPSGLGSGTMAAGGGAPMADNNEGADGVGNASGNWHCDSTWLGDRVITTSTRTWALPTYNNHLYKQISSQSGATNDNHFFSYSTPWGYFDFNRFHCHFSPRDWQRLINNNWGFRPRKLRFKLFNIQVKEVTTNDGVTTIANNLTSTIQVFSDSEYQLPYVLGSAHQGCLPPFPADVFMIPQYGYLTLNNGSQSVGRSSFYCLEYFPSQMLRTGNNFEFSYTFEEVPFHSSYVHSQSLDRLMNPLIDQYLYYLARTQSTTGSTRELQFHQAGPNTMAEQSKNWLPGPCYRQQRLSKNIDSNNNSNFAWTGATKYHLNGRNSLTNPGVAMATNKDDEDQFFPINGVLVFGKTGAANKTTLENVLMTSEEEIKTTNPVATEEYGVVSSNLQSSTAGPQTQTVNSQGALPGMVWQNRDVCLQGPIWAKIPHTDGNFHPSPLMGGFGLKHPPPQILIKNTPVPANPPEVFTPAKFASFITQYSTGQVSVEIEWELQKENSKRWNPEIQYTSNYAKSNNVEFAVNNEGVYTEPRPIGTRYLTRNL

SEQ ID NO: 4748 - protein, 728 aa, Adeno-associated virus
MAADGYLPDWLEDNLSEGIREWWDLKPGAPKPKANQQKQDDGRGLVLPGYKYLGPFNGLDKGEPVNEADAAALEHDKAYDKQLEQGDNPYLKYNHADAEFQERLQEDTSFGGNLGRAVFQAKKRVLEPLGLVEEGAKTASGKKRPIESPDSSTGIGKKGQQPAKKKLNFGQTGDSESVPDPQPLGEPPAAPSGLGSGTMAAGGGAPMADNNEGADGVGNASGNWHCDSTWLGDRVITTSTRTWALPTYNNHLYKQISSQSGATNDNHFFGYSTPWGYFDFNRFHCHFSPRDWQRLINNNWGFRPRKLRFKLFNIQVKEVTTNDGVTTIANNLTSTIQVFSDSEYQLPYVLGSAHQGCLPPFPADVFMIPQYGYLTLNNGSQSVGRSSFCCLEYFPSQMLRTGNNFEFSYTFEEVPFHSSYAHSQSLDRLMNPLIDQYLYYLARTQSTTGSTRELQFHQAGPNTVAEQSKNWLPGPCYRQQRLSKNIDSNNNSNFAWTGATKYHLNGRNSLTNPGVAMATNKDDEDQFLPINGVLVFGKTGAANKTTLENVLMTSEEEIKTTNPVATEEYGVVSSNLQSSTAGPRTQTVNSQGALPGMVWQNRDVYLQGPIWAEIPHTDGNFHPSPLMGGFGLKHPPPQILIKNTPVPANPPEVFTPAKFASFITQYSTGQVSVEIEWELQKENSKRWNPEIQYTSNYAKSNNVEFAVNNEGVYTEPRPIGTRYLTRNL

SEQ ID NO: 4749 - protein, 738 aa, Adeno-associated virus
MAADGYLPDWLEDNLSEGIREWWALKPGAPKPKANQQKQDDGRGLVLPGYKYLGPFNGLDKGEPVNAADAAALEHDKAYDQQLKAGDNPYLRYNHADAEFQERLQEDTSFGGNLGRAVFQAKKRVLEPLGLVEEGAKTAPGKKRPVEPSPQRSPDSTTGIGKKGQQPAKKRLNFGQTGDSESVPDPQPIGEPPAGPSGLGSGTMAAGGGAPMADNNEGADGVGSSSGNWHCDSTWLGDRVITTSTRTWALPTYNNHLYKQISNGTSGGSTNDNTYFGYSTPWGYFDFNRFHCHFSPRDWQRLINNNWGFRPKRLNFKLFNIQVKEVTQNEGTKTIANNLTSTIQVFTDSEYQLPYVLGSARQGCLPPFPADVFMIPQYGYLTLNNGSQAVGRSSFYCLEYFPSQMLRTGNNFEFSYQFEDVPFHSSYAHSQSLDRLMNPLIDQYLYYLSRTQSTGGTAGTQQLLFSQAGPNNMSAQAKNWLPGPCYRQQRVSTTLSQNNNSNFAWTGATKYHLNGRDSLVNPGVAMATHKDDEERFFPSSGVLMFGKQGAGKGNVDYSSVMLTSEEEIKTTNPVATEQYGVVADNLQQQNAAPIVGAVNSQGALPGMVWQNRDVYLQGPIWAKIPHTDGNFHPSPLMGGFGLKHPPPQILIKNTPVPADPPTTFSQAKLASFITQYSTGQVSVEIEWELQKENSKRWNPEIQYTSNYYKSTNVDFAVNTDGTYSEPRPIGTRYLTRNL

SEQ ID NO: 4750 - DNA, 3121 bp, Adeno-associated virus
gaattcgcccttcgcagagaccaaagttcaactgaaacgaatcaaccggtttattgattaacaagcaattacagattacgggtgaggtaacgggtgccgatggggcgaggctcagaataagtgccatctgtgttaacagcaaagtccacatttgtagatttgtagtagttggaagtgtattgaatctctgggttccagcgtttgctgttttctttctgcagctcccattcaatttccacgctgacctgtccggtgctgtactgcgtgatgaacgacgccagcttagcttgactgaaggtagttggaggatccgcgggaacaggtgtattcttaatcaggatctgaggaggcgggtgtttcagtccaaagccccccatcagcggcgagggatgaaagtttccgtccgtgtgaggaatcttggcccagataggaccctgcaggtacacgtcccggttctgccagaccatgccaggtaaggctccttgactgttgacggcccctacaataggagcggcgttttgctgttgcaggttatcggccaccacgccgtactgttctgtggccactgggttggtggttttaatttcttcctcactggttagcataacgctgctatagtccacgttgccttttccagctccctgtttcccaaacattaagactccgctggacggaaaaaatcgctcttcgtcgtccttgtgggttgccatagcgacaccgggatttaccagagagtctctgccattcagatgatacttggtggcaccggtccaggcaaagttgctgttgttattttgcgacagtgtcgtggagacgcgttgctgccggtagcagggcccgggtagccagtttttggcctgagccgacatgttattaggcccggcctgagaaaatagcaactgctgagttcctgcggtacctcccgtggactgagtccgagacaggtagtacaggtactggtcgatgagggggttcatcagccggtccaggctttggctgtgcgcgtagctgctgtgaaaaggcacgtcctcaaactggtagctgaactcaaagttgttgcccgttctcagcatttgagaaggaaagtactccaggcagtagaaggaggaacggcccacggcctgactgccattgttcagagtcaggtacccgtactgaggaatcatgaagacgtccgccgggaacggaggcaggcagccctggcgcgcagagccgaggacgtacgggagctggtattccgagtccgtaaagacctgaatcgtgctggtaaggttattggcgatggtcttggtgccttcattctgcgtgacctccttgacctggatgttgaagagcttgaagttgagtctcttgggccggaatccccagttgttgttgatgagtcgctgccagtcacgtggtgagaagtggcagtggaatctgttaaagtcaaaatacccccagggggtgctgtagccgaagtaggtgttgtcgttggtgcttcctcccgaagtcccgttggagatttgcttgtagaggtggttgttgtaggtggggagggcccaggttcgggtgctggtggtgatgactctgtcgcccagccatgtggaatcgcaatgccaatttcctgaggaactacccactccgtcggcgccttcgttattgtctgccattggagcgccaccgcctgcagccattgtaccagatcccagaccagaggggcctgcggggggttctccgattggttgagggtcgggcactgactctgagtcgccagtctgcccaaagttgagtctctttttcgcgggctgctggcctttcttgccgatgcccgtagtggagtctggagaacgctggggtgatggctctaccggtctcttctttccaggagccgtcttagcgccttcctcaaccagaccgagaggttcgagaacccgcttcttggcctggaagactgctcgtccgaggttgcccccaaaagacgtatcttcttgcagacgctcctgaaactcggcgtcggcgtggttataccgcaggtacggattgtcacccgctttgagctgctggtcgtaggccttgtcgtgctcgagggccgctgcgtccgccgcgttgacgggctcccccttgtcgagtccgttgaagggtccgaggtacttgtagccaggaagcaccagaccccggccgtcgtcctgcttttgctggttggctttgggcttcggggctccaggtttcagcgcccaccactcgcgaatgccctcagagaggttgtcctcgagccaatctggaagataaccatcggcagccatacctgatctaaatcatttattgttcaaagatgcagtcatccaaatccacattgaccagatcgcaggcagtgcaagcgtctggcacctttcccatgatatgatgaatgtagcacagtttctgatacgcctttttgacgacagaaacgggttgagattctgacacgggaaagcactctaaacagtctttctgtccgtgagtgaagcagatatttgaattctgattcattctctcgcattgtctgcagggaaacagcatcagattcatgcccacgtgacgagaacatttgttttggtacctgtccgcgtagttgatcgaagcttccgcgtctgacgtcgatggctgcgcaactgactcgcgcacccgtttgggctcacttatatctgcgtcactgggggcgggtcttttcttggctccaccctttttgacgtagaattcatgctccacctcaaccacgtgatcctttgcccaccggaaaaagtctttgacttcctgcttggtgaccttcccaaagtcatgatccagacggcgggtgagttcaaatttgaacatccggtcttgcaacggctgctggtgttcgaaggtcgttgagttcccgtcaatcacggcgcacatgttggtgttggaggtgacgatcacgggagtcgggtctatctgggccgaggacttgcatttctggtccacgcgcaccttgcttcctccgagaatggctttggccgactccacgaccttggcggtcatcttcccctcctcccaccagatcaccatcttgtcgacacagtcgttgaagggaaagttctcattggtccagttgacgcagccgtagaagggcgaattc

SEQ ID NO: 4751 - DNA, 3121 bp, Adeno-associated virus
gaattcgcccttctacggctgcgtcaactggaccaatgagaactttcccttcaacgactgtgtcgacaagatggtgatctggtgggaggaggggaagatgaccgccaaggtcgtggagtcggccaaagccattctcggaggaagcaaggtgcgcgtggaccagaaatgcaagtcctcggcccagatagacccgactcccgtgatcgtcacctccaacaccaacatgtgcgccgtgattgacgggaactcaacgaccttcgaacaccagcagccgttgcaagaccggatgttcaaatttgaactcacccgccgtctggatcatgactttgggaaggtcaccaagcaggaagtcaaagactttttccggtgggcaaaggatcacgtggttgaggtggagcacgaattctacgtcaaaaagggtggagccaagaaaagacccgcccccagtgacgcagatataagtgagcccaaacgggtgcgcgagtcagttgcgcagccatcgacgtcagacgcggaagcttcgatcaactacgcagacaggtaccaaaacaaatgttctcgtcacgcgggcatgaatctgatgctgtttccctgcagacaatgcgagagaatgaatcagaattcaaatatctgcttcactcacggacagaaagactgtttagagtgctttcccgtgtcagaatctcaacccgtttctgtcgtcaaaaaggcgtatcagaaactgtgctacattcatcatatcatgggaaaggtgccagacgcttgcactgcctgcgatctggtcgatgtggatttggatgactgcatctttgaacaataaatgatttaaatcaggtatggctgccgatggttatcttccagattggctcgaggacaacctctctgagggcattcgcgagtggtgggcgctgaaacctggagccccgaagcccaaagccaaccagcaaaagcaggacggcggccggggtctggtgcttcctggctacaagtacctcggacccttcaacggactcgacaagggggagcccgtcaacgcggcggacgcagcggccctcgagcacgacaaggcctacgaccagcagctcaaagcgggtgacaatccgtacctgcggtataaccacgccgacgccgagtttcaggagcgtctgcaagaagatacgtcttttgggggcaacctcgggcgagcagtcttccaggccaagaagcgggttctcgaacctctcggtctggttgaggaaggcgctaagacggctcctggaaagaagagaccggtagagccatcaccccagcgttctccagactcctctacgggcatcggcaagaaaggccagcagcccgcgaaaaagagactcaactttgggcagactggcgactcagagtcagtgcccgaccctcaaccaatcggagaaccccccgcaggcccctctggtctgggatctggtacaatggctgcaggcggtggcgctccaatggcagacaataacgaaggcgccgacggagtgggtagttcctcaggaaattggcattgcgattccacatggctgggcgactgagtcatcaccaccagcacccgaacctgggccctccccacctacaacaaccacctctacaagcaaatctccaacgggacttcgggaggaagcaccaacgacaacacctacttcggctacagcaccccctgggggtattttgactttaacagattccactgccacttctcaccacgtgactggcagcgactcatcaacaacaactggggattccggcccaagagactcaacttcaagctcttcaacatccaggtcaaggaggtcacgcagaatgaaggcaccaagaccatcgccaataaccttaccagcacgattcaggtctttacggactcggaataccagctcccgtacgtcctcggctctgcgcaccagggctgcctgcctccgttcccggcggacgtcttcatgattcctcagtacgggtacctgactctgaacaatggcagtcaggccgtgggccgttcctccttctactgcctggagtactttccttctcaaatgctgagaacgggcaacaactttgagttcagctaccagtttgaggacgtgccttttcacagcagctacgcgcacagccaaagcctggaccggctgatgaaccccctcatcgaccagtacctgtactacctgtctcggactcagtccacgggaggtaccgcaggaactcagcagttgctattttctcaggccgggcctaataacatgtcggctcaggccaaaaactggctacccgggccctgctaccggcagtaacgcgtctccacgacactgtcgcaaaataacaacagcaactttgtctggaccggtgccaccaagtatcatctgaatggcagagactctctggtagatcccggtgtcgctatggcaacccacaaggacgacgaagagcgattttttccgtccagcggagtcataatgtttgggaaacagggagctggaaaagacaacgtggactatagcagcgtcatgctaaccagtgaggaagaaattaaaaccaccaacccagtggccacagaacagtacggcgtggtggccgataacctgcaacagcaaaacgccgctcctattgtaggggccgtcaacagtcaaggagccttacctggcatggtctggcagaaccgggacgtgtacctgcagggtcctacctgggccaagattcctcacacggacggaaactttcatccctcgccgctgatgggaggctttggactgaaacacccgcctcctcagatcctgattaagaatacacctgttcccgcggatcctccaactaccttcagtcaagctaagctggcgtcgttcatcacgcagtacagcaccggacaggtcagcgtggaaattgaatgggagctgcaggaagaaaacagcaaacgctggaacccagagattcaatacacttccaactactacaaatctacaaatgtggactttgctgttaacacagatggcacttattctgagcctcgccccatcggcacccgttacctcacccgtaatctgtaattgcttgttaatcaataaaccggttgattcgtttcagttgaactttggtctctgcgaagggcgaattc

SEQ ID NO: 4752 - protein, 738 aa, Adeno-associated virus
MAADGYLPDWLEDNLSEGIREWWALKPGAPKPKANQQKQDDGRGLVLPGYKYLGPFNGLDKGEPVNAADAAALEHDKAYDQQLKAGDNPYLRYNHADAEFQERLQEDTSFGGNLGRAVFQAKKRVLEPLGLVEEGAKTAPGKKRPVEPSPQRSPDSSTGIGKKGQQPAKKRLNFGQTGDSESVPDPQPIGEPPAGPSGLGSGTMAAGGGAPMADNNEGADGVGSSSGNWHCDSTWLGDGVITTSTRTWALPTYNNHLYKQISNGTSGGSTNDNTYFGYSTPWGYFDFNRFHCHFSPRDWQRLINNNWGFRPKSLNFKLFNIQVKEVTQNEGTKTIANNLTSTIQVFTDSEYQLPYVLGSAHQGCLPPFPADVFMIPQYGYLTLNNGSQAVGRSSFYCLEYFPSQMLRTGNNFEFSYQFEDVPFHSSYAHSQSLDRLMNPLIDQYLYYLSRTQSTGGTAGTQQLLFSQAGPNNMSAQAKNWLPGPCYRQQRVSTTLSQNDNSNFAWTGATKYHLNGRDSLVNPGVAMATHKDDEERFFPSSGVLMFGKQGAGKDNVDYSSVMLTSEEEIKTTNPVATEQYGVVADNLQQQNAAPIVGAVNSQGALPGMVWQNRDVYLQGPIWAKIPHTDGNFHPSPLMGGFGLKHPPPQILIKNTPVPADPPTTFSQAKLASFITQYSTGQVSVEIEWELQKENSKRWNPEIQYTSNYYKSTNVDFAVNTDGTYSEPRPIGTRYLTRNL

SEQ ID NO: 4753 - DNA, 3121 bp, Adeno-associated virus
gaattcgcccttcgcgagaccaaagttcaactgaaacgaatcaaccggtttattgattaacaagcaattacagattacgggtgaggtaacgggtgccgatggggcgaggctcagaataagtgccatctgtgttaacagcaaagtccacatttgtagatttgtagtagttggaagtgtattgaatctctgggttccagcgtttgctgttttctttctgcagctcccattcaatttccacgctgacctgtccggtgctgtactgcgtgatgaacgacgccagcttagcttgactgaaggtagttggaggatccgcgggaacaggtgtattcttaatcaggatctgaggaggcgggtgtttcagtccaaagcctcccatcagcggcgagggatgaaagtttccgtccgtgtgaggaatcttggcccagataggaccctgcaggtacacgtcccggttctgccagaccatgccaggtaaggctccttgactgttgacggcccctacaataggagcggcgttttgctgttgcaggttatcggccaccacgccgtactgttctgtggccactgggttggtggttttaatttcttcctcactggttagcataacgctgctatagtccacgttgtcttttccagctccctgtttcccaaacattaagactccgctggacggaaaaaatcgctcttcgtcgtccttgtgggttgccatagcgacaccgggatttaccagagagtctctgccattcagatgatacttggtggcaccggtccaggcaaagttgctgttgtcattttgcgacagtgtcgtggagacgcgttgctgccggtagcagggcccgggtagccagtttttggcctgagccgacatgttattaggcccggcctgagaaaatagcaactgctgagttcctgcggtacctcccgtggactgagtccgagacaggtagtacaggtactggtcgatgagggggttcatcagccggtccaggctttggctgtgcgcgtagctgctgtgaaaaggcacgtcctcaaactggtagctgaactcaaagttgttgcccgttctcagcatttgagaaggaaagtactccaggcagtagaaggaggaacggcccacggcctgactgccattgttcagagtcaggtacccgtactgaggaatcatgaagacgtccgccgggaacggaggcaggcagccctggtgcgcagagccgaggacgtacgggagctggtattccgagtccgtaaagacctgaatcgtgctggtaaggttattggcgatggtcttggtgccttcattctgcgtgacctccttgacctggatgttgaagagcttgaagttgaggctcttgggccggaatccccagttgttgttgatgagtcgctgccagtcacgtggtgagaagtggcagtggaatctgttaaagtcaaaatacccccagggggtgctgtagccgaagtaggtgttgtcgttggtgcttcctcccgaagtcccgttggagatttgcttgtagaggtggttgttgtaggtggggagggcccaggttcgggtgctggtggtgatgactccgtcgcccagccatgtggaatcgcaatgccaatttcctgaggaactacccactccgtcggcgccttcgttattgtctgccattggagcgccaccgcctgcagccattgtaccagatcccagaccagaggggcctgcggggggttctccgattggttgagggtcgggcactgactctgagtcgccagtctgcccaaagttgagtctctttttcgcgggctgctggcctttcttgccgatgcccgtagaggagtctggagaacgctggggtgatggctctaccggtctcttctttccaggagccgtcttagcgccttcctcaaccagaccgagaggttcgagaacccgcttcttggcctggaagactgctcgcccgaggttgcccccaaaagacgtatcttcttgcagacgctcctgaaactcggcgtcggcgtggttataccgcaggtacggattgtcacccgctttgagctgctggtcgtaggccttgtcgtgctcgagggccgctgcgtccgccgcgttgacgggctcccccttgtcgagtccgttgaagggtccgaggtacttgtagccaggaagcaccagaccccggccgtcgtcctgcttttgctggttggctttgggcttcggggctccaggtttcagcgcccaccactcgcgaatgccctcagagaggttgtcctcgagccaatctggaagataaccatcggcagccatacctgatttaaatcatttattgttcaaagatgcagtcatccaaatccacattgaccagatcgcaggcagtgcaagcgtctggcacctttcccatgatatgatgaatgtagcacagtttctgatacgcctttttgacgacagaaacgggttgagattctgacacgggaaagcactctaaacagtctttctgtccgtgagtgaagcagatatttgaattctgattcattctctcgcattgtctgcagggaaacagcatcagattcatgcccacgtgacgagaacatttgttttggtacctgtctgcgtagttgatcgaagcttccgcgtctgacgtcgatggctgcgcaactgactcgcgcacccgtttgggctcacttatatctgcgtcactgggggcgggtcttttcttggctccaccctttttgacgtagaattcatgctccacctcaaccacgtgatcctttgcccaccggaaaaagtctttgacttcctgcttggtgaccttcccaaagtcatgatccagacggcgggtgagttcaaatttgaacatccggtcttgcaacggctgctggtgttcgaaggtcgttgagttcccgtcaatcacggcgcacatgttggtgttggaggtgacgatcacgggagtcgggtctatctgggccgaggacttgcatttctggtccacgcgcaccttgcttcctccgagaatggctttggccgactccacgaccttggcggtcatcttcccctcctcccaccagatcaccatcttgtcgacacagtcgttgaagggaaagttctcattggtccagttgacgcagccgtagaaagggcgaattc

SEQ ID NO: 4754 - DNA, 2211 bp, Adeno-associated virus
atggctgctgacggttatcttccagattggctcgaggacaacctttctgaaggcattcgtgagtggtgggctctgaaacctggagtccctcaacccaaagcgaaccaacaacaccaggacaaccgtcggggtcttgtgcttccgggttacaaatacctcggacccggtaacggactcgacaaaggagagccggtcaacgaggcggacgcggcagccctcgaacacgacaaagcttacgaccagcagctcaaggccggtgacaacccgtacctcaagtacaaccacgccgacgccgagtttcaggagcgtcttcaagaagatacgtcttttgggggcaaccttggcagagcagtcttccaggccaaaaagaggatccttgagcctcttggtctggttgaggaagcagctaaaacggctcctggaaagaagggggctgtagatcagtctcctcaggaaccggactcatcatctggtgttggcaaatcgggcaaacagcctgccagaaaaagactaaatttcggtcagactggagactcagagtcagtcccagaccctcaacctctcggagaaccaccagcagcccccacaagtttgggatctaatacaatggcttcaggcggtggcgcaccaatggcagacaataacgagggtgccgatggagtgggtaattcctcaggaaattggcattgcgattcccaatggctgggcgacagagtcatcaccaccagcaccagaacctgggccctgcccacttacaacaaccatctctacaagcaaatctccagccaatcaggagcttcaaacgacaaccactactttggctacagcaccccttgggggtattttgactttaacagattccactgccacttctcaccacgtgactggcagcgactcattaacaacaactggggattccggcccaagaaactcagcttcaagctcttcaacatccaagttagaggggtcacgcagaacgatggcacgacgactattgccaataaccttaccagcacggttcaagtgtttacggactcggagtatcagctcccgtacgtgctcgggtcggcgcaccaaggctgtctcccgccgtttccagcggacgtcttcatggtccctcagtatggatacctcaccctgaacaacggaagtcaagcggtgggacgctcatccttttactgcctggagtacttcccttcgcagatgctaaggactggaaataacttccaattcagctataccttcgaggatgtaccttttcacagcagctacgctcacagccagagtttggatcgcttgatgaatcctcttattgatcagtatctgtactacctgaacagaacgcaaggaacaacctctggaacaaccaaccaatcacggctgctttttagccaggctgggcctcagtctatgtctttgcaggccagaaattggctacctgggccctgctaccggcaacagagactttcaaagactgctaacgacaacaacaacagtaactttccttggacagcggccagcaaatatcatctcaatggccgcgactcgctggtgaatccaggaccagctatggccagtcacaaggacgatgaagaaaaatttttccctatgcacggcaatctaatatttggcaaagaagggacaacggcaagtaacgcagaattagataatgtaatgattacggatgaagaagagattcgtaccaccaatcctgtggcaacagagcagtatggaactgtggcaaataacttgcagagctcaaatacagctcccacgactggaactgtcaatcatcagggggccttacctggcatggtgtggcaagatcgtgacgtgtaccttcaaggacctatctgggcaaagattcctcacacggatggacactttcatccttctcctctgatgggaggctttggactgaaacatccgcctcctcaaatcatgatcaaaaatactccggtaccggcaaatcctccgacgactttcagcccggccaagtttgcttcatttatcactcagtactccactggacaggtcagcgtggaaattgagtgggagctacagaaagaaaacagcaaacgttggaatccagagattcagtacacttccaactacaacaagtctgttaatgtggactttactgtagacactaatggtgtttatagtgaacctcgccctattggaacccggtatctcacacgaaacttgtga

SEQ ID NO: 4755 - protein, 737 aa, Adeno-associated virus
MAADGYLPDWLEDNLSEGIREWWDLKPGAPKPKANQQKQDNGRGLVLPGYKYLGPFNGLDKGEPVNAADAAALEHDKAYDQQLNAGDNPYLRYNHADAEFQERLQEDTSFGGNLGRAVFQAKKRVLEPLGLVEEGAKTAPAKKRPVEPSPQRSPDSSTGIGKKGQQPARKRLNFGQTGDSESVPDPQPLGEPPAAPSSVGSGTVAAGGGAPMADNNEGADGVGNASGNWHCDSTWLGDRVITTSTRTWALPTYNNHLYEQISSETAGSTNDNTYFGYSTPWGYFDFNRFHCHFSPRDWQRLINNNWGFRPKKLRFKLFNIQVKEVTTNDGVTTIANNLTSTIQVFSDSEYQLPYVLGSAHQGCLPPFPADVFMIPQYGYLTLNNGSQSVGRSSFYCLEYFPSQMLRTGNNFEFSYSFEDVPFHSSYAHSQSLDRLMNPLIDQYLYYLARTQSDPGGTAGNRELQFYQGGPSTMAEQAKNWLPGPCFRQQRVSKTLDQNNNSNFAWTGATKYHLNGRNSLVNPGVAMATHKDDEDRFFPSSGVLIFGKTGATNKTTLENVLMTNEEEIRPTNPVATEEYGIVSSNLQAANTAAQTQVVNNQGALPGMVWQNRDVYLQGPIWAKIPHTDGNFHPSPLMGGFGLKHPPPQILIKNTPVPANPPEVFTPAKFASFITQYSTGQVSVEIEWELQKENSKRWDPEIQYTSNFEKQTGVDFAVDSQGVYSEPRPIGTRYLTRNL

SEQ ID NO: 4756 - DNA, 2211 bp, Adeno-associated virus
atggctgctgacggttatcttccagattggctcgaggacaacctttctgaaggcattcgtgagtggtgggctctgaaacctggagtccctcaacccaaagcgaaccaacaacaccaggacaaccgtcggggtcttgtgcttccgggttacaaatacctcggacccggtaacggactcgacaaaggagagccggtcaacgaggcggacgcggcagccctcgaacacgacaaagcttacgaccagcagctcaaggccggtgacaacccgtacctcaagtacaaccacgccgacgccgagtttcaggagcgtcttcaagaagatacgtcttttgggggcaaccttggcagagcagtcttccaggccaaaaagaggatccttgagcctcttggtctggttgaggaagcagctaaaacggctcctggaaagaagggggctgtagatcagtctcctcaggaaccggactcatcatctggtgttggcaaatcgggcaaacagcctgccagaaaaagactaaatttcggtcagactggagactcagagtcagtcccagaccctcaacctctcggagaaccaccagcagcccccacaagtttgggatctaatacaatggcttcaggcggtggcgcaccaatggcagacaataacgagggtgccgatggagtgggtaattcctcaggaaattggcattgcgattcccaatggctgggcgacagagtcatcaccaccagcaccagaacctgggccctgcccacttacaacaaccatctctacaagcaaatctccagccaatcaggagcttcaaacgacaaccactactttggctacagcaccccttgggggtattttgactttaacagattccactgccacttctcaccacgtgactggcagcgactcattaacaacaactggggattccggcccaagaaactcagcttcaagctcttcaacatccaagttagaggggtcacgcagaacgatggcacgacgactattgccaataaccttaccagcacggttcaagtgtttacggactcggagtatcagctcccgtacgtgctcgggtcggcgcaccaaggctgtctcccgccgtttccagcggacgtcttcatggtccctcagtatggatacctcaccctgaacaacggaagtcaagcggtgggacgctcatccttttactgcctggagtacttcccttcgcagatgctaaggactggaaataacttccaattcagctataccttcgaggatgtaccttttcacagcagctacgctcacagccagagtttggatcgcttgatgaatcctcttattgatcagtatctgtactacctgaacagaacgcaaggaacaacctctggaacaaccaaccaatcacggctgctttttagccaggctgggcctcagtctatgtctttgcaggccagaaattggctacctgggccctgctaccggcaacagagactttcaaagactgctaacgacaacaacaacagtaactttccttggacagcggccagcaaatatcatctcaatggccgcgactcgctggtgaatccaggaccagctatggccagtcacaaggacgatgaagaaaaatttttccctatgcacggcaatctaatatttggcaaagaagggacaacggcaagtaacgcagaattagataatgtaatgattacggatgaagaagagattcgtaccaccaatcctgtggcaacagagcagtatggaactgtggcaaataacttgcagagctcaaatacagctcccacgactggaactgtcaatcatcagggggccttacctggcatggtgtggcaagatcgtgacgtgtaccttcaaggacctatctgggcaaagattcctcacacggatggacactttcatccttctcctctgatgggaggctttggactgaaacatccgcctcctcaaatcatgatcaaaaatactccggtaccggcaaatcctccgacgactttcagcccggccaagtttgcttcatttatcactcagtactccactggacaggtcagcgtggaaattgagtgggagctacagaaagaaaacagcaaacgttggaatccagagattcagtacacttccaactacaacaagtctgttaatgtggactttactgtagacactaatggtgtttatagtgaacctcgccctattggaacccggtatctcacacgaaacttgtaa

SEQ ID NO: 4757 - protein, 736 aa, Adeno-associated virus
MAADGYLPDWLEDNLSEGIREWWALKPGVPQPKANQQHQDNRRGLVLPGYKYLGPGNGLDKGEPVNEADAAALEHDKAYDQQLKAGDNPYLKYNHADAEFQERLQEDTSFGGNLGRAVFQAKKRILEPLGLVEEAAKTAPGKKGAVDQSPQEPDSSSGVGKSGKQPARKRLNFGQTGDSESVPDPQPLGEPPAAPTSLGSNTMASGGGAPMADNNEGADGVGNSSGNWHCDSQWLGDRVITTSTRTWALPTYNNHLYKQISSQSGASNDNHYFGYSTPWGYFDFNRFHCHFSPRDWQRLINNNWGFRPKKLSFKLFNIQVRGVTQNDGTTTIANNLTSTVQVFTDSEYQLPYVLGSAHQGCLPPFPADVFMVPQYGYLTLNNGSQAVGRSSFYCLEYFPSQMLRTGNNFQFSYTFEDVPFHSSYAHSQSLDRLMNPLIDQYLYYLNRTQGTTSGTTNQSRLLFSQAGPQSMSLQARNWLPGPCYRQQRLSKTANDNNNSNFPWTAASKYHLNGRDSLVNPGPAMASHKDDEEKFFPMHGNLIFGKEGTTASNAELDNVMITDEEEIRTTNPVATEQYGTVANNLQSSNTAPTTGTVNHQGALPGMVWQDRDVYLQGPIWAKIPHTDGHFHPSPLMGGFGLKHPPPQIMIKNTPVPANPPTTFSPAKFASFITQYSTGQVSVEIEWELQKENSKRWNPEIQYTSNYNKSVNVDFTVDTNGVYSEPRPIGTRYLTRNL

SEQ ID NO: 4758 - protein, 728 aa, Adeno-associated virus
MAADGYLPDWLEDNLSEGIREWWDLKPGAPKPKANQQKQDDGRGLVLPGYKYLGPFNGLDKGEPVNEADAAALEHDKAYDKQLEQGDNPYLKYNHADAEFQERLQEDTSFGGNLGRAVFQAKKRVLEPLGLVEEGAKTAPGKKRPIESPDSSTGIGRKGQQPAKKKLNFGQTGDSESVPDPQPIGEPPAGPSGLGSGTMAAGGGAPMADNNEGADGVGNASGNWHCDSTWLGDRVITTSTRTWALPTYNNHLYKQISSQSGATNDNHFFGYSTPWGYFDFNRFHCHFSPRDWQRLINNNWGFRPRKLRFKLFNIQVKEVTTNDGVTTIANNLTSTIQVFSDSEYQLPYVLGSAHQGCLPPFPADVFMIPQYGYLTLNNGSQSVGRSSFYCLEYFPSQMLRTGNNFEFSYTFEEVPFHSSYAHSQSLDRLMNPLIDQYLYYLARTQSTTGSTRELQFHQAGPNTMAEQSKNWLPGPCYRQQRLSKNIDSNNNSNFAWTGATKYHLNGRNSLTNPGVAMATNKDDEDQFFPINGVLVFGKTGAANKTTLENVLMTSEEEIKTTNPVATEEYGVVSSNLQSSTAGPQTQTVNSQGALPGMVWQNRDVYLQGPIWAKIPHTDGNFHPSPLMGGFGLKHPPPQILIKNTPVPANPPEVFTPAKFASFITQYSTGQVSVEIEWELQKENSKRWNPEIQYTSNYAKSNNVEFAVNNEGVYTEPRPIGTRYLTRNL

SEQ ID NO: 4759 - protein, 728 aa, Adeno-associated virus
MAADGYLPDWLEDNLSEGIREWWDLKPGAPKPKANQQKQDDGRGLVLPGYKYLGPFNGLDKGEPVNAADAAALEHDKAYDQQLKAGDNPYLRYNHADAEFQERLQEDTSFGGNLGRAVFQAKKRVLEPLGLVEEGAKTAPGKKRPIESPDSSTGIGKKGQQPAKKKLNFGQTGDSESVPDPQPIGEPPAGPSGLGSGTMAAGGGAPMADNNEGADGVGNASGNWHCDSTWLGDRVITTSTRTWALPTYNNHLYKQISSQSGATNDNHFFGYSTPWGYFDFNRFHCHFSPRDWQRLINNNWGFRPRKLRFKLFNIQVKEVTTNDGVTTIANNLTSTIQVFSDSEYQLPYVLGSAHQGCLPPFPADVFMIPQYGYLTLNNGSQSVGRSSFYCLEYFPSQMLRTGNNFEFSYTFEEVPFHSSYAHSQSLDRLMNPLIDQYLYYLARTQSTTGSTRELQFHQAGPNTMAEQSKNWLPGPCYRRQRLSKDIDSNNNSNFAWTGATKYHLNGRNSLTNPGVAMATNKDDEDQFFPINGVLVFGKTGAANKTTLENVLMTSEEEIKTTNPVATEEYGVVSSNLQSSTAGPQTQTVNSQGALPGMVWQNRDVYLQGPIWAKIPHTDGNFHPSPLMGGFGLKHPPPQILIKNTPVPANPPEVFTPAKFASFITQYSTGQVSVEIEWELQKENSKRWNPEIQYTSNYAKSNNVEFAVNNEGVYTEPRPIGTRYLTRNL

SEQ ID NO: 4760 - protein, 685 aa, Adeno-associated virus
MAADGYLPDWLEDNLSEGIREWWDLKPGAPKPKANQQKQDDGRGLVLPGYKYLGPFNGLDKGEPVNEADAAALEHDKAYDKQLEQGDNPYLKYNHADAEFQERLQEDTSFGGNLGRAVFQAKKRVLEPLGLVEEGAKTAPGKKRPVEPSPQRSPDSSTGIGKTGQQPAKKRLNFGQTGDSESVPDPQPIGEPPAGPSGLGSGTMAAGGGAPMADNNEGADGVGSSSGNWHCDSTWLGDRVITTSTRTWALPTYNNHLYKQISNGTSGGSTNDNTYFGYSTPWGYFDFNRFHCHFSPRDWQRLINNNWGFRPKRLNFKLFNIQVKEVTQNEGTKTIANNLTSTIQVFTDSEYQLPYVLGSAHQGCLPPFPADVFMIPQYGYLTLNNGSQAVGRSSFYCLEYFPSQMLRTGNNFEFSYQFEDVPFHSSYAHSQSLDRLTNPLIDQYLYYLARTQSTTGSTRGLQFHQAGPNTMAEQSKNWLPGPCYRQQRLSKNIDSNNNSNFAWTGATKYHLNGRNSLTNPGVAMATNKDDEDQFFPINGVLVFGKTGAANKTTLENVLMTSEEEIKTTNPVATEEYGVVSSNLQSSTAGPQTQTVNSQGALPGMVWQNRDVYLQGPIWAKIPHTDGNFHPSPLMGGFGLKHPPPQILIKYTSNYYKSTNVDFAVNTEGTYSEPRPIGTRYLTRNL

SEQ ID NO: 4761 - protein, 733 aa, Adeno-associated virus
MAADGYLPDWLEDNLSEGIREWWDLKPGAPKPKANQQKQDDGRGLVLPGYKYLGPFNGLDKGEPVNAADAAALEHDKAYDQQLKAGDNPYLRYNHADAEFQERLQEDTSFGGNLGRAVFQAKKRVLEPLGLVEEGAKTAPGKKRPIESPDSSTGIGKKGQQPAKKKLNFGQTGDSESVPDPQPIGEPPAGPSGLGSGTMAAGGGAPMADNNEGADGVGSSSGNWHCDSTWLGDRVITTSTRTWALPTYNNHLYKQISNGTSGGSTNDNTYFGYSTPWGYFDFNRFHCHFSPRDWQRLINNNWGFRPKRLNFKLFNIQVKEVTQNEGTKTIANNLTSTIQVFTDSEYQLPYVLGSAHQGCLPPFPADVFMIPQYGYLTLNNGSQAVGRSSFYCLEYFPSQMLRTGNNFEFSYQFEDVPFHSSYAHSQSLDRLMNPLIDQYLYYLSRTQSTGGTAGTQQLLFSQAGPNNMSAQAKNWLPGPCYRQQRVSTTVSQNNNSNFAWTGATKYHLNGRDSLVNPGVAMATHKGDEERFFPSSGVLMFGKQGAGKDNVDYSSVMLTSEEEIKTTNPVATEQYGVVADNLQQQNAAPIVGAVNSQGALPGMVWQNRDVYLQGPIWAKIPHTDGNFHPSPLMGGFGLKHPPPQILIKNTPVPADPPTTFSQAKLASFITQYSTGQVSVEIEWELQKENSKRWNPEIQYTSNYYKSTNVDFAVNTEGTYSEPRPIGTRYLTRSL

SEQ ID NO: 4762 - protein, 738 aa, Adeno-associated virus
MAADGYLPDWLEDNLSEGIREWWDLKPGAPKPKANQQKQDDGRGLVLPGYKYLGPFNGLDKGEPVNAADAAALEHDKAYDQQLKAGDNPYLRYNHADAEFQERLQEDTSFGGNLGRAVFQAKKRVLEPLGLVEEGAKTAPGKKRPVEPSPQRSPDSSTGIGKTGQQPAKKRLNFGQTGDSESVPDPQPIGEPPAGPSGLGSGTMAAGGGAPMADNNEGADGVGSSSGNWHCDSTWLGDRVITTSTRTWALPTYNNHLYKQISNGTSGGSTNDNTYFGYSTPWGYFDFNRFHCHFSPRDWQRLINNNWGFRPKRLNFKLFNIQVKEVTQNEGTKTIANNLTSTIQVFTDSEYQLPYVLGSAHQGCPPPFPADVFMIPQYGYLTLNNGSQAVGRSSFYCLEYFPSQMRRTGNNFEFSYQFEDVPFHSSYAHSQSLDRLMNPLIDQYLYYLSRTQSTGGTAGTQQLLFSQAGPNNMSAQAKNWLPGPCYRQQRVSTTLSQNNNSNFAWTGATKYHLNGRDSLVNPGVAMATHKDDEERFFPSSGVLMFGKQGAGKDNVDYSSVMLTSEEEIKTTNPVATEQYGVVADNLQQQNAAPIVGAVNSQGALPGMVWQNRDVYLQGPIWAKIPHTDGNFHPSPLMGGFGLKHPPPQILIKNTPVPADPPTTFSQAKLASFITQYSTGQVSVEIEWELQKENSKRWNPEIQYTSNYYKSTNVDFAVNTEGTYSEPRPIGTRYLTRNL

SEQ ID NO: 4763 - protein, 733 aa, Adeno-associated virus
MAADGYLPDWLEDNLSEGIREWWDLRPGAPKPKANQQKQDDGRGLVLPGYKYLGPFNGLDKGEPVNEADAAALEHDKAYDKQLEQGDNPYLKYNHADAEFQERLQEDTSFGGNLGRAVFQAKKRVLEPLGLVEEGAKTAPGKKRPIESPDSSTGIGKKGQQPAKKRLNFGQTGDSESVPDPQPIGEPPAGPSGLGSGTMAAGGGAPMADNNEGADGVGSSSGNWHCDSTWLGDRVITTSTRTWALPTYNNHLYKQISNGTSGGSTNDNTYFGYSTPWGYFDFNRFHCHFSPRDWQRLINNNWGFRPKRLNFKLFNIQVKEVTQNEGTKTIANNLTSTIQVFTDSEYQLPYVLGSAHQGCLPPFPADVFMIPQYGYLTLNNGSQAVGRSSFYCLEYFPSQMLRTGNNFEFSYQFEDVPFHSSYAHSQSLDRLMNPLIDQYLYYLSRTQSTGGTAGTQQLLFSQAGPNNMSAQAKNWLPGPCYRQQRVSTTVSQNNNSNFAWTGATKYHLNGRDSLVNPGVAMATHKGDEERFFPSSGVLMFGKQGAGKDNVDYSSVMLTSEEEIKTTNPVATEQYGVVADNLQQQNAAPIVGAVNSQGALPGMVWQNRDVYLQGPIWAKIPHTDGNFHPSPLMGGFGLKHPPPQILIKNTPVPADPPTTFSQAKLASFITQYSTGQVSVEIEWELQKENSKRWNPEIQYTSNYYKSTNVDFAVNTEGTYSEPRPIGTRYLTRNL

SEQ ID NO: 4764 - DNA, 3098 bp, Adeno-associated virus
gaattcgccctttctacggctgcgtcaactggaccaatgagaactttcccttcaacgattgcgtcgacaagatggtgatctggtgggaggagggcaagatgacggccaaggtcgtggagtccgccaaggccattctcggcggcagcaaggtgcgcgtggaccaaaagtgcaagtcttccgcccagatcgatcccacccccgtgatcgtcacttccaacaccaacatgtgcgctgtgattgacgggaacagcaccaccttcgagcaccagcagccgttacaagaccggatgttcaaatttgaactcacccgccgtctggagcacgactttggcaaggtgacaaagcaggaagtcaaagagttcttccgctgggcgcaggatcacgtgaccgaggtggcgcatgagttctacgtcagaaagggtggagccaacaagagacccgcccccgatgacgcggataaaagcgagcccaagcgggcctgcccctcagtcgcggatccatcgacgtcagacgcggaaggagctccggtggactttgccgacaggtaccaaaacaaatgttctcgtcacgcgggcatgcttcagatgctgtttccctgcaagacatgcgagagaatgaatcagaatttcaacatttgcttcacgcacgggaccagagactgttcagaatgtttccccggcgtgtcagaatctcaaccggtcgtcagaaagaggacgtatcggaaactctgtgccattcatcatctgctggggcgggctcccgagattgcttgctcggcctgcgatctggtcaacgtggacctggatgaccgtgtttctgagcaataaatgacttaaaccaggtatggctgccgatggttatcttccagattggctcgaggacaacctctctgagggcattcgcgagtggtgggacttgaaacctggagccccgaaacccaaagccaaccagcaaaagcaggacgacggccggggtctggtgcttcctggctacaagtacctcggacccttcaacggactcgacaagggagagccggtcaacgaggcagacgccgcggccctcgagcacgacaaggcctacgacaagcagctcgagcagggggacaacccgtacctcaagtacaaccacgccgacgccgagtttcaggagcgtcttcaagaagatacgtcttttgggggcaacctcgggcgagcagtcttccaggccaagaagcgggttctcgaacctctcggtctggttgaggaaggcgctaagacggctcctggaaagaagagacccatagaatcccccgactcctccacgggcatcggcaagaaaggccagcagcccgctaaaaagaagctcaactttgggcagactggcgactcagagtcagtgcccgacccccaacctctcggagaacctcccgccgcgccctcaggtctgggatctggtacaatggctgcaggcggtggcgcaccaatggcagacaataacgaaggcgccgacggagtgggtaatgcctccggaaattggcattgcgattccacatggctgggcgacagagtcatcaccaccagcacccgcacctgggccctgcccacctacaacaaccacctctacaagcagatatcaagtcagagcggggctaccaacgacaaccacttcttcggctacagcaccccctggggctattttgacttcaacagattccactgccacttctcaccacgtgactggcagcgactcatcaacaacaactggggattccggcccagaaagctgcggttcaagttgttcaacatccaggtcaaggaggtcacgacgaacgacggcgttacgaccatcgctaataaccttaccagcacgattcaggtcttctcggactcggagtaccaactgccgtacgtcctcggctctgcgcaccagggctgcctccctccgttccctgcggacgtgttcatgattcctcagtacggatatctgactctaaacaacggcagtcagtctgtgggacgttcctccttctactgcctggagtactttccttctcagatgctgagaacgggcaataactttgaattcagctacacctttgaggaagtgcctttccacagcagctatgcgcacagccagagcctggaccggctgatgaatcccctcatcgaccagtacctgtactacctggcccggacccagagcactacggggtccacaagggagctgcagttccatcaggctgggcccaacaccatggccgagcaatcaaagaactggctgcccggaccctgttatcggcagcagagactgtcaaaaaacatagacagcaacaacaacagtaactttgcctggaccggggccactaaataccatctgaatggtagaaattcattaaccaacccgggcgtagccatggccaccaacaaggacgacgaggaccagttctttcccatcaacggagtgctggtttttggcgaaacgggggctgccaacaagacaacgctggaaaacgtgctaatgaccagcgaggaggagatcaaaaccaccaatcccgtggctacagaagaatacggtgtggtctccagcaacctgcaatcgtctacggccggaccccagacacagactgtcaacagccagggggctctgcccggcatggtctggcagaaccgggacgtgtacctgcagggtcccatctgggccaaaattcctcacacggacggcaactttcacccgtctcccctgatgggcggatttggactcaaacacccgcctcctcaaattctcatcaaaaacaccccggtacctgctaatcctccagaggtgtttactcctgccaagtttgcctcatttatcacgcagtacagcaccggccaggtcagcgtggagatcgagtgggaactgcagaaagaaaacagcaaacgctggaatccagagattcagtacacctcaaattatgccaagtctaataatgtggaatttgctgtcaacaacgaaggggtttatactgagcctcgccccattggcacccgttacctcacccgtaacctgtaattgcctgttaatcaataaaccggttaattcgtttcagttgaactttggtctctgcgaagggcgaattc

SEQ ID NO: 4765 - protein, 728 aa, Adeno-associated virus
MAADGYLPDWLEDNLSEGIREWWDLKPGAPKPKANQQKQDDGRGLVLPGYKYLGPFNGLDKGEPVNEADAAALEHDKAYDKQLEQGDNPYLKYNHADAEFQERLQEDTSFGGNLGRAVFQAKKRVLEPLGLVEEGAKTAPGKKRPIESPDSSTGIGKKGQQPAKKKLNFGQTGDSESVPDPQPLGEPPAAPSGLGSGTMAAGGGAPMADNNEGADGVGNASGNWHCDSTWLGDRVITTSTRTWALPTYNNHLYKQISSQSGATNDNHFFGYSTPWGYFDFNRFHCHFSPRDWQRLINNNWGFRPRKLRFKLFNIQVKEVTTNDGVTTIANNLTSTIQVFSDSEYQLPYVLGSAHQGCLPPFPADVFMIPQYGYLTLNNGSQSVGRSSFYCLEYFPSQMLRTGNNFEFSYTFEEVPFHSSYAHSQSLDRLMNPLIDQYLYYLARTQSTTGSTRELQFHQAGPNTMAEQSKNWLPGPCYRQQRLSKNIDSNNNSNFAWTGATKYHLNGRNSLTNPGVAMATNKDDEDQFFPINGVLVFGETGAANKTTLENVLMTSEEEIKTTNPVATEEYGVVSSNLQSSTAGPQTQTVNSQGALPGMVWQNRDVYLQGPIWAKIPHTDGNFHPSPLMGGFGLKHPPPQILIKNTPVPANPPEVFTPAKFASFITQYSTGQVSVEIEWELQKENSKRWNPEIQYTSNYAKSNNVEFAVNNEGVYTEPRPIGTRYLTRNL

SEQ ID NO: 4766 - protein, 733 aa, Adeno-associated virus
MAADGHLPDWLEDNLSEGIREWWDLKPGAPKPKANQQKQDDGRGLVLPGYKYLGPFNGLDKGEPVNAADAAALEHDKAYDQQLKAGDNPYLRYNHADAEFQERLQEDTSFGGNLGRAVFQAKKRVLEPLGLVEEGAKTAPGKKRPIESPDSSTGIGKKGQQPAKKKLNFGQTGDSESVPDPQPIGEPPAGPSGLGSGTMAAGGGAPMADNNEGADGVGSSSGNWHCDSTWLGDRVITTSTRTWALPTYNNHLYKQISNGTSGGSTNDNTYFGYSTPWGYFDFNRFHCHFSPRDWQRLINNSWGFRPKRLNFKLFNIQVKEVTQNEGTKTIANNLTSTIQVFTDSEYQLPYVLGSAHQGCLPPFPADVFMIPQYGYLTLNNGSQAVGRSSFYCLEYFPSQMLRTGNNFEFSYQFEDVPFHSSYAHSQSLDRLMNPLIDQYLYYLSRTQSTGGTAGTQQLLFSQAGPNNMSAQAKNWLPGPCYRQQRVSTTLSQNNNSNFAWTGATKYHLNGRDSLVNPGVAMATHKDDEERFFPSSGVLMFGKQGAGKDNVDYSSVMLTSEEEIKTTNPVATEQYGVVADNLQQQNAAPIVGAVNSQGALPGMVWQNRDVYLQGPIWAKIPHTDGNFHPSPLMGGFGLKHPPPQILIKNTPVPADPPTTFSQAKLASFITQYSTGQVSVEIEWELQKENSKRWNPEIQYTSNYYKSTNVDFAVNTEGTYSEPRPIGTRYLTRNL

SEQ ID NO: 4767 - DNA, 2495 bp, Adeno-associated virus
gaattcgccctttctacggctgcgtcaactagaccaatgagaactttcccttcaacgattgcgtcgacaagatggtgatctggtgggaggagggcaagatgacggccaaggtcgtggagtccgccaaggccattcatcatctgctggggcgggctcccgagattgcttgctcggcctgcgatctggtcaacgtggacctggatgactgtgtttctgagcaataaatgacttaaaccaggtatggctgccgatggttatcttccagattggctcgaggacaacctctctgagggcattcgcgagtggtgggacttgaaacctggagccccgaaacccaaagccaaccagcaaaagcaggacgacggccggggtctggtgcttcctggctacaagtacctcggacccttcaacggactcgacaagggagagccggtcaacgaggcagacgccgcggccctcgagcacgacaaggcctacgacaagcagctcgagcagggggacaacccgtacctcaagtacaaccacgccgacgccgagtttcaggagcgtcttcaagaagatacgtcttttgggggcaacctcgggcgagcagtcttccaggccaagaagcgggttctcgaacctctcggtctggttgaggaaggcgctaagacggctcctggaaagaagagacccatagaatcccccgactcctccacgggcatcggcaagaaaggccagcagcccgctaaaaagaagctcaactttgggcagactggcgactcagagtcagtgcccgaccctcaaccaatcggagaaccccccgcaggcccctctggtctgggatctggtacaatggctgcaggcggtggcgctccaatggcagacaataacgaaggcgccgacggagtgggtaatgcctccggaaattggcattgcgattccacatggctgggcgacagagtcatcaccaccagcacccgcacctgggccctgcccacctacaacaaccacctctacaagcagatatcaagtcagagcggggctaccaacgacaaccacttcttcggctacagcaccccctggggctattttgacttcaacagattccactgccacttctcaccacgtgactggcagcgactcatcaacaacaactggggattccggcccagaaagctgcggttcaagttgttcaacatccaggtcaaggaggtcacgacgaacgacggcgttacgaccatcgctaataaccttaccagcacgattcaggtcttctcggactcggagtaccaactgccgtacgtcctcggctctgcgcaccagggctgcctccctccgttccctgcggacgtgttcatgattcctcagtacggatatctgactctaaacaacggcagtcagtctgtgggacgttcctccttctactgcctggagtactttccttctcagatgctgagaacgggcaataactttgaattcagctacacctttgaggaagtgcctttccacagcagctatgcgcacagccagagcctggaccggctgatgaatcccctcatcgaccagtacctgtactacctggcccggacccagagcactacggggtccacaagggagctgcagttccatcaggctgggcccaacaccatggccgagcaatcaaagaactggctgcccggaccctgttatcggcagcagagactgtcaaaaaacatagacagcaacaacaccagtaactttgcctggaccggggccactaaataccatctgaatggtagaaattcattaaccaacccgggcgtagccatggccaccaacaaggacgacgaggaccagttctttcccatcaacggagtgctggtttttggcaaaacgggggctgccaacaagacaacgctggaaaacgtgctaatgaccagcgaggaggagatcaaaaccaccaatcccgtggctacagaacagtacggtgtggtctccagcaacctgcaatcgtctacggccggaccccagacacagactgtcaacagccagggggctctgcccggcatggtctggcagaaccgggacgtgtacctgcagggtcccatctgggccaaaattcctcacacggacggcaactttcacccgtctcccctgatgggcggatttggactcaaacacccgcctcctcaaattctcatcaaaaacaccccggtacctgctaatcctccagaggtgtttactcctgccaagtttgcctcatttatcacgcagtacagcaccggccaggtcagcgtggagatcgagtgggaactgcagaaagaaaacagcaaacgctggaatccagagattcagtacacctcaaattatgccaagtctaataatgtggaatttgctgtcaacaacgaaggggtttatactgagcctcgccccattggcacccgttacctcacccgtaacctgtaattgcctgttaatcaataaaccggttaattcgtttcagttgaactttggtctctgcgaagggcgaattc

SEQ ID NO: 4768 - protein, 728 aa, Adeno-associated virus
MAADGYLPDWLEDNLSEGIREWWDLKPGAPKPKANQQKQDDGRGLVLPGYKYLGPFNGLDKGEPVNEADAAALEHDKAYDKQLEQGDNPYLKYNHADAEFQERLQEDTSFGGNLGRAVFQAKKRVLEPLGLVEEGAKTAPGKKRPIESPDSSTGIGKKGQQPAKKKLNFGQTGDSESVPDPQPIGEPPAGPSGLGSGTMAAGGGAPMADNNEGADGVGNASGNWHCDSTWLGDRVITTSTRTWALPTYNNHLYKQISSQSGATNDNHFFGYSTPWGYFDFNRFHCHFSPRDWQRLINNNWGFRPRKLRFKLFNIQVKEVTTNDGVTTIANNLTSTIQVFSDSEYQLPYVLGSAHQGCLPPFPADVFMIPQYGYLTLNNGSQSVGRSSFYCLEYFPSQMLRTGNNFEFSYTFEEVPFHSSYAHSQSLDRLMNPLIDQYLYYLARTQSTTGSTRELQFHQAGPNTMAEQSKNWLPGPCYRQQRLSKNIDSNNTSNFAWTGATKYHLNGRNSLTNPGVAMATNKDDEDQFFPINGVLVFGKTGAANKTTLENVLMTSEEEIKTTNPVATEQYGVVSSNLQSSTAGPQTQTVNSQGALPGMVWQNRDVYLQGPIWAKIPHTDGNFHPSPLMGGFGLKHPPPQILIKNTPVPANPPEVFTPAKFASFITQYSTGQVSVEIEWELQKENSKRWNPEIQYTSNYAKSNNVEFAVNNEGVYTEPRPIGTRYLTRNL

SEQ ID NO: 4769 - DNA, 2504 bp, Adeno-associated virus
gaattcgccctttctacggctgcgtcaactggaccaatgagaactttcccttcaacgattgcgtcgacaagatggtgatctggtgggaggagggcaagatgacggccaaggtcgtggagtccgccaaggccattcatcatctgctggggcgggctcccgagattgcttgctcggcctgcgatctggtcaacgtggacctggatgactgtgtttctgagcaataaatgacttaaaccaggtatggctgccgatggttatcttccagattggctcgaggacaacctctctgagggcattcgcgagtggtgggacttgaaacctggagccccgaaacccaaagccaaccagcaaaagcaggacgacggccggggtctggtgcttcctggctacaagtacctcggacccttcaacggactcgacaagggagagccggtcaacgaggcagacgccgcggccctcgagcacgacaaggcctacgacaagcagctcgagcagggggacaacccgtacctcaagtacaaccacgccgacgccgagtttcaggagcgtcttcaagaagatacgtcttttgggggcaacctcgggcgagcagtcttccaggccaagaagcgggttctcgaacctctcggtctggttgaggaaggcgctaagacggctcctggaaagaagagacccatagaatcccccgactcctccacgggcatcggcaagaaaggccagcagcccgctaaaaagaagctcaactttgggcagactggcgactcagagtcagtgcccgaccctcaaccaatcggagaaccccccgcaggcccctctggtctgggatctggtacaatggctgcaggcggtggcgctccaatggcagacaataacgaaggcgccgacggagtgggtaatgcctccggaaattggcattgcgattccacatggctgggcgacagagtcatcaccaccagcacccgcacctgggccctgcccacctacaacaaccacctctacaagcagatatcaagtcagagcggggctaccaacgacaaccacttcttcggctacagcaccccctggggctattttgacttcaacagattccactgccacttctcatcacgtgactggcagcgactcatcaacaacaactggggattccggcccaagagactcaacttcaagctcttcaacatccaggtcaaggaggtcacgcagaatgaaggcaccaagaccatcgccaataaccttaccagcacgattcaggtctttacggactcggaataccggctcccgtacgtcctcggctctgcgcaccagggctgcctgcctccgttcccggcggacgtcttcatgattcctcagtacgggtacctgactctgaacaacggcagtcaggccgtgggccgttcctccttctactgcctggagtactttccttctcaaatgctgagaacgggcaacaactttgagttcagctaccagtttgaggacgtgccttttcacagcagctacgcgcacagccaaagcctggaccggctgatgaaccccctcatcgaccagtacctgtactacctgtctcggactcagtccacgggaggtaccgcaggaactcagcagttgctattttctcaggccgggcctaataacatgtcggctcaggccaaaaactggctacccgggccctgctaccggcagcaacgcgtctccacgacactgtcgcaaaataacaacagcaactttgcttggaccggtgccaccaagtatcatctgaatggcagagactctctggtaaatcccggtgtcgctatggcaacgcacaaggacgacgaagagcgattttttccatccagcggagtcttgatgtttgggaaacagggagctggaaaagacaacgtggactatagcagcgttatgctaaccagtgaggaagaaatcaaaaccaccaacccagtggccacagaacagtacggcgtggtggccgataacctgcaacagcaaaacgccgctcctattgtaggggccgtcaacagtcaaggagccttacctggcatggtctggcagaaccgggacgtgtacctgcagggtcctatctgggccaagattcctcacacggacggcaactttcatccttcgccgctgatgggaggctttggactgaaacacccgcctcctcagatcctgattaagaatacacctgttcccgcggatcctccaactaccttcagtcaagccaagccggcgtcgttcatcacgcagtacagcaccggacaggtcagcgtggaaattgaatgggagctgcagaaagagaacagcaagcgctggaacccagagattcagtatacttccaactactacaaatctacaaatgtggactttgctgtcaatactgagggtacttattcagagcctcgccccattggcacccgttacctcacccgtaacctgtaattgcctgttaatcaataaaccggttaattcgtttcagttgaactttggtctctgcgaagggcgaattc

SEQ ID NO: 4770 - protein, 731 aa, Adeno-associated virus
MAADGYLPDWLEDNLSEGIREWWDLKPGAPKPKANQQKQDDGRGLVLPGYKYLGPFNGLDKGEPVNEADAAALEHDKAYDKQLEQGDNPYLKYNHADAEFQERLQEDTSFGGNLGRAVFQAKKRVLEPLGLVEEGAKTAPGKKRPIESPDSSTGIGKKGQQPAKKKLNFGQTGDSESVPDPQPIGEPPAGPSGLGSGTMAAGGGAPMADNNEGADGVGNASGNWHCDSTWLGDRVITTSTRTWALPTYNNHLYKQISSQSGATNDNHFFGYSTPWGYFDFNRFHCHFSSRDWQRLINNNWGFRPKRLNFKLFNIQVKEVTQNEGTKTIANNLTSTIQVFTDSEYRLPYVLGSAHQGCLPPFPADVFMIPQYGYLTLNNGSQAVGRSSFYCLEYFPSQMLRTGNNFEFSYQFEDVPFHSSYAHSQSLDRLMNPLIDQYLYYLSRTQSTGGTAGTQQLLFSQAGPNNMSAQAKNWLPGPCYRQQRVSTTLSQNNNSNFAWTGATKYHLNGRDSLVNPGVAMATHKDDEERFFPSSGVLMFGKQGAGKDNVDYSSVMLTSEEEIKTTNPVATEQYGVVADNLQQQNAAPIVGAVNSQGALPGMVWQNRDVYLQGPIWAKIPHTDGNFHPSPLMGGFGLKHPPPQILIKNTPVPADPPTTFSQAKPASFITQYSTGQVSVEIEWELQKENSKRWNPEIQYTSNYYKSTNVDFAVNTEGTYSEPRPIGTRYLTRNL

SEQ ID NO: 4771 - protein, 731 aa, Adeno-associated virus
MAADGYLPDWLEDNLSEGIREWWDLKPGAPKPKANQQKQDDGRGLVLPGYKYLGPFNGLDKGEPVNEADAAALEHDKAYDKQLEQGDNPYLKYNHADAEFQERLQEDTSFGGNLGRAVFRAKKRVLEPLGLVEEGAKTAPGKKRPIESPDSSTGIGKKGQQPAKKKLNFGQTGDSESVPDPQPLGEPPAAPSGLGSGTMAAGGGAPMADNNEGADGVGNASGNWHCDSTWLGDRVITTSTRTWALPTYNNHLYKQISSQSGATNDNHFFGYSTPWGYFDFNRFHCHFSPRDWQRLINNNRGFRPRKLRFKLFNIQVKEVTTNDGVTTIANNLTSTIQVFSDSEYQLPYVLGSAHQGCLPPFPADVFMIPQYGYLTLNNGSQSVGRSSFYCLEYFPSQMLRTGNNFEFSYQFEDVPFHSSYAHSQSLDRLMNPLIDQYLYYLSRTQSTGGTAGTQQLLFSQAGPNNMSAQAKNWLPGPCYRQQRVSTTLSQNNNSNFAWTGATKYHLNGRDSLVNPGVAMATHKDDEERFFPSSGVLMFGKQGAGKDNVDYSSVMLTSEEEIKTTNPVATEQYGVVADNLQQQNAAPIVGAVNSQGALPGMAWQNRDVYLQGPIWAKIPHTDGNFHPSPLMGGFGLKHPPPQILIKNTPVPADPPTTFSQAKLASFITQYSTGQVSVEIEWELQKENSKRWNPEIQYTSNYYKSTNVDFAVNTEGTYSEPRPIGTRYLTRNL

SEQ ID NO: 4772 - protein, 738 aa, Adeno-associated virus
MAADGYLPDWLEDNLSEGIREWWDLKPGAPKPKANQQKQDDGRGLVLPGYKYLGPFNGLDKGEPVNEADAAALEHDKAYDKQLEQGDNPYLKYNHADAEFQERLQEDTSFGGNLGRAVFQAKKRVLEPLGLVEEGAKTAPGKKRPVEPSPQRSPDSSTGIGKTGQQPAKKRLNFGQTGDSESVPDPQPIGEPPAGPSGLGSGTMAAGGGAPMADNNEGADGVGSSSGNWHCDSTWLGDRVITTSTRTWALPTYNNHLYKQISNGTSGGSTNDNTYFGYSTPWGYFDFNRFHCHFSPRDWQRLINNNWGFRPKRLNFKLFNIQVKEVTQNEGTKTIANNLTSTIQVFTDSEYQLPYVLGSAHQGCLPPFPADVFMIPQYGYLTLNNGSQAVGRSSFYCLEYFPSQMLRTGNNFEFSYQFEDVPFHSSYAHSQSLDRLMNPLIDQYLYYLSRTQSTGGTAGTQQLLFSQAGPNNMSAQAKNWLPGPCYRQQRVSTTLSQNNNSNFAWTGATKYHLNGRDSLVNPGVAMATHKDDEERFFPSSGVLMFGKQGAGKDNVDYSSVMLTSEEEIKTTNPVATEQYGVVADNLQQQNAAPIVGAVNSQGALPGMVWQNRDVYLQGPIWAKIPHTDGNFHPSPLMGGFGLKHPPPQILIKNTPVPADPPTTFSQAKLASFITQYSTGQVSVEIEWELQKENSKRWNPEIQYTSNYYKSTNVDFAVNTEGTYSEPRPIGTRYLTRNL

SEQ ID NO: 4773 - protein, 735 aa, Adeno-associated virus
MAADGYLPDWLEDNLSEGIREWWDLKPGAPKPKANQQKQDDGRGLVLPGYKYLGPFNGLDKGEPVNEADAAALEHDKAYDKQLEQGDNPYLKYNHADAEFQERLQEDTSFGGNLGRAVFQAKKRVLEPLGLVEEGAKTAPGKKRPVEPSPQRSPDSSTGIGKTGQQPAKKRLNFGQTGDSESVPDPQPIGEPPAGPSGLGSGTMAAGGGAPMADNNEGADGVGSSSGNWHCDSTWLGDRVITTSTRTWALPTYNNHLYKQISNGTSGGSTNDNTYFGYSTPWGYFDFNRFHCHFSPRDWQRLINNNWGFRPRKLRFKLFNIQVKEVTTDDGVTTIANNLTSTIQVFSDSEYQLPYVLGSAHQGCLPPFPADVFMIPQYGYLTLNNGSQSVGRSSFYCLEYFPSQMLRTGNNFEFSYTFEEVPFHSSYAHSQSLDRLMNPLIDQYLYYLARTQSTTGSTRELQFHQAGPNTMAEQSKNWLPGPCYRQQRLSKNIDSNNNSNFAWTGATKYHLNGRNSLTNPGVAMATNKDDEDQFFPINGVLVFGKTGAANKTTLENVLMTSEEEIKTTNPVATEEYGVVSSNLQSSTAGPQTQTVNSQGALPGMVWQNRDVYLQGPIWAKIPHTDGNFHPSPLMDGFGLKHPPPQILIKNTPVPANPPEVFTPAKFASFITQYSTGQVSVEIEWELQKENSKRWNPEIQYTSNYAKSNNVEFAVNNEGVYTEPRPIGTRYLTRNL

SEQ ID NO: 4774 - DNA, 3128 bp, Adeno-associated virus
gaattcgccctttctacggctgcgtcaactggaccaatgagaactttcccttcaacgattgcgtcgacaagatggtgatctggtgggaggagggcaagatgacggccaaggtcgtggagtccgccaaggccattctcggcggcagcaaggtgcgcgtggaccaaaagtgcaagtcttccgcccagatcgatcccacccccgtgatcgtcacttccaacaccaacatgtgcgccgtgattgacgggaacagcaccaccttcgagcaccagcagccgttacaagaccggatgttcaaatttgaactcacccgccgtctggagcacgactttggcaaggtgacaaagcaggaagtcaaagagttcttccgctgggcgcaggatcacgtgaccgaggtggcgcatgagttctacgtcagaaagggtggagccaacaagagacccgcccccgatgacgcggataaaagcgagcccaagcgggcctgcccctcagtcgcggatccatcgacgtcagacgcggaaggagctccggtggactttgccgacaggtaccaaaacaaatgttctcgtcacgcgggcatgcttcagatgctgtttccctgcaagacatgcgagagaatgaatcagaatttcaacatttgcttcacgcacgggaccagagactgttcagaatgtttccccggcgtgtcagaatctcaaccggtcgtcagaaagaggacgtatcggaaactctgtgccattcatcatctgctagggcgggctcccgagattgcttgctcggcctgcgatctggtcaacgtggacctggatgactgtgtttctgagcaataaatgacttaaaccaggtatggctgccgatggttatcttccagattggctcgaggacaacctctctgagggcattcgcgagtggtgggacttgaaacctggagccccgaaacccaaagccaaccagcaaaagcaggacgacggccggggtctggtgcttcctggctacaagtacctcggacccttcaacggactcgacaagggggagcccgtcaacgcggcggacgcagcggccctcgagcacgacaaggcctacgaccagcagctcaaagcgggtgacaatccgtacctgcggtataaccacgccgacgccgagtttcaggagcgtctgcaagaagatacgtcttttgggggcaacctcgggcgagcagtcttccaggccaagaagcgggttctcgaacctctcggtctggttgaggaaggcgctaagacggctcctggaaagaagagaccggtagagccatcaccccagcgttctccagactcctctacgggcatcggcaagacaggccagcagcccgcgaaaaagagactcaactttgggcagactggcgactcagagtcagtgcccgaccctcaaccaatcggagaaccccccgcaggcccctctggtctgggatctggtacaatggctgcaggcggtggcgctccaatggcagacaataacgaaggcgccgacggagtgggtagttcctcaggaaattggcattgcgattccacatggctgggcgacagagtcatcaccaccagcacccgaacctgggccctccccacctacaacaaccacctctacaagcaaatctccaacgggacatcgggaggaagcaccaacgacaacacctacttcggctacagcaccccctgggggtattttgactttaacagattccactgccacttctcaccacgtgactggcagcgactcatcaacaacaactggggattccggcccaagagactcaacttcaagctcttcaacatccaggtcaaggaggtcacgcagaatgaaggcaccaagaccatcgccaataaccttaccagcacgattcaggtctttacggactcggaataccagctcccgtacgtcctcggctctgcgcaccagggctgcctgcctccgttcccggcggacgtcttcatgattcctcagtacgggtacctgactctgaacaacggcagtcaggccgtgggccgttcctccttctactgcctggagtactttccttctcaaatgctgagaacgggcaacaactttgagttcagctaccagtttgaggacgtgccttttcacagcagctacgcgcacagccaaagcctggaccggctgatgaaccccctcatcgaccagtacctgtactacctgtctcggactcagtccacgggaggtaccgcaggaactcagcagttgctattttctcaggccgggcctaataacatgtcggctcaggccaaaaactggctacccgggccctgctaccggcagcaacgcgtctccacgacactgtcgcaaaataacaacagcaactttgcttggaccggtgccaccaagtatcatctgaatggcagagactctctggtaaatcccggtgtcgctatggcaacgcacaaggacgacgaagagcgattttttccatccagcggagtcttgatgtttgggaaacagggagctggaaaagacaacgtggactatagcagcgttatgctaaccagtgaggaagaaatcaaaaccaccaacccagtggccacagaacagtacggcgtggtggccgataacctgcaacagcaaaacgccgctcctattgtaggggccgtcaacagtcaaggagccttacctggcatggtctggcagaaccgggacgtgtacctgcagggtcctatctgggccaagattcctcacacggacggcaactttcatccttcgccgctgatgggaggctttggactgaaacacccgcctcctcagatcctgattaagaatacacctgttcccgcggatcctccaactaccttcagtcaagccaagctggcgtcgttcatcacgcagtacagcaccggacaggtcagcgtggaaattgaatgggagctgcagaaagagaacagcaagcgctggaacccagagattcagtatacttccaactactacaaatctacaaatgtggactttgctgtcaatactgagggtacttattcagagcctcgccccattggcacccgttacctcacccgtaacctgtaattgcctgttaatcaataaaccggctaattcgtttcagttgaactttggtctctgcgaagggcgaattc

SEQ ID NO: 4775 - protein, 738 aa, Adeno-associated virus
MAADGYLPDWLEDNLSEGIREWWDLKPGAPKPKANQQKQDDGRGLVLPGYKYLGPFNGLDKGEPVNAADAAALEHDKAYDQQLKAGDNPYLRYNHADAEFQERLQEDTSFGGNLGRAVFQAKKRVLEPLGLVEEGAKTAPGKKRPVEPSPQRSPDSSTGIGKTGQQPAKKRLNFGQTGDSESVPDPQPIGEPPAGPSGLGSGTMAAGGGAPMADNNEGADGVGSSSGNWHCDSTWLGDRVITTSTRTWALPTYNNHLYKQISNGTSGGSTNDNTYFGYSTPWGYFDFNRFHCHFSPRDWQRLINNNWGFRPKRLNFKLFNIQVKEVTQNEGTKTIANNLTSTIQVFTDSEYQLPYVLGSAHQGCLPPFPADVFMIPQYGYLTLNNGSQAVGRSSFYCLEYFPSQMLRTGNNFEFSYQFEDVPFHSSYAHSQSLDRLMNPLIDQYLYYLSRTQSTGGTAGTQQLLFSQAGPNNMSAQAKNWLPGPCYRQQRVSTTLSQNNNSNFAWTGATKYHLNGRDSLVNPGVAMATHKDDEERFFPSSGVLMFGKQGAGKDNVDYSSVMLTSEEEIKTTNPVATEQYGVVADNLQQQNAAPIVGAVNSQGALPGMVWQNRDVYLQGPIWAKIPHTDGNFHPSPLMGGFGLKHPPPQILIKNTPVPADPPTTFSQAKLASFITQYSTGQVSVEIEWELQKENSKRWNPEIQYTSNYYKSTNVDFAVNTEGTYSEPRPIGTRYLTRNL

SEQ ID NO: 4776 - DNA, 3084 bp, Adeno-associated virus
gaattcgccctttctacggctgcatcaactggaccaatgagaactttcccttcaacgattgcgtcgacaagatggtgatctggtgggaggagggcaagatgacggccaaggtcgtggagtccgccaaggccattctcggcggcagcaaggtgcgcgtggaccaaaagtgcaagtcgtccgcccagatcgaccccacccccgtgatcgtcacctccaacaccaacatgtgcgccgtgattgacgggaacagcaccaccttcgagcaccagcagccgttgcaggaccggatgttcaagttcgaactcacccgccgtctggagcacgactttggcaaggtgaccaagcaggaagtcaaagagttcttccgctgggcgcaggatcacgtgaccgaggtggcgcatgagttctacgtcagaaagggcggagccagcaaaagacccgcccccgatgacgcggatataagcgagcccaagcgggcctgcccctcagtcgcggatccatcgacgtcagacgcggaaggagctccggtggactttgccgacaggtaccaaaacaaatgttctcgtcacgcgggcatgcttcagatgctgtttccctgcaaaacgtgcgagaaaatgaatcagaatttcaacatttgcttcacgcacggggtcagagactgctcagaatgtttccccggtgcatcagaatctcaaccggtcgtcagaaaaaaaacgtatcagaaactgtgtgccattcatcatctgctggggcgggcacccgagattgcttgctcggcctgcgatctggtcaacgtggacctggacgactgtgtttctgagcaataaatgacttaaaccaggtatggctgccgatggttatcttccagattggcttgaggacaacctctctgagggcattcgcgagtggtgggacctgaaacctggagccccgaaacccaaagccaaccagcaaaagcaggacgacggccggggtctggtgcttcctggctacaagtacctcggacccttcaacggactcgacaagggggagcccgtcaacgcggcggacgcagcggccctcgagcacgacaaggcctacgaccagcagctcaaagcgggtgacaatccgtacctgcggtataaccacgccgacgccgagtttcaggagcgtctgcaagaagatacgtcttttgggggcaacctcgggcgagcagtcttccaggccaagaagcgggttctcgaacctctcggtctggttgaggaaggcgctaagacggctcctggaaagaagagaccggtagagccatcacctcagcgttcccccgactcctccacgggcatcggcaagaaaggccaccagcccgcgagaaagagactgaactttgggcagactggcgactcggagtcagtccccgaccctcaaccaatcggagaaccaccagcaggcccctctggtctgggatctggtacaatggctgcaggcggtggcgctccaatggcagacaataacgaaggcgccgacggagtgggtagttcctcaggaaattggcattgcgattccacatggctgggcgacagagtcatcaccaccagcacccgaacctgggccctgcccacctacaacaaccatctctacaagcaaatctccaacgggacatcgggaggaagcactaacgacaacacctactttggctacagcaccccctgggggtattttgacttcaacagattccactgccacttctcaccacgtgactggcagcgactcatcaacaataactggggattccggcccaagagactcaacttcaagctcttcaacatccaggtcaaggaggtcacgcagaatgaaggcaccaagaccatcgccaataaccttaccagcacgattcaggtgtttacggactcggaataccagctcccgtacgtccccggctctgcgcaccagggctgcctccctccgttcccggcggacgtcttcatgattcctcagtacgggtatctgaccctaaacaatggcagtcaggctgtgggccgttcctccttctactgcctggaatacttcccttctcaaatgctgaggacgggcaacaactttgaattcagctacaccttcgaggacgtgcctttccacagcagctacgcgcacagccagagcctggaccggctgatgaaccctctcatcgaccagtacctgtattacttatccagaactcagtccacaggaggaactcaaggtactcagcaattgttattttctcaagccgggcccgcaaacatgtcggctcaggccaagaactggctacctggaccgtgttaccgtcagcaacgagtttccacgacactgtcgcaaaacaacaacagcaattttgcttggaccggtgccaccaagtatcacctgaatggcagagactccctggttaatcccggcgttgccatggctacccacaaggacgacgaggagcgcttcttcccgtcaagcggagttctaatgtttggcaagcagggggctggaaaagacaatgtggactacagcagcgtgatgctcaccagcgaagaagaaattaaaactactaacccagtggctacagagcagtatggtgtggtggcagacaacctgcagcagaccaacggagctcccattgtgggaactgtcaacagccagggggccttacctggtatggtctggcaaaaccgggacgtgtacctgcagggccccatctgggccaaaattcctcacacggacggcaactttcatccttcgccgctgatgggaggctttggactgaaacacccgcctcctcagatcctggtgaaaaacactcctgttcctgcggatcctccgaccaccttcagccaggccaagctggcttcttttatcacgcagtacagcaccggacaggtcagcgtggaaatcgaatgggagctgcagaaagaaaacagcaagcgctggaacccagagattcagtatacttccaactactacaaatctacaaatgtggactttgctgtcaatactgagggtacttattcagagcctcgccccattggcactcgttatctcacccgtaatctgtaattgcttgttaatcaataaaccggt

SEQ ID NO: 4777 - protein, 738 aa, Adeno-associated virus
MAADGYLPDWLEDNLSEGIREWWDLKPGAPKPKANQQKQDDGRGLVLPGYKYLGPFNGLDKGEPVNAADAAALEHDKAYDQQLKAGDNPYLRYNHADAEFQERLQEDTSFGGNLGRAVFQAKKRVLEPLGLVEEGAKTAPGKKRPVEPSPQRSPDSSTGIGKKGHQPARKRLNFGQTGDSESVPDPQPIGEPPAGPSGLGSGTMAAGGGAPMADNNEGADGVGSSSGNWHCDSTWLGDRVITTSTRTWALPTYNNHLYKQISNGTSGGSTNDNTYFGYSTPWGYFDFNRFHCHFSPRDWQRLINNNWGFRPKRLNFKLFNIQVKEVTQNEGTKTIANNLTSTIQVFTDSEYQLPYVPGSAHQGCLPPFPADVFMIPQYGYLTLNNGSQAVGRSSFYCLEYFPSQMLRTGNNFEFSYTFEDVPFHSSYAHSQSLDRLMNPLIDQYLYYLSRTQSTGGTQGTQQLLFSQAGPANMSAQAKNWLPGPCYRQQRVSTTLSQNNNSNFAWTGATKYHLNGRDSLVNPGVAMATHKDDEERFFPSSGVLMFGKQGAGKDNVDYSSVMLTSEEEIKTTNPVATEQYGVVADNLQQTNGAPIVGTVNSQGALPGMVWQNRDVYLQGPIWAKIPHTDGNFHPSPLMGGFGLKHPPPQILVKNTPVPADPPTTFSQAKLASFITQYSTGQVSVEIEWELQKENSKRWNPEIQYTSNYYKSTNVDFAVNTEGTYSEPRPIGTRYLTRNL

SEQ ID NO: 4778 - DNA, 3123 bp, Adeno-associated virus
gaattcgcccttggctgcgtcaactggaccaatgagaactttcccttcaacgattgcgtcgacaagatggtgatctggtgggaggagggcaagatgacggccaaggtcgtggagtccgccaaggccattctcggcggcagcaaggtgcgcgtggaccaaaagtgcaagtcgtccgcccagatcgaccccacccccgtgatcgtcacctccaacaccaacatgtgcgccgtgattgacgggaacagcaccaccttcgagcaccagcagccgttgcaggaccggatgttcaagttcgaactcacccgccgtctggagcacgactttggcaaggtgaccaagcaggaagtcaaagagttcttccgctgggcgcaggatcacgtgaccgaggtggcgcatgagttctacgtcagaaagggcggagccagcaaaagacccgcccccgatgacgcggatataagcgagcccaagcgggcctgcccctcagtcgcggatccatcgacgtcagacgcggaaggagctccggtggactttgccgacaggtaccaaaacaaatgttctcgtcacgcgggcatgctccagatgctgtttccctgcaaaacgtgcgagagaatgaatcagaatttcaacatttgcttcacgcacggggtcagagactgctcagaatgtttccccggtgcatcagaatctcaaccggtcgtcagaaaaaaaacgtatcagaaactgtgtgccattcatcatctgctggggcgggcacccgagattgcttgctcggcctgcgatctggtcaacgtggacctggacgactgtgtttctgagcaataaatgacttaaaccaggtatggctgccgatggttatcttccagattggcttgaggacaacctctctgagggcattcgcgagtggtgggacctgaaacctggagccccgaaacccaaagccaaccagcaaaagcaggacgacggccggggtctggtgcttcctggctacaagtacctcggacccttcaacggactcgacaagggggagcccgtcaacgcggcggacgcagcggccctcgagcacgacaaggcctacgaccagcagctcaaagcgggtgacaatccgtacctgcggtataaccacgccgacgccgagtttcaggagcgtctgcaagaagatacgtcttttgggggcaacctcgggcgagcagtcttccaggccaagaagcgggttctcgaacctctcggtctggttgaggaaggcgctaagacggctcctggaaagaagagaccggtagagccatcacctcagcgttcccccgactcctccacgggcatcggcaagaaaggccaccagcccgcgagaaagagactgaactttgggcagactggcgactcggagtcagtccccgaccctcaaccaatcggagaaccaccagcaggcccctctggtctgggatctggtacaatggctgcaggcggtggcgctccaatggcagacaataacgaaggcgccgacggagtgggtagttcctcaggaaattggcattgcgattccacatggctgggcgacagagtcatcaccaccagcacccgaacctgggccctgcccacctacaacaaccatctctacaagcaaatctccaacgggacatcgggaggaagcactaacgacaacacctactttggctacagcaccccctgggggtattttgacttcaacagattccactgccacttctcaccacgtgactggcagcgactcatcaacaataactggggattccggcccaagagactcaacttcaagctcttcaacatccaggtcaaggaggtcacgcagaatgaaggcaccaagaccatcgccaataaccttaccagcacgattcaggtgtttacggactcggaataccagctcccgtacgtcctcggctctgcgcaccagggctgcctccctccgttcccggcggacgtcttcatgattcctcagtacgggtatctgaccctaaacaatggcagtcaggctgtgggccgttcctccttctactgcctggaatacttcccttctcaaatgctgaggacgggcaacaactttgaattcagctacaccttcgaggacgtgcctttccacagcagctacgcgcacagccagagcctggaccggctgatgaaccctctcatcgaccagtacctgtattacttatccagaactcagtccacaggaggaactcaaggtactcagcaattgttattttctcaagccgggcccgcaaacatgtcggctcaggccaagaactggctacctggaccgtgttaccgtcagcaacgagtttccacgacactgtcgcaaaacaacaacagcaattttgcttggaccggtgccaccaagtatcacctgaatggcagagactccctggttaatcccggcgttgccatggctacccacaaggacgacgaggagcgcttcttcccgtcaagcggagttctaatgtttggcaagcagggggctggaaaagacaatgtggactacagcagcgtgatgctcaccagcgaagaagaaattaaaactactaacccagtggctacagagcagtatggtgtggtggcagacaacctgcagcagaccaacggagctcccattgtgggaactgtcaacagccagggggccttacctggtatggtctggcaaaaccgggacgtgtacctgcagggccccatctgggccaaaattcctcacacggacggcaactttcatccttcgccgctgatgggaggctttggactgaaacacccgcctcctcagatcctggtgaaaaacactcctgttcctgcggatcctccgaccaccttcagccaggccaagctggcttcttttatcacgcagtacagcaccggacaggtcagcgtggaaatcgaatgggagctgcagaaagaaaacagcaagcgctggaacccagagattcagtatacttccaactactacaaatctacaaatgtggactttgctgtcaatactgagggtacttattcagagcctcgccccattggcactcgttatctcacccgtaatctgtaattgcttgttaatcaataaaccggttaattcgtttcagttgaactttggtctctgcgaagggcgaattc

SEQ ID NO: 4779 - protein, 738 aa, Adeno-associated virus
MAADGYLPDWLEDNLSEGIREWWDLKPGAPKPKANQQKQDDGRGLVLPGYKYLGPFNGLDKGEPVNAADAAALEHDKAYDQQLKAGDNPYLRYNHADAEFQERLQEDTSFGGNLGRAVFQAKKRVLEPLGLVEEGAKTAPGKKRPVEPSPQRSPDSSTGIGKKGHQPARKRLNFGQTGDSESVPDPQPIGEPPAGPSGLGSGTMAAGGGAPMADNNEGADGVGSSSGNWHCDSTWLGDRVITTSTRTWALPTYNNHLYKQISNGTSGGSTNDNTYFGYSTPWGYFDFNRFHCHFSPRDWQRLINNNWGFRPKRLNFKLFNIQVKEVTQNEGTKTIANNLTSTIQVFTDSEYQLPYVLGSAHQGCLPPFPADVFMIPQYGYLTLNNGSQAVGRSSFYCLEYFPSQMLRTGNNFEFSYTFEDVPFHSSYAHSQSLDRLMNPLIDQYLYYLSRTQSTGGTQGTQQLLFSQAGPANMSAQAKNWLPGPCYRQQRVSTTLSQNNNSNFAWTGATKYHLNGRDSLVNPGVAMATHKDDEERFFPSSGVLMFGKQGAGKDNVDYSSVMLTSEEEIKTTNPVATEQYGVVADNLQQTNGAPIVGTVNSQGALPGMVWQNRDVYLQGPIWAKIPHTDGNFHPSPLMGGFGLKHPPPQILVKNTPVPADPPTTFSQAKLASFITQYSTGQVSVEIEWELQKENSKRWNPEIQYTSNYYKSTNVDFAVNTEGTYSEPRPIGTRYLTRNL

SEQ ID NO: 4780 - DNA, 3122 bp, Adeno-associated virus
gaattcgccctttctacggctgcgtcaactggaccaatgagaactttcccttcaacgattgcgtcgacaagatggtgatctggtgggaggagggcaagatgacggccaaggtcgtggagtccgccaaggccattctcggcggcagcaaggtgcgtgtggaccaaaagtgcaagtcttccgcccagatcgatcccacccccgtgatcgtcacctccaacaccaacatgtgcgccgtgattgacgggaacagcgccaccttcgagcaccagcagccgttgcaggaccggatgttcaaatttgaactcacccgccgtctggagcatgactttggcaaggtgacgaagcaggaagtcaaagagttcttccgctgggcgcaggatcacgtgaccgaggtggcgcatgagttccacgtcagaaagggtggagccaacaagagacccgcccccgatgacgcggatataagcgagcccaagcgggcctgcccctcagtcgcggatccatcgacgtcagacgcggaaggagctccggtggactttgccgacaggtaccaaaacaaatgttctcgtcacgcgggcatgcttcagatgctgtttccctgcaagacatgcgagagaatgaatcagaatttcaacatttgcttcacgcacgggaccagagactgttcagaatgtttccccggcgtgtcagaatctcaaccggtcgtcagaaagaggacgtatcggaaactctgtgcgattcatcatctgctggggcgggctcccgagattgcttgctcggcctgcgatctggtcaacgtggacctggatgactgtgtttctgagcaataaatgacttaaaccaggtatggctgccgatggttatcttccagattggctcgaggacaacctctctgagggcattcgcgagtggtgggacttgaaacctggagccccgaaacccaaagccaaccagcaaaagcaggacgacggccggggtctggtgcttcctggctacaagtacctcggacccttcaacggactcgacaagggggagcccgtcaacgcggcggacgcagcggccctcgagcacgacaaagcctacgaccagcagctcaaagcgggtgacaatccgtacctgcggtataatcacgccgacgccgagtttcaggagcgtctgcaagaagatacgtcttttgggggcaacctcgggcgagcagtcttccaggccaagaagcgggttctcgaacctctcggtctggttgaggaaggcgctaagacggctcctggaaagaagagactggtagagcagtcgccacaagagccagactcctcctcgggcatcggcaagacaggccagcagcccgctaaaaagagactcaattttggtcagactggcgactcagagtcagtccccgacccacaacctctcggagaacctccagcagccccctcaggtctgggacctaatacaatggcttcaggcggtggcgctccaatggcagacaataacgaaggcgccgacggagtgggtaattcctcgggaaattggcattgcgattccacatggctgggggacagagtcatcaccaccagcacccgaacctgggccctgcccacctacaacaaccacctctacaagcaaatctccaacggcacctcgggaggaagcaccaacgacaacacctattttggctacagcaccccctgggggtattttgacttcaacagattccactgtcacttttcaccacgtgactggcaacgactcatcaacaacaattggggattccggcccaaaagactcaacttcaagctgttcaacatccaggtcaaggaagtcacgacgaacgaaggcaccaagaccatcgccaataatctcaccagcaccgtgcaggtctttacggactcggagtaccagttaccgtacgtgctaggatccgctcaccagggatgtctgcctccgttcccggcggacgtcttcacggttcctcagtacggctatttaactttaaacaatggaagccaagccctgggacgttcctccttctactgtctggagtatttcccatcgcagatgctgagaaccggcaacaactttcagttcagctacaccttcgaggacgtgcctttccacagcagctacgcgcacagccagagcctggacaggctgatgaatcccctcatcgaccagtacctgtactacctggtcagaacgcaaacgactggaactggagggacgcagactctggcattcagccaagcgggtcctagctcaatggccaaccaggctagaaattgggtgcccggaccttgctaccggcagcagcgcgtctccacgacaaccaaccagaacaacaacagcaactttgcctggacgggagctgccaagtttaagctgaacggccgagactctctaatgaatccgggcgtggcaatggcttcccacaaggatgacgacgaccgcttcttcccttcgagcggggtcctgatttttggcaagcaaggagccgggaacgatggagtggattacagccaagtgctgattacagatgaggaagaaatcaaggctaccaaccccgtggccacagaagaatatggagcagtggccatcaacaaccaggccgccaatacgcaggcgcagaccggactcgtgcacaaccagggggtgattcccggcatggtgtggcagaatagagacgtgtacctgcagggtcccatctgggccaaaattcctcacacggacggcaactttcacccgtctcccctgatgggcggctttggactgaagcacccgcctcctcaaattctcatcaagaacacaccggttccagcggacccgccgcttaccttcaaccaggccaagctgaactctttcatcacgcagtacagcaccggacaggtcagcgtggaaatcgagtgggagctgcagaaagaaaacagcaaacgctggaatccagagattcaatacacttccaactactacaaatctacaaatgtggactttgctgtcaacacggaaggagtttatagcgagcctcgccccattggcacccgttacctcacccgcaacctgtaattacatgttaatcaataaaccggttaattcgtttcagttgaactttggtctctgcgaagggcgaattc

SEQ ID NO: 4781 - protein, 736 aa, Adeno-associated virus
MAADGYLPDWLEDNLSEGIREWWDLKPGAPKPKANQQKQDDGRGLVLPGYKYLGPFNGLDKGEPVNAADAAALEHDKAYDQQLKAGDNPYLRYNHADAEFQERLQEDTSFGGNLGRAVFQAKKRVLEPLGLVEEGAKTAPGKKRLVEQSPQEPDSSSGIGKTGQQPAKKRLNFGQTGDSESVPDPQPLGEPPAAPSGLGPNTMASGGGAPMADNNEGADGVGNSSGNWHCDSTWLGDRVITTSTRTWALPTYNNHLYKQISNGTSGGSTNDNTYFGYSTPWGYFDFNRFHCHFSPRDWQRLINNNWGFRPKRLNFKLFNIQVKEVTTNEGTKTIANNLTSTVQVFTDSEYQLPYVLGSAHQGCLPPFPADVFTVPQYGYLTLNNGSQALGRSSFYCLEYFPSQMLRTGNNFQFSYTFEDVPFHSSYAHSQSLDRLMNPLIDQYLYYLVRTQTTGTGGTQTLAFSQAGPSSMANQARNWVPGPCYRQQRVSTTTNQNNNSNFAWTGAAKFKLNGRDSLMNPGVAMASHKDDDDRFFPSSGVLIFGKQGAGNDGVDYSQVLITDEEEIKATNPVATEEYGAVAINNQAANTQAQTGLVHNQGVIPGMVWQNRDVYLQGPIWAKIPHTDGNFHPSPLMGGFGLKHPPPQILIKNTPVPADPPLTFNQAKLNSFITQYSTGQVSVEIEWELQKENSKRWNPEIQYTSNYYKSTNVDFAVNTEGVYSEPRPIGTRYLTRNL

SEQ ID NO: 4782 - DNA, 3117 bp, Adeno-associated virus
gaattcgcccttggctgcgtcaactggaccaatgagaactttcccttcaacgattgcgtcgacaagatggtgatctggtgggaggagggcaagatgacggccaaggtcgtggagtccgccaaggccattctcggcggcagcaaggtgcgtgtggaccaaaagtgcaagtcttccgcccagatcgatcccacccccgtgatcgtcacctccaacaccaacatgtgcgccgtgattgacgggaacagcaccaccttcgagcaccagcagccgttgcaggaccggatgttcaaatttgaactcacccgccgtctggagcatgactttggcaaggtgacgaagcaggaagtcaaagagttcttccgctgggcgcaggatcacgtgaccgaggtggcgcatgagttccacgtcagaaagggtggagccaacaagagacccgcccccgatgacgcggatataagcgagcccaagcgggcctgcccctcagtcgcggatccatcgacgtcagacgcggaaggagctccggtggactttgccgacaggtaccaaaacaaatgttctcgtcacgcgggcatgcttcagatgctgtttccctgcaagacatgcgagagaatgaatcagaatttcaacatttgcttcacgcacgggaccagagactgttcagaatgtttccccggcgtgtcagaatctcaaccggtcgtcagaaagaggacgtatcggaaactctgtgcgattcatcatctgctggggcgggctcccgagattgcttgctcggcctgcgatctggtcaacgtggacctggatgactgtgtttctgagcaataaatgacttaaaccaggtatggctgccgatggttatcttccagattggctcgaggacaacctctctgagggcattcgcgagtggtgggacttgaaacctggagccccgaaacccaaagccaaccagcaaaagcaggacgacggccggggtctggtgcttcctggctacaagtacctcggacccttcaacggactcgacaagggggagcccgtcaacgcggcggacgcagcggccctcgagcacgacaaagcctacgaccagcagctcaaagcgggtgacaatccgtacctgcggtataatcacgccgacgccgagtttcaggagcgtctgcaagaagatacgtcttttgggggcaacctcgggcgagcagtcttccaggccaagaagcgggttctcgaacctctcggtctggttgaggaaggcgctaagacggctcctggaaagaagagaccggtagagcagtcgccacaagagccagactcctcctcgggcatcggcaagacaggccagcagcccgctaaaaagagactcaattttggtcagactggcgactcagagtcagtccccgacccacaacctctcggagaacctccagcagccccctcaggtctgggacctaatacaatggcttcaggcggtggcgctccaatggcagacaataacgaaggcgccgacggagtgggtaattcctcgggaaattggcattgcgattccacatggctgggggacagagtcatcaccaccagcacccgaacctgggccctgcccacctacaacaaccacctctacaagcaaatctccaacggcacctcgggaggaagcaccaacgacaacacctattttggctacagcaccccctgggggtattttgacttcaacagattccactgtcacttttcaccacgtgactggcaacgactcatcaacaacaattggggattccggcccaaaagactcaacttcaagctgttcaacatccaggtcaaggaagtcacgacgaacgaaggcaccaagaccatcgccaataatctcaccagcaccgtgcgggtctttacggactcggagtaccagttaccgtacgtgctaggatccgctcaccagggatgtctgcctccgttcccggcggacgtcttcatggttcctcagtacggctatttaactttaaacaatggaagccaagccctgggacgttcctccttctactgtctggagtatttcccatcgcagatgctgagaaccggcaacaactttcagttcagctacaccttcgaggacgtgcctttccacagcagctacgcgcacagccagagcctggacaggctgatgaatcccctcatcgaccagtacctgtactacctggtcagaacgcaaacgactggaactggagggacgcagactctggcattcagccaagcgggtcctagctcaatggccaaccaggctagaaattgggtgcccggaccttgctaccggcagcagcgcgtctccacgacaaccaaccagagcaacaacagcaactttgcctggacgggagctgccaagtttaagctgaacggccgagactctctaatgaatccgggcgtggcaatggcttcccacaaggatgacgacgaccgcttcttcccttcgagcggggtcctgatttttggcaagcaaggagccgggaacgatggagtggattacagccaagtgctgattacagatgaggaagaaatcaaggctaccaaccccgtggccacagaagaatatggagcagtggccatcaacaaccaggccgccaatacgcaggcgcagaccggactcgtgcacaaccagggggtgattcccggcatggtgtggcagaatagagacgtgtacctgcagggtcccatctgggccaaaattcctcacacggacggcaactttcacccgtctcccctgatgggcggctttggactgaagcacccgcctcctcaaattctcatcaagaacacaccggttccagcggacccgccgcttaccttcaaccaggccaagctgaactctttcatcacgcagtacagcaccggacaggtcagcgtggaaatcgagtgggagctgcagaaagaaaacagcaaacgctggaatccagagattcaatacacttccaactactacaaatctacaaatgtggactttgctgtcaacacggaaggagtttatagcgagcctcgccccattggcacccgttacctcacccgcaacctgtaattacatgttaatcaataaaccggttaattcgtttcagttgaactttggtctctgcgaagggcgaattc

SEQ ID NO: 4783 - protein, 736 aa, Adeno-associated virus
MAADGYLPDWLEDNLSEGIREWWDLKPGAPKPKANQQKQDDGRGLVLPGYKYLGPFNGLDKGEPVNAADAAALEHDKAYDQQLKAGDNPYLRYNHADAEFQERLQEDTSFGGNLGRAVFQAKKRVLEPLGLVEEGAKTAPGKKRPVEQSPQEPDSSSGIGKTGQQPAKKRLNFGQTGDSESVPDPQPLGEPPAAPSGLGPNTMASGGGAPMADNNEGADGVGNSSGNWHCDSTWLGDRVITTSTRTWALPTYNNHLYKQISNGTSGGSTNDNTYFGYSTPWGYFDFNRFHCHFSPRDWQRLINNNWGFRPKRLNFKLFNIQVKEVTTNEGTKTIANNLTSTVRVFTDSEYQLPYVLGSAHQGCLPPFPADVFMVPQYGYLTLNNGSQALGRSSFYCLEYFPSQMLRTGNNFQFSYTFEDVPFHSSYAHSQSLDRLMNPLIDQYLYYLVRTQTTGTGGTQTLAFSQAGPSSMANQARNWVPGPCYRQQRVSTTTNQSNNSNFAWTGAAKFKLNGRDSLMNPGVAMASHKDDDDRFFPSSGVLIFGKQGAGNDGVDYSQVLITDEEEIKATNPVATEEYGAVAINNQAANTQAQTGLVHNQGVIPGMVWQNRDVYLQGPIWAKIPHTDGNFHPSPLMGGFGLKHPPPQILIKNTPVPADPPLTFNQAKLNSFITQYSTGQVSVEIEWELQKENSKRWNPEIQYTSNYYKSTNVDFAVNTEGVYSEPRPIGTRYLTRNL

SEQ ID NO: 4784 - DNA, 3121 bp, Adeno-associated virus
gaattcgcccttctacggctgcgtcaactggaccaatgagaactttcccttcaacgattgcgtcgacaagatggtgatctggtgggaggagggcaagatgacggccaaggtcgtggagtccgccaaggccattctcggcggcagcaaggtgcgtgtggaccaaaagtgcaagtcttccgcccagatcgatcccacccccgtgatcgtcacctccaacaccaacatgtgcgccgtgattgacgggaacagcaccaccttcgagcaccagcagccgttgcaggaccggatgttcaaatttgaactcacccgccgtctggagcatgactttggcaaggtgacgaagcaggaagtcaaagagttcttccgctgggcgcaggatcacgtgaccgaggtggcgcatgagttccacgtcagaaagggtggcgccaacaagagacccgcccccgatgacgcggatataagcgagcccaagcgggcctgcccctcagtcgcggatccatcgacgtcagacgcggaaggagctccggtggactttgccgacaggtaccaaaacaaatgttctcgtcacgcgggcatgcttcagatgctgtttccctgcaagacatgcgagagaatgaatcagaatttcaacatttgcttcacgcacgggaccagagactgttcagaatgtttccccggcgtgtcagaatctcaaccggtcgtcagaaagaggacgtatcggaaactctgtgcgattcatcatctgctggggcgggctcccgagattgcttgctcggcctgcgatctggtcaacgtggacctggatgactgtgtttctgagcaataaatgacttaaaccaggtatggctgccgatggttatcttccagattggctcgaggacaacctctctgagggcattcgcgagtggtgggacttgaaacctggagccccgaaacccaaagccaaccagcaaaagcaggacgacggccggggtctggtgcttcctggctacaagtacctcggacccttcaacggactcgacaagggggagcccgtcaacgcggcggacgcagcggccctcgagcacgacaaagcctacgaccagcagctcaaagcgggtgacaatccgtacctgcggtataatcacgccgacgccgagtttcaggagcgtctgcaagaagatacgtcctttgggggcaacctcgggcgagcagtcttccaggccaagaagcgggttctcgaacctctcggtctggttgaggaaggcgctaagacggctcctggaaagaagagaccggtagagcagtcgccacaagagccagactcctcctcgggcatcggcaagacaggccagcagcccgctaaaaagagactcaattttggtcagactggcgactcagagtcagtccccgacccacaacctctcggagaacctccagcagccccctcaggtctgggacctaatacaatggcttcaggcggtggcgctccaatggcagacaataacgaaggcgccgacggagtgggtaattcctcgggaaattggcattgcgattccacatggctgggggacagagtcatcaccaccagcacccgaacctgggccctgcccacctacaacaaccacctctacaagcaaatctccaacggcacctcgggaggaagcaccaacgacaacacctattttggctacagcaccccctgggggtattttgacttcaacagattccactgtcacttttcaccacgtgactggcaacgactcatcaacaacaattggggattccggcccaaaagactcaacttcaagctgttcaacatccaggtcaaggaagtcacgacgaacgaaggcaccaagaccatcgccaataatctcaccagcaccgtgcaggtctttacggacttggagtaccagttaccgtacgtgctaggatccgctcaccagggatgtctgcctccgttcccggcggacgtcttcatggttcctcagtacggctatttaactttaaacaatggaagccaagccctgggacgttcctccttctactgtctggagtatttcccatcgcagatgccgagaaccggcaacaactttcagttcagctacaccttcgaggacgtgcctttccacagcagctacgcgcacagccagagcctggacaggctgatgaatcccctcatcgaccagtacctgtactacctggtcagaacgcaaacgactggaactggagggacgcagactctggcattcagccaagcgggtcctagctcaatggccaaccaggctagaaattgggtgcccggaccttgctaccggcagcagcgcgtctccacgacaaccaaccagaacaacaacagcaactttgcctggacgggagctgccaagtttaagctgaacggccgagactctctaatgaatccgggcgtggcaatggcttcccacaaggatgacgacgaccgcttcttcccttcgagcggggtcctgatttttggcaagcaaggagccgggaacgatggagtggattacagccaagtgctgattacagatgaggaagaaatcaaggctaccaaccccgtggccacagaagaatatggagcagtggccatcaacaaccaggccgccaatacgcaggcgcagaccggactcgtgcacaaccagggggtgattcccggcatggtgtggcagaatagagacgtgtacctgcagggtcccatctgggccaaaattcctcacacggacggcaactttcacccgtctcccctgatgggcggctttggactgaagcacccgcctcctcaaattctcatcaagaacacaccggttccagcggacccgccgcttaccttcaaccaggccaagctgaactctttcatcacgcagtacagcaccggacaggtcagcgtggaaatcgagtgggagctgcagaaagaaaacagcaaacgctggaatccagagattcaatacacttccaactactacaaatctacaaatgtggactttgctgtcaacacggaaggagtttatagcgagcctcgccccattggcacccgttacctcacccgcaacctgtaattacatgttaatcaataaaccggttaattcgtttcagttgaactttggtctctgcgaagggcgaattc

SEQ ID NO: 4785 - protein, 736 aa, Adeno-associated virus
MAADGYLPDWLEDNLSEGIREWWDLKPGAPKPKANQQKQDDGRGLVLPGYKYLGPFNGLDKGEPVNAADAAALEHDKAYDQQLKAGDNPYLRYNHADAEFQERLQEDTSFGGNLGRAVFQAKKRVLEPLGLVEEGAKTAPGKKRPVEQSPQEPDSSSGIGKTGQQPAKKRLNFGQTGDSESVPDPQPLGEPPAAPSGLGPNTMASGGGAPMADNNEGADGVGNSSGNWHCDSTWLGDRVITTSTRTWALPTYNNHLYKQISNGTSGGSTNDNTYFGYSTPWGYFDFNRFHCHFSPRDWQRLINNNWGFRPKRLNFKLFNIQVKEVTTNEGTKTIANNLTSTVQVFTDLEYQLPYVLGSAHQGCLPPFPADVFMVPQYGYLTLNNGSQALGRSSFYCLEYFPSQMPRTGNNFQFSYTFEDVPFHSSYAHSQSLDRLMNPLIDQYLYYLVRTQTTGTGGTQTLAFSQAGPSSMANQARNWVPGPCYRQQRVSTTTNQNNNSNFAWTGAAKFKLNGRDSLMNPGVAMASHKDDDDRFFPSSGVLIFGKQGAGNDGVDYSQVLITDEEEIKATNPVATEEYGAVAINNQAANTQAQTGLVHNQGVIPGMVWQNRDVYLQGPIWAKIPHTDGNFHPSPLMGGFGLKHPPPQILIKNTPVPADPPLTFNQAKLNSFITQYSTGQVSVEIEWELQKENSKRWNPEIQYTSNYYKSTNVDFAVNTEGVYSEPRPIGTRYLTRNL

SEQ ID NO: 4786 - DNA, 3122 bp, Adeno-associated virus
gaattcgccctttctacggctgcgtcaactggaccaatgagaactttcccttcaacgattgcgtcgacaagatggtgatctggtgggaggagggcaagatgacggccaaggtcgtggagtccgccaaggccattctcggcggcagcaaggtgcgtgtggaccaaaagtgcaagtcttccgcccagatcgatcccacccccgtgatcgtcacctccaacaccaacatgtgcgccgtgattgacgggaacagcaccaccttcgagcaccagcagccgttgcaggaccggatgttcaaatttgaactcacccgccgtctggagcatgactttggcaaggtgacgaagcaggaagtcaaagggttcttccgctgggcgcaggatcacgtgaccgaggtggcgcatgagttccacgtgcgagcccaagcgggcctgcccctcagtcgcggatccatcgacgtcagaccagaaagggtggagccaacaagagacccgcccccgatgacgcggatataagcggaaggagctccggtggactttgccgacaggtaccaaaacaaatgttctcgtcacgcgggcatgcttcagatgctgtttccctgcaagacatgcgagagaatgaatcagaatttcaacatttgcttcacgcacgggaccagagactgttcagaatgtttccccggcgtgtcagaatctcaaccggtcgtcagaaagaggacgtatcggaaactctgtgcgattcatcatctgctggggcgggctcccgagattgcttgctcggcctgcgatctggtcaacgtggacctggatgactgtgtttctgagcaataaatgacttaaaccaggtatggctgccgatggttatcttccagattggctcgaggacaacctctctgagggcattcgcgagtggtgggacttgaaacctggagccccgaaacccaaagccaaccagcaaaagcaggacgacggccggggtctggtgcttcctggctacaagtacctcggacccttcaacggactcgacaagggggagcccgtcaacgcggcggacgcagcggccctcgagcacgacaaagcctacgaccagcagctcaaagcgggtgacaatccgtacctgcggtataatcacgccgacgccgagtttcaggagcgtctgcaagaagatacgtcttttgggggcaacctcgggcgagcagtcttccaggccaagaagcgggttctcgaacctctcggtctggttgaggaaggcgctaagacggctcctggaaagaagagaccggtagagcagtcgccacaagagccagactcctcctcgggcatcggcaagacaggccagcagcccgctaaaaagagactcaattttggtcagactggcgactcagagtcagtccccgacccacaacctctcggagaacctccagcagccccctcaggtctgggacctaatacaatggcttcaggcggtggcgctccaatggcagacaataacgaaggcgccgacggagtgggtaattcctcgggaaattggcattgcgattccacatggctgggggacagagtcatcaccaccagcacccgaacctgggccctgcccacctacaacaaccacctctacaagcaaatctccaacggcacctcgggaggaagcaccaacgacaacacctattttggctacagcaccccctgggggtattttgacttcaacagattccactgtcacttttcaccacgtgactggcaacgactcatcaacaacaattggggattccggcccaaaagactcaacttcaagctgttcaacatccaggtcaaggaagtcacgacgaacgaaggcaccaagaccatcgccaataatctcaccagcaccgtgcaggtctttacggactcggagtaccagttaccgtacgtgctaggatccgctcaccagggatgtctgcctccgttcccggcggacgtcttcatggttcctcagtacggctatttaactttaaacaatggaagccaagccctgggacgttcctccttctactgtctggagtatttcccatcgcagatgctgagaaccggcaacaactttcagttcagctacaccttcgaggacgtgcctttccacagcagctacgcgcacagccagagcctggacaggctgatgaatcccctcatcgaccagtacctgtactacctggtcagaacgcaaacgactggaactggagggacgcagactctggcattcagccaagcgggtcctagctcaatggccaaccaggctagaaattgggtgcccggaccttgctaccggcagcagcgcgtctccacgacaaccaaccagaacaacaacagcaactttgcctggacgggagctgccaagtttaagctgaacggccgagactctctaatgaatccgggcgtggcaatggcttcccacaaggatgacgacgaccgcttcttcccttcgagcggggtcctgatttttggcaagcaaggagccgggaacgatggagtggattacagccaagtgctgattacagatgaggaagaaatcaaggctaccaaccccgtggccacagaagaatatggagcagtggccatcaacaaccaggccgccaatacgcaggcgcagaccggactcgtgcacaaccagggggtgattcccggcatggtgtggcagaatagagacgtgtacctgcagggtcccatctgggccaaaattcctcacacggacggcaactttcacccgtctcccctgatgggcggctttggactgaagcacccgcctcctcaaattctcatcaagaacacaccggttccagcggacccgccgcttaccttcaaccaggccaagctgaactctttcatcacgcagtacagcaccggacaggtcagcgtggaaatcgagtgggagctgcagaaagaaaacagcaaacgctggaatccagagattcaatacacttccaactactacaaatctacaaatgtggactttgctgtcaacacggagggggtttatagcgagcctcgccccattggcacccgttacctcacccgcaacctgtaattacatgttaatcaataaaccggttaattcgtttcagttgaactttggtctctgcgaagggcgaattc

SEQ ID NO: 4787 - protein, 736 aa, Adeno-associated virus
MAADGYLPDWLEDNLSEGIREWWDLKPGAPKPKANQQKQDDGRGLVLPGYKYLGPFNGLDKGEPVNAADAAALEHDKAYDQQLKAGDNPYLRYNHADAEFQERLQEDTSFGGNLGRAVFQAKKRVLEPLGLVEEGAKTAPGKKRPVEQSPQEPDSSSGIGKTGQQPAKKRLNFGQTGDSESVPDPQPLGEPPAAPSGLGPNTMASGGGAPMADNNEGADGVGNSSGNWHCDSTWLGDRVITTSTRTWALPTYNNHLYKQISNGTSGGSTNDNTYFGYSTPWGYFDFNRFHCHFSPRDWQRLINNNWGFRPKRLNFKLFNIQVKEVTTNEGTKTIANNLTSTVQVFTDSEYQLPYVLGSAHQGCLPPFPADVFMVPQYGYLTLNNGSQALGRSSFYCLEYFPSQMLRTGNNFQFSYTFEDVPFHSSYAHSQSLDRLMNPLIDQYLYYLVRTQTTGTGGTQTLAFSQAGPSSMANQARNWVPGPCYRQQRVSTTTNQNNNSNFAWTGAAKFKLNGRDSLMNPGVAMASHKDDDDRFFPSSGVLIFGKQGAGNDGVDYSQVLITDEEEIKATNPVATEEYGAVAINNQAANTQAQTGLVHNQGVIPGMVWQNRDVYLQGPIWAKIPHTDGNFHPSPLMGGFGLKHPPPQILIKNTPVPADPPLTFNQAKLNSFITQYSTGQVSVEIEWELQKENSKRWNPEIQYTSNYYKSTNVDFAVNTEGVYSEPRPIGTRYLTRNL

SEQ ID NO: 4788 - DNA, 2370 bp, Adeno-associated virus
gaattcgccctttctacggctgcgtcaactggaccaatgagaactttcccttcaacgattgcgtcgacaagatggtgatctggtgggaggagggcaagatgacggccaaggtcgtggagtccgccaaggccattctcggcggcagcaaggtgcgcgtggaccaaaagtgcaagtcgtccgcccagatcgaccccacccccgtgatcgtcacctccaacaccaacatgtgcgccgtgattgacgggaacagcaccaccttcgagcaccagcagccgttgcaggaccggatgttcaagttcgaactcacccgccgtctggagcacgactttggcaaggtgaccaagcaggaagtcaaagagttcttccgctgggcgcaggatcacgtgaccgaggtggcgcatgagttctacgtcagaaagggcggagccagcaaaagacccgcccccgatgacgcggatataagcgagcccaagcgggcctgcccctcagtcgcggatccatcgacgtcagacgcggaaggagctccggtggactttgccgacaggtaccaaaacaaatgttctcgtcacgcgggcatgcttcagacgctgtttccctgcaaaacgtgcgagagaatgaatcagaatttcaacatttgcttcacgcacggggtcagagactgctcagaatgtttccccggtgcatcagaatctcaaccggtcgtcagaaaaaaaacgtatcagaaactgtgtgccattcatcatctgctggggcgggcacccgagattgcttgctcggcctgcgatctggtcaacgtggacctggacgactgtgtttctgagcaataaatgacttaaaccaggtatggctgccgatggttatcttccagattggcttgaggacaacctctctgagggcattcgcgagtggtgggacctgaaacctggagccccgaaacccaaagccaaccagcaaaagcaggacgacggccggggtctggtgcttcctggctacaagtacctcggacccttcaacggactcgacaagggggagcccgtcaacgcggcggacgcagcggccctcgagcacgacaaggcctacgaccagcagctcaaagcgggtgacaatccgtacctgcggtataaccacgccgacgccgagtttcaggagcgtctgcaagaagatacgtcttttgggggcaacctcgggcgagcagtcttccaggccaagaagcgggttctcgaacctctcggtctggttgaggaaggcgctaagacggctcctggaaagaagagaccggtagagccatcacctcagcgttcccccgactcctccacgggcatcggcaagaaaggccaccagcccgcgagaaagagactgaactttgggcagactggcgactcggagtcagtccccgaccctcaaccaatcggagaaccaccagcaggcccctctggtctgggatctggtacaatggctgcaggcggtggcgctccaatggcagacaataacgaaggcgccgacggagtgggtagttcctcaggaaattggcattgcgattccacatggctgggcgacagagtcatcaccaccagcacccgaacctgggccctgcccacctacaacaaccatctctacaagcaaatctccaacgggacatcgggaggaagcactaacgacaacacctactttggctacagcaccccctgggggtattttgacttcaacagattccactgccacttctcaccacgtgactggcagcgactcatcaacaataactggggattccggcccaagagactcaacttcaagctcttcaacatccaggtcaaggaggtcacgcagaatgaaggcaccaagaccatcgccaataaccttaccagcacgattcaggtgtttacggactcggaataccagctcccgtacgtcctcggctctgcgcaccagggctgcctccctccgttcccggcggacgtcttcatgattcctcagtacgggtatctgaccctaaacaatggcagtcaggctgtgggccgttcctccttctactgcctggaatacttcccttctcaaatgctgaggacgggcaacaactttgaattcagctacaccttcgaggacgtgcctttccacagcagctacgcgcacagccagagcctggaccggctgatgaaccctctcatcgaccagtacctgtattacttatccagaactcagtccacaggaggaactcaaggtactcagcaattgttattttctcaagccgggcccgcaaacatgtyggctcaggccaagaactggctacctggaccgtgttaccgtcagcaacgagtttccacgacactgtcgcaaaacaacaacagcaattttgctggaccggtgccacca

SEQ ID NO: 4789 - protein, 738 aa, Adeno-associated virus; identical to SEQ ID NO: 4779

SEQ ID NO: 4790 - DNA, 2205 bp, Adeno-associated virus
atgactgacggttaccttccagattggctagaggacaacctctctgaaggcgttcgagagtggtgggcgctgcaacctggagcccctaaacccaaggcaaatcaacaacatcaggacaacgctcggggtcttgtgcttccgggttacaaatacctcggacccggcaacggactcgacaagggggaacccgtcaacgcagcggacgcggcagccctcgagcacgacaaggcctacgaccagcagctcaaggccggtgacaacccctacctcaagtacaaccacgccgacgcggagttccagcagcggcttcagggcgacacatcgtttgggggcaacctcggcagagcagtcttccaggccaaaaagagggttcttgaacctcttggtctggttgagcaagcgggtgagacggctcctggaaagaagagaccgttgattgaatccccccagcagcccgactcctccacgggtatcggcaaaaaaggcaagcagccggctaaaaagaagctcgttttcgaagacgaaactggagcaggcgacggaccccctgagggatcaacttccggagccatgtctgatgacagtgagatgcgtgcagcagctggcggagctgcagtcgagggcggacaaggtgccgatggagtgggtaatgcctcgggtgattggcattgcgattccacctggtctgagggccacgtcacgaccaccagcaccagaacctgggtcttgcccacctacaacaaccacctctacaagcgactcggagagagcctgcagtccaacacctacaacggattctccaccccctggggatactttgacttcaaccgcttccactgccacttctcaccacgtgactggcagcgactcatcaacaacaactggggcatgcgacccaaagccatgcgggtcaaaatcttcaacatccaggtcaaggaggtcacgacgtcgaacggcgagacaacggtggctaataaccttaccagcacggttcagatctttgcggactcgtcgtacgaactgccgtacgtgatggatgcgggtcaagagggcagcctgcctccttttcccaacgacgtctttatggtgccccagtacggctactgtggactggtgaccggcaacacttcgcagcaacagactgacagaaatgccttctactgcctggagtactttccttcgcagatgctgcggactggcaacaactttgaaattacgtacagttttgagaaggtgcctttccactcgatgtacgcgcacagccagagcctggaccggctgatgaaccctctcatcgaccagtacctgtggggactgcaatcgaccaccaccggaaccaccctgaatgccgggactgccaccaccaactttaccaagctgcggcctaccaacttttccaactttaaaaagaactggctgcccgggccttcaatcaagcagcagggcttctcaaagactgccaatcaaaactacaagatccctgccaccgggtcagacagtctcatcaaatacgagacgcacagcactctggacggaagatggagtgccctgacccccggacctccaatggccacggctggacctgcggacagcaagttcagcaacagccagctcatctttgcggggcctaaacagaacggcaacacggccaccgtacccgggactctgatcttcacctctgaggaggagctggcagccaccaacgccaccgatacggacatgtggggcaacctacctggcggtgaccagagcaacagcaacctgccgaccgtggacagactgacagccttgggagccgtgcctggaatggtctggcaaaacagagacatttactaccagggtcccatttgggccaagattcctcataccgatggacactttcacccctcaccgctgattggtgggtttgggctgaaacacccgcctcctcaaatttttatcaagaacaccccggtacctgcgaatcctgcaacgaccttcagctctactccggtaaactccttcattactcagtacagcactggccaggtgtcggtgcagattgactgggagatccagaaggagcggtccaaacgctggaaccccgaggtccagtttacctccaactacggacagcaaaactctctgttgtgggctcccgatgcggctgggaaatacactgagcctagggctatcggtacccgctacctcacccaccacctgtaa

SEQ ID NO: 4791 - protein, 734 aa, Adeno-associated virus
MTDGYLPDWLEDNLSEGVREWWALQPGAPKPKANQQHQDNARGLVLPGYKYLGPGNGLDKGEPVNAADAAALEHDKAYDQQLKAGDNPYLKYNHADAEFQQRLQGDTSFGGNLGRAVFQAKKRVLEPLGLVEQAGETAPGKKRPLIESPQQPDSSTGIGKKGKQPAKKKLVFEDETGAGDGPPEGSTSGAMSDDSEMRAAAGGAAVEGGQGADGVGNASGDWHCDSTWSEGHVTTTSTRTWVLPTYNNHLYKRLGESLQSNTYNGFSTPWGYFDFNRFHCHFSPRDWQRLINNNWGMRPKAMRVKIFNIQVKEVTTSNGETTVANNLTSTVQIFADSSYELPYVMDAGQEGSLPPFPNDVFMVPQYGYCGLVTGNTSQQQTDRNAFYCLEYFPSQMLRTGNNFEITYSFEKVPFHSMYAHSQSLDRLMNPLIDQYLWGLQSTTTGTTLNAGTATTNFTKLRPTNFSNFKKNWLPGPSIKQQGFSKTANQNYKIPATGSDSLIKYETHSTLDGRWSALTPGPPMATAGPADSKFSNSQLIFAGPKQNGNTATVPGTLIFTSEEELAATNATDTDMWGNLPGGDQSNSNLPTVDRLTALGAVPGMVWQNRDIYYQGPIWAKIPHTDGHFHPSPLIGGFGLKHPPPQIFIKNTPVPANPATTFSSTPVNSFITQYSTGQVSVQIDWEIQKERSKRWNPEVQFTSNYGQQNSLLWAPDAAGKYTEPRAIGTRYLTHHL

SEQ ID NO: 4792 - DNA, 3128 bp, Adeno-associated virus
gaattcgccctttctacggctgcgtcaactggaccaatgagaactttcccttcaacgattgcgtcgacaagatgttgatctggtgggaggagggcaagatgacggccaaggtcgtggagtccgccaaggccattctcggcggcagcaaagtgcgcgtggaccaaaagtgcaagccgtccgcccagatcgaccccacccccgtgatcgtcacctccaacaccaacatgtgcgccgtgattgacgggaacagcaccaccttcgagcaccagcagccgttgcgggaccggatgttcaagtttgaactcacccgccgtctggagcacgactttggcaaggtgacaaagcaggaagtcagagagttcttccgctgggcgcaggatcacgtgaccgaggtggcgcacgagttctacgtcagaaagggtggagccaacaagagacccgcccccgatgacgcggataaaagcgagcccaagcgggcctgcccctcagtcgcggatccatcgacgtcagacgcggaaggagctccggtggactttgccgacaggtaccaaaacaaatgttctcgtcacgcgggcatgcttcagatgctgtttccctgcaaaacatgcgagagaatgaatcagaatttcaacatttgcttcacgcacgggaccagagactgttcagaatgtttccccggcgtgtcagaatctcaaccggtcgtcagaaaaaagacgtatcggaaactctgtgcgattcatcatctgctggggcgggcacccgagattgcttgctcggcctgcgatctggtcaacgtggacctagatgactgtgtttctgagcaataaatgacttaaaccaggtatggctgccgatggttatcttccagattggctcgaggacaacctctctgagggcattcgcgagtggtgggacttgaaacctggagccccgaaacccaaagccaaccagcaaaagcaggacgacggccggggtctggtgcttcctggctacaagtacctcggacccttcaacggactcgacaagggggagcccgtcaacgcggcggacgcagcggccctcgagcacgacaaggcctacgaccagcagctcaaagcgggtgacaatccgtacctgcggtataaccacgccgacgccgagtttcaggagcgtctgcaagaagatacgtcttttgggggcaacctcgggcgagcagtcttccaggccaagaagcgggttctcgaacctctcggtctggttgaggaaggcgctaagacggctcctggaaagaagagaccggtagagccatcaccccagcgttctccagactcctctacgggcatcggcaagaaaggccagcagcccgcgaaaaagagactcaactttgggcagactggcgactcagagtcagtgcccgaccctcaaccaatcggagaaccccccgcaggcccctctggtctgggatctggtacaatggctgcaggcggtggcgctccaatggcagacaataacgaaggcgccgacggagtgggtagttcctcaggaaattggcattgcgattccacatggctgggcgacagagtcatcaccaccagcacccgaacctgggccctccccacctacaacaaccacctctacaagcaaatctccaacgggacttcgggaggaagcaccaacgacaacacctacttcggctacagcaccccctgggggtattttgactttaacagattccactgccacttctcaccacgtgactggcagcgactcatcaacaacaactggggattccggcccaagagactcaacttcaagctcttcaacatccaggtcaaggaggtcacgcagaatgaaggcaccaagaccatcgccaataaccttaccagcacgattcaggtctttacggactcggaataccagctcccgtacgtcctcggctctgcgcaccagggctgcctgcctccgttcccggcggacgtcttcatgattcctcagtacgggtacctgactctgaacaatggcagtcaggccgtgggccgttcctccttctactgcctggagtactttccttctcaaatgctgagaacgggcaacaactttgagttcagctaccagtttgaggacgtgccttttcacagcagctacgcgcacagccaaagcctggaccggctgatgaaccccctcatcgaccagtacctgtactacctgtctcggactcagtccacgggaggtaccgcaggaactcagcagttgctattttctcaggccgggcctaataacatgtcggctcaggccaaaaactggctacccgggccctgctaccggcagcaacgcgtctccacgacactgtcgcaaaataacaacagcaactgtaaatcccggtgtcgctatggcaacccacaaggacgacgaagagcgattttgcctggaccggtgccaccaagtatcatctgaatggcagagactctctgttttccgtccagcggagtcttaatgtttgggaaacagggagctggaaaagacaacgtggactatagcagcgttatgctaaccagtgaggaagaaattaaaaccaccaacccagtggccacggaacagtacggcgtggtggccgataacctgcaacagcaaaacgccgctcctattgtaggggccgtcaacagtcaaggagccttacctggcatggtctggcagaaccgggacgtgtacctgcagggtcctatctgggccaagattcctcacacggacggaaactttcatccctcgccgctgatgggaggctttggactgaaacacccgcctcctcagatcctgattaagaatacacctgttcccgcggatcctccaactaccttcagtcaagctaagctggcgtcgttcatcacgcagtacagcaccggacaggtcagcgtggaaattgaatgggagctgcagaaagaaaacagcaaacgctggaacccagagattcaatacacttccaactactacaaatctacaaatgtggacttcgctgttaacacagatggcacttattctgagcctcgccccattggcacccgttacctcacccgtaatctgtaattgctcgttaatcaataaaccggttgattcgtttcagttgaactttggtctctgcgaagggcgaattc

SEQ ID NO: 4793 - protein, 738 aa, Adeno-associated virus
MAADGYLPDWLEDNLSEGIREWWDLKPGAPKPKANQQKQDDGRGLVLPGYKYLGPFNGLDKGEPVNAADAAALEHDKAYDQQLKAGDNPYLRYNHADAEFQERLQEDTSFGGNLGRAVFQAKKRVLEPLGLVEEGAKTAPGKKRPVEPSPQRSPDSSTGIGKKGQQPAKKRLNFGQTGDSESVPDPQPIGEPPAGPSGLGSGTMAAGGGAPMADNNEGADGVGSSSGNWHCDSTWLGDRVITTSTRTWALPTYNNHLYKQISNGTSGGSTNDNTYFGYSTPWGYFDFNRFHCHFSPRDWQRLINNNWGFRPKRLNFKLFNIQVKEVTQNEGTKTIANNLTSTIQVFTDSEYQLPYVLGSAHQGCLPPFPADVFMIPQYGYLTLNNGSQAVGRSSFYCLEYFPSQMLRTGNNFEFSYQFEDVPFHSSYAHSQSLDRLMNPLIDQYLYYLSRTQSTGGTAGTQQLLFSQAGPNNMSAQAKNWLPGPCYRQQRVSTTLSQNNNSNFAWTGATKYHLNGRDSLVNPGVAMATHKDDEERFFPSSGVLMFGKQGAGKDNVDYSSVMLTSEEEIKTTNPVATEQYGVVADNLQQQNAAPIVGAVNSQGALPGMVWQNRDVYLQGPIWAKIPHTDGNFHPSPLMGGFGLKHPPPQILIKNTPVPADPPTTFSQAKLASFITQYSTGQVSVEIEWELQKENSKRWNPEIQYTSNYYKSTNVDFAVNTDGTYSEPRPIGTRYLTRNL

SEQ ID NO: 4794 - DNA, 3129 bp, Adeno-associated virus
gaattcgccctttctacggctgcgtcaactggaccaatgagaactttcccttcaacgattgcgtcgacaagatggtgatctggtgggaggagggcaagatgacggccaaggtcgtggagtccgccaaggccattctcggcggcagcaaagtgcgcgtggaccaaaagtgcaagtcgtccgcccagatcgaccccacccccgtgatcgtcacctccaacaccaacatgtgcgccgtgattgacgggaacagcaccaccttcgagcaccagcagccgttgcaggaccggatgttcaagtttgaactcacccgccgtctggagcacgactttggcaaggtgacaaagcaggaagtcagagagttcttccgctgggcgcaggatcacgtgaccgaggtggcgcacgagttctacgtcagaaagggtggagccaacaagagacccgcccccgatgacgcggataaaagcgagcccaagcgggcctgcccctcagtcgcggatccatcgacgtcagacgcggaaggagctccggtggactttgccgacaggtaccaaaacaaatgttctcgtcacgcgggcatgcttcagatgctgtttccctgcaaaacatgcgagagaatgaatcagaatttcaacatttgcttcacgcacgggaccagagactgttcagaatgtttccccggcgtgtcagaatctcaaccggtcgtcagaaaaaagacgtatcggaaactctgtgcgattcatcatctgctgggggcgggcacccgagattgcttgctcggcctgcgatctggtcaacgtggacctagatgactgtgtttctgagcaataaatgacttaaaccaggtatggctgccgatggttatcttccagattggctcgaggacaacctctctgagggcattcgcgagtggtgggacttgaaacctggagccccgaaacccaaagccaaccagcaaaagcaggacgacggccggggtctggtgcttcctggctacaagtacctcggacccttcaacggactcgacaagggggagcccgtcaacgcggcggacgcagcggccctcgagcacgacaaggcctacgaccagcagctcaaagcgggtgacaatccgtacctgcggtataaccacgccgacgccgagtttcaggagcgtctgcaagaagatacgtcttttgggggcaacctcgggcgagcagtcttccaggccaagaagcgggttctcgaacctctcggtctggttgaggaaggcgctaagacggctcctggaaagaagagaccggtagagccatcaccccagcgttctccagactcctctacgggcatcggcaagaaaggccagcagcccgcgaaaaagagactcaactttgggcagactggcgactcagagtcagtgcccgaccctcaaccaatcggagaaccccccgcaggcccctctggtctgggatctggtacaatggctgcaggcggtggcgctccaatggcagacaataacgaaggcgccgacggagtgggtagttcctcaggaaattggcattgcgattccacatggctgggcgacagagtcatcaccaccagcacccgaacctgggccctccccacctacaacaaccacctctacaagcaaatctccaacgggacttcgggaggaagcaccaacgacaacacctacttcggctacagcaccccctgggggtattttgactttaacagattccactgccacttctcaccacgtgactggcagcgactcatcaacaacaactggggattccggcccaagagactcaacttcaagctcttcaacatccaggtcaaggaggtcacgcagaatgaaggcaccaagaccatcgccaataaccttaccagcacgattcaggtctttacggactcggaataccagctcccgtacgtcctcggctctgcgcaccagggctgcctgcctccgttcccggcggacgtcttcatgattcctcagtacgggtacctgactctgaacaatggcagtcaggccgtgggccgttcctccttctactgcctggagtactttccttctcaaatgctgagaacgggcaacaactttgagttcagctaccagtttgaggacgtgccttttcacagcagctacgcgcacagccaaagcctggaccggctgatgaaccccctcatcgaccagtacctgtactacctgtctcggactcagtccacgggaggtaccgcaggaactcagcagttgctattttctcaggccgggcctaataacatgtcggctcaggccaaaaactggctacccgggccctgctaccggcagcaacgcgtctccacgacactgtcgcaaaataacaacagcaactttgcctggaccggtgccaccaagtatcatctgaatggcagagactctctggtaaatcccggtgtcgctatggcaacccacaaggacgacgaagagcgattttttccgtccagcggagtcttaatgtttgggaaacagggagctggaaaagacaacgtggactatagcagcgttatgctaaccagtgaggaagaaattaaaaccaccaacccagtggccacagaacagtacggcgtggtggccgataacctgcaacagcaaaacgccgctcctattgtaggggccgtcaacagtcaaggagccttacctggcatggtctggcagaaccgggacgtgtacctgcagggtcctatctgggccaagattcctcacacggacggaaactttcatccctcgccgctgatgggaggctttggactgaaacacccgcctcctcagatcctgattaagaatacacctgttcccgcggatcctccaactaccttcagtcaagctaagctggcgtcgttcatcacgcagtacagcaccggacaggtcagcgtggaaattgaatgggagctgcagaaagaaaacagcaaacgctggaacccagagattcaatacacttccaactactacaaatctacaaatgtggactttgctgttaacacagatggcacttattctgagcctcgccccatcggcacccgttacctcacccgtaatctgtaattgcttgttaatcaataaaccggttgattcgtttcagttgaactttggtctctgcgaagggcgaattc

SEQ ID NO: 4795 - DNA, 3128 bp, Adeno-associated virus
gaattcgccctttctacggctgcgtcaactggaccaatgagaactttcccttcaacgattgcgtcgacaagatggtgatctggtgggaggagggcaagatgacggccaaggtcgtggagtccgccaaggccattctcggcggcagcaaagtgcgcgtggaccaaaagtgcaagtcgtccgcccagatcgaccccacccccgtgatcgtcacctccaacaccaacatgtgcgccgtgattgacgggaacagcaccaccttcgagcaccagcagccgttgcaggaccggatgttcaagtttgaactcacccgccgtctggagcacgactttggcaaggtgacaaagcaggaagtcagagagttcttccgctgggcgcaggatcacgtgaccgaggtggcgcacgagttctacgtcagaaagggtggagccaacaagagacccgcccccgatgacgcggataaaagcgagcccaagcgggcctgcccctcagtcgcggatccatcgacgtcagacgcggaaggagctccggtggactttgccgacaggtaccaaaacaaatgttctcgtcacgcgggcatgcttcagatgctgtttccctgcaaaacatgcgagagaatgaatcagaatttcaacatttgcttcacgcacgggaccagagactgttcagaatgtttccccggcgtgtcagaatctcaaccggttgtcagaaaaaagacgtatcggaaactctgtgcgattcatcatctgctggggcgggcacccgagattgcttgctcggcctgcgatctggtcaacgtggacctagatgactgtgtttctgagcaataaatgacttaaaccaggtatggctgccgatggttatcttccagattggctcgaggacaacctctctgagggcattcgcgagtggtgggacttgaaacctggagccccgaaacccaaagccaaccagcaaaagcaggacgacggccggggtctggtgcttcctggctacaagtacctcggacccttcaacggactcgacaagggggagcccgtcaacgcggcggacgcagcggccctcgagcacgacaaggcctacgaccagcagctcaaagcgggtgacaatccgtacctgcggtataaccacgccgacgccgagtttcaggagcgtctgcaagaagatacgtcttttgggggcaacctcgggcgagcagtcttccaggccaagaagcgggttctcgaacctctcggtctggttgaggaaggcgctaagacggctcctggaaagaagagaccggtagagccatcaccccagcgttctccagactcctctacgggcatcggcaagaaaggccagcagcccgcgaaaaagagactcaactttgggcagactggcgactcagagtcagtgcccgaccctcaaccaatcggagaaccccccgcaggcccctctggtctgggatctggtacaatggctgcaggcggtggcgctccaatggcagacaataacgaaggcgccgacggagtgggtagttcctcaggaaattggcattgcgattccacatggctgggcgacagagtcatcaccaccagcacccgaacctgggccctccccacctacaacaaccacctctacaagcaaatctccaacgggacttcgggaggaagcaccaacgacaacacctacttcggctacagcaccccctgggggtattttgactttaacagattccactgccacttctcaccacgtgactggcagcgactcatcaacaacaactggggattccggcccaagagacccaacttcaagctcttcaacatccaggtcaaggaggtcacgcagaatgaaggcaccaagaccatcgccaataaccttaccagcacgattcaggtctttacggactcggaataccagctcccgtacgtcctcggctctgcgcaccagggctgcctgcctccgttcccggcggacgtcttcatgattcctcagtacgggtacctgactctgaacaatggcagtcaggccgtgggccgttcctccttctactgcctggagtactttccttctcaaatgctgagaacgggcaacaactttgagttcagctaccagtttgaggacgtgccttttcacagcagctacgcgcacagccaaagcctggaccggctgatgaaccccctcatcgaccagtacctgtactacctgtctcggactcagtccacgggaggtaccgcaggaactcagcagttgctattttctcaggccgggcctaataacatgtcggctcaggccaaaaactggctacccgggccctgctaccggcagcaacgcgtctccacgacactgtcgcaaaataacaacagcaactttgcctggaccggtgccaccaagtatcatctgaatggcagagactctctggtaaatcccggtgtcgctatggcaacccacaaggacgacgaagagcgattttttccgtccagcggagtcttaatgtttgggaaacagggagctggaaaagacaacgtggactatagcagcgttatgctaaccagtgaggaagaaattaaaaccaccaacccagtggccacagaacagtacggcgtggtggccgataacctgcaacagcaaaacgccgctcctattgtaggggccgtcaacagtcaaggagccttacctggcatggtctggcagaaccgggacgtgtacctgcagggtcctatctgggccaagattcctcacacggacggaaactttcatccctcgccgctgatgggaggctttggactgaaacacccgcctcctcagatcctgattaagaatacacctgttcccgcggatcctccaactaccttcagtcaagctaagctggcgtcgttcatcacgcagtacagcaccggacaggtcagcgtggaaattgaatgggagctgcagaaagaaaacagcaaacgctggaacccagagattcaatacacttccaactactacaaatctacaaatgtggactttgctgttaacacagatggcacttattctgagcctcgccccattggcacccgttacctcacccgtaatctgtaattgcttgttaatcaataaaccggttgattcgtttcagttgaactttggtctctgcgaagggcgaattc

SEQ ID NO: 4796 - protein, 738 aa, Adeno-associated virus
MAADGYLPDWLEDNLSEGIREWWDLKPGAPKPKANQQKQDDGRGLVLPGYKYLGPFNGLDKGEPVNAADAAALEHDKAYDQQLKAGDNPYLRYNHADAEFQERLQEDTSFGGNLGRAVFQAKKRVLEPLGLVEEGAKTAPGKKRPVEPSPQRSPDSSTGIGKKGQQPAKKRLNFGQTGDSESVPDPQPIGEPPAGPSGLGSGTMAAGGGAPMADNNEGADGVGSSSGNWHCDSTWLGDRVITTSTRTWALPTYNNHLYKQISNGTSGGSTNDNTYFGYSTPWGYFDFNRFHCHFSPRDWQRLINNNWGFRPKRPNFKLFNIQVKEVTQNEGTKTIANNLTSTIQVFTDSEYQLPYVLGSAHQGCLPPFPADVFMIPQYGYLTLNNGSQAVGRSSFYCLEYFPSQMLRTGNNFEFSYQFEDVPFHSSYAHSQSLDRLMNPLIDQYLYYLSRTQSTGGTAGTQQLLFSQAGPNNMSAQAKNWLPGPCYRQQRVSTTLSQNNNSNFAWTGATKYHLNGRDSLVNPGVAMATHKDDEERFFPSSGVLMFGKQGAGKDNVDYSSVMLTSEEEIKTTNPVATEQYGVVADNLQQQNAAPIVGAVNSQGALPGMVWQNRDVYLQGPIWAKIPHTDGNFHPSPLMGGFGLKHPPPQILIKNTPVPADPPTTFSQAKLASFITQYSTGQVSVEIEWELQKENSKRWNPEIQYTSNYYKSTNVDFAVNTDGTYSEPRPIGTRYLTRNL

SEQ ID NO: 4797 - protein, 738 aa, Adeno-associated virus
MAADGYLPDWLEDNLSEGIREWWDLKPGAPKPKANQQKQDDGRGLVLPGYKYLGPFNGLDKGEPVNAADAAALEHDKAYDQQLKAGDNPYLRYNHADAEFQERLQEDTSFGGNLGRAVFQAKKRVLEPLGLVEEAAKTAPGKKRPVEPSPQRSPDSSTGIGKKGQQPAKKRLNFGQTGDSESVPDPQPIGEPPAGPSGLGSGTMAAGGGAPMADNNEGADGVGSSSGNWHCDSTWLGDRVITTSTRTWALPTYNNHLYKQISNGTSGGSTNDNTYFGYSTPWGYFDFNRFHCHFSPRDWQRLINNNWGFRPKRLSFKLFNIQVKEVTQNEGTKTIANNLTSTIQVFTDSEYQLPYVLGSAHQGCLPPFPADVFMIPQYGYLTLNNGSQAVGRSSFYCLEYFPSQMLRTGNNFEFSYTFEDVPFHSSYAHSQSLDRLMNPLIDQYLYYLSRTQSTGGTQGTQQLLFSQAGPANMSAQAKNWLPGPCYRQQRVSTTLSQNNNSNFAWTGATKYHLNGRDSLVNPGVAMATHKDDEERFFPSSGVLMFGKQGAGRDNVDYSSVMLTSEEEIKTTNPVATEQYGVVADNLQQTNTGPIVGNVNSQGALPGMVWQNRDVYLQGPIWAKIPHTDGNFHPSPLMGGFGLKHPPPQILIKNTPVPADPPTTFSQAKLASFITQYSTGQVSVEIEWELQKENSKRWNPEIQYTSNYYKSTNVDFAVNTEGTYSEPRPIGTRYLTRNL

SEQ ID NO: 4798 - protein, 720 aa, Adeno-associated virus
MSFVDHPPDWLEEVGEGLREFLGLEAGPPKPKPNQQHQDQARGLVLPGYNYLGPGNGLDRGEPVNRADEVAREHDISYNEQLEAGDNPYLKYNHADAEFQEKLADDTSFGGNLGKAVFQAKKRVLEPFGLVEEGAKTAPTGKRIDDHFPKRKKARTEEDSKPSTSSDAEAGPSGSQQLQIPAQPASSLGADTMSAGGGGPLGDNNQGADGVGNASGDWHCDSTWMGDRVVTKSTRTWVLPSYNNHQYREIKSGSVDGSNANAYFGYSTPWGYFDFNRFHSHWSPRDWQRLINNYWGFRPRSLRVKIFNIQVKEVTVQDSTTTIANNLTSTVQVFTDDDYQLPYVVGNGTEGCLPAFPPQVFTLPQYGYATLNRDNTENPTERSSFFCLEYFPSKMLRTGNNFEFTYNFEEVPFHSSFAPSQNLFKLANPLVDQYLYRFVSTNNTGGVQFNKNLAGRYANTYKNWFPGPMGRTQGWNLGSGVNRASVSAFATTNRMELEGASYQVPPQPNGMTNNLQGSNTYALENTMIFNSQPANPGTTATYLEGNMLITSESETQPVNRVAYNVGGQMATNNQSSTTAPATGTYNLQEIVPGSVWMERDVYLQGPIWAKIPETGAHFHPSPAMGGFGLKHPPPMMLIKNTPVPGNITSFSDVPVSSFITQYSTGQVTVEMEWELKKENSKRWNPEIQYTNNYNDPQFVDFAPDSTGEYRTTRPIGTRYL

SEQ ID NO: 4799 - protein, 736 aa, Adeno-associated virus
MAADGYLPDWLEDNLSEGIREWWDLKPGAPKPKANQQKQDDGRGLVLPGYKYLGPFNGLDKGEPVNAADAAALEHDKAYDQQLKAGDNPYLRYNHADAEFQERLQEDTSFGGNLGRAVFQAKKRVLEPFGLVEEGAKTAPGKKRPVEQSPQEPDSSSGIGKTGQQPAKKRLNFGQTGDSESVPDPQPLGEPPATPAAVGPTTMASGGGAPMADNNEGADGVGNASGNWHCDSTWLGDRVITTSTRTWALPTYNNHLYKQISSASTGASNDNHYFGYSTPWGYFDFNRFHCHFSPRDWQRLINNNWGFRPKRLNFKLFNIQVKEVTTNDGVTTIANNLTSTVQVFSDSEYQLPYVLGSAHQGCLPPFPADVFMIPQYGYLTLNNGSQAVGRSSFYCLEYFPSQMLRTGNNFTFSYTFEDVPFHSSYAHSQSLDRLMNPLIDQYLYYLNRTQNQSGSAQNKDLLFSRGSPAGMSVQPKNWLPGPCYRQQRVSKTKTDNNNSNFTWTGASKYNLNGRESIINPGTAMASHKDDKDKFFPMSGVMIFGKESAGASNTALDNVMITDEEEIKATNPVATERFGTVAVNLQSSSTDPATGDVHVMGALPGMVWQDRDVYLQGPIWAKIPHTDGHFHPSPLMGGFGLKHPPPQILIKNTPVPANPPAEFSATKFASFITQYSTGQVSVEIEWELQKENSKRWNPEVQYTSNYAKSANVDFTVDNNGLYTEPRPIGTRYLTRPL

SEQ ID NO: 4800 - protein, 736 aa, Adeno-associated virus
MAADGYLPDWLEDNLSEGIREWWDLKPGAPKPKANQQKQDDGRGLVLPGYKYLGPFNGLDKGEPVNAADAAALEHDKAYDQQLKAGDNPYLRYNHADAEFQERLQEDTSFGGNLGRAVFQAKKRVLEPFGLVEEGAKTAPGKKRPVEQSPQEPDSSSGIGKTGQQPAKKRLNFGQTGDSESVPDPQPLGEPPATPAAVGPTTMASGGGAPMADNNEGADGVGNASGNWHCDSTWLGDRVITTSTRTWALPTYNNHLYKQISSASTGASNDNHYFGYSTPWGYFDFNRFHCHFSPRDWQRLINNNWGFRPKRLNFKLFNIQVKEVTTNDGVTTIANNLTSTVQVFSDSEYQLPYVLGSAHQGCLPPFPADVFMIPQYGYLTLNNGSQAVGRSSFYCLEYFPSQMLRTGNNFTFSYTFEDVPFHSSYAHSQSLDRLMNPLIDQYLYYLNRTQNQSGSAQNKDLLFSRGSPAGMSVQPKNWLPGPCYRQQRVSKTKTDNNNSNFTWTGASKYNLNGRESIINPGTAMASHKDDEDKFFPMSGVMIFGKESAGASNTALDNVMITDEEEIKATNPVATERFGTVAVNLQSSSTDPATGDVHVMGALPGMVWQDRDVYLQGPIWAKIPHTDGHFHPSPLMGGFGLKHPPPQILIKNTPVPANPPAEFSATKFASFITQYSTGQVSVEIEWELQKENSKRWNPEVQYTSNYAKSANVDFTVDNNGLYTEPRPIGTRYLTRPL

SEQ ID NO: 4801 - protein, 736 aa, Adeno-associated virus
MAADGYLPDWLEDNLSEGIREWWDLKPGAPKPKANQQKQDDGRGLVLPGYKYLGPFNGLDKGEPVNAADAAALEHDKAYDQQLKAGDNPYLRYNHADAEFQERLQEDTSFGGNLGRAVFQAKKRVLEPLGLVEEGAKTAPGKKRPVEQSPQEPDSSSGIGKTGQQPAKKRLNFGQTGDSESVPDPQPLGEPPATPAAVGPTTMASGGGAPMADNNEGADGVGNASGNWHCDSTWLGDRVITTSTRTWALPTYNNHLYKQISSASTGASNDNHYFGYSTPWGYFDFNRFHCHFSPRDWQRLINNNWGFRPKRLNFKLFNIQVKEVTTNDGVTTIANNLTSTVQVFSDSEYQLPYVLGSAHQGCLPPFPADVFMIPQYGYLTLNNGSQAVGRSSFYCLEYFPSQMLRTGNNFTFSYTFEDVPFHSSYAHSQSLDRLMNPLIDQYLYYLNRTQNQSGSAQNKDLLFSRGSPAGMSVQPKNWLPGPCYRQQRVSKTKTDNNNSNFTWTGASKYNLNGRESIINPGTAMASHKDDEDKFFPMSGVMIFGKESAGASNTALDNVMITDEEEIKATNPVATERFGTVAVNLQSSSTDPATGDVHVMGALPGMVWQDRDVYLQGPIWAKIPHTDGHFHPSPLMGGFGLKHPPPQILIKNTPVPANPPAEFSATKFASFITQYSTGQVSVEIEWELQKENSKRWNPEVQYTSNYAKSANVDFTVDNNGLYTEPRPIGTRYLTRPL

SEQ ID NO: 4802 - protein, 736 aa, Adeno-associated virus
MAADGYLPDWLEDNLSEGIREWWDLKPGAPKPKANQQKQDDGRGLVLPGYKYLGPFNGLDKGEPVNAADAAALEHDKAYDQQLKAGDNPYLRYNHADAEFQERLQEDTSFGGNLGRAVFQAKKRVLEPLGLVEEGAKTAPGKKRPVEQSPQEPDSSSGIGKTGQQPAKKRLNFGQTGDSESVPDPQPLGEPPATPAAVGPTTMASGGGAPMADNNEGADGVGNASGNWHCDSTWLGDRVITTSTRTWALPTYNNHLYKQISSASTGASNDNHYFGYSTPWGYFDFNRFHCHFSPRDWQRLINNNWGFRPKRLNFKLFNIQVKEVTTNDGVTTIANNLTSTVQVFSDSEYQLPYVLGSAHQGCLPPFPADVFMIPQYGYLTLNNGSQAVGRSSFYCLEYFPSQMLRTGNNFTFSYTFEDVPFHSSYAHSQSLDRLMNPLIDQYLYYLNRTQNQSGSAQNKDLLFSRGSPAGMSVQPKNWLPGPCYRQQRVSKTKTDNNNSNFTWTGASKYNLNGRESIINPGTAMASHKDDKDKFFPMSGVMIFGKESAGASNTALDNVMITDEEEIKATNPVATERFGTVAVNLQSSSTDPATGDVHVMGALPGMVWQDRDVYLQGPIWAKIPHTDGHFHPSPLMGGFGLKHPPPQILIKNTPVPANPPAEFSATKFASFITQYSTGQVSVEIEWELQKENSKRWNPEVQYTSNYAKSANVDFTVDNNGLYTEPRPIGTRYLTRPL

SEQ ID NO: 4803 - protein, 728 aa, Adeno-associated virus
MAADGYLPDWLEGNLSEGIREWWDLKPGAPKPKANQQKQDDGRGLVLPGYRYLGPFNGLDKGEPVNEADAAALEHDKAYDKQLEQGDNPYLKYNHADAEFQERLQEDTSFGGNLGRAVFQAKKRVLEPLGLVEEGAKTAPGKKRPIESPDSSTGIGKNGQPPAKKKLNFGQTGDSESVPDPQPLGEPPAAPSGLGSGTMAAGGGAPMADNNEGADGVGNASGNWHCDSTWLGDRVITTSTRTWALPTYNNHLYKQISSQSGATNDNHFFGYSTPWGYFDFNRFHCHFSPRDWQRLINNNWGFRPRKLRFKLFNIQVKEVTTNDGVTTIANNLTSTIQVFSDSEYQLPYVLGSAHQGCLPPFPADVFMIPQYGYLTLNNGSQSVGRSSFYCLEYFPSQMLRTGDNFEFSYTFEEVPFHSSYAHSQSLDRLMNPLIDQYLYYLARTQSTTGSTRELQFHQAGPNTMAEQSKNWLPGPCYRQQRLSKNIDSNNNSNFAWTGATKYHLNGRNSLTNPGVAMATNKDDEDQFFPINGVLVFGKTGAANKTTLENVLMTSEEEIKTTNPVATEEYGVVSSNLQSSTAGPQTQTVNSQGALPGMVWQNRDVYLQGPIWAKIPHTDGNFHPSPLMGGFGLKHPPPQILIKNTPVPANPPEVFTPAKFASFITQYSTGQVSVEIEWELQKENSKRWNPEIQYTSNYAKSNNVEFAVNNEGVYTEPRPIGTRYLTRNL

SEQ ID NO: 4804 - DNA, 2211 bp, Adeno-associated virus
atggctgccgatggttatcttccagattggctcgaggacaaccttagtgaaggaattcgcgagtggtgggctttgaaacctggagcccctcaacccaaggcaaatcaacaacatcaagacaacgctcgaggtcttgtgcttccgggttacaaataccttggacccggcaacggactcgacaagggggagccggtcaacgcagcagacgcggcggccctcgagcacgacaaggcctacgaccagcagctcaaggccggagacaacccgtacctcaagtacaaccacgccgacgccgagttccaggagcggctcaaagaagatacgtcttttgggggcaacctcgggcgagcagtcttccaggccaaaaagaggcttcttgaacctcttggtctggttgaggaagcggctaagacggctcctggaaagaagaggcctgtagagcagtctcctcaggaaccggactcctccgcgggtattggcaaatcgggtgcacagcccgctaaaaagagactcaatttcggtcagactggcgacacagagtcagtcccagaccctcaaccaatcggagaacctcccgcagccccctcaggtgtgggatctcttacaatggcttcaggtggtggcgcaccagtggcagacaataacgaaggtgccgatggagtgggtagttcctcgggaaattggcattgcgattcccaatggctgggggacagagtcatcaccaccagcacccgaacctgggccctgcccacctacaacaatcacctctacaagcaaatctccaacagcacatctggaggatcttcaaatgacaacgcctacttcggctacagcaccccctgggggtattttgacttcaacagattccactgccacttctcaccacgtgactggcagcgactcatcaacaacaactggggattccggcctaagcgactcaacttcaagctcttcaacattcaggtcaaagaggttacggacaacaatggagtcaagaccatcgccaataaccttaccagcacggtccaggtcttcacggactcagactatcagctcccgtacgtgctcgggtcggctcacgagggctgcctcccgccgttcccagcggacgttttcatgattcctcagtacgggtatctgacgcttaatgatggaagccaggccgtgggtcgttcgtccttttactgcctggaatatttcccgtcgcaaatgctaagaacgggtaacaacttccagttcagctacgagtttgagaacgtacctttccatagcagctacgctcacagccaaagcctggaccgactaatgaatccactcatcgaccaatacttgtactatctctcaaagactattaacggttctggacagaatcaacaaacgctaaaattcagtgtggccggacccagcaacatggctgtccagggaagaaactacatacctggacccagctaccgacaacaacgtgtctcaaccactgtgactcaaaacaacaacagcgaatttgcttggcctggagcttcttcttgggctctcaatggacgtaatagcttgatgaatcctggacctgctatggccagccacaaagaaggagaggaccgtttctttcctttgtctggatctttaatttttggcaaacaaggaactggaagagacaacgtggatgcggacaaagtcatgataaccaacgaagaagaaattaaaactactaacccggtagcaacggagtcctatggacaagtggccacaaaccaccagagtgcccaagcacaggcgcagaccggctgggttcaaaaccaaggaatacttccgggtatggtttggcaggacagagatgtgtacctgcaaggacccatttgggccaaaattcctcacacggacggcaactttcacccttctccgctgatgggagggtttggaatgaagcacccgcctcctcagatcctcatcaaaaacacacctgtacctgcggatcctccaacggccttcaacaaggacaagctgaactctttcatcacccagtattctactggccaagtcagcgtggagatcgagtgggagctgcagaaggaaaacagcaagcgctggaacccggagatccagtacacttccaactattacaagtctaataatgttgaatttgctgttaatactgaaggtgtatatagtgaaccccgccccattggcaccagatacctgactcgtaatctgtaa

SEQ ID NO: 4805 - protein, 736 aa, Adeno-associated virus
MAADGYLPDWLEDNLSEGIREWWALKPGAPQPKANQQHQDNARGLVLPGYKYLGPGNGLDKGEPVNAADAAALEHDKAYDQQLKAGDNPYLKYNHADAEFQERLKEDTSFGGNLGRAVFQAKKRLLEPLGLVEEAAKTAPGKKRPVEQSPQEPDSSAGIGKSGAQPAKKRLNFGQTGDTESVPDPQPIGEPPAAPSGVGSLTMASGGGAPVADNNEGADGVGSSSGNWHCDSQWLGDRVITTSTRTWALPTYNNHLYKQISNSTSGGSSNDNAYFGYSTPWGYFDFNRFHCHFSPRDWQRLINNNWGFRPKRLNFKLFNIQVKEVTDNNGVKTIANNLTSTVQVFTDSDYQLPYVLGSAHEGCLPPFPADVFMIPQYGYLTLNDGSQAVGRSSFYCLEYFPSQMLRTGNNFQFSYEFENVPFHSSYAHSQSLDRLMNPLIDQYLYYLSKTINGSGQNQQTLKFSVAGPSNMAVQGRNYIPGPSYRQQRVSTTVTQNNNSEFAWPGASSWALNGRNSLMNPGPAMASHKEGEDRFFPLSGSLIFGKQGTGRDNVDADKVMITNEEEIKTTNPVATESYGQVATNHQSAQAQAQTGWVQNQGILPGMVWQDRDVYLQGPIWAKIPHTDGNFHPSPLMGGFGMKHPPPQILIKNTPVPADPPTAFNKDKLNSFITQYSTGQVSVEIEWELQKENSKRWNPEIQYTSNYYKSNNVEFAVNTEGVYSEPRPIGTRYLTRNL

SEQ ID NO: 4806 - DNA, 2460 bp, Adeno-associated virus
ggtaattcctccggaaattggcattgcgattccacatggctgggcgaccgagtcattaccaccagcacccggacttgggccctgcccacctacaacaaccacctctacaagcaaatctccagccaatcgggtgccaccaacgacaaccactacttcggctacagcaccccttgggggtattttgatttcaacagattccactgccatttctcaccacgtgactggcagcgactcatcaacaacaactggggattcatggctgccgatggttatcttccagattggctcgaggacactctctctgaaggaatcagacagtggtggaagctcaaacctggcccaccaccgccgaaacctaaccaacaacaccgggacgacagtaggggtcttgtgcttcctgggtacaagtacctcggacccttcaacggactcgacaaaggagagccggtcaacgaggcagacgccgcggccctcgagcacgacaaagcctacgaccaccagctcaagcaaggggacaacccgtacctcaaatacaaccacgcggacgctgaatttcaggagcgtcttcaagaagatacgtctttcgggggcaacctcgggcgagcagtcttccaggccaaaaagagggtactcgagcctcttggtctggttgaggaagctgttaagacggctcctggaaaaaagagacctatagagcagtctcctgcagaaccggactcttcctcgggcatcggcaaatcaggccagcagcccgctaagaaaagactcaattttggtcagactggcgacacagagtcagtcccagaccctcaaccaatcggagaaccccccgcagccccctctggtgtgggatctaatacaatggcttcaggcggtggggcaccaatggcagacaataacgaaggcgccgacggagtgggtaattcctcgggaaattggcattgcgattccacatggatgggcgacagagttatcaccaccagcacaagaacctgggccctccccacctacaataatcacctctacaagcaaatctccagcgaatcgggagccaccaacgacaaccactacttcggctacagcaccccctgggggtattttgactttaacagattccactgtcacttctcaccacgtgactggcagcgactcatcaacaacaactggggatttagacccaagaaactcaatttcaagctcttcaacatccaagtcaaggaggtcacgcagaatgatggaaccacgaccatcgccaataaccttaccagcacggtgcaggtcttcacagactctgagtaccagctgccctacgtcctcggttcggctcaccagggctgccttccgccgttcccagcagacgtcttcatgattcctcagtacggctacttgactctgaacaatggcagccaagcggtaggacgttcttcattctactgtctagagtattttccctctcagatgctgaggacgggaaacaacttcaccttcagctacacttttgaagacgtgcctttccacagcagctacgcgcacagccagagtctggatcggctgatgaatcctctcattgaccagtacctgtattacctgagcaaaactcagggtacaagtggaacaacgcagcaatcgagactgcagttcagccaagctgggcctagctccatggctcagcaggccaaaaactggctaccgggacccagctaccgacagcagcgaatgtctaagacggctaatgacaacaacaacagtgaatttgcttggactgcagccaccaaatattacctgaatggaagaaattctctggtcaatcccgggcccccaatggccagtcacaaggacgatgaggaaaagtatttccccatgcacggaaatctcatctttggaaaacaaggcacaggaactaccaatgtggacattgaatcagtgcttattacagacgaagaagaaatcagaacaactaatcctgtggctacagaacaatacggacaggttgccaccaaccatcagagtcagaacaccacagcttcctatggaagtgtggacagccagggaatcttacctggaatggtgtggcaggaccgcgatgtctatcttcaaggtcccatttgggccaaaactcctcacacggacggacactttcatccttctccgctcatgggaggctttggactgaaacaccctcctccccagatcctgatcaaaaacacacctgtgccagcgaatcccgcgaccactttcactcctggaaagtttgcttcgttcattacccagtattccaccggacaggtcagcgtggaaatagagtgggagctgcagaaagaaaacagcaaacgctggaacccagaaattcagtacacctccaactacaacaagtcggtgaatgtggagtttaccgtggacgcaaacggtgtttattctgaaccccgccctattggcactcgttaccttacccggaacttg

SEQ ID NO: 4807 - DNA, 3123 bp, Adeno-associated virus
gaattcgccctttctacggctgcgtcaactggaccaatgaaaactttcccttcaacgattgcgtcgacaagatggtgatctggtgggaggagggaaagatgaccgccaaggtcgtggaatctgccaaagccattctgggtggaggcaaggttcgtgtggaccagaaatgcaagtcttcggcccagatcgacccgactccggtgattgtcacctctaacaccaacatgtgcgccgtgattgacggaaactcgaccaccttcgagcaccagcagccgttgcaagaccggatgttcaaatttgaacttacccgccgtttggatcatgactttgggaaggtcaccaagcaggaagtcaaagactttttccggtgggctcaagatcacgtgactgaggtggagcatgagttctacgtcaaaaagggtggagccaagaaaaggcccgcccccgatgatgtatatataaatgagcccaagcgggcgcgcgagtcagttgcgcagccatcgacgtcagacgcggaagcttcgataaactacgcggacaggtaccaaaacaaatgttctcgtcacgtgggcatgaatctgatgctgtttccctgtcgacaatgcgaaagaatgaatcagaattcaaatatctgcttcacacacgggcaaaaagactgtttggaatgctttcccgtgtcagaatctcaacccgtttctgtcgtcagaaaaacgtatcagaaactttgttacattcatcatatcatgggaaaagtaccagacgcctgcactgcctgcgacctggtaaatgtggacttggatgactgtatttctgagcaataaatgacttaaatcaggtatggctgctgacggttatcttccagattggctcgaggacactctctctgaaggaatcagacagtggtggaagctcaaacctggcccaccaccgccgaaacctaaccaacaacaccgggacgacagtaggggtcttgtgcttcctgggtacaagtacctcggacccttcaacggactcgacaaaggagagccggtcaacgaggcagacgccgcggccctcgagcacgacaaagcctacgaccaccagctcaagcaaggggacaacccgtacctcaaatacaaccacgcggacgctgaatttcaggagcgtcttcaagaagatacgtctttcgggggcaacctcgggcgagcagtcttccaggccaaaaagagggtactcgagcctcttggtctggttgaggaagctgttaagacggctcctggaaaaaagagacctatagagcagtctcctgcagaaccggactcttcctcgggcatcggcaaatcaggccagcagcccgctaagaaaagactcaattttggtcagactggcgacacagagtcagtcccaggccctcaaccaatcggagaaccccccgcagccccctctggtgtgggatctaatacaatggcttcaggcggtggggcaccaatggcagacaataacgaaggcgccgacggagtgggtaattcctcgggaaattggcattgcgattccacatggatgggcgacagagttatcaccaccagcacaagaacctgggccctccccacctacaataatcacctctacaagcaaatctccagcgaatcgggagccaccaacgacaaccactacttcggctacagcaccccctgggggtattttgactttaacagattccactgtcacttctcaccacgtgactggcagcgactcatcaacaacaactggggatttagacccaagaaactcaatttcaagctcttcaacatccaagtcaaggaggtcacgcagaatgatggaaccacgaccatcgccaataaccttaccagcgcggtgcaggtcttcacagactctgagtaccagctgccctacgtcctcggttcggctcaccagggctgccttccgccgttcccagcagacgtcttcatgattcctcagtacggctacttgactctgaacaatggcagccaagcggtaggacgttcttcattctactgtctagagtattttccctctcagatgctgaggacgggaaacaacttcaccttcagctacacttttgaagacgtgcctttccacagcagctacgcgcacagccagagtctggatcggctgatgaatcctctcattgaccagtacctgtattacctgagcaaaactcagggtacaagtggaacaacgcagcaatcgagactgcagttcagccaagctgggcctagctccatggctcagcaggccaaaaactggctaccgggacccagctaccgacagcagcgaatgtctaagacggctaatgacaacaacaacagtgaatttgcttggactgcagccaccaaatattacctgaatggaagaaattctctggtcaatcccgggcccccagtggccagtcacaaggacgatgaggaaaagtatttccccatgcacggaaatctcatctttggaaaacaaggcacaggaactaccaatgtggacattgaatcagtgcttattacagacgaagaagaaatcagaacaactaatcctgtggctacagaacaatacggacaggttgccaccaaccatcagagtcagaacaccacagcttcctatggaagtgtggacagccagggaatcttacctggaatggtgtggcaggaccgcgatgtctatcttcaaggtcccatttgggccaaaactcctcacacggacggacactttcatccttctccgctcatgggaggctttggactgaaacaccctcctccccagatcctgatcaaaaacacacctgtgccagcgaatcccgcgaccactttcactcctggaaagtttgcttcgttcattacccagtattccacctgacaggtcagcgtggaaatagagtgggagctgcagaaagaaaacagcaaacgctggaacccagaaattcagtacacctccaactacaacaagtcggtgaatgtggagtttaccgtggacgcaaacggtgtttattctgaaccccgccctattggcactcgttaccttacccggaacttgtaatttcctgttaatgaataagccgatttatgcgtttcagttgaactttggtctctgcgaagggcgaattcgtttaaacct

SEQ ID NO: 4808 - protein, 735 aa, Adeno-associated virus
MAADGYLPDWLEDTLSEGIRQWWKLKPGPPPPKPNQQHRDDSRGLVLPGYKYLGPFNGLDKGEPVNEADAAALEHDKAYDHQLKQGDNPYLKYNHADAEFQERLQEDTSFGGNLGRAVFQAKKRVLEPLGLVEEAVKTAPGKKRPIEQSPAEPDSSSGIGKSGQQPAKKRLNFGQTGDTESVPGPQPIGEPPAAPSGVGSNTMASGGGAPMADNNEGADGVGNSSGNWHCDSTWMGDRVITTSTRTWALPTYNNHLYKQISSESGATNDNHYFGYSTPWGYFDFNRFHCHFSPRDWQRLINNNWGFRPKKLNFKLFNIQVKEVTQNDGTTTIANNLTSAVQVFTDSEYQLPYVLGSAHQGCLPPFPADVFMIPQYGYLTLNNGSQAVGRSSFYCLEYFPSQMLRTGNNFTFSYTFEDVPFHSSYAHSQSLDRLMNPLIDQYLYYLSKTQGTSGTTQQSRLQFSQAGPSSMAQQAKNWLPGPSYRQQRMSKTANDNNNSEFAWTAATKYYLNGRNSLVNPGPPVASHKDDEEKYFPMHGNLIFGKQGTGTTNVDIESVLITDEEEIRTTNPVATEQYGQVATNHQSQNTTASYGSVDSQGILPGMVWQDRDVYLQGPIWAKTPHTDGHFHPSPLMGGFGLKHPPPQILIKNTPVPANPATTFTPGKFASFITQYSTGQVSVEIEWELQKENSKRWNPEIQYTSNYNKSVNVEFTVDANGVYSEPRPIGTRYLTRNL

SEQ ID NO: 4809 - DNA, 3123 bp, Adeno-associated virus
gaattcgccctttctacggctgcgtcaactggaccaatgaaaactttcccttcaacgattgcgtcgacaagatggtgatctggtgggaggagggaaagatgaccgccaaggtcgtggaatctgccaaagccattctgggtggaagcaaggttcgtgtggaccagaaatgcaagtcttcggcccagatcgacccgactccggtgattgtcacctctaacaccaacatgtgcgccgtgattgacggaaactcgaccaccttcgagcaccagcagccgttgcaagaccggatgttcaaatttgaacttacccgccgtttggatcatgactttgggaaggtcaccaagcaggaagtcaaagactttttccggtgggctcaagatcacgtgactgaggtggagcatgagttctacgtcaaaaagggtggagccaagaaaaggcccgcccccgatgatgtatatataaatgagcccaagcgggcgcgcgagtcagttgcgcagccatcgacgtcagacgcggaagcttcgataaactacgcgggcaggtaccaaaacaaatgttctcgtcacgtgggcatgaatctgatgctgtttccctgtcgacaatgcgaaagaatgaatcagaattcaaatatctgcttcacacacgggcaaaaagactgtttggaatgctttcccgtgtcagaatctcaacccgtttctgtcgtcagaaaaacgtatcagaaactttgttacattcatcatatcatgggaaaagaaccagacgcctgcactgcctgcgacctggtaaatgtggacttggatgactgtatttctgagcaataaatgacttaaatcaggtatggctgctgacggttatcttccagattggctcgaggacactctctctgaaggaatcagacagtggtggaagctcaaacctggcccaccaccgccgaaacctaaccaacaacaccgggacgacagtaggggtcttgtgcttcctgggtacaagtacctcggacccttcaacggactcgacaaaggagagccggtcaacgaggcagacgccgcggccctcgagcacgacaaagcctacgaccaccagctcaagcaaggggacaacccgtacctcaaatacaaccacgcggacgctgaatttcaggagcgtcttcaagaagatacgtctttcgggggcaacctcgggcgagcagtcttccaggccaaaaagagggtactcgagcctcttggtctggttgaggaagctgttaagacggctcctggaaaaaagagacctatagagcagtctcctgcagaaccggactcttcctcgggcatcggcgaatcaggccagcagcccgctaagaaaagactcaattttggtcagactggcgacacagagtcagtcccagaccctcaaccaatcggagaaccccccgcagccccctctggtgtgggatctaatacaatggcttcaggcggtggggcaccaatggcagacgataacgaaggcgccgacggagtgggtaattcctcgggaaattggcattgcgattccacatggatgggcgacagagttatcaccaccagcacaagaacctgggccctccccacctacaataatcacctctacaagcaaatctccagcgaatcgggagccaccaacgacaaccactacttcggctacagcaccccctgggggtattttgactttaacagattccactgtcacttctcaccacgtgactggcagcgactcatcaacaacaactggggatttagacccaagaaactcaatttcaagctcttcaacatccaagtcaaggaggtcacgcagaatgatggaaccacgaccatcgccaataaccttaccagcacggtgcaggtcttcacagactctgagtaccagctgccctacgtcctcggttcggctcaccagggctgccttccgccgttcccagcagacgtcttcatgattcctcagtacggctacttgactctgaacaatggcagccaagcggtaggacgttcttcattctactgtctagagtattttccctctcagatgctgaggacgggaaacaacttcaccttcagctacacttttgaagacgtgcctttccacagcagctacgcgcacagccagagtctggatcggctgatgaatcctctcattgaccagtacctgtattacctgagcaaaactcagggtacaagtggaacaacgcagcaatcgagactgcagttcagccaagctgggcctagctccatggctcagcaggccaaaaactggctaccgggacccagctaccgacagcagcgaatgtctaagacggctaatgacaacaacaacagtgaatttgcttggactgcagccaccaaatattacctgaatggaagaaattctctggtcaatcccgggcccccaatggccagtcacaaggacgatgaggaaaagtatttccccatgcacggaaatctcatctttggaaaacaaggcacaggaactaccaatgtggacattgaatcagtgcttattacagacgaagaagaaatcagaacaactaatcctgtggctacagaacaatacggacaggttgccaccaaccatcagagtcaggacaccacagcttcctatggaagtgtggacagccagggaatcttacctggaatggtgtggcaggaccgcgatgtctatcttcaaggtcccatttgggccaaaactcctcacacggacggacactttcatccttctccgctcatgggaggctttggactgaaacaccctcctccccagatcctgatcaaaaacacacctgtgccagcgaatcccgcgaccactttcactcctggaaagtttgcttcgttcattacccagtattccaccggacaggtcagcgtggaaatagagtgggagctgcagaaagaaaacagcaaacgctggaacccagaaattcagtacacctccaactacaacaagtcggtgaatgtggagtttaccgtggacgcaaacggtgtttattctgaaccccgccctattggcactcgttaccttacccggaacttgtaatttcctgttaatgaataaaccgatttatgcgtttcagttgaactttggtctctgcgaagggcgaattcgcggccgcta

SEQ ID NO: 4810 - protein, 735 aa, Adeno-associated virus
MAADGYLPDWLEDTLSEGIRQWWKLKPGPPPPKPNQQHRDDSRGLVLPGYKYLGPFNGLDKGEPVNEADAAALEHDKAYDHQLKQGDNPYLKYNHADAEFQERLQEDTSFGGNLGRAVFQAKKRVLEPLGLVEEAVKTAPGKKRPIEQSPAEPDSSSGIGESGQQPAKKRLNFGQTGDTESVPDPQPIGEPPAAPSGVGSNTMASGGGAPMADDNEGADGVGNSSGNWHCDSTWMGDRVITTSTRTWALPTYNNHLYKQISSESGATNDNHYFGYSTPWGYFDFNRFHCHFSPRDWQRLINNNWGFRPKKLNFKLFNIQVKEVTQNDGTTTIANNLTSTVQVFTDSEYQLPYVLGSAHQGCLPPFPADVFMIPQYGYLTLNNGSQAVGRSSFYCLEYFPSQMLRTGNNFTFSYTFEDVPFHSSYAHSQSLDRLMNPLIDQYLYYLSKTQGTSGTTQQSRLQFSQAGPSSMAQQAKNWLPGPSYRQQRMSKTANDNNNSEFAWTAATKYYLNGRNSLVNPGPPMASHKDDEEKYFPMHGNLIFGKQGTGTTNVDIESVLITDEEEIRTTNPVATEQYGQVATNHQSQDTTASYGSVDSQGILPGMVWQDRDVYLQGPIWAKTPHTDGHFHPSPLMGGFGLKHPPPQILIKNTPVPANPATTFTPGKFASFITQYSTGQVSVEIEWELQKENSKRWNPEIQYTSNYNKSVNVEFTVDANGVYSEPRPIGTRYLTRNL

SEQ ID NO: 4811 - DNA, 3113 bp, Adeno-associated virus
gaattcgccctttctacggctgcgtcaactggaccaatgaaaactttcccttcaacgattgcgtcgacaagatggtgatctggtgggaggagggaaagatgaccgccaaggtcgtggaatctgccaaagccattctgggtggaagcaaggttcgtgtggaccagaaatgcaagtcttcggcccagatcgacccgactccggtgattgtcacctctaacaccaacatgtgcgccgtgattgacggaaactcgaccaccttcgagcaccagcagccgttgcaagaccggatgttcaaatttgaacttacccgccgtttggatcatgactttgggaaggtcaccaagcaggaagtcaaagactttttccggtgggctcaagatcacgtgactgaggtggagcatgagttctacgtcaaaaagggtggagccaagaaaaggcccgcccccgatgatgtatatataaatgagcccaagcgggcgcgcgagtcagttgcgcagccatcgacgtcagacgcggaagcttcgataaactacgcggacaggtaccaaaacaaatgttctcgtcacgtgggcatgaatctgatgctgtttccctgtcgacaatgcgaaagaatgaatcagaattcaaatatctgcttcacacacgggcaaaaagactgtttggaatgctttcccgtgtcagaatctcaacccgttcctgtcgtcagaaaaacgtatcagaaactttgttacattcatcatatcatgggaaaagtaccagacgcctgcactgcctgcgacctggtaaatgtggacttggatgactgtatttctgagcaataaatgacttaaatcaggtatggctgctgacggttatcttccagattggctcgaggacactctctctgaaggaatcagacagtggtggaagctcaaacctggcccaccaccgccgaaacctaaccaacaacaccgggacgacagtaggggtcttgtgcttcctgggtacaagtacctcggacccttcaacggactcgacaaaggagagccggtcaacgaggcagacgccgcggccctcgagcacgacaaagcctacgaccaccagctcaagcaaggggacaacccgtacctcaaatacaaccacgcggacgctgaatttcaggagcgtcttcaagaagatacgtctttcgggggcaacctcgggcgagcagtcttccaggccaaaaagagggtactcgagcctcttggtctggttgaggaagctgttaagacggctcctggaaaaaagagacctatagagcagtctcctgcagaaccggactcttcctcgggcatcggcaaatcaggccagcagcccgctaagaaaagactcaattttggtcagactggcgacacagagtcagtcccagaccctcaaccaatcggagaaccccccgcagccccctctggtgtgggatctaatacaatggcttcaggcggtggggcaccaatggcagacaataacgaaggcgccgacggagtgggtaattcctcgggaaattggcattgcgattccacatggatgggcgacagagttatcaccaccagcacaagaacctgggccctccccacctacaataatcacctctacaagcaaatctccagcgaatcgggagccaccaacgacaaccactacttcggctacagcaccccctgggggtattttgactttaacagattccactgtcacttctcaccacgtgactggcagcgactcatcaataacaactggggatttagacccaagaaactcaatttcaagctcttcaacatccaagtcaaggaggtcacgcagaatgatggaaccacgaccatcgccaataaccttaccagcacggtgcaggtcttcacagactctgagtaccagctgccctacgtcctcggttcggctcaccagggctgccttccgccgttcccagcagacgtcttcatgattcctcagtacggctacttgactctgaacaatggcagccaagcggtaggacgttcttcattctactgtctagagtattttccctctcagatgctgaggacgggaaacaacttcaccttcagctacacttttgaagacgtgcctttccacagcagctacgcgcacagccagagtctggatcggctgatgaatcctctcattgaccagtacctgtattacctgagcaaaactcagggtacaagtggaacaacgcagcaatcgagactgcagttcaaccaagctgggcctagctccatggctcagcaggccaaaaactggctaccgggacccagctaccgacagcagcgaatgtctaagacggctaatgacaacaacaacagtgaatttgcttggactgcagccaccaaatattacccgaatggaagaaattctctggtcaatcccgggcccccaatggccagtcacaaggacgatgaggaaaagtatttccccatgcacggaaatctcatctttggaaaacaaggcacaggaactaccaatgtggacattgaatcagtgcttattacagacgaagaagaaatcagaacgactaatcctgtggctacagaacaatacggacaggttgccaccaaccgtcagagtcagaacaccacagcttcctatggaagtgtggacagccagggaatcttacctggaatggtgtggcaggaccgcgatgtctatcttcaaggtcccatttgggccaaaactcctcacacggacggacactttcatccttctccgctcatgggaggctttggactgaaacaccctcctccccagatcctgatcaaaaacacacctgtgccagcgaatcccgcgaccactttcactcctggaaagtttgcttcgttcattacccagtattccaccggacaggtcagcgtggaaatagagtgggagctgcagaaagaaaacagcaaacgctggaacccggaaattcagtacacctccaactacaacaagtcggtgaatgtggagtttaccgtggacgcaaacggtgtttattctgaaccccgccctattggcactcgttaccttacccggaacttgtaatttcctgttaatgaataaaccgatttatgcgtttcagttgaactttggtctctgcgaagggcgaattc

SEQ ID NO: 4812 - protein, 735 aa, Adeno-associated virus
MAADGYLPDWLEDTLSEGIRQWWKLKPGPPPPKPNQQHRDDSRGLVLPGYKYLGPFNGLDKGEPVNEADAAALEHDKAYDHQLKQGDNPYLKYNHADAEFQERLQEDTSFGGNLGRAVFQAKKRVLEPLGLVEEAVKTAPGKKRPIEQSPAEPDSSSGIGKSGQQPAKKRLNFGQTGDTESVPDPQPIGEPPAAPSGVGSNTMASGGGAPMADNNEGADGVGNSSGNWHCDSTWMGDRVITTSTRTWALPTYNNHLYKQISSESGATNDNHYFGYSTPWGYFDFNRFHCHFSPRDWQRLINNNWGFRPKKLNFKLFNIQVKEVTQNDGTTTIANNLTSTVQVFTDSEYQLPYVLGSAHQGCLPPFPADVFMIPQYGYLTLNNGSQAVGRSSFYCLEYFPSQMLRTGNNFTFSYTFEDVPFHSSYAHSQSLDRLMNPLIDQYLYYLSKTQGTSGTTQQSRLQFNQAGPSSMAQQAKNWLPGPSYRQQRMSKTANDNNNSEFAWTAATKYYPNGRNSLVNPGPPMASHKDDEEKYFPMHGNLIFGKQGTGTTNVDIESVLITDEEEIRTTNPVATEQYGQVATNRQSQNTTASYGSVDSQGILPGMVWQDRDVYLQGPIWAKTPHTDGHFHPSPLMGGFGLKHPPPQILIKNTPVPANPATTFTPGKFASFITQYSTGQVSVEIEWELQKENSKRWNPEIQYTSNYNKSVNVEFTVDANGVYSEPRPIGTRYLTRNL

SEQ ID NO: 4813 - DNA, 3122 bp, Adeno-associated virus
agcggccgcgaattcgccctttctacggctgcgtcaactggaccaatgaaaactttcccttcaacgattgcgtcgacaagatggtgatctggtgggaggagggaaagatgaccgccaaggtcgtggaatctgccaaagccattctgggtggaagcaaggttcgtgtggaccagaaatgcaggtcttcggcccagatcgacccgactccggtgattgtcacctctaacaccaacatgtgcgccgtgattgacggaaactcgaccaccttcgagcaccagcagccgttgcaagaccggatgttcaaatttgaacttacccgccgtttggatcatgactttgggaaggtcaccaagcaggaagtcaaagactttttccggtgggctcaagatcacgtgactgaggtggagcatgagttctacgtcaaaaagggtggagccaagaaaaggcccgcccccgatgatgtatatataaatgagcccaagcgggcgcgcgagtcagttgcgcagccatcgacgtcagacgcggaagcttcgataaactacgcggacaggtaccaaaacaaatgttctcgtcacgtgggcatgaatctgatgctgtttccctgtcgacaatgcgaaagaatgaatcagaattcaaatatctgcttcacacacgggcaaaaagactgtttggaatgctttcccgtgtcagaatctcaacccgtttctgtcgtcagaaaaacgtatcagaaactttgttacattcatcatatcatgggaaaagtaccagacgcctgcactgcctgcgacctggtaaatgtggacttggatgactgtatttctgagcaataaatgacttaaatcaggtatggctgctgacggttatcttccagattggctcgaggacactctctctgaaggaatcagacagtggtggaagctcaaacctggcccaccaccgccgaaacctaaccaacaacaccgggacgacagtaggggtcttgtgcttcctgggtacaagtacctcggacccttcaacggactcgacaaaggagagccggtcaacgaggcagacgccgcggccctcgagcacgacaaagcctacgaccaccagctcaagcaaggggacaacccgtacctcaaatacaaccacgcggacgctgaatttcaggagcgtcttcaagaagatacgtctttcgggggcaacctcgggcgagcagtcttccaggccaaaaagagggtactcgagcctcttggtctggttgaggaagctgttaagacggctcctggaaaaaagagacctatagagcagtctcctgcagaaccggactcttcctcgggcatcggcaaatcaggccagcagcccgctaagaaaagactcaattttggtcagactggcgacacagagtcagtcccagaccctcaaccaatcggagaaccccccgcagccccctctggtgtgggatctaatacaatggcttcaggcggtggggcaccaatggcagacaataacgaaggcgccgacggagtgggtaattcctcgggaaattggcattgcgattccacatggatgggcgacagagttatcaccaccagcacaagaacctgggccctccccacctacaataatcgcctctacaagcaaatctccagcgaatcgggagccaccaacgacaaccactacttcggctacagcaccccctgggggtattttgactttaacagattccactgtcacttctcaccacgtgactggcagcgactcatcaacaacaactggggatttagacccaagaaactcaatttcaagctcttcaacatccaagtcaaggaggtcacgcagaatgatggaaccacgaccatcgccaataaccttaccagcacggtgcaggtcttcacagactctgagtaccagctgccctacgtcctcggttcggctcaccagggctgccttccgccgttcccagcagacgtcttcatgattcctcagtacggctacttgactctgaacaatggcagccaagcggtaggacgttcttcattctactgtctagagtattttccctctcagatgctgaggacgggaaacaacttcaccttcagctacacttttgaagacgtgcctttccacagcagctacgcgcacagccagagtctggatcggctgatgaatcctctcattgaccagtacctgtattacctgagcaaaactcagggtacaagtggaacaacgcagcaatcgagactgcagttcagccaagctgggcctagctccatggctcagcaggccaaaaactggctaccgggacccagctaccgacagcagcgaatgtctaagacggctaatgacaacaacaacagtgaatttgcttggactgcagccaccaaatattacctgaatggaagaaattctctggtcaatcccgggcccccaatggccagtcacaaggacgatgaggaaaagtatttccccatgcacggaaatctcatctttggaaaacaaggcacaggaactaccaatgtggacattgaatcagtgcttattacagacgaagaagaaatcagaacaactaatcctgtggctacagaacaatacggacaggttgccaccaaccatcagagtcagaacaccacagcttcctatggaagtgtggacagccagggaatcttacctggaatggtgtggcaggaccgcgatgtctatcttcaaggtcccatttgggccaaaactcctcacacggacggacactttcatccttctccgctcatgggaggctttggactgaaacaccctcctccccagatcctgatcaaaaacacacctgtgccagcgaatcccgcgaccactttcactcctggaaagtttgcttcgttcattacccagtattccaccggacaggtcagcgtggaaatagagtgggagctgcagaaagaaaacagcaaacgctggaacccagaaattcagtacacctccaactacaacaagtcggtgaatgtggagtttaccgtggacgcaaacggtgtttattctgaaccccgccctattggcactcgttaccttacccggaacttgtaatttcctgttaatgaataaaccgatttatgcgtttcagttgaactttggtctctgcgaagggcgaattc

SEQ ID NO: 4814 - protein, 735 aa, Adeno-associated virus
MAADGYLPDWLEDTLSEGIRQWWKLKPGPPPPKPNQQHRDDSRGLVLPGYKYLGPFNGLDKGEPVNEADAAALEHDKAYDHQLKQGDNPYLKYNHADAEFQERLQEDTSFGGNLGRAVFQAKKRVLEPLGLVEEAVKTAPGKKRPIEQSPAEPDSSSGIGKSGQQPAKKRLNFGQTGDTESVPDPQPIGEPPAAPSGVGSNTMASGGGAPMADNNEGADGVGNSSGNWHCDSTWMGDRVITTSTRTWALPTYNNRLYKQISSESGATNDNHYFGYSTPWGYFDFNRFHCHFSPRDWQRLINNNWGFRPKKLNFKLFNIQVKEVTQNDGTTTIANNLTSTVQVFTDSEYQLPYVLGSAHQGCLPPFPADVFMIPQYGYLTLNNGSQAVGRSSFYCLEYFPSQMLRTGNNFTFSYTFEDVPFHSSYAHSQSLDRLMNPLIDQYLYYLSKTQGTSGTTQQSRLQFSQAGPSSMAQQAKNWLPGPSYRQQRMSKTANDNNNSEFAWTAATKYYLNGRNSLVNPGPPMASHKDDEEKYFPMHGNLIFGKQGTGTTNVDIESVLITDEEEIRTTNPVATEQYGQVATNHQSQNTTASYGSVDSQGILPGMVWQDRDVYLQGPIWAKTPHTDGHFHPSPLMGGFGLKHPPPQILIKNTPVPANPATTFTPGKFASFITQYSTGQVSVEIEWELQKENSKRWNPEIQYTSNYNKSVNVEFTVDANGVYSEPRPIGTRYLTRNL

SEQ ID NO: 4815 - protein, 733 aa, Adeno-associated virus
MAADGYLPDWLEDNLSEGIREWWDLKPGAPKPKANQQKQDDGRGLVLPGYKYLGPFNGLDKGEPVNAADAAALEHDKAYDQQLKAGDNPYLRYNHADAEFQERLQEDTSFGGNLGRAVFQAKKRVLEPLGLVEEGAKTAPGKKRPLESPQEPDSSSGIGKKGKQPAKKRLNFEEDTGAGDGPPEGSDTSAMSSDIEMRAAPGGNAVDAGQGSDGVGNASGDWHCDSTWSEGKVTTTSTRTWVLPTYNNHLYLRLGTTSNSNTYNGFSTPWGYFDFNRFHCHFSPRDWQRLINNNWGLRPKAMRVKIFNIQVKEVTTSNGETTVANNLTSTVQIFADSSYELPYVMDAGQEGSLSPFPNDVFMVPQYGYCGIVTGENQNQTDRNAFYCLEYFPSQMLRTGNNFEMAYNFGKVPFHSMYAYSQSPDRLMNPLLDQYLWHLQSTTSGETLNQGNAATTFGKIRSGDFAFYRKNWLPGPCVKQQRLSKTASQNYKIPASGGNALLKYDTHYTLNNRWSNIAPGPPMATAGPSDGDFSNAQLIFPGPSVTGNTTTSANNLLFTSEEEIAATNPRDTDMFGQIADNNQNATTAPITGNVTAMGVLPGMVWQNRDIYYQGPIWAKIPHADGHFHPSPLIGGFGLKHPPPQIFIKNTPVPANPATTFTAARVDSFITQYSTGQVAVQIEWEIEKERSKRWNPEVQFTSNYGNQSSMLWAPDTTGKYTEPRVIGSRYLTNHL

SEQ ID NO: 4816 - protein, 733 aa, Adeno-associated virus
MAADGYLPDWLEDNLSEGIREWWDLKPGAPKLKANQQKQDDGRGLVLPGYKYLGPFHGLDKGEPVNAADAAALEHDKAYDQQLKAGDNPYLRYNHADAEFQERLQEDTSFGGNLGRAVFQAKKRVLEPLGLVEEGAKTAPGKKRPLESPQEPDSSSGIGKKGKQPAKKRLNFEEDTGAGDGPPEGSDTSAMSSDIEMRAAPGGNAVDAGQGSDGVGNASGDWHCDSTWSEGKVTTTSTRTWVLPTYNNHLYLRLGTTSNSNTYNGFSTPWGYFDFNRFHCHFSPRDWQRLINNNWGLRPKAMRVKIFNIQVKEVTTSNGETTVANNLTSTVQIFADSSYELPYVMDAGQEGSLPPFPNDVFMVPQYGYCGIVTGENQNQTDRNAFYCLEYFPSQMLRTGNNFEMAYNFEKVPFHSMYAHSQSLDRLMNPLLDQYLWHLQSTTSGETLNQGNAATTFGKIRSGDFAFYRKNWLPGPCVKQQRFSKTASQNYKIPASGGNALLKYDTHYTLNNRWSNIAPGPPMATAGPSDGDFSNAQLIFPGPSVTGNTTTSANNLLFTSEGEIAATNPRDTDMFGQIADNNQNATTAPITGNVTAMGVLPGMVWQNRDIYYQGPIWAKIPHADGHFHPSPLIGGFGLKHPPPQIFIKNTPVPANPATTFTAARVDSFITQYSTGQVAVQIEWEIEKERSKRRNPEVQFTSNYGNQSSMLWAPDTTGKYTEPRVIGSRYLTNHL

SEQ ID NO: 4817 - protein, 733 aa, Adeno-associated virus
MAADGYLPDWLEDNLSEGIREWWDLKPGAPKPKANQQKQDDGRGLVLPGYEYLGPFNGLDKGEPVNAADAAALEHDKAYDQQLKAGDNPYLRYNHADAEFQERLQEDTSFGGNLGRAVFQAKKRVLEPLGLVEEGAKTAPGKKRPLESPQEPDSSSGIGKKGKQPAKKRLNFEEDTGAGDGPPEGSDTSAMSSDIEMRAAPGGNAVDAGQGSDGVGNASGDWHCDSTWSEGKVTTTSTRTWVLPTYNNHLYLRLGTTSNSNTYNGFSTPWGYFDFNRFHCHFSPRDWQRLINNNWGLRPKAMRVKIFNIQVKEVTTSNGETTVANNLTSTVQIFADSSYELPYVMDAGQEGSLPPFPNDVFMVPQYGYCGIVTGENQNQTDRNAFYCLEYFPSQMLRTGNNFETAYNFEKVPFHSMYAHSQSLDGLMNPLLDQYLWHLQSTTSGETLNQGNAATTFGKIRSGDFAFYRKNWLPGPCVKQQRFSKTASQNYKIPASGGNALLKYDTHYTLNNRWSNIAPGPPMATAGPSDGDFSNAQLIFPGPSVTGNTTTSANNLLFTSEEEIAATNPRDTDMFGQIADNNQNATTAPITGNVTAMGVLPGMVWQNRDIYYQGPIWAKIPHADGHFHPSPLIGGFGLKHPPPQIFIKNTPVPAYPATTFTAARVDSFITQYSTGQVAVQIEWEIEKERSKRWNPEVQFTSNCGNQSSMLWAPDTTGKYTEPRVIGSRYLTNHL

SEQ ID NO: 4818 - protein, 735 aa, Adeno-associated virus
MAADGYLPDWLEDTLSEGIRQWWKLKPGPPPPKPNQQHRDDSRGLVLPGYKYLGPFNGLDKGEPVNEADAAALEHDKAYDHQLKQGDNPYLKYNHADAEFQERLQEDTSFGGNLGRAVFQAKKRVLEPLGLVEEAVKTAPGKKRPIEQSPAEPDSSSGIGKSGQQPAKKRLNFGQTGDTESVPDPQPIGEPPAAPSGVGSNTMASGGGAPMADNNEGADGVGNSSGNWHCDSTWMGDRVITTSTRTWALPTYNNHLYKQISSESGATNDNHYFGYSTPWGYFDFNRFHCHFSPRDWQRLINNNWGFRPKKLNFKLFNIQVKEVTQNDGTTTIANNLTSTVQVFTDSEYQLPYVLGSAHQGCLPPFPADVFMIPQYGYLTLNNGSQAVGRSSFYCLEYFPSQMLRTGNNFTFSYTFEDVPFHSSYAHSQSLDRLMNPLIDQYLYYLSKTQGTSGTTQQSRLQFSQAGPSSMAQQAKNWLPGPSYRQQRMSKTANDNNNSEFAWTAATKYYLNGRNSLVNPGPPMASHKDDEEKYFPMHGNLIFGKQGTGTTNVDIESVLITDEEEIRTTNPVATEQYGQVATNHQSQNTTASYGSVDSQGILPGMVWQDRDVYLQGPIWAKIPHTDGHFHPSPLMGGFGLKHPPPQILIKNTPVPANPATTFTPGKFASFITQYSTGQVSVEIEWELQKENSKRWNPEIQYTSNYNKSVNVEFTVDANGVYSEPRPIGTRYLTRNL

SEQ ID NO: 4819 - DNA, 3127 bp, Adeno-associated virus
gcggccgcgaattcgcccttcgcagagaccaaagttcaactgaaacgaatcaaccggtttattgattaacatgcaattacagattacgggtgaggtaacgagtgccaatagggcgaggctcagagtaaacaccctggctgtcaacggcaaagtccacaccagtctgcttttcaaagttggaggtgtactgaatctccgggtcccagcgcttgctgttttccttctgcagctcccactcgatttccacgctgacttgtccggtgctgtactgtgtgatgaacgaagcaaacttggcaggagtaaacacctccggaggattagcgggaacgggagtgttcttgatcaggatctgaggaggcggatgtttaagtccaaagccgcccatcaaaggagacgggtgaaagttgccatccgtgtgaggaatcttggcccagatgggaccctgcaggtacacgtcccggttctgccagaccatgccaggtaaggctccctggttgttgacaacttgtgtctgggctgcagtattagccgcttgtaagttgctgctgactatcccgtattcttccgtggctacaggattagtaggacgaatttcttcttcatttgtcattaacacattttccaatgtagttttgttagttgctccagtttttccaaaaatcaggactccgctggatgggaaaaagcggtcctcgtcgtccttgtgagttgccatggcgacgccgggattaaccaacgagtttctgccgttcaggtgatatttggtggcaccagtccaagcaaagttgctgttgttgttttgatccagcgttttggagaccctttgttgccggaagcagggtccaggtaaccaattcttggcttgttcggccatagttgaaggcccgccctggtaaaactgcagttcccgattgccagctgtgcctcctgggtcactctgtgttctggccaggtagtacaagtactggtcgatgaggggattcatcagccggtccaggctctggctgtgtgcgtagctgctgtggaaaggcacgtcctcgaagctgtagctgaactcaaagttgttgcccgttctcagcatctgagaggggaagtactccaggcagtagaaggaggaacgtcccacagactgactgccattgttgagagtcaggtagccgtactgaggaatcatgaagacgtccgccgggaacggaggcaggcagccctggtgcgcagagccgaggacgtacggcagctggtattccgagtccgagaatacctgaatcgtgctggtaaggttattagcgatggtcgtaacgccgtcattcgtcgtgacctccttgacctggatgttgaagagcttgaaccgcagcttcttgggccggaatccccagttgttgttgatgagtcgctgccagtcacgtggtgagaagtggcagtggaatctgttaaagtcaaaatacccccagggggtgctgtagccgaagtaggtgttgtcgttggtactacctgcagtttcactggagatttgctcgtagaggtggttgttgtaggtgggcagggcccaggttcgggtgctggtggtaatgactctgtcgcccagccatgtggaatcgcaatgccaatttcctgaggcattacccactccgtcggcaccttcgttattgtctgccattggtgcgccaccgcctgcagccactgtaccagatcccacactagagggcgctgctggaggttctccgagaggttgagggtcggggactgactctgagtcgccagtctgaccgaaattgagtctctttctggcgggctgctggcccttcttgccgatgcccgtggaggagtcgggggaacgctgaggtgacggctctaccggtctcttctttgcaggagccgtcttagcgccttcctcaaccagaccgagaggttcgagaacccgcttcttggcctggaagactgctcgcccgaggttgcccccaaatgacgtatcttcttgcagacgctcctgaaactcggcgtcggcgtggttataccgcaggtacgggttgtcacccgcattgagctgctggtcgtaggccttgtcgtgctcgagggccgctgcgtccgccgcgttgacgggctcccccttgtcgagtccgttgaagggtccgaggtacttgtagccaggaagcaccagaccccggccgttgtcctgcttttgctggttggctttgggtttcggggctccaggtttcaggtcccaccactcgcgaatgccctcagagaggttgtcctcgagccaatctggaagataaccatcggcagccatacctgatttaaatcatttattgttcaaagatgcagtcatccaaatccacattgaccagatcgcaggcagtgcaagcgtctggcacctttcccatgatatgatgaatgtagcacagtttctgatacgcctttttgacgacagaaacgggtttagattctgacacgggaaagcactctaaacagtctttctgtccgtgagtgaagcagatatttgaattctgattcattctctcgcattgtctgcagggaaacagcatcagattcatgcccacgtgacgagaacatttgttttggtacctgtctgcgtagttgatcgaagcttccgcgtctgacgtcgatggctgcgcaactgactcgcgcacccgtttgggctcacttatatctgcgtcactgggggcgggtcttttcttggctccaccctttttgacgtagaattcatgctccacctcaaccacgtaatcctttgcccaccggaaaaagtctttgacttcctgcttggtgaccttcccaaagtcatgatccagacggcgggtgagttcaaatttgaacatccggtcttgcaacggctgctggtgttcgaaggtcgttgagttcccgtcgatcacggcgcacatgttggtgttggagatgacgatcgcgggagtcgggtctatctgggccgaggacttgcatttctggtccacgcgcaccttgcttcctccgagaatggctttggccgactccacgaccttggcggtcatcttcccctcctcccaccagatcaccatcttgtcgacacagtcgttgaagggaaagttctcattggtccagttgacgcagccgtagaaagggcgaattc

SEQ ID NO: 4820 - DNA, 3106 bp, Adeno-associated virus
gcggccgcgaattcgcccttcgcagagaccaaagttcaactgaaacgaatcaaccggtttattgattaacaagtaattacaggttacgggtgaggtaacgggtgccaatggggcgaggctcagtataaaccccttcgttgttgacagcaaattccacattattagacttggcataatttgaggtgtactgaatctctggattccagcgtttgctgttttctttctgcagttcccactcgatctccacgctgacctggccggtgctgtactgcgtgataaatgaggcaaacttggcaggagtaaacacctctggaggattagcaggtaccggggtgtttttgatgagaatttgaggaggcgggtgtttgagtccaaatccgcccatcaggggagacgggtgaaagttgccgtccgtgtgaggaattttggcccagatgggaccctgcaggcacacgtcccggttctgccagaccatgccgggcagagccccctggctgttgacagtctgtgtctggggtccggccgtagacgattgcaggttgctggagaccacaccgtattcttctgtagccacgggattggtggttttgatctcctcctcgctggtcattagcacgttttccagcgttgtcttgttggcagcccccgttttgccaaaaaccagcactccgttgatgggaaagaactggtcctcgtcgtccttgttggtggccatggctacgcccgggttggttaatgaatttctaccattcagatggtatttagtggccccggtccaggcaaagttactgttgttgttgctgtctatgttttttgacagtctctgctgccgataacagggtccgggcagccagttctttgattgctcggccatggtgttgggcccagcctgatggaactgcagctcccttgtggaccccgtagtgctctgggtccgggccaggtagtacaggtactggtcgatgaggggattcatcagccggtctaggctctggctgtgcacatagctgctgtggaaaggcacttcctcaaaggtgtagctgaattcaaagttattgcccgttctcagcatctgagaaggaaagtactccaggcagtagaaggaggaacgtcccacagactgactgccgttgtttagagtcagatatccgtactgaggaatcatgaacacgtccgcagggaacggagggaggcagccctggtgcgcagagccgaggacgtacggcagttggtactccgagtccgagaagacctgaatcgtgctggtaaggttattagcgatggtcgtaacgccgtcgttcgtcgtgacctccttgacctggatgttgaacaacttgaaccgcagctttctgggccggaatccccagttgttgttgatgagtcgctgccagtcacgtggtgagaagtggcagtggaatctgttgaagtcaaaatagccccagggggtgctgtagctgaagaagtggttgtcgttggtagccccgctctgacttgatatctgcttgtagaggtggttgttgtaggtgggcagggcccaggtgcgggtgctggtggtgatgactctgtcgcccagccatgtggaatcgcaatgccaatttccggaggcattacccactccgtcggcgccttcgttattgtctgccattggtgcgccaccgcctgcagccattgtaccagatcccagacctgagggcgcggcgggaggttctccgagaggttgggggtcgggcactgactctgagtcgccagtctgcccaaagttgagcttctttttagcgggctgctggcctttcttgccgatgcccgtggaggagtcgggggattctatgggtctcttctttccaggagccgtcttagcgacttcctcaaccagaccgagaggttcgagaacccgcttcttggcctggaagactgctcgcccgaggttgcccccaaaagacgtatcttcttgaagacgctcctgaaactcggcgtcggcgtggttgtacttgaggtacgggttgtccccctgctcgagctgcttgtcgtaggccttgtcgtgctcgagggccgcggcgtctgcctcgttgaccggctctcccttgtcgagtccgttgaagggtctgaggtacttgtagccaggaagcaccagaccccggccgtcgtcctgcttttgctggttggctttgggtttcggggctccaggtttcaagtcccaccactcgcgaatgccctcagagaggttgtcctcgagccaatctggaagataaccatcggcagccatacctggtttaagtcatttattgctcagaaacacagtcatccaggtccacgttgaccagatcgcaggccgagcaagcaatctcgggagcccgccccagcagatgatgaatggcacagagtttccgatacgtcctctttctgacgaccggttgagattctgacacgccggggaaacattctgaacagtctctggtcccgtgcgtgaagcaaatgttgaaattctgattcactctctcgcatgtcttgcagggaaacagcatctgaagcatgcccgcgtgacgagaacatttgttttggtacctgtcggcaaagtccaccggagctccttccgcgtctgacgtcgatggattcgcgactgaggggcaggcccgcttgggctcgcttttatccgcgtcatcgggggcgggtctcttgttggccccaccctttctgacgtagaacccatgcgccacctcggtcacgtgatcctgcgcccagcggaagaaccttttgacttcctgctttgtcaccttgccaaagttatgctccagacggcgggtgggttcaaatttgaacatccggtcctgcaacggctgctggtgctcgaaggtggcgctgttcccgtcaatcacggcgcacatgttggtgttggaggtgacggtcacgggggtggggtcgatctgggcggacgacttgcacttttggtccacgcgcaccttgctgccgccgagaatggccttggcggactccacgaccttggccgtcatcttgccctcctcccaccagatcaccatcttgtcggcgcaatcgttgaagggaaagttctcattggtccagttgacgcagccgtagaaagggcgaattc

SEQ ID NO: 4821 - DNA, 3102 bp, Adeno-associated virus
gcggccgcgaattcgcccttcgcagagaccaaagttcaactgaaacgaatcaaccggtttattgattaacaagtaattacaggttacgggtgaggtaacgggtgccaatggggcgaggctcagtataaaccccttcgttgttgacagcaaattccacattattagacttggcataatttgaggtgtactgaatctctggattccagcgtttgctgttttctttctgcagttcccactcgatctccacgctgacctggccggtgctgtactgcgtgataaatgaggcaaacttggcaggagtaaacacctctggaggattagcaggtaccggggtgtttttgatgagaatttgaggaggcgggtgtttgagtccaaatccgcccatcaggggagacgggtgaaagttgccgtccgtgtgaggaatttcggcccagatgggaccctgcaggtacacgtcccggttctgccagaccatgccgggcagagccccctggctgttgacagtctgtgtccggggtccggccgtagacgattgcaggttgctggagaccacaccgtattcttctgtagccacgggattggtggttttgatctcctcctcgctggtcattagcacgttttccagcgttgtcttgttggcagcccccgttttgccaaaaaccagcactccgttgatgggaaggaactggtcctcgtcgtccttgttggtggccatggctacgcccgggttggttaatgaatttctaccattcagatggtatttagtggccccggtccaggcaaagttactgttgttgttgctgtctatgttttttgacagtctctgctgccgataacagggtccgggcagccagttctttgattgctcggccacggtgttgggcccagcctgatggaactgcagctcccttgtggaccccgtagtgctctgggtccgggccaggtagtacaggtactggtcgatgaggggattcatcagccggtccaggctctggctgtgcgcatagctgctgtggaaaggcacttcctcaaaggtgtagctgaattcaaagttattgcccgttctcagcatctgagaaggaaagtactccaggcagcagaaggaggaacgtcccacagactgactgccgttgtttagagtcagatatccgtactgaggaatcatgaacacgtccgcagggaacggagggaggcagccctggtgcgcagagccgaggacgtacggcagttggtactccgagtccgagaagacctgaatcgtgctggtaaggttattagcgatggtcgtaacgccgtcgttcgtcgtgacctccttgacctggatgttgaacaacttgaaccgcagctttctgggccggaatccccagttgttgttgatgagtcgctgccagtcacgtggtgagaagtggcagtggaatctgttgaagtcaaaatagccccagggggtgctgtagccgaagaagtggttgtcgttggtagccccgctctgacttgatatctgcttgtagaggtggttgttgtaggtgggcagggcccaggtgcgggtgctggtggtgatgactctgtcgcccagccatgtggaatcgcaatgccaatttccggaggcattacccactccgtcggcgccttcgttattgtctgccattggtgcgccaccgcctgcagccattgtaccagatcccagacctgagggcgcggcgggaggttctccgagaggttgggggtcgggcactgactctgagtcgccagtctgcccaaagttgagcttctttttagcgggctgctggcctttcttgccgatgcccgtggaggagtcgggggattctatgggtctcttctttccggaagccgtcttagcgccttcctcaaccagaccgagaggttcgagaacccgcttcttggcctggaagactgctcgcccgaggttgcccccaaaagacgtatcttcttgaagacgctcctgaaactcggcgtcggcgtggttgtacttgaggtacgggttgtccccctgctcgagctgcttgtcgtaggccttgtcgtgctcgagggccgcggcgtctgcctcgttgaccggctctcccttgtcgagtccgttgaagggtccgaggtacttgtagccaggaagcaccagaccccggccgtcgtcctgcttttgctggttggctttgggtttcggggctccaggtttcaagtcccaccactcgcgaatgccctcagagaggttgtcctcgagccaatctggaagataaccatcggcagccatacctggtttaagtcatttattgctcagaaacacagtcatccaggtccacgttgaccagatcgcaggccgagcaagcaatctcgggagcccgccccagcagatgatgaatggcacagagtttccgatacgtcctctttctgacgaccggttgagattctgacacgccggggaaacattctgaacagtctctggtcccgtgcgtgaagcaaatgttgaaattctgattcattctctcgcatgtcttgcagggaaacagcatctgaagcatgcccgcgtgacgagaacatttgttttggtacctgtcggcaaagtccaccggagctccttccgcgtctgacgtcgatggatccgcgactgaggggcaagcccgcttgggctcgcttttatccgcgtcatcgggggcgggtctcttgttggctccaccctttctgacgtagaactcatgcgccacctcggtcacgtgatcctgcgcccagcggaagaactctttgacttcctgctttgtcaccttgccaaagtcatgctccagacggcgggtgagttcaaatttgaacatccggtcttgtaacggctgctggtgctcgaaggtggtgctgttcccgtcaatcacggcgcacatgttggtgttggaagtgacgatcacgggggtgggatcgatctgggcggacgacttgcacttttggtccacgcgcaccttgctgccgccgagaatggccttggcggactccacgaccttggccgtcatcttgccctcctcccaccagatcaccatcttgtcgacgcaatcgttgaagggaaagttctcattggtccagttgacgcagccgaagggcgaattc

SEQ ID NO: 4822 - protein, 728 aa, Adeno-associated virus
MAADGYLPDWLEDNLSEGIREWWDLKPGAPKPKANQQKQDDGRGLVLPGYRYLGPFNGLDKGEPVNEADAAALEHDKAYDKQLEQGDNPYLKYNHADAEFQERLQEDTSFGGNLGRAVFQAKKRVLEPLGLVEEGAKTAPGKKRPIESPDSSTGIGKNGQPPAKKKLNFGQTGDSESVPDPQPLGEPPAAPSGLGSGTMAAGGGAPMADNNEGADGVGNASGNWHCDSTWLGDRVITTSTRTWALPTYNNHLYKQISSQSGATNDNHFFGYSTPWGYFDFNRFHCHFSPRDWQRLINNNWGFRPRKLRFKLFNIQVKEVTTNDGVTTIANNLTSTIQVFSDSEYQLPYVLGSAHQGCLPPFPADVFMIPQYGYLTLNNGSQSVGRSSFYCLEYFPSQMLRTGNNFEFSYTFEEVPFHSSYAHSQSLDRLMNPLIDQYLYYLARTQSTTGSTRELQFHQAGPNTMAEQSKNWLPGPCYRQQRLSKNIDSNNNSNFAWTGATKYHLNGRNSLTNPGVAMATNKDDEDQFFPINGVLVFGKTGAANKTTLENVLMTSEEEIKTTNPVATEEYGVVSSNLQSSTAGPQTQTVNSQGALPGMVWQNRDVYLQGPIWAKIPHTDGNFHPSPLMGGFGLKHPPPQILIKNTPVPANPPEVFTPAKFASFITQYSTGQVSVEIEWELQKENSKRWNPEIQYTSNYAKSNNVEFAVNNEGVYTEPRPIGTRYLTRNL

SEQ ID NO: 4823 - DNA, 2187 bp, Adeno-associated virus
atggctgccgatggttatcttccagattggctcgagggcaacctctctgagggcattcgcgagtggtgggacttgaaacctggagccccgaaacccaaagccaaccagcaaaagcaggacgacggccggggtctggtgcttcctggctacaggtacctcggacccttcaacggactcgacaagggagagccggtcaacgaggcagacgccgcggccctcgagcacgacaaggcctacgacaagcagctcgagcagggggacaacccgtacctcaagtacaaccacgccgacgccgagtttcaggagcgtcttcaagaagatacgtcttttgggggcaacctcgggcgagcagtcttccaggccaagaagcgggttctcgaacctctcggtctggttgaggaaggcgctaagacggctcctggaaagaagagacccatagaatcccccgactcctccacgggcatcggcaagaacggccagccgcccgctaaaaagaagctcaactttgggcagactggcgactcagagtcagtgcccgacccccaacctctcggagaacctcccgccgcgccctcaggtctgggatctggtacaatggctgcaggcggtggcgcaccaatggcagacaataacgaaggcgccgacggagtgggtaatgcctccggaaattggcattgcgattccacatggctgggcgacagagtcatcaccaccagcacccgcacctgggccctgcccacctacaacaaccacctctacaagcagatatcaagtcagagcggggctaccaacgacaaccacttcttcggctacagcaccccctggggctattttgacttcaacagattccactgccacttctcaccacgtgactggcagcgactcatcaacaacaactggggattccggcccagaaagctgcggttcaagttgttcaacatccaggtcaaggaggtcacgacgaacgacggcgttacgaccatcgctaataaccttaccagcacgattcaggtcttctcggactcggagtaccaactgccgtacgtcctcggctctgcgcaccagggctgcctccctccgttccctgcggacgtgttcatgattcctcagtacggatatctgactctaaacaacggcagtcagtctgtgggacgttcctccttctactgcctggagtactttccttctcagatgctgagaacgggcgataactttgaattcagctacacctttgaggaagtgcctttccacagcagctatgcgcacagccagagcctggaccggctgatgaatcccctcatcgaccagtacctgtactacctggcccggacccagagcactacggggtccacaagggagctgcagttccatcaggctgggcccaacaccatggccgagcaatcaaagaactggctgcccggaccctgttatcggcagcagagactgtcaaaaaacatagacagcaacaacaacagtaactttgcctggaccggggccactaaataccatctgaatggtagaaattcattaaccaacccgggcgtagccatggccaccaacaaggacgacgaggaccagttctttcccatcaacggagtgctggtttttggcaaaacgggggctgccaacaagacaacgctggaaaacgtgctaatgaccagcgaggaggagatcaaaaccaccaatcccgtggctacagaagaatacggtgtggtctccagcaacctgcaatcgtctacggccggaccccagacacagactgtcaacagccagggggctctgcccggcatggtctggcagaaccgggacgtgtacctgcagggtcccatctgggccaaaattcctcacacggacggcaactttcacccgtctcccctgatgggcggatttggactcaaacacccgcctcctcaaattctcatcaaaaacaccccggtacctgctaatcctccagaggtgtttactcctgccaagtttgcctcatttatcacgcagtacagcaccggccaggtcagcgtggagatcgagtgggaactgcagaaagaaaacagcaaacgctggaatccagagattcagtacacctcaaattatgccaagtctaataatgtggaatttgctgtcaacaacgaaggggtttatactgagcctcgccccattggcacccgttacctcacccgtaacctgtaa

SEQ ID NO: 4824 - protein, 728 aa, Adeno-associated virus; identical to SEQ ID NO: 4803

SEQ ID NO: 4825 - DNA, 3106 bp, Adeno-associated virus
gcggccgcgaattcgcccttcgcagagaccaaagttcaactgaaacgaatcagccggtttattgattaacaagtaattacaggttacgggtgaggtaacgggtgccaatggggcgaggctcagtataaaccccttcgttgttgacagcaaattccacattattagacttggcataatttgaggtgtactgaatctctggattccagcgtttgctgttttctttctgcagttcccactcgatctccacgctgacctggccggtgctgtactgcgtgataaatgaggcaaacttggcaggagtaaacacctctggaggattagcaggtaccggggtgtttttgatgagaatttgaggaggcgggtgtttgagtccaaatccgcccatcaggggagacgggtgaaagttgccgtccgtgtgaggaattttggcccagatgggaccctgcaggtacacgtcccggttctgccagaccatgccgggcagagccccctggctgttgacagtctgtgtctggggtccggccgtagacgattgcaggttgctggagaccacaccgtattcttctgtagccacgggattggtggttttgatctcctcctcgctggtcattagcacgttttccagcgttgtcttgttggcagcccccgttttgccaaaaaccagcactccgttgatgggaaagaactggtcctcgtcgtccttgttggtggccatggctacgcccgggttggttaatgaatttctaccattcagatggtatttagtggccccggtccaggcaaagttactgttgttgttgctgtctatgttttttgacagtctctgctgccgataacagggtccgggcagccagttctttgattgctcggccatggtgttgggcccagcctgatggaactgcagctcccttgtggaccccgtagtgctctgggtccgggccaggtagtacaggtactggtcgatgaggggattcatcagccggtccaggctctggctgtgcgcatagctgctgtggaaaggcacttcctcaaaggtgtagctgaattcaaagttatcgcccgttctcagcatctgagaaggaaagtactccaggcagtagaaggaggaacgtcccacagactgactgccgttgtttagagtcagatatccgtactgaggaatcatgaacacgtccgcagggaacggagggaggcagccctggtgcgcagagccgaggacgtacggcagttggtactccgagtccgagaagacctgaatcgtgctggtaaggttattagcgatggtcgtaacgccgtcgttcgtcgtgacctccttgacctggatgttgaacaacttgaaccgcagctttctgggccggaatccccagttgttgttgatgagtcgctgccagtcacgtggtgagaagtggcagtggaatctgttgaagtcaaaatagccccagggggtgctgtagccgaagaagtggttgtcgttggtagccccgctctgacttgatatctgcttgtagaggtggttgttgtaggtgggcagggcccaggtgcgggtgctggtggtgatgactctgtcgcccagccatgtggaatcgcaatgccaatttccggaggcattacccactccgtcggcgccttcgttattgtctgccattggtgcgccaccgcctgcagccattgtaccagatcccagacctgagggcgcggcgggaggttctccgagaggttgggggtcgggcactgactctgagtcgccagtctgcccaaagttgagcttctttttagcgggcggctggccgttcttgccgatgcccgtggaggagtcgggggattctatgggtctcttctttccaggagccgtcttagcgccttcctcaaccagaccgagaggttcgagaacccgcttcttggcctggaagactgctcgcccgaggttgcccccaaaagacgtatcttcttgaagacgctcctgaaactcggcgtcggcgtggttgtacttgaggtacgggttgtccccctgctcgagctgcttgtcgtaggccttgtcgtgctcgagggccgcggcgtctgcctcgttgaccggctctcccttgtcgagtccgttgaagggtccgaggtacctgtagccaggaagcaccagaccccggccgtcgtcctgcttttgctggttggctttgggtttcggggctccaggtttcaagtcccaccactcgcgaatgccctcagagaggttgccctcgagccaatctggaagataaccatcggcagccatacctggtttaagtcatttattgctcagaaacacagtcatccaggtccacgttggccagatcgcaggccgagcaagcaatctcgggagcccgccccagcagatgatgaatggcacagagtttccgatacgtcctctttctgacgaccggttgagattctgacacgccggggaaacattctgaacagtctctggtcccgtgcgtgaagcaaatgttgaaattctgattcattctctcgcatgtcttgcaggggaacagcatctgaagcatgcccgcgtgacgagaacatttgttttggtacctgtcggcaaagtccaccggagctccttccgcgtctgacgtcgatggatccgcgactgaggggcaggcccgcttgggctcgcttttatccgcgtcatcgggggcgggtctcttgttggctccaccctttctgacgtagaactcatacgccacctcggtcacgtgatcctgcgcccagcggaagaactctttgacttcctgctttgtcaccttgccaaagtcatgctccagacggcgggtgagttcaaatttgaacatccggtcttgtaacggctgctggtgctcgaaggtggtgctgttcccgtcaatcacggcgcacatgttggtgttggaagtgacgatcacgggggtgggatcgatctgggcggacgacttgcacttttggtccacgcgcaccttgctgccgccgagaatggccttggcggactccacgaccttggccgtcatcctgccctcctcccaccagatcaccatcttgtcgacgcaatcgttgaagggaaagttctcattggtccagttgacgcagccgtagaaagggcgaattc

SEQ ID NO: 4826 - protein, 728 aa, Adeno-associated virus
MAADGYLPDWLEDNLSEGIREWWDLKPGAPKPKANQQKQDDGRGLVLPGYRYLGPFNGLDKGEPVNEADAAALEHDKAYDKQLEQGDNPYLKYNHADAEFQERLQEDTSFGGNLGRAVFQAKKRVLEPLGLVEEGAKTAPGKKRPIESPDSSTGIGKNGQPPAKKKLNFGQTGDSESVPDPQPLGEPPAAPSGLGSGTMAAGGGAPMADNNEGADGVGNASGNWHCDSTWLGDRVITTSTRTWALPTYNNHLYKQISSQSGATNDNHFFGYSTPWGYFDFNRFHCHFSPRDWQRLINNNWGFRPRKLRFKLFNIQVKEVTTNDGVTTIANNLTSTIQVFSDSEYQLPYVLGSAHQGCLPPFPADVFMIPQYGYLTLNNGSQSVGRSSFYCLEYFPSQMLRTGDNFEFSYTFEEVPFHSSYAHSQSLDRLMNPLIDQYLYYLARTQSTTGSTRELQFHQAGPNTMAEQSKNWLPGPCYRQQRLSKNIDSNNNSNFAWTGATKYHLNGRNSLTNPGVAMATNKDDEDQFFPINGVLVFGKTGAANKTTLENVLMTSEEEIKTTNPVATEEYGVVSSNLQSSTAGPQTQTVNSQGALPGMVWQNRDVYLQGPIWAKIPHTDGNFHPSPLMGGFGLKHPPPQILIKNTPVPANPPEVFTPAKFASFITQYSTGQVSVEIEWELQKENSKRWNPEIQYTSNYAKSNNVEFAVNNEGVYTEPRPIGTRYLTRNL

SEQ ID NO: 4827 - protein, 728 aa, Adeno-associated virus; identical to SEQ ID NO: 4822

SEQ ID NO: 4828 - protein, 728 aa, Adeno-associated virus
MAADGYLPDWLEDNLSEGIREWWDLKPGAPKPKANQQKQDDGRGLVLPGYKYLGPFNGLDKGEPVNEADAAALEHDKAYDKQLEQGDNPYLKYNHADAEFQERLQEDTSFGGNLGRAVFQAKKRVLEPLGLVEEGAKTAPGKKRPIESPDSSTGIGKNGQPPAKKKLNFGQTGDSESVPDPQPLGEPPAAPSGLGSGTMAAGGGAPMADNNEGADGVGNASGNWHCDSTWLGDRVITTSTRTWALPTYNNHLYKQISSQSGATNDNHFFGYSTPWGYFDFNRFHCHFSPRDWQRLINNNWGFRPRKLRFKLFNIQVKEVTTNDGVTTIANNLTSTIQVFSDSEYQLPYVLGSAHQGCLPPFPADVFMIPQYGYLTLNNGSQSVGRSSFYCLEYFPSQMLRTGNNFEFSYTFEEVPFHSSYAHSQSLDRLMNPLIDQYLYYLARTQSTTGSTRELQFHQAGPNTMAEQSKNWLPGPCYRQQRLSKNIDSNNNSNFAWTGATKYHLNGRNSLTNPGVAMATNKDDEDQFFPINGVLVFGKTGAANKTTLENVLMTSEEEIKTTNPVATEEYGVVSSNLQSSTAGPQTQTVNSQGALPGMVWQNRDVYLQGPIWAKIPHTDGNFHPSPLMGGFGLKHPPPQILIKNTPVPANPPEVFTPAKFASFITQYSTGQVSVEIEWELQKENSKRWNPEIQYTSNYAKSNNVEFAVNNEGVYTEPRPIGTRYLTRNL

SEQ ID NO: 4829 - protein, 728 aa, Adeno-associated virus
MAADGYLPDWLEDNLSEGIREWWDLKPGAPKPKANQQKQDDGRGLVLPGYKYLGPFNGLDKGEPVNEADAAALEHDKAYDKQLEQGDNPYLKYNHADAEFQERLQEDTSFGGNLGRAVFQAKKRVLEPLGLVEEGAKTAPGKKRPIESPDSSTGIGKKGQQPAKKKLNFGQTGDSESVPDPQPLGEPPAAPSGLGSGTMAAGGGAPMADNNEGADGVGNASGNWHCDSTWLGDRVITTSTRTWALPTYNNHLYKQISSQSGATNDNHFFGYSTPWGYFDFNRFHCHFSPRDWQRLINNNWGFRPRKLRFKLFNIQVKEVTTNDGVTTIANNLTSTIQVFSDSEYQLPYVLGSAHQGCLPPFPADVFMIPQYGYLTLNNGSQSVGRSSFYCLEYFPSQMLRTGNNFEFSYTFEEVPFHSSYAHSQSLDRLMNPLIDQYLYYLARTQSTTGSTRELQFHQAGPNTMAEQSKNWLPGPCYRQQRLSKNIDSNNNSNFAWTGATKYHLNGRNSLTNPGVAMATNKDDEDQFFPINGVLVFGKTGAANKTTLENVLMTSEEEIKTTNPVATEEYGVVSSNLQSSTAGPQTQTVNSQGALPGMVWQNRDVYLQGPIWAKIPHTDGNFHPSPLMGGFGLKHPPPQILIKNTPVPANPPEVFTPAKFASFITQYSTGQVSVEIEWELQKENSKRWNPEIQYTSNYAKSNNVEFAVNNEGVYTEPRPIGTRYLTRNL

SEQ ID NO: 4830 - DNA, 3098 bp, Adeno-associated virus
gaattcgcccttcgcagagaccaaagttcaactgaaacgaatcaaccggtttattgattaacaagtaattacaggttacgggtgaggtaacgggtgccaatggggcgaggctcagtataaaccccttcgttgttgacagcaaattccacattattagacttggcataatttgaggtgtactgaatctctggattccagcgtttgctgttttctttctgcagttcccactcgatctccacgctgacctggccggtgctgtactgcgtgataaatgaggcaaactaggcaggagtaaacacccctggaggattagcaggtaccggggtgtttttgatgagaatttgaggaggcgggtgtttgagtccaaatccgcccatcaggggagacgggtgaaagttgccgtccgtgtgaggaattttggcccagatgggaccctgcaggtacacgtcccggttctgccagaccatgccgggcagagccccctggctgttgacagtctgtgtctggggtccggccgtagacgattgcaggttgctggagaccacaccgtattcttctgtagccacgggattggtggttttgatctcctcctcgctggtcattagcacgttttccagcgttgtcttgttggcagcccccgttttgccaaaaaccagcactccgttgatgggaaagaactggccctcgtcgtccttgttggtggccatggctacgcccgggttggttaatgaatttctaccattcagatggtatttagtggccccggtccaggcaaagttactgttgttgttgctgtctatgttttttgacagtctctgctgccgataacagggtccgggcagccagttctttgattgctcggccatggtgttgggcccagcctgatggaactgcagctcccttgtggaccccgtagtgctctgggtccgggccaggtagtacaggtactggtcgatgaggggattcatcagccggtccaggctctggctgtgcgcatagctgctgtggaaaggcacttcctcaaaggtgtagctgaattcaaagttattgcccgttctcagcatctgagaaggaaagtactccaggcagtagaaggaggaacgtcccatagactgactgccgttgtttagagtcagatatccgtactgaggaatcatgaacacgtccgcagggaacggagggaggcagccctggtgcgcagagccgaggacgtacggcagttggtactccgagtccgagaagacctgaatcgtgctggtaaggttattagcgatggtcgtaacgccgtcgttcgtcgtgacctccttgacctggatgttgaacaacttgaaccgcagctttctgggccggaatccccagttgttgttgatgagtcgctgccagtcacgtggtgagaagtggcagtggaatctgttgaagtcaaaatagccccagggggtgctgtagccgaagaagtggttgtcgttggtagccccgctctgacttgatatctgcttgtagaggtggttgttgtaggtgggcagggcccaggtgcgggtgctggtggtgatgactctgtcgcccagccatgtggaatcgcaatgccaatttccggaggcattacccactccgtcggcgccttcgttattgtctgccattggtgcgccaccgcctgcagccattgtaccagatcccagacctgagggcgcggcgggaggttctccgagaggttgggggtcgggcactgactctgagtcgccagtctgcccaaagttgagcttctttttagcgggctgctggcctttcttgccgatgcccgtggaggagtcgggggattctatgggtctcttctttccaggagccgtcttagcgccttcctcaaccagaccgagaggttcgagaacccgcttcttggcctggaagactgctcgcccgaggttgcccccaaaagacgtatcttcttgaagacgctcctgaaactcagcgtcggcgtggttgtacttgaggtacgggttgtccccctgctcgagctgcttgtcgtaggccttgtcgtgctcgagggccgcggcgtctgcctcgttgaccggctctcccttgtcgagtccgttgaagggtccgaggtacttgtagccaggaagcaccagaccccggccgtcgtcctgcttttgctggttggctttgggtttcggggctccaggtttcaagtcccaccactcgcgaatgccctcagagaggttgtcctcgagccaatctggaagataaccatcggcagccatacctggtttaagtcatttattgctcagaaacacagtcatccaggtccacgttgaccagatcgcaggccgagcaagcaatctcgggagcccgccccagcagatgatgaatggcacagagtttccgatacgtcctctttctgacgaccggttgagattctgacacgccggggaaacattctgaacagtctctggtcccgtgcgtgaagcaaatgttgaaattctgattcattctctcgcatgtcttgcagggaaacagcatctgaagcatgcccgcgtgacgagaacatttgttttggtacctgtcggcaaagtccaccggagctccttccgcgtctgacgtcgatggatccgcgactgaggggcaggcccgcttgggctcgcttttatccgcgtcatcgggggcgggcctcttgttggctccaccctttctgacgtagaactcatgcgccacctcggtcacgtgatcctgcgcccagcggaagaactctttgacttcctgctttgtcaccttgccaaagtcctgctccagacggcgggtgagttcaaatttgaacatccggtcttgtaacggctgctggtgctcgaaggtggtgctgttcccgtcaatcacggcgcacatgttggtgttggaagtgacgatcacgggggtgggatcgatctgggcggacgacttgcacttttggtccacgcgcaccttgctgccgccgagaatggccttggcggactccacgaccttggccgtcatcttgccctcctcccaccagatcaccatcttgtcgacgcaatcgttgaagggaaagttctcattggtccagttgacgcagccgtagaaagggcgaattc

SEQ ID NO: 4831 - protein, 729 aa, Adeno-associated virus
MAADGYLPDWLEDNLSEGIREWWDLKPGAPKPKANQQKQDDGRGLVLPGYKYLGPFNGLDKGEPVNAADAAALEHDKAYDQQLKAGDNPYLRYNHADAEFQERLQEDTSFGGNLGRAVFQAKKRVLEPLGLVEEGAKTAPGKKRPIDSPDSSTGIGKKGQQPAKKKLNFGQTGDSESVPDPQPLGEPPAAPSSVGSGTMAAGGGAPMADNNEGADGVGNASGNWHCDSTWLGDRVITTSTRTWALPTYNNHLYKQISSSSSGATNDNHYFGYSTPWGYFDFNRFHCHFSPRDWQRLINNNWGFRPKKLRFKLFNIQVKEVTTNDGVTTIANNLTSTVQVFSDSEYQLPYVLGSAHQGCLPPFPADVFMIPQYGYLTLNNGSQSVGRSSFYCLEYFPSQMLRTGNNFEFSYSFEDVPFHSSYAHSQSLDRLMNPLIDQYLYYLARTQSTTGSTRELQFHQAGPNTMAEQSKNWLPGPCYRQQGLSKNLDFNNNSNFAWTAATKYHLNGRNSLTNPGIPMATNKDDEDQFFPINGVLVFGKTGAANKTTLENVLMTSEEEIKTTNPVATEEYGVVSSNLQPSTAGPQSQTINSQGALPGMVWQNRDVYLQGPIWAKIPHTDGNFHPSPLMGGFGLKHPPPQILIKNTPVPANPPEVFTPAKFASFITQYSTGQVSVEIEWELQKENSKRWNPEIQYTSNYAKSNNVEFAVNPDGVYTEPRPIGTRYLPRNL

SEQ ID NO: 4832 - protein, 1458 aa, Adeno-associated virus
MAADGYLPDWLEDNLSEGIREWWDLKPGAPKPKANQQKQDDGRGLVLPGYKYLGPFNGLDKGEPVNAADAAALEHDKAYDQQLKAGDNPYLRYNHADAEFQERLQEDTSFGGNLGRAVFQAKKRVLEPLGLVEEGAKTAPGKKRPIDSPDSSTGIGKKGQQPAKKKLNFGQTGDSESVPDPQPLGEPPAAPSSVGSGTMAAGGGAPTADNNEGADGVGNASGNWHCDSTWLGDRVITTSTRTWALPTYNNHLYKQISSSSSGATNDNHYFGYSTPWGYFDFNRFHCHFSPRDWQRLINNNWGFRPKKLRFKLFNIQVKEVTTNDGVTTIANNLTSTVQVFSDSEYQLPYVLGSAHQGCLPPFPADVFMIPQYGYLTLNNGSQSVGRSSFYCLEYFPSQMLRTGNNFEFSYSFEDVPFHSSYAHSQSLDRLMNPLIDQYLYYLARTQSTTGSTRELQFHQAGPNTMAEQSKNWLPGPCYRQQRLSKNLDFNNNSNFAWTAATKYHLNGRNSLTNPGIPMATNKDDEDQFFPINGVLVFGKTGAANKTTLENVLMTSEEEIKTTNPVATEEYGVVSSNLQSSTAGPQSQTINSQGALPGMVWQNRDVYLQGPIWAKIPHTDGNFHPSPLMGGFGLEHPPPQILIKNTPVPANPPEVFTPAKFASFITQYSTGQVSVEIEWELQKENSKRWNPEIQYTSNYAKSNNVEFAVNPDGVYTEPRPIGTRYLTRNLMAADGYLPDWLEDNLSEGIREWWDLKPGAPKPKANQQKQDDGRGLVLPGYKYLGPFNGLDKGEPVNAADAAALEHDKAYDQQLKAGDNPYLRYNHADAEFQERLQEDTSFGGNLGRAVFQAKKRVLEPLGLVEEGAKTAPGKKRPIGSPDSSTGIGKKGQQPAKKKLNFGQTGDSESVPDPQPLGEPPAAPSSVGSGTMAAGGGAPMADNNEGADGVGNASGNWHCDSTWLGDRVITTSTRTWALPTYNNHLYKQISSSSSGATNDNHYFGYSTPWGYFDFNRFHCHFSPRDWQRLINNNWGFRPKKLRFKLLNIQVKEVTTNDGVTTIANNLTSTVQVFSDSEYQLPYVLGSAHQGCLPPFPADVFMIPQYGYLTLDNGSQSVGRSSFYCLEYFPSQMLRTGNNFEFSYSFEDVPFHSSYAHSQSLDRLMNPLIDQYLYYLARTQSTTGSTRELQFHQAGPNTMAEQSKNWLPGPCYRQQRLSKNLDFNNNSNFAWTAATKYHLNGRNSLTNPGIPMATNKDDEDQFFPINGVLVFGKTGAANKTTLENVLMTSEEEIKTTNPVATEEYGVVSSNLQSSTAGPQSQTINSQGALPGMVWQNRDVYLQGPIWAKIPHTDGNFHPSPLMGGFGLKHPPPQILIKNTPVPANPPEVFTPAKFASFITQYSTGQVSVEIEWELQKENSKRWNPEIQYTSNYAKSNNVEFAVNPDGVYTEPRPIGTRYLTRNL

SEQ ID NO: 4833 - protein, 729 aa, Adeno-associated virus
MAADGYLPDWLEDNLSEGIREWWDLKPGAPKPKANQQKQDDGRGLVLPGYKYLGPFNGLDKGEPVNAADAAALEHDKAYDQQLKAGDNPYLRYNHADAEFQERLQEDTSFGGNLGRAVFQAKKRVLEPLGLVEEGAKTAPGKKRPIDSPDSSTGIGKKGQQPAKKKLNFGQTGDSESVPDPQPLGEPPAAPSSVGSGTMAAGGGAPTADNNEGADGVGNASGNWHCDSTWLGDRVITTSTRTWALPTYNNHLYKQISSSSSGATNDNHYFGYSTPWGYFDFNRFHCHFSPRDWQRLINNNWGFRPKKLRFKLFNIQVKEVTTNDGVTTIANNLTSTVQVFSDSEYQLPYVLGSAHQGCLPPFPADVFMIPQYGYLTLNNGSQSVGRSSFYCLEYFPSQMLRTGNNFEFSYSFEDVPFHSSYAHSQSLDRLMNPLIDQYLYYLARTQSTTGSTRELQFHQAGPNTMAEQSKNWLPGPCYRQQRLSKNLDFNNNSNFAWTAATKYHLNGRNSLTNPGIPMATNKDDEDQFFPINGVLVFGKTGAANKTTLENVLMTSEEEIKTTNPVATEEYGVVSSNLQSSTAGPQSQTINSQGALPGMVWQNRDVYLQGPIWAKIPHTDGNFHPSPLMGGFGLEHPPPQILIKNTPVPANPPEVFTPAKFASFITQYSTGQVSVEIEWELQKENSKRWNPEIQYTSNYAKSNNVEFAVNPDGVYTEPRPIGTRYLTRNL

SEQ ID NO: 4834 - DNA, 3075 bp, Adeno-associated virus
tgagaactttcctttcaacgattgcgtcggacaagatggtgatctggtgggaggaggggaagatgaccgccaaggtcgtggagtcggccaaagccattcttggaggaagcaaggtgcgtgtggaccagaaatgcaagtcctcggcccagatagacccgactcccgtgatcgtcacctccaacaccaacatgtgcgccgtgattgacgggaactcaacgaccttcgagcaccagcagccgttgcaagaccggatgttcaaatttgaacttacccgccgtctggatcatgactttggaaaggtcaccaagcaggaagtgaaagactttttccggtgggcaaaggatcacgtggttgaggtggagcatgaattctacgtcaaaaagggtggagctaagaaaagacccgcccccagtgacgcagatataagtgagcccaaacgggcgcgcgagtcagttgcgcagccatcaacgtcagacgcggaagcttcgatcaactacgcggacaggtaccaaaaacaaatgttctcgtcacgtgggcatgaatctgatgctgtttccctgcagacaatgcgagagaatgaatcagaattcaaatatctgcttcactcacggacagaaagactgtttagagtgctttcccgtgtcagaatctcaacccgtttctgtcgtcaaaaaggcgtatcagaaactgtgctacattcatcatatcatgggaaaggtgccagacgcttgcactgcctgcgatctggtcaatgtggatttggatgactgcatctctgaacaataaatgatttaaatcaggtatggctgccgatggttatcctccagattggctcgaggacactctctctgaagggataagacagtggtggaagctcaaacctggcccaccaccaccaaagcccgcagagcggcataaggacgacagcaggggtcttgtgcttcctgggtacaagtacctcggacccttcaacggactcgacaagggggagccggtcaacgaggcagacgccgcggccctcgagcacgacaaggcctacgaccggcagctcgacagcggagacaacccgtacctcaagtacaaccacgccgacgcagagtttcaggagcgccttaaagaagatacgtcttttgggggcaacctcggacgagcagtcttccaggcgaaaaagagggttcttgaacctctgggcctggttgaggaacctgttaagacggctccgggaaaaaagaggccggtagagcactctcctgtggagccagactcctcctcgggaaccggaaaagcgggccagcggcctgcaagaaaaagattaaattttggtcagactggagacgcagactccgtacctgacccccagcctctcggacagccaccagcagccccctctggtctgggatctactacaatggctacaggcagtggcgcaccaatggcagacaataacgagggtgccgatggagtgggtaattcctcaggaaattggcattgcgattcccaatggctgggcgacagagtcatcaccaccagcacccgaacctgggccctgcccacatacaacaaccacctctacaagcaaatctccagccaatcaggagccagcaacgacaaccactactttggctacagcaccccctgggggtattttgacttcaacagattccactgccacttttcaccacgtgactggcaaagactcatcaacaacaactggggattccggcccaaaagactcaacttcaagctctttaatattcaagtcaaagaggtcacgcagaatgacggtacgacgacgattgccaataaccttaccagcacggttcaggtgtttactgactcggagtaccagctcccgtacgtcctgggctcggcgcatcaaggatgcctcccgccgtttccagcggacgtcttcatggtcccacagtatggatacctcaccctgaacaacgggagtcaggcggtaggacgctcttccttttactgcctggagtactttccttctcagatgctgcgtactggaaacaactttcagttcagctacacttttgaagacgtgcctttccacagcagctacgctcacagccagagtctggatcggctgatgaatcctctgatcgaccagtacctgtattatctgaacaagacacaaacaaatagtggaactcttcagcagtctcggctactgtttagccaagctggaccaaccaacatgtctcttcaagctaaaaactggctgcctggaccttgctacagacagcagcgtctgtcaaaacaggcaaacgacaacaacaacagcaactttccctggactgcagctacaaagtatcatctaaatggccgggactcgttggttaatccaggaccagctatggccagtcacaaggatgacgaagaaaagtttttccccatgcatggaaccctgatatttggtaaacaaggaacaaatgccaacgacgcggatttggaaaatgtcatgattacagatgaagaagaaatcagggccaccaatcccgtggctacggagcagtacgggactgtgtcaaataatttgcaaaactcaaacactggtccaactactggaactgtcaatcgccaaggagcgttacctggtatggtgtggcaggatcgagacgtgtacctgcagggacccatttgggccaagattcctcacaccgatggacactttcatccttctccactgatgggaggttttggactcaaacacccgcctcctcagatcatgatcaaaaacactcccgttccagccaatcctcccacaaacttcagttctgccaagtttgcttctttcatcacacagtattccacgggacaggtcagcgtggagatcgagtgggagctgcagaaggagaacagcaaacgctggaatcccgaaattcagtacacttccaactacaacaagtctgttaatgtggactttactgtggacactaatggtgtgtattcagagcctcgccccattggcaccagatacctgactcgtaatctgtaattgcttgttaatcaataaaccgtttaattcgtttcagttgaactttggtctctgcgaagggcgaa

SEQ ID NO: 4835 - DNA, 3142 bp, Adeno-associated virus
aaaacgacgggccagtgattgtaatacgactcactatagggcgaaattgaaattagcggccgcgaattcgcctttcgcagagaccaaagttcaactgaaacgaattaaacggtttattgattaacaagcaattacagattacgagtcaggtatctggtgccaatggggcgaggctctgaatacacaccattagtgtccacagtaaagtccacattaacagacttgttgtagttggaagtgtactgaatttcgggattccagcgtttgctgttctccttctgcagctcccactcgatctccacgctgacctgtcccgtggaatactgtgtgatgaaagaagcaaacttggcagaactgaagtttgtgggaggattggctggaacgggagtgtttttgatcatgatctgaggaggcgggtgtttgagtccaaaacctcccatcagtggagaaggatgaaagtgtccatcggtgtgaggaatcttggcccaaatgggtccctgcaggtacacgtctcgatcctgccacaccataccaggtaacgctccttggtgattgacagttccagtagttggaccagtgtttgagttttgcaaattatttgacacagtcccgtactgctccgtagccacgggattggtggccctgatttcttcttcatctgtaatcatgacattttccaaatccgcgtcgttggcatttgttccttgtttaccaaatatcagggttccatgcatggggaaaaacttttcttcgtcatccttgtgactggccatagctggtcctggattaaccaacgagtcccggccatttagatgatactttgtagctgcagtccagggaaagttgctgttgttgttgtcgtttgcctgttttgacagacgctgctgtctgtagcaaggtccaggcagccagtttttagcttgaagagacatgttggttggtccagcttggctaaacagtagccgagactgctgaagagttccactatttgtttgtgtcttgttcagataatacaggtactggtcgatcagaggattcatcagccgatccagactctggctgtgagcgtagctgctgtggaaaggcacgtcttcaaaagtgtagctgaactgaaagttgtttccagtacgcagcatctgagaaggaaagtactccaggcagtaaaaggaagagcgtcctaccgcctgactcccgttgttcagggtgaggtatccatactgtgggaccatgaagacgtccgctggaaacggcgggaggcatccttgatgcgccgagcccaggacgtacgggagctggtactccgagtcagtaaacacctgaaccgtgctggtaaggttattggcaatcgtcgtcgtaccgtcattctgcgtgacctctttgacttgaatattaaagagcttgaagttgagtcttttgggccggaatccccggttgttgttgacgagtctttgccagtcacgtggtgaaaagtggcagtggaatctgttgaagtcaaaatacccccagggggtgctgtagccaaagtagtggttgtcgttgctggctcctgattggctggagatttgcttgtagaggtggttgttgtatgtgggcagggcccaggttcgggtgctggtggtgatgactctgtcgcccagccattgggaatcgcaatgccaatttcctgaggaattacccactccatcggcaccctcgttattgtctgccattggtgcgccactgcctgtagccattgtagtagatcccagaccagagggggctgctggtggctgtccgagaggctgggggtcaggtacggagtctgcgtctccagtctgaccaaaatttaatctttttcttgcaggctgctggcccgcttttccggttcccgaggaggagtctggctccacaggagagtgctctaccggcctcttttttcccggagccgtcttaacaggctcctcaaccaggcccagaggttcaagaaccctctttttcgcctggaagactgctcgtccgaggttgcccccaaaagacgtatcttctttaaggcgctcctgaaactctgcgtcggcgtggttgtacttgaggtacgggttgtctccgctgtcgagctgccggtcgtaggccttgtcgtgctcgagggccgcggcgtctgcctcgttgaccggctcccccttgtcgagtccgttgaagggtccgaggtacttgtacccaggaagcacaagacccctgctgtcgtccttatgccgctctgcgggctttggtggtggtgggccaggtttgagcttccaccactgtcttattccttcagagagagtgtcctcgagccaatctggaagataaccatcggcagccatacctgatttaaatcatttattgttcagagatgcagtcatccaaatccacattgaccagatcgcaggcagtgcaagcgtctggcacctttcccatgatatgatgaatgtagcacagtttctgatacgcctttttgacgacagaaacgggttgagattctgacacgggaaagcactctaaacagtctttctgtccgtgagtgaagcagatatttgaattctgattcattctctcgcattgtctgcagggaaacagcatcagattcatgcccacgtgacgagaacatttgttttggtacctgtccgcgtagttgatcgaagcttccgcgtctgacgtcgatggctgcgcaactgactcgcgcgcccgtttgggctcacttatatctgcgtcactgggggcgggtcttttcttagctccaccctttttgacgtagaattcatgctccacctcaaccacgtgatcctttgcccaccggaaaaagtctttcacttcctgcttggtgacctttccaaagtcatgatccagacggcgggtaagttcaaatttgaacatccggtcttgcaacggctgctggtgctcgaaggtcgttgagttcccgtcaatcacggcgcacatgttggtgttggaggtgacgatcacgggagtcgggtctatctgggccgaggacttgcatttctggtccacacgcaccttgcttcctccaagaatggctttggccgactccacgaccttggcggtcatcttcccctcctcccaccagatcaccatcttgtcgacgcaatggtaaaaggaaagttctcattgg

SEQ ID NO: 4836 - DNA, 2208 bp, Adeno-associated virus
atggctgccgatggttatcttccagattggctcgaggacactctctctgaaggaataagacagtggtggaagctcaaacctggcccaccaccaccaaagcccgcagagcggcataaggacgacagcaggggtcttgtgcttcctgggtacaagtacctcggacccttcaacggactcgacaagggggagccggtcaacgaggcagacgccgcggccctcgagcacgacaaggcctacgaccggcagctcgacagcggagacaacccgtacctcaagtacaaccacgccgacgcagagtttcaggagcgccttaaagaagatacgtcttttgggggcaacctcggacgagcagtcttccaggcgaaaaagagggttcttgaacctctgggcctggttgaggaacctgttaagacggctccgggaaaaaagaggccggtagagcactctcctgtggagccagactcctcctcgggaaccggaaaagcgggccagcagcctgcaagaaaaagattaaattttggtcagactggagacgcagactccgtacctgacccccagcctctcggacagccaccagcagccccctctggtctgggatctactacaatggctacaggcagtggcgcaccaatggcagacaataacgagggtgccgatggagtgggtaattcctcaggaaattggcattgcgattcccaatggctgggcgacagagtcatcaccaccagcacccgaacctgggccctgcccacatacaacaaccacctctacaagcaaatctccagccaatcaggagccagcaacgacaaccactactttggctacagcaccccctgggggtattttgacttcaacagattccactgccacttttcaccacgtgactggcaaagactcatcaacaacaactggggattccggcccaaaagactcaacttcaagctctttaatattcaagtcaaagaggtcacgcagaatggcggtacgacgacgattgccaataaccttaccagcacggttcaggtgtttactgactcggagtaccagctcccgtacgtcctgggctcggcgcatcaaggatgcctcccgccgtttccagcggacgtcttcatggtcccacagtatggatacctcaccctgaacaacgggagtcaggcggtaggacgctcttccttttactgcctggagtactttccttctcagatgctgcgtactggaaacaactttcagttcagctacacttttgaagacgtgcctttccacagcagctacgctcacagccagagtctggatcggctgatgaatcctctgatcgaccagtacctgtattatctgaacaagacacaaacaaatagtggaactcttcagcagtctcggctactgtttagccaagctggaccaaccaacatgtctcttcaagctaaaaactggctgcctggaccttgctacagacagcagcgtctgtcaaaacaggcaaacggcaacaacaacagcaactttccctggactgcagctacaaagtatcatctaaatggccgggactcgttggttaatccaggaccagctatggccagtcacaaggatgacgaagaaaagtttttccccatgcatggaaccctgatatttggtaaacaaggaacaaatgccaacgacgcggatttggaaaatgtcatgattacagatgaagaagaaatcagggccaccaatcccgtggctacggagcagtacgggactgtgtcaaataatttgcaaaactcaaacactggtccaactactggaactgtcaatcaccaaggagcgttacctggtatggtgtggcaggatcgagacgtgtacctgcagggacccatttgggccaagattcctcacaccgatggacactttcatccttctccactgacgggaggttttggactcaaacacccgcctcctcagatcatgatcaaaaacactcccgttccagccaatcctcccacaaacttcagttctgccaagtttgcttctttcatcacacagtattccacgggacaggtcagcgtggagatcgagtgggagctgcagaaggagaacagcaaacgctggaatcccgaaattcagtacacttccaactacaacaagtctgttaatgtggactttactgtggacactaatggtgtgtattcagagcctcgccccattggcaccagatacctgactcgtaatctgtaa

SEQ ID NO: 4837 - protein, 735 aa, Adeno-associated virus
MAADGYLPDWLEDTLSEGIRQWWKLKPGPPPPKPAERHKDDSRGLVLPGYKYLGPFNGLDKGEPVNEADAAALEHDKAYDRQLDSGDNPYLKYNHADAEFQERLKEDTSFGGNLGRAVFQAKKRVLEPLGLVEEPVKTAPGKKRPVEHSPVEPDSSSGTGKAGQQPARKRLNFGQTGDADSVPDPQPLGQPPAAPSGLGSTTMATGSGAPMADNNEGADGVGNSSGNWHCDSQWLGDRVITTSTRTWALPTYNNHLYKQISSQSGASNDNHYFGYSTPWGYFDFNRFHCHFSPRDWQRLINNNWGFRPKRLNFKLFNIQVKEVTQNGGTTTIANNLTSTVQVFTDSEYQLPYVLGSAHQGCLPPFPADVFMVPQYGYLTLNNGSQAVGRSSFYCLEYFPSQMLRTGNNFQFSYTFEDVPFHSSYAHSQSLDRLMNPLIDQYLYYLNKTQTNSGTLQQSRLLFSQAGPTNMSLQAKNWLPGPCYRQQRLSKQANGNNNSNFPWTAATKYHLNGRDSLVNPGPAMASHKDDEEKFFPMHGTLIFGKQGTNANDADLENVMITDEEEIRATNPVATEQYGTVSNNLQNSNTGPTTGTVNHQGALPGMVWQDRDVYLQGPIWAKIPHTDGHFHPSPLTGGFGLKHPPPQIMIKNTPVPANPPTNFSSAKFASFITQYSTGQVSVEIEWELQKENSKRWNPEIQYTSNYNKSVNVDFTVDTNGVYSEPRPIGTRYLTRNL

SEQ ID NO: 4838 - DNA, 2208 bp, Adeno-associated virus
atggctgccgatggttatcttccagattggctcgaggacactctctctgaaggaataagacagtggtggaagctcaaacctggcccaccaccaccaaagctcgcagagcggcatcaggacgacagcaggggtcttgtgcttcctgggtacaagtacctcggacccttcaacggactcgacaaaggagagccggtcaacgaggcagacgccgcggccctcgagcacgacaaggcctacgaccggcagctcgacagcggagacaacccgtacctcaagtacaaccacgccgacgcggagtttcaggagcgtcttaaagaagatacgtcttttgggggcaacctcggacgagcagtcttccaggcgaaaaagagggttcttgaacctctgggcctggttgaggaacctgttaagacggctccgggaaaaaagaggccggtagagcactctcctgtggagccagactcctcctcgggaaccggaaaggcgggccatcagcctgcgagaaagagattgaattttggtcagactggagacgcagactccgtacctgacccccagcctctcggacagccaccagcagcccccacaagtctgggatctactacaatggctacaggcagtggcgcaccaatggcagacaataacgagggtgccgatggagtgggtaattcctcaggaaattggcattgcgattcccaatggctgggcgacagagtcatcaccaccagcacccgaacctgggccctgcccacctacaacaaccacctctacaagcaaatctccagccaatcaggagcctcgaacgacaaccactactttggctacagcaccccctgggggtattttgacttcaacagattccactgtcacttctccccacgtgattggcaaagactcatcaacaacaactggggattccgacccaagagactcaacttcaagctctttaacattcaagtcaaagaggtcacgcagaatgacggtacgacgacgattgccaataaccttaccagcacggttcaggtgtttactgactcggagtaccagctcccgtacgtcctcggctcggcgcatcaaggatgcctcccgccgtttccagcggacgtcttcacggtcccacagtatggatacctcaccctgaacaacgggagtcaggcggtaggacgctcttccttttactgcctggagtactttccttctcagatgctgcgtactggaaacaaccttaccttcagctacacctttgaggacgttcctttccacagcagctacgctcacagccagagtttggaccggctgatgaatcctctgatcgaccagtatctatattatctgaacaggacacaatcaaatagtggaactcttcagcagtctaggctactgtttagccaagctggacccaccagcatgtctcttcaagctaaaaactggctgcctggaccttgctacagacagcagcgtctttcaaagcaggcaaacgacaacaacaacagcaactttccctggactgcggctacaaagtatcatctaaatggccgggactcgttggttaatccaggaccagctatggccagccacaaagacgatgaagaaaagtttttccccatgcatggaaccctgatatttggtaaacaaggaacaaatgctaacgacgcggatttggagcatgttatgattacagatgaagaagaaatcaggaccaccaatcctgtggctacagagcagtacggaaacgtgtcaaataatttgcaaaactcaaatactggtccaactacagaaaatgtcaatcaccagggagcgttacctggtatggtgtggcaggatcgagacgtgtacctgcagggacccatttgggccaagattcctcacaccgacggacactttcacccttctccactgatgggaggttttggactcaaacacccgcctcctcaaatcatgatcaaaaacactcccgttccagccaatcctcccacaaactacagttctgccaagtttgcttctttcatcacacagtattccacgggccaggtcagcgtggagattgagtgggagctgcggaaggagaacagcaaacgctggaaccccgagatccagtatacttccaactacaacaaatctgttaatgtggactttactgtggacactaatggtgtgtattcagagcctcgccccattggcaccagatacctgactcgtaatctgtaa

SEQ ID NO: 4839 - protein, 735 aa, Adeno-associated virus
MAADGYLPDWLEDTLSEGIRQWWKLKPGPPPPKLAERHQDDSRGLVLPGYKYLGPFNGLDKGEPVNEADAAALEHDKAYDRQLDSGDNPYLKYNHADAEFQERLKEDTSFGGNLGRAVFQAKKRVLEPLGLVEEPVKTAPGKKRPVEHSPVEPDSSSGTGKAGHQPARKRLNFGQTGDADSVPDPQPLGQPPAAPTSLGSTTMATGSGAPMADNNEGADGVGNSSGNWHCDSQWLGDRVITTSTRTWALPTYNNHLYKQISSQSGASNDNHYFGYSTPWGYFDFNRFHCHFSPRDWQRLINNNWGFRPKRLNFKLFNIQVKEVTQNDGTTTIANNLTSTVQVFTDSEYQLPYVLGSAHQGCLPPFPADVFTVPQYGYLTLNNGSQAVGRSSFYCLEYFPSQMLRTGNNLTFSYTFEDVPFHSSYAHSQSLDRLMNPLIDQYLYYLNRTQSNSGTLQQSRLLFSQAGPTSMSLQAKNWLPGPCYRQQRLSKQANDNNNSNFPWTAATKYHLNGRDSLVNPGPAMASHKDDEEKFFPMHGTLIFGKQGTNANDADLEHVMITDEEEIRTTNPVATEQYGNVSNNLQNSNTGPTTENVNHQGALPGMVWQDRDVYLQGPIWAKIPHTDGHFHPSPLMGGFGLKHPPPQIMIKNTPVPANPPTNYSSAKFASFITQYSTGQVSVEIEWELRKENSKRWNPEIQYTSNYNKSVNVDFTVDTNGVYSEPRPIGTRYLTRNL

SEQ ID NO: 4840 - DNA, 2208 bp, Adeno-associated virus
atggctgccgatggttatcttccagattggctcgaggacactctctctgaaggaataagacagtggtggaagctcaaacctggcccaccaccaccaaagcccgcagagcggcatcaggacgacagcaggggtcttgtgcttcctgggtacaagtacctcggacccttcaacggactcgacaaaggagagccggtcaacgaggcagacgccgcggccctcgagcacgacaaggcctacgaccggcagctcgacagcggagacaacccgtacctcaagtacaaccacgccgacgcggagtttcaggagcgtcttaaagaagatacgtcttttgggggcaacctcggacgagcagtcttccaggcgaaaaagagggttcttgaacctctgggcctggttgaggaacctgttaagacggctccgggaaaaaagaggccggtagagcactctcctgtggagccagactcctcctcgggaaccggaaaagcgggccatcagcctgcgagaaagagattgaattttggtcagactggagacgcagactccgtacctgacccccagcctctcggacagccaccagcagcccccacaagtttgggatctactacaatggctacaggcagtggcgcaccaatggcagacaataacgagggtgccgatggagtgggtaattcctcaggaaattggcattgcgattcccaatggctgggcgacagagtcatcaccaccagcacccgaacctgggccctgcccacctacaacaaccacctctacaagcaaatctccagccaatcaggagcctcgaacgacaaccactactttggctacagcaccccctgggggtattttgacttcaacagattccactgtcacttctccccacgtgattggcaaagactcatcaacaacaactggggattccgacccaagagactcaacttcaagctctttaacattcaagtcaaggaggtcacgcagaatgacggtacgacgacgattgccaataaccttaccagcacggttcaggtgtttactgactcggagtaccagctcccgtacgtcctcggctcggcgcatcaaggatgcctcccgccgtttccagcggacgtcttcatggtcccacagtatggatacctcaccctgaacaacgggagtcaggcggtaggacgctcttccttttactgcctggagtactttccttctcagatgctgcgtactggaaacaactttaccttcagctacacctttgaggacgttcctttccacagcagctacgctcacagccagagtttggaccggctgatgaatcctctgatcgaccagtatctatattatctgaacaggacacaatcaaatagtggaactcttcagcagtctaggctactgtttagccaagctggacccaccagcatgtctcttcaagctaaaaactggctgcctggaccttgctacagacagcagcgtctttcaaagcaggcaaacgacaacaacaacagcaactttccctggactgcggctacaaagtatcgtctaaatggccgggactcgttggttaatccaggaccagctatggccagccacaaagacgatgaagaaaagtttttccccatgcatggaaccctgatatttggtaaacaaggaacaaatgctaacgacgcggatttggagcatgttatgattacagatgaagaagaaatcaggaccaccaatcctgtggctacagagcagtacggaaacgtgtcaaataatttgcaaaactcaaatactggtccaactacagaaaatgtcaatcaccagggagcgttacctggtatggtgtggcaggatcgagacgtgtacctgcagggacccatttgggccaagattcctcacaccgacggacactttcacccttctccactgatgggaggttttggactcaaacacccgcctcctcaaatcatgatcaaaaacactcccgttccagccaatcctcccacaaacttcagttctgccaagtttgcttctttcatcacacagtattccacgggccaggtcagcgtggagattgagtgggagctgcagaaggagaacagcaaacgctggaaccccgagatccagtatacttccaactacaacaaatctgttaatgtggactttactgtggacactaatggtgtgtattcagagcctcgccccattggcaccagatacctgactcgtaatctgtaa

SEQ ID NO: 4841 - protein, 735 aa, Adeno-associated virus
MAADGYLPDWLEDTLSEGIRQWWKLKPGPPPPKPAERHQDDSRGLVLPGYKYLGPFNGLDKGEPVNEADAAALEHDKAYDRQLDSGDNPYLKYNHADAEFQERLKEDTSFGGNLGRAVFQAKKRVLEPLGLVEEPVKTAPGKKRPVEHSPVEPDSSSGTGKAGHQPARKRLNFGQTGDADSVPDPQPLGQPPAAPTSLGSTTMATGSGAPMADNNEGADGVGNSSGNWHCDSQWLGDRVITTSTRTWALPTYNNHLYKQISSQSGASNDNHYFGYSTPWGYFDFNRFHCHFSPRDWQRLINNNWGFRPKRLNFKLFNIQVKEVTQNDGTTTIANNLTSTVQVFTDSEYQLPYVLGSAHQGCLPPFPADVFMVPQYGYLTLNNGSQAVGRSSFYCLEYFPSQMLRTGNNFTFSYTFEDVPFHSSYAHSQSLDRLMNPLIDQYLYYLNRTQSNSGTLQQSRLLFSQAGPTSMSLQAKNWLPGPCYRQQRLSKQANDNNNSNFPWTAATKYRLNGRDSLVNPGPAMASHKDDEEKFFPMHGTLIFGKQGTNANDADLEHVMITDEEEIRTTNPVATEQYGNVSNNLQNSNTGPTTENVNHQGALPGMVWQDRDVYLQGPIWAKIPHTDGHFHPSPLMGGFGLKHPPPQIMIKNTPVPANPPTNFSSAKFASFITQYSTGQVSVEIEWELQKENSKRWNPEIQYTSNYNKSVNVDFTVDTNGVYSEPRPIGTRYLTRNL

SEQ ID NO: 4842 - DNA, 2208 bp, Adeno-associated virus
atggctgccgatggttatcttccagattggctcgaggacactctctctgaaggaataagacagtggtggaagctcaaacctggcccaccaccaccaaagcccgcagagcggcatcaggacgacagcaggggtcttgtgcttcctgggtacaagtacctcggacccttcaacggactcgacaaaggagagccggtcaacgaggcagacgccgcggccctcgagcacgacaaggcctacgaccggcagctcgacagcggagacaacccgtacctcaagtacaaccacgccgacgcggagtttcaggagcgtcttaaagaagatacgtcttttgggggcaacctcggacgagcagtcttccaggcgaaaaagagggttcttgaacctctgggcctggttgaggaacctgttaagacggctccgggaaaaaagaggccggtagagcactctcctgtggagccagactcctcctcgggaaccggaaaagcgggccatcagcctgcgagaaagagattgaattttggtcagactggagacgcagactccgtacctgacccccagcctctcggacagccaccagcagcccccacaagtttgggatctactacaatggctacaggcagtggcgcaccaatggcagacaataacgagggtgccgatggagtgggtaattcctcaggaaattggcattgcgattcccaatggctgggcgacagagtcatcaccaccagcacccgaacctgggccctgcccacctacaacaaccacctctacaagcaaatctccagccaatcaggagcctcgaacgacaaccactactttggctacagcaccccctgggggtattttgacttcaacagattccactgtcacttctccccacgtgattggcaaagactcatcaacaacaactggggattccgacccaagagactcaacttcaagctctttaacattcaagtcaaagaggtcacgcagaatgacggtacgacgacgattgccaataaccttaccagcacggttcaggtgtttactgactcggagtaccagctcccgtacgtcctcggctcggcgcatcaaggatgcctcccgccgtttccagcggacgtcttcatggtcccacagtatggatacctcaccctgaacaacgggagtcaggcggtaggacgcccttccttttactgcctggagtactttccttctcagatgctgcgtactggaaacaactttaccttcagctacacctttgaggacgttcctttccacagcagctacgctcacagccagagtttggaccggctgatgaatcctctgatcgaccagtatctatattatctgaacaggacacaatcaaatagtggaactcttcagcagtctaggctactgtttagccaagctggacccaccagcatgtctcttcaagctaaaaactggctgcctggaccttgctacagacagcagcgtctttcaaagcaggcaaacgacaacaacaacagcaactttccctggactgcggctacaaagtatcatctaaatggccgggactcgttggttaatccaggaccagctatggccagccacaaagacgatgaagaaaagtttttccccatgcatgggaccctgatatttggtaaacaaggaacaaatgctaacgacgcggatttggagcatgttatgattacagatgaagaagaaatcaggaccaccaatcctgtggctacagagcagtacggaaacgtgtcaaataatttgcaaaactcaaatactggtccaactacagaaaatgtcaatcaccagggagcgttacctggtatggtgtggcaggatcgagacgtgtacctgcagggacccatttgggccaagattcctcacaccgacggacactttcacccttctccactgatgggaggttttggactcaaacacccgcctcctcaaatcatgatcaaaaacactcccgttccagccaatcctcccacaaacttcagttctgccaagtttgcttctttcatcacacagtattccacgggccaggtcagcgtggagattgagtgggagctgcagaaggagaacagcaaacgctggaaccccgagatccagtatacttccaactacaacaaatctgttaatgtggactttactgtggacactaatggtgtgtattcagagcctcgccccattggcaccagatacctgactcgtaatctgtaa

SEQ ID NO: 4843 - protein, 735 aa, Adeno-associated virus
MAADGYLPDWLEDTLSEGIRQWWKLKPGPPPPKPAERHQDDSRGLVLPGYKYLGPFNGLDKGEPVNEADAAALEHDKAYDRQLDSGDNPYLKYNHADAEFQERLKEDTSFGGNLGRAVFQAKKRVLEPLGLVEEPVKTAPGKKRPVEHSPVEPDSSSGTGKAGHQPARKRLNFGQTGDADSVPDPQPLGQPPAAPTSLGSTTMATGSGAPMADNNEGADGVGNSSGNWHCDSQWLGDRVITTSTRTWALPTYNNHLYKQISSQSGASNDNHYFGYSTPWGYFDFNRFHCHFSPRDWQRLINNNWGFRPKRLNFKLFNIQVKEVTQNDGTTTIANNLTSTVQVFTDSEYQLPYVLGSAHQGCLPPFPADVFMVPQYGYLTLNNGSQAVGRPSFYCLEYFPSQMLRTGNNFTFSYTFEDVPFHSSYAHSQSLDRLMNPLIDQYLYYLNRTQSNSGTLQQSRLLFSQAGPTSMSLQAKNWLPGPCYRQQRLSKQANDNNNSNFPWTAATKYHLNGRDSLVNPGPAMASHKDDEEKFFPMHGTLIFGKQGTNANDADLEHVMITDEEEIRTTNPVATEQYGNVSNNLQNSNTGPTTENVNHQGALPGMVWQDRDVYLQGPIWAKIPHTDGHFHPSPLMGGFGLKHPPPQIMIKNTPVPANPPTNFSSAKFASFITQYSTGQVSVEIEWELQKENSKRWNPEIQYTSNYNKSVNVDFTVDTNGVYSEPRPIGTRYLTRNL

SEQ ID NO: 4844 - DNA, 2208 bp, Adeno-associated virus
atggctgccgatggttatcttccagattggctcgaggacactctctctgaaggaataagacagtggtggaagctcaaacctggcccaccaccaccaaagcccgcagagcggcataaggacgacagcaggggtcttgtgcttcctgggtacaagtacctcggacccttcaacggactcgacaagggagagccggtcaacgaggcagacgccgcggccctcgagcacgacaaggcctacgaccggcagctcgacagcggagacaacccgtacctcaagtacaaccacgccgacgcggagtttcaggagcgccttaaagaagatacgtcttttgggggcaacctcggacgagcagtcttccaggcaaaaaagagggttcttgaacctctgggcctggttgaggagcctgttaaaacggctccgggaaaaaagaggccggtagagcactctcctgcggagccagactcctcctcgggaaccggaaaagcgggccagcagcctgcaagaaaaagattgaatttcggtcagactggagacgcagactccgtacctgacccccagcctctcggacagccaccagcagccccctctggtctgggaactaatacgatggcttcaggcagtggcgcaccaatggcagacaataacgagggcgccgacggagtgggtaattcctcgggaaattggcattgcgattccacatggatgggcgacagagtcatcaccaccagcacccgaacttgggccctgcccacctacaacaaccatctctacaagcaaatctccagccaatcaggagccagcaacgacaaccactactttggctacagcaccccttgggggtattttgacttcaacagattccactgccacttttcaccacgtgactggcaaagactcatcaacaacaactggggattccggcccaagagactcaacttcaagctctttaacattcaagtcaaagaggtcacgcagaatgacggtacgacgacgattgccaataaccttaccagcacggttcaggtgtttactgactcggagtaccagctcccgtacgtcctcggctcggcgcatcaaggatgcctcccgccgttcccagcagacgtcttcatggtgccacagtatggatacctcaccctgaacaacgggagtcaggcagtaggacgctcttcattttactgcctggagtactttccttctcagatgctgcgtaccggaaacaactttaccttcagctacacctttgaggacgttcctttccacagcagctacgctcacagccagagtttggaccgtctcatgaatcctctcatcgaccagtacctgtattacttgagcagaacaaacactccaagcggaaccaccacgcagtccaggcttcagttttctcaggccggagcaagtgacattcgggaccagtctaggaactggcttcctggaccctgttaccgccagcagcgagtatcaaagacatctgcggataacaacaacagtgaatactcgtggactggagctaccaagtaccacctcaatggcagagactctctggtgaatccgggcccggccatggccagccacaaggacgatgaagaaaagttttttcctcagagcggggttctcatctttgggaagcaaggctcagagaaaacaaatgtggacattgaaaaggtcatgattacagacgaagaggaaatcaggaccaccaatcccgtggctacggagcagtatggttctgtatctaccaacctgcagggcggcaacacacaagcagctaccgcagatgtcaacacacaaggcgttcttccaggcatggtctggcaggacagagacgtgtacctgcaggggcccatctgggcaaagattccacacacggacggacattttcacccctctcccctcatgggcggattcggacttaaacaccctcctccacagattctcatcaagaacaccccggtacctgcgaatccttcgaccaccttcagtgcggcaaagtttgcttctttcatcacacagtattccacggggcaggtcagcgtggagatcgagtgggagctgcagaaggagaacagcaaacgctggaatcccgagatccagtacacttccaactacaacaaatctgttaatgtggactttactgttgacactaatggcgtgtattcagagcctcgccccattggcaccagatacctgactcgtaatctgtaa

SEQ ID NO: 4845 - protein, 735 aa, Adeno-associated virus
MAADGYLPDWLEDTLSEGIRQWWKLKPGPPPPKPAERHKDDSRGLVLPGYKYLGPFNGLDKGEPVNEADAAALEHDKAYDRQLDSGDNPYLKYNHADAEFQERLKEDTSFGGNLGRAVFQAKKRVLEPLGLVEEPVKTAPGKKRPVEHSPAEPDSSSGTGKAGQQPARKRLNFGQTGDADSVPDPQPLGQPPAAPSGLGTNTMASGSGAPMADNNEGADGVGNSSGNWHCDSTWMGDRVITTSTRTWALPTYNNHLYKQISSQSGASNDNHYFGYSTPWGYFDFNRFHCHFSPRDWQRLINNNWGFRPKRLNFKLFNIQVKEVTQNDGTTTIANNLTSTVQVFTDSEYQLPYVLGSAHQGCLPPFPADVFMVPQYGYLTLNNGSQAVGRSSFYCLEYFPSQMLRTGNNFTFSYTFEDVPFHSSYAHSQSLDRLMNPLIDQYLYYLSRTNTPSGTTTQSRLQFSQAGASDIRDQSRNWLPGPCYRQQRVSKTSADNNNSEYSWTGATKYHLNGRDSLVNPGPAMASHKDDEEKFFPQSGVLIFGKQGSEKTNVDIEKVMITDEEEIRTTNPVATEQYGSVSTNLQGGNTQAATADVNTQGVLPGMVWQDRDVYLQGPIWAKIPHTDGHFHPSPLMGGFGLKHPPPQILIKNTPVPANPSTTFSAAKFASFITQYSTGQVSVEIEWELQKENSKRWNPEIQYTSNYNKSVNVDFTVDTNGVYSEPRPIGTRYLTRNL

SEQ ID NO: 4846 - DNA, 3161 bp, Adeno-associated virus
gattgaatttagcggccgcgaattcgcccttgctgcgtcaactggaccaatgagaactttccattcaatgattgcgtcgacaagatggtgatctggtgggaggagggaaagatgaccgccaaggtcatggagtcggccaaagccattctcggaggaagcaaggtgcgcgtggaccagaaatgtaagtcctcggcccagatagacccgactcccgtgattgtcacctccaacaccaacatgtgcgccgtgattgacgggaactcaacgaccttcgagcaccagcagccgttgcaagaccggatgttcaaatttgaactcacccgccgtctggatcatgactttgggaaggtcaccaagcaggaagtcaaagactttttccggtgggcaaaggatcacgtggttgaggtggagcatgaattctacgtcaaaaagggtggagccaagaaaagacccgcccccagtgacgcagatataagtgagcccaaacgggcgcgcgggtcagttgcgcagccatcgacgtcagacgcggaagcttcgatcaactacgcggacaggtaccaaaacaaatgttctcgtcacgtgggcatgaatctgatgctgtttccctgcagacaatgcgagagaatgaatcaaaattcaaatatctgcttcactcacggacagaaggactgtttagagtgctttcccgtgtcagaatctcaacccgtttctgtcgtcaaaaaggcgtatcagaaactttgctacattcatcatatcatgggaaaggtgccagacgcttgcactgcctgcgatctggtcaatgtggatttggatgactgcatctctgaacaataaatgatttaaatcaggtatggctgccgatggttatcttccagattggctcaaggacactctctctgaaggaataagacagtggtggaagctcaaacctggcccaccaccaccaaagcccgcagagcggcataaggacgacagcgggggtcttgtgcttcctgggtacaagtacctcggacccttcaacggactcgacaagggagagccggtcaacgaggcagacgccgcggccctcgagtacgacaaggcctacgaccggcagctcgacagcggagacaacccgtacctcaagtacaaccacgccgacgcggagtttcaggagcgccttaaagaagatacgtcttttgggggcaacctcggacgagcagtcttccaggcgaaaaagagggttcttgaacctctgggcctggttgaggaacctgttaagacggctccgggaaaaaagaggccggtagagcactctcctgtggagccagactcctcctcgggaacaggaaaagcgggccagcagcctgcgagaaagagattgaattttggtcagactggagacgcagactccgtacctgacccccagcctctcggacagccaccagcagccccctctggtctgggaactaatacgatggctacaggcagtggcgcaccaatggcagacaataacgagggcgccgacggagtgggtaattcctcgggaagttggcattgcgattccacatggatgggcgacagagtcatcaccaccagcacccgaacctgggctctgcccacctacaacaaccatctgtacaagcagatctccagccaatcaggagccagcaacgacaaccactactttggctacagcaccccttgggggtattttgacttcaacagattccactgccacttttcaccacgtgactggcaaagactcatcaacaacaactggggattccggcccaagagactcaacttcaagctctttaacattcaagtcaaggaggtcacgcagaatgacggtacgacgacgattgccaataaccttaccagcacggttcaggtgtttactgactcggagtaccagctcccgtacgtccccggctcggcgcatcaaggatgcctcccgccgttcccagcagacgtcttcatggtgccacagtatggatacctcaccctgaacaacgggagtcaggcagtaggacgctcttcattttactgcctggagtactttccttctcagatgcttcgtaccggaaacaactttaccttcagctacacctttgaggatgttcctttccacagcagctacgctcacagccagagtttggaccgtctcatgaatcctctcatcgaccagtacctgtattacttgagcagaacaaacactccaagcggaaccaccacgcagtccaggcttcagttttctcaggccggagcaagtgacattcgggaccagtctaggaactggcttcctggaccctgttaccgccagcagcgagtatcaaagacagctgcggacaacaacaacagtgaatactcgtggactggagctaccaagtaccacctcaatggcagagactctctggtgaatccgggcccggccatggccagccacaaggacgatgaagaaaagttttttcctcaaagcggggttctcatctttgggaagcaaggctcagagaaaacaaatgtggacattgaaaaggtcatgattacagacgaagaggaaatcagaaccaccaatcccgtggccacggagcagtatggttctgtatctaccaacctccagagcggcaacacacaagcagctactgcagatgtcaacacacaaggcgttcttccaggcatggtctggcaggacagagacgtgcacctgcaggggcctatctgggcaaagattccacacacggacggacattttcacccctctcccctcatgggcggatttggacttaaacaccctcctccacagattctcatcaagaacaccccggtacctgcaaatccttcgaccaccttcagtgcggcaaagtttgcttccttcatcacacagtattccacagggcaggtcagcgtggagatcgagtgggagctgcagaaggagaacagcaaacgctggaaccccgagatccagtacacttccaactacaacaaatctgttaatgtggactttactgtggacactaatggtgtgtattcagagcctcgccccattggcaccagatacctgactcgtaatctgtaattgcttgttaatcaataaaccgtttaattcgtttcagttgaactttggtctctgcgaagggcgaattcgtttaaaccctgcaggactagtccctttagtgagg

SEQ ID NO: 4847 - DNA, 3162 bp, Adeno-associated virus
gaattgaatttagcggccgcgaattcgcccttcgcagagaccaaagttcaactgaaacgaattaaacggtttattgattaacaagcaattacagattacgagtcaggtatctggtgccaatggggcgaggctctgaatacacgccattagtgtccacagtaaagtccacattaacagacttgttgtagttggaagtgtactgaatttcgggattccagcgtttgctgttttccttctgcagctcccactcgatctccacgctgacctgtcccgtggagtactgtgtgatgaaggaagcaaactttgccgcactgaaggtggtcgaaggattcgcaggtaccggggtgttcttgatgagaatctgtggaggagggtgtttaagtccgaatccacccatgaggggagaggggtgaaaatgtccgtccgtgtgtggaatctttgcccagatgggcccctgaaggtacacatctctgtcctgccagaccatgcctggaagaacgccttgtgtgttgacatctgcggtagctgcttgtctgttgcctctctggaggttggtagatacagaaccgtactgctccgtagccacgggattggttgtcctgatttcctcttcgtctgtaatcatgaccttttcaatgtccacatttgttttctctgagccttgcttcccaaagatgagaaccccgctctgaggaaaaaacttttcttcattgtccttgtggcttgccatggccgggcccggattcaccagagagtctctgccattgaggtggtacttggtagctccagtccacgagtattcactgttgttgttatccgcagatgtctttgatactcgctgctggcggtaacagggtccaggaagccagttcctagactggtcccgaatgtcactcgctccggcctgagaaaactgaagccttgactgcgtggtggttccacttggagtgtttgttgtgctcaagtaatacaggtactggtcgatgagaggattcatgagacggtccagactctggctgtgagcgtagccgctgtggaaaggaacgtcctcaaaagtgtagctgaaggtaaagttgtttccggtacgcagcatctgagaaggaaagtactccaggcagtaaaatgaagagcgtcctactgcctgactcccgttgttcagggtgaggtatccatactgtggcaccatgaagacgtctgctgggaacggcgggaggcatccttgatgcgccgagccgaggacgtacgggagctggtactccgagtcagtaaacacctgaaccgtgctggtaaggttattggcaatcgtcgtcgtaccgtcattctgcgtgacctctttgacttgaatgttaaagagcttgaagttgagtctcttgggtcggaatccccagttgttgttgatgagtctttgccagtcacgtggtgaaaagtggcagtggaatctgttgaagtcaaaatacccccaaggggtgctgtagccaaagtagtgattgtcgttcgaggctcctgattggctggaaatttgtttgtagaggtggttgttgtaggtgggcagggcccaggttcgggtgctggtggtgatgactctgtcgcccatccatgtggaatcgcaatgccaatttcccgaggaattacccactccgtcggcgccctcgttattgtctgccattggtgcgccactgcctgtagccatcgtattagttcccagaccagagggggctgctggtggctgtccgagaggctgggggtcaggtactgagtctgcgtctccagtctgaccaaaattcaatctttttcttgcaggctgctggcccgcctttccggttcccgaggaggagtctggctccacaggagagtgctctaccggcctcttttttcctggagccgtcttgacaggttccccaaccaggcccagaggttcaagaaccctctttttcgcctggaagactgctcgtccgaggttgcccccaaaagacgtatcttctttaaggcgctcctgaaactccgcgtcggcgtggttgtacttgaggtacgggttgtctccgctgtcgagctgccggtcgtaggctttgtcgtgctcgagggccgcggcgtctgcctcgttgaccggctctcccttgtcgagtccgttgaagggtccgaggtacttgtacccaggaagcacaagacccctgctgtcgtccttatgccgctctgcgggctttggtggtggtgggccaggtttgagcttccaccactgtcttattccttcagagagagtgtcctcgagccaatctggaagataaccatcggcagccatacctgatttaaatcatttattgttcaaagatgcagtcatccaaatccacattgaccagatcgcaggcagtgcaagcgtctggcacctttcccatgatatgatgaatgtagcacagtttctgatacgcctttttgacgacagaaacgggttgagattctgacacgggaaagcactctaaacagtctttctgtccgtgagtgaagcagatatttgaattctgattcattctctcgcattgtctgcagggaaacagcatcagattcatgcccacgtgacgagaacatttgttttggtacctgtctgcgtagttgatcgaagcttccgcgtctgacgtcgatggctgcgcaactgactcgcgcacccgtttgggctcacttatatctgcgtcactgggggcgggtcttttcttggctccaccctttttgacgtagaattcatgctccacctcaaccacgtgatcctttgcccaccggaaaaagtctttgacttcctgcttggtgaccttcccaaagtcatgatccagacggcgggtgagttcaaatttgaacatccggtcttgcaacggctgctggtgttcgaaggtcgttgagttcccgtcaatcacggcgcacatgttggtgttggaggtgacgatcacgggagtcgggtctatctgggccgaggacttgcatttctggtccacgcgcaccttgcttcctccgagaatggctttggccgactccacgaccttggcggtcatcttcccctcctcccaccagatcaccatcttgtcgacacagtcgttgaagggaaagttctcattggtccagttgacgcagcaagggcgaattcgtttaaacctgcaggactagtccctttagtgaggg

SEQ ID NO: 4848 - DNA, 3164 bp, Adeno-associated virus
gcgaattgaatttagcggccgcgaattcgcccttcgcagagaccaaagttcaactgaaacgaattaaacggtttattgattaacaagcaattacaaattacgagtcaggtatctggtgccaatggggcgaggctctgaatacacgccattagtgtccacagtaaagtccacattaacagacttgttgtagttggaagtgtactgaatttcgggattccagcgtttgctgttttccttctgcagctcccactcgatctccacgctgacctgtcccgtggagtactgtgtgatgaaggaagcaaactttgccgcactgaaggtggtcgaaggattcgcaggtaccggggtgttcttgatgagaatctgtggaggagggtgtttaggtccgaatccacccatgaggggagaggggtgaaaatgtccgtccgtgtgtggaatctttgcccagatgggcccctgaaggtacacatctctgtcctgccagaccatgcctggaagaacgccttgtgtgttgacatctgcggtagctgcttgtctgttgcctctctggaggttggtagatacagaaccatactgctccgtagccacgggattggttgtcctgatttcctcttcgtctgtaatcatgaccttttcaatgtccacatttgttttctctgagccttgcttcccaaagatgagaaccccgctctgaggaaaaaacttttcttcattgtccttgtggcttgccatggccgggcccggattcaccagagagtctctgccattgaggtggtacttggtagctccagtccacgagtattcactgttgttgttatccgcagatgtctttgatactcgctgctggcggtaacagggtccaggaagccagttcctagactggtcccgaatgtcactcgctccggcctgagaaaactgaagccttgactgcgtggtggttccacttggagtgtttgttgtgctcaagtaatacaggtactggtcgatgagaggattcatgagacggtccagactctggctgtgagcgtagctgctgtggaaaggaacgtcctcaaaagtgtagctgaaggtaaagttgtttccggtacgcagcatctgagaaggaaagtactccgggcagtaaaatgaagagcgtcctactgcctgactcccgttgctcagggtgaggtatccatactgtggcaccatgaagacgtctgctgggaacggcgggaggcatccttgatgcgccgagccgaggacgtacgggagctggtactccgagtcagtaaacacctgaaccgtgctggtaaggttattggcaatcgtcgtcgtaccgtcattctgcgtgacctctttgacttgaatgttaaagagcttgaagttgagtctcttgggtcggaatccccagttgttgttgatgagtctttgccagtcacgtggtgaaaagtggcagtggaatctgttgaagtcaaaatacccccaaggggtgctgtagccaaagtagtgattgtcgttcgaggctcctgattggctggaaatttgtctgtagaggtggttgttgtaggtgggcagggcccaggttcgggtgctggtggtgatgactctgtcgcccatccatgtggaatcgcaatgccgatttcccgaggaattacccactccgtcggcgccctcgttattgtctgccattggtgcgccactgcctgtagccatcgtattagttcccagaccagagggggctgctggtggctgtccgagaggctgggggtcaggtactgagtctgcgtctccagtctgaccaaaattcaatctttttcttgcaggctgctggcccgcctttccggttcccgaggaggagtctggctccacaggagagtgctctaccggcctcttttttcccggagccgtcttaacaggttccccaaccaggcccagaggttcaagaaccctctttttcgcctggaagactgctcgtccgaggttgcccccaaaagacgtatcttctttaaggcgctcctgaaactccgcgtcggcgtggttgtacttgaggtacgggttgtctccgctgtcgagctgccggtcgtaggctttgtcgtgctcgagggccgcggcgtctgcctcgttgaccggctctcccttgtcgagtccgttgaagggtccgaggtacttgtacccaggaagcacaagacccctgctgtcgtccttatgccgctctgcgggctttggtggtggtgggccaggtttgagcttccaccactgtcttattccttcagagagagtgtcctcgagccaatctggaagataaccatcggcagccatacctgatttaaatcatttattgttcaaagatgcagtcatccaaatccacattgaccagatcgcaggcagtgcaagcgtctggcacctttcccatgatatgatgaatgtagcacagtttctgatacgcctttttgacgacagaaacgggttgagattctgacacgggaaagcactctaaacagtctttctgtccgtgagtgaagcagatatttgaattctgattcattctctcgcattgtctgcagggaaacagcatcagattcatgcccacgtgacgagaacatttgttttggtacctgtctgcgtagttgatcgaagcttccgcgtctgacgtcgatggctgcgcaactgactcgcgcacccgtttgggcccacttatatctgcgtcactgggggcgggtcttttcttggctccaccctttttgacgtagaattcatgctccacctcaaccacgtgatcctttgcccaccggaaaaagtctttgacttcctgcttggtgaccttcccaaagtcatgatccagacggcgggtgagttcaaatttgaacatccggtcttgcaacggctgctggtgttcgaaggtcgttgagttcccgtcaatcacggcgcacatgttggtgttggaggtgacgatcacgggagtcgggtctatctgggccgaggacttgcatttctggtccacgcgcaccttgcttcctccgagaatggctttggccgactccacgaccttggcggtcatcttcccctcctcccaccagatcaccatcttgtcgacacagtcgttgaagggaaagttctcattggtccagttgacgcagcaagggcgaattcgtttaaacctgcaggactagtccctttagtgaggg

SEQ ID NO: 4849 - DNA, 3163 bp, Adeno-associated virus
accctcactaaagggactagtcctgcaggtttaaacgaattcgcccttgctgcgtcaactggagcaatgagaactttcccttcaacgactgtgtcgacaagatggtgatttggtgggaggaggggaagatgaccgccaaggtcgtggagtcggccaaagccattctcggaggaagcaaggtgcgcgtggaccagaaatgcaagtcctcggcccagatagatccgactcccgtgatcgtcacctccaacaccaacatgtgcgccgtgattgacgggaactcaacgaccttcgaacaccagcagccgttgcaagaccggatgttcaaatttgaactcacccgccgtctggatcatgactttgggaaggtcaccaagcaggaagtcaaagactttttccggtgggcaaaggatcacgtggttgaggtggagcatggattctacgtcaaaaagggtggagccaagaaaagacccgcccctagtgacgcagatataagtgagcccaaacgggtgcgcgagtcagttgcgcagccatcgacgtcggacgcggaagcttcgatcaactacgcggacaggtaccaaaacaaatgttctcgtcacgtgggcatgaatctgatgctgtttccctgcagacaatgcgagagaatgaatcaaaattcaaatatctgcttcactcacggacagaaagactgtttagagtgctttcccgtgtcagaatctcaacctgtttctgtcgtcaaaaaggcgtatcagaaactgcgctacattcatcatatcatgggaaaggtgccagacgcttgcactgcctgcgatctggtcaatgtggatttggatgactgcatctctgaacaataaatgatttaaatcaggtatggctgccgatggttatcttccagattggctcgaggacactctctctgaaggaataagacagtggtggaagctcaaacctggcccaccaccaccaaagcccgcagagcggcataaggacgacagcaggggtcttgtgcttcctgggtacaagtacctcggacccttcaacggactcgacaagggagagccggtcaacgaggcagacgccgcggccctcgagcacgacaaggcctacgaccggcagctcgacagcggagacaacccgtacctcaagtacaaccacgccgacgcggagtttcaggagcgtcttaaagaagatacgtcttttgggggcaacctcggacgagcagtcttccaggcgaaaaagagggttcttgaacctctgggcctggttgaggaacctgttaagacggctccgggaaaaaagaggccggtagagcactctcctgcggagccagactcctcctcgggaaccggaaaagcgggccagcagcctgcaagaaaaagactgaatttcggtcagactggagacgcagactccgtacctgacccccagcctctcggacagccaccagcagcccccacaagtttgggatctactacaatggctacaggcagtggcgcaccaatggcagacaataacgagggtgccgatggagtgggtaattcctcaggaaattggcattgcgattcccaatggctgggcgacagagtcatcaccaccagcacccgaacctgggccctgcccacctacaacaaccacctttacaagcaaatctccagccaatcaggagcctcaaacgacaaccactactttggctacagcaccccctgggggtattttgacttcaacagattccactgccacttttcaccacgtgactggcaaagactcatcaacaacaactggggattccgacccaagagactcaacttcaagctctttaacattcaagtcaaagaggtcacgcagaatgacggtacgacgacgattgccaataaccttaccagcacggttcaggtgtttactgactcggagtaccagctcccgtacgtcctcggctcggcgcatcaaggatgcctcccgccgtttccagcggacgtcttcatggtcccacagtatggatacctcaccctgaacaacgggagtcaggcggtaggacgctcttccttttactgcctggagtgctttccttctcagatgctgcgtactggaaacaactttcagttcagctacacttttgaagacgtgcctttccacagcagctacgctcacagccagagtttggatcggctgatgaatcctctgatcgaccagtacctgtattatctaaacagaacacaaacagctagtggaactcagcagtctcggctactgtttagccaagctggacccacaagcatgtctcttcaagctaaaaactggctgcctggaccgtgttatcgccagcagcgtttgtcaaagcaggcaaacgacaacaacaacagcaactttccctggactggagctaccaagtaccacctcaatggcagagactctttggtgaacccgggcccggccatggccagccacaaggacgatgaagaaaagtttttccccatgcatggaaccctaatatttggtaaagaaggaacaaatgctaccaacgcggaattggaaaatgtcatgattacagatgaagaggaaatcaggaccaccaatcccgtggctacagagcagtacggatatgtgtcaaataatttgcaaaactcaaatactgctgcaagtactgaaactgtgaatcaccaaggagcattacctggtatggtgtggcaggatcgagacgtgtacctgcagggacccatttgggccaagattcctcacaccgatggacactttcatccttctccactgatgggaggttttggactcaaacacccgcctcctcagattatgatcaaaaacactcccgttccagccaatcctcccacaaacttcagttctgccaagtttgcttccttcatcacacagtattccacgggacaggtcagcgtggagatcgagtgggagctgcagaaggagaacagcaaacgctggaatcccgaaattcagtacacttccaactacaacaaatctgttaatgtggactttactgtggacactaatggtgtgtattcagagcctcgccccattggcaccagatacctgactcgtaatctgtaattgcttgttaatcaataaaccgtttaattcgtttcagttgaactttggtctctgcgaagggcgaattcgcggccgctaaattcaattcgcc

SEQ ID NO: 4850 - protein, 735 aa, Adeno-associated virus
MAADGYLPDWLEDTLSEGIRQWWKLKPGPPPPKPAERHKDDSRGLVLPGYKYLGPFNGLYKGEPVDEADAAALEHDKAYDRQLDSGDNPYLKYNHADAEFQERLKEDTSFGGNLGRAVFQAKKRVLEPLGLVGEPVKTAPGKKRPVEHSPVEPDSSSGTGKAGNQPARKRLNFGQTGDADSVPDPQPLGQPPAAPSGLGSTTMATGSGAPVADNNEGADGVGNSSGNWHCDSQWLGDRVITTSTRTWALPTYNNHLYKQISSQSGASNDNHYFGYSTPWGYFDFNRFHCHFSPRDRQRLINNNWGFRPKRLNFKLFNIQVKEVTQNDGTTTIANNLTSTVQVFTDSGYQLPYVLGLAHQGCLPPFPADVFMVPQYGYLTLNNGSQAVGRSSFYCLEYFPSQMLRTGNNFQFSYTFEDVPFHSSYAHSQSLDRLMNPLIDQYLYYLNKTQSNSGTLQQSRLLFSQAGPTSMSLQAKNWLPGPCYRQQRLSKQANDNNNSNFPWTAATKYHLNGRDSLVNPGPAMASHKDDEEKFFPMHGTLIFGKQGTNANDADLDNVMITDEEEIRTTNPVATEQYGYVSNNLQNSNTGPTTGTVNHQGALPGMVWQDRDVYLQGPIWAKIPHTDGHFHPSPLMGGFGLKHPPPQIMIKNTPVPANPPTNFSSAKFASFITQYSTGQVSVEIEWELQKEDSKRWNPEIQYTSNYNKPVNVDFTVDTNGVYSEPRPIGTRYLTRNL

SEQ ID NO: 4851 - DNA, 2208 bp, Adeno-associated virus
atggctgccgatggttatcttccagattggctcgaggacactctctctgaaggaataagacagtggtggaagctcaaacctggcccaccaccaccaaagcccgcagagcggcataaggacgacagcaggggtcttgtgcttcctgggtacaagtacctcggacccttcaacggactctacaagggagagccggtcgacgaggcagacgccgcggccctcgagcacgacaaggcctacgaccggcagctcgacagcggagacaacccgtacctcaagtacaaccacgccgacgcggagtttcaggagcgccttaaagaagatacgtcttttgggggcaacctcggacgagcagtcttccaggccaaaaagagggttcttgaacctctgggcttggttggggagcctgttaaaacggctccgggaaaaaagaggccggtagagcactctcctgtggagccagactcctcctcgggaaccggaaaagcgggcaaccagcctgcaagaaaaagattgaattttggtcagactggagacgcagactccgtacctgacccccagcctctcggacagccaccagcagccccctctggtctgggatctactacaatggctacaggcagtggcgcaccagtggcagacaataacgagggtgccgatggagtgggtaattcctcaggaaattggcattgcgattcccaatggctgggcgacagagtcatcaccaccagcacccgaacctgggctctgcccacctacaataaccacctctacaagcaaatctccagccaatcaggagcctcaaacgacaaccactactttggctacagcaccccctgggggtattttgacttcaacagattccactgccacttttcaccacgtgaccggcaaagactcatcaacaacaactggggattccgaccaaaaagactcaacttcaagctctttaacattcaagtcaaagaggtcacgcagaatgacggtacgacgacgattgccaataaccttaccagcacggttcaggtgtttactgactcggggtaccagctcccgtacgtcctcggcttggcgcatcaaggatgcctcccgccgttcccagcagacgtcttcatggtgccacagtatggatacctcaccctgaacaacgggagtcaggcggtaggacgctcttccttttactgcctggagtactttccttctcagatgctgcgtactggaaacaactttcagttcagctacacctttgaagacgttcctttccacagcagctacgctcacagccagagtctggatcggctgatgaatcctctgatcgaccagtacctgtattatctgaacaagacacaatcaaatagtggaactcttcagcagtctcggctactgtttagccaagctggacccaccagcatgtctcttcaagctaaaaactggctgcctggaccttgctacagacagcagcgtctgtcaaagcaggcaaacgacaacaacaacagcaactttccctggactgcggctacaaagtatcatctaaatggccgggactcgttggttaatccaggaccagctatggccagccacaaagacgatgaagaaaagtttttccccatgcatggaaccctgatatttggtaaacaaggaacaaatgctaacgacgcggatttggacaatgtcatgattacagatgaagaagaaatccgcaccaccaatcccgtggctacggagcagtacggatatgtgtcaaataatttgcaaaactcaaatactggtccaactactggaactgtcaatcaccaaggagcgttacctggtatggtgtggcaggatcgagacgtgtacctgcagggacccatttgggccaagattcctcacaccgatggacactttcatccttctccacttatgggaggttttggactcaaacacccacctcctcagatcatgattaaaaacactcccgttccagccaatcctcccacaaacttcagttctgccaagtttgcttctttcatcacacagtattccacgggacaagtcagcgtggagatcgagtgggagctgcagaaggaggacagcaaacgctggaaccccgagatccagtacacttccaactataacaaacctgttaatgtggactttactgtggacactaatggtgtgtattcagagcctcgccccattggcaccagatacctgactcgtaatctgtaa

SEQ ID NO: 4852 - DNA, 3161 bp, Adeno-associated virus
cgaattgatttagcggccgcgaattcgcccttcgcagagaccaaagttcaactgaaacgaattaaacggtttattgattaacaagcaattacagattacgagtcaggtatctggtgccaatggggcgaggctctgaatacacaccattagtgtccacagtaaagtccacattaacagatttgttgtagttggaagtgtactggatctcgggattccagcgtttgctgttctccttctgtagctcccactcgatctccacgctgacccgccccgtggaatactgtgtgatgaaggaagcaaactttgccgcactgaaggtggtcgaaggattcgcaggtaccggggtgtttttgatgagaatctgtggaggagggtgtttaagtccgaatccgcccatgaggggagaggggtgaaaatgtccgtccgtgtgcggaatctttgcccagataggcccctgcaggtacacgtctctgtcctgccagaccatgcctggaagaacgccttgtgtgttgacatctgcagtagatgcttgtgtgttgccgctctggaggttggtagatacagaaccatactgctccgtggccacgggattggtggttctgatttcctcttcgtctgtaatcatgaccttttcaatgtccacatttgttttctctgatccttgttttccaaagatgagaaccccgctctgaggaaaaaacttttcttcatcgtccttgtggctggccattgccgggcccggattcaccagagagtctctgccattgaggtggtacttggtagctccaatccacgagtattcactgttgttgttgtccgcagatgtctttgatactcgctgctggcggtaacagggtccaggaagccagttcctagactgatcccgaatgtcactcgctccggcctgagaaaactgaagcctggactgcgtggtggttccgcttggagtgtttgttctgctcaagtaatacaggtactggtcgatgagaggattcatgagacggtccaaactctggctgtgagcgtagctgctgtggaaaggaacatcctcaaaggtgtagctgaaggtaaagttgtttccggtacgcagcatctgagaagggaagtactccaggcagtaaaatgaagagcgtcctactgcctgactcccgttgttcagggtgaggtatccatactgtggcaccatgaagacgtctgctgggaacggcgggaggcatccttgatgcgccgagccgaggacgtacgggagctggtactccgagtcagtaaacacctgaaccgtgctggtaaggttattggcaatcgtcgtcgtaccatcattctgcgtgacctctctgacttgaatgttaaagagcttgaagttgagtctcttgggccggaatccccagttgttgttgatgagtctttgccagtcacgtggtgaaaagtggcagtggaatctgttgaagtcaaaatacccccaaggggtgctgtagccaaagtagtggttgtcgttgctggctcctgattggctggaaatctgcttgtacagatggttgttgtaggtgggcagagcccaggttcgggtgctggtggtgatgactctgtcgcccatccatgtggaatcgcaatgccaatttcccgaggaattacccactccgtcggcgccatcgttattgtctgccattggtgcgccactgcctgtagccatcgtattagttcccagaccagagggggctgctggtggctgtccgagaggctgggggtcaggtacggagtctgcgtctccagtctgaccgaaattcaatctctttcttgcaggctggttgcccgcttttccggttcccgaggaggagtctggctccacaggagagtgctctaccggcctcttttttcccggagccgtcttaacaggctcctcaaccaggcccagaggttcaagaaccctcttttttgcctggaagactgctcgtccgaggttgcccccaaaagacgtatcttctttaaggcgctcctgaaactccgcgtcggcgtggtcgtacttgaggtacgggttgtctccgctgtcgagctgccggtcgtaggccttgtcgtgctcgagggccgcggcgtctgcctcgttgaccggctctcccttgtcgagtccgttgaagggtccgaggtacttgtacccaggaagcacaagacccctgctgtcgtccttatgccgctctgcgggctttggtggtggtgggccaggtttgagcttccaccactgtcttattccttcagagagagtgtcctcgagccaatctggaagataaccatcggcagccatacctgatttaaatcatttattgttcagagatgcagtcatccaaatccacattgaccagatcgcaggcagtgcaagcgtctggcacctttcccatgatatgatgaatgtagcaaagtttctgatacgcctttttgacgacagaaacgggttgagattctgacacgggaaagcactctaaacagtctttctgtccgtgagtgaagcagatatttgaattctgattcattctctcgcattgtctgcagggaaacagcatcagattcatgcccacgtgacgagaacatttgttttggtacctgtccgcgtagttgatcgaagcttccgcgtctgacgtcgatggctgcgcaactgactcgcgcgcccgtttgggctcacttatatctgcgtcactgggggcgggtcttttcttggctccaccctttttgacgtagaattcatgctccacctcaaccacgtgatcctttgcccaccggaaaaagtctttcacttcctgcttggtgaccttcccaaagtcatgatccagacggcgggttagttcaaatttgaacatccggtcttgcaacggctgctggtgttcgaaggtcgttgagttcccgtcaatcacggcgcacatgttggtgttggaggtggcgatcacgggagtcgggtctatctgggccgaggacttgcacttttggtccacgcgcaccttgcttcctccgagaatggcttcggccgattccacgaccttggcggtcatctttccctcctcccaccagatcaccatcttgtcgacacagtcgttgaagggaaagttctcattggtccagttgacgcagcaagggcgaattcgtttaaacctgcaggaactagtcccttagtgagg

SEQ ID NO: 4853 - protein, 735 aa, Adeno-associated virus
MAADGYLPDWLEDTLSEGIRQWWKLKPGPPPPKPAERHKDDSRGLVLPGYKYLGPFNGLYKGEPVNEADAAALEHDKAYDRQLDSGDNPYLKYNHAGAEFQERLKEDTSFGGNLGRAVFQAKKRVLEPLGLVEEPVKTAPGKKRPVEHSPVEPDSSSGTGKAGNQPARKRLNFGQTGDADSVPDPQPLGQPPAAPSGLGSTTMATGSGAPVADNNEGADGVGNSSGNWHCDSQWLGDRVITTSTRTWALPTYNNHLYKQISSQSGASNDNHYFGYSTPWGYFDFNRFHCHFSPRDWQRLINNNWGFRPKRLNFKLFNIQVKEVTQNDGTTTIANNLTSTVQVFTDSEYQLPYVLGSAHQGCLPPFPADVFMVPQYGYLTLNNGSQAVGRSSFYCLEYFPSQMLRTGNNFQFSYTFEDVPFHSSYAHSQSLDRLMNPLIDQYLYYLNKTQSNSGTLQQSRLLFSQAGPTSMSLQAKNWLPGPCYRQQRLSKQANDNNNSNFPWTAATKYHLNGRDSLVNPGPAMASHKDDEEKFFPMHGTLIFGKQGTNANDADLDNVMITDEEEIRTTNPVATEQYGYVSNNLQDSNTGPTTGTVNHQGALPGMVWQDRDVYLQGPIWAKIPHTDGHFHPSPLMGGFGLKHPPPQIMIKNTPVPANPPTNFSSAKFASFITQYSTGQVSVEIEWELQKENSKRWNPEIQYTSNYNKSVNVDFTVDTNGVYSEPRPIGTRYLTRNL

SEQ ID NO: 4854 - DNA, 2208 bp, Adeno-associated virus
atggctgccgatggttatcttccagattggctcgaggacactctctctgaaggaataagacagtggtggaagctcaaacctggcccaccaccgccaaagcccgcagagcggcataaggacgacagcaggggtcttgtgcttcctgggtacaagtacctcggacccttcaacggactctacaagggagagccggtcaacgaggcagacgccgcggccctcgagcacgacaaggcctacgaccggcagctcgacagcggagacaacccgtacctcaagtacaaccacgccggcgcggagtttcaggagcgccttaaagaagatacgtcttttgggggcaacctcggacgagcagtcttccaggccaaaaagagggttcttgaacctctgggcttggttgaggagcctgttaaaacggctccgggaaaaaagaggccggtagagcactctcctgtggagccagactcctcctcgggaaccggaaaagcgggcaaccagcctgcaagaaaaagattgaattttggtcagactggagacgcagactccgtacctgacccccagcctctcggacagccaccagcagccccctctggtctgggatctactacaatggctacaggcagtggcgcaccagtggcagacaataacgagggtgccgatggagtgggtaattcctcaggaaattggcattgcgattcccaatggctgggcgacagagtcatcaccaccagcacccgaacctgggctctgcccacctacaacaaccacctctacaagcaaatctccagccaatcaggagcctcaaacgacaaccactactttggctacagcaccccctgggggtattttgacttcaacagattccactgccacttttcaccacgtgactggcaaagactcatcaacaacaactggggattccgaccaaagagactcaacttcaagctctttaacattcaagtcaaagaggtcacgcagaatgacggtacgacgacgattgccaataaccttaccagcacggttcaggtgtttactgactcggagtaccagctcccgtacgtcctcggctcggcgcatcaaggatgcctcccgccgttcccagcagacgtcttcatggtgccacagtatggatacctcaccctgaacaacgggagtcaggcggtaggacgctcttccttttactgcctggagtactttccttctcagatgctgcgtactggaaacaactttcagttcagctacacctttgaagacgttcctttccacagcagctacgctcacagccagagtctggatcggctgatgaatcctctgatcgaccagtacctgtattatctgaacaagacacaatcaaatagtggaacccttcagcagtctcggctactgtttagccaagctggacccaccagcatgtctcttcaagctaaaaactggctgcctggaccttgctacagacagcagcgtctgtcaaagcaggcaaacgacaacaacaacagcaactttccctggactgcggctacaaagtatcatctaaatggccgggactcgttggttaatccaggaccagctatggccagccacaaagacgatgaagaaaagtttttccccatgcatggaaccctgatatttggtaaacaaggaacaaatgctaacgacgcggatttggacaatgtcatgattacagatgaagaagaaatccgcaccaccaatcccgtggctacggagcagtacggatatgtgtcaaataatttgcaagactcaaatactggtccaactactggaactgtcaatcaccaaggagcgttacctggtatggtgtggcaggatcgagacgtgtacctgcagggacccatttgggccaagattcctcacaccgatggacactttcatccttctccacttatgggaggttttggactcaaacacccacctcctcagatcatgattaaaaacactcccgttccagccaatcctcccacaaacttcagttctgccaagtttgcttctttcatcacacagtattccacgggacaagtcagcgtagagatcgagtgggagctgcagaaggagaacagcaaacgctggaaccccgagatccagtacacttccaactataacaaatctgttaatgtggactttactgtggacactaatggtgtgtattcagagcctcgccccattggcaccagatacctgactcgtaatctgtaa

SEQ ID NO: 4855 - protein, 738 aa, Adeno-associated virus
MAADGYLPDWLEDNLSEGIREWWDLKPGAPKPKANQQKQDDGRGLVLPGCKYLGPFNGLDKGEPVNAADAAALEHDKAYDQQLKAGDNPYLRYNHADAEFQERLQEDTSFGGNLGRAVFQAKKRVLEPLGLVEEGAKTAPGKKRPVEPSPQRSPDSSTGIGKTGQQPAKKRLNFGQTGDSESVPDPQPIGEPPAGPSGLGSGTMAAGGGAPMADNNEGADGVGSSSGNWHCDSTWLGDRVITTSTRTWALPTYNNHLYKQISNGTSGGSTNDNTYFGYSTPWGYFDFNRFHCHFSPRDWQRLINNNWGFRPKRLNFKLFNIQVKEVTQNEGTKTIANNLTSTIQVFTDSEYQLPYVLGSAHQGCPPPFPADVFMIPQYGYLTLNNGSQAVGRSSFYCLEYFPSQMRRTGNNFEFSYQFEDVPFHSSYAHSQSLDRLMNPLIDQYLYYLSRTQSTGGTAGTQQLLFSQAGPNNMSAQAKNWLPGPCYRQQRVSTTLSQNNNSNFAWTGATKYHLNGRDSLVNPGVAMATHKDDEERFFPSSGVLMFGKQGAGKDNVDYSSVMLTSEEEIKTTNPVATEQYGVVADNLQQQNAAPIVGAVNSQGALPGMVWQNRDVYLQGPIWAKIPHTDGNFHPSPLMGGFGLKHPPPQILIKNTPVPADPPTTFSQAKLASFITQYSTGQVSVEIEWELQKENSKRWNPEIQYTSNYNKSVNVDFTVDTNGVYSEPRPIGTRYLTRNL

SEQ ID NO: 4856 - DNA, 2217 bp, Adeno-associated virus
atggctgccgatggttatcttccagattggctcgaggacaacctctctgagggcattcgcgagtggtgggacttgaaacctggagccccgaaacccaaagccaaccagcaaaagcaggacgacggccggggtctggtgcttcctggctgcaagtacctcggacccttcaacggactcgacaagggggagcccgtcaacgcggcggacgcagcggccctcgagcacgacaaggcctacgaccagcagctcaaagcgggtgacaatccgtacctgcggtataaccacgccgacgccgagtttcaggagcgtctgcaagaagatacgtcttttgggggcaacctcgggcgagcagtcttccaggccaagaagcgggttctcgaacctctcggtctggttgaggaaggcgctaagacggctcctggaaagaagagaccggtagagccatcaccccagcgttctccagactcctctacgggcatcggcaagacaggccagcagcccgcgaaaaagagactcaactttgggcagactggcgactcagagtcagtgcccgaccctcaaccaatcggagaaccccccgcaggcccctctggtctgggatctggtacaatggctgcaggcggtggcgctccaatggcagacaataacgaaggcgccgacggagtgggtagttcctcaggaaattggcattgcgattccacatggctgggcgacagagtcatcaccaccagcacccgaacctgggccctccccacctacaacaaccacctctacaagcaaatctccaacgggacatcgggaggaagcaccaacgacaacacctacttcggctacagcaccccctgggggtattttgactttaacagattccactgccacttctcaccacgtgactggcagcgactcatcaacaacaactggggattccggcccaagagactcaacttcaagctcttcaacatccaggtcaaggaggtcacgcagaatgaaggcaccaagaccatcgccaataaccttaccagcacgattcaggtctttacggactcggaataccagctcccgtacgtcctcggctctgcgcaccagggctgcccgcctccgttcccggcggacgtcttcatgattcctcagtacgggtacctgactctgaacaacggcagtcaggccgtgggccgttcctccttctactgcctggagtactttccttctcaaatgcggagaacgggcaacaactttgagttcagctaccagtttgaggacgtgccttttcacagcagctacgcgcatagccaaagcctggaccggctgatgaaccccctcatcgaccagtacctgtactacctgtctcggactcagtccacgggaggtaccgcaggaactcagcagttgctattttctcaggccgggcctaataacatgtcggctcaggccaaaaactggctacccgggccctgctaccggcagcaacgcgtctccacgacactgtcgcaaaataacaacagcaactttgcttggaccggtgccaccaagtatcatctgaatggcagagactctctggtaaatcccggtgtcgctatggcaacgcacaaggacgacgaagagcgattttttccatccagcggagtcttgatgtttgggaaacagggagctggaaaagacaacgtggactatagcagcgttatgctaaccagtgaggaagaaatcaaaaccaccaacccagtggccacagaacagtacggcgtggtggccgataacctgcaacagcaaaacgccgctcctattgtaggggccgtcaacagtcaaggagccttacctggcatggtctggcagaaccgggacgtgtacctgcagggtcctatctgggccaagattcctcacacggacggcaactttcatccttcgccgctgatgggaggctttggactgaaacacccgcctcctcagatcctgattaagaatacacctgttcccgcggatcctccaactaccttcagtcaagccaagctggcgtcgttcatcacgcagtacagcaccggacaggtcagcgtggaaattgaatgggagctgcagaaagagaacagcaagcgctggaacccagagattcagtatacttccaactataacaaatctgttaatgtggactttactgtggacactaatggtgtgtattcagagcctcgccccattggcaccagatacctgactcgtaatctgtaa

SEQ ID NO: 4857 - DNA, 3167 bp, Adeno-associated virus
attgaatttagcggccgcgaattcgcccttcgcagagaccaaagttcaactgaaacgaattaaacggtttattgattaacaagcaattacagattacgagtcaggtacctggtgccaatggggcgaggctctgaatacacaccattagtgtccacagtaaagtccacattaacagatttgttgtagttggaagtgtactgaatctcgggattccagcgtttgctgttctccttctgcagctcccactcgatctccacgctgacctgccccgtggagtactgtgtaatgaaggaagcaaactttgccgcactgaaggtagtcgaaggattcgcaggtaccggggtgttcttgatgagaatctgcgggggagggtgtttaagtccgaatccgcccatgaggggagaggggtgaaaatgtccgtccgtgtgtggaatctttgcccagatgggcccctgcaggtacacgtctctgtcctgccacaccatgcctggaagaacgccttgtgtgttgacatctgaggtagctgcttgtgtgttgccgctctggaggttggtagatacagaaccatactgctccgtagccacgggattggtggtcctgatttcctcttcgtctgtaatcatgaccttttcaatgtccacattagtttttcccgagtcttgttttccaaagatgagaaccccgctctgaggaaaaaacttttcttcatcgtccttgtggctggccatggccgggcccggattcaccagagagtctcttccattaaggtggtacttggtagctccagtccacgagtattcactgttgttgttatccgcagatgtctttgatactcgctgctggcggtaacagggtccaggaagccagttcctagactggtcccgaatgtcacttgctccggcctgagaaaactgaagccttgactgcgtggtggttccgcttggagtgtttgttctgctcaagtaatacaggtactggtcgatgagaggattcatgagacggtccaaactctggctgtgggcgtagctgctgtggaaaggaacgtcctcaaaggtgtagctgaaggtaaagttgtttccggtacgcagcatctgagaaggaaagtactccaggcagtaaaatgaagagcgtcctactgcctgactcccgttgttcagggtgaggtatccatactgtggcaccatgaagacgtctgctgggaacggcgggaggcatccttgatgcgccgagccgaggacgtacgggagctggtactccgagtcagtaaacacctgaaccgtgctggtaaggttattggcaatcgtcgtcgtaccgtcattctgcgtgacctccttgacttgaatgttaaagagcttgaagttgagtcttttgggccggaatccccaattgttgttgatgagtctttgccagtcacgtggcgaaaagtggcagtggaatctgttgaagtcaaaatacccccaaggggtgctgtagccaaagtagtggttgtcgtttgaggctcctgattggctggaaatctgcttgtagaggtggttgttgtaggtgggcagagcccaggtgcgggtgctggtggtgatgactctgtcgcccatccatgtggaatcgcaatgccaatttcccgaggaattacccactccgtcggcgccctcgttattgtctgccattggtgcgccactgcctgtagccatcgtattagttcccagaccagagggggctgctggtggctgtccgagaggctgggggtcaggtacggagtctgcgtctccagtctgaccgaaattcaatctctttcttgcaggctgctggcccgcttttccggttcccgaggaggagtctggctccgcaggagagtgctctaccggcctcttttttcccggagccgtcttaacaggttcctcaaccaggcccagaggttcaagaaccctctttttcgcctggaagactgctcgtccgaggttgcccccaaaagacgtatcttctttaagacgctcctggaactccgcgtcggcgtggttgtacttggggtacgggttgtctccgctgtcgagctgccggtcgtaggccttgtcgtgctcgagggccgcggcgtctgcctcgttgaccggctctcccttgtcgagtccgttgaagggtccaaggtacttgtacccaggaagcacaagacccctgctgtcgtccttatgccgctctgcgggctttggtggtggtgggccaggtttgagcttccaccactgtcttattccttcagagagagtgtcctcgagccaatctggaagataaccatcggcagccatacctgatttaaatcatttattgttcagagatgcagtcatccaaatccacattgaccagatcgcaagcagtgcaagcgtctggcacctttcccatgatatgatgaatgtagcacagtttctgatacgcctttttgacgacagaaacgggttgagattctgacacgggaaagcactctaaacagtctttctgtccgtgagtgaagcagatatttgaattctgattcattctctcgcattgtctgcagggaaacagcatcagattcatgcccacgtgacgagaacatttgttttggtacctgtccgcgtagttgattgaagcttccgcgtctgacgtcgatggctgcgcaactgactcgcgcgcccgtttgggctcacttatatctgcgtcactgggggcgggtctttttttggctccaccctttttgacgtagaattcatgctctacctcaaccacgtgatcctttgcccaccggaaaaagtctttgacttcctgcttggtgaccttcccaaagtcatgatccagacggcgggtgagttcaaatttgaacatccggtcttgcaacggctgctggtgttcgaaggtcgttgagttcccgtcaatcactgcgcacatgttggtgttggaggtgacaatcacgggagtcgggtctatctgggccgaggacttgcatttctggtccacgcgcaccttgcttcctccgagaatggctttggccgactccacgaccttggcggtcatcttcccctcctcccaccagatcaccatcttgtcgacgcaatcattgaaaggaaagttctcattggtccagttgacgcagccgtagaaagggcgaattcgtttaaacctgcaggactagtccctttagtgagggt

SEQ ID NO: 4858 - DNA, 3161 bp, Adeno-associated virus
aattgaatttagcggccgcgaattcgcccttcgcagagaccaaagttcaactgaaacgaattaaacggtttattgattaacaagcaattacagattacgagtcaggtatctggtgccaatggggcgaggctctgaatacacaccattagtgtccacagtaaagtccacattaacagatttgttgtagttggaagtgtactgaatctcgggattccagcgtttgctgttctccttctgcagctcccactcgatctccacgctgacctgccccgtggagtactgtgtaatgaaggaagcaaactttgccgcactgaaggtagtcgaaggattcgcaggtaccggggtgttcttgatgagaatctgcgggggagggtgtttaagtccgaatccgcccatgaggggagaggggtgaaaatgtccgtccgtgtgtggaatctttgcccagatgggcccctgcaggtacacgtctctgtcctgccacaccatgcctggaagaacgccttgtgtgttgacatctgaggtagctgcttgtgtgttgccgctctggaggttggtagatacagaaccatactgctccgtagccacgggattggtggtcctgatttcctcttcgtctgtaatcatgaccttttcaatgtccacattagtttttcccgagtcttgttttccaaagatgagaaccccgctctgaggaaaaaacttttcttcatcgtccttgtggctggccatggccgggcccggattcaccagagagtctcttccattaaggtggtacttggtagctccagtccacgagtattcactgttgttgttatccgcagatgtctttgatactcgctgctggcggtaacagggtccaggaagccagttcctagactggtcccgaatgtcacttgctccggcctgagaaaactgaagccttgactgcgtggtggttccgcttggagtgtttgttctgctcaagtaatacaggtactggtcgacgagaggattcatgagacggtccaaactctggctgtgggcgtagctgctgtggaaaggaacgtcctcaaaggtgtagctgaaggtaaagttgtttccggtacgcagcatctgagaaggaaagtactccaggcagtaaaatgaagagcgtcctactgcctgactcccgttgttcagggtgaggtatccatactgtggcaccatgaagacgtctgctgggaacggcgggaggcatccttgatgcgccgagccgaggacgtacgggagctggtactccgagtcagtaaacacctgaaccgtgctggtaaggttattggcaatcgtcgtcgtaccgtcattctgcgtgacctccttgacttgaatgttaaagagcttgaagttgagtcttttgggccgggatccccaattgttgttgatgagtctttgccagtcacgtggcgaaaagtggcagtggaatctgttgaagtcaaaatacccccaaggggtgctgtagccaaagtagtggttgtcgtttgaggctcctgattggctggaaatctgcctgtagaggtggttgttgtaggtgggcagagcccaggtgcgggtgctggtggtgatgactctgtcgcccatccatgtggaatcgcaatgccaatttcccgaggaattacccactccgtcggcgccctcgttattgtctgccattggtgcgccactgcctgtagccatcgtattagttcccagaccagagggggctgctggtggctgtccgagaggctgggggtcaggtacggagtctgcgtctccagtctgaccgaaattcaatctccttcttgcaggctgctggcccgcttttccggttcccgaggaggagtctggctccgcaagagagtgctctaccggcctcttttttcccggagccgtcttaacaggttcctcaaccaggcccagaggttcaagaaccctctttttcgcctggaagactgctcgtccgaggttgcccccaaaagacgtatcttctttaagacgctcctggaactccgcgtcggcgtggttgtacttgaggtacgggttgtctccgccgtcgagctgccggtcgtaggccttgtcgtgctcgagggccgcggcgtctgcctcgttgaccggctctcccttgtcgagtccgttgaagggtccaaggtacttgtacccaggaagcacaagacccctgctgtcgtccttatgccgctctgcgggctttggtggtggtgggccaggtttgagcttccaccactgtcttattccttcagagagagtgtcctcgagccaatctggaagataaccatcggcagccatacctgatttaaatcatttattgttcagagatgcagtcatccaaatccacattgaccagatcgcaagcagtgcaagcgtctggcacctttcccatgatatgatgaatgtagcacagtttctgatacgcctttttgacgacagaaacgggttgagattctgacacgggaaagcactctaaacagtctttctgtccgtgagtgaagcagatatttgaattctgattcattctctcgcattgtctgcagggaaacagcatcagattcatgcccacgtgacgagaacatttgttttggtacctgtccgcgtagttgattgaagcttccgcgtctgacgtcgatggctgcgcaactgactcgcgcgcccgtttgggctcacttatatctgcgtcactgggggcgggtctttttttggctccaccctttttgacgtagaattcatgctctacctcaaccacgtgatcctttgcccaccggaaaaagtctttgacttcctgcttggtgaccttcccaaagtcatgatccagacggcgggtgagttcaaatttgaacatccggtcttgcaacggctgctggtgttcgaaggtcgttgagttcccgtcaatcactgcgcacatgttggtgttggaggtgacaatcacgggagtcgggtctatctgggccgaggacttgcatttctggtccacgcgcaccttgcttcctccgagaatggctttggccgactccacgaccttggcggtcatcttcccctcctcccaccagatcaccatcttgtcgacgcaatcattgaaaggaaagttctcattggtccagttgacgcagcaagggcgaattcgtttaaacctgcaggactagtccctttagtgaggg

SEQ ID NO: 4859 - DNA, 3172 bp, Adeno-associated virus
gattgaatttagcggccgcgaattcgcccttgctgcgtcaactggaccaatgagaactttcccttcaacgattgcgtcgacaagatggtgatctggtgggaggagggcaagatgaccgccaaggtcgtggagtccgccaaggccattctgggtggaagcaaggtgcgcgtggaccaaaagtgcaagtcatcggcccagatcgaccccacgcccgtgatcgtcacctccaacaccaacatgtgcgccgtgatcgacgggaacagcaccaccttcgagcaccagcagcccctgcaggaccgcatgttcaagttcgagctcacccgccgtctggagcacgactttggcaaggtgaccaagcaggaagtcaaagagttcttccgctgggctcaggatcacgtgactgaggtggcgcatgagttctacgtcagaaagggcggagccaccaaaagacccgcccccagtgacgcggatataagcgagcccaagcgggcctgcccctcagttgcggagccatcgacgtcagacgcggaagcaccggtggactttgcggacaggtaccaaaacaaatgttctcgtcacgcgggcatgcttcagatgctgtttccctgcaagacatgcgagagaatgaatcagaatttcaacgtctgcttcacgcacggggtcagagactgctcagagtgcttccccggcgcgtcggaatctcaacccgtcgtcagaaaaaagacgtatcagaaactgtgcgcgattcatcatctgctggggcgggcacccgagattgcgtgttcggcctgcgatctcgtcaacgtggacttggatgactgtgtttctgagcaataaatgacttaaaccaggtatggctgctgacggttatcttccagattggctcgaggacaacctctctgagggcattcgcgagtggtgggacctgaaacctggagcccccaagcccaaggccaaccagcagaagcaggacgacggccggggtctggtgcttcctggctacaagtacctcggacccttcaacggactcgacaagggggagcccgtcaacgcggcggacgcagcggccctcgagcacgacaaggcctacgaccagcagctcaaagcgggtgacaatccgtacctgcggtataaccacgccgacgccgagtttcaggagcgtctgcaagaagatacgtcttttgggggcaacctcgggcgagcagtcttccaggccaagaagcgggttctcgaacctctcggtctggttgaggaagctgctaagacggctcctggaaagaagagaccggtagaaccgtcacctcagcgttcccccgactcctccgcgggcatcggcaagaaaggccagcagcccgctaaaaagagactgaactttggtcagactggcgactcagagtcagtccccgaccctcaaccaatcggagaaccaccagcaggcccctctggtctgggatctggtacaatggctgcaggcggtggcgctccaatggcagacaataacgaaggcgccgacggagtgggtagttcctcaggaaattggcattgcgattccacatggctgggcgacagagtcatcaccaccagcacccgaacctgggccctgcccacctacaacaaccacctctacaagcaaatatccaatgggacatcgggaggaagcaccaacgacaacacctacttcggctacagcaccccctgggggtattttgacttcaacagattccactgccacttctcaccacgtgactggcagcgactcatcaacaacaactggggattccggccaaaaagactcagcttcaagctcttcaacatccaggtcaaggaggtcacgcagaatgaaggcaccgagaccatcgccaataaccttaccagcacgattcaggtatttacggactcggaataccagctgccgtacgtcctcggctccgcgcaccagggctgcctgcctccgttcccggcggacgtcttcatgattccccagtacggctaccttacactgaacaatggaagtcaagccgtaggccgttcctccttctactgcctggaatattttccatctcaaatgctgcgaactggaaacaattttgaattcagctacaccttcgaggacgtgcctttccacagcagctgcgcacacagccagagctcggaccgactgatgaatcctctcatcgaccagtacctgtactacttatccagaactcggtccacaggaggaactcaaggtacccagcaattgttattttctcaagctgggcctgcaaacatgtcggctcaggctaagaactggctacctggaccttgctaccggcagcagcgagtctctacgacactgtcgcaaaacaacaacagcaactttgcttggactggtgccaccaaatatcacctgaacggaagagactctttggtaaatcccggtgtcgccatggcaacccacaaggacgacgaggaacgcttcttcccgtcgagtggagtcctgatgtttggaaaacagggtgctggaagagacaatgtggactacagcagcgttatgctaaccagcgaagaagaaattaaaaccactaaccctgtagccacagaacaatacggtgtggtggctgacaacttgcagcaaaccaatacagggcctattgtgggaaatgtcaacagccaaggagccttacctggcatggtctggcagaaccgagacgtgtacctgcagggtcccatctgggccaagattcctcacacggacggcaacttccacccttcaccgctaatgggaggatttggactgaagcacccacctcctcagatcctgatcaagaacacgccggtacctgcggatcctccaacaacgttcagccaggcgaaattggcttccttcattacgcagtacagcaccggacaggtcagcgtggaaatcgagtgggagctgcagaaggagaacagcaaacgctggaacccagagattcagtacacttcaaactactacaaatctacaaatgtggactttgctgtcaatacagagggaacttattctgagcctcgccccattggtactcgttacctcacccgtaatctgtaattgctggttaatcaataaaccgtttgattcgtttcagttgaactttggtctctgcgaagggcgaattcgtttaaacctgcaggactagtccctttagtgagg

SEQ ID NO: 4860 - DNA, 3172 bp, Adeno-associated virus
gattgaatttagcggccgcgaattcgcccttgctgcgtcaactggaccaatgagaactttcccttcaacgattgcgtcgacaagatggtgatctggtgggaggagggcaagatgaccgccaaggtcgtggagtccgccaaggccattctgggtggaagcaaggtgcgcgtggaccaaaagtgcaagtcatcggcccagatcgaccccacgcccgtgatcgtcacctccaacaccaacatgtgcgccgtgatcggcgggaacagcaccaccttcgagcaccagcagcccctgcaggaccgcatgttcaagttcgagctcacccgccgtctggagcacgactttggcaaggtgaccaagcaggaagtcaaagagttcttccgctgggctcaggatcacgtgactgaggtggcgcatgagttctacgtcagaaagggcggagccaccaaaagacccgcccccagtgacgcggatataagcgagcccaagcgggcctgcccctcagttgcggagccatcgacgtcagacgcggaagcaccggtggactttgcggacaggtaccaaaacaaatgttctcgtcacgcgggcatgcttcagatgctgtttccctgcaagacatgcgagagaatgaatcagaatttcaacgtctgcttcacgcacggggtcagagactgctcagagtgcctccccggcgcgtcagaatctcaacccgtcgtcagaaaaaagacgtatcagaaactgtgcgcgattcatcatctgctggggcgggcacccgagattgcgtgttcggcctgcgatctcgtcaacgtggacttggatgactgtgtttctgagcaataaatgacttaaaccaggtatggctgctgacggttatcttccagattggctcgaggacaacctctctgagggcattcgcgagtggtgggacctgaaacctggagcccccaagcccaaggccaaccagcagaagcaggacgacggccggggtctggtgcttcttggctacaagtacctcggacccttcaacggactcgacaagggggagcccgtcaatgcggcggacgcagcggccctcgagcacgacaaggcctacgaccagcagctcaaagcgggtgacaatccgtacctgcggtataaccacgccgacgccgagtttcaggagcgtctgcaagaagatacgtcttttgggggcaacctcgggcgagcagtcttccaggccaagaagcgggttctcgaacctctcggtctggttgaggaagctgctaagacggctcctggaaagaagagaccggtagaaccgtcacctcagcgttcccccgactcctccacgggcatcggcaagaaaggccagcagcccgctaaaaagagactgaactttggtcagactggcgactcagagtcagtccccgaccctcaaccaatcggagaaccaccagcaggcccctctggtctgggatctggtacaatggctgcaggcggtggcgctccaatggcagacaataacgaaggcgccgacggagtgggtagttcctcaggaaattggcattgcgattccacatggctgggcgacagagtcatcaccaccagcacccgaacctgggccctgcccacctacaacaaccacctctacaagcaaatatccaatgggacatcgggaggaagcaccaacgacaacacctacttcggctacagcaccccctgggggtattttgacttcaacagattccactgccacttctcaccacgtgactggcagcgactcatcaacaacaactggggattccggccaaaaagactcagcttcaagctcttcaacatccaggtcaaggaggtcacgcagaatgaaggcaccaagaccatcgccaataaccttaccagcacgattcaggtatttacggactcggaataccagctgccgtacgtcctcggctccgcgcaccagggctgcctgcctccgttcccggcggacgtcttcatgattccccagtacggctaccttacactgaacaatggaagtcaagccgtaggccgttcctccttctactgcctggaatattttccatctcaaatgctgcgaactggaaacaattttgaattcagctacaccttcgaggacgtgcctttccacagcggctacgcacacagccagagcttggaccgactgatgaatcctctcatcgaccagtacctgtactacttatccagaactcagtccacaggaggaactcaaggtacccagcaattgttattttctcaagctgggcctgcaaacatgtcggctcaggctaagaactggctacctggaccttgctaccggcagcagcgagtctctacgacactgtcgcaaaacaacaacagcaactttgcttggactggtgccaccaaatatcacctgaacggaagagactctttggtaaatcccggtgtcgccatggcaacccacaaggacgacgaggaacgcttcttcccgtcgagtggagtcctgatgtttggaaaacagggtgctggaagagacaatgtggactacagcagcgttatgctaaccagcgaagaagaaattaaaaccactaaccctgtagccacagaacaatacggtgtggtggctgacaacttgcagcaaaccaatacagggcctattgtgggaaatgtcaacagccaaggagccttacctggcatggtctggcagaaccgagacgtgtacctgcagggtcccatctgggccaagattcctcacacggacggcaacttccacccttcaccgctaatgggaggatttggactgaagcacccacctcctcagatcctgatcaagaacacgccggtacctgcggatcctccaacgacgttcagccaggcgaaattggcttccttcattacgcagtacagcaccggacaggtcagcgtggaaatcgagtgggagctgcagaaggagaacagcaaacgctggaacccagagattcagtacacttcaaactactacaaatctacaaatgtggactttgctgtcaatacagagggaacttattctgagcctcgccccattggtactcgttacctcacccgtaatctgtaattgctggttaatcaataaaccgtttgattcgtttcagttgaactttggtctctgcgaagggcgaattcgtttaaacctgcaggactagtccctttagtgagg

SEQ ID NO: 4861 - DNA, 2208 bp, Adeno-associated virus
atggctgccgatggttatcttccagattggctcgaggacactctctctgaaggaataagacagtggtggaagctcaaacctggcccaccaccaccaaagcccgcagagcggcataaggacgacagcaggggtcttgtgcttcctgggtacaagtacctcggacccttcaacggactcgacaagggagagccggtcaacgaggcagacgccgcggccctcgagcacgacaaggcctacgaccggcagctcgaaagcggagacaacccgtacctcaagtacaaccacgccgacgcggagtttcaggagcgtcttaaagaagatacgtcttttgggggcaacctcggacgagcagtcttccaggcgaaaaagagggttcttgaacctctgggcctggttgaggagcctgttaaaacggctccgggaaaaaagaggccggtagagcactctcctgtggagccagactcctcctcgggaaccggaaaagcgggccagcagcctgcgagaaaaagattgaattttggtcagactggagacgcagactccgtacctgacccccagcctctcggacagccaccagcagccccctctggtctgggatctactacaatggcttcaggcagtggcgcaccagtggcagacaataacgagggtgccgatggagtgggtaattcctcaggaaattggcattgcgattcccaatggctgggcgacagagtcatcaccaccagcacccgaacctgggccctgcccacctacaacaaccacctctacaagcaaatctccagccaatcaggagcctcaaacgacaaccactactttggctacagcaccccctgggggtattttgacttcaacagattccactgccacttttcaccacgtgactggcaaagactcatcaacaacagctggggattccgacccaaaagactcaacttcaagctctttaacattcaagtcaaagaggtcacgcagaatgacggtacgacgacgattgccaataaccttaccagcacggttcaagtgtttaccgactcggagtaccagctcccgtacgtcctcggctcggcgcatcaaggatgcctcccgccgttcccagcagacgtctttatggtcccacagtatggatacctcaccctgaacaacgggagtcaggcggtaggacgctcttccttttactgcctggagtactttccttctcagatgctgcgtactggaaacaactttcagttcagctacacctttgaagacgttcccttccacagcagctacgctcacagccagagtctggatcggctgctgaatcctctgatcgaccagtacctatattatctgaacaagacacaatcaaatagtggaactcttcagcagtctcggctactgtttagccaagctggacccaccagcatgtctcttcaagctaaaaactggctgcctggaccttgctacagacagcagcgtctgtcaaagcaggcaaacgacaacaacaacagcaactttccctggactgcggctacaaagtatcatctaaatggccgggactcgttggttaatccaggaccagctatggccagccacaaagacgatgaagaaaagtttttccccatgcatggaaccctgatatttggtaaacaaggaacaaatgctaacgacgcggatttggacaatgtcatgattacagatgaagaagaaatccgcaccaccaatcccgtggctacggagcagtacggatatgtgtcaaataatttgcaaaactcaaatactggtccaactactggaactgtcaatcaccaaggagcgttacctggtatggtgtggcaggatcgagacgtgtacctgcagggacccatttgggccaagattcctcacacggacgggcactttcatccttctccactaatgggaggttttgggctcaaacacccgcctcctcagatcatgatcaaaaacactcccgttccagccaatcctcctacaaacttcagttcttccaagtttgcttctttcatcacacagtattccacggggcaggtcagcgtggagatcgagtgggagctgcagaaggagaacagcaaacgctggaatcccgaaattcagtatacttccaactacaacaaatctgttaatgtggactttactgtggacactaatggtgtgtattcagagcctcgccccattggcaccagatacccgactcgtaatctgtaa

SEQ ID NO: 4862 - protein, 735 aa, Adeno-associated virus
MAADGYLPDWLEDTLSEGIRQWWKLKPGPPPPKPAERHKDDSRGLVLPGYKYLGPFNGLDKGEPVNEADAAALEHDKAYDRQLESGDNPYLKYNHADAEFQERLKEDTSFGGNLGRAVFQAKKRVLEPLGLVEEPVKTAPGKKRPVEHSPVEPDSSSGTGKAGQQPARKRLNFGQTGDADSVPDPQPLGQPPAAPSGLGSTTMASGSGAPVADNNEGADGVGNSSGNWHCDSQWLGDRVITTSTRTWALPTYNNHLYKQISSQSGASNDNHYFGYSTPWGYFDFNRFHCHFSPRDWQRLINNSWGFRPKRLNFKLFNIQVKEVTQNDGTTTIANNLTSTVQVFTDSEYQLPYVLGSAHQGCLPPFPADVFMVPQYGYLTLNNGSQAVGRSSFYCLEYFPSQMLRTGNNFQFSYTFEDVPFHSSYAHSQSLDRLLNPLIDQYLYYLNKTQSNSGTLQQSRLLFSQAGPTSMSLQAKNWLPGPCYRQQRLSKQANDNNNSNFPWTAATKYHLNGRDSLVNPGPAMASHKDDEEKFFPMHGTLIFGKQGTNANDADLDNVMITDEEEIRTTNPVATEQYGYVSNNLQNSNTGPTTGTVNHQGALPGMVWQDRDVYLQGPIWAKIPHTDGHFHPSPLMGGFGLKHPPPQIMIKNTPVPANPPTNFSSSKFASFITQYSTGQVSVEIEWELQKENSKRWNPEIQYTSNYNKSVNVDFTVDTNGVYSEPRPIGTRYPTRNL

SEQ ID NO: 4863 - DNA, 2208 bp, Adeno-associated virus
atggctgccgatggttatcttccagattggctcgaggacactctctctgaaggaataagacagtggtggaagctcaaacctggcccaccaccaccaaagcccgcagagcggcataaggacgacagcaggggtcttgtgcttcctgggtacaagtacctcggacccttcaacggactcgacaagggagagccggtcaacgaggcagacgccgcggccctcgagcacgacaaggcctacgaccggcagctcgacagcggagacaacccgtacctcaagtacaaccacgccgacgcggagtttcaggagcgtcttaaagaagatacgtcttttgggggcaacctcggacgagcagtcttccaggccaaaaagaggattcttgaacctctgggcctggttgaggaacctgttaagacggctccgggagaaaagaggccggtagagcactctcctgcggagccagactcctcctcgggaaccggaaaagcgggccagcagcctgcaagaaagagattgaattttggccagactggagacgcagactcagtacctgacccccagcctctcggacagccaccagcagccccctctggtctgggaactaatacgatggcttcaggcagtggcgcaccaatggcagacaataacgagggcgccgacggagtgggtaattcctcgggaaattggtattgcgattccacatggatgggcgacagagtcatcaccaccagcacccgcacctgggccctgcccacctacaacaaccatctgtacaagcaaatctccagccagtctggagccagcaacgacaaccactactttggctacagcaccccctgggggtattttgacttcaacagattccactgccacttctccccacgtgactggcaaagactcatcaacaacaactggggattccggcccaagagactcagcttcaagctctttaacattcaagtcaaagaggtcacgcagaatgacggtacgacgacgattgccaataaccttaccagcacggttcaggtgtttactgactcggagtaccagctcccgtacgtcctcggctcggcgcatcaaggatgcctcccgccgttcccagcagacgtcttcatggtgccacagtatggatacctcaccctgaacaacggcagtcaggcggtaggacgctcttccttttactgcctggagtactttccttctcagatgcttcgtaccggaaacaactttaccttcagctacacctttgaagacgttcctttccatagcagctacgctcacagccaaagtctggaccgtctcatgaatcctctcatcgaccagtacctgtattacttgagcagaacaaacactccaagcggaaccaccacgatgtccaggcttcagttttctcaggccggagcaagtgacattcgggaccagtctagaaactggcttcctggaccctgttaccgccagcagcgagtatcaaagacagctgcggacaacaacaacagtgattactcgtggactggagctaccaagtaccacctcaatggaagagactctctggtgaatccgggcccagctatggccagccacaaggacgatgaagaaaaatattttcctcagagcggggttctcatctttggaaaacaagactcgggaaaaactaatgtggacattgaaaaggttatgattacagacgaagaggaaatcaggaccaccaatcccgtggctacggagcagtatggttctgtatctaccaacctccagagcggcaacacacaagcagctacctcagatgtcaacacacaaggcgttcttccaggcatggtctggcaggacagagacgtgtacctgcaggggcccatctgggcaaagattccacacacggacggacattttcacccctctcccctcgtgggcggattcggacttaaacaccctcctccacaaattctcatcaagaacaccccggtacctgcgaatccttcgaccactttcagtgcggcaaagtttgcttccttcatcacacagtactccacggggcaggtcagcgtggagatcgagtgggagctgcagaaggagaacagcaaacgctggaatcccgaaattcagtacacttccaactacaacaaatctgttaatgtggactttactgtggacactaatggtgtgtattcagagcctcgccccattggcaccagatacctgactcgtaatctgtaa

SEQ ID NO: 4864 - protein, 735 aa, Adeno-associated virus
MAADGYLPDWLEDTLSEGIRQWWKLKPGPPPPKPAERHKDDSRGLVLPGYKYLGPFNGLDKGEPVNEADAAALEHDKAYDRQLDSGDNPYLKYNHADAEFQERLKEDTSFGGNLGRAVFQAKKRILEPLGLVEEPVKTAPGEKRPVEHSPAEPDSSSGTGKAGQQPARKRLNFGQTGDADSVPDPQPLGQPPAAPSGLGTNTMASGSGAPMADNNEGADGVGNSSGNWYCDSTWMGDRVITTSTRTWALPTYNNHLYKQISSQSGASNDNHYFGYSTPWGYFDFNRFHCHFSPRDWQRLINNNWGFRPKRLSFKLFNIQVKEVTQNDGTTTIANNLTSTVQVFTDSEYQLPYVLGSAHQGCLPPFPADVFMVPQYGYLTLNNGSQAVGRSSFYCLEYFPSQMLRTGNNFTFSYTFEDVPFHSSYAHSQSLDRLMNPLIDQYLYYLSRTNTPSGTTTMSRLQFSQAGASDIRDQSRNWLPGPCYRQQRVSKTAADNNNSDYSWTGATKYHLNGRDSLVNPGPAMASHKDDEEKYFPQSGVLIFGKQDSGKTNVDIEKVMITDEEEIRTTNPVATEQYGSVSTNLQSGNTQAATSDVNTQGVLPGMVWQDRDVYLQGPIWAKIPHTDGHFHPSPLVGGFGLKHPPPQILIKNTPVPANPSTTFSAAKFASFITQYSTGQVSVEIEWELQKENSKRWNPEIQYTSNYNKSVNVDFTVDTNGVYSEPRPIGTRYLTRNL

SEQ ID NO: 4865 - DNA, 2209 bp, Adeno-associated virus
atggctgccgatggttatcctccagattggctcgaggacactctctctgaagggataagacagtggtggaagctcaaacctggcccaccaccaccaaagcccgcagagcggcataaggacgacagcaggggtcttgtgcttcctgggtacaagtacctcggacccttcaacggactcgacaagggggagccggtcaacgaggcagacgccgcggccctcgagcacgacaaggcctacgaccggcagctcgacagcggagacaacccgtacctcaagtacaaccacgccgacgcagagtttcaggagcgccttaaagaagatacgtcttttgggggcaacctcggacgagcagtcttccaggcgaaaaagagggttcttgaacctctgggcctggttgaggaacctgttaagacggctccgggaaaaaagaggccggtagagcactctcctgtggagccagactcctcctcgggaaccggaaaagcgggccagcggcctgcaagaaaaagattaaattttggtcagactggagacgcagactccgtacctgacccccagcctctcggacagccaccagcagccccctctggtctgggatctactacaatggctacaggcagtggcgcaccaatggcagacaataacgagggtgccgatggagtgggtaattcctcaggaaattggcattgcgattcccaatggctgggcgacagagtcatcaccaccagcacccgaacctgggccctgcccacatacaacaaccacctctacaagcaaatctccagccaatcaggagccagcaacgacaaccactactttggctacagcaccccctgggggtattttgacttcaacagattccactgccacttttcaccacgtgactggcaaagactcatcaacaacaactggggattccggcccaaaagactcaacttcaagctctttaatattcaagtcaaagaggtcacgcagaatgacggtacgacgacgattgccaataaccttaccagcacggttcaggtgtttactgactcggagtaccagctcccgtacgtcctgggctcggcgcatcaaggatgcctcccgccgtttccagcggacgtcttcatggtcccacagtatggatacctcaccctgaacaacgggagtcaggcggtaggacgctcttccttttactgcctggagtactttccttctcagatgctgcgtactggaaacaactttcagttcagctacacttttgaagacgtgcctttccacagcagctacgctcacagccagagtctggatcggctgatgaatcctctgatcgaccagtacctgtattatctgaacaagacacaaacaaatagtggaactcttcagcagtctcggctactgtttagccaagctggaccaaccaacatgtctcttcaagctaaaaactggctgcctggaccttgctacagacagcagcgtctgtcaaaacaggcaaacgacaacaacaacagcaactttccctggactgcagctacaaagtatcatctaaatggccgggactcgttggttaatccaggaccagctatggccagtcacaaggatgacgaagaaaagtttttccccatgcatggaaccctgatatttggtaaacaaggaacaaatgccaacgacgcggatttggaaaatgtcatgattacagatgaagaagaaatcagggccaccaatcccgtggctacggagcagtacgggactgtgtcaaataatttgcaaaactcaaacactggtccaactactggaactgtcaatcgccaaggagcgttacctggtatggtgtggcaggatcgagacgtgtacctgcagggacccatttgggccaagattcctcacaccgatggacactttcatccttctccactgatgggaggttttggactcaaacacccgcctcctcagatcatgatcaaaaacactcccgttccagccaatcctcccacaaacttcagttctgccaagtttgcttctttcatcacacagtattccacgggacaggtcagcgtggagatcgagtgggagctgcagaaggagaacagcaaacgctggaatcccgaaattcagtacacttccaactacaacaagtctgttaatgtggactttactgtggacactaatggtgtgtattcagagcctcgccccattggcaccagatacctgactcgtaatctgtaat

SEQ ID NO: 4866 - protein, 735 aa, Adeno-associated virus
MAADGYPPDWLEDTLSEGIRQWWKLKPGPPPPKPAERHKDDSRGLVLPGYKYLGPFNGLDKGEPVNEADAAALEHDKAYDRQLDSGDNPYLKYNHADAEFQERLKEDTSFGGNLGRAVFQAKKRVLEPLGLVEEPVKTAPGKKRPVEHSPVEPDSSSGTGKAGQRPARKRLNFGQTGDADSVPDPQPLGQPPAAPSGLGSTTMATGSGAPMADNNEGADGVGNSSGNWHCDSQWLGDRVITTSTRTWALPTYNNHLYKQISSQSGASNDNHYFGYSTPWGYFDFNRFHCHFSPRDWQRLINNNWGFRPKRLNFKLFNIQVKEVTQNDGTTTIANNLTSTVQVFTDSEYQLPYVLGSAHQGCLPPFPADVFMVPQYGYLTLNNGSQAVGRSSFYCLEYFPSQMLRTGNNFQFSYTFEDVPFHSSYAHSQSLDRLMNPLIDQYLYYLNKTQTNSGTLQQSRLLFSQAGPTNMSLQAKNWLPGPCYRQQRLSKQANDNNNSNFPWTAATKYHLNGRDSLVNPGPAMASHKDDEEKFFPMHGTLIFGKQGTNANDADLENVMITDEEEIRATNPVATEQYGTVSNNLQNSNTGPTTGTVNRQGALPGMVWQDRDVYLQGPIWAKIPHTDGHFHPSPLMGGFGLKHPPPQIMIKNTPVPANPPTNFSSAKFASFITQYSTGQVSVEIEWELQKENSKRWNPEIQYTSNYNKSVNVDFTVDTNGVYSEPRPIGTRYLTRNL

SEQ ID NO: 4867 - DNA, 2208 bp, Adeno-associated virus
atggctgccgatggttatcttccagattggctcgaggacactctctctgaaggaataagacagtggtggaagctcaaacctggcccaccaccaccaaagcccgcagagcggcataaggacgacagcaggggtcttgtgcttcctgggtacaggtacctcggacccttcaacggactcgacaagggagagccggtcaacgaggcagacgccgcggccctcgagcacgacaaggcctacgaccggcagctcgacagcggagacaacccgtacctcaagtacaaccacgtcgacgcggagtttcaggagcgtcttaaagaagatacgtcttttgggggcaacctcggacgagcagtcttccaggccaaaaagaggattcttgaacctctgggcctggttgaggaacctgttaaggcggctccgggagaaaagaggccggtagagcactctcctgcggagccagactcctcctcgggaaccggaaaagcgggccagcagcctgcaagaaagagattgaattttggtcagactggagacgcagactcagtacctgacccccagcctctcggacagccaccagcagccccctctggtctgggaactaatacgatggcttcaggcagtggcgcaccaatggcagacaataacgagggcgccgacggagtgggtaattcctcgggaaattggcattgcgattccacatggatgggcgacagagtcatcaccaccagcacccgcacctgggccctgcccacctacaacaaccatctgtacaagcaaatctccagccagtctggagccagcaacgacaaccactactttggctacagcaccccctgggggcattttgacttcaacagattccactgccacttctccccacgtgactggcaaagactcatcaacaacaactggggattccggcccaagagactcagcttcaagctctttaacattcaagtcaaagaggtcacgcagaatgacggtacgacgacgattgccaataaccttaccagcacggttcaggtgtttactgactcggagtaccagctcccgtacgtcctcggctcggcgcatcaaggatgcctcccgccgttcccagcagacgtcttcatggtgccacagtatggatacctcaccctgaacaacggcagtcaggcggtaggacgctcttccttttactgcctggagtactttccttctcagatgcttcgtaccggaaacaactttaccttcagctacacctttgaagacgttcctttccatagcagctacgctcacagccaaagtctggaccgtctcatgaatcctctcatcgaccagtacctgtattacttgagcagaacaaacactccaagcggaaccaccacgatgtccaggcttcagttttctcaggccggagcaagtgacattcgggaccagtctagaaactggcttcctggaccctgttaccgccagcagcgagtatcaaagacagctgcggacaacaacaacagtgattactcgtggactggagctaccaagtaccacctcaatggaagagactctctggtgaatccgggcccagctatggccagccacaaggacgatgaagaaaaatattttcctcagagcggggttctcatctttggaaaacaagactcgggaaaaactaatgtggacattgaaaaggttatgattacagacgaagaggaaatcaggaccaccaatcccgtggctacggagcagtatggttctgtatctaccaacctccagagcggcaacacacaagcagctacctcagatgtcaacacacaaggcgttcttccaggcatggtctggcaggacagagacgtgtacctgcaggggcccatctgggcaaagattccacacacggacggacattttcacccctctccccccatgggcggattcggacttaaacaccctcctccacaaattctcatcaagaacaccccggtacctgcgaatccttcgaccactttcagtgcggcaaagtttgcttccttcatcacacagtactccacggggcaggtcagcgtggagatcgagtgggagctgcagaaggagaacagcaaacgctggaatcccgaaattcagtacacttccaactacaacaaatctgttaatgtggactttactgtggacactaatggtgtgtattcagagcctcgccccattggcgccagatacctgactcgtaatctgtaa

SEQ ID NO: 4868 - protein, 735 aa, Adeno-associated virus
MAADGYLPDWLEDTLSEGIRQWWKLKPGPPPPKPAERHKDDSRGLVLPGYRYLGPFNGLDKGEPVNEADAAALEHDKAYDRQLDSGDNPYLKYNHVDAEFQERLKEDTSFGGNLGRAVFQAKKRILEPLGLVEEPVKAAPGEKRPVEHSPAEPDSSSGTGKAGQQPARKRLNFGQTGDADSVPDPQPLGQPPAAPSGLGTNTMASGSGAPMADNNEGADGVGNSSGNWHCDSTWMGDRVITTSTRTWALPTYNNHLYKQISSQSGASNDNHYFGYSTPWGHFDFNRFHCHFSPRDWQRLINNNWGFRPKRLSFKLFNIQVKEVTQNDGTTTIANNLTSTVQVFTDSEYQLPYVLGSAHQGCLPPFPADVFMVPQYGYLTLNNGSQAVGRSSFYCLEYFPSQMLRTGNNFTFSYTFEDVPFHSSYAHSQSLDRLMNPLIDQYLYYLSRTNTPSGTTTMSRLQFSQAGASDIRDQSRNWLPGPCYRQQRVSKTAADNNNSDYSWTGATKYHLNGRDSLVNPGPAMASHKDDEEKYFPQSGVLIFGKQDSGKTNVDIEKVMITDEEEIRTTNPVATEQYGSVSTNLQSGNTQAATSDVNTQGVLPGMVWQDRDVYLQGPIWAKIPHTDGHFHPSPPMGGFGLKHPPPQILIKNTPVPANPSTTFSAAKFASFITQYSTGQVSVEIEWELQKENSKRWNPEIQYTSNYNKSVNVDFTVDTNGVYSEPRPIGARYLTRNL

SEQ ID NO: 4869 - DNA, 2208 bp, Adeno-associated virus
atggctgccgatggttatcttccagattggctcgaggacaccctctctgaaggaataagacagtggtggaagctcaaacctggcccaccaccaccaaagcccgcagagcggcataaggacgacagcaggggtcttgtgcttcctgggtacaagtacctcggacccttcaacggactcgacaagggagagccggtcaacgaggcagacgccgcggccctcgagcacgacaaggcctacgaccggcagctcgacagcggagataacccgtacctcaagtacaaccacgccgacgcggagtttcaggagcgccttaaagaggatacgtcttttgggggcaacctcggacgagcagtcttccaggccaaaaagaggattcttgaacctctgggcctggttgaggaacctgttaagacggctccgggaaaaaagaggccggtagagcactctcctgcggagccagactcctcctcgggaaccggaaaagcgggccagcagcctgcaagaaagagattgaattttggtcagactggagacgcagactcagtacctgacccccggcctctcggacagccaccagcagccccctctggtctgggaactaatacgatggcttcaggcagtggcgcaccaatggcagacaataacgagggcgccgacggagtgggtaattcctcgggaaattggcattgcgattccacatggatgggcgacagagtcatcaccaccagcacccgcacctgggccctgcccacctacaacaaccatctgtacaagcaaatctccagccagtctggagccagcaacgacaaccactactttggctacagcaccccctgggggtattttgacttcaacagattccactgccacttctccccacgtgactggcaaagactcatcaacaacaactggggattccggcccaagagactcagcttcaagctctttaacattcaagtcaaagaggtcacgcagaatgacggtacgacgacgattgccaataaccttaccagcacggttcaggtgtttactgactcggagtaccagctcccgtacgtcctcggctcggcgcatcaaggatgcctcccgccgttcccagcagacgtcttcatggtgccacagtatggatacctcaccctgaacaacggcagtcaggcggtaggacgctcttccttttactgcctggagtactttccttctcagatgcttcgtaccggaaacaactttaccttcagctacacctttgaagacgttcctttccatagcagctacgctcacagccaaagtctggaccgtctcatgaatcctctcatcgaccagtacctgtattacttgagcagaacaaacactccaagcggaaccaccacgatgtccaggcttcagttttctcaggccggagcaagtgacattcgggaccagtctagaaactggcttcctggaccctgttaccgccagcagcgagtatcaaagacagctgcggacaacaacaacagtgattactcgtggactggagctaccaagtaccacctcaatggaagagactctctggtgaatccgggcccagctatggccagccacaaggacgatgaagaaaaatattttcctcagagcggggttctcatctttggaaaacaagactcgggaaaaactaatgtggacattgaaaaggttatgattacagacgaagaggaaatcaggaccaccaatcccgtggctacggagcagtatggttctgtatctaccaacctccagagcggcaacacacaagcagctacctcagatgtcaacacacaaggcgttcttccaggcatggtctggcaggacagagacgtgtacctgcaggggcccatctgggcaaagattccacacacggacggacattttcacccctctcccctcatgggcggattcggacttaaacaccctcctccacaaattctcatcaagaacaccccggtacctgcgaatccttcgaccactttcagtgcggcaaagtttgcttccttcatcacacagtactccacggggcaggtcagcgtggagatcgagtgggagctgcagaaggagaacagcaaacgctggaatcccgaaattcagtacacttccaactacaacaaatctgttaatgtggactttactgtggacactaatggtgtgtattcagagcctcgccccattggcaccagatacctgactcgtaatctgtaa

SEQ ID NO: 4870 - protein, 735 aa, Adeno-associated virus
MAADGYLPDWLEDTLSEGIRQWWKLKPGPPPPKPAERHKDDSRGLVLPGYKYLGPFNGLDKGEPVNEADAAALEHDKAYDRQLDSGDNPYLKYNHADAEFQERLKEDTSFGGNLGRAVFQAKKRILEPLGLVEEPVKTAPGKKRPVEHSPAEPDSSSGTGKAGQQPARKRLNFGQTGDADSVPDPRPLGQPPAAPSGLGTNTMASGSGAPMADNNEGADGVGNSSGNWHCDSTWMGDRVITTSTRTWALPTYNNHLYKQISSQSGASNDNHYFGYSTPWGYFDFNRFHCHFSPRDWQRLINNNWGFRPKRLSFKLFNIQVKEVTQNDGTTTIANNLTSTVQVFTDSEYQLPYVLGSAHQGCLPPFPADVFMVPQYGYLTLNNGSQAVGRSSFYCLEYFPSQMLRTGNNFTFSYTFEDVPFHSSYAHSQSLDRLMNPLIDQYLYYLSRTNTPSGTTTMSRLQFSQAGASDIRDQSRNWLPGPCYRQQRVSKTAADNNNSDYSWTGATKYHLNGRDSLVNPGPAMASHKDDEEKYFPQSGVLIFGKQDSGKTNVDIEKVMITDEEEIRTTNPVATEQYGSVSTNLQSGNTQAATSDVNTQGVLPGMVWQDRDVYLQGPIWAKIPHTDGHFHPSPLMGGFGLKHPPPQILIKNTPVPANPSTTFSAAKFASFITQYSTGQVSVEIEWELQKENSKRWNPEIQYTSNYNKSVNVDFTVDTNGVYSEPRPIGTRYLTRNL

SEQ ID NO: 4871 - DNA, 2208 bp, Adeno-associated virus
atggctgccgatggttatcttccagattggctcgaggacactctctctgaaggaataagacagtggtggaagctcaaacctggcccaccaccaccaaagcccgcagagcggcataaggacgacagcaggggtcttgtgcttcctgggtacaagtacctcggacccttcaacggactcgacaagggagagccggtcaacgaggcagacgccgcggccctcgagcacgacaaggcctacgaccggcagctcgacagcggagacaacccgtacctcaagtacaaccacgccgacgcggagtttcaggagcgccttaaaggagatacgtcttttgggggcaacctcggacgagcagtcttccaggccaaaaagaggattcttgaacctctgggcctggttgaggaacctgttaagacggctccgggaaaaaagaggccggtagagcactctcctgcggagccagactcctcctcgggaaccggaaaagcgggccagcagcctgcaagaaagagattgaattttggtcagactggagacgcagactcagtacctgacccccagcctctcggacagccaccagcagccccctctggtctgggaactaatacgatggcttcaggcagtggcgcaccaatggcagacaataacgagggcgccgacggagtgggtaattcctcgggaaattggcattgcgattccacatggatgggcggcagagtcatcaccaccagcacccgcacctgggccctgcccacctacaacaaccatctgtacaagcaaatctccagccagtctggagccagcaacgacaaccactactttggctacagcaccccctgggggtattttgacttcaacagattccactgccacttctccccacgtgactggcaaagactcatcaacaacaactggggattccggcccaagagactcagcttcaagctctttaacattcaagtcaaagaggtcacgcagaatgacggtacgacgacgattgccaataaccttaccagcacggttcaggtgtttactgactcggagtaccagctcccgtacgtcctcggctcggcgcatcaaggatgcctcccgccgttcccagcagacgtcttcatggtgccacagtatggatacctcaccctgaacaacggcagtcaggcggtaggacgctcttccttttactgcctggagtactttccttctcagacgcttcgtaccggaaacaactttaccttcagctacacctttgaagacgttcctttccatagcagctacgctcacagccaaagtctggaccgtctcatgaatcctctcatcgaccagtacctgtattacttgagcagaacaaacactccaagcggaaccaccacgatgtccaggcttcagttttctcaggccggagcaagtgacattcgggaccagtctagaaactggcttcctggaccctgttaccgccagcagcgagtatcaaagacagctgcggacaacaacaacagtgattactcgtggactggagctaccaagtaccacctcaatggaagagactctctggtgaatccgggcccagctatggccagccacaaggacgatgaagaaaaatattttcctcagagcggggttctcatctttggaaaacaagactcgggaaaaactaatgtggacattgaaaaggttatgattacagacgaagaggaaatcaggaccaccaatcccgtggctacggagcagtatggttctgtatctaccaacctccagagcggcaacacacaagcagctacctcagatgtcaacacacaaggcgttcttccaggcatggtctggcaggacagagacgtgtacctgcaggggcccatctgggcaaagattccacacacggacggacattttcacccctctcccctcatgggcggattcggacttaaacaccctcctccacaaattctcatcaagaacaccccggtacctgcgaatccttcgaccactttcagtgcggcaaagtttgcttccttcatcacacagtactccacggggcaggtcagcgtggagatcgagtgggagctgcagaaggagaacagcaaacgctggaatcccgaaattcagtacacttccaactacaacaaatctgttaatgtggactttactgtggacactaatggtgtgtattcagagcctcgccccattggcaccagatacctgactcgtaatctgtaa

SEQ ID NO: 4872 - protein, 735 aa, Adeno-associated virus
MAADGYLPDWLEDTLSEGIRQWWKLKPGPPPPKPAERHKDDSRGLVLPGYKYLGPFNGLDKGEPVNEADAAALEHDKAYDRQLDSGDNPYLKYNHADAEFQERLKGDTSFGGNLGRAVFQAKKRILEPLGLVEEPVKTAPGKKRPVEHSPAEPDSSSGTGKAGQQPARKRLNFGQTGDADSVPDPQPLGQPPAAPSGLGTNTMASGSGAPMADNNEGADGVGNSSGNWHCDSTWMGGRVITTSTRTWALPTYNNHLYKQISSQSGASNDNHYFGYSTPWGYFDFNRFHCHFSPRDWQRLINNNWGFRPKRLSFKLFNIQVKEVTQNDGTTTIANNLTSTVQVFTDSEYQLPYVLGSAHQGCLPPFPADVFMVPQYGYLTLNNGSQAVGRSSFYCLEYFPSQTLRTGNNFTFSYTFEDVPFHSSYAHSQSLDRLMNPLIDQYLYYLSRTNTPSGTTTMSRLQFSQAGASDIRDQSRNWLPGPCYRQQRVSKTAADNNNSDYSWTGATKYHLNGRDSLVNPGPAMASHKDDEEKYFPQSGVLIFGKQDSGKTNVDIEKVMITDEEEIRTTNPVATEQYGSVSTNLQSGNTQAATSDVNTQGVLPGMVWQDRDVYLQGPIWAKIPHTDGHFHPSPLMGGFGLKHPPPQILIKNTPVPANPSTTFSAAKFASFITQYSTGQVSVEIEWELQKENSKRWNPEIQYTSNYNKSVNVDFTVDTNGVYSEPRPIGTRYLTRNL

SEQ ID NO: 4873 - DNA, 2208 bp, Adeno-associated virus
atggctgccgatggttatcttccagattggctcgaggacactctctctgaaggaataagacagtggtggaagctcaaacctggcccaccaccaccaaagcccgcagagcggcataaggacgacagcaggggtcttgtgcttcctgggtacaagtacctcggacccttcaacggactcgacaagggagagccggtcaacgaggcagacgccgcggccctcgagcacgacaaggcctacgaccggcagctcgacagcggagacaacccgtacctcaagtacaaccacgccgacgcggagtttcaggagcgtcttaaagaagatacgtcttttgggggcaacctcggacgagcagtcttccaggccaaaaagaggattcttgaacctctgggcctggttgaggaacctgttaagacggctccgggaaaaaagaggccggtagagcactctcctgcggagccagactcctcctcgggaaccggaaaagcgggccagcagcctgcaagaaagagattgaattttggtcagactggagacgcagactcagtacctgacccccagcctctcggacagccaccagcagccccctctggtctgggaactaatacgatggcttcaggcagtggcgcaccaatggcagacaataacgagggcgccgacggagtgggtaattcctcgggaaattggcattgcgattccacatggatgggcgacagagtcatcaccaccagcacccgcacctgggccctgcccacctgcaacaaccatctgtacaagcaaatctccagccagtctggagccagcaacgacaaccactactttggctacagcaccccctgggggtattttgacttcaacagattccactgccacttctccccacgtgactggcaaagactcatcaacaacaactggggattccggcccaagagactcagcttcaagctctttaacattcaagtcaaagaggtcacgcagaatgacggtacgacgacgattgccaataaccttaccagcacggttcaggtgtttactgactcggagtaccagctcccgtacgtcctcggctcggcgcatcaaggatgcctcccgccgttcccagcagacgtcttcatggtgccacagtatggatacctcaccctgaacaacggcagtcaggcggtaggacgctcttccttttactgcctggagtattttccttctcagatgcttcgtaccggaaacaactttaccttcagctacacctttgaagacgttcctttccatagcagctacgctcacagccaaagtctggaccgtctcatgaatcctctcatcgaccagtacctgtattacttgagcagaacaaacactccaagcggaaccaccacgatgtccaggcttcagttttctcaggccggagcaagtgacattcgggaccagtctagaaactggcttcctggaccctgttaccgccagcagcgagtatcaaagacagctgcggacaacaacaacagtgattactcgtggactggagctaccaagtaccacctcaatggaagagactctctggtgaatccgggcccagctatggccagccacaaggacgatgaagaaaaatattttcctcagagcggggttctcatctttggaaaacaagactcgggaaaaactaatgtggacattgaaaaggttatgattacagacgaagaggaaatcaggaccaccaatcccgtggctacggagcagtatggttctgtatctacctacctccagagcggcaacacacaagcagctacctcagatgtcaacacacaaggcgttcttccaggcatggtctggcaggacagagacgtgtacctgcgggggcccatctgggcaaagattccacacacggacggacattttcacccctctcccctcatgggcggatttggacttaaacaccctcctccacaaattctcatcaagaacaccccggtacctgcgaatccttcgaccactttcagtgcggcaaagtttgcttccttcatcacacagtactccacggggcaggtcagcgtggagatcgagtgggagctgcagaaggagaacagcaaacgctggaatcccgaaattcagtacacttccaactacaacaaatctgttaatgtggactttactgtggacactaatggtgtgtattcagagcctcgccccattggcaccagatacctgactcgtaatctgtaa

SEQ ID NO: 4874 - protein, 735 aa, Adeno-associated virus
MAADGYLPDWLEDTLSEGIRQWWKLKPGPPPPKPAERHKDDSRGLVLPGYKYLGPFNGLDKGEPVNEADAAALEHDKAYDRQLDSGDNPYLKYNHADAEFQERLKEDTSFGGNLGRAVFQAKKRILEPLGLVEEPVKTAPGKKRPVEHSPAEPDSSSGTGKAGQQPARKRLNFGQTGDADSVPDPQPLGQPPAAPSGLGTNTMASGSGAPMADNNEGADGVGNSSGNWHCDSTWMGDRVITTSTRTWALPTCNNHLYKQISSQSGASNDNHYFGYSTPWGYFDFNRFHCHFSPRDWQRLINNNWGFRPKRLSFKLFNIQVKEVTQNDGTTTIANNLTSTVQVFTDSEYQLPYVLGSAHQGCLPPFPADVFMVPQYGYLTLNNGSQAVGRSSFYCLEYFPSQMLRTGNNFTFSYTFEDVPFHSSYAHSQSLDRLMNPLIDQYLYYLSRTNTPSGTTTMSRLQFSQAGASDIRDQSRNWLPGPCYRQQRVSKTAADNNNSDYSWTGATKYHLNGRDSLVNPGPAMASHKDDEEKYFPQSGVLIFGKQDSGKTNVDIEKVMITDEEEIRTTNPVATEQYGSVSTYLQSGNTQAATSDVNTQGVLPGMVWQDRDVYLRGPIWAKIPHTDGHFHPSPLMGGFGLKHPPPQILIKNTPVPANPSTTFSAAKFASFITQYSTGQVSVEIEWELQKENSKRWNPEIQYTSNYNKSVNVDFTVDTNGVYSEPRPIGTRYLTRNL

SEQ ID NO: 4875 - DNA, 2208 bp, Adeno-associated virus; identical to SEQ ID NO: 4869

SEQ ID NO: 4876 - protein, 735 aa, Adeno-associated virus; identical to SEQ ID NO: 4870

SEQ ID NO: 4877 - DNA, 2208 bp, Adeno-associated virus
atggctgccgatggttatcttccagattggctcgaggacactctctctgaaggaataagacagtggtggaagctcaaacctggcccaccaccaccaaagcccgcagagcggcataaggacggcagcaggggtcttgtgcttcctgggtacaagtacctcggacccttcaacggactcgacaagggagagccggtcaacgaggcagacgccgcggccctcgagcacgacaaggcctacgaccggcagctcaacagcggagacaacccgtacctcaagtacaaccacgccgacgcggagtttcaggagcgccttaaagaagatacgtcttttgggggcaacctcggacgagcagtcttccaggcaaaaaagagggttcttgaacctctgggcctggttgaggagcctgttaaaacggctccgggaaaaaagagaccggtagagcactctcctgcggagccagactcctcctcgggaaccggaaaagcgggccagcagcctgcaagaaagagattgaattttggtcagactggagacgcagactccgtacctgacccccagcctctcggacagccaccagcagccccctctggtctgggatctactacaatggctacaggcagtggcgcaccaatggcagacaataacgagggtgccgatggagtgggtaattcctcaggaaattggcattgcgattcccaatggctgggcgacagagtcatcaccacaagcactcgaacctgggccctgcccacctacaacaaccacctctacaagcaaatctccagccaatcaggagcctcaaacgacaaccactattttggctacagcaccccttgggggtattttgacttcaacagattccactgccacttttcaccacgtgactggcaaagactcatcaacaacaactggggattccgacccaagagactcaacttcaagctctttaacattcaagtcaaagaggtcacgcagaatgacggtacgacgacgattgccaataaccttaccagcacggttcaggtgtttactgactcggagtaccagctcccgtacgtcctcggctcggcgcatcaaggatgcctcccgccgttcccagcggacgtcttcatggtcccacagtatggatacctcaccctgaacaacgggagtcaggcggtaggacgctctcccttttactgcctggagtactttccttctcagatgctgcgtactggaaacaactttcagttcagctacacttttgaagacgtgcctttccacagcagctacgctcacagccagagtctggatcggctgatgaatcctctgatcgaccagtacctgtattatctgaacaagacacaaacaaatagtggaactcttcagcagtctcggctactgtttagccaagctggacccaccaacatgtctcttcaagctaaaaactggctgcctggaccttgctacagacagcagcgtctgtcaaagcaggcaaacgacaacaacaacagcaactttccctggactgcagctacaaagtatcatctaaatggccgggactcgttggttaatccaggaccagctatggccagtcacaaggatgacgaagaaaagtttttccccatgcatggaaccctgatatttggtaaacaaggaacaaatgccaacgacgcggatttggaaaatgtcatgattacagatgaagaagaaatcaggaccaccaatcccgtggctacggagcagtacgggactgtgtcaaataatttgcaaaactcaaacactggtccaactactggaactgtcaatcaccaaggagcgttacctggtatggtgtggcaggatcgagatgtgtaccttcagggacccatttgggccaagattcctcacaccgatggacactttcatccttctccactgatgggaggttttggactcaaacacccgcctcctcagattatgatcaaaaacactcccgttccagccaatcctcctacaaacttcagttctgccaagtttgcttctttcatcacacagtattccacggggcaggtcagcgtggagatcgagtgggagctgcagaaggagaacagcaaacgctggaatcccgaaattcagtacacttccaactacaacaaatctgttaatgtggactttactgtggacaataatggcgtgtactcagagcctcgccccattggcaccagatacctgactcgtaatctgtaa

SEQ ID NO: 4878 - protein, 735 aa, Adeno-associated virus
MAADGYLPDWLEDTLSEGIRQWWKLKPGPPPPKPAERHKDGSRGLVLPGYKYLGPFNGLDKGEPVNEADAAALEHDKAYDRQLNSGDNPYLKYNHADAEFQERLKEDTSFGGNLGRAVFQAKKRVLEPLGLVEEPVKTAPGKKRPVEHSPAEPDSSSGTGKAGQQPARKRLNFGQTGDADSVPDPQPLGQPPAAPSGLGSTTMATGSGAPMADNNEGADGVGNSSGNWHCDSQWLGDRVITTSTRTWALPTYNNHLYKQISSQSGASNDNHYFGYSTPWGYFDFNRFHCHFSPRDWQRLINNNWGFRPKRLNFKLFNIQVKEVTQNDGTTTIANNLTSTVQVFTDSEYQLPYVLGSAHQGCLPPFPADVFMVPQYGYLTLNNGSQAVGRSPFYCLEYFPSQMLRTGNNFQFSYTFEDVPFHSSYAHSQSLDRLMNPLIDQYLYYLNKTQTNSGTLQQSRLLFSQAGPTNMSLQAKNWLPGPCYRQQRLSKQANDNNNSNFPWTAATKYHLNGRDSLVNPGPAMASHKDDEEKFFPMHGTLIFGKQGTNANDADLENVMITDEEEIRTTNPVATEQYGTVSNNLQNSNTGPTTGTVNHQGALPGMVWQDRDVYLQGPIWAKIPHTDGHFHPSPLMGGFGLKHPPPQIMIKNTPVPANPPTNFSSAKFASFITQYSTGQVSVEIEWELQKENSKRWNPEIQYTSNYNKSVNVDFTVDNNGVYSEPRPIGTRYLTRNL

SEQ ID NO: 4879 - DNA, 2208 bp, Adeno-associated virus
atggctgccgatggttatcttccagattggctcgaggacactctctctgaaggaataagacagtggtggaagctcaaacctggcccaccaccaccaaagcccgcagagcggcataaggacgacagcaggggtcttgtgcttcctgggtacaagtacctcggacccttcaacggactcgacaagggagagccggtcaacgaggcagacgccgcggccctcgagcacgacaaggcctacgaccggcagctcgacagcggagacaacccgtacctcaagtacaaccacgccgacgcggagtttcaggagcgtcttaaagaagatacgtcttttgggggcaacctcggacgagcagtcttccaggccaaaaagaggattcttgaacctctgggcctggttgaggaacctgttaagacggctccgggaaaaaagaggccggtagagcactctcctgcggagccagactcctcctcgggaaccggaaaagcgggccagcagcctgcaagaaagagattgaattttggtcagactggagacgcagactcagtacctgacccccagcctctcggacagccaccagcagccccctctggtctgggaactaatacgatggcttcaggcagtggcgcaccaatggcagacaataacgagggcgccgacggagtgggtaattcctcgggaaattggcattgcgattccacatggatgggcgacagagtcatcaccaccagcacccgcacctgggccctgcccacctacaacaaccatctgtacaagcaaatctccagccagtctggagccagcaacgacaaccactactttggctacagcaccccctgggggtattttgacttcaacagattccactgccacttctccccacgtgactggcaaagactcatcaacaacaactggggattccggcccaagagactcagcttcaagctctttaacattcaagtcaaagaggtcacgcagaatgacggtacgacgacgattgccaataaccttaccagcacggttcaggtgtttactgactcggagtaccagctcccgtacgtcctcggctcggcgcatcaaggatgcctcccgccgttcccagcagacgtcttcatggtgccacagtatggatacctcaccctgaacaacggcagtcaggcggtaggacgctcttccttttactgcctggagtactttccttctcagatgcttcgtaccggaaacaactttaccttcagctacacctttgaagacgttcctttccatagcagctacgctcacagccaaagtctggaccgtctcatgaatcctctcatcgaccagtacctgtattacttgagcagaacaaacactccaagcggaaccaccacgatgtccaggcttcagttttctcaggccggagcaagtgacattcgggaccagtctagaaactggcttcctggaccctgttaccgccagcagcgagtatcaaagacagctgcggacaacaacaacagtgattactcgtggactggagctaccaagtaccacctcaatggaagagactctctggtgaatccgggcccagctatggccagccacaaggacgatgaagaaaaatattttcctcagagcggggttctcatctttggaaaacaagactcgggaaaaactaatgtggacattgaaaaggttatgattacagacgaagaggaaatcaggaccaccaatcccgtggctacggagcagtatggttctgtatctaccaacctccagagcggcaacacacaagcagctacctcagatgtcaacacacaaggcgttcttccaggcatggtctggcaggacagagacgtgtacctgcaggggcccatctgggcaaagattccacacacggacggacattttcacccctctcccctcatgggcggattcggacttaaacaccctcctccacaaattctcatcaagaacaccccggtacctgcgaatccttcgaccactttcagtgcggcaaagtttgcttccttcatcacacagtactccacggggcaggtcagcgtggagatcgagtgggagctgcagaaggagaacagcaaacgctggaatcccgaaattcagtacacttccaactacaacaaatctgttaatgtggactttactgtggacactaatggtgtgtattcagagcctcgccccattggcaccagatacctgactcgtaatctgtaa

SEQ ID NO: 4880 - protein, 735 aa, Adeno-associated virus
MAADGYLPDWLEDTLSEGIRQWWKLKPGPPPPKPAERHKDDSRGLVLPGYKYLGPFNGLDKGEPVNEADAAALEHDKAYDRQLDSGDNPYLKYNHADAEFQERLKEDTSFGGNLGRAVFQAKKRILEPLGLVEEPVKTAPGKKRPVEHSPAEPDSSSGTGKAGQQPARKRLNFGQTGDADSVPDPQPLGQPPAAPSGLGTNTMASGSGAPMADNNEGADGVGNSSGNWHCDSTWMGDRVITTSTRTWALPTYNNHLYKQISSQSGASNDNHYFGYSTPWGYFDFNRFHCHFSPRDWQRLINNNWGFRPKRLSFKLFNIQVKEVTQNDGTTTIANNLTSTVQVFTDSEYQLPYVLGSAHQGCLPPFPADVFMVPQYGYLTLNNGSQAVGRSSFYCLEYFPSQMLRTGNNFTFSYTFEDVPFHSSYAHSQSLDRLMNPLIDQYLYYLSRTNTPSGTTTMSRLQFSQAGASDIRDQSRNWLPGPCYRQQRVSKTAADNNNSDYSWTGATKYHLNGRDSLVNPGPAMASHKDDEEKYFPQSGVLIFGKQDSGKTNVDIEKVMITDEEEIRTTNPVATEQYGSVSTNLQSGNTQAATSDVNTQGVLPGMVWQDRDVYLQGPIWAKIPHTDGHFHPSPLMGGFGLKHPPPQILIKNTPVPANPSTTFSAAKFASFITQYSTGQVSVEIEWELQKENSKRWNPEIQYTSNYNKSVNVDFTVDTNGVYSEPRPIGTRYLTRNL

SEQ ID NO: 4881 - DNA, 2208 bp, Adeno-associated virus
atggctgccgatggttatcttccagattggctcgaggacactctctctgaaggaataagacagtggtggaagctcaaacctggcccaccaccaccaaagcccgcagagcggcataaggacgacagcaggggtcttgtgcttcctgggtacaagtacctcggacccttcaacggactcgacaagggagagccggtcaacgaggcagacgccgcggccctcgagcacgacaaggcctacgaccggcagctcgacagcggagacaacccgtacctcaagtacaaccacgccgacgcggagtttcaggagcgtcttaaagaagatacgtcttttgggggcaacctcggacgagcagtcttccaggccaaaaagaggattcttgaacctctgggcctggttgaggaacctgttaagacggctccgggaaaaaagaggccggtagagcactctcctgcggagccagactcctcctcgggaaccggaaaagcgggccagcagcctgcaagaaagagattgaattttggtcagactggagacgcagactcagtacctgacccccagcctctcggacagccaccagcagccccctctggtctgggaactaatacgatggcttcaggcagtggcgcaccaatggcagacaataacgagggcgccgacggagtgggtaattcctcgggaaattggcattgcgattccacatggatgggcgacagagtcatcaccaccagcacccgcacctgggccctgcccacctacaacaaccatctgtacaagcaaatctccagccagtctggagccagcaacgacaaccactactttggctacagcaccccctgggggtatttcgacttcaacagattccactgccacttctccccacgtgactggcaaagactcatcaacaacaactggggattccggcccaagagactcagcttcaagctctttaacattcaagtcaaagaggtcacgcagaatgacggtacgacgacgattgccaataaccttaccagcacggttcaggtgtttactgactcggggtaccagctcccgtacgtcctcggctcggcgcatcaaggatgccttccgccgttcccagcagacgtcttcatggtgccacagtatggatacctcaccctgaacaacggcagtcaggcggtaggacgctcttccttttactgcctggagtactttccttctcagatgcttcgtaccggaaacaactttaccttcagctacacctttgaagacgttcctttccatagcagctacgctcacggccaaagtctggaccgtctcatgaatcctctcatcgaccagtacctgtattacttgagcagaacaaacactccaagcggaaccaccacgatgtccaggcttcagttttctcaggccggagcaagtgacgttcgggaccagtctagaaactggcttcctggaccctgttaccgccagcagcgagtatcaaagacagctgcggacaacaacaacagtgattactcgtggactggagctaccaagtaccacctcaatggaagagactctctggtgaatccgggcccagctatggccagccacaaggacgatgaagaaaaatattttcctcagagcggggttctcgtctttggaaaacaagactcgggaaaaactaatgtggacattgaaaaggttatgattacagacgaagaggaaatcaggaccaccaatcccgcggctacggagcagtatggttctgtatctaccaacctccagagcggcaacacacaagcagctacctcagatgtcaacacacaaggcgttcttccaggcatggtctggcaggacagagacgtgtacctgcaggggcccatctgggcaaagattccacacacggacggacattttcacccctctcccctcatgggcggattcggacttaaacaccctcctccacaaattctcatcaagaacaccccggtacctgcgaatccttcgaccactttcagtgcggcaaagtttgtttccttcatcacacagtactccacggggcaggtcagcgtggagatcgagtgggagctgcagaaggagaacagcaaacgctggaatcccgaaattcagtacacttccaactacaacaaatctgttaatgtggactttactgtggacactaatggtgtgtattcagagcctcgccccattggcaccagatacctgactcgtaatctgtaa

SEQ ID NO: 4882 - protein, 735 aa, Adeno-associated virus
MAADGYLPDWLEDTLSEGIRQWWKLKPGPPPPKPAERHKDDSRGLVLPGYKYLGPFNGLDKGEPVNEADAAALEHDKAYDRQLDSGDNPYLKYNHADAEFQERLKEDTSFGGNLGRAVFQAKKRILEPLGLVEEPVKTAPGKKRPVEHSPAEPDSSSGTGKAGQQPARKRLNFGQTGDADSVPDPQPLGQPPAAPSGLGTNTMASGSGAPMADNNEGADGVGNSSGNWHCDSTWMGDRVITTSTRTWALPTYNNHLYKQISSQSGASNDNHYFGYSTPWGYFDFNRFHCHFSPRDWQRLINNNWGFRPKRLSFKLFNIQVKEVTQNDGTTTIANNLTSTVQVFTDSGYQLPYVLGSAHQGCLPPFPADVFMVPQYGYLTLNNGSQAVGRSSFYCLEYFPSQMLRTGNNFTFSYTFEDVPFHSSYAHGQSLDRLMNPLIDQYLYYLSRTNTPSGTTTMSRLQFSQAGASDVRDQSRNWLPGPCYRQQRVSKTAADNNNSDYSWTGATKYHLNGRDSLVNPGPAMASHKDDEEKYFPQSGVLVFGKQDSGKTNVDIEKVMITDEEEIRTTNPAATEQYGSVSTNLQSGNTQAATSDVNTQGVLPGMVWQDRDVYLQGPIWAKIPHTDGHFHPSPLMGGFGLKHPPPQILIKNTPVPANPSTTFSAAKFVSFITQYSTGQVSVEIEWELQKENSKRWNPEIQYTSNYNKSVNVDFTVDTNGVYSEPRPIGTRYLTRNL

SEQ ID NO: 4883 - DNA, 2208 bp, Adeno-associated virus
atggctgccgatggttatcttccagattggctcgaggacactctctctgaaggaataagacagtggtggaaactcaaacctggcccaccaccaccaaagcccgcagagcggcataaggacgacagcaggggtcttgtgcttcctgggtacaagtacctcggacccttcaacggactcgacaagggagagccggtcaacgaggcagacgccgcggccctcgagcacgacaaggcctacgaccggcagctcgacagcggagacaacccgtacctcaagtacaaccacgccgacgcggagtttcaggagcgccttaaagaagatacgtcttttgggggcaacctcggacgagcagtcttccaggcaaaaaagagggttctggaacctctgagcctggttgaggagcctgttaagacggctccgggaaaaaagaggccggtagagcactctcccgcagagccagattcctcctccggaactggaaagtcgggcaaccagcctgcaagaaagagattgaatttcggtcagactggagactcagactccgtacctgacccccagcctctcggacagccaccagcagccccctctggtctgggaactaatacgatggctacaggcagtggcgcaccaatggcagacaataacgagggcgccgacggagtgggtaattcctcgggaaattggcattgcgattccacatggatgggcgacagagtcatcaccaccagcacccgaacctgggccctgcccacctacaacaaccatctgtacaagcaaatatccagccagtctggagccagcaacgacaatcactactttggctacagcaccccctgggggtattttgacttcaacagattccactgccacttttcaccacgtgactggcaaagactcatcaacaacaactggggattccgacccaagagactcaacttcaagctctttaacattcaagtcaaagaggtcacgcagaatgacggtacgacgacgattgccaataaccttaccagcacggttcaggtgtttactgactcggagtaccagctcccgtacgtcctcggctcggcgcatcaaggatgcctcccgccgttcccagcagacgtcttcatggtgccacagtatggatacctcaccctgaacaacgggagtcaggcagtaggacgctcttcattttactgcctagagtactttccttctcagatgctgcgtaccggaaacaactttaccttcagctacacctttgaggacgttcctttccacagcagctacgctcacagccagagtttggaccgtctcatgaatcctctcatcgaccagtacctgtattacttgagcagaacaaacactccaagcggaaccaccacgcagtccaggcttcagttttctcaggccggagcgagtgacattcaggaccagtctaggaactggcttcctggaccctgttaccgtcagcagcgagtatcaaagacatctgcggataacaacaacagtgaatactcgtggactggagctaccaagtaccacctcaatggcagagactctctggtgaatccgggcccggccatggccagccacaaagacgatgaagaaaagttttttcctcagagcggggttcttatctttgggaagcaaggctcagagaaaacaaatgtggatattgaaaaggtcatgattacagacgaagaggaaatcaggaccaccaatcccgtggctacggagcagtatggttctgtatctaccaacctccagagcggcaacacacaagcagctaccgcagatgtcaacacacaaggcgttcttccaggcatggtcgggcaagacagagacgtgtacctgcaggggcctacttgggcaaagattccacacacggacggacattttcacccctctcccctcatgggcggatttggacttaaacaccctcctccacagattctcatcaagaacaccccggtacctgcgaatccttcgaccaccttcagtgcggcaaagtttgcttccttcattacacagtactccacggggcaggtcagcgtggagatcgagtgggagctgcagaaggagaacagcaaacgctggaatcccgagatccagtacacttccaactacaacaagtctgttaatgtggactttactgtggacactaatggcgtgtattcagagcctcgccccattggcaccagatacctgactcgtaatctgtaa

SEQ ID NO: 4884 - protein, 735 aa, Adeno-associated virus
MAADGYLPDWLEDTLSEGIRQWWKLKPGPPPPKPAERHKDDSRGLVLPGYKYLGPFNGLDKGEPVNEADAAALEHDKAYDRQLDSGDNPYLKYNHADAEFQERLKEDTSFGGNLGRAVFQAKKRVLEPLSLVEEPVKTAPGKKRPVEHSPAEPDSSSGTGKSGNQPARKRLNFGQTGDSDSVPDPQPLGQPPAAPSGLGTNTMATGSGAPMADNNEGADGVGNSSGNWHCDSTWMGDRVITTSTRTWALPTYNNHLYKQISSQSGASNDNHYFGYSTPWGYFDFNRFHCHFSPRDWQRLINNNWGFRPKRLNFKLFNIQVKEVTQNDGTTTIANNLTSTVQVFTDSEYQLPYVLGSAHQGCLPPFPADVFMVPQYGYLTLNNGSQAVGRSSFYCLEYFPSQMLRTGNNFTFSYTFEDVPFHSSYAHSQSLDRLMNPLIDQYLYYLSRTNTPSGTTTQSRLQFSQAGASDIQDQSRNWLPGPCYRQQRVSKTSADNNNSEYSWTGATKYHLNGRDSLVNPGPAMASHKDDEEKFFPQSGVLIFGKQGSEKTNVDIEKVMITDEEEIRTTNPVATEQYGSVSTNLQSGNTQAATADVNTQGVLPGMVGQDRDVYLQGPTWAKIPHTDGHFHPSPLMGGFGLKHPPPQILIKNTPVPANPSTTFSAAKFASFITQYSTGQVSVEIEWELQKENSKRWNPEIQYTSNYNKSVNVDFTVDTNGVYSEPRPIGTRYLTRNL

SEQ ID NO: 4885 - DNA, 2208 bp, Adeno-associated virus
atggctgccgatggttatcttccagattggctcgaggacactctctctgaaggaataagacagtggtggaagctcaaacctggcccaccaccaccaaagcccgcagagcggcataaggacgacagcaggggtcttgtgcttcctgggtacaagtacctcggacccttcaacggactcgacaagggagagccggtcaacgaggcagacgccgcggccctcgagcacgacaaggcctacgaccggcagctcgacagcggagacaacccgtacctcaagtacaaccacgccgacgcagagtttcaggagcgccttaaagaagatacgtcttttgggggcaacctcggacgagcagtcttccaggcaaaaaagagggttctggaacctctgggcctggttgaggagcctgttaagacggctccgggaaaaaagaggccggtagagcactctcctgcagagccagattcctcctccggaactggaaagtcgggcaaccagcctgcaagaaagagattgaatttcggtcagactggagactcagactccgtacctgacccccagcctctcggacagccaccagcagccccctctggtctgggaactaatacgatggctacaggcagtggcgcaccaatggcagacaataacgagggcgccgacggagtgggtaattcctcgggaaattggcattgcgattccacatggatgggcgacagagtcatcaccaccagcacccgaacctgggccctgcccacctacaacaaccatctgtacaagcaaatatccagccagtctggagccagcaacgacaatcactactttggctacagcaccccctgggggtattttgacttcaacagattccactgccacttttcaccacgtgactggcaaagactcatcaacaacaactggggattccgacccaagagactcaacttcaagctctttaacattcaagtcaaagaggtcacgcagaatgacggtacgacgacgattgccaataaccttaccagcacggttcaggtgtttactgactcggagtaccagctcccgtacgtcctcggctcggcgcatcaaggatgcctcccgccgttcccagcagacgtcttcatggtgccacagtatggatacctcaccctgaacaacgggagtcaggcagtaggacgctcttcattttactgcctagggtactttccttctcagatgctgcgtaccggaaacaactttaccttcagctacacctttgaggacgttcctttccacagcagctacgctcacagccagagtttggaccgtctcatgaatcctctcatcgaccagtacctgtattacttgagcagaacaaacactccaagcggaaccaccacgcagtccaggcttcagttttctcaggccggagcgagtgacattcgggaccagtctaggaactggcttcctggaccctgttaccgtcagcagcgagtatcaaagacatctgcggataacaacaacagtgaatactcgtggactggagctaccaagtaccacctcaatggcagagactctctggtgaatccgggcccggccatggccagccacaaagacgatgaagaaaagttttttcctcagagcggggttcttatctttgggaagcaaggcccagagaaaacaaatgtggatattgaaaaggtcatgattacagacgaagaggaaatcaggaccaccaatcccgtggctacggagcagtatggttctgtatctaccaacctccagagcggcaacacacaagcagctaccgcagatgtcaacacacaaggcgttcttccaggcatggtctggcaagacagagacgtgtacctgcaggggcctatttgggcaaagattccacacacggacggacattttcacccctctcccctcatgggcggatttggacttaaacaccctcctccacagattctcatcaagaacaccccggtacctgcgaatccttcgaccaccttcagtgcggcaaagtttgcttccttcattacacagtactccacggggcaggtcagcgtggagatcgagtgggagctgcagaaggagaacagcaaacgctggaatcccgagatccagtacacttccaactacaacaagtctgttaatgtggactttactgtggacactaatggcgtgtattcagagcctcgccccattggcaccagatacctgactcgtaatctgtaa

SEQ ID NO: 4886 - protein, 735 aa, Adeno-associated virus
MAADGYLPDWLEDTLSEGIRQWWKLKPGPPPPKPAERHKDDSRGLVLPGYKYLGPFNGLDKGEPVNEADAAALEHDKAYDRQLDSGDNPYLKYNHADAEFQERLKEDTSFGGNLGRAVFQAKKRVLEPLGLVEEPVKTAPGKKRPVEHSPAEPDSSSGTGKSGNQPARKRLNFGQTGDSDSVPDPQPLGQPPAAPSGLGTNTMATGSGAPMADNNEGADGVGNSSGNWHCDSTWMGDRVITTSTRTWALPTYNNHLYKQISSQSGASNDNHYFGYSTPWGYFDFNRFHCHFSPRDWQRLINNNWGFRPKRLNFKLFNIQVKEVTQNDGTTTIANNLTSTVQVFTDSEYQLPYVLGSAHQGCLPPFPADVFMVPQYGYLTLNNGSQAVGRSSFYCLGYFPSQMLRTGNNFTFSYTFEDVPFHSSYAHSQSLDRLMNPLIDQYLYYLSRTNTPSGTTTQSRLQFSQAGASDIRDQSRNWLPGPCYRQQRVSKTSADNNNSEYSWTGATKYHLNGRDSLVNPGPAMASHKDDEEKFFPQSGVLIFGKQGPEKTNVDIEKVMITDEEEIRTTNPVATEQYGSVSTNLQSGNTQAATADVNTQGVLPGMVWQDRDVYLQGPIWAKIPHTDGHFHPSPLMGGFGLKHPPPQILIKNTPVPANPSTTFSAAKFASFITQYSTGQVSVEIEWELQKENSKRWNPEIQYTSNYNKSVNVDFTVDTNGVYSEPRPIGTRYLTRNL

SEQ ID NO: 4887 - protein, 735 aa, Adeno-associated virus
MAADGYLPDWLEDTLSEGIRQWWKLKPGPPPPKPAERHKDDSRGLVLPGYKYLGPFNGLDKGEPVNEADAAALEHDKAYDRQLDSGDNPYLKYNHADAEFQERLKEDTSFGGNLGRAVFQAKKRVLEPLGLVEEPVKTAPGKKRPVEHSPAEPDSSSGTGKSGNQPARKRLNFGQTGDSDSVPDPQPLGQPPAAPSGLGTNTMATGSGAPMADNNEGADGVGNSSGNWHCDSTWMGDRVITTSTRTWALPTYNNHLYKQISSQSGASNDNHYFGYSTPWGYFDFNRFHCHFSPRDWQRLINNNWGFRPKRLNFKLFNIQVKEVTQNDGTTTIANNLTSTVQVFTDSEYQLPYVLGSAHQGCLPPFPADVFMVPQYGYLTLNNGSQAVGRSSFYCLEYFPSQMLRTGNNFTFSYTFEDVPFHSSYAHSQSLDRLMNPLIDQYLYYLSRTNTPSGTTTQSRLQFSQAGASDIRDQSRNWLPGPCYRQQRVSKTSADNNNSEYSWTGATKYHLNGRDSLVNPGPAMASHKDDEEKFFPQSGVLIFGKQGPEKTNVDIEKVMITDEEEIRTTNPVATEQYGSVSTNLQSGNTQAATADVNTQGVLPGMVWQDRDVYLQGPIWAKIPHTDGHFHPSPLMGGFGLKHPPPQILIKNTPVPANPSTTFSAAKFASFITQYSTGQVSVEIEWELQKENSKRWNPEIQYTSNYNKSVNVDFTVDTNGVYSEPRPIGTRYLTRNL

SEQ ID NO: 4888 - protein, 735 aa, Adeno-associated virus; identical to SEQ ID NO: 4887

SEQ ID NO: 4889 - DNA, 2211 bp, Adeno-associated virus
atggctgccgatggttatcttccagattggctcgaggacactctctctgaaggaataagacagtggtggaagctcaaacctggcccaccaccaccaaagcccgcagagcggcataaggacgacagcaggggtcttgtgcttcctgggtacaagtacctcggacccttcaacggactcgacaagggggagccggtcaacgaggcagacgccgcggccctcgagcacgacaaggcctacgaccggcagctcgacagcggagacaacccgtacctcaagtacaaccacgccgacgcagagtttcaggagcgccttaaagaagatacgtcttttgggggcaacctcggacgagcagtcttccaggcgaaaaagagggttcttgaacctctgcggcctggtttgaggaaacctgttaagacggctccgggaaaaaagaggccggtagagcactctcctgtggagccagactcctcctcgggaaccggaaaagcgggccagcagcctgcaagaaaaagattaaattttggtcagactggagacgcagactccgtacctgacccccagcctctcggacagccaccagcagccccctctggtctgggatctactacaatggctacaggcagtggcgcaccaatggcagacaataacgagggtgccgatggagtgggtaattcctcaggaaattggcattgcgattcccaatggctggacgacagagtcatcgccaccagcacccgaacctgggccctgcccacatacaacaaccacctctacaagcaaatctccagccaatcaggagcctgcaacgacaaccactactttggctacagcaccccctgggggtattttgacttcaacagattccactgccacttttcaccacgtgactggcaaagactcatcaacagcaactggggattccggcccaaaagactcaacttcaagctctttaatattcaagtcaaagaggtcacgcagaatgacggtacgacgacgattgccaataaccttaccagcacggttcaggtgtttactgactcggagtaccagctcccgtacgtcccgggctcggcgcatcaaggatgcctcccgccgtttccagcggacgtcttcatggtcccacagtatggatacctcaccctgaacaacgggagtcaggcggtaggacgctcttccttttactgcctggagtactttccttctcagatgctgcgtactggaaacaactttcagttcagctacacttttgaagacgtgcctttccacagcagctacgctcactgccagagtctggatcggctgatgaatcctctgatcgaccagtacctgtattatctgaacaagacacaaacaaatagtggaactcttcagcagtctcggctactgtttagccaagctggaccaaccaacatgtctcttcaagctaaaaactggctgcctggaccttgctacagacagcagcgtctgtcaaaacaggcaaacgacaataacaactgcaactttccctggactgcagctacaaagtatcatctaaatggccgggactcgttggttaatccaggaccagctatggccagtcacaaggatgacgaagaaaagtttttccccatgcatggaaccctgatatttggtaaacaaggaacaaatgccaacgacgcggatttggaaaatgtcatgattacagatgaagaagaaatcaggcccaccaatcccgtggctacggagcagtacgggactgtgtcaaataatttgcaaaactcaaacactggtccaactacaggaactgtcaatcaccaaggagcgttacctggtatggtgtggcaggatcgagacgtgtacctgcagggacccatttgggccaagattcctcacaccgatggacactttcatccttctccactgatgggaggttttggactcaaacacccgcctcctcagatcatgatcaaaagcactcccgttccagccaatcctcccacaaacttcagttctgccaagtttgcttcttccatcacacagtattccacgggacaggtcagcgtggagatcgagtgggagctgcagaaggagaacagcaaacgctggaatcccgaaattcagtacacttccaactacaacaagtctgttaatgtggactttactgtggacactaatggtgtgtattcagagcctcgccccattggcaccagatacctgactcgtaatctgtaa

SEQ ID NO: 4890 - protein, 736 aa, Adeno-associated virus
MAADGYLPDWLEDTLSEGIRQWWKLKPGPPPPKPAERHKDDSRGLVLPGYKYLGPFNGLDKGEPVNEADAAALEHDKAYDRQLDSGDNPYLKYNHADAEFQERLKEDTSFGGNLGRAVFQAKKRVLEPLRPGLRKPVKTAPGKKRPVEHSPVEPDSSSGTGKAGQQPARKRLNFGQTGDADSVPDPQPLGQPPAAPSGLGSTTMATGSGAPMADNNEGADGVGNSSGNWHCDSQWLDDRVIATSTRTWALPTYNNHLYKQISSQSGACNDNHYFGYSTPWGYFDFNRFHCHFSPRDWQRLINSNWGFRPKRLNFKLFNIQVKEVTQNDGTTTIANNLTSTVQVFTDSEYQLPYVPGSAHQGCLPPFPADVFMVPQYGYLTLNNGSQAVGRSSFYCLEYFPSQMLRTGNNFQFSYTFEDVPFHSSYAHCQSLDRLMNPLIDQYLYYLNKTQTNSGTLQQSRLLFSQAGPTNMSLQAKNWLPGPCYRQQRLSKQANDNNNCNFPWTAATKYHLNGRDSLVNPGPAMASHKDDEEKFFPMHGTLIFGKQGTNANDADLENVMITDEEEIRPTNPVATEQYGTVSNNLQNSNTGPTTGTVNHQGALPGMVWQDRDVYLQGPIWAKIPHTDGHFHPSPLMGGFGLKHPPPQIMIKSTPVPANPPTNFSSAKFASSITQYSTGQVSVEIEWELQKENSKRWNPEIQYTSNYNKSVNVDFTVDTNGVYSEPRPIGTRYLTRNL

SEQ ID NO: 4891 - DNA, 2208 bp, Adeno-associated virus
atggctgccgatggttatcttccagattggctcgaggacactctctctgaaggaataagacagtggtggaagctcaaacctggcccaccaccaccaaagcccgcagagcggcataaggacgacagcaggggtcttgtgcttcctgggtacaagtacctcggacccttcaacggactcgacaagggagagccggtcaacgaggcagacgccgcggccctcgagcacgacaaggcctacgaccggcagctcgacagcggagacaacccgtacctcaagtacaaccacgccgacgcggagtttcaggagcgccttaaagaggatacgtcttttgggggcaacctcggacgagcagtcttccaggcaaaaaagagggttctggaacctctgggcctggttgaggagcctgttaagacggctccgggaaaaaagaggccggtagagcactctcctgcagagccagattcctcctccggaactggaaagtcgggcaaccagcctgcaagaaagagattgaatttcggtcagactggagactcagactccgtacctgacccccagcctctcggacagccaccagcagccccctctggtctgggaactaatacgatggctacaggcagtggcgcaccaatggcagacaataacgagggcgccgacggagtgggtaattcctcgggaaattggcattgcgattccacatggatgggcgacagagtcatcaccaccagcacccgaacctgggccctgcccacctacaacaaccatctgtacaagcaaatatccagccagtctggagccagcaacgacaatcactactttggctacagcaccccctgggggtattttgacttcaacagattccactgccacttttcaccacgtgactggcaaagactcatcaacaacaactggggattccgacccaagagactcaacttcaagctctttaacattcaagtcaaagaggtcacgcagaatgacggtacgacgacgattgccaataaccttaccagcacggttcaggtgtttactgactcggagtaccagctcccgtacgtcctcggctcggcgcatcaaggatgcctcccgccgttcccagcagacgtcttcatggtgccacagtatggatacctcaccctgaacaacgggagtcaggcagtaggacgctcttcattttactgcctagagtactttccttctcagatgctgcgtaccggaaacagctttaccttcagctacacctttgaggacgttcctttccacagcagctacgctcacagccagagtttggaccgtctcatgaatcctctcatcgaccagtacctgtattacttgagcagaacaaacactccaagcggaaccaccacgcagtccaggcttcagttttctcaggccggagcgagtgacattcgggaccagtctaggaactggcttcctggaccctgttaccgtcagcagcgagtatcaaagacatctgcggataacaacaacagtgaatactcgtggactggagctaccaagtaccacctcaatggcagagactctctggtgaatccgggcccggccatggccagccacaaagacgatgaagaaaagttctttcctcagagcggggttcttatctttgggaagcaaggctcagagaaaacaaatgtggatattgaaaaggtcatgattacagacgaagaggaaatcaggaccaccaatcccgtggctacggagcagtatggttctgtatctaccaacctccagagcggcaacacacaagcagctaccgcagatgtcaacacacaaggcgttcttccaggcatggtctggcaagacagagacgtgtacctgcaggggcctatttgggcaaagattccacacacggacggacattttcacccctctcccctcatgggcggatttggacttaaacaccctcctccacagattctcatcaagaacaccccggtacctgcgaatccttcgaccaccttcagtgcggcaaagtttgcttccttcattacacagtactccacggggcaggtcagcgtggagatcgagtgggagctgcagaaggagaacagcaaacgctggaatcccgagatccagtacacttccaactacaacaagtctgttaatgtggactttactgtggacactaatggcgtgtattcagagcctcgccccattggcaccagatacctgactcgtaatctgtaa

SEQ ID NO: 4892 - protein, 735 aa, Adeno-associated virus
MAADGYLPDWLEDTLSEGIRQWWKLKPGPPPPKPAERHKDDSRGLVLPGYKYLGPFNGLDKGEPVNEADAAALEHDKAYDRQLDSGDNPYLKYNHADAEFQERLKEDTSFGGNLGRAVFQAKKRVLEPLGLVEEPVKTAPGKKRPVEHSPAEPDSSSGTGKSGNQPARKRLNFGQTGDSDSVPDPQPLGQPPAAPSGLGTNTMATGSGAPMADNNEGADGVGNSSGNWHCDSTWMGDRVITTSTRTWALPTYNNHLYKQISSQSGASNDNHYFGYSTPWGYFDFNRFHCHFSPRDWQRLINNNWGFRPKRLNFKLFNIQVKEVTQNDGTTTIANNLTSTVQVFTDSEYQLPYVLGSAHQGCLPPFPADVFMVPQYGYLTLNNGSQAVGRSSFYCLEYFPSQMLRTGNSFTFSYTFEDVPFHSSYAHSQSLDRLMNPLIDQYLYYLSRTNTPSGTTTQSRLQFSQAGASDIRDQSRNWLPGPCYRQQRVSKTSADNNNSEYSWTGATKYHLNGRDSLVNPGPAMASHKDDEEKFFPQSGVLIFGKQGSEKTNVDIEKVMITDEEEIRTTNPVATEQYGSVSTNLQSGNTQAATADVNTQGVLPGMVWQDRDVYLQGPIWAKIPHTDGHFHPSPLMGGFGLKHPPPQILIKNTPVPANPSTTFSAAKFASFITQYSTGQVSVEIEWELQKENSKRWNPEIQYTSNYNKSVNVDFTVDTNGVYSEPRPIGTRYLTRNL

SEQ ID NO: 4893 - DNA, 2211 bp, Adeno-associated virus; identical to SEQ ID NO: 4804

SEQ ID NO: 4894 - protein, 736 aa, Adeno-associated virus
MAADGYLPDWLEDTLSEGIRQWWKLKPGPPPPKPAERHKDDSRGLVLPGYKYLGPGNGLDKGEPVNAADAAALEHDKAYDQQLKAGDNPYLKYNHADAEFQERLKEDTSFGGNLGRAVFQAKKRLLEPLGLVEEAAKTAPGKKRPVEQSPQEPDSSAGIGKSGSQPAKKKLNFGQTGDTESVPDPQPIGEPPAAPSGVGSLTMASGGGAPVADNNEGADGVGSSSGNWHCDSQWLGDRVITTSTRTWALPTYNNHLYKQISNSTSGGSSNDNAYFGYSTPWGYFDFNRFHCHFSPRDWQRLINNNWGFRPKRLNFKLFNIQVKEVTDNNGVKTIANNLTSTVQVFTDSDYQLPYVLGSAHEGCLPPFPADVFMIPQYGYLTLNDGGQAVGRSSFYCLEYFPSQMLRTGNNFQFSYEFENVPFHSSYAHSQSLDRLMNPLIDQYLYYLSKTINGSGQNQQTLKFSVAGPSNMAVQGRNYIPGPSYRQQRVSTTVTQNNNSEFAWPGASSWALNGRNSLMNPGPAMASHKEGEDRFFPLSGSLIFGKQGTGRDNVDADKVMITNEEEIKTTNPVATESYGQVATNHQSAQAQAQTGWVQNQGILPGMVWQDRDVYLQGPIWAKIPHTDGNFHPSPLMGGFGMKHPPPQILIKNTPVPADPPTAFNKDKLNSFITQYSTGQVSVEIEWELQKENSKRWNPEIQYTSNYYKSNNVEFAVSTEGVYSEPRPIGTRYLTRNL

SEQ ID NO: 4895 - DNA, 2211 bp, Adeno-associated virus
atggctgccgatggttatcttccagattggctcgaggacactctctctgaaggaataagacagtggtggaagctcaaacctggcccaccaccaccaaagcccgcagagcggcataaggacgacagcaggggtcttgtgcttcctgggtacaagtacctcggacccggcaacggactcgacaagggggagccggtcaacgcagcagacgcggcggccctcgagcacgacaaggcctacgaccagcagctcaaggccggagacaacccgtacctcaagtacaaccacgccgacgccgagttccaggagcggctcaaagaagatacgtcttttgggggcaacctcgggcgagcagtcttccaggccaaaaagaggcttcttgaacctcttggtctggttgaggaagcggctaagacggctcctggaaagaagaggcctgtagagcagtctcctcaggaaccggactcctccgcgggtattggcaaatcgggttcacagcccgctaaaaagaaactcaatttcggtcagactggcgacacagagtcagtccccgaccctcaaccaatcggagaacctcccgcagccccctcaggtgtgggatctcttacaatggcttcaggtggtggcgcaccagtggcagacaataacgaaggtgccgatggagtgggtagttcctcgggaaattggcattgcgattcccaatggctgggggacagagtcatcaccaccagcacccgaacctgggccctgcccacctacaacaatcacctctacaagcaaatctccaacagcacatctggaggatcttcaaatgacaacgcctacttcggctacagcaccccctgggggtattttgacttcaacagattccactgccacttctcaccacgtgactggcagcgactcatcaacaacaactggggattccggcctaagcgactcaacttcaagctcttcaacattcaggtcaaagaggttacggacaacaatggagtcaagaccatcgccaataaccttaccagcacggtccaggtcttcacggactcagactatcagctcccgtacgtgctcgggtcggctcacgagggctgcctcccgccgttcccagcggacgttttcatgattcctcagtacgggtatctgacgcttaatgatgggagccaggccgtgggtcgttcgtccttttactgcctggaatatttcccgtcgcaaatgctaagaacgggtaacaacttccagttcagctacgagtttgagaacgtacctttccatagcagctacgctcacagccaaagcctggaccgactaatgaatccactcatcgaccaatacttgtactatctctcaaagactattaacggttctggacagaatcaacaaacgctaaaattcagcgtggccggacccagcaacatggctgtccagggaagaaactacatacctggacccagctaccgacaacaacgtgtctcaaccactgtgactcaaaacaacaacagcgaatttgcttggcctggagcttcttcttgggctctcaatggacgtaatagcttgatgaatcctggacctgctatggccagccacaaagaaggagaggaccgtttctttcctttgtctggatctttaatttttggcaaacaaggaactggaagagacaacgtggatgcggacaaagtcatgataaccaacgaagaagaaattaaaactactaacccggtagcaacggagtcctatggacaagtggccacaaaccaccagagtgcccaagcacaggcgcagaccggctgggttcaaaaccaaggaatacttccgggtatggtttggcaggacagagatgtgtacctgcaaggacccatttgggccaaaattcctcacacggacggcaactttcacccttctccgctaatgggagggtttggaatgaagcacccgcctcctcagatcctcatcaaaaacacacctgtacctgcggatcctccaacggctttcaataaggacaagctgaactctttcatcacccagtattctactggccaagtcagcgtggagattgagtgggagctgcagaaggaaaacagcaagcgctggaacccggagatccagtacacttccaactattacaagtctaataatgttgaatttgctgttaatactgaaggtgtatatagtgaaccccgccccattggcaccagatacctgactcgtaatctgtaa

SEQ ID NO: 4896 - protein, 736 aa, Adeno-associated virus
MAADGYLPDWLEDTLSEGIRQWWKLKPGPPPPKPAERHKDDSRGLVLPGYKYLGPGNGLDKGEPVNAADAAALEHDKAYDQQLKAGDNPYLKYNHADAEFQERLKEDTSFGGNLGRAVFQAKKRLLEPLGLVEEAAKTAPGKKRPVEQSPQEPDSSAGIGKSGSQPAKKKLNFGQTGDTESVPDPQPIGEPPAAPSGVGSLTMASGGGAPVADNNEGADGVGSSSGNWHCDSQWLGDRVITTSTRTWALPTYNNHLYKQISNSTSGGSSNDNAYFGYSTPWGYFDFNRFHCHFSPRDWQRLINNNWGFRPKRLNFKLFNIQVKEVTDNNGVKTIANNLTSTVQVFTDSDYQLPYVLGSAHEGCLPPFPADVFMIPQYGYLTLNDGSQAVGRSSFYCLEYFPSQMLRTGNNFQFSYEFENVPFHSSYAHSQSLDRLMNPLIDQYLYYLSKTINGSGQNQQTLKFSVAGPSNMAVQGRNYIPGPSYRQQRVSTTVTQNNNSEFAWPGASSWALNGRNSLMNPGPAMASHKEGEDRFFPLSGSLIFGKQGTGRDNVDADKVMITNEEEIKTTNPVATESYGQVATNHQSAQAQAQTGWVQNQGILPGMVWQDRDVYLQGPIWAKIPHTDGNFHPSPLMGGFGMKHPPPQILIKNTPVPADPPTAFNKDKLNSFITQYSTGQVSVEIEWELQKENSKRWNPEIQYTSNYYKSNNVEFAVNTEGVYSEPRPIGTRYLTRNL

SEQ ID NO: 4897 - DNA, 2208 bp, Adeno-associated virus
atggctgccgatggttatcttccagattggctcgaggacactctctctgaaggaataagacagcggtggaagctcaaacctggcccaccaccaccagagcccgcagagcggcataaggacgacagcaggggtcttgtgcttcctgggtacaagtacctcggacccttcaacggactcgacaagggagagccggtcaacgaggcagacgccgcggccctcgagcacgacaaagcctacgaccggcagctcgacagcggagacaacccgtacctcaagtacaaccacgccgacgcggagtttcaggagcgccttaaagaagatacgtcttttgggggcaacctcggacgagcagtcttccaggcgaaaaagagggtacttgaacctctgggcctggttgaggaacctgttaagacggctccgggaaaaaagaggccggtagagcactctcctgtggagccagactcctcctcgggaaccggaaaggcgggccagcagcctgcaagaaaaagattgaattttggtcagactggagacgcagactcagtacctgacccccagcctctcggacagccaccagcagccccctctggtctgggaactaatacgatggctacaggcagtggcgcaccaatggcagacaataacgagggcgccgacggagtgggtaattcctcgggaaattggcattgcgattccacatggatgggcgacagagtcatcaccaccagcacccgaacctgggccctgcccacctacaacaaccacctctacaaacaaatttccagccaatcaggagcctcgaacgacaatcactactttggctacagcaccccttgggggtattttgacttcaacagattccactgccacttttcaccacgtgactggcaaagactcatcaacaacaactggggattccgacccaagagactcaacttcaagctctttaacattcaagtcaaagaggtcacgcagaatgacggtacgacgacgattgccaataaccttaccggcacggttcaggtgtttactgactcggagtaccagctcccgtacgtcctcggctcggcgcatcaaggatgcctcccgccgttcccagcagacgtcttcatggtgccacagtatggatacctcaccctgaacaacgggagtcaggcagtaggacgctcttcattttactgcctggagtactttccttctcagatgctgcgtaccggaaacaactttaccttcagctacacttttgaggacgttcctttccacagcagctacgctcacagccagagtctgggccgtctcatgaatcctctcatcgaccagtacctgtattacttgagcagaacaaacactccaagtggaaccaccacgcagtcaaggcttcagttttctcaggccggagcgagtgacattcgggaccagtctaggaactggcttcctggaccctgttaccgccagcagcgagtatcaaagacatctgcggataacaacaacagtgaatactcgtggactggagctaccaagtaccacctcaatggcagagactctctggtgaatccgggcccggccatggcaagccacaaggacgatgaagaaaagttttttcctcagagcggggttctcatctttgggaagcaaggctcagagaaaacaaatgtggacattgaaaaggtcatgattacagacgaagaggaaatcaggacaaccaatcccgtggctacggagcagtatggttctgtatctaccaacctccagagaggcaacagacaagcagctaccgcagatgtcaacacacaaggcgttcttccaggcatggtctggcaggacagagatgtgtaccttcaggggcccatctgggcaaagattccacacacggacggacattttcacccctctcccctcatgggtggattcggacttaaacaccctcctccacagattctcatcaagaacaccccggtacctgcgaatccttcgaccaccttcagtgcggcaaagtttgcttccttcatcacacagtactccacgggacaggtcagcgtggagatcgagtgggagctgcagaaggaaaacagcaaacgctggaatcccgaaattcagtacacttccaactacaacaagtctgttaatgtggactttactgtggacactaatggcgtgtattcagagcctcgccccattggcaccagatacctgactcgtaatctgtaa

SEQ ID NO: 4898 - protein, 735 aa, Adeno-associated virus
MAADGYLPDWLEDTLSEGIRQRWKLKPGPPPPEPAERHKDDSRGLVLPGYKYLGPFNGLDKGEPVNEADAAALEHDKAYDRQLDSGDNPYLKYNHADAEFQERLKEDTSFGGNLGRAVFQAKKRVLEPLGLVEEPVKTAPGKKRPVEHSPVEPDSSSGTGKAGQQPARKRLNFGQTGDADSVPDPQPLGQPPAAPSGLGTNTMATGSGAPMADNNEGADGVGNSSGNWHCDSTWMGDRVITTSTRTWALPTYNNHLYKQISSQSGASNDNHYFGYSTPWGYFDFNRFHCHFSPRDWQRLINNNWGFRPKRLNFKLFNIQVKEVTQNDGTTTIANNLTGTVQVFTDSEYQLPYVLGSAHQGCLPPFPADVFMVPQYGYLTLNNGSQAVGRSSFYCLEYFPSQMLRTGNNFTFSYTFEDVPFHSSYAHSQSLGRLMNPLIDQYLYYLSRTNTPSGTTTQSRLQFSQAGASDIRDQSRNWLPGPCYRQQRVSKTSADNNNSEYSWTGATKYHLNGRDSLVNPGPAMASHKDDEEKFFPQSGVLIFGKQGSEKTNVDIEKVMITDEEEIRTTNPVATEQYGSVSTNLQRGNRQAATADVNTQGVLPGMVWQDRDVYLQGPIWAKIPHTDGHFHPSPLMGGFGLKHPPPQILIKNTPVPANPSTTFSAAKFASFITQYSTGQVSVEIEWELQKENSKRWNPEIQYTSNYNKSVNVDFTVDTNGVYSEPRPIGTRYLTRNL

SEQ ID NO: 4899 - DNA, 2208 bp, Adeno-associated virus
atggctgccgatggttatcttccagattggctcgaggacactctctctgaaggaataagacagcggtggaagctcaaacctggcccaccaccaccagagcccgcagagcggcataaggacgacagcaggggtcttgtgcttcctgggtacaagtacctcggacccttcaacggactcgacaagggagagccggtcaacgaggcagacgccgcggccctcgagcacgacaaagcctacgaccggcagctcgacagcggagacaacccgtacctcaagtacaaccacgccgacgcggagtttcaggagcgccttaaagaagatacgtcctttgggggcaacctcggacgagcagtcttccaggcgaaaaagagggtacttgaacctctgggcctggttgaggaacctgttaagacggctccgggaaaaaagaggccggtagagcactctcctgtggagccagactcctcctcgggaaccggaaaggcgggccagcagcctgcaagaaaaagattgaattttggtcagactggagacgcagactcagtacctgacccccagcctctcggacagccaccagcagccccctctggtctgggaactaatacgatggctacaggcagtggcgcaccaatggcagacaataacgagggcgccgacggagtgggtaattcctcgggaaattggcattgcgattccacatggatgggcgacagagtcatcaccaccagcacccgaacctgggccctgcccacctacaacaaccacctctacaaacaaatttccagccaatcaggagcctcgaacgacaatcactactttggctacagcaccccttgggggtattttgacttcaacagattccactgccacttttcaccacgtgactggcaaagactcatcaacaacaactggggattccgacccaagagactcaacttcaagctctttaacattcaagtcaaagaggtcacgcagaatgacggtacgacgacgattgccaataaccttaccagcacggttcaggtgtttactgactcggagtaccagctcccgtacgtcctcggctcggcgcatcaaggatgcctcccgccgttcccagcagacgtcttcatggtgccacagtatggatacctcaccctgaacaacgagagtcaggcagtaggacgctcttcattttactgcctggagtactttccttctcagatgctgcgtaccggaaacaactttaccttcagctacacttttgaggacgttcctttccacagcagctacgctcacagccagagtctgggccgtctcatgaatcctctcatcgaccagtacctgtattacttgagcagaacaaacactccaagtggaaccaccacgcagtcaaggcttcagttttctcaggccggagcgagtgacattcgggaccagtctaggaactggcttcctggaccctgttaccgccagcagcgagtatcaaagacatctgcggataacaacaacagtgaatactcgtggactggagctaccaagtaccacctcaatggcagagactctctggtgaatccgggcccggccatggcaagccacaaggacgatgaagaaaagttttttcctcagagcggggttctcatctttgggaagcaaggctcagagaaaacaaatgtggacattgaaaaggtcatgattacagacgaagaggaaatcaggacaaccaatcccgtggctacggagcagtatggttctgtatctaccaacctccagagaggcaacagacaagcagctaccgcagatgtcaacacacaaggcgttcttccaggcatggtctggcaggacagagatgtgtaccttcaggggcccatctgggcaaagattccacacacggacggacattttcacccctctcccctcatgggtggattcggacttaaacaccctcctccacagattctcatcaagaacaccccggtacctgcgaatccttcgaccaccttcagtgcggcaaagtttgcttccttcatcacacagtactccacgggacaggtcagcgtggagatcgagtgggagctgcagaaggaaaacagcaaacgctggaatcccgaaattcagtacacttccaactacaacaagtctgttaatgtggactttactgtggacactaatggcgtgtattcagagcctcgccccattggcaccagatacctgactcgtaatctgtaa

SEQ ID NO: 4900 - protein, 735 aa, Adeno-associated virus
MAADGYLPDWLEDTLSEGIRQRWKLKPGPPPPEPAERHKDDSRGLVLPGYKYLGPFNGLDKGEPVNEADAAALEHDKAYDRQLDSGDNPYLKYNHADAEFQERLKEDTSFGGNLGRAVFQAKKRVLEPLGLVEEPVKTAPGKKRPVEHSPVEPDSSSGTGKAGQQPARKRLNFGQTGDADSVPDPQPLGQPPAAPSGLGTNTMATGSGAPMADNNEGADGVGNSSGNWHCDSTWMGDRVITTSTRTWALPTYNNHLYKQISSQSGASNDNHYFGYSTPWGYFDFNRFHCHFSPRDWQRLINNNWGFRPKRLNFKLFNIQVKEVTQNDGTTTIANNLTSTVQVFTDSEYQLPYVLGSAHQGCLPPFPADVFMVPQYGYLTLNNESQAVGRSSFYCLEYFPSQMLRTGNNFTFSYTFEDVPFHSSYAHSQSLGRLMNPLIDQYLYYLSRTNTPSGTTTQSRLQFSQAGASDIRDQSRNWLPGPCYRQQRVSKTSADNNNSEYSWTGATKYHLNGRDSLVNPGPAMASHKDDEEKFFPQSGVLIFGKQGSEKTNVDIEKVMITDEEEIRTTNPVATEQYGSVSTNLQRGNRQAATADVNTQGVLPGMVWQDRDVYLQGPIWAKIPHTDGHFHPSPLMGGFGLKHPPPQILIKNTPVPANPSTTFSAAKFASFITQYSTGQVSVEIEWELQKENSKRWNPEIQYTSNYNKSVNVDFTVDTNGVYSEPRPIGTRYLTRNL

SEQ ID NO: 4901 - DNA, 2208 bp, Adeno-associated virus
atggctgccgatggttatcttccagattggctcgaggacactctctctgaaggaataagacagcggtggaagctcaaacctggcccaccaccaccagagcccgcagagcggcataaggacgacagcaggggtcttgtgcttcctgggtacaagtacctcggacccttcaacggactcgacaagggagagccggtcaacgaggcagacgccgcggccctcgagcacgacaaagcctacgaccggcagctcgacagcggagacaacccgtacctcaagtacaaccacgccgacgcggagtttcaggagcgccttaaagaagatacgtcttttgggggcaacctcggacgagcagtcttccaggcgaaaaagagggtacttgaacctctgggcctggttgaggaacctgttaagacggctccgggaaaaaagaggccggtagagcactctcctgtggagccagactcctcctcgggaaccggaaaggcgggccagcagcctgcaagaaaaagattgaattttggtcagactggagacgcagactcagtacctgacccccagcctctcggacagccaccagcagccccctctggtctgggaactaatacgatggctacaggcagtggcgcaccaatggcagacaataacgagggcgccgacggagtgggtaattcctcgggaaattggcattgcgattccacatggatgggcgacagagtcatcaccaccagcacccgaacctgggccctgcccacctacaacaaccacctctacaaacaaatttccagccaatcaggagcctcgaacgacaatcactactttggctacagcaccccttgggggtattttgacttcaacagattccactgccacttttcaccacgtgactggcaaagactcatcaacaacaactggggattccgacccaagagactcaacttcaagctctttaacattcaagtcaaagaggtcacgcagaatgacggtacgacgacgattgccaataaccttaccagcacggttcaggtgtttactgactcggagtaccagctcccgtacgtcctcggctcggcgcatcaaggatgcctcccgccgttcccagcagacgtcttcatggtaccacagtatggatacctcaccctgaacaacgggagtcaggcagtaggacgctcttcattttactgcctggagtactttccttctcagatgctgcgtaccggaaacaactttaccttcagctacacttttgaggacgttcctttccacagcagctacgctcacagccagagtctgggccgtctcatgaatcctctcatcgaccagtacctgtattacttgagcagaacaaacactccaagtggaaccaccacgcagtcaaggcttcagttttctcaggccggagcgagtgacattcgggaccagtctaggaactggcttcctggaccctgttaccgccagcagcgagtatcaaagacatctgcggataacaacaacagtgaatactcgtggactggagctaccaagtaccacctcaatggcagagactctctggtgaatccgggcccggccatggcaagccacaaggacgatgaagaaaagttttttcctcagagcggggttctcatctttgggaagcaaggctcagagaaaacaaatgtggacattgaaaaggtcatgattacagacgaagaggaaatcaggacaaccaatcccgtggctacggagcagtatggttctgtatctaccaacctccagagaggcaacagacaagcagctaccgcagatgtcaacacacaaggcgttcttccaggcatggtctggcaggacagagatgtgtaccttcaggggcccatctgggcaaagattccacacacggacggacattttcacccctctcccctcatgggtggattcggacttaaacaccctcctccacagattctcatcaagaacaccccggtacctgcgaatccttcgaccaccttcagtgcggcaaagtttgcttccttcatcacacagtactccacgggacaggtcagcgtggagatcgagtgggagctgcagaaggaaaacagcaaacgctggaatcccgaaattcagtacacttccaactacaacaagtctgttaatgtggactttactgtggacactaatggcgtgtattcagagcctcgccccattggcaccagatacctgactcgtaatctgtaa

SEQ ID NO: 4902 - protein, 735 aa, Adeno-associated virus
MAADGYLPDWLEDTLSEGIRQRWKLKPGPPPPEPAERHKDDSRGLVLPGYKYLGPFNGLDKGEPVNEADAAALEHDKAYDRQLDSGDNPYLKYNHADAEFQERLKEDTSFGGNLGRAVFQAKKRVLEPLGLVEEPVKTAPGKKRPVEHSPVEPDSSSGTGKAGQQPARKRLNFGQTGDADSVPDPQPLGQPPAAPSGLGTNTMATGSGAPMADNNEGADGVGNSSGNWHCDSTWMGDRVITTSTRTWALPTYNNHLYKQISSQSGASNDNHYFGYSTPWGYFDFNRFHCHFSPRDWQRLINNNWGFRPKRLNFKLFNIQVKEVTQNDGTTTIANNLTSTVQVFTDSEYQLPYVLGSAHQGCLPPFPADVFMVPQYGYLTLNNGSQAVGRSSFYCLEYFPSQMLRTGNNFTFSYTFEDVPFHSSYAHSQSLGRLMNPLIDQYLYYLSRTNTPSGTTTQSRLQFSQAGASDIRDQSRNWLPGPCYRQQRVSKTSADNNNSEYSWTGATKYHLNGRDSLVNPGPAMASHKDDEEKFFPQSGVLIFGKQGSEKTNVDIEKVMITDEEEIRTTNPVATEQYGSVSTNLQRGNRQAATADVNTQGVLPGMVWQDRDVYLQGPIWAKIPHTDGHFHPSPLMGGFGLKHPPPQILIKNTPVPANPSTTFSAAKFASFITQYSTGQVSVEIEWELQKENSKRWNPEIQYTSNYNKSVNVDFTVDTNGVYSEPRPIGTRYLTRNL

SEQ ID NO: 4903 - DNA, 2208 bp, Adeno-associated virus
atggctgccgatggttatcttccagattggctcgaggacactctctctgaaggaataagacagcggtggaagctcaaacctggcccaccaccaccagagcccgcagagcggcataaggacgacagcaggggtcttgtgcttcctgggtacaagtacctcggacccttcaacggactcgacaagggagagccggtcaacgaggcagacgccgcggccctcgagcacgacaaagcctacgaccggcagctcgacagcggagacaacccgtacctcaagtacaaccacgccgacgcggagtttcaggagcgccttaaagaagatacgtcttttgggggcaacctcggacgagcagtcttccaggcgaaaaagagggtactcgaacctctgggcctggttgaggaacctgttaagacggctccgggaaaaaagaggccggtagagcactctcctgtggagccagactcctcctcgggaaccggaaaggcgggccagcagcctgcaagaaaaagattgaattttggtcagactggagacgcagactcagtacctgacccccagcctctcggacagccaccagcagccccctctggtctgggaactaatacgatggctacaggcagtggcgcaccaatggcagacaataacgagggcgccgacggagtgggtaattcctcgggaaattggcattgcgattccacatggatgggcgacagagtcatcaccaccagcacccgaacctgggccctgcccacctacaacaaccacctctacaaacaaatttccagccaatcaggagcctcgaacgacaatcactactttggctacagcaccccttgggggtattttgacttcaacagattccactgccacttttcaccacgtgactggcaaagactcatcaacaacaactggggattccgacccaagagactcaacttcaagctctttaacattcaagtcaaagaggtcacgcagaatgacggtacgacgacgattgccaataaccttaccagcacggttcaggtgtttactgactcggagtaccagctcccgtacgtcctcggctcggcgcatcaaggatgcctcccgccgttcccagcagacgtcttcatggtgccacagtatggatacctcaccctgaacaacgggagtcaggcagcaggacgctcttcattttactgcctggagtactttccttctcagatgctgcgtaccggaaacaactttaccttcagctacacttttgaggacgttcctttccacagcagctacgctcacagccagagtctgggccgtctcatgaatcctctcatcgaccagtacctgtattacttgagcagaacaaacactccaagtggaaccaccacgcagtcaaggcttcagttttctcaggccggagcgagtgacattcgggaccagtctaggaactggcttcctggaccctgttaccgccagcagcgagtatcaaagacatctgcggataacaacaacagtgaatactcgtggactggagctaccaagtaccacctcaatggcagagactctctggtgaatccgggcccggccatggcaagccacaaggacgatgaagaaaagttttttcctcagagcggggttctcatctttgggaagcaaggctcagagaaaacaaatgtggacattgaaaaggtcatgattacagacgaagaggaaatcaggacaaccaatcccgtggctacggagcagtatggttctgtatctaccaacctccagagaggcaacagacaagcagctaccgcagatgtcaacacacaaggcgttcttccaggcatggtctggcaggacagagatgtgtaccttcaggggcccatctgggcaaagattccacacacggacggacattttcacccctctcccctcatgggtggattcggacttaaacaccctcctccacagattctcatcaagaacaccccggtacctgcgaatccttcgaccaccttcagtgcggcaaagtttgcttccttcatcacacagtactccacgggacaggtcagcgtggagatcgagtgggagctgcagaaggaaaacagcaaacgctggaatcccgaaattcagtacacttccaactacaacaagtccgttaatgtggactttactgtggacactaatggcgtgtattcagagcctcgccccattggcaccagatacctgactcgtaatctgtaa

SEQ ID NO: 4904 - protein, 735 aa, Adeno-associated virus
MAADGYLPDWLEDTLSEGIRQRWKLKPGPPPPEPAERHKDDSRGLVLPGYKYLGPFNGLDKGEPVNEADAAALEHDKAYDRQLDSGDNPYLKYNHADAEFQERLKEDTSFGGNLGRAVFQAKKRVLEPLGLVEEPVKTAPGKKRPVEHSPVEPDSSSGTGKAGQQPARKRLNFGQTGDADSVPDPQPLGQPPAAPSGLGTNTMATGSGAPMADNNEGADGVGNSSGNWHCDSTWMGDRVITTSTRTWALPTYNNHLYKQISSQSGASNDNHYFGYSTPWGYFDFNRFHCHFSPRDWQRLINNNWGFRPKRLNFKLFNIQVKEVTQNDGTTTIANNLTSTVQVFTDSEYQLPYVLGSAHQGCLPPFPADVFMVPQYGYLTLNNGSQAAGRSSFYCLEYFPSQMLRTGNNFTFSYTFEDVPFHSSYAHSQSLGRLMNPLIDQYLYYLSRTNTPSGTTTQSRLQFSQAGASDIRDQSRNWLPGPCYRQQRVSKTSADNNNSEYSWTGATKYHLNGRDSLVNPGPAMASHKDDEEKFFPQSGVLIFGKQGSEKTNVDIEKVMITDEEEIRTTNPVATEQYGSVSTNLQRGNRQAATADVNTQGVLPGMVWQDRDVYLQGPIWAKIPHTDGHFHPSPLMGGFGLKHPPPQILIKNTPVPANPSTTFSAAKFASFITQYSTGQVSVEIEWELQKENSKRWNPEIQYTSNYNKSVNVDFTVDTNGVYSEPRPIGTRYLTRNL

SEQ ID NO: 4905 - protein, 738 aa, Adeno-associated virus; identical to SEQ ID NO: 4797

SEQ ID NO: 4906 - DNA, 2217 bp, Adeno-associated virus
atggctgctgacggttatcttccagattggctcgaggacaacctctctgagggcattcgcgagtggtgggacctgaaacctggagcccccaagcccaaggccaaccagcagaagcaggacgacggccggggtctggtgcttcctggctacaagtacctcggacccttcaacggactcgacaagggggagcccgtcaacgcggcggacgcagcggccctcgagcacgacaaggcctacgaccagcagctcaaagcgggtgacaatccgtacctgcggtataaccacgccgacgccgagtttcaggagcgtctgcaagaagatacgtcttttgggggcaacctcgggcgagcagtcttccaggccaagaagcgggttctcgaacctctcggtctggttgaggaagctgctaagacggctcctggaaagaagagaccggtagaaccgtcacctcagcgttcccccgactcctccacgggcatcggcaagaaaggccagcagcccgctaaaaagagactgaactttggtcagactggcgactcagagtcagtccccgaccctcaaccaatcggagaaccaccagcaggcccctctggtctgggatctggtacaatggctgcaggcggtggcgctccaatggcagacaataacgaaggcgccgacggagtgggtagttcctcaggaaattggcattgcgattccacatggctgggcgacagagtcatcaccaccagcacccgaacctgggccctgcccacctacaacaaccacctctacaagcaaatatccaatgggacatcgggaggaagcaccaacgacaacacctacttcggctacagcaccccctgggggtattttgacttcaacagattccactgccacttctcaccacgtgactggcagcgactcatcaacaacaactggggattccggccaaaaagactcagcttcaagctcttcaacatccaggtcaaggaggtcacgcagaatgaaggcaccaagaccatcgccaataaccttaccagcacgattcaggtatttacggactcggaataccagctgccgtacgtcctcggctccgcgcaccagggctgcctgcctccgttcccggcggacgtcttcatgattccccagtacggctaccttacactgaacaatggaagtcaagccgtaggccgttcctccttctactgcctggaatattttccatctcaaatgctgcgaactggaaacaattttgaattcagctacaccttcgaggacgtgcctttccacagcagctacgcacacagccagagcttggaccgactgatgaatcctctcatcgaccagtacctgtactacttatccagaactcagtccacaggaggaactcaaggtacccagcaattgttattttctcaagctgggcctgcaaacatgtcggctcaggctaagaactggctacctggaccttgctaccggcagcagcgagtctctacgacactgtcgcaaaacaacaacagcaactttgcttggactggtgccaccaaatatcacctgaacggaagagactctttggtaaatcccggtgtcgccatggcaacccacaaggacgacgaggaacgcttcttcccgtcgagtggagtcctgatgttcggaaaacagggtgctggaagagacaatgtggactacagcagcgttatgctaaccagcgaagaagaaattaaaaccactaaccccgtagccacagaacaatacggtgtggtggctgacaacttgcagcaaaccaatacagggcctattgtgggaaatgtcaacagccaaggagccttacctggcatggtctggcagaaccgagacgtgtacctgcagggtcccatctgggccaagattcctcacacggacggcaacttccacccttcaccgctaatgggaggatttggactgaagcacccacctcctcagatcctgatcaagaacacgccggtacctgcggatcctccaacaacgttcagccaggcgaaattggcttccttcattacgcagtacagcaccggacaggtcagcgtggaaatcgagtgggagctgcagaaggagaacagcaaacgctggaacccagagattcagtacacttcaaactactacaaatctacaaatgtggactttgctgtcaatacagagggaacttattctgagcctcgccccattggtactcgttacctcacccgtaatctgtaa

SEQ ID NO: 4907 - protein, 738 aa, Adeno-associated virus
MAADGYLPDWLEDNLSEGIREWWDLKPGAPKPKANQQKQDDGRGLVLPGYKYLGPFNGLDKGEPVNAADAAALEHDKAYDQQLKAGDNPYLRYNHADAEFQERLQEDTSFGGNLGRAVFQAKKRVLEPLGLVEEAAKTAPGKKRPVEPSPQRSPDSSTGIGKKGQQPAKKRLNFGQTGDSESVPDPQPIGEPPAGPSGLGSGTMAAGGGAPMADNNEGADGVGSSSGNWHCDSTWLGDRVITTSTRTWALPTYNNHLYKQISNGTSGGSTNDNTYFGYSTPWGYFDFNRFHCHFSPRDWQRLINNNWGFRPKRLSFKLFNIQVKEVTQNEGTKTIANNLTSTIQVFTDSEYQLPYVLGSAHQGCLPPFPADVFMIPQYGYLTLNNGSQAVGRSSFYCLEYFPSQMLRTGNNFEFSYTFEDVPFHSSYAHSQSLDRLMNPLIDQYLYYLSRTQSTGGTQGTQQLLFSQAGPANMSAQAKNWLPGPCYRQQRVSTTLSQNNNSNFAWTGATKYHLNGRDSLVNPGVAMATHKDDEERFFPSSGVLMFGKQGAGRDNVDYSSVMLTSEEEIKTTNPVATEQYGVVADNLQQTNTGPIVGNVNSQGALPGMVWQNRDVYLQGPIWAKIPHTDGNCHPSPLMGGFGLKHPPPQILIKNTPVPADPPTTFSQAKLASFITQYSTGQVSVEIEWELQKENSKRWNPEIQYTSNYYKSTNVDFAVNTEGTYSEPRPIGTRYLTRNL

SEQ ID NO: 4908 - protein, 738 aa, Adeno-associated virus
MAADGYLPDWLEDNLSEGIREWWDLKPGAPKPKANQQKQDDGRGLVLPGYKYLGPFNGLDKGEPVNAADAAALEHDKAYDQQLKAGDNPYLRYNHADAEFQERLQEDTSFGGNLGRAVFQAKKRVLEPLGLVEEGAKTAPGKKRPVEPSPQRSPDSSTGIGKKGQQPARKRLNFGRTGDSESVPDPQPIGEPPAAPSSVGSGTMAAGGGAPMADNNEGADGVGSSSGNWHCDSTWLGDRVITTSTRTWALPTYNNHLYKQISNGTSGGSTNDNTYFGYSTPWGYLDFNRFHCHFSPRDWQRLINNNWGFRPKRLSFKLFNIQVKEVTQNEGTKTIANNLASTIQVFTDSEYQPPYVLGSAHQGCLPPFPADVFMIPQYGYLTLNNGSQAVGRSSFYCLEYFPSQMLRTGNNFSFSYTFEDVPFHSSYAHSQSLDRLMNPLIDQYLYYLSRTQSTGGTAGTQQLLFSRAGPSNMSAQARNWLPGPCYRQQRVSTTLSQNNNSNFAWTGATKYHLNGRDSLVNPGVAMATNKDDEDRFFPSSGILMFGKQGAGKDNVDYSNVMLTSEEEIKTTNPVATEQYGVVADNLQQQNTAPTVGAVNSQGALPGMVWQNRDVYLQGPIWAKIPHTDGNFHPSPLMGGFGLKHPPPQILIKNTPVPADPPTAFNQAKLNSFIAQYSTGQVSVEIEWELQKENSKRWNPEIQYTSNYYKSTNADFAVNTEGVYSEPRPIGTRYLTRNL

SEQ ID NO: 4909 - DNA, 2217 bp, Adeno-associated virus
atggctgccgatggttatcttccagattggctcgaggacaacctctctgagggcattcgcgagtggtgggacctgaaacctggagccccgaaacccaaagccaaccagcaaaagcaggacgacggccggggtctggtgcttcctggctacaagtacctcggacccttcaacggactcgacaagggggagcccgtcaacgcggcggacgcagcggccctcgagcacgacaaggcctacgaccagcagctcaaagcgggtgacaatccgtacctgcggtataatcacgccgacgccgagtttcaggagcgtctgcaagaagatacgtcttttgggggcaacctcgggcgagcagtcttccaggccaagaagcgggttctcgaacctctcggtctggttgaggaaggcgctaagacggctcctggaaagaagagaccggtagagccgtcaccacagcgttcccccgactcctccacgggcatcggcaagaaaggccagcagcccgccagaaagagactcaatttcggtcggactggcgactcagagtcagtccccgaccctcaacctatcggagaacctccagcagcgccctctagtgtgggatctggtacaatggctgcaggcggtggcgcaccaatggcagacaataacgaaggtgccgacggagtgggtagttcctcgggaaattggcattgcgattccacatggctgggcgacagagttatcaccaccagcacccgaacctgggccctgcccacctacaacaaccacctctacaagcaaatctccaacgggacctcgggaggcagcaccaacgacaacacctactttggctacagcaccccctgggggtatcttgactttaacagattccactgccacttctcaccacgtgactggcagcgactcatcaacaacaactggggattccggcccaagagactcagcttcaagctcttcaacatccaggtcaaagaggtcacgcagaatgaaggcaccaagaccatcgccaataacctcgccagcaccatccaggtgtttacggactcggaataccagccgccgtacgtcctcggctctgcccaccagggctgcctgcctccgttcccggcggacgtcttcatgattcctcagtacggctacctgactctcaacaacggtagtcaggccgtgggacgttcctccttctactgcctggagtacttcccctctcagatgctgagaacgggcaacaacttttccttcagctacactttcgaggacgtgcctttccacagcagctacgcgcacagccagagtttggacaggctgatgaatcctctcatcgaccagtacctgtactacctgtcaagaacccagtctacgggaggcacagcgggaacccagcagttgctgttttctcgggccgggcctagcaacatgtcggctcaggccagaaactggctgcctggaccctgctacagacagcagcgcgtctccacgacactgtcgcaaaacaacaacagcaactttgcctggactggtgccaccaagtatcatctgaacggcagagactctctggtgaatccgggcgtcgccatggcaaccaacaaggacgacgaggaccgcttcttcccatccagcggcatcctcatgtttggcaagcagggagctggaaaagacaacgtggactatagcaacgtgatgctaaccagcgaggaagaaatcaagaccaccaaccccgtggccacagaacagtatggcgtggtggctgataacctacagcagcaaaacaccgctcctactgtgggggccgtcaacagccagggagccttacctggcatggtctggcagaaccgggacgtgtacctgcagggtcctatttgggccaagattcctcacacagatggcaactttcacccgtctcctttaatgggcggctttggacttaaacatccgcctcctcagatcctcatcaaaaacactcctgttcctgcggatcctccaacagcgttcaaccaggccaagctgaattctttcatcgcgcagtacagcaccggacaagtcagcgtggagatcgagtgggagctgcagaaggagaacagcaagcgctggaacccagagattcagtatacttccaactactacaaatctacaaatgcggactttgctgttaatactgagggtgtttactctgagcctcgccccattggcactcgttacctcacccgtaatctgtaa

SEQ ID NO: 4910 - DNA, 2208 bp, Adeno-associated virus
atggctgccgatggttatcttccagattggctcgaggacactctctctgaaggaataagacagtggtggaagctcaaacctggcccaccaccaccaaagcccgcagagcggcataaggacgacagcaggggtcttgtgcttcctgggtacaagtacctcggacccttcaacggactcgacaagggggagccggtcaacgaggcagacgccgcggccctcgagcacgacaaggcctacgaccggcagctcgacagcggagacaacccgtacctcaagtacaaccacgccgacgcagagtttcaggagcgccttaaagaagatacgtcttttgggggcaacctcggacgagcagtcttccaggcgaaaaagagggttcttgaacctctgggcctggttgaggagcctgttaagacggctccgggaaaaaagaggccggtagagcactctcctgtggagccagactcctcctcgggaaccggaaaagcgggccagcagcctgcaagaaaaagattaaattttggtcagactggagacgcagactccgtacctgacccccagcctctcggacagccaccagcagccccctctggtctgggatctactacaatggctacaggcagtggcgcaccaatggcagacaataacgagggtgccgatggagtgggtaattcctcaggaaattggcattgcgattcccaatggctgggcgacagagtcatcaccaccagcacccgaacctgggccctgcccacatacaacaaccacctctacaagcaaatctccagccaatcaggagccagcaacgacaaccactactttggctacagcaccccctgggggtattttgacttcaacagattccactgccacttttcaccacgtgactggcaaagactcgtcaacaacaaccggggattccggcccaaaagactcaacttcaagctctttaatattcaagtcaaagaggtcacgcagaatgacggtacgacgacgattgccaataaccttaccagcacggttcaggtgtttactgactcggagtaccagctcccgtacgtcctgggctcggcgcatcaaggatgcctcccgccgtttccagcggacgtcttcatggtcccacagtatggatacctcaccctgaacaacgggagtcaggcggtaggacgctcttccttttactgcctggagtactttccttctcagatgctgcgtactggaaacaactttcagttcagctacacttttgaagacgtgcctttccacagcagctacgctcacagccagagtctggatcggctgatgaatcctctgatcgaccagtacctgtattatctgaacaagacacaaacaaatagtggaactcttcagcagtctcggctactgtttagccaagctggaccaaccaacatgtctcttcaagctaaaaactggctgcctggaccttgctacagacagcagcgtctgtcaaaacaggcaaacgacaacaacaacagcaactttccctggactgcagctacaaagtatcatctaaatggccgggactcgttggttaatccaggaccagctatggccagtcacaaggatgacgaagaaaagtttttccccatgcatggaaccctgatatttggtaaacaaggaacaaatgccaacgacgcggatttggaaaatgtcatgattacagatgaagaagaaatcagggccaccaatcccgtggctacggagcagtacgggactgtgtcaaataatttgcaaaactcaaacactggtccaactactggaactgtcaatcaccaaggagcgttacctggtatggtgtggcaggatcgagacgtgtacctgcagggacccatttgggccaagattcctcacaccgatggacactttcatccttctccactgatgggaggttttggactcaaacacccgcctcctcagatcatgatcaaaaacactcccgttccagccaatcctcccacaaacttcagttctgccaagtttgcttctttcatcacacagtattccacgggacaggtcagcgtggagatcgagtgggagctgcagaaggagaacagcaaacgctggaatcccgaaattcagtacacttccaactacaacaagtctgttaatgtggactttactgtggacactaatggtgtgtattcagagcctcgccccattggcaccagatacctgactcgtaatctgtaa

SEQ ID NO: 4911 - protein, 735 aa, Adeno-associated virus
MAADGYLPDWLEDTLSEGIRQWWKLKPGPPPPKPAERHKDDSRGLVLPGYKYLGPFNGLDKGEPVNEADAAALEHDKAYDRQLDSGDNPYLKYNHADAEFQERLKEDTSFGGNLGRAVFQAKKRVLEPLGLVEEPVKTAPGKKRPVEHSPVEPDSSSGTGKAGQQPARKRLNFGQTGDADSVPDPQPLGQPPAAPSGLGSTTMATGSGAPMADNNEGADGVGNSSGNWHCDSQWLGDRVITTSTRTWALPTYNNHLYKQISSQSGASNDNHYFGYSTPWGYFDFNRFHCHFSPRDWQRLVNNNRGFRPKRLNFKLFNIQVKEVTQNDGTTTIANNLTSTVQVFTDSEYQLPYVLGSAHQGCLPPFPADVFMVPQYGYLTLNNGSQAVGRSSFYCLEYFPSQMLRTGNNFQFSYTFEDVPFHSSYAHSQSLDRLMNPLIDQYLYYLNKTQTNSGTLQQSRLLFSQAGPTNMSLQAKNWLPGPCYRQQRLSKQANDNNNSNFPWTAATKYHLNGRDSLVNPGPAMASHKDDEEKFFPMHGTLIFGKQGTNANDADLENVMITDEEEIRATNPVATEQYGTVSNNLQNSNTGPTTGTVNHQGALPGMVWQDRDVYLQGPIWAKIPHTDGHFHPSPLMGGFGLKHPPPQIMIKNTPVPANPPTNFSSAKFASFITQYSTGQVSVEIEWELQKENSKRWNPEIQYTSNYNKSVNVDFTVDTNGVYSEPRPIGTRYLTRNL

SEQ ID NO: 4912 - protein, 738 aa, Adeno-associated virus
MAADGYLPDWLEDNLSEGIREWWDLKPGAPKPKANQQKQDDGRGLVLPGYKYLGPFNGLDKGEPVNAADAAALEHDKAYDQQLKAGDNPYLRYNHADAEFQERLQEDTSFGGNLGRAVFQAKKRVLEPLGLVEEAAKTAPGKKRPVEPSPQRSPDSSTGIGKKGQQPAKKRLSFGQTGDSESVPDPQPIGEPPAGPSGLGSGTMAAGGGAPMADNNEGADGVGSSSGNWHCDSTWLGDRVITTSTRTWALPTYNNHLYKQISNGTSGGSTNDNTYFGYSTPWGYFDFNRFHCHFSPRDWQRLINNNWGFRPKRLSFKLFNIQVKEVTQNEGTKTIANNLTSTIQVFTDSEYQLPYVLGSAHQGCLPPFPADVFMIPQYGYLTLNNGSQAVGRSSFYCLEYFPSQMLRTGNNSEFSYTFEDVPFHSSYAHSQSLDRLMNPLIDQYLYYLSRTQSTGGTQGTQQLLFSQAGPANMSAQAKNWLPGPCYRQQRVSTTLSQNNNSNFAWTGATKYHLNGRDSLVNPGVAMATHKDDEERFFPSSGVLMFGKQGAGRDNVDYSSVMLTSEEEIKTTNPVATEQYGVVADNLQQTNTGPIVGNVNSQGALPGMVWQNRDVYLQGPIWAKIPHTDGNFHPSPLMGGFGLKHPPPQILIKNTPVPADPPTTFSQAKLASFITQYSTGQVSVEIEWELQKENSKRWNPEIQYTSNYYKSTNVDFAVNTEGTYSEPRPIGTRYLTRNL

SEQ ID NO: 4913 - DNA, 2217 bp, Adeno-associated virus
atggctgctgacggttatcttccagattggctcgaggacaacctctctgagggcattcgcgagtggtgggacctgaaacctggagcccccaagcccaaggccaaccagcagaagcaggacgacggccggggtctggtgcttcctggctacaagtacctcggacccttcaacggactcgacaagggggagcccgtcaacgcggcggacgcagcggccctcgagcacgacaaggcctacgaccagcagctcaaagcgggtgacaatccgtacctgcggtataaccacgccgacgccgagtttcaggagcgtctgcaagaagatacgtcttttgggggcaacctcgggcgagcagtcttccaggccaagaagcgggttctcgaacctctcggtctggttgaggaagctgctaagacggctcctggaaagaagagaccggtagaaccgtcacctcagcgttcccccgactcctccacgggcatcggcaagaaaggccagcagcccgctaaaaagagactgagctttggtcagactggcgactcagagtcagtccccgaccctcaaccaatcggagaaccaccagcaggcccctctggtctgggatctggtacaatggctgcaggcggtggcgctccaatggcagacaataacgaaggcgccgacggagtgggtagttcctcaggaaattggcattgcgattccacatggctgggcgacagagtcatcaccaccagcacccgaacctgggccctgcccacctacaacaaccacctctacaagcaaatatccaatgggacatcgggaggaagcaccaacgacaacacctacttcggctacagcaccccctgggggtattttgacttcaacagattccactgccacttctcaccacgtgactggcagcgactcatcaacaacaactggggattccggccaaaaagactcagcttcaagctcttcaacatccaggtcaaggaggtcacgcagaatgaaggcaccaagaccatcgccaataaccttaccagcacgattcaggtatttacggactcggaataccagctgccgtacgtcctcggctccgcgcaccagggctgcctgcctccgttcccggcggacgtcttcatgattccccagtacggctaccttacactgaacaatggaagtcaagccgtaggccgttcctccttctactgcctggaatattttccatctcaaatgctgcgaactggaaacaattctgaattcagctacaccttcgaggacgtgcctttccacagcagctacgcacacagccagagcttggaccgactgatgaatcctctcatcgaccagtacctgtactacttatccagaactcagtccacaggaggaactcaaggtacccagcaattgttattttctcaagctgggcctgcaaacatgtcggctcaggctaagaactggctacctggaccttgctaccggcagcagcgagtctctacgacactgtcgcaaaacaacaacagcaactttgcttggactggtgccaccaaatatcacctgaacggaagagactctttggtaaatcccggtgtcgccatggcaacccacaaggacgacgaggaacgcttcttcccgtcgagtggagtcctgatgtttggaaaacagggtgctggaagagacaatgtggactacagcagcgttatgctaaccagcgaagaagaaattaaaaccactaaccctgtagccacagaacaatacggtgtggtggctgacaacttgcagcaaaccaatacagggcctattgtgggaaatgtcaacagccaaggagccttacctggcatggtctggcagaaccgagacgtgtacctgcagggtcccatctgggccaagattcctcacacggacggcaacttccacccttcaccgctaatgggaggatttggactgaagcacccacctcctcagatcctgatcaagaacacgccggtacctgcggatcctccaacaacgttcagccaggcgaaattggcttccttcattacgcagtacagcaccggacaggtcagcgtggaaatcgagtgggagctgcagaaggagaacagcaaacgctggaacccagagattcagtacacttcaaactactacaaatctacaaatgtggactttgctgtcaatacagagggaacttattctgagcctcgccccattggtactcgttacctcacccgtaatctgtaa

SEQ ID NO: 4914 - protein, 738 aa, Adeno-associated virus
MAADGYLPDWLEDNLSEGIREWWDLKPGAPKPKANQQKQDDGRGLVLPGYKYLGPFNGLDKGEPVNAADAAALEHDKAYDQQLKAGDNPYLRYNHADAEFQERLQEDTSFGGNLGRAVFQAKKRVLEPLGPVEEAAKTAPGKKRPVEPPPQRSPDSSTGIGKKGQQPAKKRLNFGQTGDSESVPDPQPIGEPPAGPSGLGSGTMAAGGGAPMADNNEGADGVGSSSGNWHCDSTWLGDRVITTSTRTWALPTYNNHLYKQISNGTSGGSTNDNTYFGYSTPWGYFDFNRFHCHFSPRDWQRLINNNWGFRPKRLSFKLFNIQVKEVTQNEGTKTVANNLTSTIQVFTDSEYQLPYVLGSAHQGCLPPFPADVFMIPQYGYLTLNNGSQAVGRSSFYCLEYFPSQMLRTGNNFEFSYTFEDVPFHSSYAHSQSLDRLMNPLIDQYLYYLSRTQSTGGTQGTQQLLFSQAGPANMSAQAKNWLPGPCYRQQRVSTTLSQNNNSNFAWTGATKYHLNGRDSLVNPGVAMATHKDDEERFFPSSGVLMFGKQGAGRDNVDYSSVMLTSEEEIKTTNPVATEQYGVVADNLQQTNTGPIVGNVNSQGALPGMVWQNRDVYLQGPIWAKIPHTDGNFHPSPLMGGFGLKHPPPQILIKNTPVPADPPTTFSQAKLASFITQYSTGQVSVEIEWELQKENSKRWNPEIQYTSNYYKSTNVDFAVNTEGTYSEPRPIGTRYLTRNL

SEQ ID NO: 4915 - DNA, 2217 bp, Adeno-associated virus
atggctgctgacggttatcttccagattggctcgaggacaacctctctgagggcattcgcgagtggtgggacctgaaacctggagcccccaagcccaaggccaaccagcagaagcaggacgacggccggggtctggtgcttcctggctacaagtacctcggacccttcaacggactcgacaagggggagcccgtcaacgcggcggacgcagcggccctcgagcacgacaaggcctacgaccagcagctcaaagcgggtgacaatccgtacctgcggtataaccacgccgacgccgagtttcaggagcgtctacaagaagatacgtcttttgggggcaacctcgggcgagcagtcttccaggccaagaagcgggttctcgaacctctcggtccggttgaggaagctgctaagacggctcctggaaagaagagaccggtagaaccgccacctcagcgttcccccgactcctccacgggcatcggcaagaaaggccagcagcccgctaaaaagagactgaactttggtcagactggcgactcagagtcagtccccgaccctcaaccaatcggagaaccaccagcaggcccctctggtctgggatctggtacaatggctgcaggcggtggcgctccaatggcagacaataacgaaggcgccgacggagtgggtagttcctcaggaaattggcattgcgattccacatggctgggcgacagagtcatcaccaccagcacccgaacctgggccctgcccacctacaacaaccacctctacaagcaaatatccaatgggacatcgggaggaagcaccaacgacaacacctacttcggctacagcaccccctgggggtattttgacttcaacagattccactgccacttctcaccacgtgactggcagcgactcatcaacaacaactggggattccggccaaaaagactcagcttcaagctcttcaacatccaggtcaaggaggtcacgcagaatgaaggcaccaagaccgtcgccaataaccttaccagcacgattcaggtatttacggactcggaataccagctgccgtacgtcctcggctccgcgcaccagggctgcctgcctccgttcccggcggacgtcttcatgattccccagtacggctaccttacactgaacaatggaagtcaagccgtaggccgttcctccttctactgcctggaatattttccatctcaaatgctgcgaactggaaacaattttgaattcagctacaccttcgaggacgtgcctttccacagcagctacgcacacagccagagcttggaccgactgatgaatcctctcatcgaccagtacctgtactacttatccagaactcagtccacaggaggaactcaaggtacccagcaattgttattttctcaagctgggcctgcaaacatgtcggctcaggctaagaactggctacctggaccttgctaccggcagcagcgagtctctacgacactgtcgcaaaacaacaacagcaactttgcttggactggtgccaccaaatatcacctgaacggaagagactctttggtaaatcccggtgtcgccatggcaacccacaaggacgacgaggaacgcttcttcccgtcgagtggagtcctgatgtttggaaaacagggtgctggaagagacaatgtggactacagcagcgttatgctaaccagcgaagaagaaattaaaaccactaaccctgtagccacagaacaatacggtgtggtggctgacaacttgcagcaaaccaatacagggcctattgtgggaaatgtcaacagccaaggagccttacctggcatggtctggcagaaccgagacgtgtacctgcagggtcccatctgggccaagattcctcacacggacggcaacttccacccttcaccgctaatgggaggatttggactgaagcacccacctcctcagatcctgatcaagaacacgccggtacctgcggatcctccaacaacgttcagccaggcgaaattggcttccttcattacgcagtacagcaccggacaggtcagcgtggaaatcgagtgggagctgcagaaggagaacagcaaacgttggaacccagagattcagtacacttcaaactactacaaatctacaaatgtggactttgctgtcaatacagagggaacttattctgagcctcgccccattggtactcgttacctcacccgtaatctgtaa

SEQ ID NO: 4916 - protein, 738 aa, Adeno-associated virus
MAADGYLPDWLEDNLSEGIREWWDLKPGAPKPKANQQKQDDGRGLVLPGYKYLGPFNGLDKGEPVNAADAAALEHDKAYDQQLKAGDNPYLRYNHADAEFQERLQEDTSFGGNLGRAVFQAKKRVLEPLGLVEEAAKTAPGKKRPVEPSPQRSPDSSTGIGKKGQQPAKKRLNFGQTGDSESVPDPQPIGEPPAGPSGLGSGTMAAGGGAPMADNNEGADGVGSSSGNWHCDSTWLGDRVITTSTRTWALPTYNNHLYKQISNGTSGGSTNDNTYFGYSTPWGYFDFNRFHCHFSPRDWQRLINNNWGFRPKRLSFKLFNIQVKEVTQNEGTKTIANNLTSTIQVFTDSEYQLPYVLGSAHQGCLPPFPADVFMIPQYGYLTLNNGSQAVGRSSFYCLEYFPSQMLRTGNNFEFSYTFEDVPFHSSYAHSQSLDRLMNPLIDQYLYYLSRTQSTGGTQGTQQLLFSQAGPANMSAQAKNWLPGPCYRQQRVSTTLSQSNNSNFAWTGATKYHLNGRDSLVNPGVAMATHKDDEERFFPSSGVLMFGKQGAGRDNVDYSSVMLTSEEEIKTTNPVATEQYGVVADNLQQTNTGPIVGNVNSQGALPGMVWQNRDVYLQGPIWAKIPHTDGNFHPSPLMGGLGLKHPPPQILIKNTPVPADPPTTFSQAKLASFITQYSTGQVSVEIEWELQKENSKRWNPEIQYTSNYYKSTNVDFAVNTEGTYSEPRPIGTRYLTRNL

SEQ ID NO: 4917 - DNA, 2217 bp, Adeno-associated virus
atggctgctgacggttatcttccagattggctcgaggacaacctctctgagggcattcgcgagtggtgggacctgaaacctggagcccccaagcccaaggccaaccagcagaagcaggacgacggccggggtctggtgcttcctggctacaagtacctcggacccttcaacggactcgacaagggggagcccgtcaacgcggcggacgcagcggccctcgagcacgacaaggcctacgaccagcagctcaaagcgggtgacaatccgtacctgcggtataaccacgccgacgccgagtttcaggagcgtctgcaagaagatacgtcttttgggggcaacctcgggcgagcagtcttccaggccaagaagcgggttctcgaacctctcggtctggttgaggaagcggctaagacggctcctggaaagaagagaccggtagaaccgtcacctcagcgttcccccgactcctccacgggcatcggcaagaaaggccagcagcccgctaaaaagagactgaactttggtcagactggcgactcagagtcagtccccgaccctcaaccaatcggagaaccaccagcaggcccctctggtctgggatctggtacaatggctgcaggcggtggcgctccaatggcagacaataacgaaggcgccgacggagtgggtagttcctcaggaaattggcattgcgattccacatggctgggcgacagagtcatcaccaccagcacccgaacctgggccctgcccacctacaacaaccacctctacaagcaaatatccaatgggacatcgggaggaagcaccaacgacaacacctacttcggctacagcaccccctgggggtattttgacttcaacagattccactgccacttctcaccacgtgactggcagcgactcatcaacaacaactggggattccggccaaaaagactcagcttcaagctcttcaacatccaggtcaaggaggtcacgcagaatgaaggcaccaagaccatcgccaataaccttaccagcacgattcaggtatttacggactcggaataccagctgccgtacgtcctcggctccgcgcaccagggctgcctgcctccgttcccggcggacgtcttcatgattccccagtacggctaccttacactgaacaatggaagtcaagccgtaggccgttcctccttctactgcctggaatattttccatctcaaatgctgcgaactggaaacaattttgaattcagctacaccttcgaggacgtgcctttccacagcagctacgcacacagccagagcttggaccgactgatgaatcctctcatcgaccagtacctgtactacttatccagaactcagtccacaggaggaactcaaggtacccagcaattgttattttctcaagctgggcctgcaaacatgtcggctcaggctaagaactggctacctggaccttgctaccggcagcagcgagtctctacgacactgtcgcaaagcaacaacagcaactttgcttggactggtgccaccaaatatcacctgaacggaagagactctttggtaaatcccggtgtcgccatggcaacccacaaggacgacgaggaacgcttcttcccgtcgagtggagtcctgatgtttggaaaacagggtgctggaagagacaatgtggactacagcagcgttatgctaaccagcgaagaagaaattaaaaccactaaccctgtagccacagaacaatacggtgtggtggctgacaacttgcagcaaaccaatacagggcctattgtgggaaatgtcaacagccaaggagccttacctggcatggtctggcagaaccgagacgtgtacctgcagggtcccatctgggccaagattcctcacacggacggcaacttccacccttcaccgctaatgggaggacttggactgaagcacccacctcctcagatcctgatcaagaacacgccggtacctgcggatcctccaacaacgttcagccaggcgaaattggcttccttcattacgcagtacagcaccggacaggtcagcgtggaaatcgagtgggagctgcagaaggagaacagcaaacgctggaacccagagattcagtacacttcaaactactacaaatctacaaatgtggactttgctgtcaatacagagggaacttattctgagcctcgccccattggtactcgttacctcacccgtaatctgtaa

SEQ ID NO: 4918 - protein, 737 aa, Adeno-associated virus
MAADGYLPDWLEDNLSEGIREWWDLKPGAPKPKANQQKQDDGRGLVLPGYKYLGPFNGLDKGEPVNAADAAALEHDKAYDQQLKAGDNPYPRYNHADAEFQERLQEDTPFGGNLGRAVFQAKKRVLEPLGLVEEAAKTAPGKKRPVEPSPQRSPDSSTGIGKKGQQPAKKRLNFGQTGDSESVPDPQPIGEPPAGPSGLGSGTMAAGGGAPMADNNEGADGVGNASGNWHCDSTWLGDRVITTSTRTWALPTYNNHLYKQISSASTGASNDNHYFGYSTPWGYFDFNRFHCHFSPRDWQRLINNNWGFRPKRLNFKLFNIQVKEVTTNDGVTTIANNLTSTVQVFSDSEYQLPYVLGSAHQGCLPPFPADVFMIPQYGYLTLNNGSQAVGRSSFYCLEYFPSQMLRTGNNFTFSYTFEEVPLHSSYAHSQSLDRLMNPLIVQYLYYLNRTQNQSGSAQNKDLLFSRGSPAGMSVQPKNWLPGPCYRQQRVSKTKTDNNNSNFTWTGASKYNLNGRESIINPGTAMASHKDDEDKFFPMSGVMIFGKESAGASNTALDNVMITDEEEIKATNPVATERFGTVAVNFQSSSTDPATGDVHAMGALPGMVWQDRDVYLQGPIWAKIPHTDGHFHPSPLMGGFGLKNPPPQILIKNTPVPANPPAEFSATKFASFITQYSTGQVSVEIEWELQKENSKRWNPEVQYTSNYAKSASVDFTVDNNGLYTEPRPIGTRYLTRPL

SEQ ID NO: 4919 - protein, 737 aa, Adeno-associated virus
MAADGYLPDWLEDNLSEGIREWWDLKPGAPKPKANQQKQDDGRGLVLPGYKYLGPFNGLDKGEPVNAADAAALEHDKAYDQQLKAGDNPYPRYNHADAEFQERLQEDTSFGGNLGRAVFQAKKRVLEPLGLVEEAAKTAPGKKRPVEPSPQRSPDSSTGIGKKGQQPAKKRLNFGQTGDSESVPDPQPIGEPPAGPSGLGSGTMAAGGGAPMADNNEGADGVGNASGNWHCDSTWLGDRVITTSTRTWALPTYNNHLYKQISSASTGASNDNHYFGYSTPWGYFDFNRFHCHFSPRDWQRLINNNWGFRPKRLNFKLFNIQVKEVTTNDGVTTIANNLTSTVQVFSDSEYQLPYVLGSAHQGCLPPFPADVFMIPQYGYLTLNNGSQAVGRSSFYCLEYFPSQMLRTGNNFTFSYTFEEVPLHSSYAHSQSLDRLMNPLIDQYLYYLNRTQNQSGSAQNKDLLFSRGSPAGMSVQPKNWLPGPCYRQQRVSKTKTDNNNSNFTWTGASKYNLNGRESIINPGTAMASHKDDEDKFFPMSGVMIFGKESAGASNTALDNVMITDEEEIKATNPVATERFGTVAVNFQSSSTDPATGDVHAMGALPGMVWQDRDVYLQGPIWAKIPHTDGHFHPSPLMGGFGLKNPPPQILIKNTPVPANPPAEFSATKFASFITQYSTGQVSVEIEWELQKENSKRWNPEVQYTSNYAKSASVDFTVDNNGLYTEPRPIGTRYLTRPL

SEQ ID NO: 4920 - DNA, 2214 bp, Adeno-associated virus
atggctgctgacggttatcttccagattggctcgaggacaacctctctgagggcattcgcgagtggtgggacctgaaacctggagcccccaagcccaaggccaaccagcagaagcaggacgacggccggggtctggtgcttcctggctacaagtacctcggacccttcaacggactcgacaagggggagcccgtcaacgcggcggacgcagcggccctcgagcacgacaaggcctacgaccagcagctcaaagcgggtgacaatccgtacccgcggtataaccacgccgacgccgagtttcaggagcgtctgcaagaagatacgccttttgggggcaacctcgggcgagcagtcttccaggccaagaagcgggttctcgaacctctcggtctggttgaggaagctgctaagacggctcctggaaagaagagaccggtagaaccgtcacctcagcgttcccccgactcctccacgggcatcggcaagaaaggccagcagcccgctaaaaagagactgaactttggtcagactggcgactcagagtcagtccccgaccctcaaccaatcggagaaccaccagcaggcccctctggtctgggatctggtacaatggctgcaggcggtggcgctccaatggcagacaataacgaaggcgccgacggagtgggtaatgcctcaggaaattggcattgcgattccacatggctgggcgacagagtcatcaccaccagcacccgcacctgggccttgcccacctacaataaccacctctacaagcaaatctccagtgcttcaacgggggccagcaacgacaaccactacttcggctacagcaccccctgggggtattttgatttcaacagattccactgccacttttcaccacgtgactggcagcgactcatcaacaacaattggggattccggcccaagagactcaacttcaaactcttcaacatccaagtcaaggaggtcacgacgaatgatggcgtcacaaccatcgctaataaccttaccagcacggttcaagtcttctcggactcggagtaccagcttccgtacgtcctcggctctgcgcaccagggctgcctccctccgttcccggcggacgtgttcatgattccgcaatacggctacctgacgctcaacaatggcagccaagccgtgggacgttcatccttttactgcctggaatatttcccttctcagatgctgagaacgggcaacaactttaccttcagctacacctttgaggaagtgcctctccacagcagctacgcgcacagccagagcctggaccggctgatgaatcctctcatcgtccaatacctgtattacctgaacagaactcaaaatcagtccggaagtgcccaaaacaaggacttgctgttcagccgtgggtctccagctggcatgtctgttcagcccaaaaactggctacctggaccctgttatcggcagcagcgcgtttctaaaacaaaaacagacaacaacaacagcaattttacctggactggtgcttcaaaatataacctcaatgggcgtgaatccatcatcaaccctggcactgctatggcctcacacaaagacgacgaagacaagttctttcccatgagcggtgtcatgatttttggaaaagagagcgccggagcttcaaacactgcattggacaatgtcatgattacagacgaagaggaaattaaagccactaaccctgtggccaccgaaagatttgggaccgtggcagtcaatttccagagcagcagcacagaccctgcgaccggagatgtgcatgctatgggagcattacctggcatggtgtggcaagatagagacgtgtacctgcagggtcccatttgggccaaaattcctcacacagatggacactttcacccgtctcctcttatgggcggctttggactcaagaacccgcctcctcagatcctcatcaaaaacacgcctgttcctgcgaatcctccggcggagttttcagctacaaagtttgcttcattcatcacccaatactccacaggacaagtgagtgtggaaattgaatgggagctgcagaaagaaaacagcaagcgctggaatcccgaagtgcagtacacatccaattatgcaaaatctgccagcgttgattttactgtggacaacaatggactttatactgagcctcgccccattggcacccgttaccttacccgtcccctgtaa

SEQ ID NO: 4921 - protein, 736 aa, Adeno-associated virus
MAADGYLPDWLEDTLSEGIRQWWKLRPGPPPPKPAERHKDDSRGLVLPGYKYLGPFNGLDKGEPVNEADAAALEHDKAYDRQLDSGDNPYLKYNHADAEFQERLKEDTSFGGNLGRAVFQAKKRVLEPLGLVEEGAETAPGKKRPVEQSPQGPDSSSGIGKTGQQPAKKRLNFGQTGDSESVPDPQPLGEPPATPAAVGPTTMASGGGAPMADNNEGADGVGNASGNWHCDSTWLGDRVITTSTRTWALPTYNNHLYKQISSASTGASNDNHYFGYSTPWGYFDFNRFHCHFSPRDWQRLINNNWGFRPKRLNFKLFNIQVKEVTTNDGVTTIANNLTSTVQVFSDSEYQLPYVLGSAHQGCLPPFPADVFMIPQYGYLTLNNGSQAVGRSSFYCLEYFPSQMLRTGNNFTFSYTFEEVPFHSSYAHSQSLDRLMNPLIDQYLYYPNRTQNQSGSAQNKDLLFSRGSPAGMSVQPKNWLPGPCYRQQRVSKTKTDNNNSNFTWTGASKYNLNGRESIINPGTAMASHKDDEDKFFPMSGVMIFGKESAGASNTALDNVMITDEEEIKATNPVATERFGTVAVNFQSSSTDPATGDVHAMGALPGMVWQGRDVYLQGPIWAKIPHTDGHFHPSPLMGGFGLKNPPPQILIKNTPVPANPPAEFSATKFASFITQYSTGQVSVEIEWELQKENSKRWNPEVQYTSNYAKSANVDFTVDNNGLYTEPRPIGTRYLTRPL

SEQ ID NO: 4922 - DNA, 2211 bp, Adeno-associated virus
atggctgccgatggttatcttccagattggctcgaggacactctctctgaaggaataagacagtggtggaagctcagacctggcccaccaccaccaaagcccgcagagcggcataaggacgacagcaggggtcttgtgcttcctgggtacaagtacctcggacccttcaacggactcgacaagggagagccggtcaacgaggcagacgccgcggccctcgagcacgacaaagcctacgaccggcagctcgacagcggagacaacccgtacctcaagtacaaccacgccgacgcggagtttcaggagcgccttaaagaagatacgtcttttgggggcaacctcgggcgagcagtcttccaggccaagaagcgggttctcgaacctctcggtctggttgaggaaggcgctgagacggctcctggaaagaaacgtccggtagagcagtcgccacaagggccagactcctcctcgggcatcggcaagacaggccagcagcccgctaaaaagagactcaattttggtcagactggcgactcagagtcagtccccgatccacaacctctcggagaacctccagcaacccccgctgctgtgggacctactacaatggcttcaggcggtggcgcaccaatggcagacaataacgaaggcgccgacggagtgggtaatgcctcaggaaattggcattgcgattccacatggctgggcgacagagtcatcaccaccagcacccgcacctgggccttgcccacctacaataaccacctctacaagcaaatctccagtgcttcaacgggggccagcaacgacaaccactacttcggctacagcaccccctgggggtattttgatttcaacagattccactgccacttttcaccacgtgactggcagcgactcatcaacaacaattggggattccggcccaagagactcaacttcaaactcttcaacatccaagtcaaggaggtcacgacgaatgatggcgtcacaaccatcgctaataaccttaccagcacggttcaagtcttctcggactcggagtaccagcttccgtacgtcctcggctctgcgcaccagggctgcctccctccgttcccggcggacgtgttcatgattccgcaatacggctacctgacgctcaacaatggcagccaagccgtgggacgttcatccttttactgcctggaatatttcccttctcagatgctgagaacgggcaacaactttaccttcagctacacctttgaggaagtgcctttccacagcagctacgcgcacagccagagcctggaccggctgatgaatcctctcatcgaccaatacctgtattacccgaacagaactcaaaatcagtccggaagtgcccaaaacaaggacttgctgtttagccgtgggtctccagctggcatgtctgttcagcccaaaaactggctacctggaccctgttatcggcagcagcgcgtttctaaaacaaaaacagacaacaacaacagcaattttacctggactggtgcttcaaaatataacctcaatgggcgtgaatccatcatcaaccctggcactgctatggcctcacacaaagacgacgaagacaagttctttcccatgagcggtgtcatgatttttggaaaagagagcgccggagcttcaaacactgcattggacaatgtcatgattacagacgaagaggaaattaaagccactaaccctgtggccaccgaaagatttgggaccgtggcagtcaatttccagagcagcagcacagaccctgcgaccggagatgtgcatgctatgggagcattacctggcatggtgtggcaaggtagagacgtgtacctgcagggtcccatttgggccaaaattcctcacacagatggacactttcacccgtctcctcttatgggcggctttggactcaagaacccgcctcctcagatcctcatcaaaaacacgcctgttcctgcgaatcctccggcggagttttcagctacaaagtttgcttcattcatcacccaatactccacaggacaagtgagtgtggaaattgaatgggagctgcagaaagaaaacagcaagcgctggaatcccgaagtgcagtacacatccaattatgcaaaatctgccaacgttgattttactgtggacaacaatggactttatactgagcctcgccccattggcacccgttaccttacccgtcccctgtaa

SEQ ID NO: 4923 - protein, 736 aa, Adeno-associated virus
MAADGYLPDWLEDTLSEGIRQWWKLRPGPPPPKPAERHKDDSRGLVLPGYKYLGPFNGLDKGEPVNEADAAALEHDKAYDRQLDSGDNPYLKYNHADAEFQERLKEDTSFGGNLGRAVFQAKKRVLEPLGLVEEGAKTAPGKKRPVEQSPQGPDSSSGIGKTGQQPAKKRLNFGQTGDSESVPDPQPLGEPPATPAAVGPTTMASGGGAPMADNNEGADGVGNASGNWHCDSTWLGDRVITTSTRTWALPTYNNHLYKQISSASTGASNDNHYFGYSTPWGYFDFNRFHCHFSPRDWQRLINNNWGFRPKRLNFKLFNIQVKEVTTNDGVTTIANNLTSTVQVFSDSEYQLPYVLGSAHQGCLPPFPADVFMIPQYGYLTLNNGSQAVGRSSFYCLEYFPSQMLRTGNNFTFSYTFEEVPFHSSYAHSQSLDRLMNPLIDQYLYYPNRTQNQSGSAQNKDLLFSRGSPAGMSVQPKNWLPGPCYRQQRVSKTKTDNNNSNFTWTGASKYNLNGRESIINPGTAMASHKDDEDKFFPMSGVMIFGKESAGASNTALDNVMITDEEEIKATNPVATERFGTVAVNFQSSSTDPATGDVHAMGALPGMVWQGRDVYLQGPIWAKIPHTDGHFHPSPLMGGFGLKNPPPQILIKNTPVPANPPAEFSATKFASFITQYSTGQVSVEIEWELQKENSKRWNPEVQYTSNYAKSANVDFTVDNNGLYTEPRPIGTRYLTRPL

SEQ ID NO: 4924 - protein, 736 aa, Adeno-associated virus
MAADGYLPDWLEDTLSEGIRQWWKLRPGPPPPKPAERHKDDSRGLVLPGYKYLGPFNGLDKGEPVNEADAAALEHDKAYDRQLDSGDNPYLKYNHADAEFQERLKEDTSFGGNLGRAVFQAKKRVLEPLGLVEEGAKTAPGKKRPVEQSPQGPDSSSGIGKTGQQPAKKRLNFGQTGDSESVPDPQPLGEPPATPAAVGPTTMASGGGAPMADNNEGADGVGNASGNWHCDSTWLGDRVITTSTRTWALPTYNNHLYKQISSASTGASNDNHYFGYSTPWGYFDFNRFHCHFSPRDWQRLINNNWGFRPKRLNFKLFNIQVKEVTTNDGVTTIANNLTSTVQVFSDSEYQLPYVLGSAHQGCLPPFPADVFMIPQYGYLTLNNGSQAVGRSSFYCLEYFPSQMLRTGNNFTFSYTFEEVPFHSSYAHSQSLDRLMNPLIDQYLYYLNRTQNQSGSAQNKDLLFSRGSPAGMSVQPKNWLPGPCYRQQRVSKTKTDNNNSNFTWTGASKYNLNGRESIINPGTAMASHKDDEDKFFPMSGVMIFGKESAGASNTALDNVMITDEEEIKATNPVATERFGTVAVNFQSSSTDPATGDVHAMGALPGMVWQGRDVYLQGPIWAKIPHTDGHFHPSPLMGGFGLKNPPPQILIKNTPVPANPPAEFSATKFASFITQYSTGQVSVEIEWELQKENSKRWNPEVQYTSNYAKSANVDFTVDNNGLYTEPRPIGTRYLTRPL

SEQ ID NO: 4925 - protein, 736 aa, Adeno-associated virus
MAADGYLPDWLEDTLSEGIRQWWKLRPGPPPPKPAERHKDDSRGLVLPGYKYLGPFNGLDKGEPVNEADAAALEHDKAYDRQLDSGDNPYLKYNHADAEFQERLKEDTSFGGNLGRAVFQAKKRVLEPLGLVEEGAKTAPGKKRPVEQSPQGPDSSSGIGKTGQQPAKKRLNFGQTGDSESVPDPQPLGEPPATPAAVGPTTMASGGGAPMADNNEGADGVGNASGNWHCDSTWLGDRVITTSTRTWALPTYNNHLYKQISSASTGASNDNHYFGYSTPWGYFDFNRFHCHFSPRDWQRLINNNWGFRPKRLNFKLFNIQVKEVTTNDGVTTIANNLTSTVQVFSDSEYQLPYVLGSAHQGCLPPFPADVFMIPQYGYLTLNNGSQAVGRSSFYCLEYFPSQMLRTGNNFTFSYTFEEVPFHSSYAHSQSLDRLMNPLIDQYLYYLNRTQNQSGSAQNKDLLFSRGSPAGMSVQPKNWLPGPCYRQQRVSKTKTDNNNSNFTWTGASKYNLNGRESIINPGTAMASHKDDEDKFFPMSGVMIFGKESAGASNTALDNVMITDEEEIKATNPVATERFGTVAVNFQSSSTDPATGDVHAMGALPGMVWQDRDVYLQGPIWAKIPHTDGHFHPSPLMGGFGLKNPPPQILIKNTPVPANPPAEFSATKFASFITQYSTGQVSVEIEWELQKENSKRWNPEVQYTSNYAKSANVDFTVDNNGLYTEPRPIGTRYLTRPL

SEQ ID NO: 4926 - DNA, 2208 bp, Adeno-associated virus
atggctgccgatggctatcttccagattggctcgaggacactctctctgaaggaataagacagtggtggaagctcaaacctggcccaccaccaccaaagcccgcagagcggcatagggacgacagcaggggtcttgtgcttcctgggtacaagtacctcggacccttcaacggactcgacaagggagagccggtcaacgaggcagacgccgcggccctcgagcacgacaaagcctacgaccggcagctcgacagcggagacaacccgtacctcaagtacaaccacgccgacgcggagtttcaggagcgccttaaagaagatacgtcttttgggggcaacctcggacgagcagtcttccaggcgaaaaagagggttcttgaacctctgggcctggttgaggaacctgttaagacggctccgggaaaaaagaggccggtagagcactctcctgtggagccagactcctcctcgggaaccggaaaggcgggccagcagcctgcaagaaaaagattgaattttggtcagactggagacgcagactcagtacctgacccccagcctctcggacagccaccagcagccccctctggtctgggaactaatacgatggctacaggcagtggcgcaccaatggcagacaataacgagggcgccgacggagtgggtaattcctcgggaaattggcattgcgattccacatggatgggcgacagagtcatcaccaccagcacccgaacctgggccctgcccacctacaacaaccacctctacaaacaaatttccagccaatcaggagcctcgaacgacaatcactactttggctacagcaccccttgggggtattttgacttcaacagattccactgccacttttcaccacgtgactggcaaagactcatcaacaacaactggggattccgacccaagagactcaacttcaagctctttaacattcaagtcaaagaggtcacgcagaatgacggtacgacgacgattgccaataaccttaccagcacggttcaggtgtttactgactcggggtaccagctcccgtacgtcctcggctcggcgcatcaaggatgcctcccgccgttcccagcagacgtcttcatggtgccacagtatggataccccaccctgaacaacgggagtcaggcagtaggacgctcttcattttactgcctggagtactttccttctcagatgctgcgtaccggaaacaactttaccttcagctacacttttgaggacgttcctttccacagcagctacgctcacagccagagtctggaccgtctcatgaatcctctcatcgaccagtacctgtattacttgagcacaacaaacactccaagtggaaccaccacgcagtcaaggcttcagttttctcaggccggagcgagtgacattcgggaccagtctaggaactggcttcctggaccctgttaccgccagcagcgagtatcaaagacatctgcggataacaacaacagtgaatactcgtggactggagctaccaagtaccacctcaatggcagagactctctggtgaatccgggcccggccgtggcaagccacaaggacgatgaagaaaagttttttcctcagagcggggttctcatctttgggaagcaaggctcagagaaaacaaatgtggacattgaaaaggtcatgattacagacgaagaggaaatcaggacaaccaatcccgtggctacggagcagtatggttctgtatctaccaacctccagagaggcaacagacaagcagctaccgcagatgtcaacacacaaggcgttcttccaggcatggtctggcaggacagagatgtgtaccttcaggggcccatctgggcaaagattccacacacggacggacattttcacccctctcccctcatgggtggattcggacttaaacaccctcctccacagattctcatcaagaacaccccggtacctgcgaatccttcgaccaccttcagtgcggcaaagtttgcttccttcatcacacagtactccacgggacaggtcagcgtggagatcgagtgggagctgcagaaggaaaacagcaaacgctggaatcccgaaattcagtacacttccaactacaacaagtctgttaatgtggactttactgtggacactaatggcgtgtattcagagcctcgccccattggcaccagatacctgactcgtaatctgtaa

SEQ ID NO: 4927 - protein, 735 aa, Adeno-associated virus
MAADGYLPDWLEDTLSEGIRQWWKLKPGPPPPKPAERHRDDSRGLVLPGYKYLGPFNGLDKGEPVNEADAAALEHDKAYDRQLDSGDNPYLKYNHADAEFQERLKEDTSFGGNLGRAVFQAKKRVLEPLGLVEEPVKTAPGKKRPVEHSPVEPDSSSGTGKAGQQPARKRLNFGQTGDADSVPDPQPLGQPPAAPSGLGTNTMATGSGAPMADNNEGADGVGNSSGNWHCDSTWMGDRVITTSTRTWALPTYNNHLYKQISSQSGASNDNHYFGYSTPWGYFDFNRFHCHFSPRDWQRLINNNWGFRPKRLNFKLFNIQVKEVTQNDGTTTIANNLTSTVQVFTDSGYQLPYVLGSAHQGCLPPFPADVFMVPQYGYPTLNNGSQAVGRSSFYCLEYFPSQMLRTGNNFTFSYTFEDVPFHSSYAHSQSLDRLMNPLIDQYLYYLSTTNTPSGTTTQSRLQFSQAGASDIRDQSRNWLPGPCYRQQRVSKTSADNNNSEYSWTGATKYHLNGRDSLVNPGPAVASHKDDEEKFFPQSGVLIFGKQGSEKTNVDIEKVMITDEEEIRTTNPVATEQYGSVSTNLQRGNRQAATADVNTQGVLPGMVWQDRDVYLQGPIWAKIPHTDGHFHPSPLMGGFGLKHPPPQILIKNTPVPANPSTTFSAAKFASFITQYSTGQVSVEIEWELQKENSKRWNPEIQYTSNYNKSVNVDFTVDTNGVYSEPRPIGTRYLTRNL

SEQ ID NO: 4928 - DNA, 2211 bp, Adeno-associated virus
atggctgccgacggttatcttccagattggctcgaggacactctctctgaaggaataagacagtggtggaagctcaaacctggcccaccaccaccaaagcccgcagagcggcataaggacgacagcaggggtcttgtgcttcctgggtacaagtacctcggacccttcaacggactcgacaagggagagccggtcaacgaggcagacgccgcggccctcgagcacgacaaagcctacgaccggcagctcgacagcggagacaacccgtacctcaagtacaaccacgccgacgcggagtttcaggagcgccttaaagaagatacgtcttttgggggcaacctcgggcgggcagtcttccaggccaagaagcgggttctcgaacctctcggtctggttgaggaaggcgctaagacggctcctggaaagaaacgtccggtagagcagtcgccacaagagccagactccccctcgggcatcggcaagacaggccagcagcccgctaaaaagagactcaattttggtcagactggcgactcagagtcagtccccgatccacaacctctcggagaacctccagcaacccccgctgctgtgggacctactacaatggcttcaggcggtggcgcaccaatggcagacaataacgaaggcgccgacggagtgggtaatgcctcaggaaattggcactgcgattccacatggctgggcgacagagtcatcaccaccagcacccgcacctgggccttgcccacctacaataaccacctctacaagcaaatctccagtgcttcaacgggggccagcaacgacaaccactacttcggctacagcaccccctgggggtattttgatttcaacagattccactgccacttttcaccacgtgactggcagcgactcatcaacaacaattggggattccggcccaagagactcaacttcaaactcttcaacatccaagtcaaggaggtcacgacgaatgatggcgtcacaaccatcgctaataaccttaccagcacggttcaagtcttctcggactcggagtaccagcttccgtacgtcctcggctctgcgcaccagggccgcctccctccgttcccggcggacgtgttcatgattccgcaatacggctacctgacgctcaacaatggcagccaagccgtgggacgttcatcctcttactgcctggaatatttcccttctcagatgctgagaacgggcaacaactttaccttcagctacacctttgaggaagtgcctctccacagcagctgcgcgcacagccagagcctggaccggctgatgaatcctctcatcgaccaatacctgtattacctgaacagaactcaaaatcagtccggaagtgcccaaaacagggacttgctgttcagccgtgggtctccagctggcatgtctgttcagcccaaaaactggctacctggaccctgttatcggcagcagcgcgtttctaaaacaaaaacagacaacaacaacagcaattttacctggactggtgcttcaaaatataacctcaatgggcgtgaatccatcatcaaccctggcactgctatggcctcacacaaagacgacgaagacaagttctttcccatgagcggtgtcatgatttttggaaaagagagcgccggagcttcaaacactgcattggacaatgtcatgattacagacgaagaggaaattaaagccactaaccctgtggccaccgaaagatttgggaccgtggcagtcaatttccagagcagcagcacagaccctgcgaccggagatgtgcatgctatgggagcattacctggcatggtgtggcaagatagagacgtgtacctgcagggtcccatttgggccaaaattcctcacacagatggacactttcacccgtctcctcttatgggcggctttggactcaagaacccgcctcctcagatcctcatcaaaaacacgcctgttcctgcgaatcctccggcggagttttcagctacaaagtttgcttcattcatcacccaatactccgcaggacaagtgagtgtggaaattgaatgggagctgcagaaagaaaacagcaagcgctggaatcccgaagtgcagtacacatccaattatgcaaaatctgccaacgttgattttactgtggacaacaatggactttatactgagcctcgccccattggcacccgttaccttacccgtcccctgtaa

SEQ ID NO: 4929 - protein, 736 aa, Adeno-associated virus
MAADGYLPDWLEDTLSEGIRQWWKLKPGPPPPKPAERHKDDSRGLVLPGYKYLGPFNGLDKGEPVNEADAAALEHDKAYDRQLDSGDNPYLKYNHADAEFQERLKEDTSFGGNLGRAVFQAKKRVLEPLGLVEEGAKTAPGKKRPVEQSPQEPDSPSGIGKTGQQPAKKRLNFGQTGDSESVPDPQPLGEPPATPAAVGPTTMASGGGAPMADNNEGADGVGNASGNWHCDSTWLGDRVITTSTRTWALPTYNNHLYKQISSASTGASNDNHYFGYSTPWGYFDFNRFHCHFSPRDWQRLINNNWGFRPKRLNFKLFNIQVKEVTTNDGVTTIANNLTSTVQVFSDSEYQLPYVLGSAHQGRLPPFPADVFMIPQYGYLTLNNGSQAVGRSSSYCLEYFPSQMLRTGNNFTFSYTFEEVPLHSSCAHSQSLDRLMNPLIDQYLYYLNRTQNQSGSAQNRDLLFSRGSPAGMSVQPKNWLPGPCYRQQRVSKTKTDNNNSNFTWTGASKYNLNGRESIINPGTAMASHKDDEDKFFPMSGVMIFGKESAGASNTALDNVMITDEEEIKATNPVATERFGTVAVNFQSSSTDPATGDVHAMGALPGMVWQDRDVYLQGPIWAKIPHTDGHFHPSPLMGGFGLKNPPPQILIKNTPVPANPPAEFSATKFASFITQYSAGQVSVEIEWELQKENSKRWNPEVQYTSNYAKSANVDFTVDNNGLYTEPRPIGTRYLTRPL

SEQ ID NO: 4930 - protein, 736 aa, Adeno-associated virus
MAADGYLPDWLEDTLSEGIRQWWKLKPGPPPPKPAERHKDDSRGLVLPGYKYLGPFNGLDKGEPVNEADAAALEHDKAYDRQLDSGDNPYLKYNHADAEFQERLKEDTSFGGNLGRAVFQAKKRVLEPLGLVEEGAKTAPGKKRPVEQSPQEPDSSSGIGKTGQQPAKKRLNFGQTGDSESVPDPQPLGEPPATPAAVGPTTMASGGGAPMADNNEGADGVGNASGNWHCDSTWLGDRVITTSTRTWALPTYNNHLYKQISSASTGASNDNHYFGYSTPWGYFDFNRFHCHFSPRDWQRLINNNWGFRPKRLNFKLFNIQVKEVTTNDGVTTIANNLTSTVQVFSDSEYQLPYVLGSAHQGCLPPFPADVFMIPQYGYLTLNNGSQAVGRSSFYCLEYFPSQMLRTGNNFTFSYTFEEVPLHSSCAHSQSLDRLMNPLIDQYLYYLNRTQNQSGSAQNRDLLFSRGSPAGMSVQPKNWLPGPCYRQQRVSKTKTDNNNSNFTWTGASKYNLNGRESIINPGTAMASHKDDEDKFFPMSGVMIFGKESAGASNTALDNVMITDEEEIKATNPVATERFGTVAVNFQSSSTDPATGDVHAMGALPGMVWQDRDVYLQGPIWAKIPHTDGHFHPSPLMGGFGLKNPPPQILIKNTPVPANPPAEFSATKFASFITQYSTGQVSVEIEWELQKENSKRWNPEVQYTSNYAKSANVDFTVDNNGLYTEPRPIGTRYLTRPL

SEQ ID NO: 4931 - DNA, 2208 bp, Adeno-associated virus
atggctgccgatggctatcttccagattggctcgaggacactctctctgaaggaataagacagtggtggaagctcaaacctggcccaccaccaccaaagcccgcagagcggcatagggacgacagcaggggtcttgtgcttcctgggtacaagtacctcggacccttcaacggactcgacaagggagagccggtcaacgaggcagacgccgcggccctcgagcacgacaaagcctacgaccggcagctcgacagcggagacaacccgtacctcaagtacaaccacgccgacgcggagtttcaggagcgccttaaagaagatacgtcttttgggggcaacctcggacgagcagtcttccaggcgaaaaagagggttcttgaacctctgggcctggttggggaacctgttaagacggctccgggaaaaaagaggccggtagagcactctcctgtggagccagactcctcctcgggaaccggaaaggcgggccagcagcctgcaagaaaaagattgaattttggtcagactggagacgcagactcagtacctgacccccagcctctcggacagccaccagcagccccctctggtctgggaactaatacgatggctacaggcagtggcgcaccaatggcagacaataacgagggcgccgacggagtgggtaattcctcgggaaattggcattgcgattccacatggatgggcgacagagtcatcaccaccagcacccgaacctgggccctgcccacctacaacaaccacctctacaaacaaatttccagccaatcaggagcctcgaacgacagtcactactttggctacagcaccccttgggggtattttgacttcaacagattccactgccacttttcaccacgtgactggcaaagactcatcaacaacaactggggattccgacccaagagactcaacttcaagctctttaacattcaagtcaaagaggtcacgcagaatgacggtacgacgacgattgccaataaccttaccagcacggttcaggtgtttactgactcggagtaccagctcccgtacgtcctcggctcggcgcatcaaggatgcctcccgccgttcccagcagacgtcttcatggtgccacagtatggatacctcaccctgaacaacgggagtcaggcagtaggacgctcttcattttactgcctggagtactttccttctcagatgctgcgtaccggaaacaactttaccttcagctacacttttgaggacgttcctttccacagcagctacgctcacagccagagtctggaccgtctcatgaatcctctcatcgaccagtacctgtattacttgagcacaacaaacactccaagtggaaccaccacgcagtcaaggctccagttttctcaggccggagcgagtgacattcgggaccagtctaggaactggcttcctggaccctgttaccgccagcagcgagtatcaaagacatctgcggataacaacaacagtgaatactcgtggactggagctaccaagtaccacctcaatggcagagactctctggtgaatccgggcccggccatggcaagccacaaggacaatgaagaaaagttttttcctcagagcggggttctcatctttgggaagcaaggctcagagaaaacaaatgtggacattgaaaaggtcatgattacagacgaagaggaaatcaggacaaccaatcccgtggctacggagcagtatggttctgtatctaccaacctccagagaggcaacagacaagcagctaccgcagatgtcaacacacaaggcgttcttccaggcatggtctggcaggacagagatgtgtaccttcaggggcccatctgggcaaagattccacacacggacggacattttcacccctctcccctcatgggtggattcggacttaaacaccctcctccacagattctcatcaagaacaccccggtacctgcgaatccttcgaccaccttcagtgcggcaaagtttgcttccttcatcacacagtactccacgggacaggtcagcgtggagatcgagtgggagctgcagaaggaaaacagcaaacgctggaatcccgaaattcagtacacttccaactacaacaagtctgttaatgtggactttactgtggacactaatggcgtgtattcagagcctcgccccattggcaccagatacctgactcgtaatctgtaa

SEQ ID NO: 4932 - protein, 735 aa, Adeno-associated virus
MAADGYLPDWLEDTLSEGIRQWWKLKPGPPPPKPAERHRDDSRGLVLPGYKYLGPFNGLDKGEPVNEADAAALEHDKAYDRQLDSGDNPYLKYNHADAEFQERLKEDTSFGGNLGRAVFQAKKRVLEPLGLVGEPVKTAPGKKRPVEHSPVEPDSSSGTGKAGQQPARKRLNFGQTGDADSVPDPQPLGQPPAAPSGLGTNTMATGSGAPMADNNEGADGVGNSSGNWHCDSTWMGDRVITTSTRTWALPTYNNHLYKQISSQSGASNDSHYFGYSTPWGYFDFNRFHCHFSPRDWQRLINNNWGFRPKRLNFKLFNIQVKEVTQNDGTTTIANNLTSTVQVFTDSEYQLPYVLGSAHQGCLPPFPADVFMVPQYGYLTLNNGSQAVGRSSFYCLEYFPSQMLRTGNNFTFSYTFEDVPFHSSYAHSQSLDRLMNPLIDQYLYYLSTTNTPSGTTTQSRLQFSQAGASDIRDQSRNWLPGPCYRQQRVSKTSADNNNSEYSWTGATKYHLNGRDSLVNPGPAMASHKDNEEKFFPQSGVLIFGKQGSEKTNVDIEKVMITDEEEIRTTNPVATEQYGSVSTNLQRGNRQAATADVNTQGVLPGMVWQDRDVYLQGPIWAKIPHTDGHFHPSPLMGGFGLKHPPPQILIKNTPVPANPSTTFSAAKFASFITQYSTGQVSVEIEWELQKENSKRWNPEIQYTSNYNKSVNVDFTVDTNGVYSEPRPIGTRYLTRNL

SEQ ID NO: 4933 - protein, 737 aa, Adeno-associated virus
RMAADGYLPDWLEDNLSEGIREWWDLKPGAPKPKANQQKQDDGRGLVLPGYKYLGPFNGLDKGEPVNAADAAALEHDKAYDQQLKAGDNPYLRYNHADAEFQERLQEDTSFGGNLGRAVFQAKKRVLEPLGLVEEGAKTAPGKKRPVEQSPQEPDSSSGIGKTGQQPAKKRLNFGQTGDSESVPDPQPLGEPPATPAAVGPTTMASGGGAPMADNNEGADGVGNASGNWHCDSTWLGDRVITTSTRTWALPTYNNHLYKQISSTSTGASNDNHYFGYGTPWGYFDFNRFHCHFSPRDWQRLINNNWGFRPKRLNFKLFNIQVEEVTTNDGVTTIANNLTSTVQVFSDSEYQLPYVLGSAHQGCLPPFPADVFMIPQYGYLTLNNGSQAVGRSSFYCLEYFPSQMLRTGNNFTFSYTFEEVPFHSSYAHSQSLDRLMNPLIDQYLYYLNRTQNQSGSAQNKDLLFSRGSPAGMSVQPKNWLPGPCYRQQRVSKTKTDNNNSNFTWTGASKYNLNGRESIINPGTAVASHKDDEDKFFPMSGVMIFGKESAGASSTALDNVMITDEEEIKATNPVATERFGTVAVNFQSSSTDPATGDVHAMGALPGMVWQDRDVYLQGPIWAKIPHTDGHFHPSPLMGGFGLKNPPPQILIKNTPVPANPPAEFSATKFASFITQYSTGQVSVEIEWELQKENSKRWNPEVQYTSNYAKSANVDFTVDNNGLYTEPRPIGTRYLTRPL

SEQ ID NO: 4934 - protein, 736 aa, Adeno-associated virus
MAADGYLPDWLEDNLSEGIREWWDLKPGAPKPKANQQKQDDGRGLVLPGYKYLGPFNGLDKGEPVNAADAAALEHDKAYDQQLKAGDNPYLRYNHADAEFQERLQEDTSFGGNLGRAVFQAKKRVLEPLGLVEEGAKTAPGKKRPVEQSPQEPDSSSGIGKTGQQPAKKRLNFGQTGDSESVPDPQPLGEPPATPAAVGPTTMASGGGAPMADNNEGADGVGNASGNWHCDSTWLGDRVITTSTRTWALPTYNNHLYKQISSTSTGASNDNHYFGYGTPWGYFDFNRFHCHFSPRDWQRLINNNWGFRPKRLNFKLFNIQVEEVTTNDGVTTIANNLTSTVQVFSDSEYQLPYVLGSAHQGCLPPFPADVFMIPQYGYLTLNNGSQAVGRSSFYCLEYFPSQMLRTGNNFTFSYTFEEVPFHSSYAHSQSLDRLMNPLIDQYLYYLNRTQNQSGSAQNKDLLFSRGSPAGMSVQPKNWLPGPCYRQQRVSKTKTDNNNSNFTWTGASKYNLNGRESIINPGTAVASHKDDEDKFFPMSGVMIFGKESAGASSTALDNVMITDEEEIKATNPVATERFGTVAVNFQSSSTDPATGDVHAMGALPGMVWQDRDVYLQGPIWAKIPHTDGHFHPSPLMGGFGLKNPPPQILIKNTPVPANPPAEFSATKFASFITQYSTGQVSVEIEWELQKENSKRWNPEVQYTSNYAKSANVDFTVDNNGLYTEPRPIGTRYLTRPL

SEQ ID NO: 4935 - DNA, 2211 bp, Adeno-associated virus
atggctgccgatggttatcttccagattggctcgaggacaacctctctgagggcattcgcgagtggtgggacttgaaacctggagccccgaagcccaaagccaaccagcaaaagcaggacgacggccggggtctggtgcttcctggctacaagtacctcggacccttcaacggactcgacaagggggagcccgtcaacgcggcggacgcagcggccctcgagcacgacaaggcctacgaccagcagctcaaagcgggtgacaatccgtacctgcggtataaccacgccgacgccgagtttcaggagcgtctgcaagaagatacgtcttttgggggcaacctcgggcgagcagtcttccaggccaagaagcgggttctcgaacctctcggtctggttgaggaaggcgctaagacggctcctggaaagaaacgtccggtagagcagtcgccacaagagccagactcctcctcgggcatcggcaagacaggccagcagcccgctaaaaagagactcaattttggccagactggcgactcagagtcagtccccgatccacaacctctcggagaacctccagcaacccccgctgctgtgggacctactacaatggcttcaggcggtggcgcaccaatggcagacaataacgaaggcgccgacggagtgggtaatgcctcaggaaattggcattgcgattccacatggctgggcgacagagtcatcaccaccagcacccgcacctgggccttgcccacctacaataaccacctctacaagcaaatctccagtacttcaacgggggccagcaacgacaaccactacttcggctacggcaccccctgggggtattttgatttcaacagattccactgccacttttcaccacgtgactggcagcgactcatcaacaacaattggggattccggcccaagagactcaacttcaaactcttcaacatccaagtcgaggaggtcacgacgaatgatggcgtcacaaccatcgctaataaccttaccagcacggttcaagtcttctcggactcggagtaccagcttccgtacgtcctcggctctgcgcaccagggctgcctccctccgttcccggcggacgtgttcatgattccgcaatacggctacctgacgctcaacaatggcagccaagccgtgggacgttcatccttttactgcctggaatatttcccttctcagatgctgagaacgggcaacaactttaccttcagctacacctttgaggaagtgcctttccacagcagctacgcgcacagccagagcctggaccggctgatgaatcctctcatcgaccaatacctgtattacctgaacagaacacaaaatcagtccggaagtgcccaaaacaaggacttgctgtttagccgtgggtctccagctggcatgtctgttcagcccaaaaactggctacctggaccctgttatcggcagcagcgcgtttctaaaacaaaaacagacaacaacaacagcaattttacctggactggtgcttcaaaatataacctcaatgggcgtgaatccatcatcaaccctggcaccgctgtggcctcacacaaagacgacgaagacaagttctttcccatgagcggtgtcatgatttttggaaaagagagcgccggagcttcaagcactgcattggacaatgtcatgattacagacgaagaggaaattaaagccactaaccctgtggccaccgaaagatttgggaccgtggcagtcaatttccagagcagcagcacagaccctgcgaccggagatgtgcatgctatgggagcattacctggcatggtgtggcaagatagagacgtgtacctgcagggtcccatttgggccaaaattcctcacacagatggacactttcacccgtctcctcttatgggcggctttggactcaagaacccgcctcctcagatcctcatcaaaaacacgcctgttcctgcgaatcctccggcggagttttcagctacaaagtttgcttcattcatcacccaatactccacaggacaagtgagtgtggaaattgaatgggagctgcagaaagaaaacagcaagcgctggaatcccgaagtgcagtacacatccaattatgcaaaatctgccaacgttgattttactgtggacaacaatggactttatactgagcctcgccccattggcacccgttaccttacccgtcccctgtaa

SEQ ID NO: 4936 - protein, 737 aa, Adeno-associated virus
RMAADGYLPDWLEDNLSEGIREWWDLKPGAPKPKANQQKQDDGRGLVLPGYKYLGPFNGLDKGEPVNAADAAALEHDKAYDQQLKAGDNPYLRYNHADAEFQERLQEDTSFGGNLGRAVFQAKKRVLEPLGLVEEGAKTAPGKKRPVEQSPQEPDSSSGIGKTGQQPAKKRLNFGQTGDSESVPDPQPLGEPPATPAAVGPTTMASGGGAPMADNNEGADGVGNASGNWHCDSTWLGDRVITTSTRTWALPTYNNHLYKQISSTSTGASNDNHYFGYSTPWGYFDFNRFHCHFSPRDWQRLINNNWGFRPKRLNFKLFNIQVEEVTTNDGVTTIANNLTSTVQVFSDSEYQLPYVLGSAHQGCLPPFPADVFMIPQYGYLTLNNGSQAVGRSSFYCLEYFPSQMLRTGNNFTFSYTFEEVPFHSSYAHSQSLDRLMNPLIDQYLYYLNRTQNQSGSAQNKDLLFSRGSPAGMSVQPKNWLPGPCYRQQRVSKTKTDNNNSNFTWTGASKYNLNGRESIINPGTAVASHKDDEDKFFPMSGVMIFGKESAGASSTALDNVMITDEEEIKATNPVATERFGTVAVNFQSSSTDPATGDVHAMGALPGMVWQDRDVYLQGPIWAKIPHTDGHFHPSPLMGGFGLKNPPPQILIKNTPVPANPPAEFSATKFASFITQYSTGQVSVEIEWELQKENSKRWNPEVQYTSNYAKSANVDFTVDNNGLYTEPRPIGTRYLTRPL

SEQ ID NO: 4937 - protein, 737 aa, Adeno-associated virus
RMAADGYLPDWLEDNLSEGIREWWDLKPGAPKPKANQQKQDDGRGLVLPGYKYLGPFNGLDKGEPVNAADAAALEHDKAYDQQLKAGDNPYLRYNHADAEFQERLQEDTSFGGNLGRAVFQAKKRVLEPLGLVEEGAKTAPGKKRPVEQSPQEPDSSSGIGKTGQQPAKKRLNFGQTGDSESVPDPQPLGEPPATPAAVGPTTMASGGGAPMADNNEGADGVGNASGNWHCDSTWLGDRVITTSTRTWALPTYNNHLYKQISSTSTGASNDNHYFGYSTPWGYFDFNRFHCHFSPRDWQRLINNNWGFRPKRLNFKLFNIQVKEVTTNDGVTTIANNLTSTVQVFSDSEYQLPYVLGSAHQGCLPPFPADVFMIPQYGYLTLNNGSQAVGRSSFYCLEYFPSQMLRTGNNFTFSYTFEEVPFHSSYAHSQSLDRLMNPLIDQYLYYLNRTQNQSGSAQNKDLLFSRGSPAGMSVQPKNWLPGPCYRQQRVSKTKTDNNNSNFTWTGASKYNLNGRESIINPGTAVASHKDDEDKFFPMSGVMIFGKESAGASSTALDNVMITDEEEIKATNPVATERFGTVAVNFQSSSTDPATGDVHAMGALPGMVWQDRDVYLQGPIWAKIPHTDGHFHPSPLMGGFGLKNPPPQILIKNTPVPANPPAEFSATKFASFITQYSTGQVSVEIEWELQKENSKRWNPEVQYTSNYAKSANVDFTVDNNGLYTEPRPIGTRYLTRPL

SEQ ID NO: 4938 - protein, 737 aa, Adeno-associated virus
RMAADGYLPDWLEDNLSEGIREWWDLKPGAPKPKANQQKQDDGRGLVLPGYKYLGPFNGLDKGEPVNAADAAALEHDKAYDQQLKAGDNPYLRYNHADAEFQERLQEDTSFGGNLGRAVFQAKKRVLEPLGLVEEGAKTAPGKKRPVEQSPQEPDSSSGIGKTGQQPAKKRLNFGQTGDSESVPDPQPLGEPPATPAAVGPTTMASGGGAPMADNNEGADGVGNASGNWHCDSTWLGDRVITTSTRTWALPTYNNHLYKQISSTSTGASNDNHYFGYSTPWGYFDFNRFHCHFSPRDWQRLINNNWGFRPKRLNFKLFNIQVKEVTTNDGVTTIANNLTSTVQVFSDSEYQLPYVLGSAHQGCLPPFPADVFMIPQYGYLTLNNGSQAVGRSSFYCLEYFPSQMLRTGNNFTFSYTFEEVPFHSSYAHSQSLDRLMNPLIDQYLYYLNRTQNQSGSAQNKDLLFSRGSPAGMSVQPKNWLPGPCYRQQRVSKTKTDNNNSNFTWTGASKYNLNGRESIINPGTAVASHKDDEDKFFPMSGVMIFGKESAGANSTALDNVMITDEEEIKATNPVATERFGTVAVNFQSSSTDPATGDVHAMGALPGMVWQDRDVYLQGPIWAKIPHTDGHFHPSPLMGGFGLKNPPPQILIKNTPVPANPPAEFSATKFASFITQYSTGQVSVEIEWELQKENSKRWNPEVQYTSNYAKSANVDFTVDNNGLYTEPRPIGTRYLTRPL

SEQ ID NO: 4939 - DNA, 2208 bp, Adeno-associated virus
atggctgccgatggttatcttccagattggctcaaggacactctctctgaaggaataagacagtggtggaagctcaaacctggcccaccaccaccaaagcccgcagagcggcataaggacgacagcgggggtcttgtgcttcctgggtacaagtacctcggacccttcaacggactcgacaagggagagccggtcaacgaggcagacgccgcggccctcgagtacgacaaggcctacgaccggcagctcgacagcggagacaacccgtacctcaagtacaaccacgccgacgcggagtttcaggagcgccttaaagaagatacgtcttttgggggcaacctcggacgagcagtcttccaggcgaaaaagagggttcttgaacctctgggcctggttgaggaacctgttaagacggctccgggaaaaaagaggccggtagagcactctcctgtggagccagactcctcctcgggaacaggaaaagcgggccagcagcctgcgagaaagagattgaattttggtcagactggagacgcagactccgtacctgacccccagcctctcggacagccaccagcagccccctctggtctgggaactaatacgatggctacaggcagtggcgcaccaatggcagacaataacgagggcgccgacggagtgggtaattcctcgggaagttggcattgcgattccacatggatgggcgacagagtcatcaccaccagcacccgaacctgggctctgcccacctacaacaaccatctgtacaagcagatctccagccaatcaggagccagcaacgacaaccactactttggctacagcaccccttgggggtattttgacttcaacagattccactgccacttttcaccacgtgactggcaaagactcatcaacaacaactggggattccggcccaagagactcaacttcaagctctttaacattcaagtcaaggaggtcacgcagaatgacggtacgacgacgattgccaataaccttaccagcacggttcaggtgtttactgactcggagtaccagctcccgtacgtccccggctcggcgcatcaaggatgcctcccgccgttcccagcagacgtcttcatggtgccacagtatggatacctcaccctgaacaacgggagtcaggcagtaggacgctcttcattttactgcctggagtactttccttctcagatgcttcgtaccggaaacaactttaccttcagctacacctttgaggatgttcctttccacagcagctacgctcacagccagagtttggaccgtctcatgaatcctctcatcgaccagtacctgtattacttgagcagaacaaacactccaagcggaaccaccacgcagtccaggcttcagttttctcaggccggagcaagtgacattcgggaccagtctaggaactggcttcctggaccctgttaccgccagcagcgagtatcaaagacagctgcggacaacaacaacagtgaatactcgtggactggagctaccaagtaccacctcaatggcagagactctctggtgaatccgggcccggccatggccagccacaaggacgatgaagaaaagttttttcctcaaagcggggttctcatctttgggaagcaaggctcagagaaaacaaatgtggacattgaaaaggtcatgattacagacgaagaggaaatcagaaccaccaatcccgtggccacggagcagtatggttctgtatctaccaacctccagagcggcaacacacaagcagctactgcagatgtcaacacacaaggcgttcttccaggcatggtctggcaggacagagacgtgcacctgcaggggcctatctgggcaaagattccacacacggacggacattttcacccctctcccctcatgggcggatttggacttaaacaccctcctccacagattctcatcaagaacaccccggtacctgcaaatccttcgaccaccttcagtgcggcaaagtttgcttccttcatcacacagtattccacagggcaggtcagcgtggagatcgagtgggagctgcagaaggagaacagcaaacgctggaaccccgagatccagtacacttccaactacaacaaatctgttaatgtggactttactgtggacactaatggtgtgtattcagagcctcgccccattggcaccagatacctgactcgtaatctgtaa

SEQ ID NO: 4940 - protein, 735 aa, Adeno-associated virus
MAADGYLPDWLKDTLSEGIRQWWKLKPGPPPPKPAERHKDDSGGLVLPGYKYLGPFNGLDKGEPVNEADAAALEYDKAYDRQLDSGDNPYLKYNHADAEFQERLKEDTSFGGNLGRAVFQAKKRVLEPLGLVEEPVKTAPGKKRPVEHSPVEPDSSSGTGKAGQQPARKRLNFGQTGDADSVPDPQPLGQPPAAPSGLGTNTMATGSGAPMADNNEGADGVGNSSGSWHCDSTWMGDRVITTSTRTWALPTYNNHLYKQISSQSGASNDNHYFGYSTPWGYFDFNRFHCHFSPRDWQRLINNNWGFRPKRLNFKLFNIQVKEVTQNDGTTTIANNLTSTVQVFTDSEYQLPYVPGSAHQGCLPPFPADVFMVPQYGYLTLNNGSQAVGRSSFYCLEYFPSQMLRTGNNFTFSYTFEDVPFHSSYAHSQSLDRLMNPLIDQYLYYLSRTNTPSGTTTQSRLQFSQAGASDIRDQSRNWLPGPCYRQQRVSKTAADNNNSEYSWTGATKYHLNGRDSLVNPGPAMASHKDDEEKFFPQSGVLIFGKQGSEKTNVDIEKVMITDEEEIRTTNPVATEQYGSVSTNLQSGNTQAATADVNTQGVLPGMVWQDRDVHLQGPIWAKIPHTDGHFHPSPLMGGFGLKHPPPQILIKNTPVPANPSTTFSAAKFASFITQYSTGQVSVEIEWELQKENSKRWNPEIQYTSNYNKSVNVDFTVDTNGVYSEPRPIGTRYLTRNL

SEQ ID NO: 4941 - DNA, 2208 bp, Adeno-associated virus
atggctgccgatggttatcttccagattggctcgaggacactctctctgaaggaataagacagtggtggaagctcaaacctggcccaccaccaccaaagcccgcagagcggcataaggacgacagcaggggtcttgtgcttcctgggtacaagtacctcggacccttcaacggactcgacaagggggagccggtcaacgaggcagacgccgcggccctcgagcacgacaaggcctacgaccggcagctcgacagcggagacaacccgtacctcaagtacaaccacgccgacgcagagtttcaggagcgccttaaagaagatacgtcttttgggggcaacctcggacgagcagtcttccaggcgaaaaagagggttcttgaacctctgggcctggttgaggaacctgttaagacggctccgggaaaaaagaggccggtagagcactctcctgtggagccagactcctcctcgggaaccggaaaagcgggccagcagcctgcaagaaaaagattaaattttggtcagactggagacgcagactccgtacctgacccccagcctctcggacagccaccagcagccccctctggtctgggatctactacaatggctacaggcagtggcgcaccaatggcagacaataacgagggtgccgatggagtgggtaattcctcaggaaattggcattgcgattcccaatggctgggcgacagagtcatcaccaccagcacccgaacctgggccctgcccacatacaacaaccacctctacaagcaaatctccagccaatcaggagccagcaacgacaaccactactttggctacagcaccccctgggggtattttgacttcaacagattccactgccacttttcaccacgtgactggcaaagactcatcaacaacaactggggattccggcccaaaagactcaacttcaagctctttaatattcaagtcaaagaggtcacgcagaatgacggtacgacgacgattgccaataaccttaccagcacggttcaggtgtttactgactcggagtaccagctcccgtacgtcctgggctcggcgcatcaaggatgcctcccgccgtttccagcggacgtcttcatggtcccacagtatggatacctcaccctgaacaacgggagtcaggcggtaggacgctcttccttttactgcctggagtactttccttctcagatgctgcgtactggaaacaactttcagttcagctacacttttgaagacgtgcctttccacagcagctacgctcacagccagagtctggatcggctgatgaatcctctgatcgaccagtacctgtattatctgaacaagacacaaacaaatagtggaactcttcagcagtctcggctactgtttagccaagctggaccaaccaacatgtctcttcaagctaaaaactggctgcctggaccttgctacagacagcagcgtctgtcaaaacaggcaaacgacaacaacaacagcaactttccctggactgcagctacaaagtatcatctaaatggccgggactcgttggttaatccaggaccagctatggccagtcgcaaggatgacgaagaaaagtttttccccatgcatggaaccctgatatttggtaaacaaggaacaaatgccaacgacgcggatttggaaaatgtcatgattacagatgaagaagaaatcagggccaccaatcccgtggctacggagcagtacgggactgtgtcaaataatttgcaaaactcaaacactggtccaactactggaactgtcaatcaccaaggagcgttacctggtatggtgtggcaggatcgagacgtgtacctgcagggacccatttgggccaagattcctcacaccgatggacactttcatccttctccactgatgggaggttttggactcaaacacccgcctcctcagatcatgatcaaaaacactcccgttccagccaatcctcccacaaacttcagttctgccaagtttgcttctttcatcacacagtattccacgggacaggtcagcgtggagatcgagtgggagctgcagaaggagaacagcaaacgctggaatcccgaaattcagtacacttccaactacaacaagtctgttaatgtggactttactgtggacactaatggtgtgtattcagagcctcgccccattggcaccagatacctgactcgtaatctgtaa

SEQ ID NO: 4942 - protein, 735 aa, Adeno-associated virus
MAADGYLPDWLEDTLSEGIRQWWKLKPGPPPPKPAERHKDDSRGLVLPGYKYLGPFNGLDKGEPVNEADAAALEHDKAYDRQLDSGDNPYLKYNHADAEFQERLKEDTSFGGNLGRAVFQAKKRVLEPLGLVEEPVKTAPGKKRPVEHSPVEPDSSSGTGKAGQQPARKRLNFGQTGDADSVPDPQPLGQPPAAPSGLGSTTMATGSGAPMADNNEGADGVGNSSGNWHCDSQWLGDRVITTSTRTWALPTYNNHLYKQISSQSGASNDNHYFGYSTPWGYFDFNRFHCHFSPRDWQRLINNNWGFRPKRLNFKLFNIQVKEVTQNDGTTTIANNLTSTVQVFTDSEYQLPYVLGSAHQGCLPPFPADVFMVPQYGYLTLNNGSQAVGRSSFYCLEYFPSQMLRTGNNFQFSYTFEDVPFHSSYAHSQSLDRLMNPLIDQYLYYLNKTQTNSGTLQQSRLLFSQAGPTNMSLQAKNWLPGPCYRQQRLSKQANDNNNSNFPWTAATKYHLNGRDSLVNPGPAMASRKDDEEKFFPMHGTLIFGKQGTNANDADLENVMITDEEEIRATNPVATEQYGTVSNNLQNSNTGPTTGTVNHQGALPGMVWQDRDVYLQGPIWAKIPHTDGHFHPSPLMGGFGLKHPPPQIMIKNTPVPANPPTNFSSAKFASFITQYSTGQVSVEIEWELQKENSKRWNPEIQYTSNYNKSVNVDFTVDTNGVYSEPRPIGTRYLTRNL

SEQ ID NO: 4943 - DNA, 2208 bp, Adeno-associated virus
atggctgccgatggttatcttccagattggctcgaggacactctctctgaaggaataagacagtggtggaagctcaaacctggcccaccaccaccaaagcccgcagagcggcataaggacgacagcaggggtcttgtgcttcctgggtacaagtacctcggacccttcaacggactcgacaagggagagccggtcaacgaggcagacgccgcggccctcgagcacgacaaagcctacgaccggcagctcgacagcggagacaacccgtacctcaagtacaaccacgccgacgcggagtttcaggagcgccttaaagaagatacgtcttttgggggcaacctcggacgagcagtcttccaggcgaaaaagagggttcttgaacctctgggcctggttggggaacctgtcaagacggctccaggaaaaaagaggccggtagagcactctcctgtggagccagactcctcctcgggaaccggaaaggcgggccagcagcctgcaagaaaaagattgaattttggtcagactggagacgcagactcagtacctgacccccagcctctcggacagccaccagcagccccctctggtctgggaactaatacgatggctacaggcagtggcgcaccaatggcagacaataacgagggcgccgacggagtgggtaattcctcgggaaattggcattgcgattccacatggatgggcgacagagtcatcaccaccagcacccgaacctgggccctgcccacctacaacaaccacctctacaaacaaatttccagccaatcaggagcctcgaacgacaatcactactttggctacagcaccccttgggggtattttgacttcaacagattccactgccacttttcaccacgtgactggcaaagactcatcaacaacaactggggattccgacccaagagactcaacttcaagctctttaacattcaagtcaaagaggtcacgcagaatgacggtacgacgacgattgccaataaccttaccagcacggttcaggtgtttactgactcggagtaccagctcccgtacgtcctcggctcggcgcatcaaggatgcctcccgccgttcccagcagacgtcttcatggtgccacagtatggatacctcaccctgaacaacgggagtcaggcagtaggacgctcttcattttactgcctggagtactttccttctcagatgctgcgtaccggaaacaactttaccttcagctacacttttgaggacgttcctttccacagcggctacgctcacagccagagtctggaccgtctcatgaatcctctcatcgaccagtacctgtattacttgagcacaacaaacactccaagtggaaccaccacgcagtcaaggcttcagttttctcaggccggagcgagtgacattcgggaccagtctaggaactggcttcctggaccctgttaccgccagcagcgagtatcaaagacatctgcggataacaacaacagtgaatactcgtggactggagctaccaagtaccacctcaatggcagagactctctggtgaatccgggcccggccatggcaagccacaaggacaatgaagaaaagttttttcctcagagcggggttctcatctttgggaagcaaggctcagagaaaacaaatgtggacattgaaaaggtcatgattacagacgaagaggaaatcaggacaaccaatcccgtggctacggagcagtacggttctgtatctaccaacctccagagaggcaacagacaagcagctaccgcagatgtcaacacacaaggcgttcttccaggcatggtctggcaggacagagatgtgtaccttcaggggcccatctgggcaaagattccacacacggacggacattttcacccctctcccctcatgggtggattcggacttaaacaccctcctccacagattctcatcaagaacaccccggtacctgcgaatccttcgaccaccttcagtgcggcaaagtttgcttccttcatcacacagtactccacgggacaggtcagcgtggagatcgagtgggagctgcagaaggaaaacagcaaacgctggaatcccgaaattcagtacacttccaactacaacaagtctgttaatgtggactttactgtggacactaatggcgtgtattcagagcctcgccccattggcaccagatacctgactcgtaatctgtaa

SEQ ID NO: 4944 - protein, 735 aa, Adeno-associated virus
MAADGYLPDWLEDTLSEGIRQWWKLKPGPPPPKPAERHKDDSRGLVLPGYKYLGPFNGLDKGEPVNEADAAALEHDKAYDRQLDSGDNPYLKYNHADAEFQERLKEDTSFGGNLGRAVFQAKKRVLEPLGLVGEPVKTAPGKKRPVEHSPVEPDSSSGTGKAGQQPARKRLNFGQTGDADSVPDPQPLGQPPAAPSGLGTNTMATGSGAPMADNNEGADGVGNSSGNWHCDSTWMGDRVITTSTRTWALPTYNNHLYKQISSQSGASNDNHYFGYSTPWGYFDFNRFHCHFSPRDWQRLINNNWGFRPKRLNFKLFNIQVKEVTQNDGTTTIANNLTSTVQVFTDSEYQLPYVLGSAHQGCLPPFPADVFMVPQYGYLTLNNGSQAVGRSSFYCLEYFPSQMLRTGNNFTFSYTFEDVPFHSGYAHSQSLDRLMNPLIDQYLYYLSTTNTPSGTTTQSRLQFSQAGASDIRDQSRNWLPGPCYRQQRVSKTSADNNNSEYSWTGATKYHLNGRDSLVNPGPAMASHKDNEEKFFPQSGVLIFGKQGSEKTNVDIEKVMITDEEEIRTTNPVATEQYGSVSTNLQRGNRQAATADVNTQGVLPGMVWQDRDVYLQGPIWAKIPHTDGHFHPSPLMGGFGLKHPPPQILIKNTPVPANPSTTFSAAKFASFITQYSTGQVSVEIEWELQKENSKRWNPEIQYTSNYNKSVNVDFTVDTNGVYSEPRPIGTRYLTRNL

SEQ ID NO: 4945 - DNA, 2208 bp, Adeno-associated virus
atggctgccgatggttatcttccagattggctcgaggacactctctctgaaggaataagacagtggtggaagctcaaacctggcccaccaccaccaaagcccgcagagcggcataaggacgacagcaggggtcttgtgcttcctgggtacaagtacctcggacccttcaacggactcgacaagggagagccggtcaacgaggcagacgccgcggccctcgagcacgacaaagcctacgaccggcagctcgacagcggagacaacccgtacctcaagtacaaccacgccgacgcggagtttcaggagcgccttaaagaagatacgtcttttgggggcaacctcggacgagcagtcttccaggcgaaaaagagggttcttgaacctctgggcctggttggggaacctgttaagacggctccgggaaaaaagaggccggtagagcactctcctgtggagccagactcctcctcgggaaccggaaaggcgggccagcagcctgcaagaaaaagattgaattttggtcagactggagacgcagactcagtacctgacccccagcctctcggacagccaccagcagccccctctggtctgggaactaatacgatggctacaggcagtggcgcaccaatggcagacaataacgagggcgccgacggagtgggtaattcctcgggaaatcggcattgcgattccacatggatgggcgacagagtcatcaccaccagcacccgaacctgggccctgcccacctacaacaaccacctctacagacaaatttccagccaatcaggagcctcgaacgacaatcactactttggctacagcaccccttgggggtattttgacttcaacagattccactgccacttttcaccacgtgactggcaaagactcatcaacaacaactggggattccgacccaagagactcaacttcaagctctttaacattcaagtcaaagaggtcacgcagaatgacggtacgacgacgattgccaataaccttaccagcacggttcaggtgtttactgactcggagtaccagctcccgtacgtcctcggctcggcgcatcaaggatgcctcccgccgttcccagcagacgtcttcatggtgccacagtatggatacctcaccctgagcaacgggagtcaggcagtaggacgctcttcattttactgcccggagtactttccttctcagatgctgcgtaccggaaacaactttaccttcagctacacttttgaggacgttcctttccacagcagctacgctcacagccagagtctggaccgtctcatgaatcctctcatcgaccagtacctgtattacttgagcacaacaaacactccaagtggaaccaccacgcagtcaaggcttcagttttctcaggccggagcgagtgacattcgggaccagtctaggaactggcttcctggaccctgttaccgccagcagcgagtatcaaagacatctgcggataacaacaacagtgaatactcgtggactggagctaccaagtaccacctcaatggcagagactctctggtgaatccgggcccggccatggcaagccacaaggacaatgaagaaaagttttttcctcagagcggggttctcatctttgggaagcaaggctcagagaaaacaaatgtggacattgaaaaggtcatgattacagacgaagaggaaatcaggacaaccaatcccgtggctacggagcagtatggttctgtatctaccaacctccagagaggcaacagacaagcagctaccgcagatgtcaacacacaaggcgttcttccaggcatggtctggcaggacagagatgtgtaccttcaggggcccatctgggcaaagattccacacacggacggacattttcacccctctcccctcatgggtggattcggacctaaacaccctcctccacagattctcatcaagaacaccccggtacctgcgaatccttcgaccaccttcagtgcggcaaagtttgcttccttcatcacacagtactccacgggacaggtcagcgtggagatcgagtgggagctgcagaaggaaaacagcaaacgctggaatcccgaaattcagtacacttccaactacaacaagtctgttaatgtggactttactgtggacactaatggcgtgtattcagagcctcgccccattggcaccagatacctgactcgtaatttgtaa

SEQ ID NO: 4946 - protein, 735 aa, Adeno-associated virus
MAADGYLPDWLEDTLSEGIRQWWKLKPGPPPPKPAERHKDDSRGLVLPGYKYLGPFNGLDKGEPVNEADAAALEHDKAYDRQLDSGDNPYLKYNHADAEFQERLKEDTSFGGNLGRAVFQAKKRVLEPLGLVGEPVKTAPGKKRPVEHSPVEPDSSSGTGKAGQQPARKRLNFGQTGDADSVPDPQPLGQPPAAPSGLGTNTMATGSGAPMADNNEGADGVGNSSGNRHCDSTWMGDRVITTSTRTWALPTYNNHLYRQISSQSGASNDNHYFGYSTPWGYFDFNRFHCHFSPRDWQRLINNNWGFRPKRLNFKLFNIQVKEVTQNDGTTTIANNLTSTVQVFTDSEYQLPYVLGSAHQGCLPPFPADVFMVPQYGYLTLSNGSQAVGRSSFYCPEYFPSQMLRTGNNFTFSYTFEDVPFHSSYAHSQSLDRLMNPLIDQYLYYLSTTNTPSGTTTQSRLQFSQAGASDIRDQSRNWLPGPCYRQQRVSKTSADNNNSEYSWTGATKYHLNGRDSLVNPGPAMASHKDNEEKFFPQSGVLIFGKQGSEKTNVDIEKVMITDEEEIRTTNPVATEQYGSVSTNLQRGNRQAATADVNTQGVLPGMVWQDRDVYLQGPIWAKIPHTDGHFHPSPLMGGFGPKHPPPQILIKNTPVPANPSTTFSAAKFASFITQYSTGQVSVEIEWELQKENSKRWNPEIQYTSNYNKSVNVDFTVDTNGVYSEPRPIGTRYLTRNL

SEQ ID NO: 4947 - DNA, 2205 bp, Adeno-associated virus
atggctgccgatggttatcttccagattggctcgaggacactctctctgaaggaataagacagtggtggaagctcaaacctggcccaccaccaccaaagcccgcagagcggcataaggacgacagcaggggtcttgtgcttcctgggtacaagtacctcggacccttcaacggactcgacaagggagagccggtcaacgaggcagacgccgcggccctcgagcacgacaaggcctacgaccggcagctcgacagcggagacaacccgtacctcaagtacaaccacgccgacgcggagtttcaggagcgtcttaaagaagatacgtcttttgggggcaacctcggacgagcagtcttccaggcgaaaaagagggttcttgaacctctgggcctggttgaggaacctgttaagacggctccgggaaaaaagaggccggtagagcactctcctgcggagccagactcctcctcgggaaccggaaaagcgggccagcagcctgcaagaaaaagactgaatttcggtcagactggagacgcagactccgtacctgacccccagcctctcagacagccaccagcagcccccacaagtttgggatctactacaatggctacaggcagtggcgcaccaatggcagacaataacgagggtgccgatggagtgggtaattcctcaggaaattggcattgcgattcccaatggctgggcgacagagtcatcaccaccagcacccgaacctgggccctgcccacctacaacaaccacctttacaagcaaatctccagccaatcaggagcctcaaacgacaaccactactttggctacagcaccccctgggggtattttgacttcaacagattccactgccacttttcaccacgtgactggcaaagactcatcaacaacaactggggattccgacccaagagactcaacttcaagctctttaacattcaagtcaaagaggtcacgcagaatgacggtacgacgacgattgccaataaccttaccagcacggttcaggtgtttactgactcggagtaccagctcccgtacgtcctcggctcggcgcatcaaggatgcctcccgccgtttccagcggacgtcttcatggtcccacagtatggatacctcaccctgaacaacgggagtcaggcggtaggacgctcttccttttactgcctggagtactttccttctcagatgctgcgtactggaaacaactttcagttcagctacacttttgaagacgtgcctttccacagcagctacgctcacagccagagtttggatcggctgatgaatcctctgatcgaccagtacctgtattatctaaacagaacacaaacagctagtggaactcagcagtctcggctactgtttagccaagctggacccacaagcatgtctcttcaagctaaaaactggctgcctggaccgtgttatcgccagcagcgtttgtcaaagcaggcaaacgacaacaacaacagcaactttccctggactggagctaccaagtactacctcaatggcagagactctttggtgaacccgggcccggccatggccagccacaaggacgatgaagaaaagtttttccccatgcatggaaccctaatatttggtaaagaaggaacaaatgctaccaacgcggaattggaaaatgtcatgattacagatgaagaggaaatcaggaccaccaatcccgtggctacagagcagtacggatatgtgtcaaataatttgcaaaactcaaatactgctgcaagtactgaaactgtgaatcaccaaggagcattacctggtatggtgtggcaggatcgagacgtgtacctgcagggacccatttgggccaagattcctcacaccgatggacactttcatccttctccactgatgggaggttttggactcaaacacccgcctcctcagattatgatcaaaaacactcccgttccagccaatcctcccacaaacttcagttctgccaagtttgcttccttcatcacacagtattccacgggacaggtcagcgtggagatcgagtgggagctgcagaaggagaacagcaaacgctggaatcccgaaattcagtacacttccaactacaacaaatctgttaatgtggactttactgtggacactaatggtgtgtattcagagcctcgccccattggcaccagatacctgactcgtaatctgtaa

SEQ ID NO: 4948 - protein, 734 aa, Adeno-associated virus
MAADGYLPDWLEDTLSEGIRQWWKLKPGPPPPKPAERHKDDSRGLVLPGYKYLGPFNGLDKGEPVNEADAAALEHDKAYDRQLDSGDNPYLKYNHADAEFQERLKEDTSFGGNLGRAVFQAKKRVLEPLGLVEEPVKTAPGKKRPVEHSPAEPDSSSGTGKAGQQPARKRLNFGQTGDADSVPDPQPLRQPPAAPTSLGSTTMATGSGAPMADNNEGADGVGNSSGNWHCDSQWLGDRVITTSTRTWALPTYNNHLYKQISSQSGASNDNHYFGYSTPWGYFDFNRFHCHFSPRDWQRLINNNWGFRPKRLNFKLFNIQVKEVTQNDGTTTIANNLTSTVQVFTDSEYQLPYVLGSAHQGCLPPFPADVFMVPQYGYLTLNNGSQAVGRSSFYCLEYFPSQMLRTGNNFQFSYTFEDVPFHSSYAHSQSLDRLMNPLIDQYLYYLNRTQTASGTQQSRLLFSQAGPTSMSLQAKNWLPGPCYRQQRLSKQANDNNNSNFPWTGATKYYLNGRDSLVNPGPAMASHKDDEEKFFPMHGTLIFGKEGTNATNAELENVMITDEEEIRTTNPVATEQYGYVSNNLQNSNTAASTETVNHQGALPGMVWQDRDVYLQGPIWAKIPHTDGHFHPSPLMGGFGLKHPPPQIMIKNTPVPANPPTNFSSAKFASFITQYSTGQVSVEIEWELQKENSKRWNPEIQYTSNYNKSVNVDFTVDTNGVYSEPRPIGTRYLTRNL

SEQ ID NO: 4949 - DNA, 3160 bp, Adeno-associated virus
acccttcactaaagggactagtcctgcaggtttaaacgaattcgcccttgctgcgtcaactggaccaatgagaactttcccttcaacgactgtgtcgacaagatggtgatttggtgggaggaggggaagatgaccgccaaggtcgtggagtcggccaaagccattctcggaggaagcaaggtgcgcgtggaccagaaatgcaagtcctcggcccagatagatccgactcccgtgatcgtcacctccaacaccaacatgtgcgccgtgattgacgggaactcaacgaccttcgaacaccagcagccgttgcaagaccggatgttcaaatttgaactcacccgccgtctggatcatgactttgggaaggtcaccaagcgggaagtcaaagactttttccggtgggcaaaggatcacgtggttgaggtggagcatgaattctacgtcaaaaagggtggagccaagaaaagacccgcccctagtgacgcagatataagtgagcccaaacgggtgcgcgagtcagttgcgcagccatcgacgtcagacgcggaagcttcgatcaactacgcggacaggtaccaaaacaaatgttctcgtcacgtgggcatgaatctgatgctgtttccctgcagacaatgcgagagaatgaatcaaaattcaaatatctgcttcactcacggacagaaagactgtttagagtgctttcccgtgtcagaatctcaacctgtttctgtcgtcaaaaaggcgtatcagaaactgtgctacattcatcatatcatgggaaaggtgccagacgcttgcactgcctgcgatctggtcaatgtggatttggatgactgcatctctgaacaataaatgatttaaatcaggtatggctgccgatggttatcttccagattggctcgaggacactctctctgaaggaataagacagtggtggaagctcaaacctggcccaccaccaccaaagcccgcagagcggcataaggacgacagcaggggtcttgtgcttcctgggtacaagtacctcggacccttcaacggactcgacaagggagagccggtcaacgaggcagacgccgcggccctcgagcacgacaaggcctacgaccggcagctcgacagcggagacaacccgtacctcaagtacaaccacgccgacgcggagtttcaggagcgtcttaaagaagatacgtcttttgggggcaacctcggacgagcagtcttccaggcgaaaaagagggttcttgaacctctgggcctggttgaggaacctgttaagacggctccgggaaaaaagaggccggtagagcactctcctgcggagccagactcctcctcgggaaccggaaaagcgggccagcagcctgcaagaaaaagactgaatttcggtcagactggagacgcagactccgtacctgacccccagcctctcagacagccaccagcagcccccacaagtttgggatctactacaatggctacaggcagtggcgcaccaatggcagacaataacgagggtgccgatggagtgggtaattcctcaggaaattggcattgcgattcccaatggctgggcgacagagtcatcaccaccagcacccgaacctgggccctgcccacctacaacaaccacctttacaagcaaatctccagccaatcaggagcctcaaacgacaaccactactttggctacagcaccccctgggggtattttgacttcaacagattccactgccacttttcaccacgtgactggcaaagactcatcaacaacaactggggattccgacccaagagactcaacttcaagctctttaacattcaagtcaaagaggtcacgcagaatgacggtacgacgacgattgccaataaccttaccagcacggttcaggtgtttactgactcggagtaccagctcccgtacgtcctcggctcggcgcatcaaggatgcctcccgccgtttccagcggacgtcttcatggtcccacagtatggatacctcaccctgaacaacgggagtcaggcggtaggacgctcttccttttactgcctggagtactttccttctcagatgctgcgtactggaaacaactttcagttcagctacacttttgaagacgtgcctttccacagcagctacgctcacagccagagtttggatcggctgatgaatcctctgatcgaccagtacctgtattatctaaacagaacacaaacagctagtggaactcagcagtctcggctactgtttagccaagctggacccacaagcatgtctcttcaagctaaaaactggctgcctggaccgtgttatcgccagcagcgtttgtcaaagcaggcaaacgacaacaacaacagcaactttccctggactggagctaccaagtactacctcaatggcagagactctttggtgaacccgggcccggccatggccagccacaaggacgatgaagaaaagtttttccccatgcatggaaccctaatatttggtaaagaaggaacaaatgctaccaacgcggaattggaaaatgtcatgattacagatgaagaggaaatcaggaccaccaatcccgtggctacagagcagtacggatatgtgtcaaataatttgcaaaactcaaatactgctgcaagtactgaaactgtgaatcaccaaggagcattacctggtatggtgtggcaggatcgagacgtgtacctgcagggacccatttgggccaagattcctcacaccgatggacactttcatccttctccactgatgggaggttttggactcaaacacccgcctcctcagattatgatcaaaaacactcccgttccagccaatcctcccacaaacttcagttctgccaagtttgcttccttcatcacacagtattccacgggacaggtcagcgtggagatcgagtgggagctgcagaaggagaacagcaaacgctggaatcccgaaattcagtacacttccaactacaacaaatctgttaatgtggactttactgtggacactaatggtgtgtattcagagcctcgccccattggcaccagatacctgactcgtaatctgtaattgcttgttaatcaataaaccgtttaattcgtttcagttgaactttggtctctgcgaagggcgaattcgcggccgctaaatcaatcg

SEQ ID NO: 4950 - protein, 734 aa, Adeno-associated virus
MAADGYLPDWLEDTLSEGIRQWWKLKPGPPPPKPAERHKDDSRGLVLPGYKYLGPFNGLDKGEPVNEADAAALEHDKAYDRQLDSGDNPYLKYNHADAEFQERLKEDTSFGGNLGRAVFQAKKRVLEPLGLVEEPVKTAPGKKRPVEHSPAEPDSSSGTGKAGQQPARKRLNFGQTGDADSVPDPQPLGQPPAAPTSLGSTTMATGSGAPMADNNEGADGVGNSSGNWHCDSQWLGDRVITTSTRTWALPTYNNHLYKQISSQSGASNDNHYFGYSTPWGYFDFNRFHCRFSPRDWQRLINNNWGFRPKRLNFKLFNIQVKEVTQNDGTTTIANNLTSTVQVFTDSEYQLPYVLGSAHQGCLPPFPADVFMVPQYGYLTLNNGSQAVGRSSFYCLEYFPSQMLRTGNNFQFSYTFEDVPFHSSYAHSQGLDRLMNPLIDQYLYYLNRTQTASGTQQSRLLFSQAGPTSMSLQAKNWLPGPCYRQQRLSKQANDNNNSNFPWTGATKYHLNGGDSLVNPGPAMASHKDDEEKFFPMHGTLIFGKEGTNATNAELENVMITDEEEIRTTNPVATEQYGYVSNNLQNSNTAASTETVNHQGALPGMVWQDRDVYLRGPIWAKIPHADGHFHPSPLMGGFGLKHPPPQIMIKNTPVPANPPTNFSSAKFASFITQYSTGQVSVEIEWELQKENSKRWNPEIQYTSNYNKSVNVDFTVDTNGVYSEPRPIGTRYLTRNL

SEQ ID NO: 4951 - DNA, 3157 bp, Adeno-associated virus
ctcactaagggactagtcctgcaggtttaaacgaattcgcccttgctgcgtcaactggaccaatgagaactttcccttcaacgactgtgtcgacaagatggtgatttggtgggaggaggggaagatgaccgccaaggtcgtggagtcggccaaagccactctcggaggaagcaaggtgcgcgtggaccagaaacgcaagtcctcggcccagatagatccgactcccgtgatcgtcacctccaacaccaacatgtgcgccgtgattgacgggaactcaacgaccttcgaacaccagcagccgttgcaagaccgaatgttcaaatttgaactcacccgccgtctggatcatgacttcgggaaggtcaccaagcaggaagtcaaagactttttccggtgggcaaaggatcacgtggttgaggtggagcatgaattctacgtcaaaaagggtggagccaagaaaagacccgcccctagtgacgcagatataagtgagcccaaacgggtgcgcgagtcagttgcgcagccatcgacgtcagacgcggaagcttcgatcaactacgcggacaggtaccaaaacaaatgttctcgtcacgtgggcatgaatctgatgctgtttccctgcagacaatgcgagagaatgaatcaaaattcaaatatctgcttcactcacggacagaaagactgtttagagtgctttcccgtgtcagaatctcaacctgtttctgtcgtcaaaaaggcgtatcagaaactgtgctacattcatcatatcatgggaaaggtgccagacgcttgcactgcctgcgatctggtcaatgtggatttggatgactgcatctctgaacaataaatgatttaaatcaggtatggctgccgatggttatcttccagattggctcgaggacactctctctgaaggaataagacagtggtggaagctcaaacctggcccaccaccaccaaagcccgcagagcggcataaggacgacagcaggggtcttgtgcttcctgggtacaagtacctcggacccttcaacggactcgacaagggagagccggtcaacgaggcagacgccgcggctctcgagcacgacaaggcctacgaccggcagctcgacagcggagacaacccgtacctcaagtacaaccacgccgacgcggagtttcaggagcgtcttaaagaagatacgtcttttgggggcaacctcggacgagcagtcttccaggcgaaaaagagggttcttgaacctctgggcctggttgaggaacctgttaagacggctccgggaaaaaagaggccggtagagcactctcctgcggagccagactcctcctcgggaaccggaaaagcgggccagcagcctgcaagaaaaagactgaatttcggtcagactggagacgcagactccgtacctgacccccagcctctcggacagccaccagcagcccccacaagtttgggatctactacaatggctacaggcagtggcgcaccaatggcagacaataacgagggtgccgatggagtgggtaattcctcaggaaattggcattgcgattcccaatggctgggcgacagagtcatcaccaccagcacccgaacctgggccctgcccacctacaacaaccacctttacaagcaaatctccagccaatcaggagcctcaaacgacaaccactactttggctacagcaccccctgggggtattttgacttcaacagattccactgccgcttttcaccacgtgactggcaaagactcatcaacaacaactggggattccgacccaagagactcaacttcaagctctttaacattcaagtcaaagaggtcacgcagaatgacggtacgacgacgattgccaataaccttaccagcacggttcaggtgtttactgactcggagtaccagctcccgtacgtcctcggctcggcgcatcaaggatgcctcccgccgtttccagcggacgtcttcatggtcccacagtatggatacctcaccctgaacaacgggagtcaggcggtaggacgctcttccttttactgcctggagtactttccttctcagatgctgcgtactggaaacaactttcagttcagctacacttttgaagacgtgcctttccacagcagctacgctcacagccagggtttggatcggctgatgaatcctctgatcgaccagtacctgtattatctaaacagaacacaaacagctagtggaactcagcagtctcggctactgtttagccaagctggacccacaagcatgtctcttcaagctaaaaactggctgcctggaccgtgttatcgccagcagcgtttgtcaaagcaggcaaacgacaacaacaacagcaactttccctggactggagctaccaagtaccacctcaatggcggagactctttggtgaacccgggcccggccatggccagccacaaggacgatgaagaaaagtttttccccatgcatggaaccctaatatttggtaaagaaggaacaaatgctaccaacgcggaattggaaaatgtcatgattacagatgaagaggaaatcaggaccaccaatcccgtggctacagagcagtacggatatgtgtcaaataatttgcaaaactcaaatactgctgcaagtactgaaactgtgaatcaccaaggagcattacctggtatggtgtggcaggatcgagacgtgtacctgcggggacccatttgggccaagattcctcacgccgatggacactttcatccttctccactgatgggaggttttggactcaaacacccgcctcctcagattatgatcaaaaacactcccgttccagccaatcctcccacaaacttcagttctgccaagtttgcttccttcatcacacagtattccacgggacaggtcagcgtggagatcgagtgggagctgcagaaggagaacagcaaacgctggaatcccgaaattcagtacacttccaactacaacaaatctgttaatgtggactttactgtggacactaatggtgtgtattcagagcctcgccccattggcaccagatacctgactcgtaatctgtaattgcttgttaatcaataaaccgtttaattcgtttcagttgaactttggtctctgcgaagggcgaattcgcggccgctaaattcaattcg

SEQ ID NO: 4952 - protein, 734 aa, Adeno-associated virus
MAADGYLPDWLEDTLSEGIRQWWKLKPGPPPPKPAERHKDDSRGLVLPGYKYLGPFNGLDKGEPVNEADAAALEHDKAYDRQLDSGDNPYLKYNHADAEFQERLKEDTSFGGNLGRAVFQAKKRVLEPLGLVEEPVKTAPGKKRPVEHSPAEPDSSSGTGKAGQQPARKRLNFGQTGDADSVPDPQPLGQPPAAPTSLGSTTMATGSGAPMADNNEGADGVGNSSGNWHCDSQWLGDRVITTSTRTWALPTYNNHLYKQISSQSGASNDNHYFGYSTPWGYFDFNRFHCHFSPRDWQRLINNNWGFRPKRLNFKLFNIQVKEVTQNDGTTTIANNLTSTVQVFTDSEYQLPYVLGSAHQGCLPPFPADVFMVPQYGYLTLNNGSQAVGRSSFYCLECFPSQMLRTGNNFQFSYTFEDVPFHSSYAHSQSLDRLMNPLIDQYLYYLNRTQTASGTQQSRLLFSQAGPTSMSLQAKNWLPGPCYRQQRLSKQANDNNNSNFPWTGATKYHLNGRDSLVNPGPAMASHKDDEEKFFPMHGTLIFGKEGTNATNAELENVMITDEEEIRTTNPVATEQYGYVSNNLQNSNTAASTETVNHQGALPGMVWQDRDVYLQGPIWAKIPHTDGHFHPSPLMGGFGLKHPPPQIMIKNTPVPANPPTNFSSAKFASFITQYSTGQVSVEIEWELQKENSKRWNPEIQYTSNYNKSVNVDFTVDTNGVYSEPRPIGTRYLTRNL

SEQ ID NO: 4953 - DNA, 2208 bp, Adeno-associated virus
atggctgccgatggttatcttccagattggctcgaggacactctctctgaaggaataagacagtggtggaagctcaaacctggcccaccaccaccaaagcccgcagagcggcataaggacgacagcaggggtcttgtgcttcctggatacaagtacctcggacccttcaacggactcgacaagggagagccggtcaacgaggcagacgccgcggccctcgagcacgacaaggcctacgaccggcagctcgacagcggagacaacccgtacctcaagtacaaccacgccgacgcggagtttcaggagcgccttaaagaagatacgtcttttgggggcaacctcggacgagcagtcttccaggcgaaaaagagggttcttgaacctctgggcctggttgaggaacctgttaagacggctccgggaaaaaagaggccggtagagcactctcctgtggagccagactcctcctcgggaaccggaaaagcgggcaaccagcctgcaagaaaaagattgaatttcggtcagactggagacgcagactccgtacctgacccccagcctctcggacagccaccagcatccccctctggtctgggaactaatacgatggctacaggcagtggcgcaccaatggcagacaataacgagggcgccgacggagtgggtaattcctcgggaaattggcattgcgattccacatggatgggcgacagagtcgtcaccaccagcacccgcacctgggccctgcccacctacaacaaccacctctacaagcagatttccagccaatcaggagccagcaacgacaaccactactttggctacagcaccccttgggggtattttgacttcaacagattccactgccacttttcgccacgcgactggcagagactcatcaacaacaactggggattccggcccaaaagactcaacttcaagctgtttaacattcaagtcaaggaggtcacgcagaatgacggtacgacgacgattgccaataaccttaccagcacggttcaggtgtttactgacttggagtaccagctcccgtacgtcctcggctcggcgcatcaaggatgcctcccgccgttcccagcagacgtcttcatggtgccacagtatggatacctcaccctgaacaacgggagtcaggcggtaggacgctcttccttttactgcctggagtactttccttctcagatgcttcgcaccggaaacaactttaccttcagctacacttttgaagacgttcctttccacagcagctacgctcacagtcaaagtctggaccgtctcatgaatcctctcatcgaccagtacctgtattacttgagcagaacaaacactccaagcggaaccactacgcagtccaggcttcagttttctcaggccggagcgagtgacattcgggaccagtctaggaactggcttcctggaccctgttaccgccagcagcgagtatcaaagacagctgcggataacaacaacagtgaatactcgtggactggagctaccaagtaccacctcaatggcagagactctctggtgaatccgggcccggccatggccagccacaaggacgatgaagaaaagttttttcctcaaagcggggttctcatctttgggaagcaaggctcagagaaaacaaatgtggacattgaaaaggtcatgattacagacgaagaggaaatcaggaccaccaatcccgtggctacggagcagtatggttctgtatctaccaacctccagagcggcaacacacaagcagctacctcagatgtcaacacacaaggcgttcttccaggcatggtctggcaggacagagacgtgtacctgcaggggcccatctgggcaaaaattccacacacggacggacattttcacccctctcccctcatgggcggatttggacttaaacaccctcctccacagattctcattaagaataccccggtacctgcgaatccttcgaccaccttcagcgcggcaaagtttgcttccttcatcacacagtattccacggggcaggtcagcgtggagatcgagtgggagctgcagaaggagaacagcaaacgctggaatcccgaaattcagtacacttccaactacaacaaatctgttaatgtggactttactgtggacactaatggggtgtattcagagcctcgccctattggcaccagatacctgactcgtaatctgtaa

SEQ ID NO: 4954 - DNA, 3159 bp, Adeno-associated virus
gattgatttagcggccgcgaattcgcccttgctgcgtcaactggaccaatgagaactttcccttcaacgattgcgtcgacaagatggtgatctggtgggaggagggaaagatgaccgccaaggtcgtggagtcggccaaagccattctcggaggaagcaaggtgcgtgtggaccaaaagtgcaagtcttcggcccagatcgacccgactcccgtgatcgtcacctccaacaccaacatgtgcgccgtgattgatggaaactcaacgaccttcgagcaccagcagccgttgcaagaccggatgttcaaatttgaacttacccgccgtctggatcatgactttggaaaggtcaccaagcaggaagtgaaagactttttccggtgggcaaaggatcacgtggttgaggtggagcatgagttctacgtcaaaaagggtggagccaaaaaaagacccgcccccagtgacgcagatataagtgagcccaaacgggcgcgcgagtcagttgcgcagccatcgacgtcagacgcggaagcttcgatcaactacgcggacaggtaccaaaacaaatgttctcgtcacgtgggcatgaatctgatgctgtttccctgcagacaatgcgagagaatgaatcagaattcaaatatctgcttcactcacggacagaaagactgtccatagtgctttcccgtgtcagaatctcaacccgtttctgtcgtcaaaaaggcgtatcagaaactgtgctacattcatcacatcatgggaaaggtgccagacgcttgcactgcttgcgacctggtcaatgtggatttggatgactgcatctctgaacaataaatgatttaaatcaggtatggctgccgatggttatcttccagattggctcgaggacactctctctgaaggaataagacagtggtggaagctcaaacctggcccaccaccaccaaagcccgcagagcggcataaggacgacagcaggggtcttgtgcttcctggatacaagtacctcggacccttcaacggactcgacaagggagagccggtcaacgaggcagacgccgcggccctcgagcacgacaaggcctacgaccggcagctcgacagcggagacaacccgtacctcaagtacaaccacgccgacgcggagtttcaggagcgccttaaagaagatacgtcttttgggggcaacctcggacgagcagtcttccaggcgaaaaagagggttcttgaacctctgggcctggttgaggaacctgttaagacggctccgggaaaaaagaggccggtagagcactctcctgtggagccagactcctcctcgggaaccggaaaagcgggcaaccagcctgcaagaaaaagattgaatttcggtcagactggagacgcagactccgtacctgacccccagcctctcggacagccaccagcatccccctctggtctgggaactaatacgatggctacaggcagtggcgcaccaatggcagacaataacgagggcgccgacggagtgggtaattcctcgggaaattggcattgcgattccacatggatgggcgacagagtcgtcaccaccagcacccgcacctgggccctgcccacctacaacaaccacctctacaagcagatttccagccaatcaggagccagcaacgacaaccactactttggctacagcaccccttgggggtattttgacttcaacagattccactgccacttttcgccacgcgactggcagagactcatcaacaacaactggggattccggcccaaaagactcaacttcaagctgtttaacattcaagtcaaggaggtcacgcagaatgacggtacgacgacgattgccaataaccttaccagcacggttcaggtgtttactgacttggagtaccagctcccgtacgtcctcggctcggcgcatcaaggatgcctcccgccgttcccagcagacgtcttcatggtgccacagtatggatacctcaccctgaacaacgggagtcaggcggtaggacgctcttccttttactgcctggagtactttccttctcagatgcttcgcaccggaaacaactttaccttcagctacacttttgaagacgttcctttccacagcagctacgctcacagtcaaagtctggaccgtctcatgaatcctctcatcgaccagtacctgtattacttgagcagaacaaacactccaagcggaaccactacgcagtccaggcttcagttttctcaggccggagcgagtgacattcgggaccagtctaggaactggcttcctggaccctgttaccgccagcagcgagtatcaaagacagctgcggataacaacaacagtgaatactcgtggactggagctaccaagtaccacctcaatggcagagactctctggtgaatccgggcccggccatggccagccacaaggacgatgaagaaaagttttttcctcaaagcggggttctcatctttgggaagcaaggctcagagaaaacaaatgtggacattgaaaaggtcatgattacagacgaagaggaaatcaggaccaccaatcccgtggctacggagcagtatggttctgtatctaccaacctccagagcggcaacacacaagcagctacctcagatgtcaacacacaaggcgttcttccaggcatggtctggcaggacagagacgtgtacctgcaggggcccatctgggcaaaaattccacacacggacggacattttcacccctctcccctcatgggcggatttggacttaaacaccctcctccacagattctcattaagaataccccggtacctgcgaatccttcgaccaccttcagcgcggcaaagtttgcttccttcatcacacagtattccacggggcaggtcagcgtggagatcgagtgggagctgcagaaggagaacagcaaacgctggaatcccgaaattcagtacacttccaactacaacaaatctgttaatgtggactttactgtggacactaatggggtgtattcagagcctcgccctattggcaccagatacctgactcgtaatctgtaattgcttgttaatcaataaaccgtttaattcgtttcagttgaactttggtctctgcgaagggcgaattcgtttaaacctgcaggactagtccctttagtgagg

SEQ ID NO: 4955 - protein, 735 aa, Adeno-associated virus
MAADGYLPDWLEDTLSEGIRQWWKLKPGPPPPKPAERHKDDSRGLVLPGYKYLGPFNGLDKGEPVNEADAAALEHDKAYDRQLDSGDNPYLKYNHADAEFQERLKEDTSFGGNLGRAVFQAKKRVLEPLGLVEEPVKTAPGKKRPVEHSPVEPDSSSGTGKAGNQPARKRLNFGQTGDADSVPDPQPLGQPPASPSGLGTNTMATGSGAPMADNNEGADGVGNSSGNWHCDSTWMGDRVVTTSTRTWALPTYNNHLYKQISSQSGASNDNHYFGYSTPWGYFDFNRFHCHFSPRDWQRLINNNWGFRPKRLNFKLFNIQVKEVTQNDGTTTIANNLTSTVQVFTDLEYQLPYVLGSAHQGCLPPFPADVFMVPQYGYLTLNNGSQAVGRSSFYCLEYFPSQMLRTGNNFTFSYTFEDVPFHSSYAHSQSLDRLMNPLIDQYLYYLSRTNTPSGTTTQSRLQFSQAGASDIRDQSRNWLPGPCYRQQRVSKTAADNNNSEYSWTGATKYHLNGRDSLVNPGPAMASHKDDEEKFFPQSGVLIFGKQGSEKTNVDIEKVMITDEEEIRTTNPVATEQYGSVSTNLQSGNTQAATSDVNTQGVLPGMVWQDRDVYLQGPIWAKIPHTDGHFHPSPLMGGFGLKHPPPQILIKNTPVPANPSTTFSAAKFASFITQYSTGQVSVEIEWELQKENSKRWNPEIQYTSNYNKSVNVDFTVDTNGVYSEPRPIGTRYLTRNL

SEQ ID NO: 4956 - DNA, 2205 bp, Adeno-associated virus
atggctgccgatggttatcttccagattggctcgaggacactctctctgaaggaataagacagtggtggaagctcaaacctggcccaccaccaaagcccgcagagcggcataaggacgacagcaggggtcttgtgcttcctggatacaagtacctcggacccttcaacggactcgacaagggagagccggtcaacgaggcagacgccgcggccctcgagcacgacaaggcctacgaccggcagctcgacagcggagacaacccgtacctcaagtacaaccacgccgacgcggagtttcaggagcgccttaaagaagatacgtcttttgggggcaacctcggacgagcagtcttccaggcgaaaaagagggttcttgaacctctgggcctggttgaggaacctgttaagacggctccgggaaaaaagaggcccgtagagcactctcctgtggagccagactcctcctcgggaaccggaaaagcgggcaaccagcctgcaagaaaaagattgaatttcggtcagactggagacgcagactccgtacctgacccccagcctctcggacagccaccagcagccccctctggtctgggaactaatacgatggctacaggcagtggcgcaccaatggcagacaataacgagggcgccgacggagtgggtaattcctcgggagattggcattgcgattccacatggatgggcgacagagtcatcaccaccagcacccgcacctgggccctgcccacctacaacaaccacctctacaagcagatttccagccaatcaggagccagcaatgacaaccactactttggctacagcaccccttgggggtattttgacttcaacagattccactgccacttttcgccacgcgactggcagagactcatcaacaacaactggggattccggcccaaaagactcaacctcaagctgtttaacattcaagtcaaggaggtcacgcagaatgacggtacgacgacgattgccaataaccttaccagcacggttcaggtgtttactgacttggagtaccagctcccgtacgtcctcggctcggcgcatcaaggatgcctcccgccgttcccagcagacgtcttcatggtgccacagtatggatacctcaccctgaacaacgggagtcaggcggtaggacgctcttccttttactgcctggagtactttccttctcagatgcttcgtaccggaaacaactttaccttcagctacacttttgaagacgttcctttccacagcagctacgctcacagtcaaagtctggaccgtctcatgaatcctctcatcgaccagtacctgtattacttgagcagaacaaacactccaagcggaaccactacgcagtccaggcttcagttttctcaggccggagcgagtgacattcgggaccagtctaggaactggcttcctggaccctgttaccgccagcagcgagtatcaaagacagctgcggataacaacaacggtgaatactcgtggactggagctaccaagtaccacctcaatggcagagactctctggtgaatccgggcccggccatggccagccacaaggacgatgaagaaaagttttttcctcaaagcggggttctcatctttgggaagcaaggctcagagaaaacaaatgtggacattgaaaaggtcatgattacagacgaagaggaaatcaggaccaccaatcccgtggctacggagcagtatggttctgtatctaccaacctccagagcggcaacacacgagcagctacctcagatgtcaacacacaaggcgttcttccaggcatggtctggcaggacagagacgtgtacctgcaggggcccatctgggcaaaaattccacacacggacggacattttcacccctctcccctcatgggcggatttggacttaaacaccctcctccacagattctcattaagaataccccggtacctgcgaatccttcgaccaccttcagcgcggcaaagtttgcttccttcatcacacagtattccacggggcaggtcagcgtggagatcgagtgggagctgcagaaggagaacagcaaacgctggaatcccgaaattcagtacacttccaactacaacaaatctgttaatgtggactttactgtggacactaatggggtgtattcagagcctcgccctattggcaccagatacctgactcgtaatctgtaa

SEQ ID NO: 4957 - DNA, 3156 bp, Adeno-associated virus
cgattgaatttagcggccgcgaattcgcccttgctgcgtcaacggaccaatgagaactttcccttcaacgattgcgtcgacaagatggtgatctggtgggaggagggaaagatgaccgccaaggtcgtggagtcggccaaagccattctcggaggaagcaaggtgcgtgtggaccaaaagtgcaagtcttcggcccagatcgacccgactcccgtgatcgtcacctccaacaccaacatgtgcgccgtgattgatggaaactcaacgaccttcgagcaccagcagccgttgcaagaccggatgttcaaatttgaacttacccgccgtctggatcatgactttggaaaggtcaccaagcaggaagtgaaagactttttccggtgggcaaaggatcacgtggttgaggtggagcatgagttctacgtcaaaaagggtggagccaaaaaaagacccgcccccagtgacgcagatataagtgagcccaaacgggcgcgcgagtcagttgcgcagccatcgacgtcagacgcggaagcttcgatcaactacgcggacaggtaccaaaacaaatgttctcgtcacgtgggcatgaatctgatgctgtttccctgcagacaatgcgagcgaatgaatcagaattcaaatatctgcttcactcacggacagaaagactgtttagagtgctttcccgtgtcagaatctcaacccgtttctgtcgtcaaaaaggcgtatcagaaactgtgctacattcatcacatcatgggaaaggtgccagacgcttgcactgcttgcgacctggtcaatgtggatttggatgactgcatctctgaacaataaatgatttaaatcaggtatggctgccgatggttatcttccagattggctcgaggacactctctctgaaggaataagacagtggtggaagctcaaacctggcccaccaccaaagcccgcagagcggcataaggacgacagcaggggtcttgtgcttcctggatacaagtacctcggacccttcaacggactcgacaagggagagccggtcaacgaggcagacgccgcggccctcgagcacgacaaggcctacgaccggcagctcgacagcggagacaacccgtacctcaagtacaaccacgccgacgcggagtttcaggagcgccttaaagaagatacgtcttttgggggcaacctcggacgagcagtcttccaggcgaaaaagagggttcttgaacctctgggcctggttgaggaacctgttaagacggctccgggaaaaaagaggcccgtagagcactctcctgtggagccagactcctcctcgggaaccggaaaagcgggcaaccagcctgcaagaaaaagattgaatttcggtcagactggagacgcagactccgtacctgacccccagcctctcggacagccaccagcagccccctctggtctgggaactaatacgatggctacaggcagtggcgcaccaatggcagacaataacgagggcgccgacggagtgggtaattcctcgggagattggcattgcgattccacatggatgggcgacagagtcatcaccaccagcacccgcacctgggccctgcccacctacaacaaccacctctacaagcagatttccagccaatcaggagccagcaatgacaaccactactttggctacagcaccccttgggggtattttgacttcaacagattccactgccacttttcgccacgcgactggcagagactcatcaacaacaactggggattccggcccaaaagactcaacctcaagctgtttaacattcaagtcaaggaggtcacgcagaatgacggtacgacgacgattgccaataaccttaccagcacggttcaggtgtttactgacttggagtaccagctcccgtacgtcctcggctcggcgcatcaaggatgcctcccgccgttcccagcagacgtcttcatggtgccacagtatggatacctcaccctgaacaacgggagtcaggcggtaggacgctcttccttttactgcctggagtactttccttctcagatgcttcgtaccggaaacaactttaccttcagctacacttttgaagacgttcctttccacagcagctacgctcacagtcaaagtctggaccgtctcatgaatcctctcatcgaccagtacctgtattacttgagcagaacaaacactccaagcggaaccactacgcagtccaggcttcagttttctcaggccggagcgagtgacattcgggaccagtctaggaactggcttcctggaccctgttaccgccagcagcgagtatcaaagacagctgcggataacaacaacggtgaatactcgtggactggagctaccaagtaccacctcaatggcagagactctctggtgaatccgggcccggccatggccagccacaaggacgatgaagaaaagttttttcctcaaagcggggttctcatctttgggaagcaaggctcagagaaaacaaatgtggacattgaaaaggtcatgattacagacgaagaggaaatcaggaccaccaatcccgtggctacggagcagtatggttctgtatctaccaacctccagagcggcaacacacgagcagctacctcagatgtcaacacacaaggcgttcttccaggcatggtctggcaggacagagacgtgtacctgcaggggcccatctgggcaaaaattccacacacggacggacattttcacccctctcccctcatgggcggatttggacttaaacaccctcctccacagattctcattaagaataccccggtacctgcgaatccttcgaccaccttcagcgcggcaaagtttgcttccttcatcacacagtattccacggggcaggtcagcgtggagatcgagtgggagctgcagaaggagaacagcaaacgctggaatcccgaaattcagtacacttccaactacaacaaatctgttaatgtggactttactgtggacactaatggggtgtattcagagcctcgccctattggcaccagatacctgactcgtaatctgtaattgcttgttaatcaataaaccgtttaattcgtttcagttgaactttggtctctgcgaagggcgaattcgtttaaacctgcaggactagtccctttagtgag

SEQ ID NO: 4958 - protein, 734 aa, Adeno-associated virus
MAADGYLPDWLEDTLSEGIRQWWKLKPGPPPKPAERHKDDSRGLVLPGYKYLGPFNGLDKGEPVNEADAAALEHDKAYDRQLDSGDNPYLKYNHADAEFQERLKEDTSFGGNLGRAVFQAKKRVLEPLGLVEEPVKTAPGKKRPVEHSPVEPDSSSGTGKAGNQPARKRLNFGQTGDADSVPDPQPLGQPPAAPSGLGTNTMATGSGAPMADNNEGADGVGNSSGDWHCDSTWMGDRVITTSTRTWALPTYNNHLYKQISSQSGASNDNHYFGYSTPWGYFDFNRFHCHFSPRDWQRLINNNWGFRPKRLNLKLFNIQVKEVTQNDGTTTIANNLTSTVQVFTDLEYQLPYVLGSAHQGCLPPFPADVFMVPQYGYLTLNNGSQAVGRSSFYCLEYFPSQMLRTGNNFTFSYTFEDVPFHSSYAHSQSLDRLMNPLIDQYLYYLSRTNTPSGTTTQSRLQFSQAGASDIRDQSRNWLPGPCYRQQRVSKTAADNNNGEYSWTGATKYHLNGRDSLVNPGPAMASHKDDEEKFFPQSGVLIFGKQGSEKTNVDIEKVMITDEEEIRTTNPVATEQYGSVSTNLQSGNTRAATSDVNTQGVLPGMVWQDRDVYLQGPIWAKIPHTDGHFHPSPLMGGFGLKHPPPQILIKNTPVPANPSTTFSAAKFASFITQYSTGQVSVEIEWELQKENSKRWNPEIQYTSNYNKSVNVDFTVDTNGVYSEPRPIGTRYLTRNL

SEQ ID NO: 4959 - DNA, 2208 bp, Adeno-associated virus
atggctgccgatggttatcttccagattggctcgaggacactctctctgaaggaataagacagtggtggaagctcaaacctggcccaccaccaccaaagcccgcagagcggcataaggacgacagcaggggtcttgtgcttcctgggtacaagtacctcggacccttcaacggactcgacaagggagagccggtcaacgaggcagacgccgcggccctcgagcacgacaaggcctacgaccggcagctcgacagcggagacaacccgtacctcaagtacgaccacgccgacgcggagtttcaggagcgccttaaagaagatacgtcttttgggggcaacctcggacgagcagtcttccaggcaaaaaagagggttcttgaacctctgggcctggttgaggagcctgttaagacggctccgggaaaaaagaggccggtagagcactctcctgtggagccagactcctcctcgggaaccggaaaagcgggcaaccagcctgcaagaaagagattgaatttcggtcagactggagacgcagactccgtacctgacccccagcctctcggacagccaccagcagccccctctggtctgggaactaatacgatggctacaggcagtggcgcaccaatggcagacaataacgatggcgccgacggagtgggtaattcctcgggaaattggcattgcgattccacatggatgggcgacagagtcatcaccaccagcacccgaacctgggctctgcccacctacaacaaccatctgtacaagcagatttccagccaatcaggagccagcaacgacaaccactactttggctacagcaccccttgggggtattttgacttcaacagattccactgccacttttcaccacgtgactggcaaagactcatcaacaacaactggggattccggcccaagagactcaacttcaagctctttaacattcaagtcagagaggtcacgcagaatgatggtacgacgacgattgccaataaccttaccagcacggttcaggtgtttactgactcggagtaccagctcccgtacgtcctcggctcggcgcatcaaggatgcctcccgccgttcccagcagacgtcttcatggtgccacagtatggatacctcaccctgaacaacgggagtcaggcagtaggacgctcttcattttactgcctggagtacttcccttctcagatgctgcgtaccggaaacaactttaccttcagctacacctttgaggatgttcctttccacagcagctacgctcacagccagagtttggaccgtctcatgaatcctctcatcgaccagtacctgtattacttgagcagaacaaacactccaagcggaaccaccacgcagtccaggcttcagttttctcaggccggagcgagtgacattcgggatcagtctaggaactggcttcctggaccctgttaccgccagcagcgagtatcaaagacatctgcggacaacaacaacagtgaatactcgtggattggagctaccaagtaccacctcaatggcagagactctctggtgaatccgggcccggcaatggccagccacaaggacgatgaagaaaagttttttcctcagagcggggttctcatctttggaaaacaaggatcagagaaaacaaatgtggacattgaaaaggtcatgattacagacgaagaggaaatcagaaccaccaatcccgtggccacggagcagtatggttctgtatctaccaacctccagagcggcaacacacaagcatctactgcagatgtcaacacacaaggcgttcttccaggcatggtctggcaggacagagacgtgtacctgcaggggcctatctgggcaaagattccgcacacggacggacattttcacccctctcccctcatgggcggattcggacttaaacaccctcctccacagattctcatcaaaaacaccccggtacctgcgaatccttcgaccaccttcagtgcggcaaagtttgcttccttcatcacacagtattccacggggcgggtcagcgtggagatcgagtgggagctacagaaggagaacagcaaacgctggaatcccgagatccagtacacttccaactacaacaaatctgttaatgtggactttactgtggacactaatggtgtgtattcagagcctcgccccattggcaccagatacctgactcgtaatctgtaa

SEQ ID NO: 4960 - protein, 735 aa, Adeno-associated virus
MAADGYLPDWLEDTLSEGIRQWWKLKPGPPPPKPAERHKDDSRGLVLPGYKYLGPFNGLDKGEPVNEADAAALEHDKAYDRQLDSGDNPYLKYDHADAEFQERLKEDTSFGGNLGRAVFQAKKRVLEPLGLVEEPVKTAPGKKRPVEHSPVEPDSSSGTGKAGNQPARKRLNFGQTGDADSVPDPQPLGQPPAAPSGLGTNTMATGSGAPMADNNDGADGVGNSSGNWHCDSTWMGDRVITTSTRTWALPTYNNHLYKQISSQSGASNDNHYFGYSTPWGYFDFNRFHCHFSPRDWQRLINNNWGFRPKRLNFKLFNIQVREVTQNDGTTTIANNLTSTVQVFTDSEYQLPYVLGSAHQGCLPPFPADVFMVPQYGYLTLNNGSQAVGRSSFYCLEYFPSQMLRTGNNFTFSYTFEDVPFHSSYAHSQSLDRLMNPLIDQYLYYLSRTNTPSGTTTQSRLQFSQAGASDIRDQSRNWLPGPCYRQQRVSKTSADNNNSEYSWIGATKYHLNGRDSLVNPGPAMASHKDDEEKFFPQSGVLIFGKQGSEKTNVDIEKVMITDEEEIRTTNPVATEQYGSVSTNLQSGNTQASTADVNTQGVLPGMVWQDRDVYLQGPIWAKIPHTDGHFHPSPLMGGFGLKHPPPQILIKNTPVPANPSTTFSAAKFASFITQYSTGRVSVEIEWELQKENSKRWNPEIQYTSNYNKSVNVDFTVDTNGVYSEPRPIGTRYLTRNL

SEQ ID NO: 4961 - DNA, 2217 bp, Adeno-associated virus
atggctgccgatggttatcttccagattggctcgaggacaacctctctgagggcattcgcgagtggtgggacttgaaacctggagccccgaaacccaaagccaaccagcaaaagcaggacgacggccggggtctggtgcttcctggctacaagtacctcggacccttcaacggactcgacaagggggagcccgtcaacgcggcggacgcagcggccctcgagcacgacaaggcctacgaccagcagctcaaagcgggtgacaatccgtacctgcggtataaccacgccgacgccgagtttcaggagcgtctgcaagaagatacgtcttttgggggcaacctcgggcgagcagtcttccaggccaagaagcgggttctcgaacctctcggtctggttgaggaaggcgctaagacggctcctggaaagaagagaccggtagagccatcaccccagcgttctccagactcctctacgggcatcggcaagacaggccagcagcccgcgaaaaagagactcaactttgggcagactggcgactcagagtcagtgcccgaccctcaaccaatcggagaaccccccgcaggcccctctggtctgggatctggtacaatggctgcaggcggtggcgctccaatggcagacaataacgaaggcgccgacggagtgggtagttcctcaggaaattggcattgcgattccgcatggctgggcgacagagtcatcaccaccagcacccgaccctgggccctccccacctacaacaaccacctctacaagcaaatctccaacgggacatcgggaggaagcaccaacgacaacacctacttcggctacagcaccccctgggggtattttgactttaacagattccactgccacttctcaccacgtgactggcagcgactcatcaacaacaactggggattccggcccaagagactcaacttcaagctcttcaacatccaggtcaaggaggtcacgcagaatgaaggcaccaagaccatcgccaataaccttaccagcacgattcaggtctttacggactcggaataccagctcccgtacgtcctcggctctgcgcaccagggctgcccgcctccgttcccggcggacgtcttcatgattcctcagtacgggtacctgactctgaacaacggcagtcaggccgtgggccgttcctccttctactgcctggagtactttccttctcaaatgcggagaacgggcaacaactttgagttcagctaccagtttgaggacgtgccttttcacagcagctacgcgcatagccaaagcctggaccggctgatgaaccccctcatcgaccagtacctgtactacctgtctcggactcagtccacgggaggtaccgcaggaactcagcagttgctattttctcaggccgggcctaataacatgtcggctcaggccaaaaactggctacccgggccctgctaccggcagcaacgcgtctccacgacactgtcgcaaaataacaacagcaactttgcttggaccggtgccaccaagtatcatctgaatggcagagactctctggtaaatcccggtgtcgctatggcaacgcacaaggacgacgaagagcgattttttccatccagcggagtcttgatgtttgggaaacagggagctggaaaagacaacgtggactatagcagcgttatgctaaccagtgaggaagaaatcaaaaccaccaacccagtggccacagaacagtacggcgtggtggccgataacctgcaacagcaaaacgccgctcctattgtaggggccgtcaacagtcaaggagccttacctggcatggtctggcagaaccgggacgtgtacctgcagggtcctatctgggccaagattcctcacacggacggcaactttcatccttcgccgctgatgggaggctttggactgaaacacccgcctcctcagatcctgattaagaatacacctgttcccgcggatcctccaactaccttcagtcaagccaagctggcgtcgttcatcacgcagtacagcaccggacaggtcagcgtggaaattgaatgggagctgcagaaagagaacagcaagcgctggaacccagagattcagtatacttccaactactacaaatctacaaatgtggactttgctgtcaatactgagggtacttattcagagcctcgccccattggcacccgttacctcacccgtaacctgtaa

SEQ ID NO: 4962 - protein, 738 aa, Adeno-associated virus
MAADGYLPDWLEDNLSEGIREWWDLKPGAPKPKANQQKQDDGRGLVLPGYKYLGPFNGLDKGEPVNAADAAALEHDKAYDQQLKAGDNPYLRYNHADAEFQERLQEDTSFGGNLGRAVFQAKKRVLEPLGLVEEGAKTAPGKKRPVEPSPQRSPDSSTGIGKTGQQPAKKRLNFGQTGDSESVPDPQPIGEPPAGPSGLGSGTMAAGGGAPMADNNEGADGVGSSSGNWHCDSAWLGDRVITTSTRPWALPTYNNHLYKQISNGTSGGSTNDNTYFGYSTPWGYFDFNRFHCHFSPRDWQRLINNNWGFRPKRLNFKLFNIQVKEVTQNEGTKTIANNLTSTIQVFTDSEYQLPYVLGSAHQGCPPPFPADVFMIPQYGYLTLNNGSQAVGRSSFYCLEYFPSQMRRTGNNFEFSYQFEDVPFHSSYAHSQSLDRLMNPLIDQYLYYLSRTQSTGGTAGTQQLLFSQAGPNNMSAQAKNWLPGPCYRQQRVSTTLSQNNNSNFAWTGATKYHLNGRDSLVNPGVAMATHKDDEERFFPSSGVLMFGKQGAGKDNVDYSSVMLTSEEEIKTTNPVATEQYGVVADNLQQQNAAPIVGAVNSQGALPGMVWQNRDVYLQGPIWAKIPHTDGNFHPSPLMGGFGLKHPPPQILIKNTPVPADPPTTFSQAKLASFITQYSTGQVSVEIEWELQKENSKRWNPEIQYTSNYYKSTNVDFAVNTEGTYSEPRPIGTRYLTRNL

SEQ ID NO: 4963 - protein, 735 aa, Adeno-associated virus
MAADGYLPDWLEDTLSEGIRQWWKLKPGPPPPKPAERHKDDSRGLVLPGYKYLGPFNGLDKGEPVNEADAAALEHDKAYDRQLDSGDNPYLKYNHADAEFQERLKEDTSFGGNLGRAVFQAKKRVLEPLGLVEEPVKTAPGKKRPVEHSPVEPDSSSGTGKAGQQPARKRLNFGQTGDADSVPDPQPLGQPPAAPSGLGSTTMATGSGAPMADNNEGADGVGNSSGNWHCDSQWLGDRVITTSTRTWALPTYNNHLYKQISSQSGASNDNHYFGYSTPWGYFDFNRFHCHFSPRDWQRLINNNWGFRPKRLNFKLFNIQVKEVTQNDGTTTIANNLTSTVQVFTDSEYQLPYVLGSAHQGCLPPFPADVFMVPQYGYLTLNNGSQAVGRSSFYCLEYFPSQMLRTGNNFQFSYTFEDVPFHSSYAHSQSLDRLMNPLVDQYLYYLNKTQTNSGTLQQSRLLFSQAGPTNMSLQAKNWLPGPCYRQQRLSKQANDNNNSNFPWTAATKYHLNGRDSLVNPGPAMASHKDDEEKFFPMHGTLIFGKQGTNANDADLENVMITDEEEIRTTNPVATEQYGTVSNNLQNSNTGPTTGTVNHQGALPGMVWQDRDVYLQGPIWAKIPHTDGHFHPSPLMGGFGLKHPPPQIMIKNTPVPANPPTNFSSAKFASFITQYSTGQVSVEIEWELQKENSKRWNPEIQYTSNYNKSVNVDFTVDTNGVYSEPRPIGTRYLTRNL

SEQ ID NO: 4964 - DNA, 3158 bp, Adeno-associated virus
gattgaatttagcggccgcgaattcgcccttgctgcgtcaactggaccaatgagaactttcctttcaatgattgcgtcgacaagatggtgatctggtgggaggagggaaagatgaccgccaaggtcgtggagtcggccaaagccattctcggaggaagcaaggtgcgcgcggaccagaaatgcaagtcctcggcccagatagacccgactcccgtgattgtcacctccaacaccaacatgtgcgccgtgattgacgggaactcaacgaccttcgaacaccagcagccgttgcaagaccggatgttcaaatttgaactcacccgccgtctggatcatgactttgggaaggtcaccaagcaggaagtcaaagactttttccggtgggcaaaggatcacgtggttgaggtggagcatgaattctacgtcaaaaagggtggagctaagaaaagacccgcccccagtgacgcagatataagtgagcccaaacgggcgcgcgagtcagttgcgcagccatcgacgtcagacgcggaagcttcgatcaactacgcgggcaggtaccaaaacaaatgttctcgtcacgtgggcatgaatctgatgctgtttccctgcagacaatgcgagagaatgaatcagaattcaaatatctgcttcactcacggacagaaagactgtttagagtgctttcccgtgtcagaatctcaacccgtttctgtcgtcaaaaaggcgtatcagaaactttgctacattcatcatatcatgggaaaggtgccagacgcttgcactgcctgcgatctggtcaatgtggatttggatgactgcatctctgaacaataaatgatttaaatcaggtatggctgccgatggttatcttccagattggctcgaggacactctctctgaaggaataagacagtggtggaagctcaaacctggcccaccaccaccaaagcccgcagagcggcataaggacgacagcaggggtcttgtgcttcctgggtacaagtacctcggacccttcaacggactcgacaagggggagccggtcaacgaggcagacgccgcggccctcgagcacgacaaggcctacgaccggcagctcgacagcggagacaacccgtacctcaagtacaaccacgccgacgcggagtttcaggagcgccttaaagaagatacgtcttttgggggcaacctcggacgagcagtcttccaggcaaaaaagagggttcttgaacctctgggcctggttgaggaacctgttaaaacggctccgggaaaaaagaggccggtagagcactctcctgtggagccagactcctcctcgggaaccggaaaagcgggccagcagcctgcaagaaaaagattgaatttcggtcagactggagacgcagactccgtacctgacccccagcctctcggacagccaccagcagccccctctggtctgggatctactacaatggctacaggcagtggcgcaccaatggcagacaataacgagggtgccgatggagtgggtaattcctcgggaaattggcattgcgattcccaatggctgggcgacagagtcatcaccaccagcacccgcacctgggccctgcccacctacaacaaccacctctacaagcaaatctccagccaatcaggagcctcaaacgacaaccactactttggctacagcaccccctgggggtattttgacttcaacagattccactgccacttttcaccacgtgactggcaaagactcatcaacaacaactggggattccgacccaagagactcaacttcaagctctttaacattcaagtcaaagaggtcacgcagaatgacggtacgacgacgattgccaataaccttaccagcacggttcaggtgtttactgactcggagtaccagctcccgtacgtcctcggctcggcgcatcaaggatgcctcccgccgtttccagcggacgtcttcatggtcccacagtatggatacctcaccctgaacaacgggagtcaggcagtaggacgctcttcattttactgcctggagtactttccttctcagatgctgcgtaccggaaacaactttcaattcagctacacttttgaagacgtgcctttccacagcagctacgctcacagccagagtctggatcggctgatgaatcctctggtcgaccagtacctgtattatctgaacaagacacaaacaaatagtggaactcttcagcagtctcggctactgtttagccaagctggacccaccaacatgtctcttcaagctaaaaactggctgcctggaccttgctacagacagcagcgtctgtcaaagcaggcaaacgacaacaacaacagcaactttccctggactgcagctacaaagtatcatctaaatggccgggactcgttggttaatccaggaccagctatggccagtcacaaggatgacgaagaaaagtttttccccatgcatggaacccttatatttggtaaacaaggaacaaatgccaacgacgcggatttggaaaatgtcatgattacagatgaagaagaaatcaggaccaccaatcccgtggctacggagcagtacggaactgtatcaaataatttgcaaaactcaaacactggtccaactactggaactgtcaatcaccaaggagcgttacctggtatggtgtggcaggatcgagacgtgtacctgcagggacccatttgggccaagattcctcacaccgatggacactttcatccttctccactgatgggaggttttggactcaaacacccacctcctcaaatcatgatcaaaaacactcccgttccagccaatcctcccacaaacttcagttctgccaagtttgcttctttcatcacacagtattccacggggcaggtcagcgtggagatcgagtgggagctgcagaaggagaacagcaaacgctggaatcccgaaattcagtacacttccaactacaacaaatctgttaatgtggactttactgtggacactaatggtgtgtattcagagcctcgccccattggcaccagatacctgactcgtaatctgtaattgcttgttaatcaataaaccgtttaattcgtttcagttgaactttggtctctgcgaagggcgaattcgtttaaacctgcaggactagtccctttagtga

SEQ ID NO: 4965 - protein, 735 aa, Adeno-associated virus
MAADGYLPDWLEDTLSEGIRQWWKLKPGPPPPKPAERHKDDSRGLVLPGYKYLGPFNGLDKGEPVNEADAAALEHDKAYDRQLDSGDNPYLKYNHADAEFQERLKEDTSFGGNLGRAVFQAKKRVLEPLGLVEEPVKTAPGKKRPVEHPPVEPDSSSGTGKAGQQPARKRLNFGQTGDADSVPDPQPLGQPPAAPSGLGSTTMATGSGAPMADNNEGADGVGNSSGNWHCDSQWLGDRVITTSTRTWALPTYNNHLYKQISSQSGASNDNHYFGYSTPWGYFDFNRFHCHFSPRDWQRLINNNWGFRPKRLNFKLFNIQVKEVTQNDGTTTIANNLTSTVQVFTDSEYQLPYVLGSAHQGCLPPFPADVFMVPQYGYLTLNNGSQAVGRSSFYCLEYFPSQMLRTGNNFQFSYTFEDVPFHSSYAHSQSLDRLMNPLIDQYLYYLNKTQTNSGTLQQSRLLFSQAGPTNMSLQAKNRLPGPCYRQQRLSKQANDNNNSNFPWTAATKYHLNGRDSLVNPGPAMASHKDDEEKFFPMHGTLIFGKQGTNANDADLENVMITDEEEIRTTNPVATEQYGTVSNNLQNSNTGPTTGTVNHQGALPGMVWQDRDVYLQGPIWAKIPHTDGHFHPSPLVGGFGLKHPPPQIMIKNTPVPANPPTNFSSAKFASFITQYSTGQVSVEIEWELQKENSKRWNPEIQYTSNYNKSVNVDFTVDTNGVYSEPRPIGTRYLTRNL

SEQ ID NO: 4966 - DNA, 3159 bp, Adeno-associated virus
gattgaatttagcggccgcgaattcgcccttgctgcgtcaactggaccaatgagaactttcctttcaatgattgcgtcgacaagatggtgatctggtgggaggagggaaagatgaccgccaaggtcgtggagtcggccaaagccattctcggaggaagcaaggtgcgcgtggaccagaaatgcaagtcctcggcccagatagacccgactcccgtgattgtcacctccaacaccgacatgtgcgccgtgattgacgggaactcaacgaccttcgaacaccagcagccgttgcaagaccggatgttcaaatttgaactcacccgccgtctggatcatgactttgggaaggtcaccaagcaggaagtcaaagactttttccggtgggcaaaggatcacgtggttgaggtggagcatgaattctacgtcaaaaagggtggagctaagaaaagacccgcccccagtgacgcagatataagtgagcccaaacgggcgcgcgagtcagttgcgcagccatcgacgtcagacgcggaagcttcgatcaactacgcggacaggtaccaaaacaaatgttctcgtcacgtgggcatgaatctgatgctgtttccctgcagacaatgcgagagaatgaatcagaattcaaatatctgcttcactcacggacagaaagactgtttagagtgctttcccgtgtcagaatctcaacccgtttctgtcgtcaaaaaggcgtatcagaaactttgctacattcatcatatcatgggaaaggtgccagacgcttgcactgcctgcgatctggtcaatgtggatttggatgactgcatctctgaacaataaatgatttaaatcaggtatggctgccgatggttatcttccagattggctcgaggacactctctctgaaggaataagacagtggtggaagctcaaacctggcccaccaccaccaaagcccgcagagcggcataaggacgacagcaggggtcttgtgcttcctgggtacaagtacctcggacccttcaacggactcgacaagggggagccggtcaacgaggcagacgccgcggccctcgagcacgacaaggcctacgaccggcagctcgacagcggagacaacccgtacctcaagtacaaccacgccgacgcggagtttcaggagcgccttaaagaagatacgtcttttgggggcaacctcggacgagcagtcttccaggcaaaaaagagggttcttgaacctctgggcctggttgaggaacctgttaaaacggctccgggaaaaaagaggccggtagagcaccctcctgtggagccagactcctcctcgggaaccggaaaagcgggccagcagcctgcaagaaaaagattgaatttcggtcagactggagacgcagactccgtacctgacccccagcctctcggacagccaccagcagccccctctggtctgggatctactacaatggctacaggcagtggcgcaccaatggcagacaataacgagggtgccgatggagtgggtaattcctcgggaaattggcattgcgattcccaatggctgggcgacagagtcatcaccaccagcacccgcacctgggccctgcccacctacaacaaccacctctacaagcaaatctccagccaatcaggagcctcaaacgacaaccactactttggctacagcaccccctgggggtattttgacttcaacagattccactgccacttttcaccacgtgactggcaaagactcatcaacaacaactggggattccgacccaagagactcaacttcaagctctttaacattcaagtcaaagaggtcacgcagaatgacggtacgacgacgattgccaataaccttaccagcacggttcaggtgtttactgactcggagtaccagctcccgtacgtcctcggctcggcgcatcaaggatgcctcccgccgtttccagcggacgtcttcatggtcccacagtatggatacctcaccctgaacaacgggagtcaggcagtaggacgctcttcattttactgcctggagtactttccttctcagatgctgcgtaccggaaacaactttcagttcagctacacttttgaagacgtgcctttccacagcagctacgctcacagccagagtctggatcggctgatgaatcctctgatcgaccagtacctgtattatctgaacaagacacaaacaaatagtggaactcttcagcagtctcggctactgtttagccaagctggacccaccaacatgtctcttcaagctaaaaaccggctgcctggaccttgctacagacagcagcgtctgtcaaagcaggcaaacgacaacaacaacagcaactttccctggaccgcagctacaaagtatcatctaaatggccgggactcgttggttaatccaggaccagctatggccagtcacaaggatgacgaagaaaagtttttccccatgcatggaacccttatatttggtaaacaaggaacaaatgccaacgacgcggatttggaaaatgtcatgattacagatgaagaagaaatcaggaccaccaatcccgtggctacggagcagtacggaactgtatcaaataatttgcaaaactcaaacactggtccaactactggaactgtcaatcaccaaggagcgttacctggtatggtgtggcaggatcgagacgtgtacctgcagggacccatttgggccaagattcctcacaccgatggacactttcatccttctccactggtgggaggttttggactcaaacacccacctcctcaaatcatgatcaaaaacactcccgttccagccaatcctcccacaaacttcagttctgccaagtttgcttctttcatcacacagtattccacggggcaggtcagcgtggagatcgagtgggagctgcagaaggagaacagcaaacgctggaatcccgaaattcagtacacttccaactacaacaaatctgttaatgtggactttactgtggacactaatggtgtgtattcagagcctcgccccattggcaccagatacctgactcgtaatctgtaattgcttgttaatcaataaaccgtttaattcgtttcagttgaactttggtctctgcgaagggcgaattcgtttaaacctgcaggactagtccctttagtgag

SEQ ID NO: 4967 - DNA, 2208 bp, Adeno-associated virus
atggctgccgatggttatcttccagattggctcgaggacactctctctgaaggaataagacagtggtggaagctcaaacctggcccaccaccaccaaagcccgcagagcggcataaggacgacagcaggggtcttgtgcttcctgggtacaagtaccttggacccttcaacggactcgacaagggagagccggtcaacgaggcagacgccgcggccctcgagcacgacaaggcctacgaccggcagctcgacagcggagacaacccgtaccccaagtacaaccacgccgacgcggagttccaggagcgtcttaaagaagatacgtcttttgggggcaacctcggacgagcagtcttccaggcgaaaaagagggttcttgaacctctgggcctggttgaggaacctgttaagacggctccgggaaaaaagaggccggtagagcactctcctgcggagccagactcctcctcgggaaccggaaaagcgggccagcagcctgcaagaaagagattgaatttcggtcagactggagacgcagactccgtacctgacccccagcctctcggacagccaccagcagccccctctggtctgggaactaatacgatggctacaggcagtggcgcaccaatggcagacaataacgagggcgccgacggagtgggtaattcctcgggaaattggcattgcgattccacatggatgggcgacagagtcatcaccaccagcacccgcacctgggctctgcccacctacaacaaccacctctacaagcagatttccagccaatcaggagcctcaaacgacaaccactactttggctacagcaccccttgggggtattttgacttcaacagattccactgccacttttcgccacgtgactggcaaagactcatcaacaacaattggggattccggcccaaaagactcaacttcaagctctttaacattcaagtcaaggaggtcacgcagaatgacggtacgacgacgattgccaataaccttaccagcacggttcaggtgtttactgactcggagtaccagctcccgtacgtcctcggctcggcgcatcaaggatgcctcccgccgttcccagcagacgtcttcatggtgccacagtatggatacctcaccctgaacaacgggagtcaggcagtaggacgctcttcattttactgcctggagtactttccttctcagatgctgcgtaccggaaacaactttaccttcagctacacctttgaggacgttcctttccacagcagctacgcccacagccagagtttggaccgtctcatgaatcctctcatcgaccagtacctgtattacttgagcagaacaaacactccaagcggaaccaccacgcagtcaaggcttcagttttctcaggccggagcaagtgacattcgggaccagtctaggaactggcttcctggaccctgttaccgccagcagcgagtatcaaagacatctgcggataacaacaacagtgaatactcgtggactggagctaccaagtaccaccttaatggaagagactctctggtgaatccgggcccggccatggccagccacaaggacgatgaagaaaagttttttcctcagagcggggttctcatctttggaaaacaagactcgggaaaaactaatgtggacattgaaaaggtcatgattacagacgaagaggaaatcaggaccaccaatcccgtggctacggagcagtatggttctgtatctaccaacctccagagcggcaacacacaagcagctacctcagatgtcaacacacaaggcgttcttccaggcatggtgtggcaggacagagacgtgtacctgcaggggcccatctgggcaaagattccacacacggacggacattttcacccctctcccctcatgggcggattcggacttaaacaccctcccccgcagattctcatcaagaacaccccggtacctgcgaatccttcgactaccttcagtgcggcaaagtttgcttccttcattacacagtactccacggggcaggtcagcgtggagatcgagtgggagctgcagaaggagaacagcaaacgctggaatcccgagattcagtacacttccaactacaacaaatctgttaatgtggactttactgtggacactaatggtgtgtattcagagcctcgccccattggcaccaggtacctgactcgtaatctgtaa

SEQ ID NO: 4968 - protein, 735 aa, Adeno-associated virus
MAADGYLPDWLEDTLSEGIRQWWKLKPGPPPPKPAERHKDDSRGLVLPGYKYLGPFNGLDKGEPVNEADAAALEHDKAYDRQLDSGDNPYPKYNHADAEFQERLKEDTSFGGNLGRAVFQAKKRVLEPLGLVEEPVKTAPGKKRPVEHSPAEPDSSSGTGKAGQQPARKRLNFGQTGDADSVPDPQPLGQPPAAPSGLGTNTMATGSGAPMADNNEGADGVGNSSGNWHCDSTWMGDRVITTSTRTWALPTYNNHLYKQISSQSGASNDNHYFGYSTPWGYFDFNRFHCHFSPRDWQRLINNNWGFRPKRLNFKLFNIQVKEVTQNDGTTTIANNLTSTVQVFTDSEYQLPYVLGSAHQGCLPPFPADVFMVPQYGYLTLNNGSQAVGRSSFYCLEYFPSQMLRTGNNFTFSYTFEDVPFHSSYAHSQSLDRLMNPLIDQYLYYLSRTNTPSGTTTQSRLQFSQAGASDIRDQSRNWLPGPCYRQQRVSKTSADNNNSEYSWTGATKYHLNGRDSLVNPGPAMASHKDDEEKFFPQSGVLIFGKQDSGKTNVDIEKVMITDEEEIRTTNPVATEQYGSVSTNLQSGNTQAATSDVNTQGVLPGMVWQDRDVYLQGPIWAKIPHTDGHFHPSPLMGGFGLKHPPPQILIKNTPVPANPSTTFSAAKFASFITQYSTGQVSVEIEWELQKENSKRWNPEIQYTSNYNKSVNVDFTVDTNGVYSEPRPIGTRYLTRNL

SEQ ID NO: 4969 - DNA, 2208 bp, Adeno-associated virus
atggctgccgatggttatcttccagattggctcgaggacactctctctgaaggaataagacagtggtggaagctcaaacctggcccaccaccaccaaagcccgcagagcggcataaggacgacagcaggggtcttgtgcttcctgggtacaagtaccttggacccttcaacggactcgacaagggagagccggtcaacgaggcagacgccgcggccctcgagcacgacaaggcctacgaccggcagctcgacggcggagacaacccgtacctcaagtacaaccacgccgacgcggagttccaggagcgtcttaaagaagatacgtcttttgggggcaacctcggacgagcagtcttccaggcgaaaaagagggttcttgaacctctgggcctggttgaggaacctgttaagacggctccgggaaaaaagaggccggtagagcactctcttgcggagccagactcctcctcgggaaccggaaaagcgggccagcagcctgcaagaaggagattgaatttcggtcagactggagacgcagactccgtacctgacccccagcctctcggacagccaccagcagccccctctggtctgggaactaatacgatggctacaggcagtggcgcaccaatggcagacaataacgagggcgccgacggagtgggtaattcctcgggaaattggcattgcgattccacatggatgggcgacagagtcatcaccaccagcacccgcacctgggctctgcccacctacaacaaccacctctacaggcagatttccagccaatcaggagcctcaaacgacaaccactactttggctacagcaccccttgggggtattttgacttcaacagattccactgccacttttcgccacgtgactggcaaagactcatcaacaacaattggggatcccggcccaaaagactcaacttcaagctctttaacattcaagtcaaggaggtcacgcagaatgacggtacgacgacgattgccaataaccttaccagcacggttcaggtgtttactgactcggagtaccagctcccgtacgtcctcggctcggcgcatcaaggatgcctcccgccgttcccagcagacgtcttcatggtgccacagtatggatacctcaccctgaacaacgggagtcaggcagtaggacgctcttcattttactgcctggagtactttccttctcagatgctgcgtaccggaaacaactttaccttcagctacacctttgaggacgttcctttccacagcagctacgcccacagccagagtttggaccgtctcatgaatcctctcgtcgaccagtacctgtattacttgagcagaacaaacactccaagcggaaccaccacgcagtcaaggcttcagttttctcaggccggagcaagtgacattcgggaccagtctaggaactggcttcctggaccctgttaccgccagcagcgagtatcaaagacatctgcggataacaacaacagtgaatactcgtggactggagctaccaagtaccaccttaatggaagagactctctggtgaatccgggcccggccatggccagccacaaggacgatgaagaaaagttttttcctcagagcggggttctcatctttggaaaacaagactcgggaaaaactaatgtggacattgaaaaggtcatgattacagacgaagaggaaatcaggaccaccaatcccgtggctacggagcagtatggttctgtatctaccaacctccagagcggcaacacacaagcagctacctcagatgtcaacacacaaggcgttcttccaggcatggtgtggcaggacagagacgtgtacctgcaggggcccatctgggcaaagattccacacacggacggacattttcacccctctcccctcatgggcggattcggacttaaacaccctcccccgcagattctcatcaagaacaccccggtacctgcgaatccttcgactaccttcagtgcggcaaagtttgcttccttcattacacagtactccacggggcaggtcagcgtggagatcgagtgggagctgcagaaggagaacagcaaacgctggaatcccgagattcagtacacttccaactacaacaaatctgttaatgtggactttactgtggacactaatggtgtgtattcagagcctcgccccattggcaccagatacctgactcgtaatctgtaa

SEQ ID NO: 4970 - protein, 735 aa, Adeno-associated virus
MAADGYLPDWLEDTLSEGIRQWWKLKPGPPPPKPAERHKDDSRGLVLPGYKYLGPFNGLDKGEPVNEADAAALEHDKAYDRQLDGGDNPYLKYNHADAEFQERLKEDTSFGGNLGRAVFQAKKRVLEPLGLVEEPVKTAPGKKRPVEHSLAEPDSSSGTGKAGQQPARRRLNFGQTGDADSVPDPQPLGQPPAAPSGLGTNTMATGSGAPMADNNEGADGVGNSSGNWHCDSTWMGDRVITTSTRTWALPTYNNHLYRQISSQSGASNDNHYFGYSTPWGYFDFNRFHCHFSPRDWQRLINNNWGSRPKRLNFKLFNIQVKEVTQNDGTTTIANNLTSTVQVFTDSEYQLPYVLGSAHQGCLPPFPADVFMVPQYGYLTLNNGSQAVGRSSFYCLEYFPSQMLRTGNNFTFSYTFEDVPFHSSYAHSQSLDRLMNPLVDQYLYYLSRTNTPSGTTTQSRLQFSQAGASDIRDQSRNWLPGPCYRQQRVSKTSADNNNSEYSWTGATKYHLNGRDSLVNPGPAMASHKDDEEKFFPQSGVLIFGKQDSGKTNVDIEKVMITDEEEIRTTNPVATEQYGSVSTNLQSGNTQAATSDVNTQGVLPGMVWQDRDVYLQGPIWAKIPHTDGHFHPSPLMGGFGLKHPPPQILIKNTPVPANPSTTFSAAKFASFITQYSTGQVSVEIEWELQKENSKRWNPEIQYTSNYNKSVNVDFTVDTNGVYSEPRPIGTRYLTRNL

SEQ ID NO: 4971 - protein, 738 aa, Adeno-associated virus
MAADGYLPDWLEDNLSEGIREWWDLKPGAPKPKANQQKQDDGRGLVLPGYKYLGPFNGLDKGEPVNAADAAALEHDKAYDQQLKAGDNPYLRYNHADAEFQERLQEDTSFGGNLGRAVFQAKKRVLEPLGLVEEAAKTAPGKKRPVEPSPQRSPDSSAGIGKKGQQPAKKRLNFGQTGDSESVPDPQPIGEPPAGPSGLGSGTMAAGGGAPMADNNEGADGVGSSSGNWHCDSTWLGDRVITTSTRTWALPTYNNHLYKQISNGTSGGSTNDNTYFGYSTPWGYFDFNRFHCHFSPRDWQRLINNNWGFRPKRLSFKLFNIQVKEVTQNEGTETIANNLTSTIQVFTDSEYQLPYVLGSAHQGCLPPFPADVFMIPQYGYLTLNNGSQAVGRSSFYCLEYFPSQMLRTGNNFEFSYTFEDVPFHSSCAHSQSSDRLMNPLIDQYLYYLSRTRSTGGTQGTQQLLFSQAGPANMSAQAKNWLPGPCYRQQRVSTTLSQNNNSNFAWTGATKYHLNGRDSLVNPGVAMATHKDDEERFFPSSGVLMFGKQGAGRDNVDYSSVMLTSEEEIKTTNPVATEQYGVVADNLQQTNTGPIVGNVNSQGALPGMVWQNRDVYLQGPIWAKIPHTDGNFHPSPLMGGFGLKHPPPQILIKNTPVPADPPTTFSQAKLASFITQYSTGQVSVEIEWELQKENSKRWNPEIQYTSNYYKSTNVDFAVNTEGTYSEPRPIGTRYLTRNL

SEQ ID NO: 4972 - DNA, 2217 bp, Adeno-associated virus
atggctgctgacggttatcttccagattggctcgaggacaacctctctgagggcattcgcgagtggtgggacctgaaacctggagcccccaagcccaaggccaaccagcagaagcaggacgacggccggggtctggtgcttcttggctacaagtacctcggacccttcaacggactcgacaagggggagcccgtcaatgcggcggacgcagcggccctcgagcacgacaaggcctacgaccagcagctcaaagcgggtgacaatccgtacctgcggtataaccacgccgacgccgagtttcaggagcgtctgcaagaagatacgtcttttgggggcaacctcgggcgagcagtcttccaggccaagaagcgggttctcgaacctctcggtctggttgaggaagctgctaagacggctcctggaaagaagagaccggtagaaccgtcacctcagcgttcccccgactcctccacgggcatcggcaagaaaggccagcagcccgctaaaaagagactgaactttggtcagactggcgactcagagtcagtccccgaccctcaaccaatcggagaaccaccagcaggcccctctggtctgggatctggtacaatggctgcaggcggtggcgctccaatggcagacaataacgaaggcgccgacggagtgggtagttcctcaggaaattggcattgcgattccacatggctgggcgacagagtcatcaccaccagcacccgaacctgggccctgcccacctacaacaaccacctctacaagcaaatatccaatgggacatcgggaggaagcaccaacgacaacacctacttcggctacagcaccccctgggggtattttgacttcaacagattccactgccacttctcaccacgtgactggcagcgactcatcaacaacaactggggattccggccaaaaagactcagcttcaagctcttcaacatccaggtcaaggaggtcacgcagaatgaaggcaccaagaccatcgccaataaccttaccagcacgattcaggtatttacggactcggaataccagctgccgtacgtcctcggctccgcgcaccagggctgcctgcctccgttcccggcggacgtcttcatgattccccagtacggctaccttacactgaacaatggaagtcaagccgtaggccgttcctccttctactgcctggaatattttccatctcaaatgctgcgaactggaaacaattttgaattcagctacaccttcgaggacgtgcctttccacagcggctacgcacacagccagagcttggaccgactgatgaatcctctcatcgaccagtacctgtactacttatccagaactcagtccacaggaggaactcaaggtacccagcaattgttattttctcaagctgggcctgcaaacatgtcggctcaggctaagaactggctacctggaccttgctaccggcagcagcgagtctctacgacactgtcgcaaaacaacaacagcaactttgcttggactggtgccaccaaatatcacctgaacggaagagactctttggtaaatcccggtgtcgccatggcaacccacaaggacgacgaggaacgcttcttcccgtcgagtggagtcctgatgtttggaaaacagggtgctggaagagacaatgtggactacagcagcgttatgctaaccagcgaagaagaaattaaaaccactaaccctgtagccacagaacaatacggtgtggtggctgacaacttgcagcaaaccaatacagggcctattgtgggaaatgtcaacagccaaggagccttacctggcatggtctggcagaaccgagacgtgtacctgcagggtcccatctgggccaagattcctcacacggacggcaacttccacccttcaccgctaatgggaggatttggactgaagcacccacctcctcagatcctgatcaagaacacgccggtacctgcggatcctccaacgacgttcagccaggcgaaattggcttccttcattacgcagtacagcaccggacaggtcagcgtggaaatcgagtgggagctgcagaaggagaacagcaaacgctggaacccagagattcagtacacttcaaactactacaaatctacaaatgtggactttgctgtcaatacagagggaacttattctgagcctcgccccattggtactcgttacctcacccgtaatctgtaa

SEQ ID NO: 4973 - protein, 738 aa, Adeno-associated virus
MAADGYLPDWLEDNLSEGIREWWDLKPGAPKPKANQQKQDDGRGLVLLGYKYLGPFNGLDKGEPVNAADAAALEHDKAYDQQLKAGDNPYLRYNHADAEFQERLQEDTSFGGNLGRAVFQAKKRVLEPLGLVEEAAKTAPGKKRPVEPSPQRSPDSSTGIGKKGQQPAKKRLNFGQTGDSESVPDPQPIGEPPAGPSGLGSGTMAAGGGAPMADNNEGADGVGSSSGNWHCDSTWLGDRVITTSTRTWALPTYNNHLYKQISNGTSGGSTNDNTYFGYSTPWGYFDFNRFHCHFSPRDWQRLINNNWGFRPKRLSFKLFNIQVKEVTQNEGTKTIANNLTSTIQVFTDSEYQLPYVLGSAHQGCLPPFPADVFMIPQYGYLTLNNGSQAVGRSSFYCLEYFPSQMLRTGNNFEFSYTFEDVPFHSGYAHSQSLDRLMNPLIDQYLYYLSRTQSTGGTQGTQQLLFSQAGPANMSAQAKNWLPGPCYRQQRVSTTLSQNNNSNFAWTGATKYHLNGRDSLVNPGVAMATHKDDEERFFPSSGVLMFGKQGAGRDNVDYSSVMLTSEEEIKTTNPVATEQYGVVADNLQQTNTGPIVGNVNSQGALPGMVWQNRDVYLQGPIWAKIPHTDGNFHPSPLMGGFGLKHPPPQILIKNTPVPADPPTTFSQAKLASFITQYSTGQVSVEIEWELQKENSKRWNPEIQYTSNYYKSTNVDFAVNTEGTYSEPRPIGTRYLTRNL

SEQ ID NO: 4974 - protein, 735 aa, Adeno-associated virus
MAADGYLPDWLEDTLSEGIRQWWKLKPGPPPPKPAERHKDDSRGLVLPGYKYLGPFNGLDKGEPVNEADAAALEHDKAYDRQLDSGDNPYLKYNHADAEFQERLKEDTSFGGNLGRAVFQAKKRVLEPLGLVEPPVKTAPGKKRPVEHSPAEPDSSSGTGKAGQQPARKRLNFGQTGDADSVPDPQPLGQPPAAPSGLGSTTMATGSGAPMADNNEGADGVGNSSGNWHCDSQWLGDRVITTSTRTWALPTYNNHLYKQISSQSGASNDNHYFGYSTPWGYFDFNRFHCHFSPRDWQRLINNNWGFRPKRLNFKLFNIQVKEVTQNDGTTTIANNLTSTVQVFTDSEYQLPYVLGSAHQGCLPPFPADVFMVPQYGYLTLNNGSQAVGRSSFYCLEYFPSQMLRTGNNFQFSYTFEDVPFHSSYAHSQSLDRLMNPLIDQYLYYLNKTQSNSGTLQQSRLLFSQAGPTSMSLQAKNWLPGPCYRQQRLSKQANDNNNSNFPWTAATKYHLNGRDSLVNPGPAMASHKDDEEKFFPMHGTLIFGKQGTNANDADLDNVMITDEEEIRTTNPVATEQYGYVSNNLQNSNTGPTTGTVNHQGALPGMVWQDRDVYLQGPIWAKIPHTDGHFHPSPLMGGFGLKHPPPQIMIKNTPVPANPPTNFSSAKFASFITQYSTGQVSVEIEWELQKENSKRWNPEIQYTSNYNKSVNVDFTVDTNGVYSEPRPIGTRYLTRNL

SEQ ID NO: 4975 - protein, 735 aa, Adeno-associated virus
MAADGYLPDWLEDTLSEGIRQWWKLKPGPPPPKPAERHKDDSRGLVLPGYKYLGPFNGLDKGEPVNEADAAALEHDKAYDRQLDSGDNPYLKYNHADAEFQERLKEDTSFGGNLGRAVFQAKKRVLEPLGLVEGPVKTAPGKKRPVEHSPAEPDSSSGTGKAGQQPARKRLNFGQTGDADSVPDPQPLGQPPAAPSGLGSTTMATGSGAPMADNNEGADGVGNSSGNWHCDSQWLGDRVITTSTRTWALPTYNNHLYKQISSQSGASNDNHYFGYSTPWGYFDFNRFHCHFSPRDWQRLINNNWGFRPKRLNFKLFNIQVKEVTQNDGTTTIANNLTSTVQVFTDSEYQLPYVLGSAHQGCLPPFPADVFMVPQYGYLTLNNGSQAVGRSSFYCLEYFPSQMLRTGNNFQFSYTFEDVPFHSSYAHSQSLDRLMNPLIDQYLYYLNKTQSNSGTLQQSRLLFSQAGPTSMSLQAKNWLPGPCYRQQRLSKQANDNNNSNFPWTAATKYHLNGRDSLVNPGPAMASHKDDEEKFFPMHGTLIFGKQGTNANDADLDNVMITDEEEIRTTNPVATEQYGYVSNNLQNSNTGPTTGTVNHQGALPGMVWQDRDVYLQGPIWAKIPHTDGHFHPSPLMGGFGLKHPPPQIMIKNTPVPANPPTNFSSAKFASFITQYSTGQVSVEIEWELQKENSKRWNPEIQYTSNYNKSVNVDFTVDTNGVYSEPRPIGTRYLTRNL

SEQ ID NO: 4976 - DNA, 2208 bp, Adeno-associated virus
atggctgccgatggttatcttccagattggctcgaggacactctctctgaaggaataagacagtggtggaagctcaaacctggcccaccaccaccaaagcccgcagagcggcataaggacgacagcaggggtcttgtgcttcctgggtacaagtacctcggacccttcaacggactcgacaagggggagccggtcaacgaggcagacgccgcggccctcgagcacgacaaggcctacgaccggcagctcgacagcggagacaacccgtacctcaagtacaaccacgccgacgcggagtttcaggagcgtcttaaagaagatacgtcttttgggggcaacctcggacgagcagtcttccaggcgaaaaagagggttcttgaacctctgggcctggttgagggacctgttaagacggctccgggaaaaaagaggccggtagagcactctcctgcggagccagactcctcctcgggaaccggaaaagcgggccagcagcctgcaagaaaaagattgaattttggtcagactggagacgcagactccgtacctgacccccagcctctcggacagccaccagcagccccctctggtttgggatctactacaatggctacaggcagtggcgcaccaatggcagacaataacgagggtgccgatggagtgggtaattcctcaggaaattggcattgcgattcccaatggctgggcgacagagtcatcaccaccagcacccgaacctgggccctgcccacctacaacaaccacctctacaagcaaatctcaagccaatcaggagcctcaaacgacaaccactactttggctacagcaccccttgggggtattttgacttcaacagattccactgccacttttcaccacgtgactggcaaagactcatcaacaacaactggggattccgacccaagagactcaacttcaagctctttaacattcaagtcaaagaggtcacgcagaatgacggtacgacgacgattgccaataaccttaccagcacggttcaggtgtttactgactcggagtaccagctcccgtacgtcctcgggtcggcgcatcaaggatgcctcccgccgtttccagcggacgtcttcatggtcccacagtatggatacctcaccctgaacaacgggagtcaggcggtaggacgctcttccttttactgcctggagtactttccttctcagatgcttcgtactggaaacaactttcagttcagctacacctttgaagacgttcctttccacagcagctacgctcacagccagagtctggatcggctgatgaatcctctgatcgaccagtacctgtattatctgaacaaaacacaatcaaatagtggaactcttcagcagtctcggctactgtttagtcaagctggacccaccagcatgtctcttcaagctaaaaactggctacctggaccttgctacagacagcagcgtctgtcaaagcaggcaaacgacaacaacaacagcaactttccctggactgcggctacaaagtatcacctaaatggccgggactcgttggttaatccaggaccagctatggccagtcacaaagacgatgaagaaaagtttttccccatgcatggaaccctgatatttggtaaacaaggaacaaatgctaacgacgcggatttggacaatgtcatgattacagatgaagaagaaatccgcaccaccaatcccgtggctacggagcagtacggatatgtgtcaaataatttgcaaaactcaaatactggtccaactactggaactgtcaatcaccaaggagcgttacctggcatggtgtggcaggatcgagacgtgtacctgcagggacccatttgggccaagattcctcacaccgatggacactttcatccttctccactgatgggaggttttgggctcaaacacccgcctcctcagatcatgatcaaaaacactcccgttccagccaatcctcccacaaacttcagttctgccaagtttgcttctttcatcacacagtattccacggggcaggtcagcgtggagatcgagtgggagctgcagaaagagaacagcaaacgctggaatcccgaaattcagtacacttccaactacaacaaatctgttaatgtggactttactgtggacactaatggcgtgtattcagagcctcgccccattggcaccagatacctgactcgtaatctgtaa

SEQ ID NO: 4977 - DNA, 2211 bp, Adeno-associated virus
atggctgccgatggttatcttccagattggctcgaggacaacctctctgagggcattcgcgagtggtgggacttgaaacctggagccccgaagcccaaagccaaccagcaaaagcaggacgacggccggggtctggtgcttcctggctacaagtacctcggacccttcaacggactcgacaagggggagcccgtcaacgcggcggacgcagcggccctcgagcacgacaaggcctacgaccagcagctcaaagcgggtgacaatccgtacctgcggtataaccacgccgacgccgagtttcaggagcgtctgcaagaagatacgtcttttgggggcaacctcgggcgagcagtcttccaggccaagaagcgggttctcgaacctctcggtctggttgaggaaggcgctaagacggctcctggaaagaaacgtccggtagagcagtcgccacaagagccagactcctcctcgggcatcggcaagacaggccagcagcccgctaaaaagagactcaattttggtcagactggcgactcagagtcagtccccgatccacaacctctcggagaacctccagcaacccccgctgctgtgggacctactacaatggcttcaggcggtggcgcaccaatggcagacaataacgaaggcgccgacggagtgggtaatgcctcaggaaattggcattgcgattccacatggctgggcgacagagtcatcaccaccagcacccgcacctgggccttgcccacctacaataaccacctctacaagcaaatctccagtgcttcaacgggggccagcaacgacaaccactacttcggctacagcaccccctgggggtattttgatttcaacagattccactgccacttttcaccacgtgactggcagcgactcatcaacaacaattggggattccggcccaagagactcaacttcaaactcttcaacatccaagtcaaggaggtcacgacgaatgatggcgtcacaaccatcgctaataaccttaccagcacggttcaagtcttctcggactcggagtaccagcttccgtacgtcctcggctctgcgcaccagggctgcctccctccgttcccggcggacgtgttcatgattccgcaatacggctacctgacgctcaacaatggcagccaagccgtgggacgttcatccttttactgcctggaatatttcccttctcagatgctgagaacgggcaacaactttaccttcagctacacctttgaggaagtgcctttccacagcagctacgcgcacagccagagcctggaccggctgatgaatcctctcatcgaccaatacctgtattacctgaacagaactcaaaatcagtccggaagtgcccaaaacaaggacttgctgtttagccgtgggtctccagctggcatgtctgttcagcccaaaaactggctacctggaccctgttatcggcagcagcgcgtttctaaaacaaaaacagacaacaacaacagcaattttacctggactggtgcttcaaaatataacctcaatgggcgtgaatccatcatcaaccctggcactgctatggcctcacacaaagacgacgaagacaagttctttcccatgagcggtgtcatgatttttggaaaagagagcgccggagcttcaaacactgcattggacaatgtcatgattacagacgaagaggaaattaaagccactaaccctgtggccaccgaaagatttgggaccgtggcagtcaatttccagagcagcagcacagaccctgcgaccggagatgtgcatgctatgggagcattacctggcatggtgtggcaagatagagacgtgtacctgcagggtcccatttgggccaaaattcctcacacagatggacactttcacccgtctcctcttatgggcggctttggactcaagaacccgcctcctcagatcctcatcaaaaacacgcctgttcctgcgaatcctccggcggagttttcagctacaaagtttgcttcattcatcacccaatactccacaggacaagtgagtgtggaaattgaatgggagctgcagaaagaaaacagcaagcgctggaatcccgaagtgcagtacacatccaattatgcaaaatctgccaacgttgattttactgtggacaacaatggactttatactgagcctcgccccattggcacccgttaccttacccgtcccctgtaa

SEQ ID NO: 4978 - DNA, 2208 bp, Adeno-associated virus
atggctgccgatggttatcttccagattggctcgaggacactctctctgaaggaacaagacagtggtggaagctcaaacctggcccaccaccaccaaagcccgcagagcggcataaggacgacagcaggggtcttgtgcttcctgggtacaagtacctcggacccttcaacggactcgacaagggggagccggtcaacgaggcagacgccgcggccctcgagcacgacaaggcctacgaccggcagctcgacagcggagacaacccgtacctcaagtacaaccacgccgacgcggagtttcaggagcgtcttaaagaagatacgtcttttgggggcaacctcggacgagcagtcttccaggcgaaaaagagggttcttgaacctctgggcctggttgaggaacctgttaagacggctccgggaaaaaagaggccggtagagcactctcctgcggagccagactcctcctcgggaaccggaaaagcgggccagcagcctgcaagaaaaagattgaattttggtcagactggagacgcagactccgtacctgacccccagcctctcggacagccaccagcagccccctctggtttgggatctactacaatggctacaggcagtggcgcaccaatggcagacaataacgagggtgccgatggagtgggtaattcctcaggaaattggcattgcgattcccaatggctgggcgacagagtcatcaccaccagcacccgaacctgggccctgcccacctacaacaaccacctctacaagcaaatctcaagccaatcaggagcctcaaacgacaaccactactttggctacagcaccccttgggggtattttgacttcaacagattccactgccacttttcaccacgtgactggcaaagactcatcaacaacaactggggattccgacccaagagactcaacttcaagctctttaacattcaagtcaaagaggtcacgcagaatgacggtacgacgacgattgccaataaccttaccagcacggttcaggtgtttactgactcggagtaccagctcccgtacgtcctcgggtcggcgcatcaaggatgcctcccgccgtttccagcggacgtcttcatggtcccacagtatggatacctcaccctgaacaacgggagtcaggcggtaggacgctcttccttttactgcctggagtactttccttctcagatgcttcgtactggaaacaactttcagttcagctacacctttgaagacgttcctttccacagcagctacgctcacagccagagtctggatcggctgatgaatcctctgatcgaccagtacctgtattatctgaacaaaacacaatcaaatagtggaactcttcagcagtctcggctactgtttagtcaagctggacccaccagcatgtctcttcaagctaaaaactggctacctggaccttgctacagacagcagcgtctgtcaaagcaggcaaacgacaacaacaacagcaactttccctggactgcggctacaaagtaccacctaaatggccgggactcgttggttaatccaggaccagctatggccagtcacaaagacgatgaagaaaagtttttccccatgcatggaaccctgatatttggtaaacaaggaacaaatgctaacgacgcggatttggacaatgtcatgattacagatgaagaagaaatccgcaccaccaatcccgtggctacggagcagtacggatatgtgtcaaataatttgcaaaactcaaatactggtccaactactggaactgtcaatcaccaaggagcgttacctggcatggtgtggcaggatcgagacgtgtacctgcagggacccatttgggccaagattcctcacaccgatggacactttcatccttctccactgatgggaggttttgggctcaaacacccgcctcctcagatcatgatcaaaaacactcccgttccagccaatcctcccacaaacttcagttctgccaagtttgcttctttcatcacacagtattccacggggcaggtcagcgtggagatcgagtgggagctgcagaaagagaacagcaaacgctggaatcccgaaattcagtacacttccaactacaacaaatctgttaatgtggactttactgtggacactaatggcgtgtattcagagcctcgccccattggcaccagatacctgactcgtaatctgtaa

SEQ ID NO: 4979 - DNA, 2217 bp, Adeno-associated virus
atggctgctgacggttatcttccagattggctcgaggacaacctctctgagggcattcgcgagtggtgggacctgaaacctggagcccccaagcccaaggccaaccagcagaagcaggacgacggccggggtctggtgcttcctggctacaagtacctcggacccttcaacggactcgacaagggggagcccgtcaacgcggcggacgcagcggccctcgagcacgacaaggcctacgaccagcagctcaaagcgggtgacaatccgtacctgcggtataaccacgccgacgccgagtttcaggagcgtctgcaagaagatacgtcttttgggggcaacctcgggcgagcagtcttccaggccaagaagcgggttctcgaacctctcggtctggttgaggaagctgctaagacggctcctggaaagaagagaccggtagaaccgtcacctcagcgttcccccgactcctccacgggcatcggcaagaaaggccagcagcccgctaaaaagagactgaactttggtcagactggcgactcagagtcagtccccgaccctcaaccaatcggagaaccacctgcaggcccctctggtctgggatctggtacaatggctgcaggcggtggcgctccaatggcagacaataacgaaggcgccgacggagtgggtagttcctcaggaaattggcattgcgattccacatggctgggcgacagagtcatcaccaccagcacccgaacctgggccctgcccacctacaacaaccacctctacaagcaaatatccaatgggacatcgggagggagcaccaacgacaacacctacttcggctacagcaccccctgggggtattttgacttcaacagattccactgccacttctcaccacgtgactggcagcgactcatcaacaacaactggggattccggccaaaaagactcagcttcaagctcttcaacatccaggtcaaggaggtcacgcagaatgaaggcaccaagaccatcgccaataaccttaccagcacgattcaggtatttacggactcggaataccagctgccgtacgtcctcggctccgcgcaccagggctgcctgcctccgttcccggcggacgtcttcatgattccccagtacggctaccttacactgaacaatggaagtcaagccgtaggccgttcctccttctactgcctggaatattttccatctcaaatgctgcgaactggaaacaattttgaattcagctacaccttcgaggacgtgcctttccacagcagctacgcacacagccagagcttggaccgactgatgaatcctctcatcgaccagtacctgtactacttatccagaactcagtccacaggaggaactcaaggtacccagcaattgttattttctcaagctgggcctgcaaacatgtcggctcaggctaagaactggctacctggaccttgctaccggcagcagcgagtctctacgacactgtcgcaaaacaacaacagcaactttgcttggactggtgccaccaaatatcacctgaacggaagagactctttggtaaatcccggtgtcgccatggcaacccacaaggacgacgaggaacgcttcttcccgtcgagtggagtcctgatgtttggaaaacagggtgctggaagagacaatgtggactacagcagcgttatgctaaccagcgaagaagaaattaaaaccactaaccctgtagccacagaacaatacggtgtggtggctgacaacttgcagcaaaccaatacagggcctattgtgggaaatgtcaacagccaaggagccttacctggcatggtctggcagaaccgagacgtgtacctgcagggtcccatctgggccaagattcctcacacggacggcaactgccacccttcaccgctaatgggaggatttggactgaagcacccacctcctcagatcctgatcaagaacacgccggtacctgcggatcctccaacaacgttcagccaggcgaaattggcttccttcattacgcagtacagcaccggacaggtcagcgtggaaatcgagtgggagctgcagaaggagaacagcaaacgctggaacccagagattcagtacacttcaaactactacaaatctacaaatgtggactttgctgtcaatacagagggaacttattctgagcctcgccccattggtactcgttacctcacccgtaatctgtaa

SEQ ID NO: 4980 - protein, 735 aa, Adeno-associated virus
MAADGYLPDWLEDTLSEGTRQWWKLKPGPPPPKPAERHKDDSRGLVLPGYKYLGPFNGLDKGEPVNEADAAALEHDKAYDRQLDSGDNPYLKYNHADAEFQERLKEDTSFGGNLGRAVFQAKKRVLEPLGLVEEPVKTAPGKKRPVEHSPAEPDSSSGTGKAGQQPARKRLNFGQTGDADSVPDPQPLGQPPAAPSGLGSTTMATGSGAPMADNNEGADGVGNSSGNWHCDSQWLGDRVITTSTRTWALPTYNNHLYKQISSQSGASNDNHYFGYSTPWGYFDFNRFHCHFSPRDWQRLINNNWGFRPKRLNFKLFNIQVKEVTQNDGTTTIANNLTSTVQVFTDSEYQLPYVLGSAHQGCLPPFPADVFMVPQYGYLTLNNGSQAVGRSSFYCLEYFPSQMLRTGNNFQFSYTFEDVPFHSSYAHSQSLDRLMNPLIDQYLYYLNKTQSNSGTLQQSRLLFSQAGPTSMSLQAKNWLPGPCYRQQRLSKQANDNNNSNFPWTAATKYHLNGRDSLVNPGPAMASHKDDEEKFFPMHGTLIFGKQGTNANDADLDNVMITDEEEIRTTNPVATEQYGYVSNNLQNSNTGPTTGTVNHQGALPGMVWQDRDVYLQGPIWAKIPHTDGHFHPSPLMGGFGLKHPPPQIMIKNTPVPANPPTNFSSAKFASFITQYSTGQVSVEIEWELQKENSKRWNPEIQYTSNYNKSVNVDFTVDTNGVYSEPRPIGTRYLTRNL

SEQ ID NO: 4981 - DNA, 2208 bp, Adeno-associated virus
atggctgccgatggttatcttccagattggctcgaggacactctctctgaaggaataagacagtggtggaagctcaaacctggcccaccaccaccaaagcccgcagagcggcatcaggacaacagcaggggtcttgtgcttcctgggtacaagtacctcggaccctccaacggactcgacaaaggagagccggtcaacgaggcagacgccgcggccctcgagcacgacaaggcctacgaccggcagctcgacagcggagacaacccgtacctcaagtacaaccacgccgacgcggagtttcaggagcgtcttaaagaagatacgtcttttgggggcaacctcggacgagcagtcttccaggcgaaaaagagggttcttgaacctctgggcctggttgaggaacctgttaagacggctccgggaaaaaagaggccggtagagcactctcctgtggagccagactcctcctcgggaaccggaaaagcgggccatcagcctgcgagaaagagattgaattttggtcagactggagacgcagactccgtacctgacccccagcctctcggacagccaccagcagcccccacaagtttgggatctactacaatggctacaggcagtggcgcaccaatggcagacaataacgagggtgccgatggagtgggtaattcctcaggaaattggcattgcgattcccaatggctgggcgacagagtcatcaccaccagcacccgaacctgggccctgcccacctacaacaaccacctctacaagcaaatctccagccaatcaggagcctcgaacgacaaccactactttggctgcagcaccccctgggggtattttgacttcaacagattccactgtcacttctccccacgtgattggcaaagactcatcaacaacaactggggattccgacccaagagactcaacttcaagctctttaacattcaagtcaaagaggtcacgcagaatgacggtacgacgacgattgccaataaccttaccagcacggttcaggtgtttactgactcggagtacccgctcccgtacgtcctcggctcggcgcatcaaggatgcctcccgccgtttccagcggacgtcttcatggtcccacagtatggatacctcaccctgaacaacgggagtcaggcggtaggacgctcttccttttactgcctggagtactttccttctcagatgctgcgtaccggaaacaactttaccttcagctacacctttgaggacgttcctttccacagcagctacgctcacagccagagtttggaccggctgatgaatcctctgatcgaccagtatctatattatctgaacaggacacaatcaaatagtggaactcttcagcagtctaggctactgtttagccaagctggacccaccagcatgtctcttcaagctaaaaactggctgcctggaccttgctacagacagcagcgtctttcaaagcaggcaaacgacaacaacaacagcaactttccctggactgcggctacaaagtatcatctaaatggccgggactcgttggttaatccaggaccagctatggccagccacaaagacgatgaagaaaagtttttccccatgcatggaaccctgatatttggtaaacaaggaacaaatgctaacgacgcggatttggagcatgttatgattacagatgaagaagaaatcaggaccaccaatcctgtggctacagagcagtacggaaacgtgtcaaataatttgcaaaactcaaatactggtccaactacagaaaatgtcaatcaccagggagcgttacctggtatggtgtggcaggatcgagacgtgtacctgcagggacccatttgggccaagattcctcacaccgacggacactttcacccttctccactgatgggaggttttggactcaaacacccgcctcctcaaatcatgatcaaaaacactcccgttccagccaatcctcccacaaacttcagttctgccaagtttgcttctttcatcacacagtattccacgggccaggtcagcgtggagattgagtgggagctgcagaaggagaacagcaaacgctggaaccccgagatccagtatacttccaactacaacaaatctgttaatgtggactttactgtggacactaatggtgtgtattcagagccttgccccattggcaccagatacctgactcgtaatctgtaa

SEQ ID NO: 4982 - protein, 735 aa, Adeno-associated virus
MAADGYLPDWLEDTLSEGIRQWWKLKPGPPPPKPAERHQDNSRGLVLPGYKYLGPSNGLDKGEPVNEADAAALEHDKAYDRQLDSGDNPYLKYNHADAEFQERLKEDTSFGGNLGRAVFQAKKRVLEPLGLVEEPVKTAPGKKRPVEHSPVEPDSSSGTGKAGHQPARKRLNFGQTGDADSVPDPQPLGQPPAAPTSLGSTTMATGSGAPMADNNEGADGVGNSSGNWHCDSQWLGDRVITTSTRTWALPTYNNHLYKQISSQSGASNDNHYFGCSTPWGYFDFNRFHCHFSPRDWQRLINNNWGFRPKRLNFKLFNIQVKEVTQNDGTTTIANNLTSTVQVFTDSEYPLPYVLGSAHQGCLPPFPADVFMVPQYGYLTLNNGSQAVGRSSFYCLEYFPSQMLRTGNNFTFSYTFEDVPFHSSYAHSQSLDRLMNPLIDQYLYYLNRTQSNSGTLQQSRLLFSQAGPTSMSLQAKNWLPGPCYRQQRLSKQANDNNNSNFPWTAATKYHLNGRDSLVNPGPAMASHKDDEEKFFPMHGTLIFGKQGTNANDADLEHVMITDEEEIRTTNPVATEQYGNVSNNLQNSNTGPTTENVNHQGALPGMVWQDRDVYLQGPIWAKIPHTDGHFHPSPLMGGFGLKHPPPQIMIKNTPVPANPPTNFSSAKFASFITQYSTGQVSVEIEWELQKENSKRWNPEIQYTSNYNKSVNVDFTVDTNGVYSEPCPIGTRYLTRNL

SEQ ID NO: 4983 - DNA, 2196 bp, Adeno-associated virus
atggctgctgacggttatcttccagattggctcgaggacaacctctctgagggcattcgcgagtggtgggcgctgaaacctggagccccgcaacccaaagccaaccagcaaaagcaggacgacggccggggtctggtgcttcctggctacaagtacctcggacccttcaacggactcgacaagggggagcccgtcaacgaggcggacgccgcggccctcgagcacgacaaggcctacgaccagcagctcaaagcgggtgacaatccgtacctgcggtataatcacgccgacgccgagtttcaagagcgtctgcaagaagatacgtcctttgggggcaacctcgggcgagcagtcttccaggccaaaaagagggtactcgagcctctgggtctggttgaggaaggcgctaagacggctcctggaaagaagcggccagtagaaccggactccagctcgggcatcggcaagtcaggccagcagcccgcgaaaaagagactgaattttgggcagactggcgactcagagtcagtgcctgacccccaacctctctcagaaccacccgcaggtccctctggtctgggatctggtacaatggctgctggcggtggcgctccaatggcagacaataacgaaggcgccgacggagtgggtaatgtctcaggaaattggcattgcgattccacatggctgggcgaccgagtcatcaccaccagcactcggacctgggccctccccacctacaacaaccacctctacaagcaaatctccaacgggacctcgggaggcagcagcaacgacaacacctactttggctacagcaccccctgggggtattttgactttaacagattccactgccacttttcaccacgtgactggcagcgactcatcaacaacaactgggggttccggcccaagaagctcaacttcaagctcttcaacatccaggtcaaggaggtcacccagaatgaaggcaccaagaccatcgccaataacctcaccagcacggtgcaggtctttacggactcggagtaccagctcccgtacgtgctcggctctgcccaccagggctgcctgcctccgttcccggcggacgtgttcatgattccgcagtacgggtacctgacgctgaacaacgggagccaggccgtggggcgatcctccttctactgcctggagtactttccctcgcagatgctgagaacgggcaacaactttaccttcagctacaccttcgaggacgtgcccttccacagcagctacgcgcacagccagagcctggaccggctgatgaacccgctgattgaccagtacctgtactacctgtctcggactcagaccaacgggaccaatgccacgcagactctgttgtttgctcaggccgggcctcagaacatgtcggctcaggccaagaactggctgcctggtccttgctatcggcagcagcgcgtctctacgacagtgtcgcaaaacaacaacagcaactttacctggaccggggcgaccaagtaccacctgaacggccgagactccctggtgagccccggtgtcgccatggcaacgcacaaggacgacgaggagcgcttcttcccgagcagcggggtcctgatgtttggcaagcagggcgctggaaaggacaatgtcgagtacaccaacgtgatgctcaccagcgaggaggagatcaagaccaccaaccctgtggccacggagcagtacggcgtggtggctgacaatctgcagcagaccaactcagctcccattgtgggggcagtcaacagccagggggccttacccggtatggtctggcagaaccgggacgtgtacctgcagggtcccatctgggccaagatcccgcatacggacggcaactttcacccgtctcctctcatgggcggctttggactgaaacacccgcctccccagatcctgatcaaaaacacgccggtacctgcggatcccccggtgaactttacggacgctaagctggcgagtttcatcacgcagtacagcaccgggcaggtcagcgtggagattgagtgggagctgcagaaggagaacagcaagcgctggaatcccgagattcagtacacttccaattattataaatcagctaatgtggactttgccgtcaatgcagatggtgtatatagtgaaccccgccccattggcactcgttacctcacccgtaatctgtaa

SEQ ID NO: 4984 - protein, 731 aa, Adeno-associated virus
MAADGYLPDWLEDNLSEGIREWWALKPGAPQPKANQQKQDDGRGLVLPGYKYLGPFNGLDKGEPVNEADAAALEHDKAYDQQLKAGDNPYLRYNHADAEFQERLQEDTSFGGNLGRAVFQAKKRVLEPLGLVEEGAKTAPGKKRPVEPDSSSGIGKSGQQPAKKRLNFGQTGDSESVPDPQPLSEPPAGPSGLGSGTMAAGGGAPMADNNEGADGVGNVSGNWHCDSTWLGDRVITTSTRTWALPTYNNHLYKQISNGTSGGSSNDNTYFGYSTPWGYFDFNRFHCHFSPRDWQRLINNNWGFRPKKLNFKLFNIQVKEVTQNEGTKTIANNLTSTVQVFTDSEYQLPYVLGSAHQGCLPPFPADVFMIPQYGYLTLNNGSQAVGRSSFYCLEYFPSQMLRTGNNFTFSYTFEDVPFHSSYAHSQSLDRLMNPLIDQYLYYLSRTQTNGTNATQTLLFAQAGPQNMSAQAKNWLPGPCYRQQRVSTTVSQNNNSNFTWTGATKYHLNGRDSLVSPGVAMATHKDDEERFFPSSGVLMFGKQGAGKDNVEYTNVMLTSEEEIKTTNPVATEQYGVVADNLQQTNSAPIVGAVNSQGALPGMVWQNRDVYLQGPIWAKIPHTDGNFHPSPLMGGFGLKHPPPQILIKNTPVPADPPVNFTDAKLASFITQYSTGQVSVEIEWELQKENSKRWNPEIQYTSNYYKSANVDFAVNADGVYSEPRPIGTRYLTRNL

SEQ ID NO: 4985 - DNA, 2196 bp, Adeno-associated virus
atggctgctgacggttatcttccagattggctcgaggacaacctctctgagggcattcgcgagtggtgggcgctgaaacctggagccccgcaacccaaagccaaccagcaaaagcaggacgacggccggggtctggtgcttcctggctacaagtacctcggacccttcaacggactcgacaagggggagcccgtcaacgaggcggacgccgcggccctcgagcacgacaaggcctacgaccagcagctcaaagcgggtgacaatccgtacctgcggtataatcacgccgacgccgagtttcaagagcgtctgcaagaagatacgtcctttgggggcaacctcgggcgagcagtcttccaggccaaaaagagggtactcgagcctctgggtctggttgaggaaggcgctaagacggctcctggaaagaagcggccagtagaaccggactccagctcgggcatcggcaagtcaggccggcagcccgcgaaaaagagactgaattttgggcagactggcgactcagagtcagtgcctgacccccaacctctctcagaaccacccgcaggtccctctggtctgggatctggtacaatggctgcaggcggtggcgctccaatggcagacaataacgaaggcgccgacggagtgggtaatgcctcaggaaattggcattgcgattccacatggctgggcgaccgagtcatcaccaccagcactcggacctgggccctccccacctacaacaaccacctctacaagcaaatctccaacgggacctcgggaggcagcagcaacgacaacacctactttggctacagcaccccctgggggtattttgactttaacagattccactgccacttttcaccacgtgactggcagcgactcatcaacaacaactggggattccggcccaagaggctcaacttcaagctcttcaacatccaggtcaaggaggtcacccagaatgaaggcaccaagaccatcgccaataacctcaccagcacggtgcaggtctttacggactcgaagtaccagctcccgtacgtgctcggctctgcccaccagggctgcctgcctccgttcccggcggacgtgttcatgattccgcagtacgggtacctgacgctgaacaacgggagccaggccgtggggcgatcctccttctactgcctggagtactttccctcgcagatgctgagaacgggcaacaactttaccttcagctacaccttcgaggacgtgcccttccacagcagctacgcgcacagccagagcctggaccggctgatgaacccgctgattgaccagtacctgtactacctgtctcggactcagaccaacgggaccaatgccacgcagactctgttgtttgctcaggccgggcctcagaacatgtcggctcaggccaagaactggctgcctggtccttgctatcggcagcagcgcgtctctacgacagtgtcgcaaaacaacaacagcaactttacctggaccggggcgaccaagtaccacctgaacggccgagactccctggtgaaccccggtgtcgccatggcaacgcacaaggacgacgaggagcgcttcttcccgagcagcggggtcctgatgtttggcaagcagggcgctggaaaggacaatgtcgagtacaccaacgtgatgctcaccagcgaggaggagatcaagaccaccaaccctgtggccacggagcagtacggtgtggtggctgacaatctgcagcagaccaactcggctcccattgtgggggcagtcaacagccagggggccttacccggtatggtctggcagaaccgggacgtgtacctgcagggtcccatctgggccaagatcccgcatacggacggcaactttcacccgtctcctctcatgggcggctttggactgaaacacccgcctccccagatcctgatcaaaaacacgccggtacctgcggatcccccggtgaactttacggacgctaagctggcgagtttcatcacgcagtacagcaccgggcaggtcagcgtggagattgagtgggagctgcagaaggagaacagcaagcgctggaatcccgagattcagtacacttccaattattataaatcagctaatgtggactttgccgtcaatgcagatggtgtatatagtgaaccccgccccattggcactcgttacctcacccgtaatctgtaa

SEQ ID NO: 4986 - protein, 731 aa, Adeno-associated virus
MAADGYLPDWLEDNLSEGIREWWALKPGAPQPKANQQKQDDGRGLVLPGYKYLGPFNGLDKGEPVNEADAAALEHDKAYDQQLKAGDNPYLRYNHADAEFQERLQEDTSFGGNLGRAVFQAKKRVLEPLGLVEEGAKTAPGKKRPVEPDSSSGIGKSGRQPAKKRLNFGQTGDSESVPDPQPLSEPPAGPSGLGSGTMAAGGGAPMADNNEGADGVGNASGNWHCDSTWLGDRVITTSTRTWALPTYNNHLYKQISNGTSGGSSNDNTYFGYSTPWGYFDFNRFHCHFSPRDWQRLINNNWGFRPKRLNFKLFNIQVKEVTQNEGTKTIANNLTSTVQVFTDSKYQLPYVLGSAHQGCLPPFPADVFMIPQYGYLTLNNGSQAVGRSSFYCLEYFPSQMLRTGNNFTFSYTFEDVPFHSSYAHSQSLDRLMNPLIDQYLYYLSRTQTNGTNATQTLLFAQAGPQNMSAQAKNWLPGPCYRQQRVSTTVSQNNNSNFTWTGATKYHLNGRDSLVNPGVAMATHKDDEERFFPSSGVLMFGKQGAGKDNVEYTNVMLTSEEEIKTTNPVATEQYGVVADNLQQTNSAPIVGAVNSQGALPGMVWQNRDVYLQGPIWAKIPHTDGNFHPSPLMGGFGLKHPPPQILIKNTPVPADPPVNFTDAKLASFITQYSTGQVSVEIEWELQKENSKRWNPEIQYTSNYYKSANVDFAVNADGVYSEPRPIGTRYLTRNL

SEQ ID NO: 4987 - DNA, 2196 bp, Adeno-associated virus
atggctgctgacggttatcttccagattggctcgaggacaacctctctgagggcattcgcgagtggtgggcgctgaaacctggagccccgcaacccaaagccaaccagcaaaagcaggacgacggccggggtctggtgcttcctggctacaagtacctcggacccttcaacggactcgacaagggggagcccgtcaacgaggcggacgccgcggccctcgagcacgacaaggcctacgaccagcagctcaaagcgggtgacaatccgtacctgcggtataatcacgccgacgccgagtttcaagagcgtctgcaagaagatacgtcctttgggggcaacctcgggcgagcagtcttccaggccaaaaagagggtactcgagcctctgggtctggttgaggaaggcgctaagacggctcctggaaagaagcggccagtagaaccggactccagctcgggcatcggcaagtcaggccagcagcccgcgaaaaagagactgaattttgggccgactggcgactcagagtcagtgcctgacccccaacctctctcagaaccacctgcaggtccctctggtctgggatctggtacaatggctgcaggcggtggcgctccaatggcagacaataacgaaggcgccgacggagtgggtaatgtctcaggaaattggcattgcgattccacatggctgggcgaccgagtcatcaccaccagcactcggacctgggccctccccacctacaacaaccacctctacaagcaaatctccaacgggacctcgggaggcagcagcaacgacaacacctactttggctacagcaccccctgggggtattttgactttaacagattccactgccacttttcaccacgcgactggcagcgactcatcaacaacaactggggattccggcccaagaagctcaacttcaagctcttcaacatccaggtcaaggaggtcacccagaatgaaggcaccaagaccaccgccaataacctcaccagcacggtgcaggtctttacggactcggagtaccagctcccgtacgtgctcggctctgcccaccagggctgcctgcctccgttcccggcggacgtgttcatgattccgcagtacgggtacctgacgctgaacaacgggagccaggccgtggggcgatcctccttctactgcctggagtactttccctcgcagatgctgagaacgggcaacaactttaccttcagctacaccttcgaggacgtgcccttccacagcagctacgcgcacagccagagcctggaccggctgatgaacccgctgattgaccagtacctgtactacctgtctcggactcagaccaacgggaccaatgccacgcagactctgttgtttgctcaggccgggcctcagaacatgtcggctcaggccaagaactggctgcctggtccttgctatcggcagcagcgcgtctctacggcagtgtcgcaaaacaacaacagcaactttacctggaccggggcgaccaagtaccacctgaacggccgagactccctggtgaaccccggtgtcgccatggcaacgcacaaggacgacgaggagcgcttcttcccgagcagcggggtcctgatgtttggcaagcagggcgctggaaaggacaatgtcgagtacaccaacgtgatgctcaccagcgaggaggagatcaagaccaccaaccctgtggccacggagcagtacggtgtggtggctgacaatctgcagcagaccaactcggctcccattgtgggggcagtcaacagccagggggccttacccggtatggtctggcagaaccgggacgtgtacctgcagggtcccatctgggccaagatcccgcatacggacggcaactttcacccgtctcctctcatgggcggctttggactgaaacacccgcctccccagatcctgatcaaaaacacgccggtacctgcggatcccccggtgaactttacggacgctaagctggcgagtttcatcacgcagtacagcaccgggcaggtcagcgtggagattgagtgggagctgcagaaggagaacagcaagcgctggaatcccgagattcagtacacttccaattattataaatcagctaatgtggactttgccgtcaatgcagatggtgtatatagcgaaccccgccccattggcactcgttacctcacccgtaatctgtaa

SEQ ID NO: 4988 - protein, 731 aa, Adeno-associated virus
MAADGYLPDWLEDNLSEGIREWWALKPGAPQPKANQQKQDDGRGLVLPGYKYLGPFNGLDKGEPVNEADAAALEHDKAYDQQLKAGDNPYLRYNHADAEFQERLQEDTSFGGNLGRAVFQAKKRVLEPLGLVEEGAKTAPGKKRPVEPDSSSGIGKSGQQPAKKRLNFGPTGDSESVPDPQPLSEPPAGPSGLGSGTMAAGGGAPMADNNEGADGVGNVSGNWHCDSTWLGDRVITTSTRTWALPTYNNHLYKQISNGTSGGSSNDNTYFGYSTPWGYFDFNRFHCHFSPRDWQRLINNNWGFRPKKLNFKLFNIQVKEVTQNEGTKTTANNLTSTVQVFTDSEYQLPYVLGSAHQGCLPPFPADVFMIPQYGYLTLNNGSQAVGRSSFYCLEYFPSQMLRTGNNFTFSYTFEDVPFHSSYAHSQSLDRLMNPLIDQYLYYLSRTQTNGTNATQTLLFAQAGPQNMSAQAKNWLPGPCYRQQRVSTAVSQNNNSNFTWTGATKYHLNGRDSLVNPGVAMATHKDDEERFFPSSGVLMFGKQGAGKDNVEYTNVMLTSEEEIKTTNPVATEQYGVVADNLQQTNSAPIVGAVNSQGALPGMVWQNRDVYLQGPIWAKIPHTDGNFHPSPLMGGFGLKHPPPQILIKNTPVPADPPVNFTDAKLASFITQYSTGQVSVEIEWELQKENSKRWNPEIQYTSNYYKSANVDFAVNADGVYSEPRPIGTRYLTRNL

SEQ ID NO: 4989 - DNA, 4404 bp, Adeno-associated virus
atggctgccgatggttatcttccagattggctcgagggcaacctctctgagggcattcgcgagtggtgggacttgaaacctggagccccgaaacccaaagccaaccagcaaaagcaggacgacggccggggtctggtgcttcctggctacaggtacctcggacccttcaacggactcgacaagggagagccggtcaacgaggcagacgccgcggccctcgagcacgacaaggcctacgacaagcagctcgagcagggggacaacccgtacctcaagtacaaccacgccgacgccgagtttcaggagcgtcttcaagaagatacgtcttttgggggcaacctcgggcgagcagtcttccaggccaagaagcgggttctcgaacctctcggtctggttgaggaaggcgctaagacggctcctggaaagaagagacccatagaatcccccgactcctccacgggcatcggcaagaacggccagccgcccgctaaaaagaagctcaactttgggcagactggcgactcagagtcagtgcccgacccccaacctctcggagaacctcccgccgcgccctcaggtctgggatctggtacaatggctgcaggcggtggcgcaccaatggcagacaataacgaaggcgccgacggagtgggtaatgcctccggaaattggcattgcgattccacatggctgggcgacagagtcatcaccaccagcacccgcacctgggccctgcccacctacaacaaccacctctacaagcagatatcaagtcagagcggggctaccaacgacaaccacttcttcggctacagcaccccctggggctattttgacttcaacagattccactgccacttctcaccacgtgactggcagcgactcatcaacaacaactggggattccggcccagaaagctgcggttcaagttgttcaacatccaggtcaaggaggtcacgacgaacgacggcgttacgaccatcgctaataaccttaccagcacgattcaggtcttctcggactcggagtaccaactgccgtacgtcctcggctctgcgcaccagggctgcctccctccgttccctgcggacgtgttcatgattcctcagtacggatatctgactctaaacaacggcagtcagtctgtgggacgttcctccttctactgcctggagtactttccttctcagatgctgagaacgggcgataactttgaattcagctacacctttgaggaagtgcctttccacagcagctatgcgcacagccagagcctggaccggctgatgaatcccctcatcgaccagtacctgtactacctggcccggacccagagcactacggggtccacaagggagctgcagttccatcaggctgggcccaacaccatggccgagcaatcaaagaactggctgcccggaccctgttatcggcagcagagactgtcaaaaaacatagacagcaacaacaacagtaactttgcctggaccggggccactaaataccatctgaatggtagaaattcattaaccaacccgggcgtagccatggccaccaacaaggacgacgaggaccagttctttcccatcaacggagtgctggtttttggcaaaacgggggctgccaacaagacaacgctggaaaacgtgctaatgaccagcgaggaggagatcaaaaccaccaatcccgtggctacagaagaatacggtgtggtctccagcaacctgcaatcgtctacggccggaccccagacacagactgtcaacagccagggggctctgcccggcatggtctggcagaaccgggacgtgtacctgcagggtcccatctgggccaaaattcctcacacggacggcaactttcacccgtctcccctgatgggcggatttggactcaaacacccgcctcctcaaattctcatcaaaaacaccccggtacctgctaatcctccagaggtgtttactcctgccaagtttgcctcatttatcacgcagtacagcaccggccaggtcagcgtggagatcgagtgggaactgcagaaagaaaacagcaaacgctggaatccagagattcagtacacctcaaattatgccaagtctaataatgtggaatttgctgtcaacaacgaaggggtttatactgagcctcgccccattggcacccgttacctcacccgtaacctgtaaatggctgccgatggttatcttccagattggctcgaggacaacctctctgagggcattcgcgagtggtgggacttgaaacctggagccccgaaacccaaagccaaccagcaaaagcaggacgacggccggggtctggtgcttcctggctacaagtacctcggacccttcaacggactcgacaagggggagcccgtcaacgcggcggacgcagcggccctcgagcacgacaaggcctacgaccagcagctcaaagcgggtgacaatccgtacctgcggtataaccacgccgacgccgagtttcaggagcgtctgcaagaagatacgtcttttgggggcaacctcgggcgagcagtcttccaggccaagaagcgggttctcgaacctctcggtctggttgaggaaggcgctaagacggctcctggaaagaagagaccggtagagccatcaccccagcgttctccagactcctctacgggcatcggcaagaaaggccagcagcccgcgaaaaagagactcaactttgggcagactggcgactcagagtcagtgcccgaccctcaaccaatcggagaaccccccgcaggcccctctggtctgggatctggtacaatggctgcaggcggtggcgctccaatggcagacaataacgaaggcgccgacggagtgggtagttcctcaggaaattggcattgcgattccacatggctgggcgacagagtcatcaccaccagcacccgaacctgggccctccccacctacaacaaccacctctacaagcaaatctccaacgggacttcgggaggaagcaccaacgacaacacctacttcggctacagcaccccctgggggtattttgactttaacagattccactgccacttctcaccacgtgactggcagcgactcatcaacaacaactggggattccggcccaagagactcaacttcaagctcttcaacatccaggtcaaggaggtcacgcagaatgaaggcaccaagaccatcgccaataaccttaccagcacgattcaggtctttacggactcggaataccagctcccgtacgtcctcggctctgcgcaccagggctgcctgcctccgttcccggcggacgtcttcatgattcctcagtacgggtacctgactctgaacaatggcagtcaggccgtgggccgttcctccttctactgcctggagtactttccttctcaaatgctgagaacgggcaacaactttgagttcagctaccagtttgaggacgtgccttttcacagcagctacgcgcacagccaaagcctggaccggctgatgaaccccctcatcgaccagtacctgtactacctgtctcggactcagtccacgggaggtaccgcaggaactcagcagttgctattttctcaggccgggcctaataacatgtcggctcaggccaaaaactggctacccgggccctgctaccggcagcaacgcgtctccacgacactgtcgcaaaataacaacagcaactttgcctggaccggtgccaccaagtatcatctgaatggcagagactctctggtaaatcccggtgtcgctatggcaacccacaaggacgacgaagagcgattttttccgtccagcggagtcttaatgtttgggaaacagggagctggaaaagacaacgtggactatagcagcgttatgctaaccagtgaggaagaaattaaaaccaccaacccagtggccacagaacagtacggcgtggtggccgataacctgcaacagcaaaacgccgctcctattgtaggggccgtcaacagtcaaggagccttacctggcatggtctggcagaaccgggacgtgtacctgcagggtcctatctgggccaagattcctcacacggacggaaactttcatccctcgccgctgatgggaggctttggactgaaacacccgcctcctcagatcctgattaagaatacacctgttcccgcggatcctccaactaccttcagtcaagctaagctggcgtcgttcatcacgcagtacagcaccggacaggtcagcgtggaaattgaatgggagctgcagaaagaaaacagcaaacgctggaacccagagattcaatacacttccaactactacaaatctacaaatgtggactttgctgttaacacagatggcacttattctgagcctcgccccatcggcacccgttacctcacccgtaatctgtaa

SEQ ID NO: 4990 - protein, 738 aa, Adeno-associated virus; identical to SEQ ID NO: 4793

SEQ ID NO: 4991 - protein, 738 aa, Adeno-associated virus; identical to SEQ ID NO: 4793

SEQ ID NO: 4992 - DNA, 2501 bp, Adeno-associated virus
gaattcgcccttggctgcgtcaactggaccaatgagaactttcccttcaacgattgcgtcgacaagatggtgatctggtgggaggagggcaagatgacggccaaggtcgtggagtccgccaaggccattcatcatctgctggggcgggctcccgagattgcttgctcggcctgcgatctggtcaacgtggacctggatgactgtgtttctgagcaataaatgacttaaaccaggtatggctgccgatggttatcttccagattggctcgaggacaacctctctgagggcattcgcgagtggtgggacttgagacctggagccccgaaacccaaagccaaccagcaaaagcaggacgacggccggggtctggtgcttcctggctacaagtacctcggacccttcaacggactcgacaagggagagccggtcaacgaggcagacgccgcggccctcgagcacgacaaggcctacgacaagcagctcgagcagggggacaacccgtacctcaagtacaaccacgccgacgccgagtttcaggagcgtcttcaagaagatacgtcttttgggggcaacctcgggcgagcagtcttccaggccaagaagcgggttctcgaacctctcggtctggttgaggaaggcgctaagacggctcctggaaagaagagacccatagaatcccccgactcctccacgggcatcggcaagaaaggccagcagcccgctaaaaagagactcaactttgggcagactggcgactcagagtcagtgcccgaccctcaaccaatcggagaaccccccgcaggcccctctggtctgggatctggcacaatggctgcaggcggtggcgctccaatggcagacaataacgaaggcgccgacggagtgggtagttcctcaggaaattggcattgcgattccacatggctgggcgacagagtcatcaccaccagcacccgaacctgggccctccccacctacaacaaccacctctacaagcaaatctccaacgggacatcgggaggaagcaccaacgacaacacctacttcggctacagcaccccctgggggtattttgactttaacagattccactgccacttctcaccacgtgactggcagcgactcatcaacaacaactggggattccggcccaagagactcaacttcaagctcttcaacatccaggtcaaggaggtcacgcagaatgaaggcaccaagaccatcgccaataaccttaccagcacgattcaggtctttacggactcggaataccagctcccgtacgtcctcggctctgcgcaccagggctgcctgcctccgttcccggcggacgtcttcatgattcctcagtacgggtacctgactctgaacaacggcagtcaggccgtgggccgttcctccttctactgcctggagtactttccttctcaaatgctgagaacgggcaacaactttgagttcagctaccagtttgaggacgtgccttttcacagcagctatgcgcacagccaaagcctggaccggctgatgaaccccctcatcgaccagtacctgtactacctgtctcggactcagtccacgggaggtaccgcaggaactcagcagttgctattttctcaggccgggcctaataacatgtcggctcaggccaaaaactggctacccgggccctgctaccggcagcaacgcgtctccacgacagtgtcgcaaaataacaacagcaactttgcttggaccggtgccaccaagtatcatctgaatggcagagactctctggtaaatcccggtgtcgctatggcaacgcacaagggcgacgaagagcgattttttccatccagcggagtcttgatgtttgggaaacagggagctggaaaagacaacgtagactatagcagcgttatgctaaccagtgaggaagaaatcaaaaccaccaacccagtggccacagaacagtacggcgtggtggccgataacctgcaacagcaaaacgccgctcctattgtaggggccgtcaacagtcaaggagccttacctggcatggtctggcagaaccgggacgtgtacctgcagggtcctatctgggccaagattcctcacacggacggcaactttcatccttcgccgctgatgggaggctttggactgaaacacccgcctcctcagatcctgattaagaatacacctgttcccgcggatcctccaactaccttcagtcaagccaagctggcgtcgttcatcacgcagtacagcaccggacaggtcagcgtggaaattgaatgggagctgcagaaagagaacagcaagcgctggaacccagagattcagtatacttccaactactacaaatctacaaatgtggactttgctgtcaatactgagggtacttattcagagcctcgccccattggcacccgttacctcacccgtaacctgtaattgcctgttaatcaataaaccggttgattcgtttcagttgaactttggtctcaagggcgaattc

SEQ ID NO: 4993 - DNA, 2187 bp, Adeno-associated virus
atggctgccgatggttatcttccagattggctcgaggacaacctctctgagggcattcgcgagtggtgggacttgaaacctggagccccgaaacccaaagccaaccagcaaaagcaggacgacggccggggtctggtgcttcctggctacaagtacctcggacccttcaacggactcgacaagggagagccggtcaacgaggcagacgccgcggccctcgagcacgacaaggcctacgacaagcagctcgagcagggggacaacccgtacctcaagtacaaccacgccgacgccgagtttcaggagcgtcttcaagaagatacgtcttttgggggcaacctcgggcgagcagtcttccaggccaagaagcgggttctcgaacctctcggtctggttgaggaaggcgctaagacggctcctggaaagaagagacccatagaatcccccgactcctccacgggcatcggcaagaaaggccagcagcccgctaaaaagaagctcaactttgggcagactggcgactcagagtcagtgcccgacccccaacctctcggagaacctcccgccgcgccctcaggtctgggatctggtacaatggctgcaggcggtggcgcaccaatggcagacaataacgaaggcgccgacggagtgggtaatgcctccggaaattggcattgcgattccacatggctgggcgacagagtcatcaccaccagcacccgcacctgggccctgcccacctacaacaaccacctctacaagcagatatcaagtcagagcggggctaccaacgacaaccacttcttcggctacagcaccccctggggctattttgacttcaacagattccactgccacttctcaccacgtgactggcagcgactcatcaacaacaactggggattccggcccagaaagctgcggttcaagttgttcaacatccaggtcaaggaggtcacgacgaacgacggcgttacgaccatcgctaataaccttaccagcacgattcaggtcttctcggactcggagtaccaactgccgtacgtcctcggctctgcgcaccagggctgcctccctccgttccctgcggacgtgttcatgattcctcagtacggatatctgactctaaacaacggcagtcagtctgtgggacgttcctccttctactgcctggagtactttccttctcagatgctgagaacgggcaataactttgaattcagctacacctttgaggaagtgcctttccacagcagctatgcgcacagccagagcctggaccggctgatgaatcccctcatcgaccagtacctgtactacctggcccggacccagagcactacggggtccacaagggagctgcagttccatcaggctgggcccaacaccatggccgagcaatcaaagaactggctgcccggaccctgttatcggcagcagagactgtcaaaaaacatagacagcaacaacaacagtaactttgcctggaccggggccactaaataccatctgaatggtagaaattcattaaccaacccgggcgtagccatggccaccaacaaggacgacgaggaccagttctttcccatcaacggagtgctggtttttggcgaaacgggggctgccaacaagacaacgctggaaaacgtgctaatgaccagcgaggaggagatcaaaaccaccaatcccgtggctacagaagaatacggtgtggtctccagcaacctgcaatcgtctacggccggaccccagacacagactgtcaacagccagggggctctgcccggcatggtctggcagaaccgggacgtgtacctgcagggtcccatctgggccaaaattcctcacacggacggcaactttcacccgtctcccctgatgggcggatttggactcaaacacccgcctcctcaaattctcatcaaaaacaccccggtacctgctaatcctccagaggtgtttactcctgccaagtttgcctcatttatcacgcagtacagcaccggccaggtcagcgtggagatcgagtgggaactgcagaaagaaaacagcaaacgctggaatccagagattcagtacacctcaaattatgccaagtctaataatgtggaatttgctgtcaacaacgaaggggtttatactgagcctcgccccattggcacccgttacctcacccgtaacctgtaa

SEQ ID NO: 4994 - protein, 728 aa, Adeno-associated virus; identical to SEQ ID NO: 4765

SEQ ID NO: 4995 - protein, 728 aa, Adeno-associated virus; identical to SEQ ID NO: 4829

SEQ ID NO: 4996 - protein, 728 aa, Adeno-associated virus; identical to SEQ ID NO: 4829

SEQ ID NO: 4997 - DNA, 3113 bp, Adeno-associated virus
gaattcgccctttctacggctgcgtcaactggaccaatgagaactttcccttcaacgattgcgtcgacaagatggtgatctggtgggaggagggcaagatgacggccaaggtcgtggagtccgccaaggccattctcggcggcagcaaggtgcgcgtggaccaaaagtgcaagtcgtccgcccagatcgatcccacccccgtgatcgtcacttccaacaccaacatgtgcgccgtgattgacgggaacagcaccaccttcgagcaccagcagccgttacaagaccggatgttcaaatttgaactcacccgccgtctggagcatgactttggcaaggtgacaaagcaggaagtcaaagagttcttccgctgggcgcaggatcacgtgaccgaggtggcgcatgagttctacgtcagaaagggtggagccaacaagagacccgcccccgatgacgcggataaaagcgagcccaagcgggcctgcccctcagtcgcggatccatcgacgtcagacgcggaaggagctccggtggactttgccgacaggtaccaaaacaaatgttctcgtcacgcgggcatgcttcagatgctgcttccctgcaagacatgcgagagaatgaatcagaatttcagcatttgcttcacgcacgggaccagagactgttcagaatgtttccccggcgtgtcagaatctcaaccggtcgtcagaaagaggacgtatcggaaactctgtgccattcatcatctgctggggcgggctcccgagattgcttgctcggcctgcgatctggtcaacgtggacctggatgactgtgtttctgagcaataaatgacttaaaccaggtatggctgccgatggtcatcttccagattggctcgaggacaacctctctgagggcattcgcgagtggtgggacttgaaacctggagccccgaaacccaaagccaaccagcaaaagcaggacgacggccggggtctggtgcttcctggctacaagtacctcggacccttcaacggactcgacaagggggagcccgtcaacgcggcggacgcagcggccctcgagcacgacaaggcctacgaccagcagctcaaagcgggtgacaatccgtacctgcggtataaccacgccgacgccgagtttcaggagcgtcttcaagaagatacgtcttttgggggcaacctcgggcgagcagtcttccaggccaagaagcgggttctcgaacctctcggtctggttgaggaaggcgctaagacggctcctggaaagaagagacccatagaatcccccgactcctccacgggcatcggcaagaaaggccagcagcccgctaaaaagaagctcaactttgggcagactggcgactcagagtcagtgcccgaccctcaaccaatcggagaaccccccgcaggcccctctggtctgggatctggtacaatggctgcaggcggtggcgctccaatggcagacaataacgaaggcgccgacggagtgggtagttcctcaggaaattggcattgcgattccacatagctgggcgacagagtcatcaccaccagcacccgaacctgggccctccccacctacaacaaccacctctacaagcaaatctccaacgggacatcgggaggaagcaccaacgacaacacctacttcggctacagcaccccctgggggtattttgactttaacagattccactgccacttctcaccacgtgactggcagcgactcatcaacaacagctggggattccggcccaagagactcaacttcaagctcttcaacatccaggtcaaggaggtcacgcagaatgaaggcaccaagaccatcgccaataaccttaccagcacgattcaggtctttacggactcggaataccagctcccgtacgtcctcggctctgcgcaccagggctgcctgcctccgttcccggcggacgtcttcatgattcctcagtacgggtacctgactctgaacaacggcagtcaggccgtgggccgttcctccttctactgcctggagtactttccttctcaaatgctgagaacgggcaacaactttgagttcagctaccagtttgaggacgtgccttttcacagcagctacgcgcacagccaaagcctggaccggctgatgaaccccctcatcgaccagtacctgtactacctgtctcggactcagtccacgggaggtaccgcaggaactcagcagttgctattttctcaggccgggcctaataacatgtcggctcaggccaaaaactggctacccgggccctgctaccggcagcaacgcgtctccacgacactgtcgcaaaataacaacagcaactttgcttggaccggtgccaccaagtatcatctgaatggcagagactctctggtaaatcccggtgtcgctatggcaacgcacaaggacgacgaagagcgattttttccatccagcggagtcttgatgtttgggaaacagggagctggaaaagacaacgtggactatagcagcgttatgctaaccagtgaggaagaaatcaaaaccaccaacccagtggccacagaacagtacggcgtggtggccgataacctgcaacagcaaaacgccgctcctattgtaggggccgtcaacagtcaaggagccttacctggcatggtctggcagaaccgggacgtgtacctgcagggtcctatctgggccaagattcctcacacggacggcaactttcatccttcgccgctgatgggaggctttggactgaaacacccgcctcctcagatcctgattaagaatacacctgttcccgcggatcctccaactaccttcagtcaagccaagctggcgtcgttcatcacgcagtacagcaccggacaggtcagcgtggaaattgaatgggagctgcagaaagagaacagcaagcgctggaacccagagattcagtatacttccaactactacaaatctacaaatgtggactttgctgtcaatactgagggtacttattcagagcctcgccccattggcacccgttacctcacccgtaacctgtaattgcctgttaatcaataaaccggttaattcgtttcagttgaactttggtctctgcgaagggcgaattc

SEQ ID NO: 4998 - DNA, 3106 bp, Adeno-associated virus
gaattcgcccttctacggctgcgtcaactggaccaatgagaactttcccttcaacgattgcgtcgacaagatggtgatctggtgggaggagggcaagatgacggccaaggtcgtggagtccgccaaggccattctcggcggcagcaaggtgcgcgtggaccaaaagtgcaagtcgtccgcccagatcgaccccacccccgtgatcgtcacctccaacaccaacatgtgcgccgtgattgacgggaacagcaccaccttcgagcaccagcagccgttgcaggaccggatgttcaaatttgaactcacccgccgtctggagcatgactttggcaaggcgacaaagcaggaagtcaaagagttcttccgctgggcgcaggatcacgtgaccgaggtggcgcatgagttctacgtcagaaagggtggagccaacaagagacccgcccccgatgacgcggataaaagcgagcccaagcgggcccgcccctcagtcgcggatccatcgacgtcagacgcggaaggagctccggtggactttgccgacaggtaccaaaacaaatgttctcgtcacgcgggcatgcttcagatgctgtttccctgcaaaacatgcgagagaatgaatcagaatttcaacatttgcttcacgcacgggaccagagactgttcagaatgtttccccggcgtgtcagaatctcaaccggtcgtcagaaagaggacgtatcggaaactctgtgccattcatcatctgctggggcgggctcccgagattgcttgctcggcctgcgatctggtcaacgtggacctggatgactgtgtttctgagcaataaatgacttaaaccaggtatggctgccgatggttatcttccagattggctcgaggacaacctctctgagggcattcgcgagtggtgggacttgaaacctggagccccgaaacccaaagccaaccagcaaaagcaggacgacggccggggtctggtgcttcctggctacaagtacctcggacccttcaacggactcgacaagggagagccggtcaacgaggcagacgccgcggccctcgagcacgacaaggcctacgacaagcagctcgagcagggggacaacccgtacctcaagtacaaccacgccgacgccgagtttcaggagcgtcttcaagaagatacgtcttttgggggcaacctcgggcgagcagtcttccgggccaagaagcgggttctcgaacctctcggtctggttgaggaaggcgctaagacggctcctggaaagaagagacccatagaatcccccgactcctccacgggcatcggcaagaaaggccagcagcccgctaaaaagaagctcaactttgggcagactggcgactcagagtcagtgcccgacccccaacctctcggagaacctcccgccgcgccctcaggtctgggatctggtacaatggctgcaggcggtggcgcaccaatggcagacaataacgaaggcgccgacggagtgggtaatgcctccggaaattggcattgcgattccacatggctgggcgacagagtcatcaccaccagcacccgcacctgggccctgcccacctacaacaaccacctctacaagcagatatcaagtcagagcggggctaccaacgacaaccacttcttcggctacagcaccccctggggctattttgacttcaacagattccactgccacttctcaccacgtgactggcagcgactcatcaacaacaaccggggattccggcccagaaagctgcggttcaagttgttcaacatccaggtcaaggaggtcacgacgaacgacggcgttacgaccatcgctaataaccttaccagcacgattcaggtcttctcggactcggagtaccaactgccgtacgtcctcggctctgcgcaccagggctgcctccctccgttccctgcggacgtgttcatgattcctcagtacggatatctgactctaaacaacggcagtcagtctgtgggacgttcctccttctactgcctggagtactttccttctcagatgctgagaacgggcaataactttgaattcagctaccagtttgaggacgtgccctttcacagcagctacgcgcacagccaaagcctggaccggctgatgaaccccctcatcgaccagtacctgtactacctgtctcggactcagtccacgggaggtaccgcaggaactcagcagttgctattttctcaggccgggcctaataacatgtcggctcaggccaaaaactggctacccgggccctgctaccggcagcaacgcgtctccacgacactgtcgcaaaataacaacagcaactttgcttggaccggtgccaccaagtatcatctgaatggcagagactctctggtaaatcccggtgtcgctatggcaacgcacaaggacgacgaagagcgattttttccatccagcggagtcttgatgtttgggaaacagggagctggaaaagacaacgtggactatagcagcgttatgctaaccagtgaggaagaaatcaaaaccaccaacccagtggccacagaacagtacggcgtggtggccgataacctgcaacagcaaaacgccgctcctattgtaggggccgtcaacagtcaaggagccttacctggcatggcctggcagaaccgggacgtgtacctgcagggtcctatctgggccaagattcctcacacggacggcaactttcatccttcgccgctgatgggaggctttggactgaaacacccgcctcctcagatcctgattaagaatacacctgttcccgcggatcctccaactaccttcagtcaagccaagctggcgtcgttcatcacgcagtacagcaccggacaggtcagcgtggaaattgaatgggagctgcagaaagagaacagcaagcgctggaacccagagattcagtatacttccaactactacaaatctacaaatgtggactttgctgtcaatactgagggtacttattcagagcctcgccccattggcacccgttacctcacccgtaacctgtaattgcctgttaatcaataaaccggttaattcgtttcagttgaactttggtctctgcgaagggcgaattc

SEQ ID NO: 4999 - DNA, 3197 bp, Adeno-associated virus
gaattcgccctttctacggctgcgtcaactggaccaatgagaactttcccttcaacgattgcgtcgacaagatggtgatctggtgggaggagggcaagatgacggccaaggtcgtggagtccgccaaggccattctcggcggcagcaaggtgcgcgtggaccaaaagtgcaagtcgtccgcccagatcgaccccacccccgtgatcgtcacctccaacaccaacatgtgcgccgtgattgacgggaacagcaccaccttcgagcaccagcagccgttacaagaccggatgttcaaatttgaactcacccgccgtctggagcacgactttggcaaggtgacaaagcaggaagtcaaagagttcttccgctgggcgcaggatcacgtgaccgaggtggcgcatgagttctacgtcagaaagggtggagccaacaagagacccgcccccgatgacgcggataaaagcgagcccaagcgggcctgcccctcagtcgcggatccatcgacgtcagacgcggaaggagctccggtggactttgccgacaggtaccaaaacaaatgttctcgtcacgcgggcatgcttcagatgctgtttccctgcaagacatgcgagagaatgaatcagaatttcaacatttgcttcacgcacgggaccagagactgttcagaatgtttccccggcgtgtcagaatctcaaccggtcgtcagaaagaggacgtatcggaaactctgtgccattcatcatctgctggggcgggctcccgagattgcttgctcggcctgcgatctggtcaacgtggacctggatgactgtgtttctgagcaataaatgacttaaaccaggtatggctgccgatggttatcttccagattggctcgaggacaacctctctgagggcattcgcgagtggtgggacttgaaacctggagccccgaaacccaaagccaaccagcaaaagcaggacgacggccggggtctggtgcttcctggctacaagtacctcggacccttcaacggactcgacaagggagagccggtcaacgaggcagacgccgcggccctcgagcacgacaaggcctacgacaagcagctcgagcagggggacaacccgtacctcaagtacaaccacgccgacgccgagtttcaggagcgtcttcaagaagatacgtcttttgggggcaacctcgggcgagcagtcttccaggccaagaagcgggttctcgaacctctcggtctggttgaggaaggcgctaagacggctcctggaaagaagagaccggtagagccatcaccccagcgttctccagactcctctacgggcatcggcaagacaggccagcagcccgcgaaaaagagactcaactttgggcagactggcgactcagagtcagtgcccgaccctcaaccaatcggagaaccccccgcaggcccctctggtctgggatctggtacaatggctgcaggcggtggcgctccaatggcagacaataacgaaggcgccgacggagtgggtagttcctcaggaaattggcattgcgattccacatggctgggcgacagagtcatcaccaccagcacccgaacctgggccctccccacctacaacaaccacctctacaagcaaatctccaacgggacatcgggaggaagcaccaacgacaacacctacttcggctacagcaccccctgggggtattttgactttaacagattccactgccacttctcaccacgtgactggcagcgactcatcaacaacaactggggattccggcccaagagactcaacttcaagctcttcaacatccaggtcaaggaggtcacgcagaatgaaggcaccaagaccatcgccaataaccttaccagcacgattcaggtctttacggactcggaataccagctcccgtacgtcctcggctctgcgcaccagggctgcctgcctccgttcccggcggacgtcttcatgattcctcagtacgggtacctgactctgaacaacggcagtcaggccgtgggccgttcctccttctactgcctggagtactttccttctcaaatgctgagaacgggcaacaactttgagttcagctaccagtttgaggacgtgccttttcacagcagctacgcgcacagccaaagcctggaccggctgatgaaccccctcatcgaccagtacctgtactacctgtctcggactcagtccacgggaggtaccgcaggaactcagcagttgctattttctcaggccgggcctaataacatgtcggctcaggccaaaaactggctacccgggccctgctaccggcagcaacgcgtctccacgacactgtcgcaaaataacaacagcaactttgcttggaccggtgccaccaagtatcatctgaatggcagagactctctggtaaatcccggtgtcgctatggcaacgcacaaggacgacgaagagcgattttttccatccagcggagtcttgatgtttgggaaacagggagctggaaaagacaacgtggactatagcagcgttatgctaaccagtgaggaagaaatcaaaaccaccaacccagtggccacagaacagtacggcgtggtggccgataacctgcaacagcaaaacgccgctcctattgtaggggccgtcaacagtcaaggagccttacctggcatggtctggcagaaccgggacgtgtacctgcagggtcctatctgggccaagattcctcacacggacggcaactttcatccttcgccgctgatgggaggctttggactgaaacacccgcctcctcagatcctgattaagaatacacctgttcccgcggatcctccaactaccttcagtcaagccaagctggcgtcgttcatcacgcagtacagcaccggacaggtcagcgtggaaattgaatgggagctgcagaaagagaacagcaagcgctggaacccagagattcagtatacttccaactactacaaatctacaaatgtggactttgctgtcaatactgagggtacttattcagagcctcgccccattggcacccgttacctcacccgtaacctgtaattgcctgttaatcaataaaccggttaattcgtttcagttgaactttggtctctgcgaagggcgaattcgtttaaacctgcaggactagtccctttagtgagggttaattctgagcttggcgtaatcatgggtcatag

SEQ ID NO: 5000 - DNA, 3276 bp, Adeno-associated virus
gaattcgcccttcgcagagaccaaagttcaactgaaacgaattaaccggtttattgattaacaggcaattacaggttacgggtgaggtaacgggtgccaatggggcgaggctcagtataaaccccttcgttgttgacagcaaattccacattattagacttggcataatttgaggtgtactgaatctctggattccagcgtttgctgttttctttctgcagttcccactcgatctccacgctgacctggccggtgctgtactgcgtgataaatgaggcaaacttggcaggagtaaacacctctggaggattagcaggtaccggggtgtttttgatgagaatttgaggaggcgggtgtttgagtccaaatccgtccatcaggggagacgggtgaaagttgccgtccgtgtgaggaattttggcccagatgggaccctgcaggtacacgtcccggttctgccagaccatgccgggcagagccccctggctgttgacagtctgtgtctggggtccggccgtagacgattgcaggttgctggagaccacaccgtattcttctgtagccacgggattggtggttttgatctcctcctcgctggtcattagcacgttttccagcgttgtcttgttggcagcccccgttttgccaaaaaccagcactccgttgatgggaaagaactggtcctcgtcgtccttgttggtggccatggctacgcccgggttggttaatgaatttctaccattcagatggtatttagtggccccggtccaggcaaagttactgttgttgttgctgtctatgttttttgacagtctctgctgccgataacagggtccgggcagccagttctttgattgctcggccatggtgttgggcccagcctgatggaactgcagctcccttgtggaccccgtagtgctctgggtccgggccaggtagtacaggtactggtcgatgaggggattcatcagccggtccaggctctggctatgcgcatagctgctgtggaaaggcacttcctcaaaggtgtagctgaattcaaagttattgcccgttctcagcatctgagaaggaaagtactccaggcagtagaaggaggaacgtcccacagactgactgccgttgtttagagtcagatatccgtactgaggaatcatgaacacgtccgcagggaacggagggaggcagccctggtgcgcagagccgaggacgtacggcagttggtactccgagtccgagaagacctgaatcgtgctggtaaggttattagcgatggtcgtaacgccgtcgtccgtcgtgacctccttgacctggatgttgaacaacttgaaccgcagctttctgggccggaatccccagttgttgttgatgagtcgctgccagtcacgtggtgagaagtggcagtggaatctgttaaagtcaaaatacccccagggggtgctgtagccgaagtaggtgttgtcgttggtgcttcctcccgatgtcccgttggagatttgcttgtagaggtggttgttgtaggtggggagggcccaggttcgggtgctggtggtgatgactctgtcgcccagccatgtggaatcgcaatgccaatttcctgaggaactacccactccgtcggcgccttcgttattgtctgccattggagcgccaccgcctgcagccattgtaccagatcccagaccagaggggcctgcggggggttctccgattggttgagggtcgggcactgactctgagtcgccagtctgcccaaagttgagtctctttttcgcgggctgctggcctgtcttgccgatgcccgtagaggagtctggagaacgctggggtgatggctctaccggtctcttctttccaggagccgtcttagcgccttcctcaaccagaccgagaggttcgagaacccgcttcttggcctggaagactgctcgcccgaggttgcccccaaaagacgtatcttcttgaagacgctcctgaaactcggcgtcggcgtggttgtacttgaggtacgggttgtccccctgctcgagctgcttgtcgtaggccttgtcgtgctcgagggccgcggcgtctgcctcgttgaccggctctcccttgtcgagtccgttgaagggtccgaggtacttgtagccaggaagcaccagaccccggccgtcgtcctgcttttgctggttggctttgggtttcggggctccaggtttcaagtcccaccactcgcgaatgccctcagagaggttgtcctcgagccaatctggaagataaccatcggcagccatacctggtttaagtcatttattgctcagaaacacagtcatccaggtccacgttgaccagatcgcaggccgagcaagcaatctcgggagcccgccccagcagatgatgaatggcacagagtttccgatacgtcctctttctgacgaccggttgagattctgacacgccggggaaacattctgaacagtctctggtcccgtgcgtgaagcaaatgttgaaattctgattcattctctcgcatgtcttgcagggaaacagcatctgaagcatgcccgcgtgacgagaacacttgttttggtacctgtcggcaaagtccaccggagctccttccgcgtctgacgtcgatggatgcaaaatgtcgcaaaagcactcacgtgacagctaatacaggaccactcccctatgacgtgatttacgtcagcgctatgcccgcgtgacgagaacatttgttttggtacctgtcggcaaagtccaccggagctccttccgcgtctgacgtcgatggatccgcgactgaggggcaggcccgcttgggctcgcttttatccgcgtcatcgggggcgggtctcttgttggctccaccctttctgacgtagaactcatgcgccacctcggtcacgtgatcctgcgcccagcggaagaactctttgacttcctgctttgtcaccttgccaaagtcatgctccagacggcgggtgagttcaaatttgaacatccggtcctgcaacggctgctggtgctcgaaggtggtgctgttcccgtcaatcacggcgcacatgttggtgttggaagtgacgatcacgggggtgggatcgatctgggcggaagacttgcacttttggtccacgcgcaccttgctgccgccgagaatggccttggcggactccacgaccttggccgtcatcttgccctcctcccaccagatcaccatcttgtcgacgcaatcgttgaagggaaagttctcattggtccagttgacgcagccgtagaaagggcgaattc

SEQ ID NO: 5001 - protein, 738 aa, Adeno-associated virus; identical to SEQ ID NO: 4777

SEQ ID NO: 5002 - protein, 738 aa, Adeno-associated virus
MAADGYLPDWLEDNLSEGIREWWDLKPGAPKPKANQQKQDDGRGLVLPGYKYLGPFNGLDKGEPVNAADAAALEHDKAYDQQLKAGDNPYLRYNHADAEFQERLQEDTSFGGNLGRAVFQAKKRVLEPLGLVEEGAKTAPGKKRPVEPSPQRSPDSSTGIGKKGHQPARKRLNFGQTGDSESVPDPQPIGEPPAGPSGLGSGTMAAGGGAPMADNNEGADGVGSSSGNWHCDSTWLGDRVITTSTRTWALPTYNNHLYKQISNGTSGGSTNDNTYFGYSTPWGYFDFNRFHCHFSPRDWQRLINNNWGFRPKRLNFKLFNIQVKEVTQNEGTKTIANNLTSTIQVFTDSEYQLPYVPGSAHQGCLPPFPADVFMIPQYGYLTLNNGSQAVGRSSFYCLEYFPSQMLRTGNNFEFSYTFEDVPFHSSYAHSQSLDRLMNPLIDQYLYYLSRTQSTGGTQGTQQLLFSQAGPANMSAQAKNWLPGPCYRQQRVSTTLSQNNNSNFAWTGATKYHLNGRDSLVNPGVAMATHKDDEERFFPSSGVLMFGKQGAGKDNVDYSSVMLTSEEEIKTTNPVATEQYGVVADNLQQTNGAPIVGTVNSQGALPGMVWQNRDVYLQGPIWAKIPHTDGNFHPSPLMGGFGLKHPPPQILIKNTPVPADPPTTFSQAKLASFITQYSTGQVSVEIEWELQKENSKRWNPEIQYTSNYYKSTNVDFAVNTEGTYSEPRPIGTRYLTRNL

SEQ ID NO: 5003 - protein, 738 aa, Adeno-associated virus; identical to SEQ ID NO: 4775

SEQ ID NO: 5004 - DNA, 2489 bp, Adeno-associated virus
gaattcgccctttctacggctgcgtcaactggaccaatgagaactttcccttcaacgattgcgtcgacaagatggtgatctggtgggaggagggcaagatgacggccaaggtcgtgaagtccgccaaggccattcatcatctgctggggcgggctcccgagattgcttgctcggcctgcgatctggtcaacgtggacctggatgactgtgtttctgagcaataaatgacttaaaccaggtatggctgccgatggttatcttccagattggctcgaggacaacctctctgagggcattcgcgagtggtgggacttgaaacctggagccccgaaacccaaagccaaccagcaaaagcaggacgacggccggggtctggtgcttcctggctacaagtacctcggacccttcaacggactcgacaagggagagccggtcaacgaggcagacgccgcggccctcgagcacgacaaggcctacgacaagcagctcgagcagggggacaacccgtacctcaagtacaaccacgccgacgccgagtttcaggagcgtcttcaagaagatacgtcttttgggggcaacctcgggcgagcagtcttccaggccaagaagcgggttctcgaacctctcggtctggttgaggaaggcgctaagacggctcctggaaagaagagacccatagaatcccccgactcctccacgggcatcggcaggaaaggccagcagcccgctaaaaagaagctcaactttgggcagactggcgactcagagtcagtgcccgaccctcaaccaatcggagaaccccccgcaggcccctctggtctgggatctggtacaatggctgcaggcggtggcgctccaatggcagacaataacgaaggcgccgacggagtgggtaatgcctccggaaattggcattgcgattccacatggctgggcgacagagtcatcaccaccagcacccgcacctgggccctgcccacctacaacaaccacctctacaagcagatatcaagtcagagcggggctaccaacgacaaccacttcttcggctacagcaccccctggggctattttgacttcaacagattccactgccacttctcaccacgtgactggcagcgactcatcaacaacaactggggattccggcccagaaagctgcggttcaagttgttcaacatccaggtcaaggaggtcacgacgaacgacggcgttacgaccatcgccaataaccttaccagcacgattcaggtcttctcggactcggagtaccaactgccgtacgtcctcggctctgcgcaccagggctgcctccctccgttccctgcggacgtgttcatgattcctcagtacggatatctgactctaaacaacggcagtcagtctgtgggacgttcctccttctactgcctggagtactttccttctcagatgctgagaacgggcaataactttgaattcagctacacctttgaggaagtgcctttccacagcagctatgcgcacagccagagcctggaccggctgatgaatcccctcatcgaccagtacctgtactacctggcccggacccagagcactacggggtccacaagggagctgcagttccatcaggctgggcccaacaccatggccgagcaatcaaagaactggctgcccggaccctgttatcggcagcagagactgtcaaaaaacatagacagcaacaacaacagtaactttgcctggaccggggccactaaataccatctgaatggtagaaattcattaaccaacccgggcgtagccatggccaccaacaaggacgacgaggaccagttctttcccatcaacggagtgctggtttttggcaaaacgggggctgccaacaagacaacgctggaaaacgtgctaatgaccagcgaggaggagatcaaaaccaccaatcccgtggctacagaagaatacggtgtggtctccagcaacctgcaatcgtctacggccggaccccagacacagactgtcaacagccagggggctctgcccggcatggtctggcagaaccgggacgtgtacctgcagggtcccatctgggccaaaattcctcacacggacggcaactttcacccgtctcccctgatgggcggatttggactcaaacacccgcctcctcaaattctcatcaaaaacaccccggtacctgctaatcctccagaggtgtttactcctgccaagtttgcctcatttatcacgcagtacagcaccggccaggtcagcgtggagatcgagtgggaactgcagaaagaaaacagcaaacgctggaatccagagattcagtacacctcaaattatgccaagtctaataatgtggaatttgctgtcaacaacgaaggggtttatactgagcctcgccccattggcacccgttacctcacccgtaacctgtaattgcctgttaatcaataaaccggttaattcgtttcagttgaactttggtcaagggcgaattc

SEQ ID NO: 5005 - DNA, 3098 bp, Adeno-associated virus
gaattcgccctttctacggctgcgtcaactggaccaatgagaactttcccttcaacgattgcgtcgacaagatggtgatctggtgggaggagggcaagatgacggccaaggtcgtggagtccgccaaggccattctcggcggcagcaaggtgcgcgtggaccaaaagtgcaagtcttccgcccagatcgatcccacccccgtgatcgtcacttccaacaccaacatgtgcgccgtgattgacgggaacagcaccaccttcgagcaccagcagccgttacaagaccggatgttcaaatttgaactcacccgccgtctggagcacgactttggcaaggtgacaaagcaggaagtcaaagagttcttccgctgggcgcaggatcacgtgaccgaggtggcgcatgagttctacgtcagaaagggtggagccaacaagagacccgcccccgatgacgcggataaaagcgagcccaagcgggcctgcccctcagtcgcggatccatcgacgtcagacgcggaaggagctccggtggactttgccgacaggtaccaaaacaaatgttctcgtcacgcgggcatgcttcagatgctgtttccctgcaagacatgcgagagaatgaatcagaatttcaacatttgcttcacgcacgggaccggagactgttcagaatgtttccccggcgtgtcagaatctcaaccggtcgtcagaaagaggacgtatcggaaactctgtgccattcatcatctgctggggcgggctcccgagattgcttgctcggcctgcgatctggtcaacgtggacctggatgactgtgtttctgagcaataaatgacttaaaccaggtatggctgccgatggttatcttccagattggctcgaggacaacctctctgagggcattcgcgagtggtgggacttgaaacctggagccccgaaacccaaagccaaccagcaaaagcaggacgacggccggggtctggtgcttcctggctacaagtacctcggacccttcaacggactcgacaagggagagccggtcaacgcggcggacgcagcggccctcgagcacgacaaggcctacgaccagcagctcaaagcgggtgacaatccgtacctgcggtataaccacgccgacgccgagtttcaggagcgtcttcaagaagatacgtcttttgggggcaacctcgggcgagcagtcttccaggccaagaagcgggttctcgaacctctcggtctggttgaggaaggcgctaagacggctcctggaaagaagagacccatagaatcccccgactcctccacgggcatcggcaagaaaggccagcagcccgctaaaaagaagctcaactttgggcagactggcgactcagagtcagtgcccgaccctcaaccaatcggagaaccccccgcaggcccctctggtctgggatctggtacaatggctgcaggcggtggcgctccaatggcagacaataacgaaggcgccgacggagtgggtaatgcctccggaaattggcattgcgattccacatggctgggcgacagagtcatcaccaccagcacccgcacctgggccctgcccacctacaacaaccacctctacaagcagatatcaagtcagagcggggctaccaacgacaaccacttcttcggctacagcaccccctggggctattttgacttcaacagattccactgccacttctcaccacgtgactggcagcgactcatcaacaacaactggggattccggcccagaaagctgcggttcaagttgttcaacatccaggtcaaggaggtcacgacgaacgacggcgttacgaccatcgctaataaccttaccagcacgattcaggtcttctcggactcggagtaccaactgccgtacgtcctcggctctgcgcaccagggctgcctccctccgttccctgcggacgtgttcatgattcctcagtacggatatctgactctaaacaacggcagtcagtctgtgggacgttcctccttctactgcctggagtactttccttctcagatgctgagaacgggcaataactttgaattcagctacacctttgaggaagtgcctttccacagcagctatgcgcacagccagagcctggaccggctgatgaatcccctcatcgaccagtacctgtactacctggcccggacccagagcactacggggtccacaagggagctgcagttccatcaggctgggcccaacaccatggccgagcaatcaaagaactggctgcccggaccctgttatcggcggcagagactgtcaaaagacatagacagcaacaacaacagtaactttgcctggaccggggccactaaataccatctgaatggtagaaattcattaaccaacccgggcgtagccatggccaccaacaaggacgacgaggaccagttctttcccatcaacggagtgctggtttttggcaaaacgggggctgccaacaagacaacgctggaaaacgtgctaatgaccagcgaggaggagatcaaaaccaccaatcccgtggctacagaagaatacggtgtggtctccagcaacctgcaatcgtctacggccggaccccagacacagactgtcaacagccagggggctctgcccggcatggtctggcagaaccgggacgtgtacctgcagggtcccatctgggccaaaattcctcacacggacggcaactttcacccgtctcccctgatgggcggatttggactcaaacacccgcctcctcaaattctcatcaaaaacaccccggtacctgctaatcctccagaggtgtttactcctgccaagtttgcctcatttatcacgcagtacagcaccggccaggtcagcgtggagatcgagtgggaactgcagaaagagaacagcaaacgctggaatccagagattcagtacacctcaaattatgccaagtctaataatgtggaatttgctgtcaacaacgaaggggtttatactgagcctcgccccattggcacccgttacctcacccgtaacctgtaattacttgttaatcaataaaccggttgattcgtttcagttgaactttggtctctgcgaagggcgaattc

SEQ ID NO: 5006 - DNA, 2969 bp, Adeno-associated virus
gaattcgccctttctacggctgcgtcaactggaccaatgagaactttcccttcaacgattgcgtcgacaagatggtgatctggtgggaggagggcaagatgacggccaaggtcgtggagtccgccaaggccattctcggcggcagcaaggtgcgcgtggaccaaaagtgcaagtcgtccgcccagatcgaccccacccccgtgatcgtcacctccaacaccaacatgtgcgccgtgattgacgggaacagcaccaccttcgagcaccagcagccgttacaagaccggatgttcaaatttgaactcacccgccgtctggagcacgactttggcaaggtgacaaagcaggaagtcaaagagttcttccgctgggcgcaggatcacgtgaccgaggtggcgcatgagttctacgtcagaaagggtggagccaacaagagacccgcccccgatgacgcggataaaagcgagcccaagcgggcctgcccctcagtcgcggatccatcgacgtcagacgcggaaggagctccggtggactttgccgacaggtaccaaaacaaatgttctcgtcacgcgggcatgcttcagatgctgtttccctgcaagacatgcgagagaatgaatcagaatttcaacatttgcttcacgcacgggaccagagactgttcagaatgtttccccggcgtgtcagaatctcaaccggtcgtcagaaagaggacgtatcggaaactctgtgccattcatcatctgctggggcgggctcccgagattgcttgctcggcctgcgatctggtcaacgtggacctggatgactgtgtttctgagcaataaatgacttaaaccaggtatggctgccgatggttatcttccagattggctcgaggacaacctctctgagggcatccgcgagtggtgggacttgaaacctggagccccgaaacccaaagccaaccagcaaaagcaggacgacggccggggtctggtgcttcctggctacaagtacctcggacccttcaacggactcgacaagggagagccggtcaacgaggcagacgccgcggccctcgagcacgacaaggcctacgacaagcagctcgagcagggggacaacccgtacctcaagtacaaccacgccgacgccgagtttcaggagcgtcttcaagaagatacgtcttttgggggcaacctcgggcgagcagtcttccaggccaagaagcgggttctcgaacctctcggtctggttgaggaaggcgctaagacggctcctggaaagaagagaccggtagagccatcaccccagcgttctccagactcctctacgggcatcggcaagacaggccagcagcccgcgaaaaagagactcaactttgggcagactggcgactcagagtcagtgcccgaccctcaaccaatcggagaaccccccgcaggcccctctggtctgggatctggtacaatggctgcaggcggtggcgctccaatggcagacaataacgaaggcgccgacggagtgggtagttcctcaggaaattggcattgcgattccacatggctgggcgacagagtcatcaccaccagcacccgaacctgggccctccccacctacaacaaccacctctacaagcaaatctccaacgggacatcgggaggaagcaccaacgacaacacctacttcggctacagcaccccctgggggtattttgactttaacagattccactgccacttctcaccacgtgactggcagcgactcatcaacaacaactggggattccggcccaagagactcaacttcaagctcttcaacatccaggtcaaggaggtcacgcagaatgaaggcaccaagaccatcgccaataaccttaccagcacgattcaggtctttacggactcggaataccagctcccgtacgtcctcggctctgcgcaccagggctgcctgcctccgttcccggcggacgtcttcatgattcctcagtacgggtacctgactctgaacaacggcagtcaggccgtgggccgttcctccttctactgcctggagtactttccttctcaaatgctgagaacgggcaacaactttgagttcagctaccagtttgaggacgtgccttttcacagcagctacgcgcacagccaaagcctggaccggctgacgaaccccctcatcgaccagtacctgtactacctggcccggacccagagcactacggggtccacaagggggctgcagttccatcaggctgggcccaacaccatggccgagcaatcaaagaactggctgcccggaccctgttatcggcagcagagactgtcaaaaaacatagacagcaacaacaacagtaactttgcctggaccggggccactaaataccatctgaatggtagaaattcattaaccaacccgggcgtagccatggccaccaacaaggacgacgaggaccagttctttcccatcaacggagtgctggtttttggcaaaacgggggctgccaacaagacaacgctggaaaacgtgctaatgaccagcgaggaggagatcaaaaccaccaatcccgtggctacagaagaatacggtgtggtctccagcaacctgcaatcgtctacggccggaccccagacacagactgtcaacagccagggggctctgcccggcatggtctggcagaaccgggacgtgtacctgcagggtcccatctgggccaaaattcctcacacggacggcaactttcacccgtctcccctgatgggcggatttggactcaaacacccgcctcctcaaattctcatcaagtatacttccaactactacaaatctacaaatgtggactttgctgtcaatactgagggtacttattcagagcctcgccccattggcacccgttacctcacccgtaacctgtaattgcctgttaatcaataaaccggttaattcgtttcagttgaactttggtctctgcgaagggcgaattc

SEQ ID NO: 5007 - DNA, 3113 bp, Adeno-associated virus
gaattcgccctttctacggctgcgtcaactggaccaatgagaactttcccttcaacgattgcgtcgacaagatggtgatctggtgggaggagggcaagatgacggccaaggtcgtggagtccgccaaggccattctcggcggcagcaaggtgcgcgtggaccaaaagtgcaagtcgtccgcccagatcgatcccacccccgtgatcgtcacttccaacaccaacatgtgcgccgtgattgacgggaacagcaccaccttcgagcaccagcagccgttacaagaccggatgttcaaatttgaactcacccgccgtctggagcatgactttggcaaggtgacaaagcaggaagtcaaagagttcttccgctgggcgcaggatcacgtgaccgaggtggcgcatgagttctacgtcagaaagggtggagccaacaagagacccgcccccgatgacgcggataaaagcgagcccaagcgggcctgcccctcagtcgcggatccatcgacgtcagacgcggaaggagctccggtggactttgccgacaggtaccaaaacaaatgttctcgtcacgcgggcatgcttcagatgctgtttccctgcaagacatgcgagagaatgaatcagaatttcaacatttgcttcacgcacgggaccagagactgttcagaatgtttccccggcgtgtcagaatctcaaccggtcgtcagaaagaggacgtatcggaaactctgtgccattcatcatctgctggggcgggctcccgagattgcttgctcggcctgcgatctggtcaacgtggacctggatgactgtgtttctgagcaataaatgacttaaaccaggtatggctgccgatggttatcttccagattggctcgaggacaacctctctgagggcattcgcgagtggtgggacttgaaacctggagccccgaaacccaaagccaaccagcaaaagcaggacgacggccggggtctggtgcttcctggctacaagtacctcggacccttcaacggactcgacaagggggagcccgtcaacgcggcggacgcagcggccctcgagcacgacaaggcctacgaccagcagctcaaagcgggtgacaatccgtacctgcggtataaccacgccgacgccgagtttcaggagcgtcttcaagaagatacgtcttttgggggcaacctcgggcgagcagtcttccaggccaagaagcgggttctcgaacctctcggtctggttgaggaaggcgctaagacggctcctggaaagaagagacccatagaatcccccgactcctccacgggcatcggcaagaaaggccagcagcccgctaaaaagaagctcaactttgggcagactggcgactcagagtcagtgcccgaccctcaaccaatcggagaaccccccgcaggcccctctggtctgggatctggtacaatggctgcaggcggtggcgctccaatggcagacaataacgaaggcgccgacggagtgggtagttcctcaggaaattggcattgcgattccacatggctgggcgacagagtcatcaccaccagcacccgaacctgggccctccccacctacaacaaccacctctacaagcaaatctccaacgggacatcgggaggaagcaccaacgacaacacctacttcggctacagcaccccctgggggtattttgactttaacagattccactgccacttctcaccacgtgactggcagcgactcatcaacaacaactggggattccggcccaagagactcaacttcaagctcttcaacatccaggtcaaggaggtcacgcagaatgaaggcaccaagaccatcgccaataaccttaccagcacgattcaggtctttacggactcggaataccagctcccgtacgtcctcggctctgcgcaccagggctgcctgcctccgttcccggcggacgtcttcatgattcctcagtacgggtacctgactctgaacaacggcagtcaggccgtgggccgttcctccttctactgcctggagtactttccttctcaaatgctgagaacgggcaacaactttgagttcagctaccagtttgaggacgtgccttttcacagcagctatgcgcacagccaaagcctggaccggctgatgaaccccctcatcgaccagtacctgtactacctgtctcggactcagtccacgggaggtaccgcaggaactcagcagttgctattttctcaggccgggcctaataacatgtcggctcaggccaaaaactggctacccgggccctgctaccggcagcaacgcgtctccacgacagtgtcgcaaaataacaacagcaactttgcttggaccggtgccaccaagtatcatctgaatggcagagactctctggtaaatcccggtgtcgctatggcaacgcacaagggcgacgaagagcgattttttccatccagcggagtcttgatgtttgggaaacagggagctggaaaagacaacgtggactatagcagcgttatgctaaccagtgaggaagaaatcaaaaccaccaacccagtggccacagaacagtacggcgtggtggccgataacctgcaacagcaaaacgccgctcctattgtaggggccgtcaacagtcaaggagccttacctggcatggtctggcagaaccgggacgtgtacctgcagggtcctatctgggccaagattcctcacacggacggcaactttcatccttcgccgctgatgggaggctttggactgaaacacccgcctcctcagatcctgattaagaatacacctgttcccgcggatcctccaactaccttcagtcaagccaagctggcgtcgttcatcacgcagtacagcaccggacaggtcagcgtggaaattgaatgggagctgcagaaagagaacagcaagcgctggaacccagagattcagtatacttccaactactacaaatctacaaatgtggactttgctgtcaatactgagggtacttattcagagcctcgccccattggcacccgttacctcacccgtagcctgtaattgcctgttaatcaataaaccggttgattcgtttcagttgaactttggtctctgcgaagggcgaattc

SEQ ID NO: 5008 - DNA, 3128 bp, Adeno-associated virus
gaattcgccctttctacggctgcgtcaactggaccaatgagaactttcccttcaacgattgcgtcgacaagatggtgatctggtgggaggagggcaagatgacggccaaggtcgtggagtccgccaaggccattctcggcggcagcaaggtgcgcgtggaccaaaagtgcaagtcgtccgcccagatcgaccccacccccgtgatcgtcacctccaacaccaacatgtgcgccgtgattgacgggaacagcaccaccttcgagcaccagcagccgttgcaggaccggatgttcaaatttgaactcacccgccgtctggagcatgactttggcaaggtgacaaagcaggaagtcaaagagttcttccgctgggcgcaggatcacgtgaccgaggtggcgcatgagttctacgtcagaaagggtggagccaacaagagacccgcccccgatgacgcggataaaagcgagcccaagcgggcctgcccctcagtcgcggatccatcgacgtcagacgcggaaggagctccggtggactttgccgacaggtaccaaaacaaatgttctcgtcacgcgggcatgcttcagatgctgtttccctgcaagacatgcgagagaatgaatcagaatttcaacatttgcttcacgcgcgggaccagagactgttcagaatgtttcccgggcgtgtcagaatctcaaccggtcgtcagaaagaggacgtatcggaaactctgtgccattcatcatctgctggggcgggctcccgagattgcttgctcggcctgcgatctggtcaacgtggacctggatgactgtgtttctgagcaataaatgacttaaaccaggtatggctgccgatggttatcttccagattggctcgaggacaacctctctgagggcattcgcgagtggtgggacttgaaacctggagccccgaaacccaaagccaaccagcaaaagcaggacgacggccggggtctggtgcttcctggctacaagtacctcggacccttcaacggactcgacaagggggagcccgtcaacgcggcggacgcagcggccctcgagcacgacaaggcctacgaccagcagctcaaagcgggtgacaatccgtacctgcggtataaccacgccgacgccgagtttcaggagcgtctgcaagaagatacgtcttttgggggcaacctcgggcgagcagtcttccaggccaagaagcgggttctcgaacctctcggtctggttgaggaaggcgctaagacggctcctggaaagaagagaccggtagagccatcaccccagcgttctccagactcctctacgggcatcggcaagacaggccagcagcccgcgaaaaagagactcaactttgggcagactggcgactcagagtcagtgcccgaccctcaaccaatcggagaaccccccgcaggcccctctggtctgggatctggtacaatggctgcaggcggtggcgctccaatggcagacaataacgaaggcgccgacggagtgggtagttcctcaggaaattggcattgcgattccacatggctgggcgacagagtcatcaccaccagcacccgaacctgggccctccccacctacaacaaccacctctacaagcaaatctccaacgggacatcgggaggaagcaccaacgacaacacctacttcggctacagcaccccctgggggtattttgactttaacagattccactgccacttctcaccacgtgactggcagcgactcatcaacaacaactggggattccggcccaagagactcaacttcaagctcttcaacatccaggtcaaggaggtcacgcagaatgaaggcaccaagaccatcgccaataaccttaccagcacgattcaggtctttacggactcggaataccagctcccgtacgtcctcggctctgcgcaccagggctgcccgcctccgttcccggcggacgtcttcatgattcctcagtacgggtacctgactctgaacaacggcagtcaggccgtgggccgttcctccttctactgcctggagtactttccttctcaaatgcggagaacgggcaacaactttgagttcagctaccagtttgaggacgtgccttttcacagcagctacgcgcatagccaaagcctggaccggctgatgaaccccctcatcgaccagtacctgtactacctgtctcggactcagtccacgggaggtaccgcaggaactcagcagttgctattttctcaggccgggcctaataacatgtcggctcaggccaaaaactggctacccgggccctgctaccggcagcaacgcgtctccacgacactgtcgcaaaataacaacagcaactttgcttggaccggtgccaccaagtatcatctgaatggcagagactctctggtaaatcccggtgtcgctatggcaacgcacaaggacgacgaagagcgattttttccatccagcggagtcttgatgtttgggaaacagggagctggaaaagacaacgtggactatagcagcgttatgctaaccagtgaggaagaaatcaaaaccaccaacccagtggccacagaacagtacggcgtggtggccgataacctgcaacagcaaaacgccgctcctattgtaggggccgtcaacagtcaaggagccttacctggcatggtctggcagaaccgggacgtgtacctgcagggtcctatctgggccaagattcctcacacggacggcaactttcatccttcgccgctgatgggaggctttggactgaaacacccgcctcctcagatcctgattaagaatacacctgttcccgcggatcctccaactaccttcagtcaagccaagctggcgtcgttcatcacgcagtacagcaccggacaggtcagcgtggaaattgaatgggagctgcagaaagagaacagcaagcgctggaacccagagattcagtatacttccaactactacaaatctacaaatgtggactttgctgtcaatactgagggtacttattcagagcctcgccccattggcacccgttacctcacccgtaacctgtaattgcctgttaatcaataaaccggttaattcgtttcagttgaactttggtctctgcgaagggcgaattc

SEQ ID NO: 5009 - protein, 738 aa, Adeno-associated virus; identical to SEQ ID NO: 5002

SEQ ID NO: 5010 - DNA, 1933 bp, Adeno-associated virus
  modified_base (1302)..(1302): a, c, t or g
caaggcctacgaccagcagctcaaagcgggtgacaatccgtacctgcggtataaccacgccgacgccgagtttcaggagcgtcttcaagaagatacgtcttttgggggcaacctcgggcgagcagtcttccaggccaaaaagcgggttctcgaacctcttggtctggttgagacgccagctaagacggcacctggaaagaagcgaccggtagactcgccagactccacctcgggcatcggcaagaaaggccagcagcccgcgaaaaagagactcaactttgggcagactggcgactcagagtcagtccccgaccctcaaccaatcggagaaccaccagcaggcccctctggtctgggatctggtacaatggctgcaggcggtggcgcaccaatggctgacaataacgagggcgccgacggagtgggtaatgcctcaggaaattggcattgcgattccacatggctgggcgacagagtcatcaccaccagcacccgaacctgggccctgcccacctacaacaaccacctctacaagcaaatctccagtcagtcagcagggagcaccaacgataacgtctatttcggctacagcaccccctgggggtattttgacttcaacagattccattgccacttctcaccacgtgactggcagcgacttatcaacaacaactggggattccggcccaagaagctcaacttcaagctcttcaacatccaggtcaaggaggtcacgacgaatgacggtgtcacaaccatcgctaataaccttaccagcacggttcaggtcttttcggactcggaatatcaactgccgtacgtcctcggctccgcgcaccagggctgcctgcctccgttcccggcagacgtgttcatgattccgcagtacggatacctgactctgaacaatggcagccaatcggtaggccgttcctccttctactgcctggagtactttccttctcagatgctgagaacgggcaacaacttcacctttagctacaccttcgaggacgtgcctttccacagcagctacgcgcacagccagagtctggaccggctgatgaatcccctcatcgaccagtacctgtactacttggccagaacacagagcaacgcaggaggtactgctggcaatcgggaactgcagttttatcagggcggacctaccaccatggccgaacaagcaaagaactggctgcccggaccttgcttccggcaacagagagtatccaagacgctggatcaaaataacaacagcaactttgcctggactggtgccacaaaataccatttaaatgnaagaaattcattggttaatcccggtgtcgccatggcaacccacaaggacgacgaggaacgcttcttcccttcgagcggagttctaatttttggcaaaactggagcagctaataaaactacattagaaaacgtgctcatgacaaatgaagaagaaattcgtcctaccaacccggtagctaccgaggaatacgggattgtaagcagcaacttgcaggcggctagcaccgcagcccagacacaagttgttaacaaccagggagccttacctggcatggtctggcagaaccgggacgtgtacctgcaaggtcccatttgggccaagattcctcacacggacggcaactttcacccgtctcctctaatgggtggctttggactgaaacacccgcctccccagatcctgatcaaaaacacaccggtacctgctaatcctccagaagtgtttactcctgccaagtttgcttccttcatcacgcagtacagcaccgggcaagtcagcgttgagatcgagtgggagctgcagaaagagaacagcaagcgctggaacccagagattcagtacacctccaactttgacaaacagactggagtggactttgctgttgacagccagggtgtttactctgagcct

SEQ ID NO: 5011 - DNA, 3105 bp, Adeno-associated virus
gaattcgcccttgctgcgtcaactggaccaatgagaactttcccttcaacgattgcgtcgacaagatggtgatctggtgggaggagggcaagatgaccgccaaggtcgtggagtccgccaaggccattctgggcggaagcaaggtgcgcgtggaccaaaagtgcaagtcatcggcccagatcgaccccacgcccgtgatcgtcacctccaacaccaacatgtgcgccgtgatcgacgggaacagcaccaccttcgagcaccagcagccgctgcaggaccgcatgttcaagttcgagctcacccgccgtctggagcacgactttggcaaggtgaccaagcaggaagtcaaagagttcttccgctgggctcaggatcacgtgactgaggtggcgcatgagttctacgtcagaaagggcggagccaccaaaagacccgcccccagtgacgcggatataagcgagcccaagcgggcctgcccctcagttgcggagccatcgacgtcagacgcggaagcaccggtggactttgcggacaggtaccaaaacaaatgttctcgtcacgcgggcatgcttcagatgctgtttccctgcaagacatgcgagagaatgaatcagaatttcaacgtctgcttcacgcacggggtcagagactgctcagagtgcttccccggcgcgtcagaatctcaacccgtcgtcagaaaaaagacgtatcagaaactgtgcgcgattcatcatctgctggggcgggcacccgagattgcgtgttcggcccgcgatctcgtcaacgtggacttggatgactgtgtttctgagcaataaatgacttaaaccaggtatggctgctgacggttatcttccagattggctcgaggacaacctctctgagggcattcgcgagtggtgggacctgaaacctggagcccccaagcccaaggccaaccagcagaagcaggacgacggccggggtctggtgcttcctggctacaagtacctcggacccttcaacggactcgacaagggggagcccgtcaacgcggcggacgcagcggccctcgagcacgacaaggcctacgaccagcagctcaaagcgggtgacaatccgtacctgcggtataaccacgccgacgccgagtttcaggagcgtctgcaagaagatacgtcttttgggggcaacctcgggcgagcagtcttccaggccaagaagagggtactcgaacctctgggcctggttgaagaaggtgctaagacggctcctggaaagaagagaccgttagagtcaccacaagagcccgactcctcctcaggaatcggcaaaaaaggcaaacaaccagccaaaaagagactcaactttgaagaggacactggagccggagacggaccccctgaaggatcagataccagcgccatgtcttcagacattgaaatgcgtgcagcaccgggcggaaatgctgtcgatgcgggacaaggttccgatggagtgggtaatgcctcgggtgattggcattgcgattccacctggtctgagggcaaggtcacaacaacctcgaccagaacctgggtcttgcccacctacaacaaccacttgtacctgcggctcggaacaacatcaaacagcaacacctacaacggattctccaccccctggggatactttgactttaacagattccactgtcacttctcaccacgtgactggcaaagactcatcaacaacaactggggactacgaccaaaagccatgcgcgttaaaatcttcaatatccaagttaaggaggtcacaacgtcgaacggcgagactacggtcgctaataaccttaccagcacggttcagatatttgcggactcgtcgtatgagctcccgtacgtgatggacgctggacaagagggaagtctgtctcctttccccaatgacgtcttcatggtgcctcaatatggctactgtggcattgtgactggcgaaaatcagaaccagacggacagaaatgctttctactgcctggagtattttccttcacaaatgctgagaactggcaataactttgaaatggcttacaactttgggaaggtgccgttccactcaatgtatgcttacagccagagcccggacagactgatgaatcccctcctggaccagtacctgtggcacttacagtcgaccacctctggagagactctgaatcaaggcaatgcagcaaccacatttggaaaaatcaggagtggagactttgccttttacagaaagaactggctgcctgggccttgtgttaaacagcagagactctcaaaaactgccagtcaaaattacaagattcctgccagcgggggcaacgctctgttaaagtatgacacccactataccttaaacaaccgctggagcaacatagcgcctggacctccaatggcaacagctggaccttcagatggggacttcagcaacgcccagctcatcttccctggaccatcagtcaccggaaacacaacaacctcagcaaacaatctgttgtttacatcagaagaagaaattgctgccaccaacccaagagacacggacatgtttggtcagattgctgacaataatcagaatgctacaactgctcccataaccggcaacgtgactgctatgggagtgcttcctggcatggtgtggcaaaacagagacatttactaccaagggccaatttgggccaagatcccacacgcggacggacattttcatccttcaccgctaattggcggttttggactgaaacatccgcctccccagatatttatcaaaaacacccccgtacctgccaatcctgcgacaaccttcactgcagccagagtggactctttcatcacacaatacagcaccggccaggtcgctgttcagattgaatgggaaatcgaaaaggaacgctccaaacgctggaatcctgaagtgcagtttacttcaaactatgggaaccagtcttctatgttgtgggctcccgatacaactgggaagtatacagagccgcgggttattggctctcgttatttgactaatcatttgtaactgcctagttaatcaataaaccgtgtgattcgtttcagttgaactttggtctctgcgaagggcgaattc

SEQ ID NO: 5012 - protein, 733 aa, Adeno-associated virus
MAADGYLPDWLEDNLSEGIREWWDLKPGAPKPKANQQKQDDGRGLVLPGYKYLGPFNGLDKGEPVNAADAAALEHDKAYDQQLKAGDNPYLRYNHADAEFQERLQEDTSFGGNLGRAVFQAKKRVLEPLGLVEEGAKTAPGKKRPLESPQEPDSSSGIGKKGKQPAKKRLNFEEDTGAGDGPPEGSDTSAMSSDIEMRAAPGGNAVDAGQGSDGVGNASGDWHCDSTWSEGKVTTTSTRTWVLPTYNNHLYLRLGTTSNSNTYNGFSTPWGYFDFNRFHCHFSPRDWQRLINNNWGLRPKAMRVKIFNIQVKEVTTSNGETTVANNLTSTVQIFADSSYELPYVMDAGQEGSLPPFPNDVFMVPQYGYCGIVTGENQNQTDRNAFYCLEYFPSQMLRTGNNFEMAYNFEKVPFHSMYAHSQSLDRLMNPLLDQYLWHLQSTTSGETLNQGNAATTFGKIRSGDFAFYRKNWLPGPCVKQQRFSKTASQNYKIPASGGNALLKYDTHYTLNNRWSNIAPGPPMATAGPSDGDFSNAQLIFPGPSVTGNTTTSANNLLFTSEEEIAATNPRDTDMFGQIADNNQNATTAPITGNVTAMGVLPGMVWQNRDIYYQGPIWAKIPHADGHFHPSPLIGGFGLKHPPPQIFIKNTPVPANPATTFTAARVDSFITQYSTGQVAVQIEWEIEKERSKRWNPEVQFTSNYGNQSSMLWAPDTTGKYTEPRVIGSRYLTNHL

SEQ ID NO: 5013 - DNA, 3105 bp, Adeno-associated virus
gaattcgcccttgctgcgtcaactggaccaatgagaactttcccttcaacgattgcgtcgacaagatggtgatctggtgggaggagggcaagatgaccgccaaggtcgtggagtccgccaaggccattctgggcggaagcaaggtgcgcgtggaccaaaagtgcaagtcatcggcccagatcgaccccacgcccgtgatcgtcacctccaacaccaacatgtgcgccgtgatcgacgggaacagcaccaccttcgagcaccagcagccgctgcaggaccgcatgttcaagttcgagctcacccgccgtctggagcacgactttggcaaggtgaccaagcaggaagtcaaagagttcttccgctgggctcaggatcacgtgactgaggtggcgcatgagttctacgtcagaaagggcggagccaccaaaagacccgcccccagtgacgcggatataagcgagcccaagcgggcctgcccctcagttgcggagccatcgacgtcagacgcggaagcaccggtggactttgcggacaggtaccaaaacaaatgttctcgtcacgcgggcatgcttcagatgctgtttccctgcaagacatgcgagagaatgaatcagaatttcaacgtctgcttcacgcacggggtcagagactgctcagagtgcttccccggcgcgtcagaatctcaacccgtcgtcagaaaaaagacgtatcagaaactgtgcgcgattcatcatctgctggggcgggcacccgagattgcgtgttcggcctgcgatctcgtcaacgtggacttggatgactgtgtttctgagcaataaatgacttaaaccaggtatggctgctgacggttatcttccagattggctcgaggacaacctctctgagggcattcgcgagtggtgggacctgaaacctggagcccccaagctcaaggccaaccagcagaagcaggacgacggccggggtctggtgcttcctggctacaagtacctcggacccttccacggactcgacaagggggagcccgtcaacgcggcggacgcagcggccctcgagcacgacaaggcctacgaccagcagctcaaagcgggtgacaatccgtacctgcggtataaccacgccgacgccgagtttcaggagcgtctgcaagaagatacgtcttttgggggcaacctcgggcgagcagtcttccaggccaagaagagggtactcgaaccactgggcctggttgaagaaggtgctaagacggctcctggaaagaagagaccgttagagtcaccacaagagcccgactcctcctcaggaatcggcaaaaaaggcaaacaaccagccaaaaagagactcaactttgaagaggacactggagccggagacggaccccctgaaggatcagataccagcgccatgtcttcagacattgaaatgcgtgcagcaccgggcggaaatgctgtcgatgcgggacaaggttccgatggagtgggtaatgcctcgggtgattggcattgcgattccacctggtctgagggcaaggtcacaacaacctcgaccagaacctgggtcttgcccacctacaacaaccacttgtacctgcggctcggaacaacatcaaacagcaacacctacaacggattctccaccccctggggatactttgactttaacagattccactgtcacttctcaccacgtgactggcaaagactcatcaacaacaactggggactacgaccaaaagccatgcgcgttaaaatcttcaatatccaagttaaggaggtcacaacgtcgaacggcgagactacggtcgctaataaccttaccagcacggttcagatatttgcggactcgtcgtatgagctcccgtacgtgatggacgctggacaagagggaagtctgcctcctttccccaatgacgtcttcatggtgcctcaatatggctactgtggcattgtgactggcgaaaatcagaaccagacggacagaaatgctttctactgcctggagtattttccttcacaaatgctgagaactggcaataactttgaaatggcttacaactttgagaaggtgccgttccactcaatgtatgctcacagccagagcctggacagactgatgaatcccctcctggaccagtacctgtggcacttacagtcgaccacctctggagagactctgaatcaaggcaatgcagcaaccacatttggaaaaatcaggagtggagactttgccttttacagaaagaactggctgcctgggccttgtgttaaacagcagagattctcaaaaactgccagtcaaaattacaagattcctgccagcgggggcaacgctctgttaaagtatgacacccactataccttaaacaaccgctggagcaacatagcgcctggacctccaatggcaacagctggaccttcagatggggacttcagcaacgcccagctcatcttccctggaccatcagtcaccggaaacacaacaacctcagcaaacaatctgttgtttacatcagaaggagaaattgctgccaccaacccaagagacacggacatgtttggtcagattgctgacaataatcagaatgctacaactgctcccataaccggcaacgtgactgctatgggagtgcttcctggcatggtgtggcaaaacagagacatttactaccaagggccaatttgggccaagatcccacacgcggacggacattttcatccttcaccgctaattggcggttttggactgaaacatccgcctccccagatatttatcaaaaacacccccgtacctgccaatcctgcgacaaccttcactgcagccagagtggactctttcatcacacaatacagcaccggccaggtcgctgttcagattgaatgggaaatcgaaaaggaacgctccaaacgccggaatcctgaagtgcagtttacttcaaactatgggaaccagtcttctatgttgtgggctcccgatacaactgggaagtatacagagccgcgggttattggctctcgttatttgactaatcatttgtaactgcctagttaatcaataaaccgtgtgattcgtttcagttgaactttggtctctgcgaagggcgaattc

SEQ ID NO: 5014 - DNA, 3105 bp, Adeno-associated virus
gaattcgcccttcgcagagaccaaagttcaactgaaacgaatcacacggtttattgattaactaggcagttacaaatgattagtcaaataacgagagccaataacccgcggctctgtatacttcccagttgtatcgggagcccacaacatagaagactggttcccacagtttgaagtaaactgcacttcaggattccagcgtttggagcgttccttttcgatttcccattcaatctgaacagcgacctggccggtgctgtattgtgtgatgaaagagtccactctggctgcagtgaaggttgtcgcaggataggcaggtacgggggtgtttttgataaatatctggggaggcggatgtttcagtccaaaaccgccaattagcggtgaaggatgaaaatgtccgtccgcgtgtgggatcttggcccaaattggcccttggtagtaaatgtctctgttttgccacaccatgccaggaagcactcccatagcagtcacgttgccggttatgggagcagttgtagcattctgattattgtcagcaatctgaccaaacatgtccgtgtctcttgggttggtggcagcaatttcttcttctgatgtaaacaacagattgtttgctgaggttgttgtgtttccggtgactgatggtccagggaagatgagctgggcgttgctgaagtccccatctgaaggtccagctgttgccattggaggtccaggcgctatgttgctccagcggttgtttaaggtatagtgggtgtcatactttaacagagcgttgcccccgctggcaggaatcttgtaattttgactggcagtttttgagaatctctgctgtttaacacaaggcccaggcagccagttctttctgtaaaaggcaaagtctccactcctgatttttccaaatgtggttgctgcattgccttgattcagagtctctccagaggtggtcgactgtaagtgccacaggtactggtccaggaggggattcatcagtccgtccaggctctggctgtgagcatacattgagtggaacggcaccttctcaaagttgtaagccgtttcaaagttattgccagttctcagcatttgtgaaggaaaatactccaggcagtagaaagcatttctgtccgtctggttctgattttcgccagtcacaatgccacagtagccatattgaggcaccatgaagacgtcattggggaaaggaggcagacttccctcttgtccagcgtccatcacgtacgggagctcatacgacgagtccgcaaatatctgaaccgtgctggtaaggttattagcgaccgtagtctcgccgttcgacgttgtgacctccttaacttggatattgaagattttaacgcgcatggcttttggtcgtagtccccagttgttgttgatgagtctttgccagtcacgtggtgagaagtgacagtggaatctgttaaagtcaaagtatccccagggggtggagaatccgttgtaggtgttgctgtttgatgttgttccgagccgcaggtacaagtggttgttgtaggtgggcaagacccaggttctggtcgaggttgttgtgaccttgccctcagaccaggtggaatcgcaatgccaatcacccgaggcattacccactccatcggaaccttgtcccgcatcgacagcatttccgcccggtgctgcacgcatttcaatgtctgaagacatggcgctggtatctgatccttcagggggtccgtctccggctccagtgtcctcttcaaagttgagtctctttttggctggttgtttgccttttttgccgattcctgaggaggagtcgggctcttgtggtgactctaacggtctcttctttccaggagccgtcttagcaccttcttcaaccaggcccagaggttcgagtaccctcttcttggcctggaagactgctcgcccgaggttgcccccaaaagacgtatcttcttgcagacgctcctgaaactcggcgtcggcgtggttataccgcaggtacggattgtcacccgctttgagctgctggtcgtaggccttgtcgtgctcgagggccgctgcgtccgccgcgttgacgggctcccccttgtcgagtccgttgaagggtccgaggtactcgtagccaggaagcaccagaccccggccgtcgtcctgcttctgctggttggccttgggcttgggggctccaggtttcaggtcccaccactcgcgaatgccctcagagaggttgtcctcgagccaatctggaagataaccgtcagcagccatacctggtttaagtcatttattgctcagaaacacagtcatccaagtccacgttgacgagatcgcaggccgaacacgcaatctcgggtgcccgccccagcagatgatgaatcgcgcacagtttctgatacgtcttttttctgacgacgggttgagattctgacgcgccggggaagcactctgagcagtctctgaccccgtgcgtgaagcagacgttgaaattctgattcattctctcgcatgtcttgcagggaaacagcatctgaagcatgcccgcgtgacgagaacatttgttttggtacctgtccgcaaggtccaccggtgcttccgcgtctgacgtcgatggctccgcaactgaggggcaggcccgcttgggctcgcttatatccgcgtcactgggggcgggtcttttggtggctccgccctttctgacgtagaactcatgcgccacctcagtcacgtgatcctgagcccagcggaagaactctttgacttcctgcttggtcaccttgccaaagtcgtgctccagacggcgggtgagctcgaacttgaacatgcggtcctgcagcggctgctggtgctcgaaggtggtgctgttcccgtcgatcacggcgcacatgttggtgttggaggtgacgatcacgggcgtggggtcgatctgggccgatgacttgcacttttggtccacgcgcaccttgcttccgcccagaatggccttggcggactccacgaccttggcggtcatcttgccctcctcccaccagatcaccatcttgtcgacgcaatcgttgaagggaaagttctcattggtccagttgacgcagcaagggcgaattc

SEQ ID NO: 5015 - DNA, 3094 bp, Adeno-associated virus
gaattcgcccttgctgcgtcaactggaccaagagaactttcccttcaacgattgcgtcgacaagatggtgatctggtgggaggagggcaagatgacggccaaggtcgtggagtccgccaaagccattctgggcggaagcaaggtgcgcgtcgaccaaaagtgcaagtcctcggcccagatcgatcccacccccgtgatcgtcacctccaacaccaacatgtgcgccgtgatcgacgggaacagcaccaccttcgagcaccagcagccgttgcaggaccggatgttcaaatttgaactcacccgccgtctggaacacgactttggcaaggtgaccaagcaggaagtcaaagagttcttccgctgggctagtgatcacgtgactgaggtgacgcatgagttctacgtcagaaagggcggagccagcaaaagacccgcccccgatgacgcggatataagcgagcccaagcgggcctgtccctcagtcacggacccatcgacgtcagacgcggaaggagctccggtggactttgccgacaggtaccaaaacaaatgttctcgtcacgcgggcatgcttcagatgctgtttccctgcaaaacgtgcgagagaatgaatcagaatttcaacatttgcttcacgcacggggtcagagactgtttagaatgtttccccggcgtgtcagaatctcaaccggtcgtcagaaaaaagacgtatcggaagctgtgtgcgattcatcatctgctggggcgggcacccgagattgcttgctcggcctgcgacctggtcaacgtggacctggacgactgtgtttctgagcaataaatgacttaaaccgggtatggctgccgatggttatcttccagattggctcgaggacaacctctctgagggcattcgcgagtggtgggacctgaaacctggagccccgaaacccaaagccaaccagcaaaagcaggacgacggccggggtctggtgcttcctggctacaagtacctcggacccttcaacggactcgacaagggggagcccgtcaacgcggcggacgcagcggccctcgagcacgacaaggcctacgaccagcagctcaaagcgggtgacaatccgtacctgcggtataaccacgccgacgccgagtttcaggagcgtctgcaagaagatacgtcatttgggggcaacctcgggcgagcagtcttccaggccaagaagcgggttctcgaacctctcggtctggttgaggaaggcgctaagacggctcctggaaagaagagacccatagactctccagactcctccacgggcatcggcaaaaaaggccagcagcccgctaaaaagaagctcaattttggtcagactggcgactcagagtcagtccccgaccctcaacctcttggagaacctccagcagcgccctctagtgtgggatctggtacaatggctgcaggcggtggcgcaccaatggcagacaataacgaaggtgccgacggagtgggtaatgcctcaggaaattggcattgcgattccacatggctgggcgacagagtcatcaccaccagcaccagaacctgggccctccccacctacaacaaccacctctacaagcaaatctccagcagcagctcaggagccaccaatgacaaccactacttcggctacagcaccccctgggggtattttgactttaacagattccactgccacttctcaccacgtgactggcagcgactcatcaacaacaactggggattccggcccaagaagctgcggttcaagctcttcaacatccaggtcaaggaggtcacaacgaatgacggcgtcacgaccatcgctaataaccttaccagcacggttcaggtcttctcggactcggaataccagctgccgtacgtcctcggctctgcgcaccagggctgcctgcctccgttcccggcggacgtcttcatgattcctcagtacggctacctgactctgaacaacggcagccaatcggtgggccgttcctccttctactgcctggaatatttcccctctcaaatgctgagaacgggcaacaactttgagttcagttacagcttcgaggacgtgcctttccacagcagctacgcgcacagccagagcctagaccggctgatgaaccctctcatcgaccagtacctgtactacctggcccggacccagagcaccacgggttccaccagggaactgcaatttcatcaagctgggcccaatactatggccgagcagtcaaagaactggctgcctggaccctgctataggcaacagggactgtcaaagaacttggactttaacaacaacagcaattttgcctggactgctgccactaaatatcatctgaatggcagaaactctttgaccaatcctggcattcccatggcaaccaacaaggatgatgaggaccagttctttcccatcaacggggtactggtttttggcaagacgggagctgccaacaaaactacgctggaaaacgttctgatgaccagcgaggaggagatcaagaccactaaccctgtggctacagaagaatacggtgtggtctccagcaacctgcagccgtctacagccgggcctcaatcacagactatcaacagccagggagcactgcctggcatggtctggcagaaccgggacgtgtatctgcagggtcccatctgggccaaaattcctcacacggatggcaactttcacccgtctcctctgatgggcggttttggactcaaacacccgcctccacagatcctgatcaaaaacacacctgtacctgctaatcctccggaggtgtttactcctgccaagtttgcctccttcatcacgcagtacagcaccggacaagtcagcgtggaaatcgagtgggagctgcagaaagaaaacagcaagcgctggaacccagaaattcagtatacttccaattatgccaagtctaataatgttgaatttgctgtgaaccctgatggtgtttatactgagcctcgccccattggcactcgttacctcccccgtaatctgtaattgcttgttaatcaataaaccggttgattcgtttcagttgaactttggtctctgcgaagggcgaattc

SEQ ID NO: 5016 - DNA, 3095 bp, Adeno-associated virus
gaattcgcccttcgcagagaccaaagttcaactgaaacgaatcaaccggtttattgattaacaagcaattacagattacgggtgaggtaacgagtgccaatggggcgaggctcagtataaacaccatcagggttcacagcaaattcaacattattagacttggcataattggaagtatactgaatttctgggttccagcgcttgctgttttctttctgcagctcccactcgatttccacgctgacttgtccggtgctgtactgcgtgatgaaggaggcaaacttggcaggagtaaacacctccggaggattagcaggtacaggtgtgtttttgatcaggatctgtggaggcgggtgtttgagtccaaaaccgcccatcagaggagacgggtgaaagttgccatccgtgtgaggaattttggcccagatgggaccctgcagatacacgtcccggttctgccagaccatgccaggcagtgctccctggctgttgatagtctgtgattgaggcccggctgtagacgactgcaggttgctggagaccacaccgtattcttctgtagccacagggttagtggtcttgatctcctcctcgctggtcatcagaacgttttccagcgtagttttgttggcagctcccgtcttgccaaaaaccagtaccccgttgatgggaaagaactggtcctcatcatccttgttggttgccatgggaatgccaggattggtcaaagagtttctgccattcagatgatatttagtggcagcagtccaggcaaaattgctgttgttgttaaagtccaagttctttgacagtctctgttgcctatagcagggtccaggcagccagttctttgactgctcggccatagtattgggcccagcttgatgaaattgcagttccctggtggaacccgtggtgctctgggtccgggccaggtagtacaggtactggtcgatgagagggttcatcagccggtctaggctctggctgtgcgcgtagctgctgtggaaaggcacgtcctcgaagctgtaactgaactcaaagttgttgcccgttctcagcatttgagaggggaaatattccaggcagtagaaggaggaacggcccaccgattggctgccgttgtccagagtcaggtagccgtactgaggaatcatgaagacgtccgccgggaacggaggcaggcagccctggtgcgcagagccgaggacgtacggcagctggtattccgagtccgagaagacctgaaccgtgctggtaaggttattagcgatggtcgtgacgccgtcattcgttgtgacctccttgacctggatgttgaggagcttgaaccgcagcttcttgggccggaatccccagttgttgttgatgagtcgctgccagtcacgtggtgagaagtggcagtggaatctgttaaagtcaaaatacccccagggggtgctgtagccgaagtagtggttgtcattggtggctcctgagctgctgctggagatttgcttgtagaggtggttgttgtaggtggggagggcccaggttctggtgctggtggtgatgactctgtcgcccagccatgtggaatcgcaatgccaatttcctgaggcattacccactccgtcggcaccttcgttattgtctgccattggtgcgccaccgcctgcagccattgtaccagatcccacactagagggcgctgctggaggttctccaagaggttgagggtcggggactgactctgagtcgccagtctgaccaaaattgagcttctttttagcgggctgctggccttttttgccgatgcccgtggaggagtctggagagcctatgggtctcttctttccaggagccgtcttagcgccttcctcaaccagaccgagaggttcgagaacccgcttcttggcctggaagactgctcgcccgaggttgcccccaaatgacgtatcttcttgcagacgctcctgaaactcggcgtcggcgtggttataccgcaggtacggattgtcacccgctttgagctgctggtcgtaggccttgtcgtgctcgagggccgctgcgtccgccgcgttgacgggctcccccttgtcgagtccgttgaagggtccgaggtacttgtagccaggaagcaccagaccccggccgtcgtcctgcttttgctggttggctttgggtttcggggctccaggtttcaggtcccaccactcgcgaatgccctcagagaggttgtcctcgagccaatctggaagataaccatcggcagccatacctggtttaagtcatttattgctcagaaacacagtcgtccaggtccacgttgaccaggtcgcaggccgagcaagcaatctcgggtgcccgccccagcagatgatgaatcgcacacagcttccgatacgtcttttttctgacgaccggttgagattctgacacgccggggaaacattctaaacagtctctgaccccgtgcgtgaagcaaatgttgaaattctgattcattctctcgcacgttttgcagggaaacagcacctgaagcatgcccgcgtgacgagaacatttgttttggtacctgtcggcaaagtccaccggagctccttccgcgtctgacgtcgatgggtccgtgactgagggacgggcccgcttgggctcgcttatatccgcgtcatcgggggcgggtcttttgctggctccgccctttctgacgtagaactcatgcgtcacctcagtcacgtgatcactagcccagcggaagaactctttgacttcctgctttgtcaccttgccaaagtcgtgttccagacggcgggtgagttcaaatttgaacatccggtcctgcaacggttgctggtgctcgaaggtggtgctgttcccgtcgatcacggcgcacatgttggtgttggaggtgacgatcacgggggtgggatcgatctgggcggacgacttgcacttttggtccacgcgcaccttgctgccgccgagaatggccttggcggactccacgaccttggccgtcatcttgccctcctcccaccagatcaccatcttgtcgacgcaatcgttgaagggaaagttctcattggtccagttgacgcagcaagggcgaattc

SEQ ID NO: 5017 - DNA, 3095 bp, Adeno-associated virus
gaattcgcccttcgcagagaccaaagttcaactgaaacgaatcaaccggtttattgattaacaagcaattacagattacgggtgaggtaacgagtgccaatggggcgaggctcagtataaacaccatcagggttcacagcaaattcaacattattagacttggcataattggaagtatactgaatttctgggttccagcgcttgctgttttctttctgcagctcccactcgatttccacgctgacttgtccggtgctgtactgcgtgatgaaggaggcaaacttggcaggagtaaacacctccggaggattagcaggtacaggtgtgtttttgatcaggatctgtggaggcgggtgttcgagtccaaaaccgcccatcagaggagacgggtgaaagttgccatccgtgtgaggaattttggcccagatgggaccctgcagatacacgtcccggttctgccagaccatgccaggcagtgctccctggctgttgatagtctgtgattgaggcccggctgtagacgactgcaggttgctggagaccacaccgtattcttctgtagccacagggttagtggtcttgatctcctcctcgctggtcatcagaacgttttccagcgtagttttgttggcagctcccgtcttgccaaaaaccagtaccccgttgatgggaaagaactggtcctcatcatccttgttggttgccatgggaatgccaggattggtcaaagagtttctgccattcagatgatatttagtggcagcagtccaggcaaaattgctgttgttgttaaagtccaagttctttgacagtctctgttgcctatagcagggtccaggcagccagttctttgactgctcggccatagtattgggcccagcttgatgaaattgcagttccctggtggaacccgtggtgctctgggtccgggccaggtagtacaggtactggtcgatgagagggttcatcagccggtctaggctctggctgtgcgcgtagctgctgtggaaaggcacgtcctcgaagctgtaactgaactcaaagttgttgcccgttctcagcatttgagaggggaaatattccaggcagtagaaggaggaacggcccaccgattggctgccgttgttcagagtcaggtagccgtactgaggaatcatgaagacgtccgccgggaacggaggcaggcagccctggtgcgcagagccgaggacgtacggcagctggtattccgagtccgagaagacctgaaccgtgctggtaaggttattagcgatggtcgtgacgccgtcattcgttgtgacctccttgacctggatgttgaagagcttgaaccgcagcttcttgggccggaatccccagttgttgttgatgagtcgctgccagtcacgtggtgagaagtggcagtggaatctgttaaagtcaaaatacccccagggggtgctgtagccgaagtagtggttgtcattggtggctcctgagctgctgctggagatttgcttgtagaggtggttgttgtaggtggggagggcccaggttctggtgctggtggtgatgactctgtcgcccagccatgtggaatcgcaatgccaatttcctgaggcattacccactccgtcggcaccttcgttattgtctgccgttggtgcgccaccgcctgcagccattgtaccagatcccacactagagggcgctgctggaggttctccaagaggttgagggtcggggactgactctgagtcgccagtctgaccaaaattgagcttctttttagcgggctgctggccttttttgccgatgcccgtggaggagtctggagagtctatgggtctcttctttccaggagccgtcttagcgccttcctcaaccagaccgagaggttcgagaacccgcttcttggcctggaagactgctcgcccgaggttgcccccaaatgacgtatcttcttgcaggcgctcctgaaactcggcgtcggcgtggttataccgcaggtacggattgtcacccgctttgagctgctggtcgtaggccttgtcgtgctcgagggccgctgcgtccgccgcgttgacgggctcccccttgtcgagtccgttgaagggtccgaggtacttgtagccaggaagcaccagaccccggccgtcgtcctgcttttgctggttggctttgggtttcggggctccaggtttcaggtcccaccactcgcgaatgccctcagagaggttgtcctcgagccaatctggaagataaccatcggcagccatacctggtttaagccatttattgctcagaaacacagtcgtccaggtccacgttgaccaggtcgcaggccgagcaggcaatctcgggtgcccgccccagcagatgatgaatcgcacacagcttccgatacgtcttttttctgacgaccggttgagattctgacacgccggggaaacattctaaacagtctctgaccccgtgcgtgaagcaaatgttgaaattctgattcattctctcgcacgttttgcagggaaacagcatctgaagcatgcccgcgtggcgagaacatttgttttggtacctgtcggcaaagtccaccggagctccttccgcgtctgacgtcgatgggtccgtgactgagggacaggcccgcttgggctcgcttatatccgcgtcatcgggggcgggtcttttgctggctccgccctttctgacgtagaactcatgcgtcacctcagtcacgtgatcactagcccagcggaagaactctttgacttcctgctttgtcaccttgccaaagtcgtgttccagacggcgggtgagttcaaatttgaacatccggtcctgcaacggctgctggtgctcgaaggtggtgctgttcccgtcgatcacggcgcgcatgttggtgttggaggtgacgatcacgggggtgggatcgatctgggcggacgacttgcacttttggtccacgcgcaccttgctgccgccgagaatggccttggcggactccacgaccttggccgtcatcttgccctcctcccaccagatcaccatcttgtcgacgcaatcgttgaagggaaagttctcattggtccagttgacgcagcaagggcgaattc

SEQ ID NO: 5018 - protein, 729 aa, Adeno-associated virus; identical to SEQ ID NO: 4833

SEQ ID NO: 5019 - protein, 729 aa, Adeno-associated virus
MAADGYLPDWLEDNLSEGIREWWDLKPGAPKPKANQQKQDDGRGLVLPGYKYLGPFNGLDKGEPVNAADAAALEHDKAYDQQLKAGDNPYLRYNHADAEFQERLQEDTSFGGNLGRAVFQAKKRVLEPLGLVEEGAKTAPGKKRPIDSPDSSTGIGKKGQQPAKKKLNFGQTGDSESVPDPQPLGEPPAAPSSVGSGTMAAGGGAPTADNNEGADGVGNASGNWHCDSTWLGDRVITTSTRTWALPTYNNHLYKQISSSSSGATNDNHYFGYSTPWGYFDFNRFHCHFSPRDWQRLINNNWGFRPKKLRFKLFNIQVKEVTTNDGVTTIANNLTSTVQVFSDSEYQLPYVLGSAHQGCLPPFPADVFMIPQYGYLTLNNGSQSVGRSSFYCLEYFPSQMLRTGNNFEFSYSFEDVPFHSSYAHSQSLDRLMNPLIDQYLYYLARTQSTTGSTRELQFHQAGPNTMAEQSKNWLPGPCYRQQRLSKNLDFNNNSNFAWTAATKYHLNGRNSLTNPGIPMATNKDDEDQFFPINGVLVFGKTGAANKTTLENVLMTSEEEIKTTNPVATEEYGVVSSNLQSSTAGPQSQTINSQGALPGMVWQNRDVYLQGPIWAKIPHTDGNFHPSPLMGGFGLKHPPPQILIKNTPVPANPPEVFTPAKFASFITQYSTGQVSVEIEWELQKENSKRWNPEIQYTSNYAKSNNVEFAVNPDGVYTEPRPIGTRYLTRNL

SEQ ID NO: 5020 - protein, 729 aa, Adeno-associated virus
MAADGYLPDWLEDNLSEGIREWWDLKPGAPKPKANQQKQDDGRGLVLPGYKYLGPFNGLDKGEPVNAADAAALEHDKAYDQQLKAGDNPYLRYNHADAEFQERLQEDTSFGGNLGRAVFQAKKRVLEPLGLVEEGAKTAPGKKRPIDSPDSSTGIGKKGQQPAKKKLNFGQTGDSESVPDPQPLGEPPAAPSSVGSGTMAAGGGAPMADNNEGADGVGNASGNWHCDSTWLGDRVITTSTRTWALPTYNNHLYKQISSSSSGATNDNHYFGYSTPWGYFDFNRFHCHFSPRDWQRLINNNWGFRPKKLRFKLFNIQVKEVTTNDGVTTIANNLTSTVQVFSDSEYQLPYVLGSAHQGCLPPFPADVFMIPQYGYLTLNNGSQSVGRSSFYCLEYFPSQMLRTGNNFEFSYSFEDVPFHSSYAHSQSLDRLMNPLIDQYLYYLARTQSTTGSTRELQFHQAGPNTMAEQSKNWLPGPCYRQQRLSKNLDFNNNSNFAWTAATKYHLNGRNSLTNPGIPMATNKDDEDQFFPINGVLVFGKTGAANKTTLENVLMTSEEEIKTTNPVATEEYGVVSSNLQSSTAGPQSQTINSQGALPGMVWQNRDVYLQGPIWAKIPHTDGNFHPSPLMGGFGLKHPPPQILIKNTPVPANPPEVFTPAKFASFITQYSTGQVSVEIEWELQKENSKRWNPEIQYTSNYAKSNNVEFAVNPDGVYTEPRPIGTRYLTRNL

SEQ ID NO: 5021 - DNA, 2217 bp, Adeno-associated virus
atggctgctgacggttatcttccagattggctcgaggacaacctctctgagggcattcgcgagtggtgggacctgaaacctggagcccccaagcccaaggccaaccagcagaagcaggacgacggccggggtctggtgcttcctggctacaagtacctcggacccttcaacggactcgacaagggggagcccgtcaacgcggcggacgcagcggccctcgagcacgacaaggcctacgaccagcagctcaaagcgggtgacaatccgtacctgcggtataaccacgccgacgccgagtttcaggagcgtctacaagaagatacgtcttttgggggcaacctcgggcgagcagtcttccaggccaagaagcgggttctcgaacctctcggtctggttgaggaagctgctaagacggctcctggaaagaagagaccggtagaaccgtcacctcagcgttcccccgactcctccacgggcatcggcaagaaaggccagcggcccgctaaaaagagactgaactttggtcagactggcgactcagagtcagtccccgaccctcaaccaatcggagaaccaccagcaggcccctctggtctgggatctggtacaatggctgcaggcggtggcgctccaatggcagacaataacgaaggcgccgacggagtgggtagttcctcaggaaattggcattgcgattccacatggctgggcgacagagtcatcaccaccagcacccgaacctgggccctgcccacctacaacaaccacctctacaagcaaatatccaatgggacatcgggaggaagcaccaacgacaacacctacttcggctacagcaccccctgggggtattttgacttcaacagattccactgccacttctcaccacgtgactggcagcgactcatcaacaacaactggggattccggccaaaaagactcagcttcaagcccttcaacatccaggtcaaggaggtcacgcagaatgaaggcaccaagaccatcgccaataaccttaccagcacgattcaggtatttacggactcggaataccagctgccgtacgtcctcggctccgcgcaccagggctgcctgcctccgttcccggcggacgtcttcatgattccccagtacggctaccttacactgaacaatggaagtcaagccgtaggccgttcctccttctactgcctggaatattttccatctcaaatgctgcgaactggaaacaattttgaattcagctacaccttcgaggacgtgcctttccacagcagctacgcacacagccagagcttggaccgactgatgaatcctctcatcgaccagtacctgcactacttatccagaactcagtccacaggaggaactcaaggtacccagcaattgttattttctcaagctgggcctgcaaacatgtcggctcaggctaagaactggctacctggaccttgctaccggcagcagcgagtctctacgacactgtcgcaaaacaacaacagcaactttgcttggactggtgccaccaaatatcacctgaacggaagagactctttggtaaatcccggtgtcgccatggcaacccacaaggacgacgaggaacgcttcttcccgtcgagtggagtcctgatgtttggaaaacagggtgctggaagagacaatgtggactacagcagcgttatgctaaccagcgaagaagaaattaaaaccactaaccctgtagccacagaacaatacggtgtggtggctgacaacttgcagcaaaccaatacagggcctattgtgggaaatgtcaacagccaaggagccttacctggcatggtctggcagaaccgagacgtgtacctgcagggtcccatctgggccaagattcctcacacggacggcaacttccacccttcaccgctaatgggaggatttggactgaagcacccacctcctcagatcctgatcaagaacacgccggtacctgcggatcctccaacaacgttcagccaggcgaaattggcttccttcattacgcagtacagcaccggacaggtcagcgtggaaatcgagtgggagctgcagaaggagaacagcaaacgctggaacccagagattcagtacacttcaaactactacaaatctacaaatgtggactttgctgtcaatacagagggaacttattctgagcctcgccccattggtactcgctacctcacccgtaatctgtaa

SEQ ID NO: 5022 - protein, 738 aa, Adeno-associated virus
MAADGYLPDWLEDNLSEGIREWWDLKPGAPKPKANQQKQDDGRGLVLPGYKYLGPFNGLDKGEPVNAADAAALEHDKAYDQQLKAGDNPYLRYNHADAEFQERLQEDTSFGGNLGRAVFQAKKRVLEPLGLVEEAAKTAPGKKRPVEPSPQRSPDSSTGIGKKGQRPAKKRLNFGQTGDSESVPDPQPIGEPPAGPSGLGSGTMAAGGGAPMADNNEGADGVGSSSGNWHCDSTWLGDRVITTSTRTWALPTYNNHLYKQISNGTSGGSTNDNTYFGYSTPWGYFDFNRFHCHFSPRDWQRLINNNWGFRPKRLSFKPFNIQVKEVTQNEGTKTIANNLTSTIQVFTDSEYQLPYVLGSAHQGCLPPFPADVFMIPQYGYLTLNNGSQAVGRSSFYCLEYFPSQMLRTGNNFEFSYTFEDVPFHSSYAHSQSLDRLMNPLIDQYLHYLSRTQSTGGTQGTQQLLFSQAGPANMSAQAKNWLPGPCYRQQRVSTTLSQNNNSNFAWTGATKYHLNGRDSLVNPGVAMATHKDDEERFFPSSGVLMFGKQGAGRDNVDYSSVMLTSEEEIKTTNPVATEQYGVVADNLQQTNTGPIVGNVNSQGALPGMVWQNRDVYLQGPIWAKIPHTDGNFHPSPLMGGFGLKHPPPQILIKNTPVPADPPTTFSQAKLASFITQYSTGQVSVEIEWELQKENSKRWNPEIQYTSNYYKSTNVDFAVNTEGTYSEPRPIGTRYLTRNL

SEQ ID NO: 5023 - DNA, 2217 bp, Adeno-associated virus
atggctgctgacggttatcttccagattggctcgaggacaacctctctgagggcattcgcgagtggtgggacctgaaacctggagcccccaagcccaaggccaaccagcagaagcaggacgacggccggggtctggtgcttcctggctacaagtacctcggacccttcaacggactcgacaagggggagcccgtcaacgcggcggacgcagcggccctcgagcacgacaaggcctacgaccagcagctcaaagcgggtgacaatccgtacctgcggtataaccacgccgacgccgagtttcaggagcgtctgcaagaagatacgtcttttgggggcaacctcgggcgagcagtcttccaggccaagaagcgggttctcgaacctctcggtctggttgaggaagctgctaagacggctcctggaaagaagagaccggtagaaccgtcacctcagcgttcccccgactcctccacgggcatcggcaagaaaggccagcagcccgctaaaaagagactgaactttggtcagactggcgactcagagtcagtccccgaccctcaaccaatcggagaaccaccagcaggcccctctggtctgggatctggtacaatggctgcaggcggtggcgctccaatggcagacaataacgaaggcgccgacggagtgggtagttcctcaggaaattggcattgcgattccacatggctgggcgacagagtcatcaccaccagcacccgaacctgggccctgcccacctacaacaaccacctctacaagcaaatatccaatgggacatcgggaggaagcaccaacgacaacacctacttcggctacagcaccccctgggggtattttgacttcaacagattccactgccacttctcaccacgtgactggcagcgactcatcaacaacaactggggattccggccaaaaagactcagcttcaagctcttcaacatccaggtcaaggaggtcacgcagaatgaaggcaccaagaccatcgccaataaccttaccagcacgattcaggtatttacggactcggaataccagctgccgtacgtcctcggctccgcgcaccagggctgcctgcctccgttcccggcggacgtcttcatgattccccagtacggctaccttacactgaacaatggaagtcaagccgtaggccgttcctccttctactgcctggaatattttccatctcaaatgctgcgaactggaaacaattttgaattcagctacaccttcgaggacgtgcctttccacagcagctacgcacacagccagagcttggaccgactgatgaatcctctcatcgaccagtacctgtactacttatccagaactcagtccacaggaggaactcaaggtacccagcaattgttattttctcaagctgggcctgcaaacatgtcggctcaggctaagaactggctacctggaccttgctaccggcagcagcgagtctctacgacactgtcgcaaaacaacaacagcaactttgcttggactggtgccaccaaatatcacctgaacggaagagactctttggtaaatcccggtgtcgccatggcaacccacaaggacgacgaggaacgcttcttcccgtcgagtggagtcctgatgtttggaaaacagggtgctggaagagacaatgtggactacagcagcgttatgctaaccagcgaagaagaaattaaaaccactaaccctgtagccacagaacaatacggtgtggtggctgataacttgcagcaaaccaatacggggcctattgtgggaaatgtcaacagccaaggagccttacctggcatggtctggcagaaccgagacgtgtacctgcagggtcccatctgggccaagattcctcacacggacggcaacttccacccttcaccgctaatgggaggatttggactgaagcacccacctcctcagatcctgatcaagaacacgccggtacctgcggatcctccaacaacgttcagccaggcgaaattggcttccttcattacgcagtacagcaccggacaggtcagcgtggaaatcgagtgggagctgcagaaggagaacagcaaacgctggaacccagagattcagtacacttcaaactactacaaatctacaaatgtggactttgctgtcaatacagagggaacttattctgagcctcgccccattggtactcgttacctcacccgtaatctgtaa

SEQ ID NO: 5024 - protein, 738 aa, Adeno-associated virus; identical to SEQ ID NO: 4797

SEQ ID NO: 5025 - protein, 738 aa, Adeno-associated virus
MAADGYLPDWLEDNLSEGIREWWDLKPGAPKPKANQQKQDDGRGLVLPGYKYLGPFNGLDKGEPVNAADAAALEHDKAYDQQLKAGDNPYLRYNHADAEFQERLQEDTSFGGNLGRAVFQAKKRVLEPLGLVEEAAKTAPGKKRPVEPSPQRSPDSSTGIGKKGQQPAKKRLNFGQTGDSESVPDPQPIGEPPAGPSGLGSGTMAAGGGAPMADNNEGADGVGSSSGNWHCDSTWLGDRVITTSTRTWALPTYNNHLYKQISNGTSGGSTNDNTYFGYSTPWGYFDFNRFHCHFSPRDWQRLINNNWGFRPKRLSFKLFNIQVKEVTQDEGTKTIANNLTSTIQVFTDSEYQLPYVLGSAHQGCLPPFPADVFMIPQYGYLTLNNGSQAVGRSSFYCLEYFPSQMLRTGNNFEFSYTFEDVPFHSSYAHSQSLDRLMNPLIDQYLYYLSRTQSTGGTQGTQQLLFSQAGPANMSARAKNWLPGPCYRQQRVSTTLSQNNNSNFAWTGATKYHLNGRDSLVNPGVAMATHKDDEERFFPSSGVLMFGKQGAGRDNVDYSSVMLTSEEEIKTTNPVATEQYGVVADNLQQANTGPIVGNVNSQGALPGMVWQNRDVYLQGPIWAKIPHTDGNFHPSPLMGGFGLKHPPPQILIKNTPVPADPPTTFSQAKLASFITQYSTGQVSVEIEWELQKENSKRWNPEIQYTSNYYKSTNVDFAVNSEGTYSEPRPIGTRYLTRNL

SEQ ID NO: 5026 - DNA, 2217 bp, Adeno-associated virus
atggctgctgacggttatcttccagattggctcgaggacaacctctctgagggcattcgcgagtggtgggacctgaaacctggagcccccaagcccaaggccaaccagcagaagcaggacgacggccggggtctggtgcttcctggctacaagtacctcggacccttcaacggactcgacaagggggagcccgtcaacgcggcggacgcagcggccctcgagcacgacaaggcctacgaccagcagctcaaagcgggtgacaatccgtacctgcggtataaccacgccgacgccgagtttcaggagcgtctgcaagaagatacgtcttttgggggcaacctcgggcgagcagtcttccaggccaagaagcgggttctcgaacctctcggtctggttgaggaagctgctaagacggctcctggaaagaagagaccggtagaaccgtcacctcagcgttcccccgactcctccacgggcatcggcaagaaaggccagcagcccgctaaaaagagactgaactttggtcagactggcgactcagagtcagtccccgaccctcaaccaatcggagaaccaccagcaggcccctctggtctgggatctggtacaatggctgcaggcggtggcgctccaatggcagacaataacgaaggcgccgacggagtgggtagttcctcaggaaattggcattgcgattccacatggctgggcgacagagtcatcaccaccagcacccgaacctgggccctgcccacctacaacaaccacctctacaagcaaatatccaatgggacatcgggaggaagcaccaacgacaacacctacttcggctacagcaccccctgggggtattttgacttcaacagattccactgccacttctcaccacgtgactggcagcgactcatcaacaacaactggggattccggccaaaaagactcagcttcaagctcttcaacatccaggtcaaggaggtcacgcaggatgaaggcaccaagaccatcgccaataaccttaccagcacgattcaggtatttacggactcggaataccagctgccgtacgtcctcggctccgcgcaccagggctgcctgcctccgttcccggcggacgtcttcatgattccccagtacggctaccttacactgaacaatggaagtcaagccgtaggccgttcctccttctactgcctggaatattttccatctcaaatgctgcgaactggaaacaattttgaattcagctacaccttcgaggacgtgcctttccacagcagctacgcacacagccagagcttggaccgactgatgaatcctctcatcgaccagtacctgtactacttatccagaactcagtccacaggaggaactcaaggtacccagcaattgttattttctcaagctgggcctgcaaacatgtcggctcgggctaagaactggctacctggaccttgctaccggcagcagcgagtctctacgacactgtcgcaaaacaacaacagcaactttgcttggactggtgccaccaaatatcacctgaacggaagagactctttggtaaatcccggtgttgctatggcaacgcataaggacgacgaggaacgtttctttccatcgagcggagtcctgatgtttggaaaacagggtgctggaagagacaatgtggactatagcagcgttatgctaaccagcgaggaagaaattaaaaccactaaccctgtagccacagaacaatacggtgtggtggctgacaacttgcagcaagccaatacagggcctattgtgggaaatgtcaacagccaaggagccttacctggcatggtctggcagaaccgagacgtgtacctgcagggtcccatctgggccaaaattcctcacacggacggcaattttcacccgtctcctctgatgggcggctttggactgaagcacccacctccccagatcctgatcaagaatacgccggtacctgcggatcctccaacgacgttcagccaggcaaaattggcttccttcatcacgcagtacagcaccggccaggtcagcgtggagatcgagtgggagctgcagaaggagaacagcaagcgatggaacccagaaattcagtacacttccaactactacaaatctacaaatgtggactttgctgtcaattctgagggtacatattcagagcctcgccccattggtactcgttatctgacacgtaatctgtaa

SEQ ID NO: 5027 - DNA, 2211 bp, Adeno-associated virus
atggctgccgatggttatcttccagattggctcgaggacaacctctctgagggcattcgcgagtggtgggacttgaaacctggagccccgaaacccaaagccaaccagcaaaagcaggacgacggccggggcctggtgcttcctggctacaagtacctcggacccttcaacggactcgacaagggggagcccgtcaacgcggcggacgcagcggccctcgagcacgacaaggcctacgaccagcagctcgaagcgggtgacaatccgtacctgcggtataaccacgccgacgccgagtttcaggagcgtctgcaagaagatacgtcttttgggggcaacctcgggcgagcagtcttccaggccaagaagcgggttctcgaacctctcggtctggttgaggaaggcgctaagacggctcctggaaagaagagaccagtagagcagtcaccccaagaaccagactcctcctcgggcatcggcaagaaaggccaacagcccgccagaaaaagactcaattttggccagactggcgactcagagtcagttccagaccctcaacctctcggagaacctccagcagcgccctctggtgtgggacctaatacaatggctgcaggcggtggcgcaccaatggcagacaataacgaaggcgccgacggagtgggtagttcctcgggaaattggcattgcgattccacatggctgggcgacagagtcatcaccaccagcacccgaacctgggccctgcccacctacaacaaccacctctacaagcaaatctccaacgggacatcgggaggagccaccaacgacaacacctacttcggctacagcaccccctgggggtattttgactttaacagattccactgccacttttcaccacgtgactggcagcgactcatcaacaacaactggggattccggcccaagagactcagcttcaagctcttcaacatccaggtcaaggaggtcacgcagaatgaaggcaccaagaccatcgccaataacctcaccagcaccatccaggtgtttacggactcggagtaccagctgccgtacgttctcggctctgcccaccagggctgcctgcctccgttcccggcggacgtgttcatgattccccagtacggctacctaacactcaacaacggtagtcaggccgtgggacgctcctccttctactgcctggaatactttccttcgcagatgctgagaaccggcaacaacttccagtttacttacaccttcgaggacgtgcctttccacagcagctacgcccacagccagagcttggaccggctgatgaatcctctgattgaccagtacctgtactacttgtctcggactcaaacaacaggaggcacggcaaatacgcagactctgggcttcagccaaggtgggcctaatacaatggccaatcaggcaaagaactggctgccaggaccctgttaccgccaacaacgcgtctcaacgacaaccgggcaaaacaacaatagcaactttgcctggactgctgggaccaaataccatctgaatggaagaaattcattggctaatcctggcatcgctatggcaacacacaaagacgacgaggagcgttttttcccagtaacgggatcctgtttttggcaacaaaatgctgccagagacaatgcggattacagcgatgtcatgctcaccagcgaggaagaaatcaaaaccactaaccctgtggctacagaggaatacggtatcgtggcagataacttgcagcagcaaaacacggctcctcaaattggaactgtcaacagccagggggccttacccggtatggtctggcagaaccgggacgtgtacctgcagggtcccatctgggccaagattcctcacacggacggcaacttccacccgtctccgctgatgggcggctttggcctgaaacatcctccgcctcagatcctgatcaagaacacgcctgtacctgcggatcctccgaccaccttcaaccagtcaaagctgaactctttcatcacgcaatacagcaccggacaggtcagcgtggaaattgaatgggagctacagaaggaaaacagcaagcgctggaaccccgagatccagtacacctccaactactacaaatctacaagtgtggactttgctgttaatacagaaggcgtgtactctgaaccccgccccattggcacccgttacctcacccgtaatctgtaa

SEQ ID NO: 5028 - protein, 736 aa, Adeno-associated virus
MAADGYLPDWLEDNLSEGIREWWDLKPGAPKPKANQQKQDDGRGLVLPGYKYLGPFNGLDKGEPVNAADAAALEHDKAYDQQLEAGDNPYLRYNHADAEFQERLQEDTSFGGNLGRAVFQAKKRVLEPLGLVEEGAKTAPGKKRPVEQSPQEPDSSSGIGKKGQQPARKRLNFGQTGDSESVPDPQPLGEPPAAPSGVGPNTMAAGGGAPMADNNEGADGVGSSSGNWHCDSTWLGDRVITTSTRTWALPTYNNHLYKQISNGTSGGATNDNTYFGYSTPWGYFDFNRFHCHFSPRDWQRLINNNWGFRPKRLSFKLFNIQVKEVTQNEGTKTIANNLTSTIQVFTDSEYQLPYVLGSAHQGCLPPFPADVFMIPQYGYLTLNNGSQAVGRSSFYCLEYFPSQMLRTGNNFQFTYTFEDVPFHSSYAHSQSLDRLMNPLIDQYLYYLSRTQTTGGTANTQTLGFSQGGPNTMANQAKNWLPGPCYRQQRVSTTTGQNNNSNFAWTAGTKYHLNGRNSLANPGIAMATHKDDEERFFPVTGSCFWQQNAARDNADYSDVMLTSEEEIKTTNPVATEEYGIVADNLQQQNTAPQIGTVNSQGALPGMVWQNRDVYLQGPIWAKIPHTDGNFHPSPLMGGFGLKHPPPQILIKNTPVPADPPTTFNQSKLNSFITQYSTGQVSVEIEWELQKENSKRWNPEIQYTSNYYKSTSVDFAVNTEGVYSEPRPIGTRYLTRNL

SEQ ID NO: 5029 - DNA, 2214 bp, Adeno-associated virus
atggctgctgacggttatcttccagattggctcgaggacaacctctctgagggcattcgcgagtggtgggacctgaaacctggagcccccaagcccaaggccaaccagcagaagcaggacgacggccggggtctggtgcttcctggctacaagtacctcggacccttcaacggactcgacaagggggagcccgtcagcgcggcggacgcagcggccctcgagcacgacaaggcctgcgaccagcggctcaaagcgggtgacaatccgtacctgcggtataaccacgccgacgccgagtttcaggagcgtctgcaagaagatacgtcttttgggggcaacctcgggcgagcagtcttccaggccaagaagcgggttctcgaacctctcggtctggttgaggaagctgctaagacggctcctggaaagaagggaccggtagaaccgtcacctcagcgttcccccgactcctccacgggcatcggcaagaaaggccagcagcccgctagaaagagactgaactttgggcagactggcgactcagagtcagtccccgaccctcaaccaatcggagaaccaccagcaggcccctctggtctgggatctggtacaatggctgcaggcggtggcgcaccaatggctgacaataacgagggcgccgacggagtgggtaatgcctcaggaaattggcattgcgattccacatggctgggcgacagagtcatcaccaccagcacccgaacctgggctttgcccacctacaacaatcacctctacaagcaaatctccagtcagtcagcaggtagcaccaacgacaacgtctacttcggctacagcaccccctgggggtattttgacttcaacagattccactgtcacttctcaccacgtgactggcagcggctcatcaacaacaactggggattccggcccaagaagctcaacttcaagctgttcaacatccaggtcaaggaggtcacaacgaatgacggcgtcacgaccatcgccaataaccttaccagcacggttcaggtcttttcggactcggaataccagctgccctacgtcctcggctccgcacaccagggctgcctgcctccgttcccggcggacgtcttcatgattccccagtacggctacctgactctgaacaatggcagccaatcggtgggtcgttcctctttctactgcctggaatatttcccttctcaaatgctgagaacgggcaacaacttcaccttcagctacaccttcgaggacgttcccttccacagcagctacgcacacagccagagcctggaccggctgatgaatcctcttatcgaccagtacctgtattacctggccagaacacagagcaacgcaggaggcacagctggcaatcgggaactgcagttttatcagggcgggcctaccaccatggccgaacaagccaaaaactggctgcctggaccttgcttccggcaacaaagagtctccaagacgctggatcaaaacaacaacagcaactttgcttggactggtgccaccaaataccatctaaatggaagaaattcattggttaatcccggtgtcgccatggcaacccacaaggacgacgaggaacgcttcttcccttcgagcggagtcctgatttttggaaaaactggagcagctaataagactacactggaaaatgtgttaatgacaaatgaagaggaaattcgtcctaccaacccggtagccaccgaggaatacgggactgttagcagcaacctgcaggcggctaacactgcagcccagacacaagttgtcaacaaccagggagccttacctggtatggtctggcagaaccgggacgtgtacctgcagggtcccatctgggccaagattcctcacacggacggcaactttcacccgtctccgctgatgggcggctttggactgaagcatccgcctcctcagatcctgatcaaaaacactcctgttcctgctaatcccccggaggtgtttacgcctgccaagtttgcttctttcatcacacagtacagcaccggccaggtcagcgtggagatcgagtgggagctgcagaaggagaacagcaagcgctggaacccagagattcagtatacctccaattttgacgaacagactggtgtggactttgccgttgacagccagggtgtttattctgagcctcgccccattggtactcgttacctcacccgtaatctgtaa

SEQ ID NO: 5030 - protein, 737 aa, Adeno-associated virus
MAADGYLPDWLEDNLSEGIREWWDLKPGAPKPKANQQKQDDGRGLVLPGYKYLGPFNGLDKGEPVSAADAAALEHDKACDQRLKAGDNPYLRYNHADAEFQERLQEDTSFGGNLGRAVFQAKKRVLEPLGLVEEAAKTAPGKKGPVEPSPQRSPDSSTGIGKKGQQPARKRLNFGQTGDSESVPDPQPIGEPPAGPSGLGSGTMAAGGGAPMADNNEGADGVGNASGNWHCDSTWLGDRVITTSTRTWALPTYNNHLYKQISSQSAGSTNDNVYFGYSTPWGYFDFNRFHCHFSPRDWQRLINNNWGFRPKKLNFKLFNIQVKEVTTNDGVTTIANNLTSTVQVFSDSEYQLPYVLGSAHQGCLPPFPADVFMIPQYGYLTLNNGSQSVGRSSFYCLEYFPSQMLRTGNNFTFSYTFEDVPFHSSYAHSQSLDRLMNPLIDQYLYYLARTQSNAGGTAGNRELQFYQGGPTTMAEQAKNWLPGPCFRQQRVSKTLDQNNNSNFAWTGATKYHLNGRNSLVNPGVAMATHKDDEERFFPSSGVLIFGKTGAANKTTLENVLMTNEEEIRPTNPVATEEYGTVSSNLQAANTAAQTQVVNNQGALPGMVWQNRDVYLQGPIWAKIPHTDGNFHPSPLMGGFGLKHPPPQILIKNTPVPANPPEVFTPAKFASFITQYSTGQVSVEIEWELQKENSKRWNPEIQYTSNFDEQTGVDFAVDSQGVYSEPRPIGTRYLTRNL

SEQ ID NO: 5031 - DNA, 2214 bp, Adeno-associated virus
atggctgccgatggttatcttccagattggctcgaggacaacctctctgagggcattcgcgagtggtgggacctgaaacctggagccccgaaacccaaagccaaccagcaaaagcaggacgacggccggggtctggtgcttcctggctacaagtacctcggacccttcaacggactcgacaagggggagcccgtcaacgcggcggacgcagcggccctcgagcacgacaaggcctacgaccagcagctcaaagcgggtgacaatccgtacctgcggtataaccacgccgacgccgagtttcaggagcgtctgcaagaagatacgtcttttgggggcaacctcgggcgagcagtcttccaggccaagaagcgggttctcgaacctctcggtctggttgaggaagctgctaagacggctcctggaaagaagagaccggtagaaccgtcacctcagcgttcccccgactcctccacgggcatcggcaagaaaggccagcagcccgctagaaagagactgaactttgggcagactggcgactcagagtcagtccccgaccctcaaccaatcggagaaccaccagcaggcccctctggtctgggatctggtacaatggctgcaggcggtggcgctccaatggcagacaataacgaaggcgccgacggagtgggtaatgcctcaggaaattggcattgcgattccacatggctgggcgacagagtcatcaccaccagcacccgaacctgggctttgcccacctacaacaaccacctctacaagcaaatctccagtcagtcagcaggtagcaccaacgacaacgtctacttcggctacagcaccccctgggggtattttgacttcaacagattccactgtcacttctcaccacgtgactggcagcggctcatcaacaacaactggggattccggcccaagaagctcaacttcaagctgttcaacatccaggtcaaggaggtcacaacgaatgacggcgtcacgaccatcgccaataaccttaccagcacggttcaggtcttttcggactcggaataccagctgccctacgtcctcggctccgcacaccagggctgcctgcctccgttcccggcggacgtcttcatgattcctcagtacggctacctgactctcaacaacggtagtcaggccgtgggacgttcctccttctactgcctggagtacttcccctctcagatgctgagaacgggcaacaacttttccttcagctacactttcgaggacgtgcctttccacagcagctacgcgcacagccagagtttggacaggctgatgaatcctctcatcgaccagtacctgtactacctgtcaagaacccagtctacgggaggcacagcgggaacccagcagttgctgttttctcaggccgggcctagcaacatgtcgactcaggccagaaactggctgcctggaccctgctacagacagcagcgcgtctccacgacactgtcgcaaaacaacaacagcaactttgcctggactggtgccaccaagtatcatctgaacggcagagactctctggtgaatccgggcgtcgccatggcaaccaacaaggacgacgaggaccgcttcttcccatccagcggcatcctcatgtttggcaagcagggagctggaaaagacaacgtggactatagcaacgtgatgctaaccagcgaggaagaaatcaagaccaccaaccccgtggccacagaacagtatggcgtggtggctgataacctacagcagcaaaacaccgctcctattgtgggggccgtcaacagccagggagccttacctggcatggtctggcagaaccgggacgtgtacctgcagggtcctatttgggccaagattcctcacacagatggcaactttcacccgtctcctttaatgggcggctttggacttaaacatccgcctcctcagatccttatcaaaaacactcctgttcctgcggatcctccaacagcgttcaaccaggccaagctgaattctttcatcacgcagtacagcaccggacaagtcagcgtggagatcgagtgggagctgcagaaggagaacagcaagcgctggaacccagagattcagtatacttccaactactacaaatctacaaatgtggactttgctgttaatactgagggtgcttactctgagcctcgccccattggcactcgttacctcacccgtaatctgtaa

SEQ ID NO: 5032 - protein, 737 aa, Adeno-associated virus
MAADGYLPDWLEDNLSEGIREWWDLKPGAPKPKANQQKQDDGRGLVLPGYKYLGPFNGLDKGEPVNAADAAALEHDKAYDQQLKAGDNPYLRYNHADAEFQERLQEDTSFGGNLGRAVFQAKKRVLEPLGLVEEAAKTAPGKKRPVEPSPQRSPDSSTGIGKKGQQPARKRLNFGQTGDSESVPDPQPIGEPPAGPSGLGSGTMAAGGGAPMADNNEGADGVGNASGNWHCDSTWLGDRVITTSTRTWALPTYNNHLYKQISSQSAGSTNDNVYFGYSTPWGYFDFNRFHCHFSPRDWQRLINNNWGFRPKKLNFKLFNIQVKEVTTNDGVTTIANNLTSTVQVFSDSEYQLPYVLGSAHQGCLPPFPADVFMIPQYGYLTLNNGSQAVGRSSFYCLEYFPSQMLRTGNNFSFSYTFEDVPFHSSYAHSQSLDRLMNPLIDQYLYYLSRTQSTGGTAGTQQLLFSQAGPSNMSTQARNWLPGPCYRQQRVSTTLSQNNNSNFAWTGATKYHLNGRDSLVNPGVAMATNKDDEDRFFPSSGILMFGKQGAGKDNVDYSNVMLTSEEEIKTTNPVATEQYGVVADNLQQQNTAPIVGAVNSQGALPGMVWQNRDVYLQGPIWAKIPHTDGNFHPSPLMGGFGLKHPPPQILIKNTPVPADPPTAFNQAKLNSFITQYSTGQVSVEIEWELQKENSKRWNPEIQYTSNYYKSTNVDFAVNTEGAYSEPRPIGTRYLTRNL

SEQ ID NO: 5033 - DNA, 2217 bp, Adeno-associated virus
atggctgccgatggttatcttccagattggctcgaggacaacctctctgagggcattcgcgagtggtgggacctgaaacctggagccccgaaacccaaagccaaccagcaaaagcaggacgacggccggggtctggtgcttcctggctacaagtacctcggacccttcaacggactcgacaagggggagcccgtcaacgcggcggacgcagcggccctcgagcacgacaaggcctacgaccagcagctcaaagcgggtgacaatccgtacctgcggtataatcacgccgacgccgagtttcaggagcgtctgcaagaagatacgtcttttgggggcaacctcgggcgagcagtcttccaggccaagaagcgggttctcgaacctctcggtctggttgaggaaggcgctaagacggctcctggaaagaagagaccggtagagccgtcaccacagcgttcccccgactcctccacgggcatcggcaagaaaggccagcagcccgccagaaagagactcaatttcggtcagactggcgactcagagtcagtccccgaccctcaacctatcggagaacctccagcagcgccctctagtgtgggatctggtacaatggctgcaggcggtggcgcaccaatggcagacaataacgaaggtgccgacggagtgggtagttcctcgggaaattggcattgcgattccacatggctgggcgacagagtcatcaccaccagcacccgaacctgggccctgcccacctacaacaaccacctctacaagcaaatctccaacgggacctcgggaggcagcaccaacgacaacacctactttggctacagcaccccctgggggtattttgactttaacagattccactgccacttctcaccacgtgactggcagcgactcatcaacaacaactggggattccggcccaagagactcagcttcaagctcttcaacatccaggtcaaagaggtcacgcagaatgaaggcaccaagaccatcgccaataacctcaccagcaccatccaggtgtttacggactcggaataccagctgccgtacgtcctcggctctgcccaccagggctgcctgcctccgttcccggcggacgtcttcatgattcctcagtacggctacctgactctcaacaacggtagtcaggccgtgggacgttcctccttctactgcctggagtacttcccctctcagatgctgagaacgggcaacaacttttccttcagctacactttcgaggacgtgcctttccacagcagctacgcgcacagccagagtttggacaggctgatgaatcctctcatcgaccagtacctgtactacctgtcaagaacccagtctacgggaggcacagcgggaacccagcagttgctgttttctcaggccgggcctagcaacatgtcggctcaggccagaaactggctgcctggaccctgctacagacagcagcgcgtctccacgacactgtcgcaaaacaacaacagcaactttgcctggactggtgccaccaagtatcatctgaacggcagagactctctggtgaatccgggcgtcgccatggcaaccaacaaggacgacgaggaccgcttcttcccatccagcggcatcctcatgtttggcaagcagggagctggaaaagacaacgtggactatagcaacgtgatgctaaccagcgaggaagaaatcaaggccaccaaccccgtggccacagaacagtatggcgtggtggctgataacctacagcagcaaaacaccgctcctattgtgggggccgtcaacagccagggagccttacctggcatggtctggcagaaccgggacgtgtacctgcagggtcctatttgggccaagattcctcacacagatggcaactttcacccgtctcctttaatgggcggctttggacttaaacatccgcctcctcagatcctcatcaaaaacactcctgttcctgcggatcctccaacagcgttcaaccaggccaagctgaattctttcatcacgcagtacagcaccggacaagtcagcgtggagatcgagtgggagctgcagaaggagaacagcaagcgctggaacccagagattcagtatacttccaactactacaaatctacaaatgtggactttgctgttaatactgagggtgtttactctgagcctcgccccattggcactcgttacctcacccgtaatctgtaa

SEQ ID NO: 5034 - protein, 738 aa, Adeno-associated virus
MAADGYLPDWLEDNLSEGIREWWDLKPGAPKPKANQQKQDDGRGLVLPGYKYLGPFNGLDKGEPVNAADAAALEHDKAYDQQLKAGDNPYLRYNHADAEFQERLQEDTSFGGNLGRAVFQAKKRVLEPLGLVEEGAKTAPGKKRPVEPSPQRSPDSSTGIGKKGQQPARKRLNFGQTGDSESVPDPQPIGEPPAAPSSVGSGTMAAGGGAPMADNNEGADGVGSSSGNWHCDSTWLGDRVITTSTRTWALPTYNNHLYKQISNGTSGGSTNDNTYFGYSTPWGYFDFNRFHCHFSPRDWQRLINNNWGFRPKRLSFKLFNIQVKEVTQNEGTKTIANNLTSTIQVFTDSEYQLPYVLGSAHQGCLPPFPADVFMIPQYGYLTLNNGSQAVGRSSFYCLEYFPSQMLRTGNNFSFSYTFEDVPFHSSYAHSQSLDRLMNPLIDQYLYYLSRTQSTGGTAGTQQLLFSQAGPSNMSAQARNWLPGPCYRQQRVSTTLSQNNNSNFAWTGATKYHLNGRDSLVNPGVAMATNKDDEDRFFPSSGILMFGKQGAGKDNVDYSNVMLTSEEEIKATNPVATEQYGVVADNLQQQNTAPIVGAVNSQGALPGMVWQNRDVYLQGPIWAKIPHTDGNFHPSPLMGGFGLKHPPPQILIKNTPVPADPPTAFNQAKLNSFITQYSTGQVSVEIEWELQKENSKRWNPEIQYTSNYYKSTNVDFAVNTEGVYSEPRPIGTRYLTRNL

SEQ ID NO: 5035 - DNA, 2217 bp, Adeno-associated virus
atggctgccgatggttatcttccagattggctcgaggacaacctctctgagggcattcgcgagtggtgggacctgaaacctggagccccgaaacccaaagccaaccagcaaaagcaggacgacggccggggtctggtgcttcctggctacaagcacctcggacccttcaacggactcgacaagggggagcccgtcaacgcggcggacgcagcggccctcgagcacgacaaggcctacgaccagcagctcaaagcgggtgacaatccgtacctgcggtataatcacgctgacgccgagtttcaggagcgtctgcaagaagatacgtcttttgggggcaacctcgggcgagcagtcttccaggccaagaagcgggttctcgaacctctcggtctggttgaggaaggcgctaagacggctcctggaaagaagagaccggtagagccgtcaccacagcgttcccccgactcctccacgggcatcggcaagaaaggccagcagcccgccagaaagagactcaatttcggtcagactggcgactcagagtcagtccccgaccctcaacctatcggagaacctccagcagcgccctctagtgtgggatctggtacaatggctgcaggcggtggcgcaccaatggcagacaataacgaaggtgccgacggagtgggtagttcctcgggaaattggcattgcgattccacatggctgggcgacagagtcatcaccaccagcacccgaacctgggccctgcccacctacaacaaccacctctacaagcaaatctccaacgggacctcgggaggcagcaccaacgacaacacctactttggctacagcaccccctgggggtattttgactttaacagattccactgccacttctcaccacgtgactggcagcgactcatcaacaacaactggggattccggcccaagagactcagcttcaagctcttcaacatccaggtcaaagaggtcacgcagaatgaaggcaccaagaccatcgccaataaccttaccagcacggttcaggtcttttcggactcggaataccagctgccctacgtcctcggctccgcacaccagggctgcctgcctccgttcccggcggacgtcttcatgattccccagtacggctacctgactctgaacaatggcagccaatcggtgggtcgttcctctttctactgcctggaatatttcccttctcaaatgctgagaacgggcaacaacttcaccttcagctacaccttcgaggacgttcccttccacagcagctacgcacacagccagagcctggaccggctgatgaatcctcttatcgaccagtacctgtattacctggccagaacacagagcaacgcaggaggcacagctggcaatcgggaactgcagttttatcagggcgggcctaccaccatggccgaacaagccaaaaactggctgcctggaccttgcttccggcaacaaagagtctccaagacgctggatcaaaacaacaacagcaactttgcttggactggtgccaccaaataccatctaaatggaagaaattcattggttaatcccggtgtcgccatggcaacccacaaggacgacgaggaacgcttcttcccttcgagcggagtcctgatttttggaaaaactggagcagctaataagactacactggaaaatgtgttaatgacaaatgaagaggaaattcgtcctaccaacccggtagccaccgaggaatacgggactgttagcagcaacctgcaggcggctaacactgcagcccagacacaagttgtcaacaaccagggagccttacctggtatggtctggcagaaccgggacgtgtacctgcagggtcccatctgggccaagattcctcacacggacggcaactttcacccgtctccgctgatgggcggctttggactgaagcatccgcctcctcagatcctgatcaaaaacactcctgttcctgctaatcccccggaggtgtttacgcctgccaagtttgcttctttcatcacacagtacagcaccggccaggtcagcgtggagatcgagtgggagctgcagaaggagaacagcaagcgctggaacccagagattcagtatacctccaattttgacaaacagactggtgtggactttgccgttgacagccagggtgtttattctgagcctcgccccattggtactcgttacctcacccgtaatctgtaa

SEQ ID NO: 5036 - protein, 738 aa, Adeno-associated virus
MAADGYLPDWLEDNLSEGIREWWDLKPGAPKPKANQQKQDDGRGLVLPGYKHLGPFNGLDKGEPVNAADAAALEHDKAYDQQLKAGDNPYLRYNHADAEFQERLQEDTSFGGNLGRAVFQAKKRVLEPLGLVEEGAKTAPGKKRPVEPSPQRSPDSSTGIGKKGQQPARKRLNFGQTGDSESVPDPQPIGEPPAAPSSVGSGTMAAGGGAPMADNNEGADGVGSSSGNWHCDSTWLGDRVITTSTRTWALPTYNNHLYKQISNGTSGGSTNDNTYFGYSTPWGYFDFNRFHCHFSPRDWQRLINNNWGFRPKRLSFKLFNIQVKEVTQNEGTKTIANNLTSTVQVFSDSEYQLPYVLGSAHQGCLPPFPADVFMIPQYGYLTLNNGSQSVGRSSFYCLEYFPSQMLRTGNNFTFSYTFEDVPFHSSYAHSQSLDRLMNPLIDQYLYYLARTQSNAGGTAGNRELQFYQGGPTTMAEQAKNWLPGPCFRQQRVSKTLDQNNNSNFAWTGATKYHLNGRNSLVNPGVAMATHKDDEERFFPSSGVLIFGKTGAANKTTLENVLMTNEEEIRPTNPVATEEYGTVSSNLQAANTAAQTQVVNNQGALPGMVWQNRDVYLQGPIWAKIPHTDGNFHPSPLMGGFGLKHPPPQILIKNTPVPANPPEVFTPAKFASFITQYSTGQVSVEIEWELQKENSKRWNPEIQYTSNFDKQTGVDFAVDSQGVYSEPRPIGTRYLTRNL

SEQ ID NO: 5037 - protein, 737 aa, Adeno-associated virus
MAADGYLPDWLEDNLSEGIREWWDLKPGAPKPKANQQKQDDGRGLVLPGYKYLGPFNGLDKGEPVNAADAAALEHDKAYDQQLKAGDNPYLRYNHADAEFQERLQEDTSFGGNLGRAVFQAKKRVLEPLGLVEEAAKTAPGKKRPVEPSPQRSPDSSTGIGKKGQQPARKRLNFGQTGDSESVPDPQPIGEPPAGPSGLGSGTMAAGGGAPMADNNKGADGVGNASGNWHCDSTWLGDRVITTSTRTWALPTYNNHLYKQISSQSAGSTNDNVYFGYSTPWGYFDFNRFHCHFSPRDWQRLINSNWGFRPKKLNFKLFNIQVKEVTTNDGVTTIANNLTSTVQVFSDSEYQLPYVLGSAHQGCLPPFPADVFMIPQYGYLTLNNGSQSVGRSSFYCLEYFPSQMLRTGNNFTFSYTFEDVPFHSSYAHSQSLDRLMNPLIDQYLYYLARTQSNAGGTAGNRELQFYQGGPTTMAEQAKNWLPGPCFRQQRVSKTLDQNNNSNFAWTGATKYHLNGRNSLVNPGVAMATHKDDEERFFPSSGVLIFGKTGAANKTTLENVLMTNEEEIRPTNPVATEEYGTVSSNLQAANTAAQTQVVNNQGALPGMVWQNRDVYLQGPIWAKIPHTDGNFHPSPLMGGFGLKHPPPQILIKNTPVPANPPEVFTPAKFASFITQYSTGQVSVEIEWELQKENSKRWNPEIQYTSNFDKQTGVDFAVDSQGVYSEPRPIGTRYLTRNL

SEQ ID NO: 5038 - DNA, 2214 bp, Adeno-associated virus
atggctgctgacggttatcttccagattggctcgaggacaacctctctgagggcattcgcgagtggtgggacctgaaacctggagcccccaagcccaaggccaaccagcagaagcaggacgacggccggggtctggtgcttcctggctacaagtacctcggacccttcaacggactcgacaagggggagcccgtcaacgcggcggacgcagcggccctcgagcacgacaaggcctacgaccagcagctcaaagcgggtgacaatccgtacctgcggtataaccacgccgacgccgagtttcaggagcgtctgcaagaagatacgtcttttgggggcaacctcgggcgagcagtcttccaggccaagaagcgggttctcgaacctctcggtctggttgaggaagctgctaagacggctcctggaaagaagagaccggtagaaccgtcacctcagcgttcccccgactcctccacgggcatcggcaagaaaggccagcagcccgctagaaagagactgaactttgggcagactggcgactcagagtcagtccccgaccctcaaccaatcggagaaccaccagcaggcccctctggtctgggatctggtacaatggctgcaggcggtggcgcaccaatggctgacaataacaagggcgccgacggagtgggtaatgcctcaggaaattggcattgcgattccacatggctgggcgacagagtcatcaccaccagcacccgaacctgggctttgcccacctacaacaaccacctctacaagcaaatctccagtcagtcagcaggtagcaccaacgacaacgtctacttcggctacagcaccccctgggggtattttgacttcaacagattccactgtcacttctcaccacgtgactggcagcggctcatcaacagcaactggggattccggcccaagaagctcaacttcaagctgttcaacatccaggtcaaggaggtcacaacgaatgacggcgtcacgaccatcgccaataaccttaccagcacggttcaggtcttttcggactcggaataccagctgccctacgtcctcggctccgcacaccagggctgcctgcctccgttcccggcggacgtcttcatgattccccagtacggctacctgactctgaacaatggcagccaatcggtgggtcgttcctctttctactgcctggaatatttcccttctcaaatgctgagaacgggcaacaacttcaccttcagctacaccttcgaggacgttcccttccacagcagctacgcacacagccagagcctggaccggctgatgaatcctcttatcgaccagtacctgtattacctggccagaacacagagcaacgcaggaggcacagctggcaatcgggaactgcagttttatcagggcgggcctaccaccatggccgaacaagccaaaaactggctgcctggaccttgcttccggcaacaaagagtctccaagacgctggatcaaaacaacaacagcaactttgcttggactggtgccaccaaataccatctaaatggaagaaattcattggttaatcccggtgtcgccatggcaacccacaaggacgacgaggaacgcttcttcccttcgagcggagtcctgatttttggaaaaactggagcagctaataagactacactggaaaatgtgttaatgacaaatgaagaggaaattcgtcctaccaacccggtagccaccgaggaatacgggactgttagcagcaacctgcaggcggctaacactgcagcccagacacaagttgtcaacaaccagggagccttacctggtatggtctggcagaaccgggacgtgtacctgcagggtcccatctgggccaagattcctcacacggacggcaactttcacccgtctccgctgatgggcggctttggactgaagcatccgcctcctcagatcctgatcaaaaacactcctgttcctgctaatcccccggaggtgtttacgcctgccaagtttgcttctttcatcacacagtacagcaccggccaggtcagcgtggagatcgagtgggagctgcagaaggagaacagcaagcgctggaacccagagattcagtatacctccaattttgacaaacagactggtgtggactttgccgttgacagccagggtgtttattctgagcctcgccccattggtactcgttacctcacccgtaatctgtaa

SEQ ID NO: 5039 - protein, 737 aa, Adeno-associated virus
MAADGYLPDWLEDNLSEGIREWWDLKPGAPKPKANQQKQDDGRGLVLPGYKYLGPFNGLDKGEPVNAADAAALEHDKAYDQQLKAGDNPYLRYNHADAEFQERLQEDTSFGGNLGRAVFQAKKRVLEPLGLVEEAAKTAPGKKRPVEPSPQRSPDSSTGIGKKGQQPARKRLNFGQTGDSESVPDPQPIGEPPAGPSGLGSGTMAAGGGAPMADNNEGADGVGNASGNWHCDSTWLGDRVITTSTRTWALPTYNNHLYKQISSQSAGSTNDNVYFGYSTPWGYFDFNRFHCHFSPRDWQRLINSNWGFRPKKLNFKLFNIQVKEVTTNDGVTTIANNLTSTVQVFSDSEYQLPYVLGSAHQGCLPPFPADVFMIPQYGYLTLNNGSQSVGRSSFYCLEYFPSQMLRTGNNFTFSYTFEDVPFHSSYAHSQSLDRLMNPLIDQYLYYLARTQSNAGGTAGNRELQFYQGGPTTMAEQAKNWLPGPCFRQQRVSKTLDQNNNSNFAWTGATKYHLNGRNSLVNPGVAMATHKDDEERFFPSSGVLIFGKTGAANKTTLENVLMTNEEEIRPTNPVATEEYGTVSSNLQAANTAAQTQVVNNQGALPGMVWQNRDVYLQGPIWAKIPHTDGNFHPSPLMGGFGLKHPPPQILIKNTPVPANPPEVFTPAKFASFITQYSTGQVSVEIEWELQKENSKRWNPEIQYTSNFDKQTGVDFAVDSQGVYSEPRPIGTRYLTRNL

SEQ ID NO: 5040 - protein, 737 aa, Adeno-associated virus
MAADGYLPDWLEDNLSEGIREWWDLKPGAPKPKANQQKQDDGRGLVLPGYKYLGPFNGLDKGEPVNAADAAALEHDKAYDQQLKAGDNPYLRYNHADAEFQERLQEDTSFGGNLGRAVFQAKKRVLEPLGLVEEAAKTAPGKKRPVEPSPQRSPDSSTGIGKKGQQPARKRLNFGQTGDSESVPDPQPIGEPPAGPSGLGSGTMAAGGGAPMADNNEGADGVGNASGNWHCDSTWLGDRVITTSTRTWALPTYNNHLYKQISSQSAGSTNDNVYFGYSTPWGYFDFNRFHCHFSPRDWQRLINNNWGFRPKKLNFKLFNIQVKEVTTNDGVTTIANNLTSTVQVFSDSEYQLPYVLGSAHQGCLPPFPADVFMIPQYGYLTLNNGSQSVGRSSFYCLEYFPSQMLRTGNNFTFSYTFEDVPFHSSYAHSQSLDRLMNPLIDQYLYYLARTQSNAGGTAGNRELQFYQGGPTTMAEQAKNWLPGPCFRQQRVSKTLDQNNNSNFAWTGATKYHLNGRNSLVNPGVAMATHKDDEERFFPSSGVLIFGKTGAANKTTLENVLMTNEEEIRPTNPVATEEYGTVSSNLQAANTAAQTQVVNNQGALPGMVWQNRDVYLQGPIWAKIPHTDGNFHPSPLMGGFGLKHPPPQILIKNTPVPANPPEVFTPAKFASFITQYSTGQVSVEIEWELQKENSKRWNPEIQYTSNFDKQTGVDFAVDSQGVYSEPRPIGTRYLTRNL

SEQ ID NO: 5041 - protein, 737 aa, Adeno-associated virus
MAADGYLPDWLEDNLSEGIREWWDLKPGAPKPKANQQKQDDGRGLVLPGYKYLGPFNGLDKGEPVNAADAAALEHDKAYDQQLKAGDNPYLRYNHADAEFQERLQEDTSFGGNLGRAVFQAKKRVLEPLGLVEEAAKTAPGKKRPVEPSPQRSPDSSTGIGKKGQQPARKRLNFGQTGDSESVPDPQPIGEPPAGPSGLGSGTMAAGGGAPMADNNKGADGVGNASGNWHCDSTWLGDRVITTSTRTWALPTYNNHLYKQISSQSAGSTNDNVYFGYSTPWGYFDFNRFHCHFSPRDWQRLINNNWGFRPKKLNFKLFNIQVKEVTTNDGVTTIANNLTSTVQVFSDSEYQLPYVLGSAHQGCLPPFPADVFMIPQYGYLTLNNGSQSVGRSSFYCLEYFPSQMLRTGNNFTFSYTFEDVPFHSSYAHSQSLDRLMNPLIDQYLYYLARTQSNAGGTAGNRELQFYQGGPTTMAEQAKNWLPGPCFRQQRVSKTLDQNNNSNFAWTGATKYHLNGRNSLVNPGVAMATHKDDEERFFPSSGVLIFGKTGAANKTTLENVLMTNEEEIRPTNPVATEEYGTVSSNLQAANTAAQTQVVNNQGALPGMVWQNRDVYLQGPIWAKIPHTDGNFHPSPLMGGFGLKHPPPQILIKNTPVPANPPEVFTPAKFASFITQYSTGQVSVEIEWELQKENSKRWNPEIQYTSNFDKQTGVDFAVDSQGVYSEPRPIGTRYLTRNL

SEQ ID NO: 5042 - DNA, 2217 bp, Adeno-associated virus
atggctgccgatggttatcttccagattggctcgaggacaacctctctgagggcattcgcgagtggtgggacctgaaacctggagccccgaaacccaaagccaaccagcaaaagcaggacgacggccggggtctggtgcttcctggctacaagtacctcggacccttcaacggactcgacaagggggagcccgtcaacgcggcggacgcagcggccctcgagcacgacaaggcctacgaccagcagctcaaagcgggtgacaatccgcacctgcggtataatcacgccgacgccgagtttcaggagcgtctgcaagaagatacgtcttttgggggcaacctcgggcgagcagtcttccaggccaagaagcgggttctcgaacctctcggtctggttgaggaaggcgctaagacggctcctggaaagaagagaccggtagagccgtcaccacagcgttcccccgactcctccacgggcatcggcaagaaaggccagcagcccgccagaaagagactcaatttcggtcagactggcgactcagagtcagtccccgaccctcaacttatcggagaacctccagcagcgccctctagtgtgggatctggtacaatggctgcaggcggtggcgcaccaatggcagacaataacgaaggtgccgacggagtgggtagttcctcgggaaattggcattgcgattccacatggctgggcgacagagtcatcaccaccagcacccgaacctgggccctgcccacctacaacaaccacctctacaagcaaatctccaacgggacctcgggaggcagcaccaacgacaacacctactttggctacagcaccccctgggggtattttgactttaacagattccactgccacttctcaccacgtgactggcagcgactcatcaacaacaactggggattccggcccaagagactcagcttcaagctcttcaacatccaggtcaaagaggtcacgcagaatgaaggcaccaagaccatcgccaataacctcaccagcaccatccaggtgtttacggactcggagtaccagctgccgtacgtcctcggctctgcccaccagggctgcctgcctccgttcccggcggacgtcttcatgattcctcagtacggcaacctgactctcaacaacggtagtcaggccgtgggacgttcctccttctactgcctggagtacttcccctctcagatgctgagaacgggcaacaacttttccttcagctacactttcgaggacgtgcctttccacagcagctacgcgcacagccagagtttggacaggctgatgaatcctctcatcgaccagtacctgtactacctgtcaagaacccagtctacgggaggcacagcgggaacccagcagttgctgttttctcaggccgggcctagcaacatgtcggctcaggccagaaactggctgcctggaccctgctacagacagcagcgcgtctccacgacactgtcgcaaaacaacaacagcaactttgcctggactggtgccaccaagtatcatctgaacggcagagactctctggtgaatccgggcgtcgccatggcaaccaacaaggacgacgaggaccgcttcttcccatccagcggcatcctcatgtttggcaagcagggagctggaaaagacaacatgggctatagcaacgtgatgctaaccagcgaggaagaaatcaagaccaccaaccccgtggccacagaacagtatggcgtggtggctgataacctacagcagcaaaacaccgctcctattgtgggggccgtcaacagccagggagccttacctggcatggtctggcagaaccgggacgtgtacctgcagggtcctatttgggccaagattcctcacacagatggcaactttcacccgtctcctttaatgggcggctttggacttaaacatccgcctcctcagatcctcatcaaaaacactcctgttcctgcggatcctccaacagcgttcaaccaggccaagctgaattctttcatcacgcagtacggcaccggacaagtcagcgtggagatcgagtgggagctgcagaaggagaacagcaagcgctggaacccagagattcagtatacttccaactactacaaatctacaaatgtggactttgctgttaatactgagggtgtttactctgagcctcgccccattggcactcgttacctcacccgtaatctgtaa

SEQ ID NO: 5043 - protein, 738 aa, Adeno-associated virus
MAADGYLPDWLEDNLSEGIREWWDLKPGAPKPKANQQKQDDGRGLVLPGYKYLGPFNGLDKGEPVNAADAAALEHDKAYDQQLKAGDNPHLRYNHADAEFQERLQEDTSFGGNLGRAVFQAKKRVLEPLGLVEEGAKTAPGKKRPVEPSPQRSPDSSTGIGKKGQQPARKRLNFGQTGDSESVPDPQLIGEPPAAPSSVGSGTMAAGGGAPMADNNEGADGVGSSSGNWHCDSTWLGDRVITTSTRTWALPTYNNHLYKQISNGTSGGSTNDNTYFGYSTPWGYFDFNRFHCHFSPRDWQRLINNNWGFRPKRLSFKLFNIQVKEVTQNEGTKTIANNLTSTIQVFTDSEYQLPYVLGSAHQGCLPPFPADVFMIPQYGNLTLNNGSQAVGRSSFYCLEYFPSQMLRTGNNFSFSYTFEDVPFHSSYAHSQSLDRLMNPLIDQYLYYLSRTQSTGGTAGTQQLLFSQAGPSNMSAQARNWLPGPCYRQQRVSTTLSQNNNSNFAWTGATKYHLNGRDSLVNPGVAMATNKDDEDRFFPSSGILMFGKQGAGKDNMGYSNVMLTSEEEIKTTNPVATEQYGVVADNLQQQNTAPIVGAVNSQGALPGMVWQNRDVYLQGPIWAKIPHTDGNFHPSPLMGGFGLKHPPPQILIKNTPVPADPPTAFNQAKLNSFITQYGTGQVSVEIEWELQKENSKRWNPEIQYTSNYYKSTNVDFAVNTEGVYSEPRPIGTRYLTRNL

SEQ ID NO: 5044 - DNA, 2217 bp, Adeno-associated virus
atggctgccgatggttatcttccagattggctcgaggacaacctctctgagggcattcgcgagtggtgggacctgaaacctggagccccgaaacccaaagccaaccagcaaaagcaggacgacggccggggtctggtgcttcctggctacaagtacctcggacccttcaacggactcgacaagggggagcccgtcaacgcggcggacgcagcggccctcgagcacgacaaggcctacgaccagcagctcaaagcgggtgacaatccgtacctgcggtataatcacgccgacgccgagtttcaggagcgtctgcaagaagatacgtcttttgggggcaacctcgggcgagcagtcttccaggccaagaagcgggttctcgaacctctcggtctggttgaggaaggcgctaagacggctcctggaaagaagagaccggtagagccgtcaccacagcgttcccccgactcctccacgggcatcggcaagaaaggccagcagcccgccggaaagagactcaatttcggtcagactggcgactcagagtcagtccccgaccctcaacctatcggagaacctccagcagcgccctctagtgtgggatctggtacaatggctgcaggcggtggcgcaccaatggcagacaataacgaaggtgccgacggagtgggtagttcctcgggaaattggcattgcgattccacatggctgggcgacagagtcatcaccaccagcacccgaacctgggccctgcccacctacaacaaccacctctacaagcaaatctccaacgggacctcgggaggcagcaccaacgacaacacctactttggctacagcaccccctgggggtattttgactttaacagattccactgccacttctcaccacgtgactggcagcgactcatcaacaacaactggggattccggcccaagagactcagcttcaagctcttcaacatccaggtcaaagaggtcacgcagaatgaaggcaccaagaccatcgccaataacctcaccagcaccatccaggtgtttacggactcggaataccagctgccgtacgtcctcggctctgcccaccagggctgcctgcctccgttcccggcggacgtcttcatgattcctcagtacggctacctgactctcaacaacggtagtcaggccgtgggacgttcctccttctactgcctggagtacttcccctctcagatgctgagaacgggcaacaacttttccttcagctacactttcgaggacgtgcctttccacagcagctacgcgcacagccagagtttggacaggctgatgaatcctctcgtcgaccagtacctgtactacctgtcaagaacccagtctacgggaggcacagcgggaacccagcagttgctgttttctcaggccgggcctagcaacatgtcggctcaggccagaaactggctgcctggaccctgctacagacagcagcgcgtctccacgacactgtcgcaaaacaacaacagcaactttgcctggactggtgccaccaagtatcatctgaacggcagagactctctggtgaatccgggcgtcgccatggcaaccaacaaggacgacgaggaccgcttcttcccatccagcggcatcctcatgtttggcaagcagggagctggaaaagacaacgtggactatagcaacgtgatgctaaccagcgaggaagaaatcaagaccaccaaccccgtggccacagaacagtatggcgtggtggctgataacctacagcagcaaaacaccgctcctattgtgggggccgtcaacagccagggagccttacctggcatggtctggcagaaccgggacgtgtacctgcagggtcctatttgggccaagattcctcacacagatggcaactttcacccgtctcctttaatgggcggctttggacttaaacatccgcctcctcagatcctcatcaaaaacactcctgttcctgcggatcctccaacagcgttcaaccaggccaagctgaattctttcatcacgcagtacagcaccggacaagtcagcgtggagatcgagtgggagctgcagaaggagaacagcaagcgctggagcccagagattcagtatacttccaactactacaaatctacaaatgtggactttgctgttaatactgagggtgtttactctgagcctcgccccattggcactcgttacctcacccgtaatctgtaa

SEQ ID NO: 5045 - protein, 738 aa, Adeno-associated virus
MAADGYLPDWLEDNLSEGIREWWDLKPGAPKPKANQQKQDDGRGLVLPGYKYLGPFNGLDKGEPVNAADAAALEHDKAYDQQLKAGDNPYLRYNHADAEFQERLQEDTSFGGNLGRAVFQAKKRVLEPLGLVEEGAKTAPGKKRPVEPSPQRSPDSSTGIGKKGQQPAGKRLNFGQTGDSESVPDPQPIGEPPAAPSSVGSGTMAAGGGAPMADNNEGADGVGSSSGNWHCDSTWLGDRVITTSTRTWALPTYNNHLYKQISNGTSGGSTNDNTYFGYSTPWGYFDFNRFHCHFSPRDWQRLINNNWGFRPKRLSFKLFNIQVKEVTQNEGTKTIANNLTSTIQVFTDSEYQLPYVLGSAHQGCLPPFPADVFMIPQYGYLTLNNGSQAVGRSSFYCLEYFPSQMLRTGNNFSFSYTFEDVPFHSSYAHSQSLDRLMNPLVDQYLYYLSRTQSTGGTAGTQQLLFSQAGPSNMSAQARNWLPGPCYRQQRVSTTLSQNNNSNFAWTGATKYHLNGRDSLVNPGVAMATNKDDEDRFFPSSGILMFGKQGAGKDNVDYSNVMLTSEEEIKTTNPVATEQYGVVADNLQQQNTAPIVGAVNSQGALPGMVWQNRDVYLQGPIWAKIPHTDGNFHPSPLMGGFGLKHPPPQILIKNTPVPADPPTAFNQAKLNSFITQYSTGQVSVEIEWELQKENSKRWSPEIQYTSNYYKSTNVDFAVNTEGVYSEPRPIGTRYLTRNL

SEQ ID NO: 5046 - DNA, 2217 bp, Adeno-associated virus
atggttgccgatggttatcttccagattggctcgaggacaacctctctgagggcattcgcgagtggtgggacctgaaacctggagccccgaaacccaaagccaaccagcaaaagcagggcgacggccggggtctggtgcttcctggctacaagtacctcggacccttcaacggactcgacaagggggagcccgtcaacgcggcggacgcagcggccctcgagcacgacaaggcctacgaccagcagcttaaagcgggtgacaatccgtacctgcggtataatcacgccgacgccgagcttcaggagcgtctgcaagaagatacgtcttttgggggcaacctcgggcgagcagtcttccaggccaagaagcgggttctcgaacctctcggtctggttgaggaaggcgctaagacggctcctggaaagaagagaccggtagagccgtcaccacagcgttcccccgactcctccacgggcatcggcaagaaaggccagcagcccgccagaaagagactcaatttcggtcagactggcgactcagagtcagtccccgaccctcaacctatcggagaacctccagcagcgccctctagtgtgggatctggtacaatggctgcaggcggtggcgcgccaatggcagacaataacgaaggtgccgacggagtgggtagttcctcgggaaattggcattgcgattccacatggctgggcgacagagtcatcaccaccagcacccgaacctgggccctgcccacctacaacaaccacctctacaagcaaatctccaacgggacctcgggaggcagcaccaacgacaacacctactttggctacagcaccccctgggggtattttgactttaacagattccactgccacttctcaccacgtgactggcagcgactcatcaacaacaactggggattccggcccaagagactcagcttcaagctcttcaacatccaggtcaaagaggtcacgcagaatgaaggcaccaagaccatcgccaataacctcaccagcaccatccaggtgtttacggactcggaataccagctgccgtacgtcctcggctctgcccaccagggctgccagcctccgttcccggcggacgtcttcatgattcctcagtacggctacctgactctcaacaacggtagtcaggccgtgggacgttcctccttctactgcctggagtacttcccctctcagatgctgagaacgggcaacaacttttccttcagctacactttcgaggacgtgcctttccacagcagctacgcgcacagccagagtttggacaggctgatgaatcctctcatcgaccagtacctgtactacctgtcaagaacccagtctacgggaggcacagcgggaacccagcagttgctgttttctcaggccgggcctagcaacatgtcggctcaggccagaaactggctgcctggaccctgctacagacagcagcgcgtctccacgacactgtcgcaaaacaacaacagcaactttgcctggactggtgccaccaagtatcatctgaacggcagagactctctggtgaatccgggcgtcgccatggcaaccaacaaggacgacgaggaccgcttcttcccatccagcggcatcctcatgtttggcaagcagggagctggaaaagacaacgtggactatagcaacgtgatgctaaccagcgaggaagaaatcaagaccaccaaccccgtggccacagaacagtatggcgtggtggctgataacctacagcagcaaaacaccgctcctattgtgggggccgtcaacagccagggagccttacctggcatggtctggcagaaccgggacgtgtacctgcagggtcctatttgggccaagattcctcacacagatggcaactttcacccgtctcctttaatgggcggctttggacttaaacatccgcctcctcagatcctcatcaaaaacactcctgttcctgcggatcctccaacagcgttcaaccaggccaagctgaattctttcatcacgcagtacagcaccggacaagtcagcgtggagatcgagtgggagccgcagaaggagaacagcaagcgctggaacccagagattcagtatacttccaactactacaaatctacaaatgtggactttgctgttaatactgagggtgtttactctgagcctcgccccattggcactcgttacctcacccgtaatctgtaa

SEQ ID NO: 5047 - protein, 738 aa, Adeno-associated virus
MVADGYLPDWLEDNLSEGIREWWDLKPGAPKPKANQQKQGDGRGLVLPGYKYLGPFNGLDKGEPVNAADAAALEHDKAYDQQLKAGDNPYLRYNHADAELQERLQEDTSFGGNLGRAVFQAKKRVLEPLGLVEEGAKTAPGKKRPVEPSPQRSPDSSTGIGKKGQQPARKRLNFGQTGDSESVPDPQPIGEPPAAPSSVGSGTMAAGGGAPMADNNEGADGVGSSSGNWHCDSTWLGDRVITTSTRTWALPTYNNHLYKQISNGTSGGSTNDNTYFGYSTPWGYFDFNRFHCHFSPRDWQRLINNNWGFRPKRLSFKLFNIQVKEVTQNEGTKTIANNLTSTIQVFTDSEYQLPYVLGSAHQGCQPPFPADVFMIPQYGYLTLNNGSQAVGRSSFYCLEYFPSQMLRTGNNFSFSYTFEDVPFHSSYAHSQSLDRLMNPLIDQYLYYLSRTQSTGGTAGTQQLLFSQAGPSNMSAQARNWLPGPCYRQQRVSTTLSQNNNSNFAWTGATKYHLNGRDSLVNPGVAMATNKDDEDRFFPSSGILMFGKQGAGKDNVDYSNVMLTSEEEIKTTNPVATEQYGVVADNLQQQNTAPIVGAVNSQGALPGMVWQNRDVYLQGPIWAKIPHTDGNFHPSPLMGGFGLKHPPPQILIKNTPVPADPPTAFNQAKLNSFITQYSTGQVSVEIEWEPQKENSKRWNPEIQYTSNYYKSTNVDFAVNTEGVYSEPRPIGTRYLTRNL

SEQ ID NO: 5048 - DNA, 2217 bp, Adeno-associated virus
atggctgccgatggttatcttccagattggctcgaggacaacctctctgagggcattcgcgagtggtgggacctgaaacctggagccccgaaacccaaagccaaccagcaaaagcaggacgacggccggggtctggtgcttcctggctacaagtacctcggacccttcaacggactcgacaagggggagcccgtcaacgcggcggacgcagcggccctcgagcacgacaaggcctacgaccagcagctcaaagcgggtgacaatccgtacctgcggtataatcacgccgacgccgagtttcaggagcgtctgcaagaagatacgtcttttgggggcaacctcgggcgagcagtcttccaggccaagaagcgggttctcgaacctctcggtctggttgaggaaggcgctaagacggctcctggaaagaagagaccggtagagccgtcaccacagcgttcccccgactcctccacgggcatcggcaagaaaggccagcagcccgccagaaagagactcaatttcggtcagactggcgactcagagtcagtccccgaccctcaacctatcggagaacctccagcagcgccctctagtgtgggatctggtacaatggctgcaggcggtggcgcaccaatggcagacaataacgaaggtgccgacggagtgggtagttcctcgggaaattggcattgcgattccacatggctgggcgacagagtcatcaccaccagcacccgaacctgggccctgcccacctacaacaaccacctctacaagcaaatctccaacgggacctcgggaggcagcaccaacgacaacacctactttggctacagcaccccctgggggtattttgactttaacagattccactgccacttctcaccacgtgactggcagcgactcatcaacaacaactggggattccggcccaagagactcagcttcaagctcttcaacatccaggtcaaagaggtcacgcagaatgaaggcaccaagaccatcgccaatagcctcaccagcaccatccaggtgtttacggactcggaataccagctgccgtacgtcctcggctctgcccaccagggctgcctgcctccgttcccggcggacgtcttcatgattcctcagtacggctacctgactcccaacaacggtagtcaggccgtgggacgttcctccttctactgcctggagtacttcccctctcagatgctgagaacgggcaacaacttttccttcagctacactttcgaggacgtgcctttccacagcagctacgcgcacagccagagtttggacaggctgatgaatcctctcatcgaccagtacctgtactacctgtcaagaacccagtctacgggaggcacagcgggaacccagcagttgctgtcttctcaggccgggcctagcaacatgtcggctcaggccagaaactggctgcctggaccctgctacagacagcagcgcgtctccacgacactgtcgcaaaacaacaacagcaactttgcctggactggtgccaccaagtatcatctgaacggcagagactctctggtgaatccgggcgtcgccatggcaaccaacaaggacgacgaggaccgcttcttcccatccagcggcatcctcatgtttggcaagcagggagctggaaaagacaacgtggactatagcaacgtgatgctaaccagcgaggaagaaatcaagaccaccaaccccgtggccacagaacagtatggcgtggtggctgataacctacagcagcaaaacaccgctcctattgtgggggccgtcaacagccagggagccttacctggcatggtctggcagaaccgggacgtgtacttgcagggtcctatttgggccaagattcctcacacagatggcaactttcacccgtctcctttaatgggcggctttggacttaaacatccgcctcctcagatcctcatcaaaaacactcctgttcctgcggatcctccaacagcgttcaaccaggccaagctgaattctttcatcacgcagtacagcaccggacaagtcagcgtggagatcgagtgggagctgcagaaggagaacagcaagcgctggaacccagagattcagtatacttccaactactacaaatctacaaatgtggactttgctgttaatactgagggtgtttactctgagcctcgccccattggcactcgttacctcacccgtaatctgtaa

SEQ ID NO: 5049 - protein, 738 aa, Adeno-associated virus
MAADGYLPDWLEDNLSEGIREWWDLKPGAPKPKANQQKQDDGRGLVLPGYKYLGPFNGLDKGEPVNAADAAALEHDKAYDQQLKAGDNPYLRYNHADAEFQERLQEDTSFGGNLGRAVFQAKKRVLEPLGLVEEGAKTAPGKKRPVEPSPQRSPDSSTGIGKKGQQPARKRLNFGQTGDSESVPDPQPIGEPPAAPSSVGSGTMAAGGGAPMADNNEGADGVGSSSGNWHCDSTWLGDRVITTSTRTWALPTYNNHLYKQISNGTSGGSTNDNTYFGYSTPWGYFDFNRFHCHFSPRDWQRLINNNWGFRPKRLSFKLFNIQVKEVTQNEGTKTIANSLTSTIQVFTDSEYQLPYVLGSAHQGCLPPFPADVFMIPQYGYLTPNNGSQAVGRSSFYCLEYFPSQMLRTGNNFSFSYTFEDVPFHSSYAHSQSLDRLMNPLIDQYLYYLSRTQSTGGTAGTQQLLSSQAGPSNMSAQARNWLPGPCYRQQRVSTTLSQNNNSNFAWTGATKYHLNGRDSLVNPGVAMATNKDDEDRFFPSSGILMFGKQGAGKDNVDYSNVMLTSEEEIKTTNPVATEQYGVVADNLQQQNTAPIVGAVNSQGALPGMVWQNRDVYLQGPIWAKIPHTDGNFHPSPLMGGFGLKHPPPQILIKNTPVPADPPTAFNQAKLNSFITQYSTGQVSVEIEWELQKENSKRWNPEIQYTSNYYKSTNVDFAVNTEGVYSEPRPIGTRYLTRNL

SEQ ID NO: 5050 - protein, 738 aa, Adeno-associated virus
MAADGYLPDWLEDNLSEGIREWWDLKPGAPKPKANQQKQDDGRGLVLPGYKYLGPFNGLDKGEPVNAADAAALEHDKAYDQQLKAGDNPYLRYNHADAEFQERLQEDTSFGGNLGRAVFQAKKRVLEPLGLVEEGAKTAPGKKRPVEPSPQRSPDSSTGIGKKGQQPARKRLNFGQTGDSESVPDPQPIGEPPAAPSSVGSGTMAAGGGAPMADNNEGADGVGSSSGNWHCDSTWLGDRVITTSTRTWALPTYNNHLYKQISNGTSGGSTNDNTYFGYSTPWGYFDFNRFHCHFSPRDWQRLINNNWGFRPKRLSFKLFNIQVKEVTQNEGTKTIANNLTSTIQVFTDSEYQLPYVLGSAHQGCLPPFPADVFMIPQYGYLTLNNGSQAVGRSSFYCLEYFPSQMLRTGNNFSFSYTFEDVPFHSSYVHSQSLDRLMNPLIDQYLYYLSRTQSTGGTAGTQQLLFSQAGPSNMSAQARNWLPGPCYRQQRVSTTLSQNNNSNFAWTGATKYHLNGRDSLVNSGVAMATNKDDEDRFFPSSGILMFGKQGAGKDNVDYSNVMLTSEEEIKTTNPVATEQYGVVADNLQQQNTAPIVGAVNSQGALPGMVWQNRDVYLQGPIWAKIPHTDGNFHPSPLMGGFGLKHPPPQILIKNTPVPADPPTAFNQAKLNSFITQYSTGQVSVEIEWELQKENSKRWNPEIQYTSNYYKSTNVDFAVNTEGVYSEPRPIGTRYPTRNL

SEQ ID NO: 5051 - DNA, 2217 bp, Adeno-associated virus
atggctgccgatggttatcttccagattggctcgaggacaacctctctgagggcattcgcgagtggtgggacctgaaacctggagccccgaaacccaaagccaaccagcaaaagcaggacgacggccggggtctggtgcttcctggctacaagtacctcggacccttcaacggactcgacaagggggagcccgtcaacgcggcggacgcagcggccctcgagcacgacaaggcctacgaccagcagctcaaagcgggtgacaatccgtacctgcggtataatcacgccgacgccgagtttcaggagcgtctgcaagaagatacgtcttttgggggcaacctcgggcgagcagtcttccaggccaagaagcgggttctcgaacctctcggtctggttgaggaaggcgctaagacggctcctggaaagaagagaccggtagagccgtcaccacagcgttcccccgactcctccacgggcatcggcaagaaaggccagcagcccgccagaaagagactcaatttcggtcagactggcgactcagagtcagtccccgaccctcaacctatcggagaacctccagcagcgccctctagtgtgggatctggtacaatggctgcaggcggtggcgcaccaatggcagacaataacgaaggtgccgacggagtgggtagttcctcgggaaattggcattgcgattccacatggctgggcgacagagtcatcaccaccagcacccgaacctgggccctgcccacctacaacaaccacctctacaagcaaatctccaacgggacctcgggaggcagcaccaacgacaacacctactttggctacagcaccccctgggggtattttgactttaacagattccactgccacttctcaccacgtgactggcagcgactcatcaacaacaactggggattccggcccaagagactcagcttcaagctcttcaacatccaggtcaaagaggtcacgcagaatgaaggcaccaagaccatcgccaataacctcaccagcaccatccaggtgtttacggactcggaataccagctgccgtacgtcctcggctctgcccaccagggctgcctgcctccgttcccggcggacgtcttcatgattcctcagtacggctacctgactctcaacaacggtagtcaggccgtgggacgttcctccttctactgcctggagtacttcccctctcagatgctgagaacgggcaacaacttttccttcagctacactttcgaggacgtgcctttccacagcagctacgtgcacagccagagtttggacaggctgatgaatcctctcatcgaccagtacctgtactacctgtcaagaacccagtctacgggaggcacagcgggaacccagcagttgctgttttctcaggccgggcctagcaacatgtcggctcaggccagaaactggctgcctggaccctgctacagacagcagcgcgtctccacgacactgtcgcaaaacaacaacagcaactttgcctggactggtgccaccaagtatcatctgaacggcagagactctctggtgaattcgggcgtcgccatggcaaccaacaaggacgacgaggaccgcttcttcccatccagcggcatcctcatgtttggcaagcagggagctggaaaagacaacgtggactatagcaacgtgatgctaaccagcgaggaagaaatcaagaccaccaaccccgtggccacagaacagtatggcgtggtggctgataacctacagcagcaaaacaccgctcctattgtgggggccgtcaacagccagggagccttacctggcatggtctggcagaaccgggacgtgtacctgcagggtcctatttgggccaagattcctcacacagatggcaactttcacccgtctcctttaatgggcggctttggacttaaacatccgcctcctcagatcctcatcaaaaacactcctgttcctgcggatcctccaacagcgttcaaccaggccaagctgaattctttcatcacgcagtacagcaccggacaagtcagcgtggagatcgagtgggagctgcagaaggagaacagcaagcgctggaacccagagattcagtatacttccaactactacaaatctacaaatgtggactttgctgttaatactgagggtgtttactctgagcctcgccccattggcactcgttaccccacccgtaatctgtaa

SEQ ID NO: 5052 - protein, 734 aa, Adeno-associated virus; identical to SEQ ID NO: 4948

SEQ ID NO: 5053 - DNA, 2214 bp, Adeno-associated virus
atggctgctgacggttatcttccagattggctcgaggacaacctctctgagggcattcgcgagtggtgggacctgaaacctggagccccgaaacccaaagccaaccagcagaagcaggacgacggccggggtctggtgcttcctggctacaagtacctcggacccttcaacggactcgacaagggggagcccgtcaacgcggcggacgcagcggccctcgagcacgacaaggcctacgaccagcagctcaaagcgggtgacaatccgtacctgcggtataaccacgccgacgccgagtttcaggagcgtctgcaagaagatacgtcttttgggggcaacctcgggcgagcagtcttccaggccaagaagcgggttctcgaacctctcggtctggttgaggaagctgctaagacggctcctggaaagaagagaccggtagaaccgtcacctcagcgttcccccgactcctccacgggcatcggcaagaaaggccagcagcccgctagaaagagactgaactttgggcagactggcgactcagagtcagtccccgaccctcaacctctcggagaaccaccagcaggcccctctggtctgggatctggtacaatggctgcaggcggtggcgctccaatggcagacaataacgaaggcgccgacggagtgggtaatgcctcaggaaattggcattgcgattccacatggctgggcgacagagtcatcaccaccagcacccgaacctgggctttgcccacctacaacaaccacctctacaagcaaatctccagtcagtcagcaggtagcaccaacgacaacgtctacttcggctacagcaccccctgggggtattttgacttcaacagattccactgtcacttctcaccacgtgactggcagcgactcatcaacaacaactggggattccggcccaagaagctcaacttcaagctcttcaacatccaagtcaaggaggtcacgacgaatgacggcgtcacgaccatcgctaataaccttaccagcacggttcaggtcttttcggactcggagtaccagctgccgtacgtcctcggctctgcccaccagggctgcctgcctccgttcccggcggacgtcttcatgattcctcagtacggctacctgactctgaacaatggcagccaatcggtgggacgttcatccttctactgcctggaatacttcccttctcaggtgctgagaacgggtaacaacttcaccttcagttacaccttcgaggacgtgcctttccacagcagctacgcgcacagccagagcctagaccggctgatgaatcccctcatcgaccagtacctgtattacctggctagaacacagagtaacccaggaggcacatctggcaatcgggaactgcagttttaccagggcgggccttccaccatggccgaacaagccaagaactggttacctggaccttgcttccggcaacaaagagtttccaaaacactggatcaaaacaacaacagcaactttgcttggactggtgccaccaaatatcacctgaacggcagaaactcattggtgaatcctggtgtcgccatggcaactcacaaggacgacgaggaccgctttttcccatccagcggagtcctgatttttggaaaaactggagcaaccaacaagactacattggaaaacgtgttaatgacaaatgaagaagaaattcgtcctactaatcctgtggccacagaagaatacgggatagtcagcagcaatttacaagcggccaatactgcagcccagacacaagttgtcaacaaccagggagccttacctggcatggtctggcagaaccgggacgtgtacctgcagggtcccatctgggccaaaattcctcacacagacggcaactttcacccgtctccgctgatgggcggctttggactgaagcatccgcctcctcagatcctgatcaaaaacactcctgttcctgctaatcccccggaggtgtttacgcctgccaagtttgcttctttcatcacacagtacagcaccggccaggtcagcgtggagatcgagtgggagctgcagaaggagaacagcaagcgctggaacccagagattcagtatacctccaattttgacaaacagactggtgtggactttgccgttgacagccagggtgtttattctgagcctcgccccattggtactcgttacctcacccgtaatctgtaa

SEQ ID NO: 5054 - protein, 737 aa, Adeno-associated virus
MAADGYLPDWLEDNLSEGIREWWDLKPGAPKPKANQQKQDDGRGLVLPGYKYLGPFNGLDKGEPVNAADAAALEHDKAYDQQLKAGDNPYLRYNHADAEFQERLQEDTSFGGNLGRAVFQAKKRVLEPLGLVEEAAKTAPGKKRPVEPSPQRSPDSSTGIGKKGQQPARKRLNFGQTGDSESVPDPQPLGEPPAGPSGLGSGTMAAGGGAPMADNNEGADGVGNASGNWHCDSTWLGDRVITTSTRTWALPTYNNHLYKQISSQSAGSTNDNVYFGYSTPWGYFDFNRFHCHFSPRDWQRLINNNWGFRPKKLNFKLFNIQVKEVTTNDGVTTIANNLTSTVQVFSDSEYQLPYVLGSAHQGCLPPFPADVFMIPQYGYLTLNNGSQSVGRSSFYCLEYFPSQVLRTGNNFTFSYTFEDVPFHSSYAHSQSLDRLMNPLIDQYLYYLARTQSNPGGTSGNRELQFYQGGPSTMAEQAKNWLPGPCFRQQRVSKTLDQNNNSNFAWTGATKYHLNGRNSLVNPGVAMATHKDDEDRFFPSSGVLIFGKTGATNKTTLENVLMTNEEEIRPTNPVATEEYGIVSSNLQAANTAAQTQVVNNQGALPGMVWQNRDVYLQGPIWAKIPHTDGNFHPSPLMGGFGLKHPPPQILIKNTPVPANPPEVFTPAKFASFITQYSTGQVSVEIEWELQKENSKRWNPEIQYTSNFDKQTGVDFAVDSQGVYSEPRPIGTRYLTRNL

SEQ ID NO: 5055 - DNA, 2214 bp, Adeno-associated virus
atggctgccgatggttatcttccagattggctcgaggacaacctctctgagggcattcgcgagtggtgggacctgaaacctggagccccgaaacccaaagccaaccagcaaaagcaggacgacggccggggtctggtgcttcctggctacaagtacctcggacccttcaacggactcgacaagggggagcccgtcaacgcggcggacgcagcggccctcgagcacgacaaggcctacgaccagcagctcaaagcgggtgacaatccgtacctgcggtataatcacgccgacgccgagtttcaggagcgtctgcaagaagatacgtcttttgggggcaacctcgggcgagcagtcttccaggccaagaagcgggttctcgaacctctcggtctggttgaggaaggcgctaagacggctcctggaaagaagagaccggtagagccgtcaccacagcgttcccccgactcctccacgggcatcggcaagaaaggccagcagcccgccagaaagagactcaatttcggtcagactggcgactcagagtcagtccccgaccctcaacctatcggagaacctccagcagcgccctctagtgtgggatctggtacaatggctgcaggcggtggcgcaccaatggcagacaataacgaaggtgccgacggagtgggtagttcctcgggaaattggcattgcgattccacacggctgggcgacagagtcatcaccaccagcacccggacctgggctttgcccacctacaacaaccacctctacaagcaaatctccagtcagtcagcaggtagcaccaacgacaacgtctacttcggctacagcaccccctgggggtattttgacttcaacagattccactgtcacttctcaccacgtgactggcagcggctcatcaacaacaactggggattccggcccaagaagctcaacttcaagctgttcaacatccaggtcaaggaggtcacaacgaatgacggcgtcacgaccatcgccaataaccttaccagcacggttcaggtcttttcggactcggaataccagctgccctacgtcctcggctccgcacaccagggctgcctgcctccgttcccggcggacgtcttcatgattccccagtacggctacctgactctgaacaatggcagccaatcggtgggtcgttcctctttctactgcctggaatatttcccttctcaaatgctgagaacgggcaacaacttcaccttcagctacaccttcgaggacgttcccttccacagcagctacgcacacagccagagcctggaccggctgatgaatcctcttatcgaccagtacctgtattacctggccagaacacagagcaacgcaggaggcacagctggcaatcgggaactgcagttttatcagggcgggcctaccaccatggccgaacaagccaaaaactggctgcctggaccttgcttccggcaacgaagagtctccaagacgctggatcaaaacaacaacagcaactttgcttggactggtgccaccaaataccatctaaatggaagaaattcattggttaatcccggtgtcgccatggcaacccacaaggacgacgaggaacgcttcttcccttcgagcggagtcctgatttttggaaaaactggagcagctaataagactacactggaaaatgtgttaatgacaaatgaagaggaaattcgtcctaccaacccggtagccaccgaggaatacgggactgttagcagcaacctgcaggcggctaacactgcagcccagacacaagttgtcaacaaccagggagccttacctggtatggtctggcagaaccgggacgtgtacctgcagggtcccatctgggccaagattcctcacacggacggcaactttcacccgtctccgctgatgggcggctttggactgaagcatccgcctcctcagatcctgatcaaaaacactcctgttcctgctaatcccccggaggtgtttacgcctgccaagtttgcttctttcatcacacagtacagcaccggccaggtcagcgtggagatcgagtgggagctgcagaaggagaacagcaagcgctggaacccagagattcagtatacctccaattttgacaaacagactggtgtggactttgccgttgacagccagggtgtttattctgagcctcgccccattggtactcgttacctcacccgtaatctgtaa

SEQ ID NO: 5056 - protein, 737 aa, Adeno-associated virus
MAADGYLPDWLEDNLSEGIREWWDLKPGAPKPKANQQKQDDGRGLVLPGYKYLGPFNGLDKGEPVNAADAAALEHDKAYDQQLKAGDNPYLRYNHADAEFQERLQEDTSFGGNLGRAVFQAKKRVLEPLGLVEEGAKTAPGKKRPVEPSPQRSPDSSTGIGKKGQQPARKRLNFGQTGDSESVPDPQPIGEPPAAPSSVGSGTMAAGGGAPMADNNEGADGVGSSSGNWHCDSTRLGDRVITTSTRTWALPTYNNHLYKQISSQSAGSTNDNVYFGYSTPWGYFDFNRFHCHFSPRDWQRLINNNWGFRPKKLNFKLFNIQVKEVTTNDGVTTIANNLTSTVQVFSDSEYQLPYVLGSAHQGCLPPFPADVFMIPQYGYLTLNNGSQSVGRSSFYCLEYFPSQMLRTGNNFTFSYTFEDVPFHSSYAHSQSLDRLMNPLIDQYLYYLARTQSNAGGTAGNRELQFYQGGPTTMAEQAKNWLPGPCFRQRRVSKTLDQNNNSNFAWTGATKYHLNGRNSLVNPGVAMATHKDDEERFFPSSGVLIFGKTGAANKTTLENVLMTNEEEIRPTNPVATEEYGTVSSNLQAANTAAQTQVVNNQGALPGMVWQNRDVYLQGPIWAKIPHTDGNFHPSPLMGGFGLKHPPPQILIKNTPVPANPPEVFTPAKFASFITQYSTGQVSVEIEWELQKENSKRWNPEIQYTSNFDKQTGVDFAVDSQGVYSEPRPIGTRYLTRNL

SEQ ID NO: 5057 - DNA, 2208 bp, Adeno-associated virus
atggctgccgatggttatcttccagattggctcgaggacactctctctgaaggaataagacagtggtggaagctcaaacctggcccaccaccaccaaagcccgcagagcggcataaggacgacagcaggggtcttgtgcttcctgggtacaagtacctcggacccttcaacggactcgacaagggggagccggtcaacgaggcagacgccgcggccctcgagcacgacaaggcctacgaccggcagctcgacagcggagacaacccgtacctcaagtacaaccacgccgacgcggagtttcaggagcgtcttaaagaagatacgtcttttgggggcaacctcggacgagcagtcttccaggcgaaaaagagggttcttgaacctctgggcctggttgaggaacctgttaagacggctccgggaaaaaagaggccggtagagcactctcctgcggagccagactcctcctcgggaaccggaaaagcgggccagcagcctgcaagaaaaagattgaattttggtcagactggagacgcagactccgtacctgacccccagcctctcggacagccaccagcagccccctctggtttgggatctactacaatggctacaggcagtggcgcaccaatggcagacaataacgagggtgccgatggagtgggtaattcttcaggaaattggcattgcgattcccaatggctgggcgacagagtcatcaccaccagcacccgaacctgggcccagcccacctacaacaaccacctctacaagcaaatctcaagccaatcaggagcctcaaacgacaaccactactttggctacagcaccccttgggggtattttgacttcaacagattccactgccacttttcaccacgtgactggcaaagactcatcaacaacaactggggattccgacccaagagactcaacttcaagctctttaacattcaagtcaaagaggtcacgcagaatgacggtacgacgacgattgccaataaccttaccagcacggttcaggtgtttactgactcggagtaccagctcccgtacgtcctcgggtcggcgcatcaaggatgcctcccgccgtttccagcggacgtcttcatggtcccacagtatggatacctcaccctgaacaacgggagtcaggcggtaggacgctcttccttttactgcctggagtactttccttctcagatgcttcgtactggaaacaactttcagttcagctacacctttgaagacgttcctttccacagcagctacgctcacagccagagtctggatcggctgatgaatcctctgatcgaccagtacctgtattatctgaacaaaacacaatcaaatagtggagctcttcagcagtctcggctactgtttagtcaagctggacccaccagcatgtctcttcaagctaaaaactggctacctggaccttgctacagacagcagcgtctgtcaaagcaggcaaacgacaacaacaacagcaactttccctggactgcggctacaaagtaccacctaaatggccgggactcgttggttaatccaggaccagctatggccagtcacaaagacgatgaagaaaagtttttccccatgcatggaaccctgatatttggtaaacaaggaacaaatgctaacgacgcggatttggacaatgtcatgattacagatgaagaagaaatccgcaccaccaatcccgtggctacggagcagtacggatatgtgtcaaataatttgcaaaactcaaatactggtccaactactggaactgtcaatcaccgaggagcgttacctggcatggtgtggcaggatcgagacgtgtacctgcagggacccatttgggccaagattcctcacaccgatggacactttcatccttctccactgatgggaggttttgggctcaaacacccgcctcctcagatcatgatcaaaaacactcccgttccagccaatcctcccacaaacttcagttctgccaagtttgcttctttcatcacacagtattccacggggcaggtcagcgtggagatcgagtgggagctgcagaaagagaacagcaaacgctggaatcccgaaattcagtacacttccaactacaacaaatctgttaatgtggactttactgtggacactaatggcgtgtattcagagcctcgccccattggcaccagatacctgactcgtaatctgtaa

SEQ ID NO: 5058 - protein, 735 aa, Adeno-associated virus
MAADGYLPDWLEDTLSEGIRQWWKLKPGPPPPKPAERHKDDSRGLVLPGYKYLGPFNGLDKGEPVNEADAAALEHDKAYDRQLDSGDNPYLKYNHADAEFQERLKEDTSFGGNLGRAVFQAKKRVLEPLGLVEEPVKTAPGKKRPVEHSPAEPDSSSGTGKAGQQPARKRLNFGQTGDADSVPDPQPLGQPPAAPSGLGSTTMATGSGAPMADNNEGADGVGNSSGNWHCDSQWLGDRVITTSTRTWAQPTYNNHLYKQISSQSGASNDNHYFGYSTPWGYFDFNRFHCHFSPRDWQRLINNNWGFRPKRLNFKLFNIQVKEVTQNDGTTTIANNLTSTVQVFTDSEYQLPYVLGSAHQGCLPPFPADVFMVPQYGYLTLNNGSQAVGRSSFYCLEYFPSQMLRTGNNFQFSYTFEDVPFHSSYAHSQSLDRLMNPLIDQYLYYLNKTQSNSGALQQSRLLFSQAGPTSMSLQAKNWLPGPCYRQQRLSKQANDNNNSNFPWTAATKYHLNGRDSLVNPGPAMASHKDDEEKFFPMHGTLIFGKQGTNANDADLDNVMITDEEEIRTTNPVATEQYGYVSNNLQNSNTGPTTGTVNHRGALPGMVWQDRDVYLQGPIWAKIPHTDGHFHPSPLMGGFGLKHPPPQIMIKNTPVPANPPTNFSSAKFASFITQYSTGQVSVEIEWELQKENSKRWNPEIQYTSNYNKSVNVDFTVDTNGVYSEPRPIGTRYLTRNL

SEQ ID NO: 5059 - DNA, 2217 bp, Adeno-associated virus
atggctgccgatggttatcttccagattggctcgaggacaacctctctgagggcattcgcgagtggtgggcgctgaaacctggagccccgaagcccaaagccaaccagcaaaagcaggacgacggccggggtctggtgcttcctggctacaagtacctcggacccttcaacggactcgacaagggggagcccgtcaacgcggcggacgcagcggccctcgagcacgacaaggcctacgaccagcagctgcaggcgggtgacaatccgtacctgcggtataatcacgccgacgccgagtttcaggagcgtctgcaagaagatacgtcttttgggggcaacctcgggcgagcagtcttccaggccaagaagcgggttctcgaacctctcggtctggttgaggaaggcgctaagacggctcctggaaagaagagaccggtagagccgtcaccacagcgttcccccgactcctccacgggcatcggcaagaaaggccagcagcccgccagaaagagactcaatttcggtcagactggcgactcagagtcagtccccgaccctcaacctatcggagaacctccagcagcgccctctagtgtgggatctggtacaatggctgcaggcggtggcgcgccaatggcagacaataacgaaggtgccgacggagtgggtagttcctcgggaaattggcattgcgattccacatggctgggcgacagagtcatcaccaccagcacccgaacctgggccctgcccacctacaacaaccacctctacaagcaaacctccaacgggacctcgggaggcagcaccaacgacaacacctactttggctacagcaccccctgggggtattttgactttaacagattccactgccacttctcaccacgtgactggcagcgactcatcaacaacaactggggattccggcccaagagactcagcttcaagctcttcaacatccaggtcaaagaggtcacgcagaatgaaggcaccaagaccatcgccaataacctcaccagcaccatccaggtgtttacggactcggaataccagctgccgtacgtcctcggctctgcccaccagggctgcctgcctccgttcccggcggacgtcttcatgattcctcagtacggctacctgactctcaacaacggtagtcaggccgtgggacgttcctccttctactgcctggagtacttcccctctcagatgctgagaacgggcaacaacttttccttcagctacactttcgaggacgtgcctttccacagcagctacgcgcacagccagagtttggacaggctgatgaatcctctcatcgaccagtacctgtactacctgtcaagaacccagtctacgggaggcacagcgggaacccagcagttgctgttttctcaggccgggcctagcaacatgtcggctcaggccagaaactggctgcctggaccctgctacagacagcagcgcgtctccacgacactgtcgcaaaacaacaacagcaactttgcctggactggtgccaccaagtatcatctgaacggcagagactctctggtgaatccgggcgtcgccatggcaaccaacaaggacgacgaggaccgcttcttcccatccagcggcatcctcatgtttggcaagcagggagctggaaaagacaacgtggactatagcaacgtgatgctaaccagcgaggaagaaatcaagaccaccaaccccgtggccacagaacagtatggcgtggtggctgataacctacagcagcaaaacaccgctcctattgtgggggccgtcaacagccagggagccttacctggcatggtctggcagaaccgggacgtgtacctgcagggtcctatttgggccaagattcctcacacagatggcaactttcacccgtctcctttaatgggcggctttggacttaaacatccgcctcctcagatcctcatcaaaaacactcctgttcctgcggatcctccaacagcgttcaaccaggccaagctgaattctttcatcacgcagtacagcaccggacaagtcagcgcggagatcgagtgggagctgcagaaggagaacagcaagcgctggaacccagagattcagtatacttccaactactacaaatctacaaatgtggactttgctgttaatactgagggtgtttactctgagcctcgccccattggcactcgttacctcacccgtaatctgtaa

SEQ ID NO: 5060 - protein, 738 aa, Adeno-associated virus
MAADGYLPDWLEDNLSEGIREWWALKPGAPKPKANQQKQDDGRGLVLPGYKYLGPFNGLDKGEPVNAADAAALEHDKAYDQQLQAGDNPYLRYNHADAEFQERLQEDTSFGGNLGRAVFQAKKRVLEPLGLVEEGAKTAPGKKRPVEPSPQRSPDSSTGIGKKGQQPARKRLNFGQTGDSESVPDPQPIGEPPAAPSSVGSGTMAAGGGAPMADNNEGADGVGSSSGNWHCDSTWLGDRVITTSTRTWALPTYNNHLYKQTSNGTSGGSTNDNTYFGYSTPWGYFDFNRFHCHFSPRDWQRLINNNWGFRPKRLSFKLFNIQVKEVTQNEGTKTIANNLTSTIQVFTDSEYQLPYVLGSAHQGCLPPFPADVFMIPQYGYLTLNNGSQAVGRSSFYCLEYFPSQMLRTGNNFSFSYTFEDVPFHSSYAHSQSLDRLMNPLIDQYLYYLSRTQSTGGTAGTQQLLFSQAGPSNMSAQARNWLPGPCYRQQRVSTTLSQNNNSNFAWTGATKYHLNGRDSLVNPGVAMATNKDDEDRFFPSSGILMFGKQGAGKDNVDYSNVMLTSEEEIKTTNPVATEQYGVVADNLQQQNTAPIVGAVNSQGALPGMVWQNRDVYLQGPIWAKIPHTDGNFHPSPLMGGFGLKHPPPQILIKNTPVPADPPTAFNQAKLNSFITQYSTGQVSAEIEWELQKENSKRWNPEIQYTSNYYKSTNVDFAVNTEGVYSEPRPIGTRYLTRNL

SEQ ID NO: 5061 - DNA, 2217 bp, Adeno-associated virus
atggctgctgacggttatcttccagattggctcgaggacaacctctctgagggcattcgcgagtggtgggacctgaaacctggagcccccaagcccaaggccaaccagcagaagcaggacgacggccggggtctggtgcttcctggctacaagtacctcggacccttcaacggactcgacaagggggagcccgtcaacgcggcggacgcagcggccctcgagcacgacaaggcctacgaccagcagctcaaagcgggtgacaatccgtacctgcggtataatcacgccgacgccgagtttcaggagcgtctgcaagaagatacgtcttttgggggcaacctcgggcgagcagtcttccaggccaagaagcgggttctcgaacctctcggtctggttgaggaagctgctaagacggctcctggaaagaagagaccggtagaaccgtcacctcagcgttcccccgactcctccacgggcatcggcaagaaaggccagcagcccgctagaaagagactgaactttgggcagactggcgactcagagtcagtccccgaccctcaaccaatcggagaacctccagcagcgccctctagtgtgggatctggtacaatggccgcaggcggtggcgcaccaatggcagacaataacgaaggtgccgacggagtgggtagttcctcgggaaattggcattgcgattccacatggctgggcgacagagtcatcaccaccagcacccgaacctgggccctgcccacctacaacaaccacctctacaagcaaatctccaacgggacctcgggaggcagcaccaacgacaacacctactttggctacagcaccccctgggggtattttgactttaacagattccactgccacttctcaccacgtgactggcagcgactcatcaacaacaactggggattccggcccaagagactcagcttcaagctcttcaacatccaggtcaaagaggtcacgcagaatgaaggcaccaagaccatcgccaataacctcaccagcaccatccaggtgtttacggactcggaataccagctgccgtacgtcctcggctctgcccaccagggctgcctgcctccgttcccggcggacgtcttcatgattcctcagtacggctacctgactctcaacaacggtagtcaggccgtgggacgttcctccttctactgcctggagtacttcccctctcagatgctgagaacgggcaacaacttttccttcagctacactttcgaggacgtgcctttccacagcagctacgcgcacagccagagtttggacaggctgatgaatcctctcatcgaccagtacctgtactacctgtcaagaacccagtctacgggaggcacagcgggaacccagcagctgctgttttctcaggccgggcctagcaacatgtcggctcaggccagaaactggctgcctggaccctgctacagacagcagcgcgtctccacgacactgtcgcaaaacaacaacagcaactttgcctggactggtgccaccaagtatcatctgaacggcagagactctctggtgaatccgggcgtcgccatggcaaccaacaaggacgacgaggaccgcttcttcccatccagcggcatcctcatgtttggcaagcagggagctggaaaagacaacgtggactatagcaacgtgatgctaaccagcgaggaagaaatcaagaccaccaaccccgtggccacagaacagtatggcgtggtggctgataacctacagcagcaaaacaccgctcctattgtgggggccgtcaacagccagggagccttacctggcatggtctggcagaaccgggacgtgtacctgcagggtcctatttgggccaagattcctcacacagatggcaactttcacccgtctcctttaatgggcggctttggacttaaacatccgcctcctcagatcctcatcaaaagcactcctgttcctgcggatcctccaacagcgttcaaccaggccaagctgaattctttcatcacgcagtacagcaccggacaagtcagcgtggagatcgagtgggagctgcagaaggagaacagcaagtgctggaacccagagattcagtatacttccaactactacaaatctacaaatgtggactttgctgttaatactgagggtgtttactctgagcctcgccccattggcactcgttacctcacccgtaatctgtaa

SEQ ID NO: 5062 - protein, 738 aa, Adeno-associated virus
MAADGYLPDWLEDNLSEGIREWWDLKPGAPKPKANQQKQDDGRGLVLPGYKYLGPFNGLDKGEPVNAADAAALEHDKAYDQQLKAGDNPYLRYNHADAEFQERLQEDTSFGGNLGRAVFQAKKRVLEPLGLVEEAAKTAPGKKRPVEPSPQRSPDSSTGIGKKGQQPARKRLNFGQTGDSESVPDPQPIGEPPAAPSSVGSGTMAAGGGAPMADNNEGADGVGSSSGNWHCDSTWLGDRVITTSTRTWALPTYNNHLYKQISNGTSGGSTNDNTYFGYSTPWGYFDFNRFHCHFSPRDWQRLINNNWGFRPKRLSFKLFNIQVKEVTQNEGTKTIANNLTSTIQVFTDSEYQLPYVLGSAHQGCLPPFPADVFMIPQYGYLTLNNGSQAVGRSSFYCLEYFPSQMLRTGNNFSFSYTFEDVPFHSSYAHSQSLDRLMNPLIDQYLYYLSRTQSTGGTAGTQQLLFSQAGPSNMSAQARNWLPGPCYRQQRVSTTLSQNNNSNFAWTGATKYHLNGRDSLVNPGVAMATNKDDEDRFFPSSGILMFGKQGAGKDNVDYSNVMLTSEEEIKTTNPVATEQYGVVADNLQQQNTAPIVGAVNSQGALPGMVWQNRDVYLQGPIWAKIPHTDGNFHPSPLMGGFGLKHPPPQILIKSTPVPADPPTAFNQAKLNSFITQYSTGQVSVEIEWELQKENSKCWNPEIQYTSNYYKSTNVDFAVNTEGVYSEPRPIGTRYLTRNL

SEQ ID NO: 5063 - protein, 738 aa, Adeno-associated virus
MAADGYLPDWLEDNLSEGIREWWDLKPGAPKPKANQQKQDDGRGLVLPGYKYLGPFNGLDKGEPVNAADAAALEHDKAYDQQLKAGDNPYLRYNHADAEFQERLQEDTSFGGNLGRAVFQAKKRVLEPLGLVEEAAKTAPGKKRPVEPSPQRSPDSSTGIGKKGQQPARKRLNFGQTGDSESVPDPQPIGEPPAAPSSVGSGTMAAGGGAPMADNNEGADGVGSSSGNWHCDSTWLGDRVITTSTRTWALPTYNNHLYKQISNGTSGGSTNDNTYFGYSTPWGYFDFNRFHCHFSPRDWQRLINNNWGFRPKRLSFKLFNIQVKEVTQNEGTKTIANNLTSTIQVFTDSEYQLPYVLGSAHQGCLPPFPADVFMIPQYGYLTLNNGSQAVGRSSFYCLEYFPSQMLRTGNNFSFSYTFEDVPFHSSYAHSQSLDRLMNPLIDQYLYYLSRTQSTGGTAGTQQLLFSQAGPSNMSAQARNWLPGPCYRQQRVSTTLSQNNNSNFAWTGATKYHLNGRDSLVNPGVAMATNKDDEDRFFPSSGILMFGKQGAGKDNVDYSNVMLTSEEEIKTTNPVATEQYGVVADNLQQQNTAPIVGAVNSQGALPGMVWQNRDVYLQGPIWAKIPHTDGNFHPSPLMGGFGLKHPPPQILIKSTPVPADPPTAFNQAKLNSFITQYSTGQVSVEIEWELQKENSKRWNPEIQYTSNYYKSTNVDFAVNTEGVYSEPRPIGTRYLTRNL

SEQ ID NO: 5064 - DNA, 2217 bp, Adeno-associated virus
atggctgctgacggttatcttccagattggctcgaggacaacctctctgagggcattcgcgagtggtgggacctgaaacctggagcccccaagcccaaggccaaccagcagaagcaggacgacggccggggtctggtgcttcctggctacaagtacctcggacccttcaacggactcgacaagggggagcccgtcaacgcggcggacgcagcggccctcgagcacgacaaggcctacgaccagcagctcaaagcgggtgacaatccgtacctgcggtataaccacgccgacgccgagtttcaggagcgtctgcaagaagatacgtcttttgggggcaacctcgggcgagcagtcttccaggccaagaagcgggttctcgaacctctcggtctggttgaggaagctgctaagacggctcctggaaagaagagaccggtagaaccgtcacctcagcgttcccccgactcctccacgggcatcggcaagaaaggccagcagcccgctagaaagagactgaactttgggcagactggcgactcagagtcagtccccgaccctcaaccaatcggagaaccaccagcaggcccctctggtctgggatctggtacaatggctgcaggcggtggcgcaccaatggctgacaataacgagggcgccgacggagtgggtaatgcctcaggaaattggcattgcgattccacatggctgggcgacagagtcatcaccaccagcacccgaacctgggctttgcccacctacaacaaccacctctacaagcaaatctccagtcagtcagcaggtagcaccaacgacaacgtctacttcggctacagcaccccctgggggtattttgacttcaacagattccactgtcacttctcaccacgtgactggcagcggctcatcaacaacaactggggattccggcccaagaagctcaacttcaagctgttcaacatccaggtcaaggaggtcacaacgaatgacggcgtcacgaccatcgccaataaccctaccagcacggttcaggtcttttcggactcggaataccagctgccctacgtcctcggctccgcacaccagggctgcctgcctccgttcccggcggacgtcttcatgattccccagtacggctacctgactctgaacaatggcagccaatcggtgggtcgttcctctttctactgcctggaatatttcccttctcaaatgctgagaacgggcaacaacttcaccttcagctacaccttcgaggacgttcccttccacagcagctacgcacacagccagagcctggaccggctgatgaatcctcttatcgaccagtacctgtattacctggccagaacacagagcaacgcaggaggcacagctggcaatcgggaactgcagttttatcagggcgggcctaccaccatggccgaacaagccaaaaactggctgcctggaccctgctacagacagcagcgcgtctccacgacactgtcgcaaaacaacaacagcaactttgcctggactggtgccaccaagtatcatctgaacggcagagactctctggtgaatccgggcgtcgccatggcaaccaacaaggacgacgaggaccgcttcttcccatccagcggcatcctcatgtttggcaagcagggagctggaaaagacaacgtggactatagcaacgtgatgctaaccagcgaggaagaaatcaagaccaccaaccccgtggccacagaacagtatggcgtggtggctgataacctacagcagcaaaacaccgctcctattgtgggggccgtcaacagccagggagccttacctggcatggtctggcagaaccgggacgtgtacctgcagggtcctatttgggccaagattcctcacacagatggcaactttcacccgtctcctttaatgggcggctttggacttaaacatccgcctcctcagatcctcatcaaaaacactcctgttcctgcggatcctccaacagcgttcaaccaggccaagctgaattctttcatcacgcagtacagcaccggacaagtcagcgtggagatcgagtgggagctgcagaaggagaacagcaagcgctggaacccagagattcagtatacttccaactactacaaatctacaaatgtggactttgctgttaatactgagggtgtttactctgagcctcgccccattggcactcgttacctcacccgtaatctgtaa

SEQ ID NO: 5065 - protein, 738 aa, Adeno-associated virus
MAADGYLPDWLEDNLSEGIREWWDLKPGAPKPKANQQKQDDGRGLVLPGYKYLGPFNGLDKGEPVNAADAAALEHDKAYDQQLKAGDNPYLRYNHADAEFQERLQEDTSFGGNLGRAVFQAKKRVLEPLGLVEEAAKTAPGKKRPVEPSPQRSPDSSTGIGKKGQQPARKRLNFGQTGDSESVPDPQPIGEPPAGPSGLGSGTMAAGGGAPMADNNEGADGVGNASGNWHCDSTWLGDRVITTSTRTWALPTYNNHLYKQISSQSAGSTNDNVYFGYSTPWGYFDFNRFHCHFSPRDWQRLINNNWGFRPKKLNFKLFNIQVKEVTTNDGVTTIANNPTSTVQVFSDSEYQLPYVLGSAHQGCLPPFPADVFMIPQYGYLTLNNGSQSVGRSSFYCLEYFPSQMLRTGNNFTFSYTFEDVPFHSSYAHSQSLDRLMNPLIDQYLYYLARTQSNAGGTAGNRELQFYQGGPTTMAEQAKNWLPGPCYRQQRVSTTLSQNNNSNFAWTGATKYHLNGRDSLVNPGVAMATNKDDEDRFFPSSGILMFGKQGAGKDNVDYSNVMLTSEEEIKTTNPVATEQYGVVADNLQQQNTAPIVGAVNSQGALPGMVWQNRDVYLQGPIWAKIPHTDGNFHPSPLMGGFGLKHPPPQILIKNTPVPADPPTAFNQAKLNSFITQYSTGQVSVEIEWELQKENSKRWNPEIQYTSNYYKSTNVDFAVNTEGVYSEPRPIGTRYLTRNL

SEQ ID NO: 5066 - DNA, 2208 bp, Adeno-associated virus
atggctgccgatggttatcttccagattggctcgaggacaacctctctgagggcattcacgagtggtgggacccgaaacctggagccccgaaacccaaagccaaccagcaaaagcaggacgacggccggggtctggtgcttcctggctacaagtacctcggacccttcaacggactcgacaagggggagcccgtcaacgcggcggacgcagcggccctcgagcacgacaaggcctacgaccagcagctcaaagcgggtgacaatccgtacctgcggtataatcacgccgacgccgagtttcaggagcgtctgcaagaagatacgtcttttgggggcaacctcgggcgagcagtcttccaggccaagaagcgggttctcgaacctctcggtctggttgaggaaggcgctaagacggctcctggaaagaagagaccggtagagccgtcaccacagcgttcccccgactcctccacgggcatcggcaagaaaggccagcagcccgccagaaagagactcaatttcggtcagactggcgactcagagtcagtccccgaccctcaacctatcggagaacctccagcagcgccctctagtgtgggatctggtacaatggctgcaggcggtggcgcaccaatggcagacaataacgaaggtgccgacggagtgggtagttcctcgggaaattggcattgcgattccacatggctgggcgacagagtcatcaccaccagcacccgaacctgggccctgcccacccacaacaaccacctctacaagcaaatctccaacgggacctcgggaggcagcaccaacgacaacgtctacttcggctacagcaccccctgggggtattttgacttcaacagattccactgtcacttctcaccacgtgaccggcagcgactcatcaacaacaactggggattccggcccaagagactcagcttcaagctcttcaacatccaggtcaaagaggtcacgcagaatgaaggcaccaagaccatcgccaataacctcaccagcaccatccaggtgtttacggactcggaataccagctgccgtacgtcctcggctctgcccaccagggctgcctgcctccgttcccggcggacgtcttcatgattcctcagtacggctacctgactctcaacaacggtagtcaggccgtgggacgttcctccttctactgcctggagtacttcccctctcagatgctgagaacgggcaacaacttttccttcagctacactttcgaggacgtgcctttccacagcagctacgcgcacagccagagtttggacaggctgatgaatcctctcatcgaccagtacctgtactacctgtcaagaacccagtctacggaaggcacagcgggaacccagcagttgctgttttctcaggccgggcctagcaacatgtcggctcaggccagaaactggctgcctggaccctgctacagacagcagcgcgtctccacgacactgtcgcaaaacaacaacagcaactttgcctggactggtgccaccaagtatcatctgaacggcagagactctctggtgaatccgggcgtcgccatggcaacccacaaggacgacgaggaacgcttcttcccttcgagcggagtcctgatttttggaaaaactggagcagctaataagactacactggaaaatgtgttaatgacaaatgaagaggaaattcgtcctaccaacccggtagccaccgaggaatacgggactgttagcagcaacctgcaggcggctaacactgcagcccagacacaagttgtcaacaaccagggagccttacctggtatggtctggcagaaccgggacgtgtacctgcagggtcccatctgggccaagattcctcacacggacggcaactttcacccgtctccgctgatgggcggctttggactgaagcatcctcagatcctgatcaaaaacactcctgttcctgctaatcccccggaggtgtttacgcctgccaagtttgcttctttcatcacacagtacagcaccggccaggtcagcgtggagatcgagtgggagctgcagaaggagaacagcaagcgctggaacccagagattcagtatacctccaattttgacaaacagactggtgtggactttgccgttgacagccagggtgtttattctgagcctcgccccattggtactcgttacctcacccgtaatctgtaa

SEQ ID NO: 5067 - protein, 735 aa, Adeno-associated virus
MAADGYLPDWLEDNLSEGIHEWWDPKPGAPKPKANQQKQDDGRGLVLPGYKYLGPFNGLDKGEPVNAADAAALEHDKAYDQQLKAGDNPYLRYNHADAEFQERLQEDTSFGGNLGRAVFQAKKRVLEPLGLVEEGAKTAPGKKRPVEPSPQRSPDSSTGIGKKGQQPARKRLNFGQTGDSESVPDPQPIGEPPAAPSSVGSGTMAAGGGAPMADNNEGADGVGSSSGNWHCDSTWLGDRVITTSTRTWALPTHNNHLYKQISNGTSGGSTNDNVYFGYSTPWGYFDFNRFHCHFSPRDRQRLINNNWGFRPKRLSFKLFNIQVKEVTQNEGTKTIANNLTSTIQVFTDSEYQLPYVLGSAHQGCLPPFPADVFMIPQYGYLTLNNGSQAVGRSSFYCLEYFPSQMLRTGNNFSFSYTFEDVPFHSSYAHSQSLDRLMNPLIDQYLYYLSRTQSTEGTAGTQQLLFSQAGPSNMSAQARNWLPGPCYRQQRVSTTLSQNNNSNFAWTGATKYHLNGRDSLVNPGVAMATHKDDEERFFPSSGVLIFGKTGAANKTTLENVLMTNEEEIRPTNPVATEEYGTVSSNLQAANTAAQTQVVNNQGALPGMVWQNRDVYLQGPIWAKIPHTDGNFHPSPLMGGFGLKHPQILIKNTPVPANPPEVFTPAKFASFITQYSTGQVSVEIEWELQKENSKRWNPEIQYTSNFDKQTGVDFAVDSQGVYSEPRPIGTRYLTRNL

SEQ ID NO: 5068 - protein, 738 aa, Adeno-associated virus
MAADGYLPDWLEDNLSEGIREWWDLKPGAPKPKANQQKQDDGRGLVLPGYKYLGPFNGLDKGEPVNAADAAALEHDKAYDQQLKAGDNPYLRYNHADAEFQERLQEDTSFGGNLGRAVFQAKKRVLEPLGLVEEGAKTAPGKKRPVEPSPQRSPDSSTGIGKKGQQPARKRLNFGQTGDSESVPDPQPIGEPPAAPSSVGSGTMAAGGGAPMADNNEGADGVGSSSGNWHCDSTWLGDRVITTSTRTWALPTYNNHLYKQISNGTSGGSTNDNTYFGYSTPWGYFDFNRFHCHFSPRDWQRPINNNWGFRPKRLSFKLFNIQVKEVTQNEGTKTIANNLTSTIQVFTDSEYQLPYVLGSAHQGCLPPFPADVFMIPQYGYLTLNNGSQAVGRSSFYCLEYFPSQMLRTGNNFSFSYPFEDVPFHSSYAHSQSLDRLMNPLIDQYLYYLSRTQSTGGTAGTQQLLFSQAGPSNMSAQARNWLPGPCYRQQRVSTTLSQNNNSNFAWTGATKYHLNGRDSLVNPGVAMATNKDDEDRFFPSSGILMFGKQGAGKDNVDYSNVMLTSEEEIKTTNPVATEQYGVVADNLQQQDTAPIVGAVNSQGALPGMVWQNRDVYLQGPIWAKIPHTDGNFHPSPLMGGFGLKHPPPQVLIKNTPVPADPPTAFNQAKLNSFITQYSTGQVSVEIEWELQKENSKRWNPEIQYTSNYYKSTNVDFAVNTEGVYSEPRPIGTRYLTRNL

SEQ ID NO: 5069 - DNA, 2217 bp, Adeno-associated virus
atggctgccgatggttatcttccagattggctcgaggacaacctctctgagggcattcgcgagtggtgggacctgaaacctggagccccgaaacccaaggccaaccagcaaaagcaggacgacggccggggtctggtgcttcctggctacaagtacctcggacccttcaacggactcgacaagggggagcccgtcaacgcggcggacgcagcggccctcgagcacgacaaggcctacgaccagcagctcaaagcgggtgacaatccgtacctgcggtataatcacgccgacgccgagtttcaggagcgtctgcaagaagatacgtcttttgggggcaacctcgggcgagcagtcttccaggccaagaagcgggttctcgaacctctcggtctggttgaggaaggcgctaagacggctcctggaaagaagagaccggtagagccgtcaccacagcgttcccccgactcctccacgggcatcggcaagaaaggccagcagcccgccagaaagagactcaatttcggtcagactggcgactcagagtcagtccccgaccctcaacctatcggagaacctccagcagcgccctctagtgtgggatctggtacaatggctgcaggcggtggcgcaccaatggcagacaataacgaaggtgccgacggagtgggtagttcctcgggaaattggcattgcgattccacatggctgggcgacagagtcatcaccaccagcacccgaacctgggccctgcccacctacaacaaccacctctacaagcaaatctccaacgggacctcgggaggcagcaccaacgacaacacctactttggctacagcaccccctgggggtattttgactttaacagattccactgccacttctcaccacgtgactggcagcgacccatcaacaacaactggggattccggcccaagagactcagcttcaagctcttcaacatccaggtcaaagaggtcacgcagaatgaaggcaccaagaccatcgccaataacctcaccagcaccatccaggtgtttacggactcggaataccagctgccgtacgtcctcggctctgcccaccagggctgcctgcctccgttcccggcggacgtcttcatgattcctcagtacggctacctgactctcaacaacggtagtcaggccgtgggacgttcctccttctactgcctggagtacttcccctctcagatgctgagaacgggcaacaacttttccttcagctaccctttcgaggacgtgcctttccacagcagctacgcgcacagccagagtttggacaggctgatgaatcctctcatcgaccagtacctgtactacctgtcaagaacccagtctacgggaggcacagcgggaacccagcagttgctgttttctcaggccgggcctagcaacatgtcggctcaggccagaaactggctgcctggaccctgctacagacagcagcgcgtctccacgacactgtcgcaaaacaacaacagcaactttgcctggactggtgccaccaagtatcatctgaacggcagagactctctggtgaatccgggcgtcgccatggcaaccaacaaggacgacgaggaccgcttcttcccatccagcggcatcctcatgtttggcaagcagggagctggaaaagacaacgtggactatagcaacgtgatgctaaccagcgaggaagaaatcaagaccaccaaccccgtggccacagaacagtatggcgtggtggctgataacctacagcagcaagacaccgctcctattgtgggggccgtcaacagccagggagccttacctggcatggtctggcagaaccgggacgtgtacctgcagggtcctatttgggccaagattcctcacacagatggcaactttcacccgtctcctttaatgggcggctttggacttaaacatccgcctcctcaggtcctcatcaaaaacactcctgttcctgcggatcctccaacagcgttcaaccaggccaagctgaattctttcatcacgcagtacagcaccggacaagtcagcgtggagatcgagtgggagctgcagaaggagaacagcaagcgctggaacccagagattcagtatacttccaactactacaaatctacaaatgtggactttgctgttaatactgagggtgtttactctgagcctcgccccattggcactcgttacctcacccgtaatctgtaa

SEQ ID NO: 5070 - DNA, 2214 bp, Adeno-associated virus
atggctgctgacggttatcttccagattggctcgaggacaacctctctgagggcattcgcgagtggtgggacctgaaacctggagcccccaagcccaaggccaaccagcagaagcaggacgacggccggggtctggtgcttcctggctacaagtacctcggacccttcaacggactcgacaagggggagcccgtcaacgcggcggacgcagcggccctcgagcacgacaaggcctacgaccagcagctcaaagcgggtgacaatccgtacctgcggtataaccacgccgacgccgagttccaggagcgtctgcaagaagatacgtcttttgggggcaacctcgggcgagcagtcttccaggccaagaagcgggttctcgaacctctcggtctggctgaggaagctgctaagacggctcctggaaagaagagaccggtagaaccgtcacctcagcgttcccccgactcctccacgggcatcggcaagaaaggccagcagcccgctagaaagagactgaactttgggcagactggcgactcagagtcagtccccgaccctcaaccaatcggagagccaccagcaggcccctctggtctgggatctggtacaatggctgcaggcggtggcgcaccaatggctgacaataacaagggcgccgacggagtgggtaatgcctcaggaaattggcattgcgattccacatggctgggcgacagagtcatcaccaccagcacccgaacctgggctttgcccacctacaacaaccacctctacaagcaaatctccagtcagtcagcaggtagcaccaacgacaacgtctacttcggctacagcaccccctgggggtattttgacttcaacagattccactgtcacttctcaccacgtgactggcagcggctcatcaacaacaactggggattccggcccaagaagctcaacttcaagctgttcaacatccaggtcaaggaggtcacaacgggtgacggcgtcacgaccatcgccaataaccttaccagcacggttcaggtcttttcggactcggaataccagctgccctacgtcctcggctccgcacaccagggctgcctgcctccgttcccggcggacgtcttcatgattccccagtacggctacctgactctgaacaatgacagccaatcggtgggtcgttcctctttctactgcctggaatatttcccttctcaaatgctgagaacgggcaacaacttcaccttcagctacaccttcgaggacgttcccttccacagcagctacgcacacagccagagcctggaccggctgatgaatcctcttatcgaccagtacctgtattacctggccagaacacagagcaacgcaggaggcacagctggcaatcgggaactgcagttttatcagggcgggcctaccaccatggccgaacaagccaaaaactggctgcctggaccttgcttccggcaacaaagagtctccaagacgctggatcaaaacaacaacagcaactttgcttggactggtgccaccaaataccatctaaatggaagaaattcattggttaatcccggtgtcgccatggcaacccacaaggacgacgaggaacgcttcttcccttcgagcggagtcctgatttttggaaaaactggagcagctaataagactacactggaaaatgtgttaatgacaaatgaagaggaaattcgtcctaccaacccggtagccaccgaggaatacgggactgttagcagcaacctgcaggcggctaacactgcagcccagacacaagttgtcaacaaccagggagccttacctggtatggtctggcagaaccgggacgtgtacctgcagggtcccatctgggccaagattcctcacacggacggcaactttcacccgtctccgctgatgggcggctttggactgaagcatccgcctcctcagatcctgatcaaaaacactcctgttcctgctaatcccccggaggtgtttacgcctgccaagtttgcttctttcatcacacagtacagcaccggccaggtcagcgtggagatcgagtgggagctgcagaaggagaacagcaagcgctggaacccagagattcagtatacctccaattttgacaaacagactggtgtggactttgccgttgacagccagggtgtttattctgagcctcgccccattggtactcgttacctcacccgtaatctgtaa

SEQ ID NO: 5071 - protein, 737 aa, Adeno-associated virus
MAADGYLPDWLEDNLSEGIREWWDLKPGAPKPKANQQKQDDGRGLVLPGYKYLGPFNGLDKGEPVNAADAAALEHDKAYDQQLKAGDNPYLRYNHADAEFQERLQEDTSFGGNLGRAVFQAKKRVLEPLGLAEEAAKTAPGKKRPVEPSPQRSPDSSTGIGKKGQQPARKRLNFGQTGDSESVPDPQPIGEPPAGPSGLGSGTMAAGGGAPMADNNKGADGVGNASGNWHCDSTWLGDRVITTSTRTWALPTYNNHLYKQISSQSAGSTNDNVYFGYSTPWGYFDFNRFHCHFSPRDWQRLINNNWGFRPKKLNFKLFNIQVKEVTTGDGVTTIANNLTSTVQVFSDSEYQLPYVLGSAHQGCLPPFPADVFMIPQYGYLTLNNDSQSVGRSSFYCLEYFPSQMLRTGNNFTFSYTFEDVPFHSSYAHSQSLDRLMNPLIDQYLYYLARTQSNAGGTAGNRELQFYQGGPTTMAEQAKNWLPGPCFRQQRVSKTLDQNNNSNFAWTGATKYHLNGRNSLVNPGVAMATHKDDEERFFPSSGVLIFGKTGAANKTTLENVLMTNEEEIRPTNPVATEEYGTVSSNLQAANTAAQTQVVNNQGALPGMVWQNRDVYLQGPIWAKIPHTDGNFHPSPLMGGFGLKHPPPQILIKNTPVPANPPEVFTPAKFASFITQYSTGQVSVEIEWELQKENSKRWNPEIQYTSNFDKQTGVDFAVDSQGVYSEPRPIGTRYLTRNL

SEQ ID NO: 5072 - DNA, 2217 bp, Adeno-associated virus
atggctgccgatggttatcttccagattggctcgaggacaacctctctgagggcattcgcgagtggtgggacctgaaacctggagccccgaaacccaaagccaaccagcaaaagcaggacgacggccggggtctggtgcttcctggctacaagtacctcggacccttcaacggactcgacaagggggagcccgtcaacgcggcggacgcagcggccctcgagcacgacaaggcctacgaccagcagctcaaagcgggtgacaatccgtacctgcggtataatcacgccgacgccgagtttcaggagcgtctgcaagaagatacgtcttttgggggcaacctcgggcgagcagtcttccaggccaagaagcgggttctcgaacctctcggtctggttgaggaaggcgctaagacggctcctggaaagaagagaccggtagagccgtcaccacagcgttcccccgactcctccacgggcatcggcaagaaaggccagcagcccgccagaaagagactcaatttcggtcagactggcgactcagagtcagtccccgaccctcaacctatcggagaacctccagcagcgccctctagtgtgggatctggtacaatggctgcaggcggtggcgcaccaatggcagacaataacgaaggtgccgacggagtgggtagttcctcgggaaattggcattgcgattccacatggctgggcgacagagtcatcaccaccagcacccgaacctgggccctgcccacctacaacaaccacctctacaagcaaatctccaacgggacctcgggaggcagcaccaacgacaacacctactttggctacagcaccccctgggggtattttgactttaacagattccactgccacttctcaccacgtgactggcagcgactcatcaacaacaactggggattccggcccaagagactcagcttcaagctcttcaacatccaggtcaaagaggtcacgcagaatgaaggcaccaagaccatcgccaataacctcaccagcaccatccaggtgtttacggactcggaataccagctgccgtacgtcctcggctctgcccaccagggctgcctgcctccgttcccggcggacgtcttcatgattcctcagtacggctacctgactctcaacaacggtagtcaggccgtgggacgttcctccttctactgcctggagtacttcccctctcagatgctgagaacgggcaacaacttttccttcagctacactttcgaggacgtgcctttccacagcagctacgcgcacagccagagtttggacaggctgatgaatcctctcatcgaccagtacctgtactacctgtcaagaacccagtctacgggaggcacagcgggaacccagcagttgctgttttctcaggccgggcctagcaacatgtcggctcaggccagaaactggctgcctggaccctgctacagacagcagcgcgtctccacgacactgtcgcaaaacaacaacagcaactttgcctggactggtgccaccaagtatcatctgaacggcagagactctctggtgaatccgggcgtcgccatggcaaccaacaaggacgacgaggaccgcttcttcccatccagcggcatcctcatgtttggcaagcagggagctggaaaagacaacgtggactatagcaacgtgatgctaaccagcgaggaagaaatcaagaccaccaaccccgtggccacagaacagtatggcgtggtggctgataacctacagcagcaaaacaccgctcctattgtgggggccgtcaacagccagggagccttacctggcatggtctggcagaaccgggacgtgtacctgcagggtcctatttgggccaagattcctcacacagatggcaactttcacccgtctcctttaatgggcggctttggacttaaacatccgcctcctcagatcctcatcaaaaacactcctgttcctgcggatcctccaacagcgttcaaccaggccaagctgaattctttcatcacgcagtacagcaccggacaagtcagcgtggagatcgtgtgggagctgcagaaggagaacagcaagcgcaggaacccagagattcagtatacttccaactactacaaatctacaaatgtggactttgctgttaatactgagggtgtttactctgagcctcgccccattggcactcgttacctcacccgtaatctgtaa

SEQ ID NO: 5073 - protein, 738 aa, Adeno-associated virus
MAADGYLPDWLEDNLSEGIREWWDLKPGAPKPKANQQKQDDGRGLVLPGYKYLGPFNGLDKGEPVNAADAAALEHDKAYDQQLKAGDNPYLRYNHADAEFQERLQEDTSFGGNLGRAVFQAKKRVLEPLGLVEEGAKTAPGKKRPVEPSPQRSPDSSTGIGKKGQQPARKRLNFGQTGDSESVPDPQPIGEPPAAPSSVGSGTMAAGGGAPMADNNEGADGVGSSSGNWHCDSTWLGDRVITTSTRTWALPTYNNHLYKQISNGTSGGSTNDNTYFGYSTPWGYFDFNRFHCHFSPRDWQRLINNNWGFRPKRLSFKLFNIQVKEVTQNEGTKTIANNLTSTIQVFTDSEYQLPYVLGSAHQGCLPPFPADVFMIPQYGYLTLNNGSQAVGRSSFYCLEYFPSQMLRTGNNFSFSYTFEDVPFHSSYAHSQSLDRLMNPLIDQYLYYLSRTQSTGGTAGTQQLLFSQAGPSNMSAQARNWLPGPCYRQQRVSTTLSQNNNSNFAWTGATKYHLNGRDSLVNPGVAMATNKDDEDRFFPSSGILMFGKQGAGKDNVDYSNVMLTSEEEIKTTNPVATEQYGVVADNLQQQNTAPIVGAVNSQGALPGMVWQNRDVYLQGPIWAKIPHTDGNFHPSPLMGGFGLKHPPPQILIKNTPVPADPPTAFNQAKLNSFITQYSTGQVSVEIVWELQKENSKRRNPEIQYTSNYYKSTNVDFAVNTEGVYSEPRPIGTRYLTRNL

SEQ ID NO: 5074 - protein, 738 aa, Adeno-associated virus
MAADGYLPDWLEDNLSEGIREWWDLKPGAPKPKANQQKQDDGRGLVLPGYKYLGPFNGLDKGEPVNAADAAALEHDKAYDQQLKAGDNPYLRYNHADAEFQERLQEDTSFGGNLGRAVFQAKKRVLEPLGLVEEGAKTAPGKKRPVEPSPQRSPDSSTGIGKKGQQPARKRLNFGQTGDSESVPDPQPIGEPPAAPSSVGSGTMAAGGGAPMADNNEGADGVGSSSGNWHCDSTWLGDRVITTSTRTWALPTYNNHLYKQISNGTSGGSTNDNTYFGYSTPWGYFDFNRFHCHFSPRDWQRLINNNWGFRPKRLSFKLFNIQVKEVTQNEGTKTIANNLTSTIQVFTDSEYQLPYVLGSAHQGCLPPFPADVFMIPQYGYLTLNNGSQAVGRSSFYCLEYFPSQMLRTGNNFSFSYTFEDVPFHSSYAHSQSLDRLMNPLIDQYLYYLSRTQSTGGTAGTQQLLFSQAGPSNMSAQARNWLPGPCYRQQRVSTTLSQNNNSNFAWTGATKYHLNGRDSLVNPGVAMATNKDDEDRFFPSSGILMFGKQGAGKDNVDYSNVMLTSEEEIKTTNPVATEQYGVVADNLQQQNTAPIVGAVNSQGALPGMVWQNRDVYLQGPIWAKIPHTDGNFHPSPLMGGFGLKHPPPQILIKNTPVPADPPTAFNQAKLNSFITQYSTGQVSVEIEWELQKENSKRWNPEIQYTSNYYKSTNVDFAVNTEGVYSEPRPIGTRYLTRNL

SEQ ID NO: 5075 - protein, 738 aa, Adeno-associated virus
MAADGYLPDWLEDNLSEGIREWWDLKPGAPKPKANQQKQDDGRGLVLPGYKYLGPFNGLDKGEPVNAADAAALEHDKAYDQQLKAGDNPYLRYNHADAEFQERLQEDTSFGGNLGRAVFQAKKRVLEPLGLVEEGAKTAPGKKRPVEPSPQRSPDSSTGIGKKGQQPARKRLNFGQTGDSESVPDPQPIGEPPAAPSSVGSGTMAAGGGAPMADNNEGADGVGSSSGNWHCDSTWLGDRVITTSTRTWALPTYNNHLYKQISNGTSGGSTNDNTYFGYSTPWGYFDFNRFHCHFSPRDWQRLINNNWGFRPKRLSFKLFNIQVKEVTQNEGTKTIANNLTSTIQVFTDSEYQLPYVLGSAHQGCLPPFPADVFMIPQYGYLTLNNGSQAVGRSSFYCLEYFPSQMLRTGNNFSFSYTFEDVPFHSSYAHSQSLDRLMNPLIDQYLYYLSRTQSTGGTAGTQQLLFSQAGPSNMSAQARNWLPGPCYRQQRVSTTLSQNNNSNFAWTGATKYHLNGRDSLVNPGVAMATNKDDEDRFFPSSGILMFGKQGAGKDNVDYSNVMLTSEEEIKTTNPVATEQYGVVADNLQQQNTAPIVGAVNSQGALPGMVWQNRDVYLQGPIWAKIPHTDGNFHPSPLMGGFGLKHPPPQILIKNTPVPADPPTAFNQAKLNSFITQYSTGQVSVEIVWELQKENSKRWNPEIQYTSNYYKSTNVDFAVNTEGVYSEPRPIGTRYLTRNL

SEQ ID NO: 5076 - protein, 738 aa, Adeno-associated virus; identical to SEQ ID NO: 5074

SEQ ID NO: 5077 - DNA, 2214 bp, Adeno-associated virus
atggctgctgacggttatcttccagattggctcgaggacaacctctctgagggcattcgcgagtggtgggacctgaaacctggagcccccaagcccaaggccaaccagcagaagcaggacgacggccggggtctggtgcttcctggctacaagtacctcggacccttcaacggactcgacaagggggagcccgtcaacgcggcggacgcagcggccctcgagcacgacaaggcctacgaccagcagctcaaagcgggtgacaatccgtacctgcggtataaccacgccgacgccgagtttcaggagcgtctgcaagaagatacgtcttttgggggcaacctcgggcgagcagtcttccaggccaagaagcgggttctcgaacctctcggtctggttgaggaagctgctaagacggctcctggaaagaagagaccggtagaaccgtcacctcagcgttcccccgactcctccacgggcatcggcaagaaaggccagcagcccgctagaaagagactgaactttgggcagactggcgactcagagtcagtccccgaccctcaaccaatcggagaaccaccagcaggcccctctggtctgggatctggtacaatggctgcaggcggtggcgctccaatggcagacaataacgaaggcgccgacggagtgggtaatgcctcaggaaattggcattgcgattccacatggctgggcgacagagtcatcaccaccagcacccgaacctgggctttgcccacctacaacaaccacctctacaagcaaatctccagtcagtcagcaggtagcaccaacgacaacgtctacttcggctacagcaccccctgggggtattttgacttcaacagattccactgtcacttctcaccacgtgactggcagcggctcatcaacaacaactggggattccggcccaagaagctcaacttcaagctgttcaacatccaggtcaaggaggtcacaacgaatgacggcgtcacgaccatcgccaataaccttaccagcacggttcaggtcttttcggactcggaataccagctgccctacgtcctcggctccgcacaccagggctgcctgcctccgttcccggcggacgtcttcatgattccccagtacggctacctgactctgaacaatggcagccaatcggtgggtcgttcctctttctactgcctggaatatttcccttctcaaatgctgagaacgggcaacaacttcaccttcagctacaccttcgaggacgttcccttccacagcagctacgcacacagccagagcctggaccggctgatgaatcctcttatcgaccagtacctgtattacctggccagaacacagagcaacgcaggaggcacagctggcaatcgggaactgcagttttatcagggcgggcctaccaccatggccgaacaagccaaaaactggctgcctagaccttgcttccggcaacaaagagtctccaagacgctggatcaaaacaacaacagcaactttgcttggactggtgccaccaaataccatctaaatggaagaaattcattggttaatcccggtgtcgccatggcaacccacaaggacgacgaggaacgcttcttcccttcgagcggagtcctgatttttggaaaaactggagcagctaataagactacactggaaaatgtgttaatgacaaatgaagaggaaattcgtcctaccaacccggtagccaccgaggaatacgggactgttagcagcaacctgcaggcggctaacactgcagcccagacacaagttgtcaacaaccagggagccttacctggtatggtctggcagaaccgggacgtgtacctgcagggtcccatctgggccaagattcctcacacggacggcaactttcacccgtctccgctgatgggcggctttggactgaagcatccgcctcctcagatcctgatcaaaaacactcctgttcctgctaatcccccggaggtgtttacgcctgccaagtttgcttctttcatcacacagtacagcaccggccaggtcagcgtggagatcgagtgggagctgcagaaggagaacagcaagcgctggaacccagagattcagtatacctccaattttgacaaacagactggtgtggactttgccgttgacagccagggtgtttattctgagcctcgccccattggtactcgttacctcacccgtaatctgtaa

SEQ ID NO: 5078 - protein, 737 aa, Adeno-associated virus
MAADGYLPDWLEDNLSEGIREWWDLKPGAPKPKANQQKQDDGRGLVLPGYKYLGPFNGLDKGEPVNAADAAALEHDKAYDQQLKAGDNPYLRYNHADAEFQERLQEDTSFGGNLGRAVFQAKKRVLEPLGLVEEAAKTAPGKKRPVEPSPQRSPDSSTGIGKKGQQPARKRLNFGQTGDSESVPDPQPIGEPPAGPSGLGSGTMAAGGGAPMADNNEGADGVGNASGNWHCDSTWLGDRVITTSTRTWALPTYNNHLYKQISSQSAGSTNDNVYFGYSTPWGYFDFNRFHCHFSPRDWQRLINNNWGFRPKKLNFKLFNIQVKEVTTNDGVTTIANNLTSTVQVFSDSEYQLPYVLGSAHQGCLPPFPADVFMIPQYGYLTLNNGSQSVGRSSFYCLEYFPSQMLRTGNNFTFSYTFEDVPFHSSYAHSQSLDRLMNPLIDQYLYYLARTQSNAGGTAGNRELQFYQGGPTTMAEQAKNWLPRPCFRQQRVSKTLDQNNNSNFAWTGATKYHLNGRNSLVNPGVAMATHKDDEERFFPSSGVLIFGKTGAANKTTLENVLMTNEEEIRPTNPVATEEYGTVSSNLQAANTAAQTQVVNNQGALPGMVWQNRDVYLQGPIWAKIPHTDGNFHPSPLMGGFGLKHPPPQILIKNTPVPANPPEVFTPAKFASFITQYSTGQVSVEIEWELQKENSKRWNPEIQYTSNFDKQTGVDFAVDSQGVYSEPRPIGTRYLTRNL

SEQ ID NO: 5079 - DNA, 2214 bp, Adeno-associated virus
atggctgctgacggttatcttccagattggctcgaggacaacctctctgagggcattcgcgagtggtgggacctgaaacctggagcccccaagcccaaggccaaccagcagaagcaggacgacggccggggtctggtgcttcctggctacaagtacctcggacccttcaacggactcgacaagggggagcccgtcaacgcggcggacgcagcggccctcgagcacgacaaggcctacgaccagcagctcaaagcgggtgacaatccgtacctgcggtataaccatgccgacgccgagtttcaggagcgtctgcaagaagatacgtcttttgggggcaacctcgggcgagcagtcctccaggccaagaagcgggttctcgaacctctcggtctggttgaggaagctgctaagacggctcctggaaagaagagaccggtagaaccgtcacctcagcgttcccccgactcctccacgggcatcggcaagaaaggccagcagcccgctagaaagagactgaactttgggcagactggcgactcagagtcagtccccgaccctcaaccaatcggagaaccaccagcaggcccctctggtctgggatctggtacaatggctgcaggcggtggcgctccaatggcagacaataacgaaggcgccgacggagtgggtaatgcctcaggaaattggcattgcgattccacatggctgggcgacagagtcatcaccaccagcacccgaacctgggctttgcccacctacaacaaccacctctacaagcaaatctccagtcagtcagcaggtagcaccaacgacaacgtctacttcggctacagcaccccctgggggtattttgacttcaacagattccactgtcacttctcaccacgtgactggcagcggctcatcaacaacaactggggattccggcccaagaagctcaacttcaagctgttcaacatccaggtcaaggaggtcacaacgaatgacggcgtcacgaccatcgccaataaccttaccagcacggttcaggtcttttcggactcggaataccagctgccctacgtcctcggctccgcacaccagggctgcctgcctccgttcccggcggacgtcttcatgattccccagtacggctacctgactctgaacaatggcagccaatcggtgggtcgttcctctttctactgcctggaatatttcccttctcaaatgctgagaacgggcaacaacttcaccttcagctacaccttcgaggacgttcccttccacagcagctacgcacacagccagagcctggaccggctgatgaatcctcttatcgaccagtacctgtattacctggccagaacacagagcaacgcaggaggcacagctggcaatcgggaactgcagttttatcagggcgggcctaccaccatggccgaacaagccaaaaactggctgcctggaccttgcttccggcaacaaagagtctccaagacgctggatcaaaacaacaacagcaactttgcttggactggtgccaccaaataccatctaaatggaagaaattcattggttaatcccggtgtcgccatggcaacccacaaggacgacgaggaacgcttcttcccttcgagcggagtcctgatttttggaaaaactggagcagctaataagactacactggaaaatgtgttaatgacaaatgaagaggaaattcgtcctaccaacccggtagccaccgaggaatacgggactgttagcagcaacctgcaggcggctaacactgcagcccagacacaagttgtcaacaaccagggagccttacctggtatggtctggcagaaccgggacgtgtacctgcagggtcccatctgggccaagattcctcacacggacggcaactttcacccgtctccgctgatgggcggctttggactgaagcatccgcctcctcagatcctgatcaaaaacactcctgttcctgctaatcccccggaggtgtttacgcctgccaagtttgcttctttcatcacacagtacagcaccggccaggtcagcgtggagatcgagtgggagctgcagaaggagaacagcaagcgctggaacccagagattcagtatacctccaattttgacaaacagactggtgtggactttgccgttgacagccagggtgtttattctgagcctcgccccattggtactcgttacctcacccgtaatctgtaa

SEQ ID NO: 5080 - protein, 737 aa, Adeno-associated virus; identical to SEQ ID NO: 5040

SEQ ID NO: 5081 - protein, 737 aa, Adeno-associated virus
MAADGYLPDWLEDNLSEGIREWWDLKPGAPKPKANQQKQDDGRGLVLPGYKYLGPFNGLDKGEPVNAADAAALEHDKAYDQQLKAGDNPYLRYNHADAEFQERLQEDTSFGGNLGRAVLQAKKRVLEPLGLVEEAAKTAPGKKRPVEPSPQRSPDSSTGIGKKGQQPARKRLNFGQTGDSESVPDPQPIGEPPAGPSGLGSGTMAAGGGAPMADNNEGADGVGNASGNWHCDSTWLGDRVITTSTRTWALPTYNNHLYKQISSQSAGSTNDNVYFGYSTPWGYFDFNRFHCHFSPRDWQRLINNNWGFRPKKLNFKLFNIQVKEVTTNDGVTTIANNLTSTVQVFSDSEYQLPYVLGSAHQGCLPPFPADVFMIPQYGYLTLNNGSQSVGRSSFYCLEYFPSQMLRTGNNFTFSYTFEDVPFHSSYAHSQSLDRLMNPLIDQYLYYLARTQSNAGGTAGNRELQFYQGGPTTMAEQAKNWLPGPCFRQQRVSKTLDQNNNSNFAWTGATKYHLNGRNSLVNPGVAMATHKDDEERFFPSSGVLIFGKTGAANKTTLENVLMTNEEEIRPTNPVATEEYGTVSSNLQAANTAAQTQVVNNQGALPGMVWQNRDVYLQGPIWAKIPHTDGNFHPSPLMGGFGLKHPPPQILIKNTPVPANPPEVFTPAKFASFITQYSTGQVSVEIEWELQKENSKRWNPEIQYTSNFDKQTGVDFAVDSQGVYSEPRPIGTRYLTRNL

SEQ ID NO: 5082 - DNA, 2217 bp, Adeno-associated virus
atggctgccgatggttatcttccagattggctcgaggacaacctctctgagggcattcgcgagtggtgggacctgaaacctggagccccgaaacccaaagccaaccagcaaaagcaggacgacggccggggtctggtgcttcctggctacaagtacctcggacccttcaacggactcgacaagggggagcccgtcaacgcggcggacgcagcggccctcgagcacgacaaggcctacgaccagcagctcaaagcgggtgacaatccgtacctgcggtataatcacgccgacgccgagtttcaggagcgtctgcaagaagatacgtcttttgggggcaacctcgggcgagcagtcttccaggccaagaagcgggttctcgaacctctcggtctggttgaggaaggcgctaagacggctcctggaaagaagagaccggtagagccgtcaccacagcgttcccccgactcctccacgggcatcggcaagaaaggccagcagcccgccagaaagagactcaatttcggtcagactggcgactcagagtcagtccccgaccctcaacctatcggagaacctccagcagcgccctctagtgtgggatctggtacaatggctgcaggcggtggcgcaccaatggcagacaataacgaaggtgccgacggagtgggtagttcctcgggaaattggcattgcgattccacatggctgggcgacagagtcatcaccaccagcacccgaacctgggccctgcccacctacaacaaccacctctacaagcaaatctccaacgggacctcgggaggcagcaccaacgacaacacctactttggctacagcaccccctgggggtattttgactttaacagattccactgccacttctcaccacgtgactggcagcgactcatcaacaacaactggggattccggcccaagagactcagcttcaagctcttcaacatccaggtcaaagaggtcacgcagaatgaaggcaccaagaccatcgccaataacctcaccagcaccatccaggtgtttacggactcggaataccagctgccgtacgtcctcggctctgcccaccagggctgcctgcctccgttcccggcggacgtcttcatgattcctcagtacggctacctgactctcaacaacggtagtcaggccgtgggacgttcctccttctactgcctggagtacttcccctctcagatgctgagaacgggcaacaacttttccttcagctacactttcgaggacgtgcctttccacagcagctacgcgcacagccagagtttggacaggctgatgaatcctctcatcgaccagtacctgtactacctgtcaagaacccagtctacgggaggcacagcgggaacccagcagttgctgttttctcaggccgggcctagcaacatgtcggctcaggccagaaactggctgcctggaccctgctacagacagcagcgcgtctccacgacactgtcgcaaaacaacaacagcaactttgcctggactggtgccaccaagtatcatctgaacggcagagactctctggtgaatccgggcgtcgccatggcaaccaacaaggacgacgaggaccgcttcttcccacccagcggcatcctcatgtttggcaagcagggagctggaaaagacaacgtggactatagcaacgtgatgctaaccagcgaggaagaaatcaagaccaccaaccccgtggccacagaacagtatggcgtggtggctgataacctacagcagcaaaacaccgctcctattgtgggggccgtcaacagccagggagccttacctggcatggtctggcagaaccgggacgtgtacctgcagggtcctatttgggccaagattcctcacacagatggcaactttcacccgtctcctttaatgggcggctttggacttaaacatccgcctcctcagatcctcatcaaaaacactcctgttcctgcggatcctccaacagcgttcaaccaggccaagctgaattctttcatcacgcagtacagcaccggacaagtcagcgtggtgatcgagtgggagctgcagaaggagaacagcaagcgctggaacccagagattcagtatacttccaactactacaaatctacaaatgtggactttgctgttaatactgagggtgtttactctgagcttcgccccattggcactcgttacctcacccgtaatctgtaa

SEQ ID NO: 5083 - protein, 738 aa, Adeno-associated virus
MAADGYLPDWLEDNLSEGIREWWDLKPGAPKPKANQQKQDDGRGLVLPGYKYLGPFNGLDKGEPVNAADAAALEHDKAYDQQLKAGDNPYLRYNHADAEFQERLQEDTSFGGNLGRAVFQAKKRVLEPLGLVEEGAKTAPGKKRPVEPSPQRSPDSSTGIGKKGQQPARKRLNFGQTGDSESVPDPQPIGEPPAAPSSVGSGTMAAGGGAPMADNNEGADGVGSSSGNWHCDSTWLGDRVITTSTRTWALPTYNNHLYKQISNGTSGGSTNDNTYFGYSTPWGYFDFNRFHCHFSPRDWQRLINNNWGFRPKRLSFKLFNIQVKEVTQNEGTKTIANNLTSTIQVFTDSEYQLPYVLGSAHQGCLPPFPADVFMIPQYGYLTLNNGSQAVGRSSFYCLEYFPSQMLRTGNNFSFSYTFEDVPFHSSYAHSQSLDRLMNPLIDQYLYYLSRTQSTGGTAGTQQLLFSQAGPSNMSAQARNWLPGPCYRQQRVSTTLSQNNNSNFAWTGATKYHLNGRDSLVNPGVAMATNKDDEDRFFPPSGILMFGKQGAGKDNVDYSNVMLTSEEEIKTTNPVATEQYGVVADNLQQQNTAPIVGAVNSQGALPGMVWQNRDVYLQGPIWAKIPHTDGNFHPSPLMGGFGLKHPPPQILIKNTPVPADPPTAFNQAKLNSFITQYSTGQVSVVIEWELQKENSKRWNPEIQYTSNYYKSTNVDFAVNTEGVYSELRPIGTRYLTRNL

SEQ ID NO: 5084 - DNA, 2214 bp, Adeno-associated virus
atggctgctgacggttatcttccagattggctcgaggacaacctctctgagggcattcgcgagtggtgggacctgaaacctggagcccccaagcccaaggccaaccagcagaagcaggacgacggccggggtctggtgcttcctggctacaagtacctcggacccttcaacggactcgacaagggggagcccgtcaacgcggcggacgcagcggccctcgagcacgacaaggcctacgaccagcagctcaaagcgggtgacaatccgtacctgcggtataaccacgccgacgccgagtttcaggagcgtctgcaagaagatacgtcttttgggggcaacctcgggcgagcagtcttccaggccaagaagcgggttctcgaacctctcggtctggttgaggaagctgctaagacggctcctggaaagaagagaccggtagaaccgtcacctcagcgttcccccgactcctccacgggcatcggcaagaaaggccagcagcccgctagaaagagactgaactttgggcagactggcgactcagagtcagtccccgaccctcaaccaatcggagaaccaccagcaggcccctctggtctgggatctggtacaatggctgcaggcggtggcgccccaatggcagacaataacgaaggcgccgacggagtgggtaatgcctcaggaaattggcattgcgattccacatggctgggcgacagagtcatcaccaccagcacccgaacctgggctttgcccacctacaacaaccacctctacaagcaaatctccagtcagtcagcaggtagcaccaacgacaacgtctacttcggctacagcaccccctgggggtattttgacttcaacagattccactgtcacttctcaccacgtgactggcagcggctcatcaacaacaactggggattccggcccaagaagctcaacttcaagctgttcaacatccaggtcaaggaggtcacaacgaatgacggcgtcacgaccatcgccaataaccttaccagcacggttcaggtcttttcggactcggaataccagctgccctacgtcctcggctccgcacaccagggctgcctgcctccgttcccggcggacgtcttcatgattccccagtacggctacctgactctgaacaatggcagccaatcggtgggtcgttcctctttctactgcctggaatatttcccttctcaaatgctgagaacgggcaacaacttcaccatcagctacaccttcgaggacgttcccttccacagcagctacgcacacagccagagcctggaccggctgatgaatcctcttatcgaccagtacctgtattacctggccagaacacagagcaacgcaggaggcacagctggcaatcaggaactgcagttttatcagggcgggcctaccaccatggccgaacaagccaaaaactggctgcctggaccttgcttccggcaacaaagagtctccaagacgctggatcaaaacaacaacagcaactttgcttggactggtgccaccaaataccatctaaatggaagaaattcattggttaatcccggtgtcgccatggcaacccacaaggacgacgaggaacgcttcttcccttcgagcggagtcctgatttttggaaaaactggagcagctaataagactacactggaaaatgtgttaatgacaaatgaagaggaaattcgtcctaccaacccggtagccaccgaggaatacgggactgttagcagcaacctgcaggcggctaacactgcagcccagacacaagttgtcaacaaccagggagccttacctggtatggtctggcagaaccgggacgtgtacctgcagggtcccatctgggccaagattcctcacacagatggcaactttcacccgtctcctttaatgggcggctttggacttaaacatccgcctcctcagatcctcatcaaaaacactcctgttcctgcggatcctccaacagcgttcaaccaggccaagctgaattctttcatcacgcagtacagcaccggacaagtcagcgtggagatcgagtgggagctgcagaaggagaacagcaagcgctggaacccagagattcagtatacttccaactactacaaatctacaaatgtggactttgctgttaatactgagggtgtttactctgagcctcgccccattggcactcgttacctcacccgtaatctgtaa

SEQ ID NO: 5085 - protein, 737 aa, Adeno-associated virus
MAADGYLPDWLEDNLSEGIREWWDLKPGAPKPKANQQKQDDGRGLVLPGYKYLGPFNGLDKGEPVNAADAAALEHDKAYDQQLKAGDNPYLRYNHADAEFQERLQEDTSFGGNLGRAVFQAKKRVLEPLGLVEEAAKTAPGKKRPVEPSPQRSPDSSTGIGKKGQQPARKRLNFGQTGDSESVPDPQPIGEPPAGPSGLGSGTMAAGGGAPMADNNEGADGVGNASGNWHCDSTWLGDRVITTSTRTWALPTYNNHLYKQISSQSAGSTNDNVYFGYSTPWGYFDFNRFHCHFSPRDWQRLINNNWGFRPKKLNFKLFNIQVKEVTTNDGVTTIANNLTSTVQVFSDSEYQLPYVLGSAHQGCLPPFPADVFMIPQYGYLTLNNGSQSVGRSSFYCLEYFPSQMLRTGNNFTISYTFEDVPFHSSYAHSQSLDRLMNPLIDQYLYYLARTQSNAGGTAGNQELQFYQGGPTTMAEQAKNWLPGPCFRQQRVSKTLDQNNNSNFAWTGATKYHLNGRNSLVNPGVAMATHKDDEERFFPSSGVLIFGKTGAANKTTLENVLMTNEEEIRPTNPVATEEYGTVSSNLQAANTAAQTQVVNNQGALPGMVWQNRDVYLQGPIWAKIPHTDGNFHPSPLMGGFGLKHPPPQILIKNTPVPADPPTAFNQAKLNSFITQYSTGQVSVEIEWELQKENSKRWNPEIQYTSNYYKSTNVDFAVNTEGVYSEPRPIGTRYLTRNL

SEQ ID NO: 5086 - DNA, 2217 bp, Adeno-associated virus
atggctgccgatggttatcttccagattggctcgaggacaacctctctgagggcattcgcgagtggtgggacctgaaacctggagccccgaaacccaaagccaaccagcaaaagcaggacgacggccggggtctggtgcttcctggctacaagtacctcggacccttcaacggactcgacaagggggagcccgtcaacgcggcggacgcagcggccctcgagcacgacaaggcctacgaccagcagctcaaagcgggtgacaatccgtacctgcggtataatcacgccgacgccgagtttcaggagcgtctgcaagaagatacgtcttttgggggcaacctcgggcgagcagtcttccaggccaagaagcgggttctcgaacctctcggtctggttgaggaaggcgctaagacggctcctggaaagaagagaccggtagagccgtcaccacagcgttcccccgactcctccacgggcatcggcaagaaaggccagcagcccgccagaaagagactcaatttcggtcagactggcgactcagagtcagtccccgaccctcaacctatcggagaacctccagcagcgccctctagtgtgggatctggtacaatggctgcaggcggtggcgcaccaatggcagacaataacgaaggtgccgacggagtgggtagttcctcgggaaattggcattgcgattccacatggctgggcgacagagtcatcaccaccagcacccgaacctgggccctgcccgcctacaacaaccacctctacaagcaaatctccaacgggacctcgggaggcagcaccaacgacaacacctactttggctacagcaccccctgggggtattttgactttaacagattccactgccacttctcaccacgtgactggcagcgactcatcaacaacaactggggattccggcccaagagactcagcttcaagctcttcaacatccaggtcaaagaggtcacgcagaatgaaggcaccaagaccatcgccaataacctcaccagcaccatccaggtgtttacggactcggaataccagctgccgtacgtcctcggctctgcccaccagggctgcctgcctccgttcccggcggatgtcttcatgattcctcagtacggctacctgactctcaacaacggtagtcaggccgtgggacgttcctccttctactgcctggagtacttcccctctcagatgctgagaacgggcaacaacttttccttcagctacactttcgaggacgtgcctttccacagcagctacgcgcacagccagagtttggacaggctgatgaatcctctcatcgaccagtacctgtactacctgtcaagaacccagtctacgggaggcacagcgggaacccagcagttgctgttttctcaggccgggcctagcaacatgtcggctcaggccagaaactggctgcctggaccctgctacagacagcagcgcgtctccacgacactgtcgcaaaacaacaacagcaactttgcctggactggtgccaccaagtatcatctgagcggcagagactctctggtgaatccgggcgtcgccatggcaaccaacaaggacgacgaggaccgcttcttcccatccagcggcatcctcatgtttggcaagcagggagctggaaaagacaacgtggactatagcaacgtgatgctaaccagcgaggaagaaatcaagaccaccaaccccgtggccacagaacagtatggcgtggtggctgataacctacagcagcaaaacaccgctcctattgtgggggccgtcaacagccagggagccttacctggcatggtctggcagaaccgggacgtgtacctgcagggtcctatttgggccaagattcctcacacagatggcaactttcacccgtctcctttaatgggcggctttggacttaaacatccgcctcctcagatcctcatcaaaaacactcctgttcctgcggatcctccaacagcgttcaaccaggccaagctgaattcttccatcacgcagtacagcaccggacaagtcagcgtggagatcgagtgggagctgcagaaggagaacagcaagcgctggaacccagagattcagtatacttccaactactacaaatctacaaatgtggactttgctgttaatactgagggtgtttactctgagcctcgccccattggcactcgttacctcacccgtaatttgtaa

SEQ ID NO: 5087 - protein, 738 aa, Adeno-associated virus
MAADGYLPDWLEDNLSEGIREWWDLKPGAPKPKANQQKQDDGRGLVLPGYKYLGPFNGLDKGEPVNAADAAALEHDKAYDQQLKAGDNPYLRYNHADAEFQERLQEDTSFGGNLGRAVFQAKKRVLEPLGLVEEGAKTAPGKKRPVEPSPQRSPDSSTGIGKKGQQPARKRLNFGQTGDSESVPDPQPIGEPPAAPSSVGSGTMAAGGGAPMADNNEGADGVGSSSGNWHCDSTWLGDRVITTSTRTWALPAYNNHLYKQISNGTSGGSTNDNTYFGYSTPWGYFDFNRFHCHFSPRDWQRLINNNWGFRPKRLSFKLFNIQVKEVTQNEGTKTIANNLTSTIQVFTDSEYQLPYVLGSAHQGCLPPFPADVFMIPQYGYLTLNNGSQAVGRSSFYCLEYFPSQMLRTGNNFSFSYTFEDVPFHSSYAHSQSLDRLMNPLIDQYLYYLSRTQSTGGTAGTQQLLFSQAGPSNMSAQARNWLPGPCYRQQRVSTTLSQNNNSNFAWTGATKYHLSGRDSLVNPGVAMATNKDDEDRFFPSSGILMFGKQGAGKDNVDYSNVMLTSEEEIKTTNPVATEQYGVVADNLQQQNTAPIVGAVNSQGALPGMVWQNRDVYLQGPIWAKIPHTDGNFHPSPLMGGFGLKHPPPQILIKNTPVPADPPTAFNQAKLNSSITQYSTGQVSVEIEWELQKENSKRWNPEIQYTSNYYKSTNVDFAVNTEGVYSEPRPIGTRYLTRNL

SEQ ID NO: 5088 - protein, 736 aa, Adeno-associated virus
MAADGYLPDWLEDNLSEGIREWWDLKPGAPKPKANQQKQDDGRGLVLPGYKYLGPFNGLDKGEPVNAADAAALEHDKAYDQQLKAGDNPYLRYNHADAEFQERLQEDTSFGGNLGRAVFQAKKRVLEPLGLVEEGAKTAPGKKRPVEQSPQEPDSSSGIGKTGQQPAKKRLNFGQTGDSESVPDPQPLGEPPATPAAVGPTTMASGGGAPMADNNEGADGVGNASGNWHCDSTWLGDRVITTSTRTWALPTYNNHLYKQISSASTGASNDNHYFGYSTPWGYFDFNRFHCHFSPRDWQRLINNNWGFRPKRLNFKLFNIQVKEVTTNDGVTTIANNLTSTVQVFSDSEYQLPYVLGSAHQGCLPPFPADVFMIPQYGYLTLNNGSQAVGRSSFYCLEYFPSQMLRTGNNFTFSYTFEEVPFHSSYAHSQSLDRLMNPLIDQYLYYLNRTQNQSGSAQNKDLLFSRGSPAGMSVQPKNWLPGPCYRQQRVSKTKTDNNNSNFTWTGASKYNLNGRESIINPGTAMASHKDDEDKFFPMSGVMIFGKESAGASNTALDNVMITDEEEIKATNPVATERFGTVAVNFQSSSTDPATGDVHAMGALPGMVWQDRDVYLQGPIWAKIPHTDGHFHPSPLMGGFGLKNPPPQILIKNTPVPANPPAEFSATKFASFITQYSTGQVSVEIEWELQKENSKRWNPEVQYTSNYAKSANVDFTVDNNGLYTEPRPIGTRYLTRPL

SEQ ID NO: 5089 - DNA, 2217 bp, Adeno-associated virus
atggctgctgacggttatcttccagattggctcgaggacaacctctctgagggcattcgcgagtggtgggacctgaaacctggagcccccaagcccaaggccaaccagcagaagcaggacgacggccggggtctggtgcttcctggctacaagtacctcggacccttcaacggactcgacaagggggagcccgtcaacgcggcggacgcagcggccctcgagcacgacaaggcctacgaccagcagctcaaagcgggtgacaatccgtacctgcggtataaccacgccgacgccgagtttcaggagcgtctgcaagaagatacgtcttttgggggcaacctcgggcgagcagtcttccaggccaagaagcgggttctcgaacctctcggtctggttgaggaagctgctaagacggctcctggaaagaagagaccggtagaaccgtcacctcagcgttcccccgactcctccacgggcatcggcaagaaaggccagcagcccgctaaaaagagactgaactttggtcagactggcgactcagagtcagtccccgaccctcaaccaatcggagaaccaccagcaggcccctctggtctgggatctggtacaatggctgcaggcggtggcgctccaatggcagacaataacgaaggcgccgacggagtgggtagttcctcaggaaattggcattgcgattccacatggctgggcgacagagtcatcaccaccagcacccgaacctgggccctgcccacctacaacaaccacctctacaagcaaatatccaatgggacatcgggaggaagcaccaacgacaacacctacttcggctacagcaccccctgggggtattttgacttcaacagattccactgccacttctcaccacgtgactggcagcgactcatcaacaacaactggggattccggccaaaaagactcagcttcaagctcttcaacatccaggtcaaggaggtcacgcagaatgaaggcaccaagaccatcgccaataaccttaccagcacgattcaggtatttacggactcggaataccagctgccgtacgtcctcggctccgcgcaccagggctgcctgcctccgttcccggcggacgtcttcatgattccccagtacggctaccttacactgaacaatggaagtcaagccgtaggccgttcctccttctactgcctggaatattttccatctcaaatgctgcgaactggaaacaattttgaattcagctacaccttcgaggacgtgcctttccacagcagctacgcacacagccagagcttggaccgactgatgaatcctctcatcgaccagtacctgtactacttatccagaactcagtccacaggaggaactcaaggtacccagcaattgttattttctcaagctgggcctgcaaacatgtcggctcaggctaagaactggctacctggaccttgctaccggcagcagcgagtctctacgacactgtcgcaaaacaacaacagcaactttgcttggactggtgccaccaaatatcacctgaacggaagagactctttggtaaatcccggtgtcgccatggcaacccacaaggacgacgaggaacgcttcttcccgtcgagtggagtcctgatgtttggaaaacagggtgctggaagagacaatgtggactacagcagcgttatgctaaccagcgaagaagaaattaaaaccactaaccctgtagccacagaacaatacggtgtggtggctgacaacttgcagcaaaccaatacagggcctattgtgggaaatgtcaacagccaaggagccttacctggcatggtctggcagaaccgagacgtgtacctgcagggtcccatctgggccaagattcctcacacggacggcaacttccacccttcaccgctaatgggaggatttggactgaagcacccacctcctcagatcctgatcaagaacacgccggtacctgcggatcctccaacaacgttcagccaggcgaaattggcttccttcattacgcagtacagcaccggacaggtcagcgtggaaatcgagtgggagctgcagaaggagaacagcaaacgctggaacccagagattcagtacacttcaaactactacaaatctacaaatgtggactttgctgtcaatacagagggaacttattctgagcctcgccccattggtactcgttacctcacccgtaatctgtaa

SEQ ID NO: 5090 - protein, 738 aa, Adeno-associated virus
MAADGYLPDWLEDNLSEGIREWWDLKPGAPKPKANQQKQDDGRGLVLPGYKYLGPFNGLDKGEPVNAADAAALEHDKAYDQQLKAGDNPYLRYNHADAEFQERLQEDTSFGGNLGRAVFQAKKRVLEPLGLVEEGAKTAPGKKRPVEPSPQRSPDSSTGIGKKGQQPARKRLNFGQTGDSESVPDPQPLGEPPAAPSSVGSGTMAAGGGAPMADNNEGADGVGSSSGNWHCDSTWLGDRVITTSTRTWALPTYNNHLYKQISNGTSGGSTNDNTYFGYSTPWGYFDFNRFHCHFSPRDWQRLINNNWGFRPKRLSFKLFNIQVKEVTQNEGTKTIANNLTSTIQVFTDSEYQLPYVLGSAHQGCLPPFPADVFMIPQYGYLTLNNGSQAVGRSSFYCLEYFPSQMLRTGNNFSFSYTFEDVPFHSSYAHSQSLDRLMNPLIDQYLYYLSRTQSTGGTAGTQQLLFSQAGPSNMSAQARNWLPGPCYRQQRVSTTLSQNNNSNFAWTGATKYHLNGRDSLVNPGVAMATNKDDEDRFFPSSGILMFGKQGAGKDNVDYSNVMLTSEEEIKTTNPVATEQYGVVADNLQRQNTAPIVGAVNSQGALPGMVWQNRDVYLQGPIWAKIPHTDGNFHPSPLMGGFGLKHPPPQILIKNTPVPADPPTAFNQAKLNSFITQYSTGQVSVEIEWELQKENSKRWNPEIQYTSNYYKSTNVDFAVNTEGVYSEPRPIGTRYLTRNL

SEQ ID NO: 5091 - protein, 736 aa, Adeno-associated virus
MAADGYLPDWLEDNLSEGIREWLNLKPGAPQPKANQQKQDNARGLVLPGYKYLGPFNGLDKGDPVNEADAAALEHDKAYGQQLKAGDNPYLKYNHADAEFQERLQKDTSFGGNLGKAVFQAKKRILEPLGLVETPAKTAPGKKRPVDPSPQRSPDSSSGIGKKSPHPARKRLNFGQTGEAESVPDPQPIGEPPSDPSSVGSGTMAAGGGAPMADNNEGADGVGNSSGNWHCDSTWLGDRVITTSTRTWALPTYNNHLYKQISSQSGATNDNHYFGYSTPWGYFDFNRFHCHFSPRDWQRLINNNWGFRPKRLSFKLFNIQVKEVTQNDGTTTIANNLTSTVQVFTDSEYQLPYVLGSAHQGCLPPFPADVFMIPQYGYLTLNNGSQAVGRSSFYCLEYFPSQMLRTGNNFQFSYTFEDVPFHSSYAHSQSLDRLMNPLIDQYLYYLSKTQGTNATVQGAKLQFSQAGPSNMRDQARNWLPGPCYRQQRVSKTANDNNNSEYAWTGATKYHLNGRDSLVNPGPAMASHKDDEEKFFPMNGTLVFGKNGAGNSNVDIENVMITDEEEIRTTNPVATEQYGVVSDNLQSSNTRPITGDVDSQGVLPGMVWQDRDVYLQGPIWAKIPHTDGHFHPSPLMGGFGLKHPPPQILIKNTPVPANPATTFTPGKFASFITQYSTGQVSVQIEWELQKENSKRWNPEIQYTSNYNKSVNVDFTVDTNGVYSEPRPIGTRYLTRNL

SEQ ID NO: 5092 - protein, 736 aa, Adeno-associated virus; identical to SEQ ID NO: 4787

SEQ ID NO: 5093 - protein, 736 aa, Adeno-associated virus
MAADGYLPDWLEDNLSEGIREWWDLKPGAPKPKANQQKQDDGRGLVLPGYKYLGPFNGLDKGEPVNAADAAALEHDKAYDQQLKAGDNPYLRYNHADAEFQERLQEDTSFGGNLGRAVFQAKKRVLEPLGLVEEGAKTAPGKKRPVEQSPQEPDSSSGIGKTGQQPAKKRLNFGQTGDSESVPDPQPLGEPPAAPSGLGPNTMASGGGAPMADNNEGADGVGNSSGNWHCDSTWLGDRVITTSTRTWALPTYNNHLYKQISNGTSGGSTNDNTYFGYSTPWGYFDFNRFHCHFSPRDWQRLINNNWGFRPKRLNFKLFNIQVKEVTTNEGTKTIANNLTSTVQVFTDSEYQLPYVLGSAHQGCLPPFPADVFMVPQYGYLTLNNGSQALGRSSFYCLEYFPSQMLRTGNNFQFSYTFEDVPFHSSYAHSQSLDRLMNPLIDQYLYYLVRTQTTGTGGTQTLAFSQAGPSSMANQARNWVPGPCYRQQRVSTTTNQNNNSNFAWTGAAKFKLNGRDSLMNPGVAMASHKDDEDRFFPSSGVLIFGKQGAGNDGVDYSQVLITDEEEIKATNPVATEEYGAVAINNQAANTQAQTGLVHNQGVIPGMVWQNRDVYLQGPIWAKIPHTDGNFHPSPLMGGFGLKHPPPQILIKNTPVPADPPLTFNQAKLNSFITQYSTGQVSVEIEWELQKENSKRWNPEIQYTSNYYKSTNVDFAVNTEGVYSEPRPIGTRYLTRNL

SEQ ID NO: 5094 - DNA, 2211 bp, Adeno-associated virus 1; identical to SEQ ID NO: 4977

SEQ ID NO: 5095 - protein, 736 aa, Adeno-associated virus 1; identical to SEQ ID NO: 5088

SEQ ID NO: 5096 - DNA, 4718 bp, Adeno-associated virus 1
ttgcccactccctctctgcgcgctcgctcgctcggtggggcctgcggaccaaaggtccgcagacggcagagctctgctctgccggccccaccgagcgagcgagcgcgcagagagggagtgggcaactccatcactaggggtaatcgcgaagcgcctcccacgctgccgcgtcagcgctgacgtaaattacgtcataggggagtggtcctgtattagctgtcacgtgagtgcttttgcgacattttgcgacaccacgtggccatttagggtatatatggccgagtgagcgagcaggatctccattttgaccgcgaaatttgaacgagcagcagccatgccgggcttctacgagatcgtgatcaaggtgccgagcgacctggacgagcacctgccgggcatttctgactcgtttgtgagctgggtggccgagaaggaatgggagctgcccccggattctgacatggatctgaatctgattgagcaggcacccctgaccgtggccgagaagctgcagcgcgacttcctggtccaatggcgccgcgtgagtaaggccccggaggccctcttctttgttcagttcgagaagggcgagtcctacttccacctccatattctggtggagaccacgggggtcaaatccatggtgctgggccgcttcctgagtcagattagggacaagctggtgcagaccatctaccgcgggatcgagccgaccctgcccaactggttcgcggtgaccaagacgcgtaatggcgccggaggggggaacaaggtggtggacgagtgctacatccccaactacctcctgcccaagactcagcccgagctgcagtgggcgtggactaacatggaggagtatataagcgcctgtttgaacctggccgagcgcaaacggctcgtggcgcagcacctgacccacgtcagccagacccaggagcagaacaaggagaatctgaaccccaattctgacgcgcctgtcatccggtcaaaaacctccgcgcgctacatggagctggtcgggtggctggtggaccggggcatcacctccgagaagcagtggatccaggaggaccaggcctcgtacatctccttcaacgccgcttccaactcgcggtcccagatcaaggccgctctggacaatgccggcaagatcatggcgctgaccaaatccgcgcccgactacctggtaggccccgctccgcccgcggacattaaaaccaaccgcatctaccgcatcctggagctgaacggctacgaacctgcctacgccggctccgtctttctcggctgggcccagaaaaggttcgggaagcgcaacaccatctggctgtttgggccggccaccacgggcaagaccaacatcgcggaagccatcgcccacgccgtgcccttctacggctgcgtcaactggaccaatgagaactttcccttcaatgattgcgtcgacaagatggtgatctggtgggaggagggcaagatgacggccaaggtcgtggagtccgccaaggccattctcggcggcagcaaggtgcgcgtggaccaaaagtgcaagtcgtccgcccagatcgaccccacccccgtgatcgtcacctccaacaccaacatgtgcgccgtgattgacgggaacagcaccaccttcgagcaccagcagccgttgcaggaccggatgttcaaatttgaactcacccgccgtctggagcatgactttggcaaggtgacaaagcaggaagtcaaagagttcttccgctgggcgcaggatcacgtgaccgaggtggcgcatgagttctacgtcagaaagggtggagccaacaaaagacccgcccccgatgacgcggataaaagcgagcccaagcgggcctgcccctcagtcgcggatccatcgacgtcagacgcggaaggagctccggtggactttgccgacaggtaccaaaacaaatgttctcgtcacgcgggcatgcttcagatgctgtttccctgcaagacatgcgagagaatgaatcagaatttcaacatttgcttcacgcacgggacgagagactgttcagagtgcttccccggcgtgtcagaatctcaaccggtcgtcagaaagaggacgtatcggaaactctgtgccattcatcatctgctggggcgggctcccgagattgcttgctcggcctgcgatctggtcaacgtggacctggatgactgtgtttctgagcaataaatgacttaaaccaggtatggctgccgatggttatcttccagattggctcgaggacaacctctctgagggcattcgcgagtggtgggacttgaaacctggagccccgaagcccaaagccaaccagcaaaagcaggacgacggccggggtctggtgcttcctggctacaagtacctcggacccttcaacggactcgacaagggggagcccgtcaacgcggcggacgcagcggccctcgagcacgacaaggcctacgaccagcagctcaaagcgggtgacaatccgtacctgcggtataaccacgccgacgccgagtttcaggagcgtctgcaagaagatacgtcttttgggggcaacctcgggcgagcagtcttccaggccaagaagcgggttctcgaacctctcggtctggttgaggaaggcgctaagacggctcctggaaagaaacgtccggtagagcagtcgccacaagagccagactcctcctcgggcatcggcaagacaggccagcagcccgctaaaaagagactcaattttggtcagactggcgactcagagtcagtccccgatccacaacctctcggagaacctccagcaacccccgctgctgtgggacctactacaatggcttcaggcggtggcgcaccaatggcagacaataacgaaggcgccgacggagtgggtaatgcctcaggaaattggcattgcgattccacatggctgggcgacagagtcatcaccaccagcacccgcacctgggccttgcccacctacaataaccacctctacaagcaaatctccagtgcttcaacgggggccagcaacgacaaccactacttcggctacagcaccccctgggggtattttgatttcaacagattccactgccacttttcaccacgtgactggcagcgactcatcaacaacaattggggattccggcccaagagactcaacttcaaactcttcaacatccaagtcaaggaggtcacgacgaatgatggcgtcacaaccatcgctaataaccttaccagcacggttcaagtcttctcggactcggagtaccagcttccgtacgtcctcggctctgcgcaccagggctgcctccctccgttcccggcggacgtgttcatgattccgcaatacggctacctgacgctcaacaatggcagccaagccgtgggacgttcatccttttactgcctggaatatttcccttctcagatgctgagaacgggcaacaactttaccttcagctacacctttgaggaagtgcctttccacagcagctacgcgcacagccagagcctggaccggctgatgaatcctctcatcgaccaatacctgtattacctgaacagaactcaaaatcagtccggaagtgcccaaaacaaggacttgctgtttagccgtgggtctccagctggcatgtctgttcagcccaaaaactggctacctggaccctgttatcggcagcagcgcgtttctaaaacaaaaacagacaacaacaacagcaattttacctggactggtgcttcaaaatataacctcaatgggcgtgaatccatcatcaaccctggcactgctatggcctcacacaaagacgacgaagacaagttctttcccatgagcggtgtcatgatttttggaaaagagagcgccggagcttcaaacactgcattggacaatgtcatgattacagacgaagaggaaattaaagccactaaccctgtggccaccgaaagatttgggaccgtggcagtcaatttccagagcagcagcacagaccctgcgaccggagatgtgcatgctatgggagcattacctggcatggtgtggcaagatagagacgtgtacctgcagggtcccatttgggccaaaattcctcacacagatggacactttcacccgtctcctcttatgggcggctttggactcaagaacccgcctcctcagatcctcatcaaaaacacgcctgttcctgcgaatcctccggcggagttttcagctacaaagtttgcttcattcatcacccaatactccacaggacaagtgagtgtggaaattgaatgggagctgcagaaagaaaacagcaagcgctggaatcccgaagtgcagtacacatccaattatgcaaaatctgccaacgttgattttactgtggacaacaatggactttatactgagcctcgccccattggcacccgttaccttacccgtcccctgtaattacgtgttaatcaataaaccggttgattcgtttcagttgaactttggtctcctgtccttcttatcttatcggttaccatggttatagcttacacattaactgcttggttgcgcttcgcgataaaagacttacgtcatcgggttacccctagtgatggagttgcccactccctctctgcgcgctcgctcgctcggtggggcctgcggaccaaaggtccgcagacggcagagctctgctctgccggccccaccgagcgagcgagcgcgcagagagggagtgggcaa

SEQ ID NO: 5097 - DNA, 255 bp, Adeno-associated virus 10
ggtaattcctccggaaattggcattgcgattccacatggctgggcgacagagtcatcaccaccagcacccgaacctgggtcctgcccacctacaacaaccacatctacaagcaaatctccagcgagacaggagccaccaacgacaaccactacttcggctacagcaccccctgggggtattttgactttaacagattccactgccacttttcaccacgtgactggcagcgactcatcaacaacaactggggattc

SEQ ID NO: 5098 - protein, 738 aa, Adeno-associated virus 10
MAADGYLPDWLEDNLSEGIREWWDLKPGAPKPKANQQKQDDGRGLVLPGYKYLGPFNGLDKGEPVNAADAAALEHDKAYDQQLKAGDNPYLRYNHADAEFQERLQEDTSFGGNLGRAVFQAKKRVLEPLGLVEEAAKTAPGKKRPVEPSPQRSPDSSTGIGKKGQQPAKKRLNFGQTGESESVPDPQPIGEPPAGPSGLGSGTMAAGGGAPMADNNEGADGVGSSSGNWHCDSTWLGDRVITTSTRTWALPTYNNHLYKQISNGTSGGSTNDNTYFGYSTPWGYFDFNRFHCHFSPRDWQRLINNNWGFRPKRLSFKLFNIQVKEVTQNEGTKTIANNLTSTIQVFTDSEYQLPYVLGSAHQGCLPPFPADVFMIPQYGYLTLNNGSQAVGRSSFYCLEYFPSQMLRTGNNFEFSYTFEDVPFHSSYAHSQSLDRLMNPLIDQYLYYLSRTQSTGGTQGTQQLLFSQAGPANMSAQAKNWLPGPCYRQQRVSTTLSQNNNSNFAWTGATKYHLNGRDSLVNPGVAMATHKDDEERFFPSSGVLMFGKQGAGRDNVDYSSVMLTSEEEIKTTNPVATEQYGVVADNLQQANTGPIVGNVNSQGALPGMVWQNRDVYLQGPIWAKIPHTDGNFHPSPLMGGFGLKHPPPQILIKNTPVPADPPTTFSQAKLASFITQYSTGQVSVEIEWELQKENSKRWNPEIQYTSNYYKSTNVDFAVNTEGTYSEPRPIGTRYLTRNL

SEQ ID NO: 5099 - protein, 738 aa, Adeno-associated virus 10; identical to SEQ ID NO: 4793

SEQ ID NO: 5100 - DNA, 258 bp, Adeno-associated virus 11
ggtaattcctccggaaattggcattgcgattccacatggctgggcgacagagtcatcaccaccagcacccgaacctgggccctgccaacctacaacaaccacctctacaaacaaatctccagcgcttcaacgggggccagcaacgacaaccactactttggctacagcaccccctgggggtattttgactttaacagattccactgccacttctcaccacgtgactggcagcgactcatcaacaacaactggggattc

SEQ ID NO: 5101 - DNA, 255 bp, Adeno-associated virus 12
ggtaattcctccggaaattggcattgcgattccacatggctgggcgaccgagtcattaccaccagcacccggacttgggccctgcccacctacaacaaccacctctacaagcaaatctccagccaatcgggtgccaccaacgacaaccactacttcggctacagcaccccttgggggtattttgatttcaacagattccactgccatttctcaccacgtgactggcagcgactcatcaacaacaactggggattc

SEQ ID NO: 5102 - DNA, 2208 bp, Adeno-associated virus 2
atggctgccgatggttatcttccagattggctcgaggacactctctctgaaggaataagacagtggtggaagctcaaacctggcccaccaccaccaaagcccgcagagcggcataaggacgacagcaggggtcttgtgcttcctgggtacaagtacctcggacccttcaacggactcgacaagggagagccggtcaacgaggcagacgccgcggccctcgagcacgacaaagcctacgaccggcagctcgacagcggagacaacccgtacctcaagtacaaccacgccgacgcggagtttcaggagcgccttaaagaagatacgtcttttgggggcaacctcggacgagcagtcttccaggcgaaaaagagggttcttgaacctctgggcctggttgaggaacctgttaagacggctccgggaaaaaagaggccggtagagcactctcctgtggagccagactcctcctcgggaaccggaaaggcgggccagcagcctgcaagaaaaagattgaattttggtcagactggagacgcagactcagtacctgacccccagcctctcggacagccaccagcagccccctctggtctgggaactaatacgatggctacaggcagtggcgcaccaatggcagacaataacgagggcgccgacggagtgggtaattcctcgggaaattggcattgcgattccacatggatgggcgacagagtcatcaccaccagcacccgaacctgggccctgcccacctacaacaaccacctctacaaacaaatttccagccaatcaggagcctcgaacgacaatcactactttggctacagcaccccttgggggtattttgacttcaacagattccactgccacttttcaccacgtgactggcaaagactcatcaacaacaactggggattccgacccaagagactcaacttcaagctctttaacattcaagtcaaagaggtcacgcagaatgacggtacgacgacgattgccaataaccttaccagcacggttcaggtgtttactgactcggagtaccagctcccgtacgtcctcggctcggcgcatcaaggatgcctcccgccgttcccagcagacgtcttcatggtgccacagtatggatacctcaccctgaacaacgggagtcaggcagtaggacgctcttcattttactgcctggagtactttccttctcagatgctgcgtaccggaaacaactttaccttcagctacacttttgaggacgttcctttccacagcagctacgctcacagccagagtctggaccgtctcatgaatcctctcatcgaccagtacctgtattacttgagcagaacaaacactccaagtggaaccaccacgcagtcaaggcttcagttttctcaggccggagcgagtgacattcgggaccagtctaggaactggcttcctggaccctgttaccgccagcagcgagtatcaaagacatctgcggataacaacaacagtgaatactcgtggactggagctaccaagtaccacctcaatggcagagactctctggtgaatccgggcccggccatggcaagccacaaggacgatgaagaaaagttttttcctcagagcggggttctcatctttgggaagcaaggctcagagaaaacaaatgtggacattgaaaaggtcatgattacagacgaagaggaaatcaggacaaccaatcccgtggctacggagcagtatggttctgtatctaccaacctccagagaggcaacagacaagcagctaccgcagatgtcaacacacaaggcgttcttccaggcatggtctggcaggacagagatgtgtaccttcaggggcccatctgggcaaagattccacacacggacggacattttcacccctctcccctcatgggtggattcggacttaaacaccctcctccacagattctcatcaagaacaccccggtacctgcgaatccttcgaccaccttcagtgcggcaaagtttgcttccttcatcacacagtactccacgggacaggtcagcgtggagatcgagtgggagctgcagaaggaaaacagcaaacgctggaatcccgaaattcagtacacttccaactacaacaagtctgttaatgtggactttactgtggacactaatggcgtgtattcagagcctcgccccattggcaccagatacctgactcgtaatctgtaa

SEQ ID NO: 5103 - protein, 735 aa, Adeno-associated virus 2 [sequence omitted]

SEQ ID NO: 5104 - protein, 621 aa, Adeno-associated virus 2
MPGFYEIVIKVPSDLDGHLPGISDSFVNWVAEKEWELPPDSDMDLNLIEQAPLTVAEKLQRDFLTEWRRVSKAPEALFFVQFEKGESYFHMHVLVETTGVKSMVLGRFLSQIREKLIQRIYRGIEPTLPNWFAVTKTRNGAGGGNKVVDECYIPNYLLPKTQPELQWAWTNMEQYLSACLNLTERKRLVAQHLTHVSQTQEQNKENQNPNSDAPVIRSKTSARYMELVGWLVDKGITSEKQWIQEDQASYISFNAASNSRSQIKAALDNAGKIMSLTKTAPDYLVGQQPVEDISSNRIYKILELNGYDPQYAASVFLGWATKKFGKRNTIWLFGPATTGKTNIAEAIAHTVPFYGCVNWTNENFPFNDCVDKMVIWWEEGKMTAKVVESAKAILGGSKVRVDQKCKSSAQIDPTPVIVTSNTNMCAVIDGNSTTFEHQQPLQDRMFKFELTRRLDHDFGKVTKQEVKDFFRWAKDHVVEVEHEFYVKKGGAKKRPAPSDADISEPKRVRESVAQPSTSDAEASINYADRYQNKCSRHVGMNLMLFPCRQCERMNQNSNICFTHGQKDCLECFPVSESQPVSVVKKAYQKLCYIHHIMGKVPDACTACDLVNVDLDDCIFEQ

SEQ ID NO: 5105 - DNA, 4675 bp, Adeno-associated virus 2
ttggccactccctctctgcgcgctcgctcgctcactgaggccgggcgaccaaaggtcgcccgacgcccgggctttgcccgggcggcctcagtgagcgagcgagcgcgcagagagggagtggccaactccatcactaggggttcctggaggggtggagtcgtgacgtgaattacgtcatagggttagggaggtcctgtattagaggtcacgtgagtgttttgcgacattttgcgacaccatgtggtcacgctgggtatttaagcccgagtgagcacgcagggtctccattttgaagcgggaggtttgaacgcgcagccgccatgccggggttttacgagattgtgattaaggtccccagcgaccttgacgggcatctgcccggcatttctgacagctttgtgaactgggtggccgagaaggaatgggagttgccgccagattctgacatggatctgaatctgattgagcaggcacccctgaccgtggccgagaagctgcagcgcgactttctgacggaatggcgccgtgtgagtaaggccccggaggcccttttctttgtgcaatttgagaagggagagagctacttccacatgcacgtgctcgtggaaaccaccggggtgaaatccatggttttgggacgtttcctgagtcagattcgcgaaaaactgattcagagaatttaccgcgggatcgagccgactttgccaaactggttcgcggtcacaaagaccagaaatggcgccggaggcgggaacaaggtggtggatgagtgctacatccccaattacttgctccccaaaacccagcctgagctccagtgggcgtggactaatatggaacagtatttaagcgcctgtttgaatctcacggagcgtaaacggttggtggcgcagcatctgacgcacgtgtcgcagacgcaggagcagaacaaagagaatcagaatcccaattctgatgcgccggtgatcagatcaaaaacttcagccaggtacatggagctggtcgggtggctcgtggacaaggggattacctcggagaagcagtggatccaggaggaccaggcctcatacatctccttcaatgcggcctccaactcgcggtcccaaatcaaggctgccttggacaatgcgggaaagattatgagcctgactaaaaccgcccccgactacctggtgggccagcagcccgtggaggacatttccagcaatcggatttataaaattttggaactaaacgggtacgatccccaatatgcggcttccgtctttctgggatgggccacgaaaaagttcggcaagaggaacaccatctggctgtttgggcctgcaactaccgggaagaccaacatcgcggaggccatagcccacactgtgcccttctacgggtgcgtaaactggaccaatgagaactttcccttcaacgactgtgtcgacaagatggtgatctggtgggaggaggggaagatgaccgccaaggtcgtggagtcggccaaagccattctcggaggaagcaaggtgcgcgtggaccagaaatgcaagtcctcggcccagatagacccgactcccgtgatcgtcacctccaacaccaacatgtgcgccgtgattgacgggaactcaacgaccttcgaacaccagcagccgttgcaagaccggatgttcaaatttgaactcacccgccgtctggatcatgactttgggaaggtcaccaagcaggaagtcaaagactttttccggtgggcaaaggatcacgtggttgaggtggagcatgaattctacgtcaaaaagggtggagccaagaaaagacccgcccccagtgacgcagatataagtgagcccaaacgggtgcgcgagtcagttgcgcagccatcgacgtcagacgcggaagcttcgatcaactacgcagacaggtaccaaaacaaatgttctcgtcacgtgggcatgaatctgatgctgtttccctgcagacaatgcgagagaatgaatcagaattcaaatatctgcttcactcacggacagaaagactgtttagagtgctttcccgtgtcagaatctcaacccgtttctgtcgtcaaaaaggcgtatcagaaactgtgctacattcatcatatcatgggaaaggtgccagacgcttgcactgcctgcgatctggtcaatgtggatttggatgactgcatctttgaacaataaatgatttaaatcaggtatggctgccgatggttatcttccagattggctcgaggacactctctctgaaggaataagacagtggtggaagctcaaacctggcccaccaccaccaaagcccgcagagcggcataaggacgacagcaggggtcttgtgcttcctgggtacaagtacctcggacccttcaacggactcgacaagggagagccggtcaacgaggcagacgccgcggccctcgagcacgtacaaagcctacgaccggcagctcgacagcggagacaacccgtacctcaagtacaaccacgccgacgcggagtttcaggagcgccttaaagaagatacgtcttttgggggcaacctcggacgagcagtcttccaggcgaaaaagagggttcttgaacctctgggcctggttgaggaacctgttaagacggctccgggaaaaaagaggccggtagagcactctcctgtggagccagactcctcctcgggaaccggaaaggcgggccagcagcctgcaagaaaaagattgaattttggtcagactggagacgcagactcagtacctgacccccagcctctcggacagccaccagcagccccctctggtctgggaactaatacgatggctacaggcagtggcgcaccaatggcagacaataacgagggcgccgacggagtgggtaattcctccggaaattggcattgcgattccacatggatgggcgacagagtcatcaccaccagcacccgaacctgggccctgcccacctacaacaaccacctctacaaacaaatttccagccaatcaggagcctcgaacgacaatcactactttggctacagcaccccttgggggtattttgacttcaacagattccactgccacttttcaccacgtgactggcaaagactcatcaacaacaactggggattccgacccaagagactcaacttcaagctctttaacattcaagtcaaagaggtcacgcagaatgacggtacgacgacgattgccaataaccttaccagcacggttcaggtgtttactgactcggagtaccagctcccgtacgtcctcggctcggcgcatcaaggatgcctcccgccgttcccagcagacgtcttcatggtgccacagtatggatacctcaccctgaacaacgggagtcaggcagtaggacgctcttcattttactgcctggagtactttccttctcagatgctgcgtaccggaaacaactttaccttcagctacacttttgaggacgttcctttccacagcagctacgctcacagccagagtctggaccgtctcatgaatcctctcatcgaccagtacctgtattacttgagcagaacaaacactccaagtggaaccaccacgcagtcaaggcttcagttttctcaggccggagcgagtgacattcgggaccagtctaggaactggcttcctggaccctgttaccgccagcagcgagtatcaaagacatctgcggataacaacaacagtgaatactcgtggactggagctaccaagtaccacctcaatggcagagactctctggtgaatccggccatggcaagccacaaggacgatgaagaaaagttttttcctcagagcggggttctcatctttgggaagcaaggctcagagaaaacaaatgtgaacattgaaaaggtcatgattacagacgaagaggaaatcggaacaaccaatcccgtggctacggagcagtatggttctgtatctaccaacctccagagaggcaacagacaagcagctaccgcagatgtcaacacacaaggcgttcttccaggcatggtctggcaggacagagatgtgtaccttcaggggcccatctgggcaaagattccacacacggacggacattttcacccctctcccctcatgggtggattcggacttaaacaccctcctccacagattctcatcaagaacaccccggtacctgcgaatccttcgaccaccttcagtgcggcaaagtttgcttccttcatcacacagtactccacgggacacggtcagcgtggagatcgagtgggagctgcagaaggaaaacagcaaacgctggaatcccgaaattcagtacacttccaactacaacaagtctgttaatcgtggacttaccgtggatactaatggcgtgtattcagagcctcgccccattggcaccagatacctgactcgtaatctgtaattgcttgttaatcaataaaccgtttaattcgtttcagttgaactttggtctctgcgtatttctttcttatctagtttccatggctacgtagataagtagcatggcgggttaatcattaactacaaggaacccctagtgatggagttggccactccctctctgcgcgctcgctcgctcactgaggccgggcgaccaaaggtcgcccgacgcccgggctttgcccgggcggcctcagtgagcgagcgagcgcgcagagagggagtggccaa

SEQ ID NO: 5106 - DNA, 4679 bp, Adeno-associated virus 2
ttggccactccctctctgcgcgctcgctcgctcactgaggccgggcgaccaaaggtcgcccgacgcccgggctttgcccgggcggcctcagtgagcgagcgagcgcgcagagagggagtggccaactccatcactaggggttcctggaggggtggagtcgtgacgtgaattacgtcatagggttagggaggtcctgtattagaggtcacgtgagtgttttgcgacattttgcgacaccatgtggtcacgctgggtatttaagcccgagtgagcacgcagggtctccattttgaagcgggaggtttgaacgcgcagccgccatgccggggttttacgagattgtgattaaggtccccagcgaccttgacgggcatctgcccggcatttctgacagctttgtgaactgggtggccgagaaggaatgggagttgccgccagattctgacatggatctgaatctgattgagcaggcacccctgaccgtggccgagaagctgcagcgcgactttctgacggaatggcgccgtgtgagtaaggccccggaggcccttttctttgtgcaatttgagaagggagagagctacttccacatgcacgtgctcgtggaaaccaccggggtgaaatccatggttttgggacgtttcctgagtcagattcgcgaaaaactgattcagagaatttaccgcgggatcgagccgactttgccaaactggttcgcggtcacaaagaccagaaatggcgccggaggcgggaacaaggtggtggatgagtgctacatccccaattacttgctccccaaaacccagcctgagctccagtgggcgtggactaatatggaacagtatttaagcgcctgtttgaatctcacggagcgtaaacggttggtggcgcagcatctgacgcacgtgtcgcagacgcaggagcagaacaaagagaatcagaatcccaattctgatgcgccggtgatcagatcaaaaacttcagccaggtacatggagctggtcgggtggctcgtggacaaggggattacctcggagaagcagtggatccaggaggaccaggcctcatacatctccttcaatgcggcctccaactcgcggtcccaaatcaaggctgccttggacaatgcgggaaagattatgagcctgactaaaaccgcccccgactacctggtgggccagcagcccgtggaggacatttccagcaatcggatttataaaattttggaactaaacgggtacgatccccaatatgcggcttccgtctttctgggatgggccacgaaaaagttcggcaagaggaacaccatctggctgtttgggcctgcaactaccgggaagaccaacatcgcggaggccatagcccacactgtgcccttctacgggtgcgtaaactggaccaatgagaactttcccttcaacgactgtgtcgacaagatggtgatctggtgggaggaggggaagatgaccgccaaggtcgtggagtcggccaaagccattctcggaggaagcaaggtgcgcgtggaccagaaatgcaagtcctcggcccagatagacccgactcccgtgatcgtcacctccaacaccaacatgtgcgccgtgattgacgggaactcaacgaccttcgaacaccagcagccgttgcaagaccggatgttcaaatttgaactcacccgccgtctggatcatgactttgggaaggtcaccaagcaggaagtcaaagactttttccggtgggcaaaggatcacgtggttgaggtggagcatgaattctacgtcaaaaagggtggagccaagaaaagacccgcccccagtgacgcagatataagtgagcccaaacgggtgcgcgagtcagttgcgcagccatcgacgtcagacgcggaagcttcgatcaactacgcagacaggtaccaaaacaaatgttctcgtcacgtgggcatgaatctgatgctgtttccctgcagacaatgcgagagaatgaatcagaattcaaatatctgcttcactcacggacagaaagactgtttagagtgctttcccgtgtcagaatctcaacccgtttctgtcgtcaaaaaggcgtatcagaaactgtgctacattcatcatatcatgggaaaggtgccagacgcttgcactgcctgcgatctggtcaatgtggatttggatgactgcatctttgaacaataaatgatttaaatcaggtatggctgccgatggttatcttccagattggctcgaggacactctctctgaaggaataagacagtggtggaagctcaaacctggcccaccaccaccaaagcccgcagagcggcataaggacgacagcaggggtcttgtgcttcctgggtacaagtacctcggacccttcaacggactcgacaagggagagccggtcaacgaggcagacgccgcggccctcgagcacgacaaagcctacgaccggcagctcgacagcggagacaacccgtacctcaagtacaaccacgccgacgcggagtttcaggagcgccttaaagaagatacgtcttttgggggcaacctcggacgagcagtcttccaggcgaaaaagagggttcttgaacctctgggcctggttgaggaacctgttaagacggctccgggaaaaaagaggccggtagagcactctcctgtggagccagactcctcctcgggaaccggaaaggcgggccagcagcctgcaagaaaaagattgaattttggtcagactggagacgcagactcagtacctgacccccagcctctcggacagccaccagcagccccctctggtctgggaactaatacgatggctacaggcagtggcgcaccaatggcagacaataacgagggcgccgacggagtgggtaattcctccggaaattggcattgcgattccacatggatgggcgacagagtcatcaccaccagcacccgaacctgggccctgcccacctacaacaaccacctctacaaacaaatttccagccaatcaggagcctcgaacgacaatcactactttggctacagcaccccttgggggtattttgacttcaacagattccactgccacttttcaccacgtgactggcaaagactcatcaacaacaactggggattccgacccaagagactcaacttcaagctctttaacattcaagtcaaagaggtcacgcagaatgacggtacgacgacgattgccaataaccttaccagcacggttcaggtgtttactgactcggagtaccagctcccgtacgtcctcggctcggcgcatcaaggatgcctcccgccgttcccagcagacgtcttcatggtgccacagtatggatacctcaccctgaacaacgggagtcaggcagtaggacgctcttcattttactgcctggagtactttccttctcagatgctgcgtaccggaaacaactttaccttcagctacacttttgaggacgttcctttccacagcagctacgctcacagccagagtctggaccgtctcatgaatcctctcatcgaccagtacctgtattacttgagcagaacaaacactccaagtggaaccaccacgcagtcaaggcttcagttttctcaggccggagcgagtgacattcgggaccagtctaggaactggcttcctggaccctgttaccgccagcagcgagtatcaaagacatctgcggataacaacaacagtgaatactcgtggactggagctaccaagtaccacctcaatggcagagactctctggtgaatccgggcccggccatggcaagccacaaggacgatgaagaaaagttttttcctcagagcggggttctcatctttgggaagcaaggctcagagaaaacaaatgtggacattgaaaaggtcatgattacagacgaagaggaaatcaggacaaccaatcccgtggctacggagcagtatggttctgtatctaccaacctccagagaggcaacagacaagcagctaccgcagatgtcaacacacaaggcgttcttccaggcatggtctggcaggacagagatgtgtaccttcaggggcccatctgggcaaagattccacacacggacggacattttcacccctctcccctcatgggtggattcggacttaaacaccctcctccacagattctcatcaagaacaccccggtacctgcgaatccttcgaccaccttcagtgcggcaaagtttgcttccttcatcacacagtactccacgggacaggtcagcgtggagatcgagtgggagctgcagaaggaaaacagcaaacgctggaatcccgaaattcagtacacttccaactacaacaagtctgttaatgtggactttactgtggacactaatggcgtgtattcagagcctcgccccattggcaccagatacctgactcgtaatctgtaattgcttgttaatcaataaaccgtttaattcgtttcagttgaactttggtctctgcgtatttctttcttatctagtttccatggctacgtagataagtagcatggcgggttaatcattaactacaaggaacccctagtgatggagttggccactccctctctgcgcgctcgctcgctcactgaggccgggcgaccaaaggtcgcccgacgcccgggctttgcccgggcggcctcagtgagcgagcgagcgcgcagagagggagtggccaa

SEQ ID NO: 5107 - protein, 735 aa, Adeno-associated virus 2
MAADGYLPDWLEDTLSEGIRQWWKLKPGPPPPKPAERHKDDSRGLVLPGYKYLGPFNGLDKGEPVNEADAAALEHDKAYDRQLDSGDNPYLKYNHADAEFQERLKEDTSFGGNLGRAVFQAKKRVLEPLGLVEEPVKTAPGKKRPVEHSPVEPDSSSGTGKAGQQPARKRLNFGQTGDADSVPDPQPLGEPPATPAAVGPTTMASGGGAPMADNNEGADGVGNASGNWHCDSTWLGDRVITTSTRTWALPTYNNHLYKQISSASTGASNDNHYFGYSTPWGYFDFNRFHCHFSPRDWQRLINNNWGFRPKRLNFKLFNIQVKEVTQNDGTTTIANNLTSTVQVFTDSEYQLPYVLGSAHQGCLPPFPADVFMIPQYGYLTLNNGSQAVGRSSFYCLEYFPSQMLRTGNNFTFSYTFEDVPFHSSYAHSQSLDRLMNPLIDQYLYYLNRTQNQSGSAQDKALLFSRGSPAGMSVQPKNWLPGPCYRQQRVSKTKTDNNNSNFTWTGASKYNLNGRESIINPGTAMASHKDDKDKFFPMSGVMIFGKESAGASNTALDNVMITDEEEIKATNPVATERFGTVAVNFQSSSTDPATGDVHVMGALPGMVWQDRDVYLQGPIWAKIPHTDGHFHPSPLMGGFGLKHPPPQILIKNTPVPANPPAEFSATKFASFITQYSTGQVSVEIEWELQKENSKRWNPEVQYTSNYAKSANVDFTVDNNGLYTEPRPIGTRYLTRP

SEQ ID NO: 5108 - protein, 740 aa, Adeno-associated virus 2
MAADGYLPDWLEDTLSEGIRQWWKLKPGPPPPKPAERHKDDSRGLVLPGYKYLGPFNGLDKGEPVNAADAAALEHDKAYDRQLDSGDNPYLKYNHADAEFQERLKEDTSFGGNLGRAVFQAKKRVLEPLGLVEEPVKTAPGKKRPVEHSPVEPDSSSGTGKAGQQPARKRLNFGQTGDADSVPDPQPLGQPPAAPSGLGTNTMATGSGAPMADNNEGADGVGNSSGNWHCDSTWMGDRVITTSTRTWALPTYNNHLYKQISSQSGASNDNHYFGYSTPWGYFDFNRFHCHFSPRDWQRLINNNWGFRPKRLNFKLFNIQVKEVTQNDGTTTIANNLTSTVQVFTDSEYQLPYVLGSAHQGCLPPFPADVFMVPQYGYLTLNNGSQAVGRSSFYCLEYFPSQMLRTGNNFTFSYTFEDVPFHSSYAHSQSLDRLMNPLIDQYLYYLSRTNTPSGTTTQSGLQFSQAGASDIRDQSRNWLPGPCYRQQRVSKTSADNNNSEYSWTGATKYHLNGRDSLVNPGPAMASHKDDEEKFFPQSGVLIFGKQGSEKTNVDIEKVMITDEEEIRTTNPVATEQYGSVSTNLQRGNRQAATADVNTQGVLPGMVWQDRDVYLQGPIWAKIPHTDGHFHPSPLMGGFGLKHPPPQILIKNTPVPANPSTTFSAAKFASFITQYSTGQVSVEIEWELQKENSKRWNPEIQYTSNYNKSVNVDFTVDTNGVYSEPRPIGTRYLTRNLLLAAA

SEQ ID NO: 5109 - protein, 734 aa, Adeno-associated virus 2
MAADGYLPDWLEDTLSEGIRQWWKLKPGPPPPKPAERHKDDSRGLVLPGYKYLGPFNGLDKGEPVNEADAAALEHDKAYDRQLDSGDNPYLKYNHADAEFQERLKEDTSFGGNLGRAVFQAKKRVLEPLGLVEEPVKTAPGKKRPVEHSPVEPDSSSGTGKAGQQPARKRLNFGQTGDADSVPDPQPLGQPPAAPSGLGTNTMATGSGAPMADNNEGADGVGNSSGNWHCDSTWMGDRVITTSTRTWALPTYNNHLYKQISSQSGASNDNHYFGYSTPWGYFDFNRFHCHFSPRDWQRLINNNWGFRPKRLNFKLFNIQVKEVTQNDGTTTIANNLTSTVQVFTDSEYQLPYVLGSAHQGCLPPFPADVFMVPQYGYLTLNNGSQAVGRSSFYCLEYFPSQMLRTGNNFTFSYTFEDVPFHSSYAHSQSLDRLMNPLIDQYLYYLSRTNTPSGTTTQSGLQFSQAGASDIRDQSRNWLPGPCYRQQRVSKTSADNNNSEYSWTGATMYHLNGRDSLVNPGPAMASHKDDEEKFFPQSGVLIFGKQGSEKTNVDIEKVMITDEEEIRTTNPVATEQYGSVSTNLQRGNRQAATADVNTQGVLPGMVWQDRDVYLQGPIWAKIPHTDGHFHPSPLMGGFGLKHPPPQILIKNTPVPANPSTTFSAAKFASFITQYSTGQVSVEIEWELQKENSKRWNPEIQYTSNYNKSINVDFTVDTNGVYSEPRPIGTRYLTRN

SEQ ID NO: 5110 - protein, 734 aa, Adeno-associated virus 2
MAADGYLPDWLEDTLSEGIRQWWKLKPGPPPPKPAERHKDDSRGLVLPGYKYLGPFNGLDKGEPVNEADAAALEHDKAYDRQLDSGDNPYLKYNHADAEFQERLKEDTSFGGNLGRAVFQAKKRVLEPLGLVEEPVKTAPGKKRPVEHSPVEPDSSSGTGKAGQQPARKRLNFGQTGDADSVPDPQPLGQPPAAPSGLGTNTMATGSGAPMADNNEGADGVGNSSGNWHCDSTWMGDRVITTSTRTWALPTYNNHLYKQISSQSGASNDNHYFGYSTPWGYFDFNRFHCHFSPRDWQRLINNNWGFRPKRLNFKLFNIQVKEVTQNDGTTTIANNLTSTVQVFTDSEYQLPYVLGSAHQGCLPPFPADVFMVPQYGYLTLNNGSQAVGRSSFYCLEYFPSQMLRTGNNFTFSYTFEDVPFHSSYAHSQSLDRLMNPLIDQYLYYLSRTNTPSGTTTQSGLQFSQAGASDIRDQSRNWLPGPCYRQQRVSKTSADNNNSEYSWTGATKYHLNGRDSLVNPGPAMASHKDDEEKFFPQSGVLIFGKQGSEKTNVDIEKVMITDEEEIRTTNPVATEQYGSVSTNLQRGNRQAATADVNTQGVLPGMVWQDRDVYLQGPIWAKIPHTDGHFHPSPLMGGFGLKHPPPQILIKNTPVPANPSTTFSEAKFASFITQYSTGQVSVEIEWELQKENSKRWNPEIQYTSNYNKSVNVDFTVDTNGVYSEPRPIGTRYLTRN

SEQ ID NO: 5111 - protein, 739 aa, Adeno-associated virus 2
MAADGYLPDWLEDTLSEGIRQWWKLKPGPPPPKPAERHKDDSRGLVLPGYKYLGPFNGLDKGEPVNEADAAALEHDKAYDRQLDSGDNPYLKYNHADAEFQERLKEDTSFGGNLGRAVFQAKKRVLEPLGLVEEPVKTAPGKKRPVEHSPVEPDSSSGTGKAGQQPARKRLNFGQTGDADSVPDPQPLGQPPAAPSGLGTNTMATGSGAPMADNNEGADGVGNSSGNWHCDSTWMGDRVITTSTRTWALPTYNNHLYKQISSQSGASNDNHYFGYSTPWGYFDFNRFHCHFSPRDWQRLINNNWGFRPKRLNFKLFNIQVKEVTQNDGTTTIANNLTSTVQVFTDSEYQLPYVLGSAHQGCLPPFPADVFMVPQYGYLTLNNGSQAVGRSSFYCLEYFPSQMLRTGNNFTFSYTFEDVPFHSSYAHSQSLDRLMNPLIDQYLYYLSRTNTPSGTTTQSGLQFSQAGASDIRDQSRNWLPGPCYRQQRVSKTSADNNNSEYSWTGATKYHLNGRDSLVNPGPAMASHKDDEEKFFPQSGVLIFGKQGSEKTNVDIEKVMITDEEEIRTTNPVATEQYGSVSTNLQRGNRQAATADVNTQGVLPGMVWQDRDVYLQGPIWAKIPHTDGHFHPSPLMGGFGLKHPPPQILIKNTPVPANPSTTFSAAKFASFITQYSTGQVSVEIEWELQKENSKRWNPEIQYTSNYNKSVNVDFTVDTNGVYSEPRPIGTRYLTRNLLLAA

SEQ ID NO: 5112 - protein, 725 aa, Adeno-associated virus 2
MAADGYLPDWLEDTLSEGIRQWWKLKPGPPPPKPAERHKDDSRGLVLPGYKYLGPFNGLDKGEPVNEADAAALEHDKAYDRQLDSGDNPYLKYNHADAEFQERLKEDTSFGGNLGRAVFQAKKRVLEPLGLVEEPVKTAPGKKRPVEHSPVEPDSSSGTGKAGQQPARKRLNFGQTGDADSVPDPQPLGQPPAAPSGLGTNTMATGSGAPMADNNEGADGVGNSSGNWHCDSTWMGDRVITTSTRTWALPTYNNHLYKQISSQSGASNDNHYFGYSTPWGYFDFNRFHCHFSPRDWQRLINNNWGFRPKRLNFKLFNIQVKEVTQNDGTTTIANNLTSTVQVFTDSEYQLPYVLGSAHQGCLPPFPADVFMVPQYGYLTLNNGSQAVGRSSFYCLEYFPSQMLRTGNNFTFSYTFEDVPFHSSYAHSQSLDRLMNPLIDQYLYYLSRTNTPSGTTTQSGLQFSQAGASDIRDQSRNWLPGPCYRQQRVSKTSADNNNSEYSWTGATKYHLNGRDSLVNPGPAMASHKDDEEKFFPQSGVLIFGKQGSEKTNVDIEKVMITDEEEIRTTNPVATEQYGSVSTNLQRGNRQAATADVNTQGVLPGMVWQDRDVYLQGPIWAKIPHTDGHFHPSPLMGGFGLKHPPPQILIKNTPVPANPSTTFSAAKFASFITQYSTGQVSVEIEWELQKENSKRWNPEIQYTSNYNKSVNVDFTVDTNGVYSEPRP

SEQ ID NO: 5113 - protein, 707 aa, Adeno-associated virus 2
MAADGYLPDWLEDTLSEGIRQWWKLKPGPPPPKPAERHKDDSRGLVLPGYKYLGPFNGLDKGEPVNEADAAALEHDKAYDRQLDSGDNPYLKYNHADAEFQERLKEDTSFGGNLGRAVFQAKKRVLEPLGLVEEPVKTAPGKKRPVEHSPVEPDSSSGTGKAGQQPARKRLNFGQTGDADSVPDPQPLGQPPAAPSGLGTNTMATGSGAPMADNNEGADGVGNSSGNWHCDSTWMGDRVITTSTRTWALPTYNNHLYKQISSQSGASNDNHYFGYSTPWGYFDFNRFHCHFSPRDWQRLINNNWGFRPKRLNFKLFNIQVKEVTQNDGTTTIANNLTSTVQVFTDSEYQLPYVLGSAHQGCLPPFPADVFMVPQYGYLTLNNGSQAVGRSSFYCLEYFPSQMLRTGNNFTFSYTFEDVPFHSSYAHSQSLDRLMNPLIDQYLYYLSRTNTPSGTTTQSGLQFSQAGASDIRDQSRNWLPGPCYRQQRVSKTSADNNNSEYSWTGATKYHLNGRDSLVNPGPAMASHKDDEEKFFPQSGVLIFGKQGSEKTNVDIEKVMITDEEEIRTTNPVATEQYGSCIYQPPERQQTSSYRRCQHTRRSSRHGLAGQRCVPSGAHLGKDSTHGRTFSPLSPHGWIRTTPSSTDSHQEHPGTCESFDHLQCGKVCFLHHTVLHGTGQRGDRVRAAEGKQQTLESRNSVHFQLQQVC

SEQ ID NO: 5114 - protein, 739 aa, Adeno-associated virus 2; identical to SEQ ID NO: 5111

SEQ ID NO: 5115 - protein, 737 aa, Adeno-associated virus 2
MASDGYLPDWLEDNLSEGIREWWDLKPGAPKPKANQQKQDDGRGLVLPGYKYLGPFNGLDKGEPVNAADAAALEHDKAYDQQLKAGDNPYLRYNHADAEFQERLQEDTSFGGNLGRAVFQAKKRVLEPFGLVEEGAKTAPGKKRPVEQSPQEPDSSSGIGKTGQQPAKKRLNFGQTGDSESVPDPQPLGEPPATPAAVGPTTMASGGGAPMADNNEGADGVGNASGNWHCDSTWLGDRVITTSTRTWALPTYNNHLYKQISSASTGASNDNHYFGYSTPWGYFDFNRFHCHFSPRDWQRLINNNWGFRPKRLNFKLFNIQVKEVTTNDGTTTIANNLTSTVQVFTDSEYQLPYVLGSAHQGCLPPFPADVFMVPQYGYLTLNNGSQAVGRSSFYCLEYFPSQMLRTGNNFTFSYTFEDVPFHSSYAHSQSLDRLMNPLIDQYLYYLSRTNTPSGTTTQSGLQFSQAGASDIRDQSRNWLPGPCYRQQRVSKTSADNNNSEYSWTGATKYHLNGRDSLVNPGPAMASHKDDEEKFFPQSGVLIFGKQGSEKTNVDIEKVMITDEEEIRTTNPVATEQYGSVSTNLQRGNRQAATADVNTQGVLPGMVWQDRDVYLQGPIWAKIPHTDGHFHPSPLMGGFGLKHHPPQILIKNTPVPANPSTTFSAAKFASFITQYSTGQVSVEIEWELQKENSKRWNPEIQYTSNYNKSVNVDFTVDTNGVYSEPRPIGTRYLTRNLL

SEQ ID NO: 5116 - protein, 741 aa, Adeno-associated virus 2
MAADGYLPDWLEDTLSEGIREWWALKPGAPKPKANQQKQDDGRGLVLPGYKYLGPFNGLDKGEPVNEADAAALEHDKAYDQQLQAGDNPYLRYNHADAEFQERLQEDTSFGGNLGRAVFQAKKRVLEPLGLVEEPVKTAPGKKRPVEHSPVEPDSSSGTGKSGQQPARKRLNFGQTGDADSVPDPQPLGQPPAAPSGLGTNTMATGSGAPMADNNEGADGVGNSSGNWHCDSTWMGDRVITTSTRTWALPTYNNHLYKQISSQSGASNDNHYFGYSTPWGYFDFNRFHCHFSPRDWQRLINNNWGFRPKRLNFKLFNIQVKEVTQNDGTTTIANNLTSTVQVFTDSEYQLPYVLGSAHQGCLPPFPADVFMVPQYGYLTLNNGSQAVGRSSFYCLEYFPSQMLRTGNNFTFSYTFEDVPFHSSYAHSQSLDRLMNPLIDQYLYYLSRTNTPSGTTTQSGLQFSQAGASDIRDQSRNWLPGPCYRQQRVSKTSADNNNSEYSWTGATKYHLNGRDSLVNPGPAMASHKDDEEKFFPQSGVLIFGKQGSEKTNVDIEKVMITDEEEIRTTNPVATEQYGSVSTNLQRGNLANHNNTTNARQAATADVNTQGVLPGMVWQDRDVYLQGPIWAKIPHTDGHFHPSPLMGGFGLKHPPPQILIKNTPVPANPSTTFSAAKFASFITQYSTGQVSVEIEWELQKENSKRWNPEIQYTSNYNKSINVDFTVDTNGVYSEPRPIGTRYL

SEQ ID NO: 5117 - protein, 730 aa, Adeno-associated virus 2
MASDGYLPDWLEDNLSEGIREWWDLKPGAPKPKANQQKQDDGRGLVLPGYKYLGPFNGLDKGEPVNAADAAALEHDKAYDQQLKAGDNPYLRYNHADAEFQERLQEDTSFGGNLGRAVFQAKKRVLEPFGLVEEGAKTAPGKKRPVEQSPQEPDSSSGIGKTGQQPAKKRLNFGQTGDSESVPDPQPLGEPPATPAAVGPTTMASGGGAPMADNNEGADGVGNASGNWHCDSTWLGDRVITTSTRTWALPTYNNHLYKQISSASTGASNDNHYFGYSTPWGYFDFNRFHCHFSPRDWQRLINNNWGFRPKRLNFKLFNIQVKEVTTNDGVTTIANNLTSTVQVFSDSEYQLPYVLGSAHQGCLPPFPADVFMIPQYGYLTLNNGSQAVGRSSFYCLEYFPSQMLRTGNNFTFSYTFEDVPFHSSYAHSQSLDRLMNPLIDQYLYYLNRTQNQSGSAQNNDLLFSRGSPAGMSVQPKNWLPGPCYRQQRVSKTKTDNNNSNFTWTGASKYNLNGRESIINPGTAMASHKDDKDKFFPMSGVMIFGKESAGASNTALDNVMITDEEEIKATNPVATERFGTVAVNLQSSSTDPATGDVHVMGALPGMVWQDRDVYLQGPIWAKIPHTDGHFHPSPLMGGFGLKNPPPQILIKNTPVPANPPAEFSATKFASFITQYSTGQVSVEIEWELQKENSKRWNPEVQYTSNYAKSANVDFTVDNNGLYTEPRPIGTR

SEQ ID NO: 5118 - protein, 735 aa, Adeno-associated virus 2
  MOD_RES (239)..(239): Any amino acid
MASDGYLPDWLEDNLSEGIREWWDLKPGAPKPKANQQKQDDGRGLVLPGYKYLGPFNGLDKGEPVNAADAAALEHDKAYDQQLKAGDNPYLRYNHADAEFQERLQEDTSFGGNLGRAVFQAKKRVLEPFGLVEEGAKTAPGKKRPVEQSPQEPDSSSGIGKTGQQPAKKRLNFGQTGDSESVPDPQPLGEPPATPAAVGPTTMASGGGAPMADNNEGADGVGNASGNWHCDSTWLGDRXITTSTRTWALPTYNNHLYKQISSASTGASNDNHYFGYSTPWGYFDFNRFHCHFSPRDWQRLINNNWGFRPKRLNFKLFNIQVKEVTTNDGVTTIANNLTSTVQVFSDSEYQLPYVLGSAHQGCLPPFPADVFMIPQYGYLTLNNGSQAVGRSSFYCLEYFPSQMLRTGNNFTFSYTFEDVPFHSSYAHSQSLDRLMNPLIDQYLYYLNRTQNQSGSAQNNDLLFSRGSPAGMSVQPKNWLPGPCYRQQRVSKTKTDNNNSNFTWTGASKYNLNGRESIINPGTAMASHKDDKDKFFPMSGVMIFGKESAGASNTALDNVMITDEEEIKATNPVATERFGTVAVNLQSSSTDPATGDVHVMGALPGMVWQDRDVYLQGPIWAKIPHTDGHFHPSPLMGGFGLKNPPPQILIKNTPVPANPPAEFSATKFASFITQYSTGQVSVEIEWELQKENSKRWNPEVQYTSNYAKSANVDFTVDNNGLYTEPRPIGTRYLTRP

SEQ ID NO: 5119 - protein, 733 aa, Adeno-associated virus 2
MASDGYLPDWLEDNLSEGIREWWDLKPGAPKPKANQQKQDDGRGLVLPGYKYLGPFNGLDKGEPVNAADAAALEHDKAYDQQLKAGDNPYLRYNHADAEFQERLQEDTSFGGNLGRAVFLAKKRVLEPFGLVEEGAKTAPGKKRPVEQSPQEPDSSSGIGKTGQQPAKKRLNFGQTGDSESVPDPQPLGEPPATPAAVGPTTMASGGGAPMADNNEGADGVGNASGNWHCDSTWLGDRVITTSTRTWALPTYNNHLYKQISSASTGASNDNHYFGYSTPWGYFDFNRFHCHFSPRDWQRLINNNWGFRPKRLNFKLFNIQVKEVTTNDGVTTIANNLTSTVQVFSDSEYQLPYVLGSAHQGCLPPFPADVFMIPQYGYLTLNNGSQAVGRSSFYCLEYFPSQMLRTGNNFTFSYTFEDVPFHSSYAHSQSLDRLMNPLIDQYLYYLNRTQNQSGSAQNNDLLFSRGSPAGMSVQPKNWLPGPCYRQQRVSKTKTDNNNSNFTWTGASKYNLNGRESIINPGTAMASHKDDKDKFFPMSGVMIFGKESAGASNTALDNVMITDEEEIKATNPVATERFGTVAVNLQSSSTDPATGDVHVMGALPGMVWQDRDVYLQGPIWAKIPHTDGHFHPSPLMGGFGLKNPPPQILIKNTPVPANPPAEFSATKFASFITQYSTGQVSVEIEWELQKENSKRWNPEVQYTSNYAKSANVDFTVDNNGLYTEPRPIGTRYLT

SEQ ID NO: 5120 - protein, 734 aa, Adeno-associated virus 2
MAADGYLPDWLEDTLSEGIRQWWKLKPGPPPPKPAERHKDDSRGLVLPGCKYLGPFNGLDKGEPVNEADAAALEHDKAYDRQLDSGDNPYLKYNHADAEFQERLKEDTSFGGNLGRAVFQAKKRVLEPLGLVEEPVKTAPGKKRPVEHSPVEPDSSSGTGKAGQQPARKRLNFGQTGDADSVPDPQPLGQPPAAPSGLGTNTMATGSGAPMADNNEGADGVGNSSGNWHCDSTWMGDRVITTSTRTWALPTYNNHLYKQISSQSGASNDNHYFGYSTPWGYFDFNRFHCHFSPRDWQRLINNNWGFRPKRLNFKLFNIQVKEVTQNDGTTTIANNLTSTVQVFSDSEYQLPYVLGSAHQGCLPPFPADVFMIPQYGYLTLNNGSQAVGRSSFYCLEYFPSQMLRTGNNFTFNYTFEDVPFHSSYAHSQSLDRLMNPLIDQYLYYLNRTQNQSGSAQNNDLLFSRGSPAGMSVQPKNWLPGPCYRQQRVSKTKTDNNNSNFTWTGASKYNLNGRESIINPGTAMASHKDDKDKFFPMSGVMIFGKESAGASNTALDNVMITDEEEIKATNPVATERFGTVAVNLQSSSTDPATGDVHVMGALPGMVWQDRDVYLQGPIWAKIPHTDGHFHPSPLMGGFGLKNPPPQILIKNTPVPANPPAEFSATKFASFITQYSTGQVSVEIEWELQKENSKRWNPEVQYTSNYAKSANVDFTVDNNGLYTEPRPIGTRYLTRP

SEQ ID NO: 5121 - protein, 734 aa, Adeno-associated virus 2
MAADGYLPDWLEDTLSEGIRQWWKLKPGPPPPKPAERHKDDSRGLVLPGYKYLGPFNGLDKGEPVNEADAAALEHDKAYDRQLDSGDNPYLKYNHADAEFQERLKEDTSFGGNLGRAVFQAKKRVLEPLGLVEEPVKTAPGKKRPVEHSPVEPDSSSGTGKAGQQPARKRLNFGQTGDADSVPDPQPLGQPPAAPSGLGTNTMATGSGAPMADNNEGADGVGNSSGNWHCDSTWMGDRVITTSTRTWALSTYNNHLYKQISSQSGASNDNHYFGYSTPWGYFDFNRFHCHFSPRDWQRLINNNWGFRPKRLNFKLFNIQVKEVTQNDGTTTIANNLTSTVQVFTDSEYQLPYVLGSAHQGCLPPFPADVFMVPQYGYLTLNNGSQAVGRSSFYCLEYFPSQMLRTGNNFTFSYTFEDVPFHSSYAHSQSLDRLMNPLIDQYLYYLSRTNTPSGTTTQSRLQFSQAGASDIRDQSRNWLPGPCYRQQRVSKTSADNNNSEYSWTGATKYHLNGRDSLVNPGPAMASHKDDEEKFFPQSGVLIFGKQGSEKTNVDIEKVMITDEEEIRTTNPVATEQYGSVSTNLQRGNRQAATADVNTQGVLPGMVWQDRDVYLQGPIWAKIPHTDGHFHPSPLMGGFGLKHPPPQILIKNTPVPANPSTTFSAAKFASFITQYSTGQVSVEIEWELQKENSKRWNPEIQYTSNYNKSINVDFTVDTNGVYSEPRPIGTRYLTRN

SEQ ID NO: 5122 - protein, 738 aa, Adeno-associated virus 2
MAADGYLPDWLEDTLSEGIRQWWKLKPGPPPPKPAERHKDDSRGLVLPGYKYLGPFNGLDKGEPVNEADAAALEHDKAYDRQLDGGDNPYLKYNHADAEFQERLKEDTSFGGNLGRAVFQAKKRVLEPLGLVEEPVKTAPGKKRPVEHSPVEPDSSSGTGKAGQQPARKRLNFGQTGDADSVPDPQPLGQPPAAPSGLGTNTMATGSGAPMADNNEGADGVGNSSGNWHCDSTWMGDRVITTSTRTWALPTYNNHLYKQISSQSGASNDNHYFGYSTPWGYFDFNRFHCHFSPRDWQRLINNNWGFRPKRLNFKLFNIQVKEVTQNDGTTTIANNLTSTVQVFTDSEYQLPYVLGSAHQGCLPPFPADVFMVPQYGYLTLNNGSQAVGRSSFYCLEYFPSQMLRTGNNFTFSYTFEDVPFHSSYAHSQSLDRLMNPLIDQYLYYLSRTNTPSGTTTQSGLQFSQAGASDIRDQSRNWLPGPCYRQQRVSKTSADNNNSEYSWTGATKYHLNGRDSLVNPGPAMASHKDDEEKFFPQSGVLIFGKQGSEKTNVDIEKVMITDEEEIRTTNPVATEQYGSVSTNLQRGNRQAATADVNTQGVLPGMVWQDRDVYLQGPIWAKIPHTDGHFHPSPLMGGFGLKHPPPQILIKNTPVPANPSTTFSAAKFASFITQYSTGQVSVEIEWELQKENSKRWNPEIQYTSNYNKSVNVDFTVDTNGVYSEPRPIGTRYLTRNLLRP

SEQ ID NO: 5123 - protein, 736 aa, Adeno-associated virus 3; identical to SEQ ID NO: 4757

SEQ ID NO: 5124 - DNA, 4726 bp, Adeno-associated virus 3
ttggccactccctctatgcgcactcgctcgctcggtggggcctggcgaccaaaggtcgccagacggacgtgctttgcacgtccggccccaccgagcgagcgagtgcgcatagagggagtggccaactccatcactagaggtatggcagtgacgtaacgcgaagcgcgcgaagcgagaccacgcctaccagctgcgtcagcagtcaggtgacccttttgcgacagtttgcgacaccacgtggccgctgagggtatatattctcgagtgagcgaaccaggagctccattttgaccgcgaaatttgaacgagcagcagccatgccggggttctacgagattgtcctgaaggtcccgagtgacctggacgagcgcctgccgggcatttctaactcgtttgttaactgggtggccgagaaggaatgggacgtgccgccggattctgacatggatccgaatctgattgagcaggcacccctgaccgtggccgaaaagcttcagcgcgagttcctggtggagtggcgccgcgtgagtaaggccccggaggccctcttttttgtccagttcgaaaagggggagacctacttccacctgcacgtgctgattgagaccatcggggtcaaatccatggtggtcggccgctacgtgagccagattaaagagaagctggtgacccgcatctaccgcggggtcgagccgcagcttccgaactggttcgcggtgaccaaaacgcgaaatggcgccgggggcgggaacaaggtggtggacgactgctacatccccaactacctgctccccaagacccagcccgagctccagtgggcgtggactaacatggaccagtatttaagcgcctgtttgaatctcgcggagcgtaaacggctggtggcgcagcatctgacgcacgtgtcgcagacgcaggagcagaacaaagagaatcagaaccccaattctgacgcgccggtcatcaggtcaaaaacctcagccaggtacatggagctggtcgggtggctggtggaccgcgggatcacgtcagaaaagcaatggattcaggaggaccaggcctcgtacatctccttcaacgccgcctccaactcgcggtcccagatcaaggccgcgctggacaatgcctccaagatcatgagcctgacaaagacggctccggactacctggtgggcagcaacccgccggaggacattaccaaaaatcggatctaccaaatcctggagctgaacgggtacgatccgcagtacgcggcctccgtcttcctgggctgggcgcaaaagaagttcgggaagaggaacaccatctggctctttgggccggccacgacgggtaaaaccaacatcgcggaagccatcgcccacgccgtgcccttctacggctgcgtaaactggaccaatgagaactttcccttcaacgattgcgtcgacaagatggtgatctggtgggaggagggcaagatgacggccaaggtcgtggagagcgccaaggccattctgggcggaagcaaggtgcgcgtggaccaaaagtgcaagtcatcggcccagatcgaacccactcccgtgatcgtcacctccaacaccaacatgtgcgccgtgattgacgggaacagcaccaccttcgagcatcagcagccgctgcaggaccggatgtttgaatttgaacttacccgccgtttggaccatgactttgggaaggtcaccaaacaggaagtaaaggactttttccggtgggcttccgatcacgtgactgacgtggctcatgagttctacgtcagaaagggtggagctaagaaacgccccgcctccaatgacgcggatgtaagcgagccaaaacgggagtgcacgtcacttgcgcagccgacaacgtcagacgcggaagcaccggcggactacgcggacaggtaccaaaacaaatgttctcgtcacgtgggcatgaatctgatgctttttccctgtaaaacatgcgagagaatgaatcaaatttccaatgtctgttttacgcatggtcaaagagactgtggggaatgcttccctggaatgtcagaatctcaacccgtttctgtcgtcaaaaagaagacttatcagaaactgtgtccaattcatcatatcctgggaagggcacccgagattgcctgttcggcctgcgatttggccaatgtggacttggatgactgtgtttctgagcaataaatgacttaaaccaggtatggctgctgacggttatcttccagattggctcgaggacaacctttctgaaggcattcgtgagtggtgggctctgaaacctggagtccctcaacccaaagcgaaccaacaacaccaggacaaccgtcggggtcttgtgcttccgggttacaaatacctcggacccggtaacggactcgacaaaggagagccggtcaacgaggcggacgcggcagccctcgaacacgacaaagcttacgaccagcagctcaaggccggtgacaacccgtacctcaagtacaaccacgccgacgccgagtttcaggagcgtcttcaagaagatacgtcttttgggggcaaccttggcagagcagtcttccaggccaaaaagaggatccttgagcctcttggtctggttgaggaagcagctaaaacggctcctggaaagaagggggctgtagatcagtctcctcaggaaccggactcatcatctggtgttggcaaatcgggcaaacagcctgccagaaaaagactaaatttcggtcagactggagactcagagtcagtcccagaccctcaacctctcggagaaccaccagcagcccccacaagtttgggatctaatacaatggcttcaggcggtggcgcaccaatggcagacaataacgagggtgccgatggagtgggtaattcctcaggaaattggcattgcgattcccaatggctgggcgacagagtcatcaccaccagcaccagaacctgggccctgcccacttacaacaaccatctctacaagcaaatctccagccaatcaggagcttcaaacgacaaccactactttggctacagcaccccttgggggtattttgactttaacagattccactgccacttctcaccacgtgactggcagcgactcattaacaacaactggggattccggcccaagaaactcagcttcaagctcttcaacatccaagttagaggggtcacgcagaacgatggcacgacgactattgccaataaccttaccagcacggttcaagtgtttacggactcggagtatcagctcccgtacgtgctcgggtcggcgcaccaaggctgtctcccgccgtttccagcggacgtcttcatggtccctcagtatggatacctcaccctgaacaacggaagtcaagcggtgggacgctcatccttttactgcctggagtacttcccttcgcagatgctaaggactggaaataacttccaattcagctataccttcgaggatgtaccttttcacagcagctacgctcacagccagagtttggatcgcttgatgaatcctcttattgatcagtatctgtactacctgaacagaacgcaaggaacaacctctggaacaaccaaccaatcacggctgctttttagccaggctgggcctcagtctatgtctttgcaggccagaaattggctacctgggccctgctaccggcaacagagactttcaaagactgctaacgacaacaacaacagtaactttccttggacagcggccagcaaatatcatctcaatggccgcgactcgctggtgaatccaggaccagctatggccagtcacaaggacgatgaagaaaaatttttccctatgcacggcaatctaatatttggcaaagaagggacaacggcaagtaacgcagaattagataatgtaatgattacggatgaagaagagattcgtaccaccaatcctgtggcaacagagcagtatggaactgtggcaaataacttgcagagctcaaatacagctcccacgactggaactgtcaatcatcagggggccttacctggcatggtgtggcaagatcgtgacgtgtaccttcaaggacctatctgggcaaagattcctcacacggatggacactttcatccttctcctctgatgggaggctttggactgaaacatccgcctcctcaaatcatgatcaaaaatactccggtaccggcaaatcctccgacgactttcagcccggccaagtttgcttcatttatcactcagtactccactggacaggtcagcgtggaaattgagtgggagctacagaaagaaaacagcaaacgttggaatccagagattcagtacacttccaactacaacaagtctgttaatgtggactttactgtagacactaatggtgtttatagtgaacctcgccctattggaacccggtatctcacacgaaacttgtgaatcctggttaatcaataaaccgtttaattcgtttcagttgaactttggctcttgtgcacttctttatctttatcttgtttccatggctactgcgtagataagcagcggcctgcggcgcttgcgcttcgcggtttacaactgctggttaatatttaactctcgccatacctctagtgatggagttggccactccctctatgcgcactcgctcgctcggtggggcctggcgaccaaaggtcgccagacggacgtgctttgcacgtccggccccaccgagcgagcgagtgcgcatagagggagtggccaa

SEQ ID NO: 5125 - protein, 736 aa, Adeno-associated virus 3A; identical to SEQ ID NO: 4757

SEQ ID NO: 5126 - protein, 624 aa, Adeno-associated virus 3A
MPGFYEIVLKVPSDLDERLPGISNSFVNWVAEKEWDVPPDSDMDPNLIEQAPLTVAEKLQREFLVEWRRVSKAPEALFFVQFEKGETYFHLHVLIETIGVKSMVVGRYVSQIKEKLVTRIYRGVEPQLPNWFAVTKTRNGAGGGNKVVDDCYIPNYLLPKTQPELQWAWTNMDQYLSACLNLAERKRLVAQHLTHVSQTQEQNKENQNPNSDAPVIRSKTSARYMELVGWLVDRGITSEKQWIQEDQASYISFNAASNSRSQIKAALDNASKIMSLTKTAPDYLVGSNPPEDITKNRIYQILELNGYDPQYAASVFLGWAQKKFGKRNTIWLFGPATTGKTNIAEAIAHAVPFYGCVNWTNENFPFNDCVDKMVIWWEEGKMTAKVVESAKAILGGSKVRVDQKCKSSAQIEPTPVIVTSNTNMCAVIDGNSTTFEHQQPLQDRMFEFELTRRLDHDFGKVTKQEVKDFFRWASDHVTDVAHEFYVRKGGAKKRPASNDADVSEPKRECTSLAQPTTSDAEAPADYADRYQNKCSRHVGMNLMLFPCKTCERMNQISNVCFTHGQRDCGECFPGMSESQPVSVVKKKTYQKLCPIHHILGRAPEIACSACDLANVDLDDCVSEQ

SEQ ID NO: 5127 - protein, 736 aa, Adeno-associated virus 3B
MAADGYLPDWLEDNLSEGIREWWALKPGVPQPKANQQHQDNRRGLVLPGYKYLGPGNGLDKGEPVNEADAAALEHDKAYDQQLKAGDNPYLKYNHADAEFQERLQEDTSFGGNLGRAVFQAKKRILEPLGLVEEAAKTAPGKKRPVDQSPQEPDSSSGVGKSGKQPARKRLNFGQTGDSESVPDPQPLGEPPAAPTSLGSNTMASGGGAPMADNNEGADGVGNSSGNWHCDSQWLGDRVITTSTRTWALPTYNNHLYKQISSQSGASNDNHYFGYSTPWGYFDFNRFHCHFSPRDWQRLINNNWGFRPKKLSFKLFNIQVKEVTQNDGTTTIANNLTSTVQVFTDSEYQLPYVLGSAHQGCLPPFPADVFMVPQYGYLTLNNGSQAVGRSSFYCLEYFPSQMLRTGNNFQFSYTFEDVPFHSSYAHSQSLDRLMNPLIDQYLYYLNRTQGTTSGTTNQSRLLFSQAGPQSMSLQARNWLPGPCYRQQRLSKTANDNNNSNFPWTAASKYHLNGRDSLVNPGPAMASHKDDEEKFFPMHGNLIFGKEGTTASNAELDNVMITDEEEIRTTNPVATEQYGTVANNLQSSNTAPTTRTVNDQGALPGMVWQDRDVYLQGPIWAKIPHTDGHFHPSPLMGGFGLKHPPPQIMIKNTPVPANPPTTFSPAKFASFITQYSTGQVSVEIEWELQKENSKRWNPEIQYTSNYNKSVNVDFTVDTNGVYSEPRPIGTRYLTRNL

SEQ ID NO: 5128 - protein, 624 aa, Adeno-associated virus 3B
MPGFYEIVLKVPSDLDEHLPGISNSFVNWVAEKEWELPPDSDMDPNLIEQAPLTVAEKLQREFLVEWRRVSKAPEALFFVQFEKGETYFHLHVLIETIGVKSMVVGRYVSQIKEKLVTRIYRGVEPQLPNWFAVTKTRNGAGGGNKVVDDCYIPNYLLPKTQPELQWAWTNMDQYLSACLNLAERKRLVAQHLTHVSQTQEQNKENQNPNSDAPVIRSKTSARYMELVGWLVDRGITSEKQWIQEDQASYISFNAASNSRSQIKAALDNASKIMSLTKTAPDYLVGSNPPEDITKNRIYQILELNGYDPQYAASVFLGWAQKKFGKRNTIWLFGPATTGKTNIAEAIAHAVPFYGCVNWTNENFPFNDCVDKMVIWWEEGKMTAKVVESAKAILGGSKVRVDQKCKSSAQIEPTPVIVTSNTNMCAVIDGNSTTFEHQQPLQDRMFKFELTRRLDHDFGKVTKQEVKDFFRWASDHVTDVAHEFYVRKGGAKKRPASNDADVSEPKRQCTSLAQPTTSDAEAPADYADRYQNKCSRHVGMNLMLFPCKTCERMNQISNVCFTHGQRDCGECFPGMSESQPVSVVKKKTYQKLCPIHHILGRAPEIACSACDLANVDLDDCVSEQ

SEQ ID NO: 5129 - DNA, 4722 bp, Adeno-associated virus 3B
tggccactccctctatgcgcactcgctcgctcggtggggcctggcgaccaaaggtcgccagacggacgtgctttgcacgtccggccccaccgagcgagcgagtgcgcatagagggagtggccaactccatcactagaggtatggcagtgacgtaacgcgaagcgcgcgaagcgagaccacgcctaccagctgcgtcagcagtcaggtgacccttttgcgacagtttgcgacaccacgtggccgctgagggtatatattctcgagtgagcgaaccaggagctccattttgaccgcgaaatttgaacgagcagcagccatgccggggttctacgagattgtcctgaaggtcccgagtgacctggacgagcacctgccgggcatttctaactcgtttgttaactgggtggccgagaaggaatgggagctgccgccggattctgacatggatccgaatctgattgagcaggcacccctgaccgtggccgaaaagcttcagcgcgagttcctggtggagtggcgccgcgtgagtaaggccccggaggccctcttttttgtccagttcgaaaagggggagacctacttccacctgcacgtgctgattgagaccatcggggtcaaatccatggtggtcggccgctacgtgagccagattaaagagaagctggtgacccgcatctaccgcggggtcgagccgcagcttccgaactggttcgcggtgaccaaaacgcgaaatggcgccgggggcgggaacaaggtggtggacgactgctacatccccaactacctgctccccaagacccagcccgagctccagtgggcgtggactaacatggaccagtatttaagcgcctgtttgaatctcgcggagcgtaaacggctggtggcgcagcatctgacgcacgtgtcgcagacgcaggagcagaacaaagagaatcagaaccccaattctgacgcgccggtcatcaggtcaaaaacctcagccaggtacatggagctggtcgggtggctggtggaccgcgggatcacgtcagaaaagcaatggattcaggaggaccaggcctcgtacatctccttcaacgccgcctccaactcgcggtcccagatcaaggccgcgctggacaatgcctccaagatcatgagcctgacaaagacggctccggactacctggtgggcagcaacccgccggaggacattaccaaaaatcggatctaccaaatcctggagctgaacgggtacgatccgcagtacgcggcctccgtcttcctgggctgggcgcaaaagaagttcgggaagaggaacaccatctggctctttgggccggccacgacgggtaaaaccaacatcgcggaagccatcgcccacgccgtgcccttctacggctgcgtaaactggaccaatgagaactttcccttcaacgattgcgtcgacaagatggtgatctggtgggaggagggcaagatgacggccaaggtcgtggagagcgccaaggccattctgggcggaagcaaggtgcgcgtggaccaaaagtgcaagtcatcggcccagatcgaacccactcccgtgatcgtcacctccaacaccaacatgtgcgccgtgattgacgggaacagcaccaccttcgagcatcagcagccgctgcaggaccggatgtttaaatttgaacttacccgccgtttggaccatgactttgggaaggtcaccaaacaggaagtaaaggactttttccggtgggcttccgatcacgtgactgacgtggctcatgagttctacgtcagaaagggtggagctaagaaacgccccgcctccaatgacgcggatgtaagcgagccaaaacggcagtgcacgtcacttgcgcagccgacaacgtcagacgcggaagcaccggcggactacgcggacaggtaccaaaacaaatgttctcgtcacgtgggcatgaatctgatgctttttccctgtaaaacatgcgagagaatgaatcaaatttccaatgtctgttttacgcatggtcaaagagactgtggggaatgcttccctggaatgtcagaatctcaacccgtttctgtcgtcaaaaagaagacttatcagaaactgtgtccaattcatcatatcctgggaagggcacccgagattgcctgttcggcctgcgatttggccaatgtggacttggatgactgtgtttctgagcaataaatgacttaaaccaggtatggctgctgacggttatcttccagattggctcgaggacaacctttctgaaggcattcgtgagtggtgggctctgaaacctggagtccctcaacccaaagcgaaccaacaacaccaggacaaccgtcggggtcttgtgcttccgggttacaaatacctcggacccggtaacggactcgacaaaggagagccggtcaacgaggcggacgcggcagccctcgaacacgacaaagcttacgaccagcagctcaaggccggtgacaacccgtacctcaagtacaaccacgccgacgccgagtttcaggagcgtcttcaagaagatacgtcttttgggggcaaccttggcagagcagtcttccaggccaaaaagaggatccttgagcctcttggtctggttgaggaagcagctaaaacggctcctggaaagaagaggcctgtagatcagtctcctcaggaaccggactcatcatctggtgttggcaaatcgggcaaacagcctgccagaaaaagactaaatttcggtcagactggcgactcagagtcagtcccagaccctcaacctctcggagaaccaccagcagcccccacaagtttgggatctaatacaatggcttcaggcggtggcgcaccaatggcagacaataacgagggtgccgatggagtgggtaattcctcaggaaattggcattgcgattcccaatggctgggcgacagagtcatcaccaccagcaccagaacctgggccctgcccacttacaacaaccatctctacaagcaaatctccagccaatcaggagcttcaaacgacaaccactactttggctacagcaccccttgggggtattttgactttaacagattccactgccacttctcaccacgtgactggcagcgactcattaacaacaactggggattccggcccaagaaactcagcttcaagctcttcaacatccaagttaaagaggtcacgcagaacgatggcacgacgactattgccaataaccttaccagcacggttcaagtgtttacggactcggagtatcagctcccgtacgtgctcgggtcggcgcaccaaggctgtctcccgccgtttccagcggacgtcttcatggtccctcagtatggatacctcaccctgaacaacggaagtcaagcggtgggacgctcatccttttactgcctggagtacttcccttcgcagatgctaaggactggaaataacttccaattcagctataccttcgaggatgtaccttttcacagcagctacgctcacagccagagtttggatcgcttgatgaatcctcttattgatcagtatctgtactacctgaacagaacgcaaggaacaacctctggaacaaccaaccaatcacggctgctttttagccaggctgggcctcagtctatgtctttgcaggccagaaattggctacctgggccctgctaccggcaacagagactttcaaagactgctaacgacaacaacaacagtaactttccttggacagcggccagcaaatatcatctcaatggccgcgactcgctggtgaatccaggaccagctatggccagtcacaaggacgatgaagaaaaatttttccctatgcacggcaatctaatatttggcaaagaagggacaacggcaagtaacgcagaattagataatgtaatgattacggatgaagaagagattcgtaccaccaatcctgtggcaacagagcagtatggaactgtggcaaataacttgcagagctcaaatacagctcccacgactagaactgtcaatgatcagggggccttacctggcatggtgtggcaagatcgtgacgtgtaccttcaaggacctatctgggcaaagattcctcacacggatggacactttcatccttctcctctgatgggaggctttggactgaaacatccgcctcctcaaatcatgatcaaaaatactccggtaccggcaaatcctccgacgactttcagcccggccaagtttgcttcatttatcactcagtactccactggacaggtcagcgtggaaattgagtgggagctacagaaagaaaacagcaaacgttggaatccagagattcagtacacttccaactacaacaagtctgttaatgtggactttactgtagacactaatggtgtttatagtgaacctcgccctattggaacccggtatctcacacgaaacttgtaatcctggttaatcaataaaccgtttaattcgtttcagttgaactttggctcttgtgcacttcttatcttatcttgtttccatggctactgcgtagataagcagcggcctgcggcgcttgcgcttcgcggtttacaactgctggttaatatttaactctcgccatacctctagtgatggagttggccactccctctatgcgcactcgctcgctcggtggggccggacgtgcaaagcacgtccgtctggcgacctttggtcgccaggccccaccgagcgagcgagtgcgcatagagggagtggccaa

SEQ ID NO: 5130 - DNA, 1800 bp, Adeno-associated virus 4
  modified_base (342)..(342): a, c, t or g
acggctcctggaaagaagagaccgttgattgaatccccccagcagcccgactcctccacgggtatcggcaaaaaaggcaagcagccggctaaaaagaagctcgttttcgaagacgaaactggagcaggcgacggaccccctgagggatcaacttccggagccatgtctgatgacagtgagatgcgtgcagcagctggcggagctgcagtcgagggsggacaaggtgccgatggagtgggtaatgcctcgggtgattggcattgcgattccacctggtctgagggccacgtcacgaccaccagcaccagaacctgggtcttgcccacctacaacaaccacctntacaagcgactcggagagagcctgcagtccaacacctacaacggattctccaccccctggggatactttgacttcaaccgcttccactgccacttctcaccacgtgactggcagcgactcatcaacaacaactggggcatgcgacccaaagccatgcgggtcaaaatcttcaacatccaggtcaaggaggtcacgacgtcgaacggcgagacaacggtggctaataaccttaccagcacggttcagatctttgcggactcgtcgtacgaactgccgtacgtgatggatgcgggtcaagagggcagcctgcctccttttcccaacgacgtctttatggtgccccagtacggctactgtggactggtgaccggcaacacttcgcagcaacagactgacagaaatgccttctactgcctggagtactttccttcgcagatgctgcggactggcaacaactttgaaattacgtacagttttgagaaggtgcctttccactcgatgtacgcgcacagccagagcctggaccggctgatgaaccctctcatcgaccagtacctgtggggactgcaatcgaccaccaccggaaccaccctgaatgccgggactgccaccaccaactttaccaagctgcggcctaccaacttttccaactttaaaaagaactggctgcccgggccttcaatcaagcagcagggcttctcaaagactgccaatcaaaactacaagatccctgccaccgggtcagacagtctcatcaaatacgagacgcacagcactctggacggaagatggagtgccctgacccccggacctccaatggccacggctggacctgcggacagcaagttcagcaacagccagctcatctttgcggggcctaaacagaacggcaacacggccaccgtacccgggactctgatcttcacctctgaggaggagctggcagccaccaacgccaccgatacggacatgtggggcaacctacctggcggtgaccagagcaacagcaacctgccgaccgtggacagactgacagccttgggagccgtgcctggaatggtctggcaaaacagagacatttactaccagggtcccatttgggccaagattcctcataccgatggacactttcacccctcaccgctgattggtgggtttgggctgaaacacccgcctcctcaaatttttatcaagaacaccccggtacctgcgaatcctgcaacgaccttcagctctactccggtaaactccttcattactcagtacagcactggccaggtgtcggtgcagattgactgggagatccagaaggagcggtccaaacgctggaaccccgaggtccagtttacctccaactacggacagcaaaactctctgttgtgggctcccgatgcggctgggaaatacactgagcctagggctatcggtacccgctacctcacccaccacctgtaataa

SEQ ID NO: 5131 - DNA, 2208 bp, Adeno-associated virus 4
  modified_base (750)..(750): a, c, t or g
atgactgacggttaccttccagattggctagaggacaacctctctgaaggcgttcgagagtggtgggcgctgcaacctggagcccctaaacccaaggcaaatcaacaacatcaggacaacgctcggggtcttgtgcttccgggttacaaatacctcggacccggcaacggactcgacaagggggaacccgtcaacgcagcggacgcggcagccctcgagcacgacaaggcctacgaccagcagctcaaggccggtgacaacccctacctcaagtacaaccacgccgacgcggagttccagcagcggcttcagggcgacacatcgtttgggggcaacctcggcagagcagtcttccaggccaaaaagagggttcttgaacctcttggtctggttgagcaagcgggtgagacggctcctggaaagaagagaccgttgattgaatccccccagcagcccgactcctccacgggtatcggcaaaaaaggcaagcagccggctaaaaagaagctcgttttcgaagacgaaactggagcaggcgacggaccccctgagggatcaacttccggagccatgtctgatgacagtgagatgcgtgcagcagctggcggagctgcagtcgagggsggacaaggtgccgatggagtgggtaatgcctcgggtgattggcattgcgattccacctggtctgagggccacgtcacgaccaccagcaccagaacctgggtcttgcccacctacaacaaccacctntacaagcgactcggagagagcctgcagtccaacacctacaacggattctccaccccctggggatactttgacttcaaccgcttccactgccacttctcaccacgtgactggcagcgactcatcaacaacaactggggcatgcgacccaaagccatgcgggtcaaaatcttcaacatccaggtcaaggaggtcacgacgtcgaacggcgagacaacggtggctaataaccttaccagcacggttcagatctttgcggactcgtcgtacgaactgccgtacgtgatggatgcgggtcaagagggcagcctgcctccttttcccaacgacgtctttatggtgccccagtacggctactgtggactggtgaccggcaacacttcgcagcaacagactgacagaaatgccttctactgcctggagtactttccttcgcagatgctgcggactggcaacaactttgaaattacgtacagttttgagaaggtgcctttccactcgatgtacgcgcacagccagagcctggaccggctgatgaaccctctcatcgaccagtacctgtggggactgcaatcgaccaccaccggaaccaccctgaatgccgggactgccaccaccaactttaccaagctgcggcctaccaacttttccaactttaaaaagaactggctgcccgggccttcaatcaagcagcagggcttctcaaagactgccaatcaaaactacaagatccctgccaccgggtcagacagtctcatcaaatacgagacgcacagcactctggacggaagatggagtgccctgacccccggacctccaatggccacggctggacctgcggacagcaagttcagcaacagccagctcatctttgcggggcctaaacagaacggcaacacggccaccgtacccgggactctgatcttcacctctgaggaggagctggcagccaccaacgccaccgatacggacatgtggggcaacctacctggcggtgaccagagcaacagcaacctgccgaccgtggacagactgacagccttgggagccgtgcctggaatggtctggcaaaacagagacatttactaccagggtcccatttgggccaagattcctcataccgatggacactttcacccctcaccgctgattggtgggtttgggctgaaacacccgcctcctcaaatttttatcaagaacaccccggtacctgcgaatcctgcaacgaccttcagctctactccggtaaactccttcattactcagtacagcactggccaggtgtcggtgcagattgactgggagatccagaaggagcggtccaaacgctggaaccccgaggtccagtttacctccaactacggacagcaaaactctctgttgtgggctcccgatgcggctgggaaatacactgagcctagggctatcggtacccgctacctcacccaccacctgtaataa

SEQ ID NO: 5132 - DNA, 1872 bp, Adeno-associated virus 4
atgccggggttctacgagatcgtgctgaaggtgcccagcgacctggacgagcacctgcccggcatttctgactcttttgtgagctgggtggccgagaaggaatgggagctgccgccggattctgacatggacttgaatctgattgagcaggcacccctgaccgtggccgaaaagctgcaacgcgagttcctggtcgagtggcgccgcgtgagtaaggccccggaggccctcttctttgtccagttcgagaagggggacagctacttccacctgcacatcctggtggagaccgtgggcgtcaaatccatggtggtgggccgctacgtgagccagattaaagagaagctggtgacccgcatctaccgcggggtcgagccgcagcttccgaactggttcgcggtgaccaagacgcgtaatggcgccggaggcgggaacaaggtggtggacgactgctacatccccaactacctgctccccaagacccagcccgagctccagtgggcgtggactaacatggaccagtatataagcgcctgtttgaatctcgcggagcgtaaacggctggtggcgcagcatctgacgcacgtgtcgcagacgcaggagcagaacaaggaaaaccagaaccccaattctgacgcgccggtcatcaggtcaaaaacctccgccaggtacatggagctggtcgggtggctggtggaccgcgggatcacgtcagaaaagcaatggatccaggaggaccaggcgtcctacatctccttcaacgccgcctccaactcgcggtcacaaatcaaggccgcgctggacaatgcctccaaaatcatgagcctgacaaagacggctccggactacctggtgggccagaacccgccggaggacatttccagcaaccgcatctaccgaatcctcgagatgaacgggtacgatccgcagtacgcggcctccgtcttcctgggctgggcgcaaaagaagttcgggaagaggaacaccatctggctctttgggccggccacgacgggtaaaaccaacatcgcggaagccatcgcccacgccgtgcccttctacggctgcgtgaactggaccaatgagaactttccgttcaacgattgcgtcgacaagatggtgatctggtgggaggagggcaagatgacggccaaggtcgtagagagcgccaaggccatcctgggcggaagcaaggtgcgcgtggaccaaaagtgcaagtcatcggcccagatcgacccaactcccgtgatcgtcacctccaacaccaacatgtgcgcggtcatcgacggaaactcgaccaccttcgagcaccaacaaccactccaggaccggatgttcaagttcgagctcaccaagcgcctggagcacgactttggcaaggtcaccaagcaggaagtcaaagactttttccggtgggcgtcagatcacgtgaccgaggtgactcacgagttttacgtcagaaagggtggagctagaaagaggcccgcccccaatgacgcagatataagtgagcccaagcgggcctgtccgtcagttgcgcagccatcgacgtcagacgcggaagctccggtggactacgcggacaggtaccaaaacaaatgttctcgtcacgtgggtatgaatctgatgctttttccctgccggcaatgcgagagaatgaatcagaatgtggacatttgcttcacgcacggggtcatggactgtgccgagtgcttccccgtgtcagaatctcaacccgtgtctgtcgtcagaaagcggacgtatcagaaactgtgtccgattcatcacatcatggggagggcgcccgaggtggcctgctcggcctgcgaactggccaatgtggacttggatgactgtgacatggaacaataa

SEQ ID NO: 5133 - DNA, 1611 bp, Adeno-associated virus 4
atgccggggttctacgagatcgtgctgaaggtgcccagcgacctggacgagcacctgcccggcatttctgactcttttgtgagctgggtggccgagaaggaatgggagctgccgccggattctgacatggacttgaatctgattgagcaggcacccctgaccgtggccgaaaagctgcaacgcgagttcctggtcgagtggcgccgcgtgagtaaggccccggaggccctcttctttgtccagttcgagaagggggacagctacttccacctgcacatcctggtggagaccgtgggcgtcaaatccatggtggtgggccgctacgtgagccagattaaagagaagctggtgacccgcatctaccgcggggtcgagccgcagcttccgaactggttcgcggtgaccaagacgcgtaatggcgccggaggcgggaacaaggtggtggacgactgctacatccccaactacctgctccccaagacccagcccgagctccagtgggcgtggactaacatggaccagtatataagcgcctgtttgaatctcgcggagcgtaaacggctggtggcgcagcatctgacgcacgtgtcgcagacgcaggagcagaacaaggaaaaccagaaccccaattctgacgcgccggtcatcaggtcaaaaacctccgccaggtacatggagctggtcgggtggctggtggaccgcgggatcacgtcagaaaagcaatggatccaggaggaccaggcgtcctacatctccttcaacgccgcctccaactcgcggtcacaaatcaaggccgcgctggacaatgcctccaaaatcatgagcctgacaaagacggctccggactacctggtgggccagaacccgccggaggacatttccagcaaccgcatctaccgaatcctcgagatgaacgggtacgatccgcagtacgcggcctccgtcttcctgggctgggcgcaaaagaagttcgggaagaggaacaccatctggctctttgggccggccacgacgggtaaaaccaacatcgcggaagccatcgcccacgccgtgcccttctacggctgcgtgaactggaccaatgagaactttccgttcaacgattgcgtcgacaagatggtgatctggtgggaggagggcaagatgacggccaaggtcgtagagagcgccaaggccatcctgggcggaagcaaggtgcgcgtggaccaaaagtgcaagtcatcggcccagatcgacccaactcccgtgatcgtcacctccaacaccaacatgtgcgcggtcatcgacggaaactcgaccaccttcgagcaccaacaaccactccaggaccggatgttcaagttcgagctcaccaagcgcctggagcacgactttggcaaggtcaccaagcaggaagtcaaagactttttccggtgggcgtcagatcacgtgaccgaggtgactcacgagttttacgtcagaaagggtggagctagaaagaggcccgcccccaatgacgcagatataagtgagcccaagcgggcctgtccgtcagttgcgcagccatcgacgtcagacgcggaagctccggtggactacgcggacagattggctagaggacaacctctctga

SEQ ID NO: 5134 - DNA, 1872 bp, Adeno-associated virus 4; identical to SEQ ID NO: 5132

SEQ ID NO: 5135 - DNA, 1617 bp, Adeno-associated virus 4
  modified_base (162)..(162): a, c, t or g
atgcgtgcagcagctggcggagctgcagtcgagggsggacaaggtgccgatggagtgggtaatgcctcgggtgattggcattgcgattccacctggtctgagggccacgtcacgaccaccagcaccagaacctgggtcttgcccacctacaacaaccacctntacaagcgactcggagagagcctgcagtccaacacctacaacggattctccaccccctggggatactttgacttcaaccgcttccactgccacttctcaccacgtgactggcagcgactcatcaacaacaactggggcatgcgacccaaagccatgcgggtcaaaatcttcaacatccaggtcaaggaggtcacgacgtcgaacggcgagacaacggtggctaataaccttaccagcacggttcagatctttgcggactcgtcgtacgaactgccgtacgtgatggatgcgggtcaagagggcagcctgcctccttttcccaacgacgtctttatggtgccccagtacggctactgtggactggtgaccggcaacacttcgcagcaacagactgacagaaatgccttctactgcctggagtactttccttcgcagatgctgcggactggcaacaactttgaaattacgtacagttttgagaaggtgcctttccactcgatgtacgcgcacagccagagcctggaccggctgatgaaccctctcatcgaccagtacctgtggggactgcaatcgaccaccaccggaaccaccctgaatgccgggactgccaccaccaactttaccaagctgcggcctaccaacttttccaactttaaaaagaactggctgcccgggccttcaatcaagcagcagggcttctcaaagactgccaatcaaaactacaagatccctgccaccgggtcagacagtctcatcaaatacgagacgcacagcactctggacggaagatggagtgccctgacccccggacctccaatggccacggctggacctgcggacagcaagttcagcaacagccagctcatctttgcggggcctaaacagaacggcaacacggccaccgtacccgggactctgatcttcacctctgaggaggagctggcagccaccaacgccaccgatacggacatgtggggcaacctacctggcggtgaccagagcaacagcaacctgccgaccgtggacagactgacagccttgggagccgtgcctggaatggtctggcaaaacagagacatttactaccagggtcccatttgggccaagattcctcataccgatggacactttcacccctcaccgctgattggtgggtttgggctgaaacacccgcctcctcaaatttttatcaagaacaccccggtacctgcgaatcctgcaacgaccttcagctctactccggtaaactccttcattactcagtacagcactggccaggtgtcggtgcagattgactgggagatccagaaggagcggtccaaacgctggaaccccgaggtccagtttacctccaactacggacagcaaaactctctgttgtgggctcccgatgcggctgggaaatacactgagcctagggctatcggtacccgctacctcacccaccacctgtaa

SEQ ID NO: 5136 - DNA, 939 bp, Adeno-associated virus 4
atggagctggtcgggtggctggtggaccgcgggatcacgtcagaaaagcaatggatccaggaggaccaggcgtcctacatctccttcaacgccgcctccaactcgcggtcacaaatcaaggccgcgctggacaatgcctccaaaatcatgagcctgacaaagacggctccggactacctggtgggccagaacccgccggaggacatttccagcaaccgcatctaccgaatcctcgagatgaacgggtacgatccgcagtacgcggcctccgtcttcctgggctgggcgcaaaagaagttcgggaagaggaacaccatctggctctttgggccggccacgacgggtaaaaccaacatcgcggaagccatcgcccacgccgtgcccttctacggctgcgtgaactggaccaatgagaactttccgttcaacgattgcgtcgacaagatggtgatctggtgggaggagggcaagatgacggccaaggtcgtagagagcgccaaggccatcctgggcggaagcaaggtgcgcgtggaccaaaagtgcaagtcatcggcccagatcgacccaactcccgtgatcgtcacctccaacaccaacatgtgcgcggtcatcgacggaaactcgaccaccttcgagcaccaacaaccactccaggaccggatgttcaagttcgagctcaccaagcgcctggagcacgactttggcaaggtcaccaagcaggaagtcaaagactttttccggtgggcgtcagatcacgtgaccgaggtgactcacgagttttacgtcagaaagggtggagctagaaagaggcccgcccccaatgacgcagatataagtgagcccaagcgggcctgtccgtcagttgcgcagccatcgacgtcagacgcggaagctccggtggactacgcggacagattggctagaggacaacctctctga

SEQ ID NO: 5137 - DNA, 1197 bp, Adeno-associated virus 4
atggagctggtcgggtggctggtggaccgcgggatcacgtcagaaaagcaatggatccaggaggaccaggcgtcctacatctccttcaacgccgcctccaactcgcggtcacaaatcaaggccgcgctggacaatgcctccaaaatcatgagcctgacaaagacggctccggactacctggtgggccagaacccgccggaggacatttccagcaaccgcatctaccgaatcctcgagatgaacgggtacgatccgcagtacgcggcctccgtcttcctgggctgggcgcaaaagaagttcgggaagaggaacaccatctggctctttgggccggccacgacgggtaaaaccaacatcgcggaagccatcgcccacgccgtgcccttctacggctgcgtgaactggaccaatgagaactttccgttcaacgattgcgtcgacaagatggtgatctggtgggaggagggcaagatgacggccaaggtcgtagagagcgccaaggccatcctgggcggaagcaaggtgcgcgtggaccaaaagtgcaagtcatcggcccagatcgacccaactcccgtgatcgtcacctccaacaccaacatgtgcgcggtcatcgacggaaactcgaccaccttcgagcaccaacaaccactccaggaccggatgttcaagttcgagctcaccaagcgcctggagcacgactttggcaaggtcaccaagcaggaagtcaaagactttttccggtgggcgtcagatcacgtgaccgaggtgactcacgagttttacgtcagaaagggtggagctagaaagaggcccgcccccaatgacgcagatataagtgagcccaagcgggcctgtccgtcagttgcgcagccatcgacgtcagacgcggaagctccggtggactacgcggacaggtaccaaaacaaatgttctcgtcacgtgggtatgaatctgatgctttttccctgccggcaatgcgagagaatgaatcagaatgtggacatttgcttcacgcacggggtcatggactgtgccgagtgcttccccgtgtcagaatctcaacccgtgtctgtcgtcagaaagcggacgtatcagaaactgtgtccgattcatcacatcatggggagggcgcccgaggtggcctgctcggcctgcgaactggccaatgtggacttggatgactgtgacatggaacaa

SEQ ID NO: 5138 - DNA, 245 bp, Adeno-associated virus 4
ctccatcatctaggtttgcccactgacgtcaatgtgacgtcctagggttagggaggtccctgtattagcagtcacgtgagtgtcgtatttcgcggagcgtagcggagcgcataccaagctgccacgtcacagccacgtggtccgtttgcgacagtttgcgacaccatgtggtcaggagggtatataaccgcgagtgagccagcgaggagctccattttgcccgcgaattttgaacgagcagcagc

SEQ ID NO: 5139 - protein, 313 aa, Adeno-associated virus 4
  MOD_RES (313)..(313): Any amino acid
MELVGWLVDRGITSEKQWIQEDQASYISFNAASNSRSQIKAALDNASKIMSLTKTAPDYLVGQNPPEDISSNRIYRILEMNGYDPQYAASVFLGWAQKKFGKRNTIWLFGPATTGKTNIAEAIAHAVPFYGCVNWTNENFPFNDCVDKMVIWWEEGKMTAKVVESAKAILGGSKVRVDQKCKSSAQIDPTPVIVTSNTNMCAVIDGNSTTFEHQQPLQDRMFKFELTKRLEHDFGKVTKQEVKDFFRWASDHVTEVTHEFYVRKGGARKRPAPNDADISEPKRACPSVAQPSTSDAEAPVDYADRLARGQPLX

SEQ ID NO: 5140 - protein, 399 aa, Adeno-associated virus 4
MELVGWLVDRGITSEKQWIQEDQASYISFNAASNSRSQIKAALDNASKIMSLTKTAPDYLVGQNPPEDISSNRIYRILEMNGYDPQYAASVFLGWAQKKFGKRNTIWLFGPATTGKTNIAEAIAHAVPFYGCVNWTNENFPFNDCVDKMVIWWEEGKMTAKVVESAKAILGGSKVRVDQKCKSSAQIDPTPVIVTSNTNMCAVIDGNSTTFEHQQPLQDRMFKFELTKRLEHDFGKVTKQEVKDFFRWASDHVTEVTHEFYVRKGGARKRPAPNDADISEPKRACPSVAQPSTSDAEAPVDYADRYQNKCSRHVGMNLMLFPCRQCERMNQNVDICFTHGVMDCAECFPVSESQPVSVVRKRTYQKLCPIHHIMGRAPEVACSACELANVDLDDCDMEQ

SEQ ID NO: 5141 - protein, 623 aa, Adeno-associated virus 4
MPGFYEIVLKVPSDLDEHLPGISDSFVSWVAEKEWELPPDSDMDLNLIEQAPLTVAEKLQREFLVEWRRVSKAPEALFFVQFEKGDSYFHLHILVETVGVKSMVVGRYVSQIKEKLVTRIYRGVEPQLPNWFAVTKTRNGAGGGNKVVDDCYIPNYLLPKTQPELQWAWTNMDQYISACLNLAERKRLVAQHLTHVSQTQEQNKENQNPNSDAPVIRSKTSARYMELVGWLVDRGITSEKQWIQEDQASYISFNAASNSRSQIKAALDNASKIMSLTKTAPDYLVGQNPPEDISSNRIYRILEMNGYDPQYAASVFLGWAQKKFGKRNTIWLFGPATTGKTNIAEAIAHAVPFYGCVNWTNENFPFNDCVDKMVIWWEEGKMTAKVVESAKAILGGSKVRVDQKCKSSAQIDPTPVIVTSNTNMCAVIDGNSTTFEHQQPLQDRMFKFELTKRLEHDFGKVTKQEVKDFFRWASDHVTEVTHEFYVRKGGARKRPAPNDADISEPKRACPSVAQPSTSDAEAPVDYADRYQNKCSRHVGMNLMLFPCRQCERMNQNVDICFTHGVMDCAECFPVSESQPVSVVRKRTYQKLCPIHHIMGRAPEVACSACELANVDLDDCDMEQ

SEQ ID NO: 5142 - protein, 537 aa, Adeno-associated virus 4
  MOD_RES (537)..(537): Any amino acid
MPGFYEIVLKVPSDLDEHLPGISDSFVSWVAEKEWELPPDSDMDLNLIEQAPLTVAEKLQREFLVEWRRVSKAPEALFFVQFEKGDSYFHLHILVETVGVKSMVVGRYVSQIKEKLVTRIYRGVEPQLPNWFAVTKTRNGAGGGNKVVDDCYIPNYLLPKTQPELQWAWTNMDQYISACLNLAERKRLVAQHLTHVSQTQEQNKENQNPNSDAPVIRSKTSARYMELVGWLVDRGITSEKQWIQEDQASYISFNAASNSRSQIKAALDNASKIMSLTKTAPDYLVGQNPPEDISSNRIYRILEMNGYDPQYAASVFLGWAQKKFGKRNTIWLFGPATTGKTNIAEAIAHAVPFYGCVNWTNENFPFNDCVDKMVIWWEEGKMTAKVVESAKAILGGSKVRVDQKCKSSAQIDPTPVIVTSNTNMCAVIDGNSTTFEHQQPLQDRMFKFELTKRLEHDFGKVTKQEVKDFFRWASDHVTEVTHEFYVRKGGARKRPAPNDADISEPKRACPSVAQPSTSDAEAPVDYADRLARGQPLX

SEQ ID NO: 5143 - protein, 623 aa, Adeno-associated virus 4; identical to SEQ ID NO: 5141

SEQ ID NO: 5144 - protein, 544 aa, Adeno-associated virus 4
MSDDSEMRAAAGGAAVEGGQGADGVGNASGDWHCDSTWSEGHVTTTSTRTWVLPTYNNHLYKRLGESLQSNTYNGFSTPWGYFDFNRFHCHFSPRDWQRLINNNWGMRPKAMRVKIFNIQVKEVTTSNGETTVANNLTSTVQIFADSSYELPYVMDAGQEGSLPPFPNDVFMVPQYGYCGLVTGNTSQQQTDRNAFYCLEYFPSQMLRTGNNFEITYSFEKVPFHSMYAHSQSLDRLMNPLIDQYLWGLQSTTTGTTLNAGTATTNFTKLRPTNFSNFKKNWLPGPSIKQQGFSKTANQNYKIPATGSDSLIKYETHSTLDGRWSALTPGPPMATAGPADSKFSNSQLIFAGPKQNGNTATVPGTLIFTSEEELAATNATDTDMWGNLPGGDQSNSNLPTVDRLTALGAVPGMVWQNRDIYYQGPIWAKIPHTDGHFHPSPLIGGFGLKHPPPQIFIKNTPVPANPATTFSSTPVNSFITQYSTGQVSVQIDWEIQKERSKRWNPEVQFTSNYGQQNSLLWAPDAAGKYTEPRAIGTRYLTHHL

SEQ ID NO: 5145 - protein, 734 aa, Adeno-associated virus 4; identical to SEQ ID NO: 4791

SEQ ID NO: 5146 - protein, 598 aa, Adeno-associated virus 4
TAPGKKRPLIESPQQPDSSTGIGKKGKQPAKKKLVFEDETGAGDGPPEGSTSGAMSDDSEMRAAAGGAAVEGGQGADGVGNASGDWHCDSTWSEGHVTTTSTRTWVLPTYNNHLYKRLGESLQSNTYNGFSTPWGYFDFNRFHCHFSPRDWQRLINNNWGMRPKAMRVKIFNIQVKEVTTSNGETTVANNLTSTVQIFADSSYELPYVMDAGQEGSLPPFPNDVFMVPQYGYCGLVTGNTSQQQTDRNAFYCLEYFPSQMLRTGNNFEITYSFEKVPFHSMYAHSQSLDRLMNPLIDQYLWGLQSTTTGTTLNAGTATTNFTKLRPTNFSNFKKNWLPGPSIKQQGFSKTANQNYKIPATGSDSLIKYETHSTLDGRWSALTPGPPMATAGPADSKFSNSQLIFAGPKQNGNTATVPGTLIFTSEEELAATNATDTDMWGNLPGGDQSNSNLPTVDRLTALGAVPGMVWQNRDIYYQGPIWAKIPHTDGHFHPSPLIGGFGLKHPPPQIFIKNTPVPANPATTFSSTPVNSFITQYSTGQVSVQIDWEIQKERSKRWNPEVQFTSNYGQQNSLLWAPDAAGKYTEPRAIGTRYLTHHL

SEQ ID NO: 5147 - DNA, 129 bp, Adeno-associated virus 4
ttggccactccctctatgcgcgctcgctcactcactcggccctgcggccagaggccggcagtctggagacctttggtgtccagggcagggccgagtgagtgagcgagcgcgcatagagggagtggccaa

SEQ ID NO: 5148 - DNA, 125 bp, Adeno-associated virus 4
ttggccactccctctatgcgcgctcgctcactcactcggccctggagaccaaaggtctccagactgccggcctctggccggcagggccgagtgagtgagcgagcgcgcatagagggagtggccaa

SEQ ID NO: 5149 - DNA, 4768 bp, Adeno-associated virus 4
  modified_base (3009)..(3009): a, c, t or g
ttggccactccctctatgcgcgctcgctcactcactcggccctggagaccaaaggtctccagactgccggcctctggccggcagggccgagtgagtgagcgagcgcgcatagagggagtggccaactccatcatctaggtttgcccactgacgtcaatgtgacgtcctagggttagggaggtccctgtattagcagtcacgtgagtgtcgtatttcgcggagcgtagcggagcgcataccaagctgccacgtcacagccacgtggtccgtttgcgacagtttgcgacaccatgtggtcaggagggtatataaccgcgagtgagccagcgaggagctccattttgcccgcgaattttgaacgagcagcagccatgccggggttctacgagatcgtgctgaaggtgcccagcgacctggacgagcacctgcccggcatttctgactcttttgtgagctgggtggccgagaaggaatgggagctgccgccggattctgacatggacttgaatctgattgagcaggcacccctgaccgtggccgaaaagctgcaacgcgagttcctggtcgagtggcgccgcgtgagtaaggccccggaggccctcttctttgtccagttcgagaagggggacagctacttccacctgcacatcctggtggagaccgtgggcgtcaaatccatggtggtgggccgctacgtgagccagattaaagagaagctggtgacccgcatctaccgcggggtcgagccgcagcttccgaactggttcgcggtgaccaagacgcgtaatggcgccggaggcgggaacaaggtggtggacgactgctacatccccaactacctgctccccaagacccagcccgagctccagtgggcgtggactaacatggaccagtatataagcgcctgtttgaatctcgcggagcgtaaacggctggtggcgcagcatctgacgcacgtgtcgcagacgcaggagcagaacaaggaaaaccagaaccccaattctgacgcgccggtcatcaggtcaaaaacctccgccaggtacatggagctggtcgggtggctggtggaccgcgggatcacgtcagaaaagcaatggatccaggaggaccaggcgtcctacatctccttcaacgccgcctccaactcgcggtcacaaatcaaggccgcgctggacaatgcctccaaaatcatgagcctgacaaagacggctccggactacctggtgggccagaacccgccggaggacatttccagcaaccgcatctaccgaatcctcgagatgaacgggtacgatccgcagtacgcggcctccgtcttcctgggctgggcgcaaaagaagttcgggaagaggaacaccatctggctctttgggccggccacgacgggtaaaaccaacatcgcggaagccatcgcccacgccgtgcccttctacggctgcgtgaactggaccaatgagaactttccgttcaacgattgcgtcgacaagatggtgatctggtgggaggagggcaagatgacggccaaggtcgtagagagcgccaaggccatcctgggcggaagcaaggtgcgcgtggaccaaaagtgcaagtcatcggcccagatcgacccaactcccgtgatcgtcacctccaacaccaacatgtgcgcggtcatcgacggaaactcgaccaccttcgagcaccaacaaccactccaggaccggatgttcaagttcgagctcaccaagcgcctggagcacgactttggcaaggtcaccaagcaggaagtcaaagactttttccggtgggcgtcagatcacgtgaccgaggtgactcacgagttttacgtcagaaagggtggagctagaaagaggcccgcccccaatgacgcagatataagtgagcccaagcgggcctgtccgtcagttgcgcagccatcgacgtcagacgcggaagctccggtggactacgcggacaggtaccaaaacaaatgttctcgtcacgtgggtatgaatctgatgctttttccctgccggcaatgcgagagaatgaatcagaatgtggacatttgcttcacgcacggggtcatggactgtgccgagtgcttccccgtgtcagaatctcaacccgtgtctgtcgtcagaaagcggacgtatcagaaactgtgtccgattcatcacatcatggggagggcgcccgaggtggcctgctcggcctgcgaactggccaatgtggacttggatgactgtgacatggaacaataaatgactcaaaccagatatgactgacggttaccttccagattggctagaggacaacctctctgaaggcgttcgagagtggtgggcgctgcaacctggagcccctaaacccaaggcaaatcaacaacatcaggacaacgctcggggtcttgtgcttccgggttacaaatacctcggacccggcaacggactcgacaagggggaacccgtcaacgcagcggacgcggcagccctcgagcacgacaaggcctacgaccagcagctcaaggccggtgacaacccctacctcaagtacaaccacgccgacgcggagttccagcagcggcttcagggcgacacaccgtttgggggcaacctcggcagagcagtcttccaggccaaaaagagggttcttgaacctcttggtctggttgagcaagcgggtgagacggctcctggaaagaagagaccgttgattgaatccccccagcagcccgactcctccacgggtatcggcaaaaaaggcaagcagccggctaaaaagaagctcgttttcgaagacgaaactggagcaggcgacggaccccctgagggatcaacttccggagccatgtctgatgacagtgagatgcgtgcagcagctggcggagctgcagtcgagggsggacaaggtgccgatggagtgggtaatgcctcgggtgattggcattgcgattccacctggtctgagggccacgtcacgaccaccagcaccagaacctgggtcttgcccacctacaacaaccacctntacaagcgactcggagagagcctgcagtccaacacctacaacggattctccaccccctggggatactttgacttcaaccgcttccactgccacttctcaccacgtgactggcagcgactcatcaacaacaactggggcatgcgacccaaagccatgcgggtcaaaatcttcaacatccaggtcaaggaggtcacgacgtcgaacggcgagacaacggtggctaataaccttaccagcacggttcagatctttgcggactcgtcgtacgaactgccgtacgtgatggatgcgggtcaagagggcagcctgcctccttttcccaacgacgtctttatggtgccccagtacggctactgtggactggtgaccggcaacacttcgcagcaacagactgacagaaatgccttctactgcctggagtactttccttcgcagatgctgcggactggcaacaactttgaaattacgtacagttttgagaaggtgcctttccactcgatgtacgcgcacagccagagcctggaccggctgatgaaccctctcatcgaccagtacctgtggggactgcaatcgaccaccaccggaaccaccctgaatgccgggactgccaccaccaactttaccaagctgcggcctaccaacttttccaactttaaaaagaactggctgcccgggccttcaatcaagcagcagggcttctcaaagactgccaatcaaaactacaagatccctgccaccgggtcagacagtctcatcaaatacgagacgcacagcactctggacggaagatggagtgccctgacccccggacctccaatggccacggctggacctgcggacagcaagttcagcaacagccagctcatctttgcggggcctaaacagaacggcaacacggccaccgtacccgggactctgatcttcacctctgaggaggagctggcagccaccaacgccaccgatacggacatgtggggcaacctacctggcggtgaccagagcaacagcaacctgccgaccgtggacagactgacagccttgggagccgtgcctggaatggtctggcaaaacagagacatttactaccagggtcccatttgggccaagattcctcataccgatggacactttcacccctcaccgctgattggtgggtttgggctgaaacacccgcctcctcaaatttttatcaagaacaccccggtacctgcgaatcctgcaacgaccttcagctctactccggtaaactccttcattactcagtacagcactggccaggtgtcggtgcagattgactgggagatccagaaggagcggtccaaacgctggaaccccgaggtccagtttacctccaactacggacagcaaaactctctgttgtgggctcccgatgcggctgggaaatacactgagcctagggctatcggtacccgctacctcacccaccacctgtaataacctgttaatcaataaaccggtttattcgtttcagttgaactttggtctccgtgtccttcttatcttatctcgtttccatggctactgcgtacataagcagcggcctgcggcgcttgcgcttcgcggtttacaactgccggttaatcagtaacttctggcaaaccatgatgatggagttggccactccctctatgcgcgctcgctcactcactcggccctggagaccaaaggtctccagactgccggcctctggccggcagggccgagtgagtgagcgagcgcgcatagagggagtggccaa

SEQ ID NO: 5150 - protein, 725 aa, Adeno-associated virus 5
MAADGYLPDWLEDTLSEGIRQWWKLKPGPPPPKPAERHKDDSRGLVLPGYKYLGPFNGLDKGEPVNEADAAALEHDKAYDRQLDSGDNPYLKYNHADAEFQERLKEDTSFGGNLGRAVFQAKKRVLEPFGLVEEGAKTAPTGKRIDDHFPKRKKARTEEDSKPSTSSDAEAGPSGSQQLQIPAQPASSLGADTMSAGGGGPLGDNNQGADGVGNASGDWHCDSTWMGDRVVTKSTRTWVLPSYNNHQYREIKSGSVDGSNANAYFGYSTPWGYFDFNRFHSHWSPRDWQRLINNYWGFRPRSLRVKIFNIQVKEVTVQDSTTTIANNLTSTVQVFTDDDYQLPYVVGNGTEGCLPAFPPQVFTLPQYGYATLNRDNTENPTERSSFFCLEYFPSKMLRTGNNFEFTYNFEEVPFHSSFAPSQNLFKLANPLVDQYLYRFVSTNNTGGVQFNKNLAGRYANTYKNWFPGPMGRTQGWNLGSGVNRASVSAFATTNRMELEGASYQVPPQPNGMTNNLQGSNTYALENTMIFNSQPANPGTTATYLEGNMLITSESETQPVNRVAYNVGGQMATNNQSSTTAPTTGTYNLQEIVPGSVWMERDVYLQGPIWAKIPETGAHFHPSPAMGGFGLKHPPPMMLIKNTPVPGNITSFSDVPVSSFITQYSTGQVTVEMEWELKKENSKRWNPEIQYTNNYNDPQFVDFAPDSTGEYRTTRPIGTRYLTRPL

SEQ ID NO: 5151 - protein, 724 aa, Adeno-associated virus 5
MSFVDHPPDWLEEVGEGLREFLGLEAGPPKPKPNQQHQDQARGLVLPGYNYLGPGNGLDRGEPVNRADEVAREHDISYNEQLEAGDNPYLKYNHADAEFQEKLADDTSFGGNLGKAVFQAKKRVLEPFGLVEEGAKTAPTGKRIDDHFPKRKKARTEEDSKPSTSSDAEAGPSGSQQLQIPAQPASSLGADTMSAGGGGPLGDNNQGADGVGNASGDWHCDSTWMGDRVVTKSTRTWVLPSYNNHQYREIKSGSVDGSNANAYFGYSTPWGYFDFNRFHSHWSPRDWQRLINNYWGFRPRSLRVKIFNIQVKEVTVQDSTTTIANNLTSTVQVFTDDDYQLPYVVGNGTEGCLPAFPPQVFTLPQYGYATLNRDNTENPTERSSFFCLEYFPSKMLRTGNNFEFTYNFEEVPFHSSFAPSQNLFKLANPLVDQYLYRFVSTNNTGGVQFNKNLAGRYANTYKNWFPGPMGRTQGWNLGSGVNRASVSAFATTNRMELEGASYQVPPQPNGMTNNLQGSNTYALENTMIFNSQPANPGTTATYLEGNMLITSESETQPVNRVAYNVGGQMATNNQSSTTAPATGTYNLQEIVPGSVWMERDVYLQGPIWAKIPETGAHFHPSPAMGGFGLKHPPPMMLIKNTPVPGNITSFSDVPVSSFITQYSTGQVTVEMEWELKKENSKRWNPEIQYTNNYNDPQFVDFAPDSTGEYRTTRPIGTRYLTRPL

SEQ ID NO: 5152 - DNA, 2175 bp, Adeno-associated virus 5
atgtcttttgttgatcaccctccagattggttggaagaagttggtgaaggtcttcgcgagtttttgggccttgaagcgggcccaccgaaaccaaaacccaatcagcagcatcaagatcaagcccgtggtcttgtgctgcctggttataactatctcggacccggaaacggtctcgatcgaggagagcctgtcaacagggcagacgaggtcgcgcgagagcacgacatctcgtacaacgagcagcttgaggcgggagacaacccctacctcaagtacaaccacgcggacgccgagtttcaggagaagctcgccgacgacacatccttcgggggaaacctcggaaaggcagtctttcaggccaagaaaagggttctcgaaccttttggcctggttgaagagggtgctaagacggcccctaccggaaagcggatagacgaccactttccaaaaagaaagaaggctcggaccgaagaggactccaagccttccacctcgtcagacgccgaagctggacccagcggatcccagcagctgcaaatcccagcccaaccagcctcaagtttgggagctgatacaatgtctgcgggaggtggcggcccattgggcgacaataaccaaggtgccgatggagtgggcaatgcctcgggagattggcattgcgattccacgtggatgggggacagagtcgtcaccaagtccacccgaacctgggtgctgcccagctacaacaaccaccagtaccgagagatcaaaagcggctccgtcgacggaagcaacgccaacgcctactttggatacagcaccccctgggggtactttgactttaaccgcttccacagccactggagcccccgagactggcaaagactcatcaacaactactggggcttcagaccccggtccctcagagtcaaaatcttcaacattcaagtcaaagaggtcacggtgcaggactccaccaccaccatcgccaacaacctcacctccaccgtccaagtgtttacggacgacgactaccagctgccctacgtcgtcggcaacgggaccgagggatgcctgccggccttccctccgcaggtctttacgctgccgcagtacggttacgcgacgctgaaccgcgacaacacagaaaatcccaccgagaggagcagcttcttctgcctagagtactttcccagcaagatgctgagaacgggcaacaactttgagtttacctacaactttgaggaggtgcccttccactccagcttcgctcccagtcagaacctgttcaagctggccaacccgctggtggaccagtacttgtaccgcttcgtgagcacaaataacactggcggagtccagttcaacaagaacctggccgggagatacgccaacacctacaaaaactggttcccggggcccatgggccgaacccagggctggaacctgggctccggggtcaaccgcgccagtgtcagcgccttcgccacgaccaataggatggagctcgagggcgcgagttaccaggtgcccccgcagccgaacggcatgaccaacaacctccagggcagcaacacctatgccctggagaacactatgatcttcaacagccagccggcgaacccgggcaccaccgccacgtacctcgagggcaacatgctcatcaccagcgagagcgagacgcagccggtgaaccgcgtggcgtacaacgtcggcgggcagatggccaccaacaaccagagctccaccactgcccccgcgaccggcacgtacaacctccaggaaatcgtgcccggcagcgtgtggatggagagggacgtgtacctccaaggacccatctgggccaagatcccagagacgggggcgcactttcacccctctccggccatgggcggattcggactcaaacacccaccgcccatgatgctcatcaagaacacgcctgtgcccggaaatatcaccagcttctcggacgtgcccgtcagcagcttcatcacccagtacagcaccgggcaggtcaccgtggagatggagtgggagctcaagaaggaaaactccaagaggtggaacccagagatccagtacacaaacaactacaacgacccccagtttgtggactttgccccggacagcaccggggaatacagaaccaccagacctatcggaacccgataccttacccgacccctttaa

SEQ ID NO: 5153 - DNA, 2208 bp, Adeno-associated virus 6
atggctgccgatggttatcttccagattggctcgaggacaacctctctgagggcattcgcgagtggtgggacttgaaacctggagccccgaaacccaaagccaaccagcaaaagcaggacgacggccggggtctggtgcttcctggctacaagtacctcggacccttcaacggactcgacaagggggagcccgtcaacgcggcggatgcagcggccctcgagcacgacaaggcctacgaccagcagctcaaagcgggtgacaatccgtacctgcggtataaccacgccgacgccgagtttcaggagcgtctgcaagaagatacgtcttttgggggcaacctcgggcgagcagtcttccaggccaagaagagggttctcgaaccttttggtctggttgaggaaggtgctaagacggctcctggaaagaaacgtccggtagagcagtcgccacaagagccagactcctcctcgggcattggcaagacaggccagcagcccgctaaaaagagactcaattttggtcagactggcgactcagagtcagtccccgacccacaacctctcggagaacctccagcaacccccgctgctgtgggacctactacaatggcttcaggcggtggcgcaccaatggcagacaataacgaaggcgccgacggagtgggtaatgcctcaggaaattggcattgcgattccacatggctgggcgacagagtcatcaccaccagcacccgaacatgggccttgcccacctataacaaccacctctacaagcaaatctccagtgcttcaacgggggccagcaacgacaaccactacttcggctacagcaccccctgggggtattttgatttcaacagattccactgccatttctcaccacgtgactggcagcgactcatcaacaacaattggggattccggcccaagagactcaacttcaagctcttcaacatccaagtcaaggaggtcacgacgaatgatggcgtcacgaccatcgctaataaccttaccagcacggttcaagtcttctcggactcggagtaccagttgccgtacgtcctcggctctgcgcaccagggctgcctccctccgttcccggcggacgtgttcatgattccgcagtacggctacctaacgctcaacaatggcagccaggcagtgggacggtcatccttttactgcctggaatatttcccatcgcagatgctgagaacgggcaataactttaccttcagctacaccttcgaggacgtgcctttccacagcagctacgcgcacagccagagcctggaccggctgatgaatcctctcatcgaccagtacctgtattacctgaacagaactcagaatcagtccggaagtgcccaaaacaaggacttgctgtttagccgggggtctccagctggcatgtctgttcagcccaaaaactggctacctggaccctgttaccggcagcagcgcgtttctaaaacaaaaacagacaacaacaacagcaactttacctggactggtgcttcaaaatataaccttaatgggcgtgaatctataatcaaccctggcactgctatggcctcacacaaagacgacaaagacaagttctttcccatgagcggtgtcatgatttttggaaaggagagcgccggagcttcaaacactgcattggacaatgtcatgatcacagacgaagaggaaatcaaagccactaaccccgtggccaccgaaagatttgggactgtggcagtcaatctccagagcagcagcacagaccctgcgaccggagatgtgcatgttatgggagccttacctggaatggtgtggcaagacagagacgtatacctgcagggtcctatttgggccaaaattcctcacacggatggacactttcacccgtctcctctcatgggcggctttggacttaagcacccgcctcctcagatcctcatcaaaaacacgcctgttcctgcgaatcctccggcagagttttcggctacaaagtttgcttcattcatcacccagtattccacaggacaagtgagcgtggagattgaatgggagctgcagaaagaaaacagcaaacgctggaatcccgaagtgcagtatacatctaactatgcaaaatctgccaacgttgatttcactgtggacaacaatggactttatactgagcctcgccccattggcacccgttacctcacccgtcccctg

SEQ ID NO: 5154 - protein, 736 aa, Adeno-associated virus 6; identical to SEQ ID NO: 4799

SEQ ID NO: 5155 - protein, 623 aa, Adeno-associated virus 6
MPGFYEIVIKVPSDLDEHLPGISDSFVNWVAEKEWELPPDSDMDLNLIEQAPLTVAEKLQRDFLVQWRRVSKAPEALFFVQFEKGESYFHLHILVETTGVKSMVLGRFLSQIRDKLVQTIYRGIEPTLPNWFAVTKTRNGAGGGNKVVDECYIPNYLLPKTQPELQWAWTNMEEYISACLNLAERKRLVAHDLTHVSQTQEQNKENLNPNSDAPVIRSKTSARYMELVGWLVDRGITSEKQWIQEDQASYISFNAASNSRSQIKAALDNAGKIMALTKSAPDYLVGPAPPADIKTNRIYRILELNGYDPAYAGSVFLGWAQKRFGKRNTIWLFGPATTGKTNIAEAIAHAVPFYGCVNWTNENFPFNDCVDKMVIWWEEGKMTAKVVESAKAILGGSKVRVDQKCKSSAQIDPTPVIVTSNTNMCAVIDGNSTTFEHQQPLQDRMFKFELTRRLEHDFGKVTKQEVKEFFRWAQDHVTEVAHEFYVRKGGANKRPAPDDADKSEPKRACPSVADPSTSDAEGAPVDFADRYQNKCSRHAGMLQMLFPCKTCERMNQNFNICFTHGTRDCSECFPGVSESQPVVRKRTYRKLCAIHHLLGRAPEIACSACDLVNVDLDDCVSEQ

SEQ ID NO: 5156 - DNA, 4683 bp, Adeno-associated virus 6
ttggccactccctctctgcgcgctcgctcgctcactgaggccgggcgaccaaaggtcgcccgacgcccgggctttgcccgggcggcctcagtgagcgagcgagcgcgcagagagggagtggccaactccatcactaggggttcctggaggggtggagtcgtgacgtgaattacgtcatagggttagggaggtcctgtattagaggtcacgtgagtgttttgcgacattttgcgacaccatgtggtcacgctgggtatttaagcccgagtgagcacgcagggtctccattttgaagcgggaggtttgaacgcgcagcgccatgccggggttttacgagattgtgattaaggtccccagcgaccttgacgagcatctgcccggcatttctgacagctttgtgaactgggtggccgagaaggaatgggagttgccgccagattctgacatggatctgaatctgattgagcaggcacccctgaccgtggccgagaagctgcagcgcgacttcctggtccagtggcgccgcgtgagtaaggccccggaggccctcttctttgttcagttcgagaagggcgagtcctacttccacctccatattctggtggagaccacgggggtcaaatccatggtgctgggccgcttcctgagtcagattagggacaagctggtgcagaccatctaccgcgggatcgagccgaccctgcccaactggttcgcggtgaccaagacgcgtaatggcgccggaggggggaacaaggtggtggacgagtgctacatccccaactacctcctgcccaagactcagcccgagctgcagtgggcgtggactaacatggaggagtatataagcgcgtgtttaaacctggccgagcgcaaacggctcgtggcgcacgacctgacccacgtcagccagacccaggagcagaacaaggagaatctgaaccccaattctgacgcgcctgtcatccggtcaaaaacctccgcacgctacatggagctggtcgggtggctggtggaccggggcatcacctccgagaagcagtggatccaggaggaccaggcctcgtacatctccttcaacgccgcctccaactcgcggtcccagatcaaggccgctctggacaatgccggcaagatcatggcgctgaccaaatccgcgcccgactacctggtaggccccgctccgcccgccgacattaaaaccaaccgcatttaccgcatcctggagctgaacggctacgaccctgcctacgccggctccgtctttctcggctgggcccagaaaaggttcggaaaacgcaacaccatctggctgtttgggccggccaccacgggcaagaccaacatcgcggaagccatcgcccacgccgtgcccttctacggctgcgtcaactggaccaatgagaactttcccttcaacgattgcgtcgacaagatggtgatctggtgggaggagggcaagatgacggccaaggtcgtggagtccgccaaggccattctcggcggcagcaaggtgcgcgtggaccaaaagtgcaagtcgtccgcccagatcgatcccacccccgtgatcgtcacctccaacaccaacatgtgcgccgtgattgacgggaacagcaccaccttcgagcaccagcagccgttgcaggaccggatgttcaaatttgaactcacccgccgtctggagcatgactttggcaaggtgacaaagcaggaagtcaaagagttcttccgctgggcgcaggatcacgtgaccgaggtggcgcatgagttctacgtcagaaagggtggagccaacaagagacccgcccccgatgacgcggataaaagcgagcccaagcgggcctgcccctcagtcgcggatccatcgacgtcagacgcggaaggagctccggtggactttgccgacaggtaccaaaacaaatgttctcgtcacgcgggcatgcttcagatgctgtttccctgcaaaacatgcgagagaatgaatcagaatttcaacatttgcttcacgcacgggaccagagactgttcagaatgtttccccggcgtgtcagaatctcaaccggtcgtcagaaagaggacgtatcggaaactctgtgccattcatcatctgctggggcgggctcccgagattgcttgctcggcctgcgatctggtcaacgtggatctggatgactgtgtttctgagcaataaatgacttaaaccaggtatggctgccgatggttatcttccagattggctcgaggacaacctctctgagggcattcgcgagtggtgggacttgaaacctggagccccgaaacccaaagccaaccagcaaaagcaggacgacggccggggtctggtgcttcctggctacaagtacctcggacccttcaacggactcgacaagggggagcccgtcaacgcggcggatgcagcggccctcgagcacgacaaggcctacgaccagcagctcaaagcgggtgacaatccgtacctgcggtataaccacgccgacgccgagtttcaggagcgtctgcaagaagatacgtcttttgggggcaacctcgggcgagcagtcttccaggccaagaagagggttctcgaaccttttggtctggttgaggaaggtgctaagacggctcctggaaagaaacgtccggtagagcagtcgccacaagagccagactcctcctcgggcattggcaagacaggccagcagcccgctaaaaagagactcaattttggtcagactggcgactcagagtcagtccccgacccacaacctctcggagaacctccagcaacccccgctgctgtgggacctactacaatggcttcaggcggtggcgcaccaatggcagacaataacgaaggcgccgacggagtgggtaatgcctcaggaaattggcattgcgattccacatggctgggcgacagagtcatcaccaccagcacccgaacatgggccttgcccacctataacaaccacctctacaagcaaatctccagtgcttcaacgggggccagcaacgacaaccactacttcggctacagcaccccctgggggtattttgatttcaacagattccactgccatttctcaccacgtgactggcagcgactcatcaacaacaattggggattccggcccaagagactcaacttcaagctcttcaacatccaagtcaaggaggtcacgacgaatgatggcgtcacgaccatcgctaataaccttaccagcacggttcaagtcttctcggactcggagtaccagttgccgtacgtcctcggctctgcgcaccagggctgcctccctccgttcccggcggacgtgttcatgattccgcagtacggctacctaacgctcaacaatggcagccaggcagtgggacggtcatccttttactgcctggaatatttcccatcgcagatgctgagaacgggcaataactttaccttcagctacaccttcgaggacgtgcctttccacagcagctacgcgcacagccagagcctggaccggctgatgaatcctctcatcgaccagtacctgtattacctgaacagaactcagaatcagtccggaagtgcccaaaacaaggacttgctgtttagccgggggtctccagctggcatgtctgttcagcccaaaaactggctacctggaccctgttaccggcagcagcgcgtttctaaaacaaaaacagacaacaacaacagcaactttacctggactggtgcttcaaaatataaccttaatgggcgtgaatctataatcaaccctggcactgctatggcctcacacaaagacgacaaagacaagttctttcccatgagcggtgtcatgatttttggaaaggagagcgccggagcttcaaacactgcattggacaatgtcatgatcacagacgaagaggaaatcaaagccactaaccccgtggccaccgaaagatttgggactgtggcagtcaatctccagagcagcagcacagaccctgcgaccggagatgtgcatgttatgggagccttacctggaatggtgtggcaagacagagacgtatacctgcagggtcctatttgggccaaaattcctcacacggatggacactttcacccgtctcctctcatgggcggctttggacttaagcacccgcctcctcagatcctcatcaaaaacacgcctgttcctgcgaatcctccggcagagttttcggctacaaagtttgcttcattcatcacccagtattccacaggacaagtgagcgtggagattgaatgggagctgcagaaagaaaacagcaaacgctggaatcccgaagtgcagtatacatctaactatgcaaaatctgccaacgttgatttcactgtggacaacaatggactttatactgagcctcgccccattggcacccgttacctcacccgtcccctgtaattgtgtgttaatcaataaaccggttaattcgtgtcagttgaactttggtctcatgtcgttattatcttatctggtcaccatagcaaccggttacacattaactgcttagttgcgcttcgcgaatacccctagtgatggagttgcccactccctctatgcgcgctcgctcgctcggtggggccggcagagcagagctctgccgtctgcggacctttggtccgcaggccccaccgagcgagcgagcgcgcatagagggagtgggcaa

SEQ ID NO: 5157 - DNA, 2211 bp, Adeno-associated virus 6
atggctgccgatggttatcttccagattggctcgaggacaacctctctgagggcattcgcgagtggtgggacttgaaacctggagccccgaaacccaaagccaaccagcaaaagcaggacgacggccggggtctggtgcttcctggctacaagtacctcggacccttcaacggactcgacaagggggagcccgtcaacgcggcggatgcagcggccctcgagcacgacaaggcctacgaccagcagctcaaagcgggtgacaatccgtacctgcggtataaccacgccgacgccgagtttcaggagcgtctgcaagaagatacgtcttttgggggcaacctcgggcgagcagtcttccaggccaagaagagggttctcgaaccttttggtctggttgaggaaggtgctaagacggctcctggaaagaaacgtccggtagagcagtcgccacaagagccagactcctcctcgggcattggcaagacaggccagcagcccgctaaaaagagactcaattttggtcagactggcgactcagagtcagtccccgacccacaacctctcggagaacctccagcaacccccgctgctgtgggacctactacaatggcttcaggcggtggcgcaccaatggcagacaataacgaaggcgccgacggagtgggtaatgcctcaggaaattggcattgcgattccacatggctgggcgacagagtcatcaccaccagcacccgaacatgggccttgcccacctataacaaccacctctacaagcaaatctccagtgcttcaacgggggccagcaacgacaaccactacttcggctacagcaccccctgggggtattttgatttcaacagattccactgccatttctcaccacgtgactggcagcgactcatcaacaacaattggggattccggcccaagagactcaacttcaagctcttcaacatccaagtcaaggaggtcacgacgaatgatggcgtcacgaccatcgctaataaccttaccagcacggttcaagtcttctcggactcggagtaccagttgccgtacgtcctcggctctgcgcaccagggctgcctccctccgttcccggcggacgtgttcatgattccgcagtacggctacctaacgctcaacaatggcagccaggcagtgggacggtcatccttttactgcctggaatatttcccatcgcagatgctgagaacgggcaataactttaccttcagctacaccttcgaggacgtgcctttccacagcagctacgcgcacagccagagcctggaccggctgatgaatcctctcatcgaccagtacctgtattacctgaacagaactcagaatcagtccggaagtgcccaaaacaaggacttgctgtttagccgggggtctccagctggcatgtctgttcagcccaaaaactggctacctggaccctgttaccggcagcagcgcgtttctaaaacaaaaacagacaacaacaacagcaactttacctggactggtgcttcaaaatataaccttaatgggcgtgaatctataatcaaccctggcactgctatggcctcacacaaagacgacaaagacaagttctttcccatgagcggtgtcatgatttttggaaaggagagcgccggagcttcaaacactgcattggacaatgtcatgatcacagacgaagaggaaatcaaagccactaaccccgtggccaccgaaagatttgggactgtggcagtcaatctccagagcagcagcacagaccctgcgaccggagatgtgcatgttatgggagccttacctggaatggtgtggcaagacagagacgtatacctgcagggtcctatttgggccaaaattcctcacacggatggacactttcacccgtctcctctcatgggcggctttggacttaagcacccgcctcctcagatcctcatcaaaaacacgcctgttcctgcgaatcctccggcagagttttcggctacaaagtttgcttcattcatcacccagtattccacaggacaagtgagcgtggagattgaatgggagctgcagaaagaaaacagcaaacgctggaatcccgaagtgcagtatacatctaactatgcaaaatctgccaacgttgatttcactgtggacaacaatggactttatactgagcctcgccccattggcacccgttacctcacccgtcccctgtaa

SEQ ID NO: 5158 - DNA, 2214 bp, Adeno-associated virus 7
atggctgccgatggttatcttccagattggctcgaggacaacctctctgagggcattcgcgagtggtgggacctgaaacctggagccccgaaacccaaagccaaccagcaaaagcaggacaacggccggggtctggtgcttcctggctacaagtacctcggacccttcaacggactcgacaagggggagcccgtcaacgcggcggacgcagcggccctcgagcacgacaaggcctacgaccagcagctcaaagcgggtgacaatccgtacctgcggtataaccacgccgacgccgagtttcaggagcgtctgcaagaagatacgtcatttgggggcaacctcgggcgagcagtcttccaggccaagaagcgggttctcgaacctctcggtctggttgaggaaggcgctaagacggctcctgcaaagaagagaccggtagagccgtcacctcagcgttcccccgactcctccacgggcatcggcaagaaaggccagcagcccgccagaaagagactcaatttcggtcagactggcgactcagagtcagtccccgaccctcaacctctcggagaacctccagcagcgccctctagtgtgggatctggtacagtggctgcaggcggtggcgcaccaatggcagacaataacgaaggtgccgacggagtgggtaatgcctcaggaaattggcattgcgattccacatggctgggcgacagagtcattaccaccagcacccgaacctgggccctgcccacctacaacaaccacctctacaagcaaatctccagtgaaactgcaggtagtaccaacgacaacacctacttcggctacagcaccccctgggggtattttgactttaacagattccactgccacttctcaccacgtgactggcagcgactcatcaacaacaactggggattccggcccaagaagctgcggttcaagctcttcaacatccaggtcaaggaggtcacgacgaatgacggcgttacgaccatcgctaataaccttaccagcacgattcaggtattctcggactcggaataccagctgccgtacgtcctcggctctgcgcaccagggctgcctgcctccgttcccggcggacgtcttcatgattcctcagtacggctacctgactctcaacaatggcagtcagtctgtgggacgttcctccttctactgcctggagtacttcccctctcagatgctgagaacgggcaacaactttgagttcagctacagcttcgaggacgtgcctttccacagcagctacgcacacagccagagcctggaccggctgatgaatcccctcatcgaccagtacttgtactacctggccagaacacagagtaacccaggaggcacagctggcaatcgggaactgcagttttaccagggcgggccttcaactatggccgaacaagccaagaattggttacctggaccttgcttccggcaacaaagagtctccaaaacgctggatcaaaacaacaacagcaactttgcttggactggtgccaccaaatatcacctgaacggcagaaactcgttggttaatcccggcgtcgccatggcaactcacaaggacgacgaggaccgctttttcccatccagcggagtcctgatttttggaaaaactggagcaactaacaaaactacattggaaaatgtgttaatgacaaatgaagaagaaattcgtcctactaatcctgtagccacggaagaatacgggatagtcagcagcaacttacaagcggctaatactgcagcccagacacaagttgtcaacaaccagggagccttacctggcatggtctggcagaaccgggacgtgtacctgcagggtcccatctgggccaagattcctcacacggatggcaactttcacccgtctcctttgatgggcggctttggacttaaacatccgcctcctcagatcctgatcaagaacactcccgttcccgctaatcctccggaggtgtttactcctgccaagtttgcttcgttcatcacacagtacagcaccggacaagtcagcgtggaaatcgagtgggagctgcagaaggaaaacagcaagcgctggaacccggagattcagtacacctccaactttgaaaagcagactggtgtggactttgccgttgacagccagggtgtttactctgagcctcgccctattggcactcgttacctcacccgtaatctgtaa

SEQ ID NO: 5159 - protein, 738 aa, Adeno-associated virus 7
MAADGYLPDWLEDNLSEGIREWWALKPGAPKPKANQQKQDDGRGLVLPGYKYLGPFNGLDKGEPVNAADAAALEHDKAYDQQLQAGDNPYLRYNHADAEFQERLQEDTSFGGNLGRAVFQAKKRVLEPLGLVEEGAKTAPGKKRPVEPSPQRSPDSSTGIGKKGQQPARKRLNFGQTGDSESVPDPQPLGEPPAAPSGVGPNTMAAGGGAPMADNNEGADGVGSSSGNWHCDSTWLGDRVITTSTRTWALPTYNNHLYKQISNGTSGGATNDNTYFGYSTPWGYFDFNRFHCHFSPRDWQRLINNNWGFRPKRLSFKLFNIQVKEVTQNEGTKTIANNLTSTIQVFTDSEYQLPYVLGSAHQGCLPPFPADVFMIPQYGYLTLNNGSQAVGRSSFYCLEYFPSQMLRTGNNFQFTYTFEDVPFHSSYAHSQSLDRLMNPLIDQYLYYLSRTQTTGGTANTQTLGFSQGGPNTMANQAKNWLPGPCYRQQRVSTTTGQNNNSNFAWTAGTKYHLNGRNSLANPGIAMATHKDDEERFFPSNGILIFGKQNAARDNADYSDVMLTSEEEIKTTNPVATEEYGIVADNLQQQNTAPQIGTVNSQGALPGMVWQNRDVYLQGPIWAKIPHTDGNFHPSPLMGGFGLKHPPPQILIKNTPVPADPPTTFNQSKLNSFITQYSTGQVSVEIEWELQKENSKRWNPEIQYTSNYYKSTSVDFAVNTEGVYSEPRPIGTRYLTRNL

SEQ ID NO: 5160 - protein, 737 aa, Adeno-associated virus 7
MAADGYLPDWLEDNLSEGIREWWDLKPGAPKPKANQQKQDNGRGLVLPGYKYLGPFNGLDKGEPVNAADAAALEHDKAYDQQLKAGDNPYLRYNHADAEFQERLQEDTSFGGNLGRAVFQAKKRVLEPLGLVEEGAKTAPAKKRPVEPSPQRSPDSSTGIGKKGQQPARKRLNFGQTGDSESVPDPQPLGEPPAAPSSVGSGTVAAGGGAPMADNNEGADGVGNASGNWHCDSTWLGDRVITTSTRTWALPTYNNHLYKQISSETAGSTNDNTYFGYSTPWGYFDFNRFHCHFSPRDWQRLINNNWGFRPKKLRFKLFNIQVKEVTTNDGVTTIANNLTSTIQVFSDSEYQLPYVLGSAHQGCLPPFPADVFMIPQYGYLTLNNGSQSVGRSSFYCLEYFPSQMLRTGNNFEFSYSFEDVPFHSSYAHSQSLDRLMNPLIDQYLYYLARTQSNPGGTAGNRELQFYQGGPSTMAEQAKNWLPGPCFRQQRVSKTLDQNNNSNFAWTGATKYHLNGRNSLVNPGVAMATHKDDEDRFFPSSGVLIFGKTGATNKTTLENVLMTNEEEIRPTNPVATEEYGIVSSNLQAANTAAQTQVVNNQGALPGMVWQNRDVYLQGPIWAKIPHTDGNFHPSPLMGGFGLKHPPPQILIKNTPVPANPPEVFTPAKFASFITQYSTGQVSVEIEWELQKENSKRWNPEIQYTSNFEKQTGVDFAVDSQGVYSEPRPIGTRYLTRNL

SEQ ID NO: 5161 - protein, 623 aa, Adeno-associated virus 7
MPGFYEIVIKVPSDLDEHLPGISDSFVNWVAEKEWELPPDSDMDLNLIEQAPLTVAEKLQRDFLVQWRRVSKAPEALFFVQFEKGESYFHLHVLVETTGVKSMVLGRFLSQIREKLVQTIYRGVEPTLPNWFAVTKTRNGAGGGNKVVDECYIPNYLLPKTQPELQWAWTNMEEYISACLNLAERKRLVAQHLTHVSQTQEQNKENLNPNSDAPVIRSKTSARYMELVGWLVDRGITSEKQWIQEDQASYISFNAASNSRSQIKAALDNAGKIMALTKSAPDYLVGPSLPADIKTNRIYRILELNGYDPAYAGSVFLGWAQKKFGKRNTIWLFGPATTGKTNIAEAIAHAVPFYGCVNWTNENFPFNDCVDKMVIWWEEGKMTAKVVESAKAILGGSKVRVDQKCKSSAQIDPTPVIVTSNTNMCAVIDGNSTTFEHQQPLQDRMFKFELTRRLEHDFGKVTKQEVKEFFRWASDHVTEVAHEFYVRKGGASKRPAPDDADISEPKRACPSVADPSTSDAEGAPVDFADRYQNKCSRHAGMIQMLFPCKTCERMNQNFNICFTHGVRDCLECFPGVSESQPVVRKKTYRKLCAIHHLLGRAPEIACSACDLVNVDLDDCVSEQ

SEQ ID NO: 5162 - DNA, 4721 bp, Adeno-associated virus 7
ttggccactccctctatgcgcgctcgctcgctcggtggggcctgcggaccaaaggtccgcagacggcagagctctgctctgccggccccaccgagcgagcgagcgcgcatagagggagtggccaactccatcactaggggtaccgcgaagcgcctcccacgctgccgcgtcagcgctgacgtaaatcacgtcataggggagtggtcctgtattagctgtcacgtgagtgcttttgcgacattttgcgacaccacgtggccatttgaggtatatatggccgagtgagcgagcaggatctccattttgaccgcgaaatttgaacgagcagcagccatgccgggtttctacgagatcgtgatcaaggtgccgagcgacctggacgagcacctgccgggcatttctgactcgtttgtgaactgggtggccgagaaggaatgggagctgcccccggattctgacatggatctgaatctgatcgagcaggcacccctgaccgtggccgagaagctgcagcgcgacttcctggtccaatggcgccgcgtgagtaaggccccggaggccctgttctttgttcagttcgagaagggcgagagctacttccaccttcacgttctggtggagaccacgggggtcaagtccatggtgctaggccgcttcctgagtcagattcgggagaagctggtccagaccatctaccgcggggtcgagcccacgctgcccaactggttcgcggtgaccaagacgcgtaatggcgccggcggggggaacaaggtggtggacgagtgctacatccccaactacctcctgcccaagacccagcccgagctgcagtgggcgtggactaacatggaggagtatataagcgcgtgtttgaacctggccgaacgcaaacggctcgtggcgcagcacctgacccacgtcagccagacgcaggagcagaacaaggagaatctgaaccccaattctgacgcgcccgtgatcaggtcaaaaacctccgcgcgctacatggagctggtcgggtggctggtggaccggggcatcacctccgagaagcagtggatccaggaggaccaggcctcgtacatctccttcaacgccgcctccaactcgcggtcccagatcaaggccgcgctggacaatgccggcaagatcatggcgctgaccaaatccgcgcccgactacctggtggggccctcgctgcccgcggacattaaaaccaaccgcatctaccgcatcctggagctgaacgggtacgatcctgcctacgccggctccgtctttctcggctgggcccagaaaaagttcgggaagcgcaacaccatctggctgtttgggcccgccaccaccggcaagaccaacattgcggaagccatcgcccacgccgtgcccttctacggctgcgtcaactggaccaatgagaactttcccttcaacgattgcgtcgacaagatggtgatctggtgggaggagggcaagatgacggccaaggtcgtggagtccgccaaggccattctcggcggcagcaaggtgcgcgtggaccaaaagtgcaagtcgtccgcccagatcgaccccacccccgtgatcgtcacctccaacaccaacatgtgcgccgtgattgacgggaacagcaccaccttcgagcaccagcagccgttgcaggaccggatgttcaaatttgaactcacccgccgtctggagcacgactttggcaaggtgacgaagcaggaagtcaaagagttcttccgctgggccagtgatcacgtgaccgaggtggcgcatgagttctacgtcagaaagggcggagccagcaaaagacccgcccccgatgacgcggatataagcgagcccaagcgggcctgcccctcagtcgcggatccatcgacgtcagacgcggaaggagctccggtggactttgccgacaggtaccaaaacaaatgttctcgtcacgcgggcatgattcagatgctgtttccctgcaaaacgtgcgagagaatgaatcagaatttcaacatttgcttcacacacggggtcagagactgtttagagtgtttccccggcgtgtcagaatctcaaccggtcgtcagaaaaaagacgtatcggaaactctgcgcgattcatcatctgctggggcgggcgcccgagattgcttgctcggcctgcgacctggtcaacgtggacctggacgactgcgtttctgagcaataaatgacttaaaccaggtatggctgccgatggttatcttccagattggctcgaggacaacctctctgagggcattcgcgagtggtgggacctgaaacctggagccccgaaacccaaagccaaccagcaaaagcaggacaacggccggggtctggtgcttcctggctacaagtacctcggacccttcaacggactcgacaagggggagcccgtcaacgcggcggacgcagcggccctcgagcacgacaaggcctacgaccagcagctcaaagcgggtgacaatccgtacctgcggtataaccacgccgacgccgagtttcaggagcgtctgcaagaagatacgtcatttgggggcaacctcgggcgagcagtcttccaggccaagaagcgggttctcgaacctctcggtctggttgaggaaggcgctaagacggctcctgcaaagaagagaccggtagagccgtcacctcagcgttcccccgactcctccacgggcatcggcaagaaaggccagcagcccgccagaaagagactcaatttcggtcagactggcgactcagagtcagtccccgaccctcaacctctcggagaacctccagcagcgccctctagtgtgggatctggtacagtggctgcaggcggtggcgcaccaatggcagacaataacgaaggtgccgacggagtgggtaatgcctcaggaaattggcattgcgattccacatggctgggcgacagagtcattaccaccagcacccgaacctgggccctgcccacctacaacaaccacctctacaagcaaatctccagtgaaactgcaggtagtaccaacgacaacacctacttcggctacagcaccccctgggggtattttgactttaacagattccactgccacttctcaccacgtgactggcagcgactcatcaacaacaactggggattccggcccaagaagctgcggttcaagctcttcaacatccaggtcaaggaggtcacgacgaatgacggcgttacgaccatcgctaataaccttaccagcacgattcaggtattctcggactcggaataccagctgccgtacgtcctcggctctgcgcaccagggctgcctgcctccgttcccggcggacgtcttcatgattcctcagtacggctacctgactctcaacaatggcagtcagtctgtgggacgttcctccttctactgcctggagtacttcccctctcagatgctgagaacgggcaacaactttgagttcagctacagcttcgaggacgtgcctttccacagcagctacgcacacagccagagcctggaccggctgatgaatcccctcatcgaccagtacttgtactacctggccagaacacagagtaacccaggaggcacagctggcaatcgggaactgcagttttaccagggcgggccttcaactatggccgaacaagccaagaattggttacctggaccttgcttccggcaacaaagagtctccaaaacgctggatcaaaacaacaacagcaactttgcttggactggtgccaccaaatatcacctgaacggcagaaactcgttggttaatcccggcgtcgccatggcaactcacaaggacgacgaggaccgctttttcccatccagcggagtcctgatttttggaaaaactggagcaactaacaaaactacattggaaaatgtgttaatgacaaatgaagaagaaattcgtcctactaatcctgtagccacggaagaatacgggatagtcagcagcaacttacaagcggctaatactgcagcccagacacaagttgtcaacaaccagggagccttacctggcatggtctggcagaaccgggacgtgtacctgcagggtcccatctgggccaagattcctcacacggatggcaactttcacccgtctcctttgatgggcggctttggacttaaacatccgcctcctcagatcctgatcaagaacactcccgttcccgctaatcctccggaggtgtttactcctgccaagtttgcttcgttcatcacacagtacagcaccggacaagtcagcgtggaaatcgagtgggagctgcagaaggaaaacagcaagcgctggaacccggagattcagtacacctccaactttgaaaagcagactggtgtggactttgccgttgacagccagggtgtttactctgagcctcgccctattggcactcgttacctcacccgtaatctgtaattgcatgttaatcaataaaccggttgattcgtttcagttgaactttggtctcctgtgcttcttatcttatcggtttccatagcaactggttacacattaactgcttgggtgcgcttcacgataagaacactgacgtcaccgcggtacccctagtgatggagttggccactccctctatgcgcgctcgctcgctcggtggggcctgcggaccaaaggtccgcagacggcagagctctgctctgccggccccaccgagcgagcgagcgcgcatagagggagtggccaa

SEQ ID NO: 5163 - DNA, 2214 bp, Adeno-associated virus 7; identical to SEQ ID NO: 5158

SEQ ID NO: 5164 - protein, 737 aa, Adeno-associated virus 7; identical to SEQ ID NO: 5160

SEQ ID NO: 5165 - DNA, 2217 bp, Adeno-associated virus 8
atggctgccgatggttatcttccagattggctcgaggacaacctctctgagggcattcgcgagtggtgggcgctgaaacctggagccccgaagcccaaagccaaccagcaaaagcaggacgacggccggggtctggtgcttcctggctacaagtacctcggacccttcaacggactcgacaagggggagcccgtcaacgcggcggacgcagcggccctcgagcacgacaaggcctacgaccagcagctgcaggcgggtgacaatccgtacctgcggtataaccacgccgacgccgagtttcaggagcgtctgcaagaagatacgtcttttgggggcaacctcgggcgagcagtcttccaggccaagaagcgggttctcgaacctctcggtctggttgaggaaggcgctaagacggctcctggaaagaagagaccggtagagccatcaccccagcgttctccagactcctctacgggcatcggcaagaaaggccaacagcccgccagaaaaagactcaattttggtcagactggcgactcagagtcagttccagaccctcaacctctcggagaacctccagcagcgccctctggtgtgggacctaatacaatggctgcaggcggtggcgcaccaatggcagacaataacgaaggcgccgacggagtgggtagttcctcgggaaattggcattgcgattccacatggctgggcgacagagtcatcaccaccagcacccgaacctgggccctgcccacctacaacaaccacctctacaagcaaatctccaacgggacatcgggaggagccaccaacgacaacacctacttcggctacagcaccccctgggggtattttgactttaacagattccactgccacttttcaccacgtgactggcagcgactcatcaacaacaactggggattccggcccaagagactcagcttcaagctcttcaacatccaggtcaaggaggtcacgcagaatgaaggcaccaagaccatcgccaataacctcaccagcaccatccaggtgtttacggactcggagtaccagctgccgtacgttctcggctctgcccaccagggctgcctgcctccgttcccggcggacgtgttcatgattccccagtacggctacctaacactcaacaacggtagtcaggccgtgggacgctcctccttctactgcctggaatactttccttcgcagatgctgagaaccggcaacaacttccagtttacttacaccttcgaggacgtgcctttccacagcagctacgcccacagccagagcttggaccggctgatgaatcctctgattgaccagtacctgtactacttgtctcggactcaaacaacaggaggcacggcaaatacgcagactctgggcttcagccaaggtgggcctaatacaatggccaatcaggcaaagaactggctgccaggaccctgttaccgccaacaacgcgtctcaacgacaaccgggcaaaacaacaatagcaactttgcctggactgctgggaccaaataccatctgaatggaagaaattcattggctaatcctggcatcgctatggcaacacacaaagacgacgaggagcgtttttttcccagtaacgggatcctgatttttggcaaacaaaatgctgccagagacaatgcggattacagcgatgtcatgctcaccagcgaggaagaaatcaaaaccactaaccctgtggctacagaggaatacggtatcgtggcagataacttgcagcagcaaaacacggctcctcaaattggaactgtcaacagccagggggccttacccggtatggtctggcagaaccgggacgtgtacctgcagggtcccatctgggccaagattcctcacacggacggcaacttccacccgtctccgctgatgggcggctttggcctgaaacatcctccgcctcagatcctgatcaagaacacgcctgtacctgcggatcctccgaccaccttcaaccagtcaaagctgaactctttcatcacgcaatacagcaccggacaggtcagcgtggaaattgaatgggagctgcagaaggaaaacagcaagcgctggaaccccgagatccagtacacctccaactactacaaatctacaagtgtggactttgctgttaatacagaaggcgtgtactctgaaccccgccccattggcacccgttacctcacccgtaatctgtaa

SEQ ID NO: 5166 - DNA, 2213 bp, Adeno-associated virus 8
atggctgccgatggttatcttccagattggctcgaggacaacctctctgagggcattcgcgagtggtgggcgctgaaacctggagccccgaagcccaaagccaaccagcaaaagcaggacgacggccggggtctggtgcttcctggctacaagtacctcggacccttcaacggactcgacaagggggagcccgtcaacgcggcggacgcagcggccctcgagcacgacaaggcctacgaccagcagctgcaggcgggtgacaatccgtacctgcggtataaccacgccgacgccgagtttcaggagcgtctgcaagaagatacgtcttttgggggcaacctcgggcgagcagtcttccaggccaagaagcgggttctcgaacctctcggtctggttgaggaaggcgctaagacggctcctggaaagaagagaccggtagagccatcaccccagcgttctccagactcctctacgggcatcggcaagaaaggccaacagcccgccagaaaaagactcaattttggtcagactggcgactcagagtcagttccagaccctcaacctctcggagaacctccagcagcgccctctggtgtgggacctaatacaatggctgcaggcggtggcgcaccaatggcagacaataacgaaggcgccgacggagtgggtagttcctcgggaaattggcattgcgattccacatggctgggcgacagagtcatcaccaccagcacccgaacctgggccctgcccacctacaacaaccacctctacaagcaaatctccaacgggacatcgggaggagccaccaacgacaacacctacttcggctacagcaccccctgggggtattttgactttaacagattccactgccacttttcaccacgtgactggcagcgactcatcaacaacaactggggattccggcccaagagactcagcttcaagctcttcaacatccaggtcaaggaggtcacgcagaatgaaggcaccaagaccatcgccaataacctcaccagcaccatccaggtgtttacggactcggagtaccagctgccgtacgttctcggctctgcccaccagggctgcctgcctccgttcccggcggacgtgttcatgattccccagtacggctacctaacactcaacaacggtagtcaggccgtgggacgctcctccttctactgcctggaatactttccttcgcagatgctgagaaccggcaacaacttccagtttacttacaccttcgaggacgtgcctttccacagcagctacgcccacagccagagcttggaccggctgatgaatcctctgattgaccagtacctgtactacttgtctcggactcaaacaacaggaggcacggcaaatacgcagactctgggcttcagccaaggtgggcctaatacaatggccaatcaggcaaagaactggctgccaggaccctgttaccgccaacaacgcgtctcaacgacaaccgggcaaaacaacaatagcaactttgcctggactgctgggaccaaataccatctgaatggaagaaattcattggctaatcctggcatcgctatggcaacacacaaagacgacgaggagcgtttttttcccagtaacgggatcctgatttttggcaaacaaaatgctgccagagacaatgcggattacagcgatgtcatgctcaccagcgaggaagaaatcaaaaccactaaccctgtggctacagaggaatacggtatcgtggcagataacttgcagcagcaaaacacggctcctcaaattggaactgtcaacagccagggggccttacccggtatggtctggcagaaccgggacgtgtacctgcagggtcccatctgggccaagattcctcacacggacggcaacttccacccgtctccgctgatgggcggctttggcctgaaacatcctccgcctcagatcctgatcaagaacacgcctgtacctgcggatcctccgaccaccttcaaccagtcaaagctgaactctttcatcacgcaatacagcaccggacaggtcagcgtggaaattgaatgggagctgcagaaggaaaacagcaagcgctggaaccccgagatccagtacacctccaactactacaaatctacaagtgtggactttgctgtaatacagaaggcgtgtactctgaaccccgccccattggcacccgttacctcacccgtaatctg

SEQ ID NO: 5167 - DNA, 4393 bp, Adeno-associated virus 8
cagagagggagtggccaactccatcactaggggtagcgcgaagcgcctcccacgctgccgcgtcagcgctgacgtaaattacgtcataggggagtggtcctgtattagctgtcacgtgagtgcttttgcggcattttgcgacaccacgtggccatttgaggtatatatggccgagtgagcgagcaggatctccattttgaccgcgaaatttgaacgagcagcagccatgccgggcttctacgagatcgtgatcaaggtgccgagcgacctggacgagcacctgccgggcatttctgactcgtttgtgaactgggtggccgagaaggaatgggagctgcccccggattctgacatggatcggaatctgatcgagcaggcacccctgaccgtggccgagaagctgcagcgcgacttcctggtccaatggcgccgcgtgagtaaggccccggaggccctcttctttgttcagttcgagaagggcgagagctactttcacctgcacgttctggtcgagaccacgggggtcaagtccatggtgctaggccgcttcctgagtcagattcgggaaaagcttggtccagaccatctacccgcggggtcgagccccaccttgcccaactggttcgcggtgaccaaagacgcggtaatggcgccggcgggggggaacaaggtggtggacgagtgctacatccccaactacctcctgcccaagactcagcccgagctgcagtgggcgtggactaacatggaggagtatataagcgcgtgcttgaacctggccgagcgcaaacggctcgtggcgcagcacctgacccacgtcagccagacgcaggagcagaacaaggagaatctgaaccccaattctgacgcgcccgtgatcaggtcaaaaacctccgcgcgctatatggagctggtcgggtggctggtggaccggggcatcacctccgagaagcagtggatccaggaggaccaggcctcgtacatctccttcaacgccgcctccaactcgcggtcccagatcaaggccgcgctggacaatgccggcaagatcatggcgctgaccaaatccgcgcccgactacctggtggggccctcgctgcccgcggacattacccagaaccgcatctaccgcatcctcgctctcaacggctacgaccctgcctacgccggctccgtctttctcggctgggctcagaaaaagttcgggaaacgcaacaccatctggctgtttggacccgccaccaccggcaagaccaacattgcggaagccatcgcccacgccgtgcccttctacggctgcgtcaactggaccaatgagaactttcccttcaatgattgcgtcgacaagatggtgatctggtgggaggagggcaagatgacggccaaggtcgtggagtccgccaaggccattctcggcggcagcaaggtgcgcgtggaccaaaagtgcaagtcgtccgcccagatcgaccccacccccgtgatcgtcacctccaacaccaacatgtgcgccgtgattgacgggaacagcaccaccttcgagcaccagcagcctctccaggaccggatgtttaagttcgaactcacccgccgtctggagcacgactttggcaaggtgacaaagcaggaagtcaaagagttcttccgctgggccagtgatcacgtgaccgaggtggcgcatgagttttacgtcagaaagggcggagccagcaaaagacccgcccccgatgacgcggataaaagcgagcccaagcgggcctgcccctcagtcgcggatccatcgacgtcagacgcggaaggagctccggtggactttgccgacaggtaccaaaacaaatgttctcgtcacgcgggcatgcttcagatgctgtttccctgcaaaacgtgcgagagaatgaatcagaatttcaacatttgcttcacacacggggtcagagactgctcagagtgtttccccggcgtgtcagaatctcaaccggtcgtcagaaagaggacgtatcggaaactctgtgcgattcatcatctgctggggcgggctcccgagattgcttgctcggcctgcgatctggtcaacgtggacctggatgactgtgtttctgagcaataaatgacttaaaccaggtatggctgccgatggttatcttccagattggctcgaggacaacctctctgagggcattcgcgagtggtgggcgctgaaacctggagccccgaagcccaaagccaaccagcaaaagcaggacgacggccggggtctggtgcttcctggctacaagtacctcggacccttcaacggactcgacaagggggagcccgtcaacgcggcggacgcagcggccctcgagcacgacaaggcctacgaccagcagctgcaggcgggtgacaatccgtacctgcggtataaccacgccgacgccgagtttcaggagcgtctgcaagaagatacgtcttttgggggcaacctcgggcgagcagtcttccaggccaagaagcgggttctcgaacctctcggtctggttgaggaaggcgctaagacggctcctggaaagaagagaccggtagagccatcaccccagcgttctccagactcctctacgggcatcggcaagaaaggccaacagcccgccagaaaaagactcaattttggtcagactggcgactcagagtcagttccagaccctcaacctctcggagaacctccagcagcgccctctggtgtgggacctaatacaatggctgcaggcggtggcgcaccaatggcagacaataacgaaggcgccgacggagtgggtagttcctcgggaaattggcattgcgattccacatggctgggcgacagagtcatcaccaccagcacccgaacctgggccctgcccacctacaacaaccacctctacaagcaaatctccaacgggacatcgggaggagccaccaacgacaacacctacttcggctacagcaccccctgggggtattttgactttaacagattccactgccacttttcaccacgtgactggcagcgactcatcaacaacaactggggattccggcccaagagactcagcttcaagctcttcaacatccaggtcaaggaggtcacgcagaatgaaggcaccaagaccatcgccaataacctcaccagcaccatccaggtgtttacggactcggagtaccagctgccgtacgttctcggctctgcccaccagggctgcctgcctccgttcccggcggacgtgttcatgattccccagtacggctacctaacactcaacaacggtagtcaggccgtgggacgctcctccttctactgcctggaatactttccttcgcagatgctgagaaccggcaacaacttccagtttacttacaccttcgaggacgtgcctttccacagcagctacgcccacagccagagcttggaccggctgatgaatcctctgattgaccagtacctgtactacttgtctcggactcaaacaacaggaggcacggcaaatacgcagactctgggcttcagccaaggtgggcctaatacaatggccaatcaggcaaagaactggctgccaggaccctgttaccgccaacaacgcgtctcaacgacaaccgggcaaaacaacaatagcaactttgcctggactgctgggaccaaataccatctgaatggaagaaattcattggctaatcctggcatcgctatggcaacacacaaagacgacgaggagcgtttttttcccagtaacgggatcctgatttttggcaaacaaaatgctgccagagacaatgcggattacagcgatgtcatgctcaccagcgaggaagaaatcaaaaccactaaccctgtggctacagaggaatacggtatcgtggcagataacttgcagcagcaaaacacggctcctcaaattggaactgtcaacagccagggggccttacccggtatggtctggcagaaccgggacgtgtacctgcagggtcccatctgggccaagattcctcacacggacggcaacttccacccgtctccgctgatgggcggctttggcctgaaacatcctccgcctcagatcctgatcaagaacacgcctgtacctgcggatcctccgaccaccttcaaccagtcaaagctgaactctttcatcacgcaatacagcaccggacaggtcagcgtggaaattgaatgggagctgcagaaggaaaacagcaagcgctggaaccccgagatccagtacacctccaactactacaaatctacaagtgtggactttgctgttaatacagaaggcgtgtactctgaaccccgccccattggcacccgttacctcacccgtaatctgtaattgcctgttaatcaataaaccggttgattcgtttcagttgaactttggtctctgcg

SEQ ID NO: 5168 - protein, 738 aa, Adeno-associated virus 8; identical to SEQ ID NO: 5159

SEQ ID NO: 5169 - protein, 737 aa, Adeno-associated virus 8
MAADGYLPDWLEDNLSEGIREWWALKPGAPKPKANQQKQDDGRGLVLPGYKYLGPFNGLDKGEPVNAADAAALEHDKAYDQQLQAGDNPYLRYNHADAEFQERLQEDTSFGGNLGRAVFQAKKRVLEPLGLVEEGAKTAPGKKRPVEPSPQRSPDSSTGIGKKGQQPARKRLNFGQTGDSESVPDPQPLGEPPAAPSGVGPNTMAAGGGAPMADNNEGADGVGSSSGNWHCDSTWLGDRVITTSTRTWALPTYNNHLYKQISNGTSGGATNDNTYFGYSTPWGYFDFNRFHCHFSPRDWQRLINNNWGFRPKRLSFKLFNIQVKEVTQNEGTKTIANNLTSTIQVFTDSEYQLPYVLGSAHQGCLPPFPADVFMIPQYGYLTLNNGSQAVGRSSFYCLEYFPSQMLRTGNNFQFTYTFEDVPFHSSYAHSQSLDRLMNPLIDQYLYYLSRTQTTGGTANTQTLGFSQGGPNTMANQAKNWLPGPCYRQQRVSTTTGQNNNSNFAWTAGTKYHLNGRNSLANPGIAMATHKDDEERFFPSNGILIFGKQNAARDNADYSDVMLTSEEEIKTTNPVATEEYGIVADNLQQQNTAPQIGTVNSQGALPGMVWQNRDVYLQGPIWAKIPHTDGNFHPSPLMGGFGLKHPPPQILIKNTPVPADPPTTFNQSKLNSFITQYSTGQVSVEIEWELQKENSKRWNPEIQYTSNYYKSTSVDFAVIQKACTLNPAPLAPVTSPVI

SEQ ID NO: 5170 - DNA, 2217 bp, Adeno-associated virus 8; identical to SEQ ID NO: 5165

SEQ ID NO: 5171 - DNA, 4385 bp, Adeno-associated virus 9
cagagagggagtggccaactccatcactaggggtaatcgcgaagcgcctcccacgctgccgcgtcagcgctgacgtagattacgtcataggggagtggtcctgtattagctgtcacgtgagtgcttttgcgacattttgcgacaccacatggccatttgaggtatatatggccgagtgagcgagcaggatctccattttgaccgcgaaatttgaacgagcagcagccatgccgggcttctacgagattgtgatcaaggtgccgagcgacctggacgagcacctgccgggcatttctgactcttttgtgaactgggtggccgagaaggaatgggagctgcccccggattctgacatggatcggaatctgatcgagcaggcacccctgaccgtggccgagaagctgcagcgcgacttcctggtccaatggcgccgcgtgagtaaggccccggaggccctcttctttgttcagttcgagaagggcgagagctactttcacctgcacgttctggtcgagaccacgggggtcaagtccatggtgctaggccgcttcctgagtcagattcgggagaagctggtccagaccatctaccgcgggatcgagccgaccctgcccaactggttcgcggtgaccaagacgcgtaatggcgccggcggggggaacaaggtggtggacgagtgctacatccccaactacctcctgcccaagactcagcccgagctgcagtgggcgtggactaacatggaggagtatataagcgcgtgcttgaacctggccgagcgcaaacggctcgtggcgcagcacctgacccacgtcagccagacgcaggagcagaacaaggagaatctgaaccccaattctgacgcgcccgtgatcaggtcaaaaacctccgcgcgctacatggagctggtcgggtggctggtggaccggggcatcacctccgagaagcagtggatccaggaggaccaggcctcgtacatctccttcaacgccgcctccaactcgcggtcccagatcaaggccgcgctggacaatgccggcaagatcatggcgctgaccaaatccgcgcccgactacctggtaggcccttcacttccggtggacattacgcagaaccgcatctaccgcatcctgcagctcaacggctacgaccctgcctacgccggctccgtctttctcggctgggcacaaaagaagttcgggaaacgcaacaccatctggctgtttgggccggccaccacgggaaagaccaacatcgcagaagccattgcccacgccgtgcccttctacggctgcgtcaactggaccaatgagaactttcccttcaacgattgcgtcgacaagatggtgatctggtgggaggagggcaagatgacggccaaggtcgtggagtccgccaaggccattctcggcggcagcaaggtgcgcgtggaccaaaagtgcaagtcgtccgcccagatcgaccccactcccgtgatcgtcacctccaacaccaacatgtgcgccgtgattgacgggaacagcaccaccttcgagcaccagcagcctctccaggaccggatgtttaagttcgaactcacccgccgtctggagcacgactttggcaaggtgacaaagcaggaagtcaaagagttcttccgctgggccagtgatcacgtgaccgaggtggcgcatgagttttacgtcagaaagggcggagccagcaaaagacccgcccccgatgacgcggataaaagcgagcccaagcgggcctgcccctcagtcgcggatccatcgacgtcagacgcggaaggagctccggtggactttgccgacaggtaccaaaacaaatgttctcgtcacgcgggcatgcttcagatgctgcttccctgcaaaacgtgcgagagaatgaatcagaatttcaacatttgcttcacacacggggtcagagactgctcagagtgtttccccggcgtgtcagaatctcaaccggtcgtcagaaagaggacgtatcggaaactctgtgcgattcatcatctgctggggcgggctcccgagattgcttgctcggcctgcgatctggtcaacgtggacctggatgactgtgtttctgagcaataaatgacttaaaccaggtatggctgccgatggttatcttccagattggctcgaggacaacctctctgagggcattcgcgagtggtgggcgctgaaacctggagccccgaagcccaaagccaaccagcaaaagcaggacgacggccggggtctggtgcttcctggctacaagtacctcggacccttcaacggactcgacaagggggagcccgtcaacgcggcggacgcagcggccctcgagcacggcaaggcctacgaccagcagctgcaggcgggtgacaatccgtacctgcggtataaccacgccgacgccgagtttcaggagcgtctgcaagaagatacgtcttttgggggcaacctcgggcgagcagtcttccaggccaagaagcgggttctcgaacctctcggtctggttgaggaaggcgctaagacggctcctggaaagaagagaccggtagagccatcaccccagcgttctccagactcctctacgggcatcggcaagaaaggccaacagcccgccagaaaaagactcaattttggtcagactggcgactcagagtcagttccagaccctcaacctctcggagaacctccagcagcgccctctggtgtgggacctaatacaatggctgcaggcggtggcgcaccaatggcagacaataacgaaggcgccgacggagtgggtaattcctcgggaaattggcattgcgattccacatggctgggggacagagtcatcaccaccagcacccgaacctgggcattgcccacctacaacaaccacctctacaagcaaatctccaatggaacatcgggaggaagcaccaacgacaacacctactttggctacagcaccccctgggggtattttgacttcaacagattccactgccacttctcaccacgtgactggcagcgactcatcaacaacaactggggattccggccaaagagactcaacttcaagctgttcaacatccaggtcaaggaggttacgacgaacgaaggcaccaagaccatcgccaataaccttaccagcaccgtccaggtctttacggactcggagtaccagctaccgtacgtcctaggctctgcccaccaaggatgcctgccaccgtttcctgcagacgtcttcatggttcctcagtacggctacctgacgctcaacaatggaagtcaagcgttaggacgttcttctttctactgtctggaatacttcccttctcagatgctgagaaccggcaacaactttcagttcagctacactttcgaggacgtgcctttccacagcagctacgcacacagccagagtctagatcgactgatgaaccccctcatcgaccagtacctatactacctggtcagaacacagacaactggaactgggggaactcaaactttggcattcagccaagcaggccctagctcaatggccaatcaggctagaaactgggtacccgggccttgctaccgtcagcagcgcgtctccacaaccaccaaccaaaataacaacagcaactttgcgtggacgggagctgctaaattcaagctgaacgggagagactcgctaatgaatcctggcgtggctatggcatcgcacaaagacgacgaggaccgcttctttccatcaagtggcgttctcatatttggcaagcaaggagccgggaacgatggagtcgactacagccaggtgctgattacagatgaggaagaaattaaagccaccaaccctgtagccacagaggaatacggagcagtggccatcaacaaccaggccgctaacacgcaggcgcaaactggacttgtgcataaccagggagttattcctggtatggtctggcagaaccgggacgtgtacctgcagggccctatttgggctaaaatacctcacacagatggcaactttcacccgtctcctctgatgggtggatttggactgaaacacccacctccacagattctaattaaaaatacaccagtgccggcagatcctcctcttaccttcaatcaagccaagctgaactctttcatcacgcagtacagcacgggacaagtcagcgtggaaatcgagtgggagctgcagaaagaaaacagcaagcgctggaatccagagatccagtatacttcaaactactacaaatctacaaatgtggactttgctgtcaataccaaaggtgtttactctgagcctcgccccattggtactcgttacctcacccgtaatttgtaattgcctgttaatcaataaaccggttaattcgtttcagttgaactttggtctctgcg

SEQ ID NO: 5172 - DNA, 4382 bp, Adeno-associated virus 9
cagagagggagtggccaactccatcactaggggtaatcgcgaagcgcctcccacgctgccgcgtcagcgctgacgtagattacgtcataggggagtggtcctgtattagctgtcacgtgagtgcttttgcgacattttgcgacaccacatggccatttgaggtatatatggccgagtgagcgagcaggatctccattttgaccgcgaaatttgaacgagcagcagccatgccgggcttctacgagattgtgatcaaggtgccgagcgacctggacgagcacctgccgggcatttctgactcttttgtgaactgggtggccgagaaggaatgggagctgcccccggattctgacatggatcggaatctgatcgagcaggcacccctgaccgtggccgagaagctgtagcgcgacttcctggtccaatggcgccgcgtgagtaaggccccggaggccctcttctttgttcagttcgagaagggcgagagctactttcacctgcacgttctggtcgagaccacgggggtcaagtccatggtgctaggccgcttcctgagtcagattcgggagaagctggtccagaccatctaccgcgggatcgagccgaccctgcccaactggttcgcggtgaccaagacgcgtaatggcgccggcggggggaacaaggtggtggacgagtgctacatccccaactacctcctgcccaagactcagcccgagctgcagtgggcgtggactaacatggaggagtatataagcgcgtgcttgaacctggccgagcgcaaacggctcgtggcgcagcacctgacccacgtcagccagacgcaggagcagaacaaggagaatctgaaccccaattctgacgcgcccgtgatcaggtcaaaaacctccgcgcgctacatggagctggtcgggtggctggtggaccggggcatcacctccgagaagcagtggatccaggaggaccaggcctcgtacatctccttcaacgccgcctccaactcgcggtcccagatcaaggccgcgctggacaatgccggcaagatcatggcgctgaccaaatccgcgcccgactacctggtaggcccttcacttccggtggacattacgcagaaccgcatctaccgcatcctgcagctcaacggctacgaccctgcctacgccggctccgtctttctcggctgggcacaaaagaagttcgggaaacgcaacaccatctggctgtttgggccggccaccacgggaaagaccaacatcgcagaagccattgcccacgccgtgcccttctacggctgcgtcaactggaccaatgagaactttcccttcaacgattgcgtcgacaagatggtgatctggtgggaggagggcaagatgacggccaaggtcgtggagtccgccaaggccattctcggcggcagcaaggtgcgcgtggaccaaaagtgcaagtcgtccgcccagatcgaccccactcccgtgatcgtcacctccaacaccaacatgtgcgccgtgattgacgggaacagcaccaccttcgagcaccagcagcctctccaggaccggatgtttaagttcgaactcacccgccgtctggagcacgactttggcaaggtgacaaagcaggaagtcaaagagttcttccgctgggccagtgatcacgtgaccgaggtggcgcatgagttttacgtcagaaagggcggagccagcaaaagacccgcccccgatgacgcggataaaagcgagcccaagcgggcctgcccctcagtcgcggatccatcgacgtcagacgcggaaggagctccggtggactttgccgacaggtaccaaaacaaatgttctcgtcacgcgggcatgcttcagatgctgcttccctgcaaaacgtgcgagagaatgaatcagaatttcaacatttgcttcacacacggggtcagagactgctcagagtgtttccccggcgtgtcagaatctcaaccggtcgtcagaaagaggacgtatcggaaactctgtgcgattcatcatctgctggggcgggctcccgagattgcttgctcggcctgcgatctggtcaacgtggacctggatgactgtgtttctgagcaataaatgacttaaaccaggtatggctgccgatggttatcttccagattggctcgaggacaacctctctgagggcattcgcgagtggtgggacctgaaacctggagccccgaaacccaaagccaaccagcaaaagcaggacgacggccggggtctggtgcttcctggctacaagtacctcggacccttcaacggactcgacaagggggagcccgtcaacgcggcggacgcagcggccctcgagcacgacaaggcctacgaccagcagctcaaagcgggtgacaatccgtacctgcggtataaccacgccgacgccgagtttcaggagcgtctgcaagaagatacgtcttttgggggcaacctcgggcgagcagtcttccaggccaagaagcgggttctcgaacctctcggtctggttgaggaaggcgctaagacggctcctggaaagaagagaccggtagagcagtcaccccaagaaccagactcatcctcgggcatcggcaaatcaggccagcagcccgctaaaaagagactcaattttggtcagactggcgactcagagtcagtccccgacccacaacctctcggagaacctccagaagccccctcaggtctgggacctaatacaatggcttcaggcggtggcgctccaatggcagacaataacgaaggcgccgacggagtgggtaattcctcgggaaattggcattgcgattccacatggctgggggacagagtcatcaccaccagcacccgaacctgggcattgcccacctacaacaaccacctctacaagcaaatctccaatggaacatcgggaggaagcaccaacgacaacacctactttggctacagcaccccctgggggtattttgacttcaacagattccactgccacttctcaccacgtgactggcagcgactcatcaacaacaactggggattccggccaaagagactcaacttcaagctgttcaacatccaggtcaaggaggttacgacgaacgaaggcaccaagaccatcgccaataaccttaccagcaccgtccaggtctttacggactcggagtaccagctaccgtacgtcctaggctctgcccaccaaggatgcctgccaccgtttcctgcagacgtcttcatggttcctcagtacggctacctgacgctcaacaatggaagtcaagcgttaggacgttcttctttctactgtctggaatacttcccttctcagatgctgagaaccggcaacaactttcagttcagctacactttcgaggacgtgcctttccacagcagctacgcacacagccagagtctagatcgactgatgaaccccctcatcgaccagtacctatactacctggtcagaacacagacaactggaactgggggaactcaaactttggcattcagccaagcaggccctagctcaatggccaatcaggctagaaactgggtacccgggccttgctaccgtcagcagcgcgtctccacaaccaccaaccaaaataacaacagcaactttgcgtggacgggagctgctaaattcaagctgaacgggagagactcgctaatgaatcctggcgtggctatggcatcgcacaaagacgacgaggaccgcttctttccatcaagtggcgttctcatatttggcaagcaaggagccgggaacgatggagtcgactacagccaggtgctgattacagatgaggaagaaattaaagccaccaaccctgtagccacagaggaatacggagcagtggccatcaacaaccaggccgctaacacgcaggcgcaaactggacttgtgcataaccagggagttattcctggtatggtctggcagaaccgggacgtgtacctgcagggccctatttgggctaaaatacctcacacagatggcaactttcacccgtctcctctgatgggtggatttggactgaaacacccacctccacagattctaattaaaaatacaccagtgccggcagatcctcctcttaccttcaatcaagccaagctgaactctttcatcacgcagtacagcacgggacaagtcagcgtggaaatcgagtgggagctgcagaaagaaaacagcaagcgctggaatccagagatccagtatacttcaaactactacaaatctacaaatgtggactttgctgtcaataccgaaggtgtttactctgagcctcgccccattggtactcgttacctcacccgtaatttgtaattgcctgttaatcaataaaccggttaattcgtttcagttgaactttggtctctgcg

SEQ ID NO: 5173 - protein, 736 aa, Adeno-associated virus 9; identical to SEQ ID NO: 4805

SEQ ID NO: 5174 - protein, 736 aa, Adeno-associated virus 9
MAADGYLPDWLEDNLSEGIREWWDLKPGAPKPKANQQKQDDGRGLVLPGYKYLGPFNGLDKGEPVNAADAAALEHDKAYDQQLKAGDNPYLRYNHADAEFQERLQEDTSFGGNLGRAVFQAKKRVLEPLGLVEEGAKTAPGKKRPVEQSPQEPDSSSGIGKSGQQPAKKRLNFGQTGDSESVPDPQPLGEPPEAPSGLGPNTMASGGGAPMADNNEGADGVGNSSGNWHCDSTWLGDRVITTSTRTWALPTYNNHLYKQISNGTSGGSTNDNTYFGYSTPWGYFDFNRFHCHFSPRDWQRLINNNWGFRPKRLNFKLFNIQVKEVTTNEGTKTIANNLTSTVQVFTDSEYQLPYVLGSAHQGCLPPFPADVFMVPQYGYLTLNNGSQALGRSSFYCLEYFPSQMLRTGNNFQFSYTFEDVPFHSSYAHSQSLDRLMNPLIDQYLYYLVRTQTTGTGGTQTLAFSQAGPSSMANQARNWVPGPCYRQQRVSTTTNQNNNSNFAWTGAAKFKLNGRDSLMNPGVAMASHKDDEDRFFPSSGVLIFGKQGAGNDGVDYSQVLITDEEEIKATNPVATEEYGAVAINNQAANTQAQTGLVHNQGVIPGMVWQNRDVYLQGPIWAKIPHTDGNFHPSPLMGGFGLKHPPPQILIKNTPVPADPPLTFNQAKLNSFITQYSTGQVSVEIEWELQKENSKRWNPEIQYTSNYYKSTNVDFAVNTEGVYSEPRPIGTRYLTRNL

SEQ ID NO: 5175 - protein, 623 aa, Adeno-associated virus 9
MPGFYEIVIKVPSDLDEHLPGISDSFVNWVAEKEWELPPDSDMDRNLIEQAPLTVAEKLQRDFLVQWRRVSKAPEALFFVQFEKGESYFHLHVLVETTGVKSMVLGRFLSQIREKLVQTIYRGIEPTLPNWFAVTKTRNGAGGGNKVVDECYIPNYLLPKTQPELQWAWTNMEEYISACLNLAERKRLVAQHLTHVSQTQEQNKENLNPNSDAPVIRSKTSARYMELVGWLVDRGITSEKQWIQEDQASYISFNAASNSRSQIKAALDNAGKIMALTKSAPDYLVGPSLPVDITQNRIYRILQLNGYDPAYAGSVFLGWAQKKFGKRNTIWLFGPATTGKTNIAEAIAHAVPFYGCVNWTNENFPFNDCVDKMVIWWEEGKMTAKVVESAKAILGGSKVRVDQKCKSSAQIDPTPVIVTSNTNMCAVIDGNSTTFEHQQPLQDRMFKFELTRRLEHDFGKVTKQEVKEFFRWASDHVTEVAHEFYVRKGGASKRPAPDDADKSEPKRACPSVADPSTSDAEGAPVDFADRYQNKCSRHAGMLQMLLPCKTCERMNQNFNICFTHGVRDCSECFPGVSESQPVVRKRTYRKLCAIHHLLGRAPEIACSACDLVNVDLDDCVSEQ

SEQ ID NO: 5176 - DNA, 1797 bp, Artificial Sequence
  Description of Artificial Sequence: Synthetic polynucleotide
acggctccgaccggagacaagcggaaaggcgaagacgaacctcgtttgcccgacacttcttcacagactcccaagaaaaacaagaagcctcgcaaggaaagaccttccggcggggcagaagatccgggcgaaggcacctcttccaacgctggagcagcagcacccgcctctagtgtgggatcatctatcatggctgaaggaggtggcggcccagtgggcgatgcaggccagggtgccgatggagtgggcaattcctccggaaattggcattgcgattcccaatggctggaaaacggagtcgtcactcgaaccacccgaacctgggtcttgcccagctacaacaaccacctgtacaaacgaatccaaggacccagcggaggcgacaacaacaacaaattctttggattcagcaccccctggggatactttgactacaatcgattccactgccacttttccccgcgagactggcaacgactcatcaacaacaactggggcatccgtcccaaagcgatgcgctttagactctttaacatccaggttaaagaggtcacggtccaagacttcaacaccaccatcggcaacaacctcaccagtacggtccaggtctttgcggacaaggactaccaactgccgtacgtcctcggatcggctaccgaaggcaccttcccgccgttcccagcggatatctacacgatcccgcagtacgggtactgcacgctaaactacaacaacgaggcggtggatcgttcggccttctactgtctggactactttccctcagacatgctgcggacaggaaataactttgagtttacttacaccttcgaggacgttcctttccatagcatgtttgcccacaaccagacgctagaccggctgatgaatcccctcgtggatcagtacctctgggctttcagctccgtcagccaagcaggctcatctggacgagctcttcattactcgcgggcgactaaaaccaacatggcggctcaatataggaactggttacctgggcctttcttccgtgatcagcaaatctttacgggcgctagcaacatcactaaaaataacgtctttagcgtttgggaaaaaggcaagcaatgggaactcgacaatcggaccaacctaatgcagcccggtcctgcggcagcgaccacctttagcggagaacctgaccgtcaagccatgcaaaacacgctggcttttagcaggaccgtctacgatcaaacgaccgccacgaccgatcgtaaccagatactcatcaccaacgaagacgaaatcagacccaccaactcggtcggtatcgacgcgtggggagcagttcccaccaacaaccagtcgatcgtgacccccggcactcgcgcggccgtcaacaatcaaggggcgcttcccgggatggtgtggcaaaacagagacatttaccctacagggacccatttggccaaaattcccgacactgacaatcacttccatccgtccccgcttattgggcggtttggctgcaagcatccccctccccagattttcattaaaaacacacccgtccctgccaacccttcggaaacgttccagacggccaaagtggcctccttcatcaaccagtactcgaccggacagtgcaccgtcgaaatcttttgggaactcaagaaggaaacctccaagcgctggaaccccgaaatccagttcacctccaactttggcaacgcggccgacatccagtttgccgtctccgacacgggatcctattccgaacctcgtcccatcggtacccgttaccttaccaaacctctgtaa

SEQ ID NO: 5177 - DNA, 1989 bp, Artificial Sequence
  Description of Artificial Sequence: Synthetic polynucleotide
atgaggtcgtactacgaggtcatcgttcagctgcccaacgacgtcgagagtcaggtacctggaatctccgattcgttcgtcaactggattacgtcgcgagaatggacgttgcctgaggacgccgattgggatttggaccaggtcgatcaagttcaactgacgctcggcgacaaaatccaacgggagattcgaactcattgggggacgatggccaaagaaccggactttcactattttatccaactggaacaaggtgaggtgttctttcatttacacgtcctgctggaaacgtgttccgtaaagccgatggtactcggaagatatatccgacatattcaacaaaaaattgtgagtaaagtctactgcgccacgagcctacgatggaaggatggatgcgtggtgaccaagaccaaaaatttcgggggcgcgaacaaggtccgggccgagtcgtatattcccgcctacctgatcccgaaacagcaaccggaagtgcagtgggcgtggactaacgtgcccgagtatataaaagcgtgcttgcaccgagaactgcgtgccagtctcgcgcgacttcacttcgaggaggcgggcgtctcgcaatccaaggaaaatctcgcgagaactgcagacggcgctcccgtgatgccgacccgcgtcagcaaacgctacatggagctcgtggattggctcgtggagaaggggatcaccaccgagaaggaatggctgctggaaaacagagaaagctttcggagctttcaggcctcgagcaactcggcgcgtcagatcaagacggccctgcaaggcgccattcaggagatgcttctgaccaagacggcggaggactacctcgtcggaaaggatcccgtctcggacgacgacatccgtcagaaccgcatctacaagattctggaactgaaccactacgacccagcgtacgtggggagtattttggtcgggtggtgccagaagaaatggggcaagcgaaacacgctgtggctgttcggacatgcgaccaccggcaagaccaacatcgcggaggctattgcccatgctgtgccgttctatggatgcgttaactggaccaacgagaactttccgttcaacgactgcgtcgaaaaaatgattatctggtgggaggagggcaaaatgaccgccaaagtggtggaaacagccaaggcgattctgggaggatctcgggtgagagtggaccaaaaatgcaaagcttcggttccgatcgaaccgacgccggtcattattaccagtaacaccaacatgtgttatgtcatcgacgggaacacgaccacgttcgagcataagcagccgttggaggacaggatgtttaagctcgaattgctgactcggttgcctgatgactttggtaaggtgaccaaacaggaggtgcgtcaattcttcaggtggtctcaggatcacctgacccctgtgatcccagaattcctagtgcggaaggcggagtctcgcaaaagacccgccccttccggggaaggctatataagcccgacaaagcggcccgcgctcgcagagcagcagcaggcgtcggagagcgcggacccggttcccaccaggtatcgtatcaaatgctcgaaacattgcggtatggataaaatgttgtttccttgccaaatttgtgaatcgatgaacagagatattaatatttgtgctattcataaaacgaccgactgtaaagagtgtttccccgactacggggataaagatgatgtagaactacccccctgtacagaacacaacgtgtctcgttgttatcaatgtcattcgggcgaattgtatcgcgtgacttcggactctgacgagaaacctgcccccgagagtgatgaaggcaccgagccatcctatgctccctgcacgattcaccacctgatgggcaagagtcacgggttagtcacttgcgcggcgtgtcggttgaaaaatagtacgttgcatgatgacttggatgacggtgatctcgaacaataa

SEQ ID NO: 5178 - DNA, 1626 bp, Artificial Sequence
  Description of Artificial Sequence: Synthetic polynucleotide
atgaggtcgtactacgaggtcatcgttcagctgcccaacgacgtcgagagtcaggtacctggaatctccgattcgttcgtcaactggattacgtcgcgagaatggacgttgcctgaggacgccgattgggatttggaccaggtcgatcaagttcaactgacgctcggcgacaaaatccaacgggagattcgaactcattgggggacgatggccaaagaaccggactttcactattttatccaactggaacaaggtgaggtgttctttcatttacacgtcctgctggaaacgtgttccgtaaagccgatggtactcggaagatatatccgacatattcaacaaaaaattgtgagtaaagtctactgcgccacgagcctacgatggaaggatggatgcgtggtgaccaagaccaaaaatttcgggggcgcgaacaaggtccgggccgagtcgtatattcccgcctacctgatcccgaaacagcaaccggaagtgcagtgggcgtggactaacgtgcccgagtatataaaagcgtgcttgcaccgagaactgcgtgccagtctcgcgcgacttcacttcgaggaggcgggcgtctcgcaatccaaggaaaatctcgcgagaactgcagacggcgctcccgtgatgccgacccgcgtcagcaaacgctacatggagctcgtggattggctcgtggagaaggggatcaccaccgagaaggaatggctgctggaaaacagagaaagctttcggagctttcaggcctcgagcaactcggcgcgtcagatcaagacggccctgcaaggcgccattcaggagatgcttctgaccaagacggcggaggactacctcgtcggaaaggatcccgtctcggacgacgacatccgtcagaaccgcatctacaagattctggaactgaaccactacgacccagcgtacgtggggagtattttggtcgggtggtgccagaagaaatggggcaagcgaaacacgctgtggctgttcggacatgcgaccaccggcaagaccaacatcgcggaggctattgcccatgctgtgccgttctatggatgcgttaactggaccaacgagaactttccgttcaacgactgcgtcgaaaaaatgattatctggtgggaggagggcaaaatgaccgccaaagtggtggaaacagccaaggcgattctgggaggatctcgggtgagagtggaccaaaaatgcaaagcttcggttccgatcgaaccgacgccggtcattattaccagtaacaccaacatgtgttatgtcatcgacgggaacacgaccacgttcgagcataagcagccgttggaggacaggatgtttaagctcgaattgctgactcggttgcctgatgactttggtaaggtgaccaaacaggaggtgcgtcaattcttcaggtggtctcaggatcacctgacccctgtgatcccagaattcctagtgcggaaggcggagtctcgcaaaagacccgccccttccggggaaggctatataagcccgacaaagcggcccgcgctcgcagagcagcagcaggcgtcggagagcgcggacccggttcccaccagattggttggagcggttggtcaaaaagggagtgaatgctgcagctga

SEQ ID NO: 5179 - DNA, 1323 bp, Artificial Sequence
  Description of Artificial Sequence: Synthetic polynucleotide
atggagctcgtggattggctcgtggagaaggggatcaccaccgagaaggaatggctgctggaaaacagagaaagctttcggagctttcaggcctcgagcaactcggcgcgtcagatcaagacggccctgcaaggcgccattcaggagatgcttctgaccaagacggcggaggactacctcgtcggaaaggatcccgtctcggacgacgacatccgtcagaaccgcatctacaagattctggaactgaaccactacgacccagcgtacgtggggagtattttggtcgggtggtgccagaagaaatggggcaagcgaaacacgctgtggctgttcggacatgcgaccaccggcaagaccaacatcgcggaggctattgcccatgctgtgccgttctatggatgcgttaactggaccaacgagaactttccgttcaacgactgcgtcgaaaaaatgattatctggtgggaggagggcaaaatgaccgccaaagtggtggaaacagccaaggcgattctgggaggatctcgggtgagagtggaccaaaaatgcaaagcttcggttccgatcgaaccgacgccggtcattattaccagtaacaccaacatgtgttatgtcatcgacgggaacacgaccacgttcgagcataagcagccgttggaggacaggatgtttaagctcgaattgctgactcggttgcctgatgactttggtaaggtgaccaaacaggaggtgcgtcaattcttcaggtggtctcaggatcacctgacccctgtgatcccagaattcctagtgcggaaggcggagtctcgcaaaagacccgccccttccggggaaggctatataagcccgacaaagcggcccgcgctcgcagagcagcagcaggcgtcggagagcgcggacccggttcccaccaggtatcgtatcaaatgctcgaaacattgcggtatggataaaatgttgtttccttgccaaatttgtgaatcgatgaacagagatattaatatttgtgctattcataaaacgaccgactgtaaagagtgtttccccgactacggggataaagatgatgtagaactacccccctgtacagaacacaacgtgtctcgttgttatcaatgtcattcgggcgaattgtatcgcgtgacttcggactctgacgagaaacctgcccccgagagtgatgaaggcaccgagccatcctatgctccctgcacgattcaccacctgatgggcaagagtcacgggttagtcacttgcgcggcgtgtcggttgaaaaatagtacgttgcatgatgacttggatgacggtgatctcgaacaataa

SEQ ID NO: 5180 - DNA, 960 bp, Artificial Sequence
  Description of Artificial Sequence: Synthetic polynucleotide
atggagctcgtggattggctcgtggagaaggggatcaccaccgagaaggaatggctgctggaaaacagagaaagctttcggagctttcaggcctcgagcaactcggcgcgtcagatcaagacggccctgcaaggcgccattcaggagatgcttctgaccaagacggcggaggactacctcgtcggaaaggatcccgtctcggacgacgacatccgtcagaaccgcatctacaagattctggaactgaaccactacgacccagcgtacgtggggagtattttggtcgggtggtgccagaagaaatggggcaagcgaaacacgctgtggctgttcggacatgcgaccaccggcaagaccaacatcgcggaggctattgcccatgctgtgccgttctatggatgcgttaactggaccaacgagaactttccgttcaacgactgcgtcgaaaaaatgattatctggtgggaggagggcaaaatgaccgccaaagtggtggaaacagccaaggcgattctgggaggatctcgggtgagagtggaccaaaaatgcaaagcttcggttccgatcgaaccgacgccggtcattattaccagtaacaccaacatgtgttatgtcatcgacgggaacacgaccacgttcgagcataagcagccgttggaggacaggatgtttaagctcgaattgctgactcggttgcctgatgactttggtaaggtgaccaaacaggaggtgcgtcaattcttcaggtggtctcaggatcacctgacccctgtgatcccagaattcctagtgcggaaggcggagtctcgcaaaagacccgccccttccggggaaggctatataagcccgacaaagcggcccgcgctcgcagagcagcagcaggcgtcggagagcgcggacccggttcccaccagattggttggagcggttggtcaaaaagggagtgaatgctgcagctga

SEQ ID NO: 5181 - DNA, 1608 bp, Artificial Sequence
  Description of Artificial Sequence: Synthetic polynucleotide
atggctgaaggaggtggcggcccagtgggcgatgcaggccagggtgccgatggagtgggcaattcctccggaaattggcattgcgattcccaatggctggaaaacggagtcgtcactcgaaccacccgaacctgggtcttgcccagctacaacaaccacctgtacaaacgaatccaaggacccagcggaggcgacaacaacaacaaattctttggattcagcaccccctggggatactttgactacaatcgattccactgccacttttccccgcgagactggcaacgactcatcaacaacaactggggcatccgtcccaaagcgatgcgctttagactctttaacatccaggttaaagaggtcacggtccaagacttcaacaccaccatcggcaacaacctcaccagtacggtccaggtctttgcggacaaggactaccaactgccgtacgtcctcggatcggctaccgaaggcaccttcccgccgttcccagcggatatctacacgatcccgcagtacgggtactgcacgctaaactacaacaacgaggcggtggatcgttcggccttctactgtctggactactttccctcagacatgctgcggacaggaaataactttgagtttacttacaccttcgaggacgttcctttccatagcatgtttgcccacaaccagacgctagaccggctgatgaatcccctcgtggatcagtacctctgggctttcagctccgtcagccaagcaggctcatctggacgagctcttcattactcgcgggcgactaaaaccaacatggcggctcaatataggaactggttacctgggcctttcttccgtgatcagcaaatctttacgggcgctagcaacatcactaaaaataacgtctttagcgtttgggaaaaaggcaagcaatgggaactcgacaatcggaccaacctaatgcagcccggtcctgcggcagcgaccacctttagcggagaacctgaccgtcaagccatgcaaaacacgctggcttttagcaggaccgtctacgatcaaacgaccgccacgaccgatcgtaaccagatactcatcaccaacgaagacgaaatcagacccaccaactcggtcggtatcgacgcgtggggagcagttcccaccaacaaccagtcgatcgtgacccccggcactcgcgcggccgtcaacaatcaaggggcgcttcccgggatggtgtggcaaaacagagacatttaccctacagggacccatttggccaaaattcccgacactgacaatcacttccatccgtccccgcttattgggcggtttggctgcaagcatccccctccccagattttcattaaaaacacacccgtccctgccaacccttcggaaacgttccagacggccaaagtggcctccttcatcaaccagtactcgaccggacagtgcaccgtcgaaatcttttgggaactcaagaaggaaacctccaagcgctggaaccccgaaatccagttcacctccaactttggcaacgcggccgacatccagtttgccgtctccgacacgggatcctattccgaacctcgtcccatcggtacccgttaccttaccaaacctctgtaa

SEQ ID NO: 5182 - DNA, 2232 bp, Artificial Sequence
  Description of Artificial Sequence: Synthetic polynucleotide
atgtctctcatttctgatgcgattccagattggttggagcggttggtcaaaaagggagtgaatgctgcagctgatttctaccatttggaaagcggtcctcctcgtcctaaggcaaatcagcaaactcaagaatctcttgaaaaggacgattcgagaggtctcgtgttcccaggctacaattatctaggccctttcaacggtctagataaaggagaacccgtcaacgaggcagacgctgccgccttagaacacgacaaggcttacgacctcgaaatcaaggacgggcacaacccgtactttgagtacaacgaggccgacagacgtttccaggaacgtctcaaagacgatacctcctttggaggcaatttaggtaaagccatcttccaggccaaaaagagggttctcgaaccctttggtctggtggaagactcaaagacggctccgaccggagacaagcggaaaggcgaagacgaacctcgtttgcccgacacttcttcacagactcccaagaaaaacaagaagcctcgcaaggaaagaccttccggcggggcagaagatccgggcgaaggcacctcttccaacgctggagcagcagcacccgcctctagtgtgggatcatctatcatggctgaaggaggtggcggcccagtgggcgatgcaggccagggtgccgatggagtgggcaattcctccggaaattggcattgcgattcccaatggctggaaaacggagtcgtcactcgaaccacccgaacctgggtcttgcccagctacaacaaccacctgtacaaacgaatccaaggacccagcggaggcgacaacaacaacaaattctttggattcagcaccccctggggatactttgactacaatcgattccactgccacttttccccgcgagactggcaacgactcatcaacaacaactggggcatccgtcccaaagcgatgcgctttagactctttaacatccaggttaaagaggtcacggtccaagacttcaacaccaccatcggcaacaacctcaccagtacggtccaggtctttgcggacaaggactaccaactgccgtacgtcctcggatcggctaccgaaggcaccttcccgccgttcccagcggatatctacacgatcccgcagtacgggtactgcacgctaaactacaacaacgaggcggtggatcgttcggccttctactgtctggactactttccctcagacatgctgcggacaggaaataactttgagtttacttacaccttcgaggacgttcctttccatagcatgtttgcccacaaccagacgctagaccggctgatgaatcccctcgtggatcagtacctctgggctttcagctccgtcagccaagcaggctcatctggacgagctcttcattactcgcgggcgactaaaaccaacatggcggctcaatataggaactggttacctgggcctttcttccgtgatcagcaaatctttacgggcgctagcaacatcactaaaaataacgtctttagcgtttgggaaaaaggcaagcaatgggaactcgacaatcggaccaacctaatgcagcccggtcctgcggcagcgaccacctttagcggagaacctgaccgtcaagccatgcaaaacacgctggcttttagcaggaccgtctacgatcaaacgaccgccacgaccgatcgtaaccagatactcatcaccaacgaagacgaaatcagacccaccaactcggtcggtatcgacgcgtggggagcagttcccaccaacaaccagtcgatcgtgacccccggcactcgcgcggccgtcaacaatcaaggggcgcttcccgggatggtgtggcaaaacagagacatttaccctacagggacccatttggccaaaattcccgacactgacaatcacttccatccgtccccgcttattgggcggtttggctgcaagcatccccctccccagattttcattaaaaacacacccgtccctgccaacccttcggaaacgttccagacggccaaagtggcctccttcatcaaccagtactcgaccggacagtgcaccgtcgaaatcttttgggaactcaagaaggaaacctccaagcgctggaaccccgaaatccagttcacctccaactttggcaacgcggccgacatccagtttgccgtctccgacacgggatcctattccgaacctcgtcccatcggtacccgttaccttaccaaacctctgtaa

SEQ ID NO: 5183 - protein, 535 aa, Artificial Sequence
  Description of Artificial Sequence: Synthetic polypeptide
MAEGGGGPVGDAGQGADGVGNSSGNWHCDSQWLENGVVTRTTRTWVLPSYNNHLYKRIQGPSGGDNNNKFFGFSTPWGYFDYNRFHCHFSPRDWQRLINNNWGIRPKAMRFRLFNIQVKEVTVQDFNTTIGNNLTSTVQVFADKDYQLPYVLGSATEGTFPPFPADIYTIPQYGYCTLNYNNEAVDRSAFYCLDYFPSDMLRTGNNFEFTYTFEDVPFHSMFAHNQTLDRLMNPLVDQYLWAFSSVSQAGSSGRALHYSRATKTNMAAQYRNWLPGPFFRDQQIFTGASNITKNNVFSVWEKGKQWELDNRTNLMQPGPAAATTFSGEPDRQAMQNTLAFSRTVYDQTTATTDRNQILITNEDEIRPTNSVGIDAWGAVPTNNQSIVTPGTRAAVNNQGALPGMVWQNRDIYPTGTHLAKIPDTDNHFHPSPLIGRFGCKHPPPQIFIKNTPVPANPSETFQTAKVASFINQYSTGQCTVEIFWELKKETSKRWNPEIQFTSNFGNAADIQFAVSDTGSYSEPRPIGTRYLTKPL

SEQ ID NO: 5184 - protein, 440 aa, Artificial Sequence
  Description of Artificial Sequence: Synthetic polypeptide
MELVDWLVEKGITTEKEWLLENRESFRSFQASSNSARQIKTALQGAIQEMLLTKTAEDYLVGKDPVSDDDIRQNRIYKILELNHYDPAYVGSILVGWCQKKWGKRNTLWLFGHATTGKTNIAEAIAHAVPFYGCVNWTNENFPFNDCVEKMIIWWEEGKMTAKVVETAKAILGGSRVRVDQKCKASVPIEPTPVIITSNTNMCYVIDGNTTTFEHKQPLEDRMFKLELLTRLPDDFGKVTKQEVRQFFRWSQDHLTPVIPEFLVRKAESRKRPAPSGEGYISPTKRPALAEQQQASESADPVPTRYRIKCSKHCGMDKMLFPCQICESMNRDINICAIHKTTDCKECFPDYGDKDDVELPPCTEHNVSRCYQCHSGELYRVTSDSDEKPAPESDEGTEPSYAPCTIHHLMGKSHGLVTCAACRLKNSTLHDDLDDGDLEQ

SEQ ID NO: 5185 - protein, 319 aa, Artificial Sequence
  Description of Artificial Sequence: Synthetic polypeptide
MELVDWLVEKGITTEKEWLLENRESFRSFQASSNSARQIKTALQGAIQEMLLTKTAEDYLVGKDPVSDDDIRQNRIYKILELNHYDPAYVGSILVGWCQKKWGKRNTLWLFGHATTGKTNIAEAIAHAVPFYGCVNWTNENFPFNDCVEKMIIWWEEGKMTAKVVETAKAILGGSRVRVDQKCKASVPIEPTPVIITSNTNMCYVIDGNTTTFEHKQPLEDRMFKLELLTRLPDDFGKVTKQEVRQFFRWSQDHLTPVIPEFLVRKAESRKRPAPSGEGYISPTKRPALAEQQQASESADPVPTRLVGAVGQKGSECCS

SEQ ID NO: 5186 - protein, 662 aa, Artificial Sequence
  Description of Artificial Sequence: Synthetic polypeptide
MRSYYEVIVQLPNDVESQVPGISDSFVNWITSREWTLPEDADWDLDQVDQVQLTLGDKIQREIRTHWGTMAKEPDFHYFIQLEQGEVFFHLHVLLETCSVKPMVLGRYIRHIQQKIVSKVYCATSLRWKDGCVVTKTKNFGGANKVRAESYIPAYLIPKQQPEVQWAWTNVPEYIKACLHRELRASLARLHFEEAGVSQSKENLARTADGAPVMPTRVSKRYMELVDWLVEKGITTEKEWLLENRESFRSFQASSNSARQIKTALQGAIQEMLLTKTAEDYLVGKDPVSDDDIRQNRIYKILELNHYDPAYVGSILVGWCQKKWGKRNTLWLFGHATTGKTNIAEAIAHAVPFYGCVNWTNENFPFNDCVEKMIIWWEEGKMTAKVVETAKAILGGSRVRVDQKCKASVPIEPTPVIITSNTNMCYVIDGNTTTFEHKQPLEDRMFKLELLTRLPDDFGKVTKQEVRQFFRWSQDHLTPVIPEFLVRKAESRKRPAPSGEGYISPTKRPALAEQQQASESADPVPTRYRIKCSKHCGMDKMLFPCQICESMNRDINICAIHKTTDCKECFPDYGDKDDVELPPCTEHNVSRCYQCHSGELYRVTSDSDEKPAPESDEGTEPSYAPCTIHHLMGKSHGLVTCAACRLKNSTLHDDLDDGDLEQ

SEQ ID NO: 5187 - protein, 541 aa, Artificial Sequence
  Description of Artificial Sequence: Synthetic polypeptide
MRSYYEVIVQLPNDVESQVPGISDSFVNWITSREWTLPEDADWDLDQVDQVQLTLGDKIQREIRTHWGTMAKEPDFHYFIQLEQGEVFFHLHVLLETCSVKPMVLGRYIRHIQQKIVSKVYCATSLRWKDGCVVTKTKNFGGANKVRAESYIPAYLIPKQQPEVQWAWTNVPEYIKACLHRELRASLARLHFEEAGVSQSKENLARTADGAPVMPTRVSKRYMELVDWLVEKGITTEKEWLLENRESFRSFQASSNSARQIKTALQGAIQEMLLTKTAEDYLVGKDPVSDDDIRQNRIYKILELNHYDPAYVGSILVGWCQKKWGKRNTLWLFGHATTGKTNIAEAIAHAVPFYGCVNWTNENFPFNDCVEKMIIWWEEGKMTAKVVETAKAILGGSRVRVDQKCKASVPIEPTPVIITSNTNMCYVIDGNTTTFEHKQPLEDRMFKLELLTRLPDDFGKVTKQEVRQFFRWSQDHLTPVIPEFLVRKAESRKRPAPSGEGYISPTKRPALAEQQQASESADPVPTRLVGAVGQKGSECCS

SEQ ID NO: 5188 - protein, 743 aa, Artificial Sequence
  Description of Artificial Sequence: Synthetic polypeptide
MSLISDAIPDWLERLVKKGVNAAADFYHLESGPPRPKANQQTQESLEKDDSRGLVFPGYNYLGPFNGLDKGEPVNEADAAALEHDKAYDLEIKDGHNPYFEYNEADRRFQERLKDDTSFGGNLGKAIFQAKKRVLEPFGLVEDSKTAPTGDKRKGEDEPRLPDTSSQTPKKNKKPRKERPSGGAEDPGEGTSSNAGAAAPASSVGSSIMAEGGGGPVGDAGQGADGVGNSSGNWHCDSQWLENGVVTRTTRTWVLPSYNNHLYKRIQGPSGGDNNNKFFGFSTPWGYFDYNRFHCHFSPRDWQRLINNNWGIRPKAMRFRLFNIQVKEVTVQDFNTTIGNNLTSTVQVFADKDYQLPYVLGSATEGTFPPFPADIYTIPQYGYCTLNYNNEAVDRSAFYCLDYFPSDMLRTGNNFEFTYTFEDVPFHSMFAHNQTLDRLMNPLVDQYLWAFSSVSQAGSSGRALHYSRATKTNMAAQYRNWLPGPFFRDQQIFTGASNITKNNVFSVWEKGKQWELDNRTNLMQPGPAAATTFSGEPDRQAMQNTLAFSRTVYDQTTATTDRNQILITNEDEIRPTNSVGIDAWGAVPTNNQSIVTPGTRAAVNNQGALPGMVWQNRDIYPTGTHLAKIPDTDNHFHPSPLIGRFGCKHPPPQIFIKNTPVPANPSETFQTAKVASFINQYSTGQCTVEIFWELKKETSKRWNPEIQFTSNFGNAADIQFAVSDTGSYSEPRPIGTRYLTKPL

SEQ ID NO: 5189 - protein, 598 aa, Artificial Sequence
  Description of Artificial Sequence: Synthetic polypeptide
TAPTGDKRKGEDEPRLPDTSSQTPKKNKKPRKERPSGGAEDPGEGTSSNAGAAAPASSVGSSIMAEGGGGPVGDAGQGADGVGNSSGNWHCDSQWLENGVVTRTTRTWVLPSYNNHLYKRIQGPSGGDNNNKFFGFSTPWGYFDYNRFHCHFSPRDWQRLINNNWGIRPKAMRFRLFNIQVKEVTVQDFNTTIGNNLTSTVQVFADKDYQLPYVLGSATEGTFPPFPADIYTIPQYGYCTLNYNNEAVDRSAFYCLDYFPSDMLRTGNNFEFTYTFEDVPFHSMFAHNQTLDRLMNPLVDQYLWAFSSVSQAGSSGRALHYSRATKTNMAAQYRNWLPGPFFRDQQIFTGASNITKNNVFSVWEKGKQWELDNRTNLMQPGPAAATTFSGEPDRQAMQNTLAFSRTVYDQTTATTDRNQILITNEDEIRPTNSVGIDAWGAVPTNNQSIVTPGTRAAVNNQGALPGMVWQNRDIYPTGTHLAKIPDTDNHFHPSPLIGRFGCKHPPPQIFIKNTPVPANPSETFQTAKVASFINQYSTGQCTVEIFWELKKETSKRWNPEIQFTSNFGNAADIQFAVSDTGSYSEPRPIGTRYLTKPL

SEQ ID NO: 5190 - DNA, 4694 bp, Artificial Sequence
  Description of Artificial Sequence: Synthetic polynucleotide
tggccagtttccaagacaggctcgctcgctcactcgggccggggccccaaaggggcccctagcgaccgcttcgcggtcgcggcccgagtgagcgagcgagcctgtcttggaaactggccagcactccggtgaggtaatgccgtcacgtggtcgggaatgggaacgggaaatctcgcgagaacgtaaacaaatataagacggcgccacacggcgctgcgtcatacgcgcgcgcgcaccggcgagatgaggtcgtactacgaggtcatcgttcagctgcccaacgacgtcgagagtcaggtacctggaatctccgattcgttcgtcaactggattacgtcgcgagaatggacgttgcctgaggacgccgattgggatttggaccaggtcgatcaagttcaactgacgctcggcgacaaaatccaacgggagattcgaactcattgggggacgatggccaaagaaccggactttcactattttatccaactggaacaaggtgaggtgttctttcatttacacgtcctgctggaaacgtgttccgtaaagccgatggtactcggaagatatatccgacatattcaacaaaaaattgtgagtaaagtctactgcgccacgagcctacgatggaaggatggatgcgtggtgaccaagaccaaaaatttcgggggcgcgaacaaggtccgggccgagtcgtatattcccgcctacctgatcccgaaacagcaaccggaagtgcagtgggcgtggactaacgtgcccgagtatataaaagcgtgcttgcaccgagaactgcgtgccagtctcgcgcgacttcacttcgaggaggcgggcgtctcgcaatccaaggaaaatctcgcgagaactgcagacggcgctcccgtgatgccgacccgcgtcagcaaacgctacatggagctcgtggattggctcgtggagaaggggatcaccaccgagaaggaatggctgctggaaaacagagaaagctttcggagctttcaggcctcgagcaactcggcgcgtcagatcaagacggccctgcaaggcgccattcaggagatgcttctgaccaagacggcggaggactacctcgtcggaaaggatcccgtctcggacgacgacatccgtcagaaccgcatctacaagattctggaactgaaccactacgacccagcgtacgtggggagtattttggtcgggtggtgccagaagaaatggggcaagcgaaacacgctgtggctgttcggacatgcgaccaccggcaagaccaacatcgcggaggctattgcccatgctgtgccgttctatggatgcgttaactggaccaacgagaactttccgttcaacgactgcgtcgaaaaaatgattatctggtgggaggagggcaaaatgaccgccaaagtggtggaaacagccaaggcgattctgggaggatctcgggtgagagtggaccaaaaatgcaaagcttcggttccgatcgaaccgacgccggtcattattaccagtaacaccaacatgtgttatgtcatcgacgggaacacgaccacgttcgagcataagcagccgttggaggacaggatgtttaagctcgaattgctgactcggttgcctgatgactttggtaaggtgaccaaacaggaggtgcgtcaattcttcaggtggtctcaggatcacctgacccctgtgatcccagaattcctagtgcggaaggcggagtctcgcaaaagacccgccccttccggggaaggctatataagcccgacaaagcggcccgcgctcgcagagcagcagcaggcgtcggagagcgcggacccggttcccaccaggtatcgtatcaaatgctcgaaacattgcggtatggataaaatgttgtttccttgccaaatttgtgaatcgatgaacagagatattaatatttgtgctattcataaaacgaccgactgtaaagagtgtttccccgactacggggataaagatgatgtagaactacccccctgtacagaacacaacgtgtctcgttgttatcaatgtcattcgggcgaattgtatcgcgtgacttcggactctgacgagaaacctgcccccgagagtgatgaaggcaccgagccatcctatgctccctgcacgattcaccacctgatgggcaagagtcacgggttagtcacttgcgcggcgtgtcggttgaaaaatagtacgttgcatgatgacttggatgacggtgatctcgaacaataaatgattgaaatgtagccatgtctctcatttctgatgcgattccagattggttggagcggttggtcaaaaagggagtgaatgctgcagctgatttctaccatttggaaagcggtcctcctcgtcctaaggcaaatcagcaaactcaagaatctcttgaaaaggacgattcgagaggtctcgtgttcccaggctacaattatctaggccctttcaacggtctagataaaggagaacccgtcaacgaggcagacgctgccgccttagaacacgacaaggcttacgacctcgaaatcaaggacgggcacaacccgtactttgagtacaacgaggccgacagacgtttccaggaacgtctcaaagacgatacctcctttggaggcaatttaggtaaagccatcttccaggccaaaaagagggttctcgaaccctttggtctggtggaagactcaaagacggctccgaccggagacaagcggaaaggcgaagacgaacctcgtttgcccgacacttcttcacagactcccaagaaaaacaagaagcctcgcaaggaaagaccttccggcggggcagaagatccgggcgaaggcacctcttccaacgctggagcagcagcacccgcctctagtgtgggatcatctatcatggctgaaggaggtggcggcccagtgggcgatgcaggccagggtgccgatggagtgggcaattcctccggaaattggcattgcgattcccaatggctggaaaacggagtcgtcactcgaaccacccgaacctgggtcttgcccagctacaacaaccacctgtacaaacgaatccaaggacccagcggaggcgacaacaacaacaaattctttggattcagcaccccctggggatactttgactacaatcgattccactgccacttttccccgcgagactggcaacgactcatcaacaacaactggggcatccgtcccaaagcgatgcgctttagactctttaacatccaggttaaagaggtcacggtccaagacttcaacaccaccatcggcaacaacctcaccagtacggtccaggtctttgcggacaaggactaccaactgccgtacgtcctcggatcggctaccgaaggcaccttcccgccgttcccagcggatatctacacgatcccgcagtacgggtactgcacgctaaactacaacaacgaggcggtggatcgttcggccttctactgtctggactactttccctcagacatgctgcggacaggaaataactttgagtttacttacaccttcgaggacgttcctttccatagcatgtttgcccacaaccagacgctagaccggctgatgaatcccctcgtggatcagtacctctgggctttcagctccgtcagccaagcaggctcatctggacgagctcttcattactcgcgggcgactaaaaccaacatggcggctcaatataggaactggttacctgggcctttcttccgtgatcagcaaatctttacgggcgctagcaacatcactaaaaataacgtctttagcgtttgggaaaaaggcaagcaatgggaactcgacaatcggaccaacctaatgcagcccggtcctgcggcagcgaccacctttagcggagaacctgaccgtcaagccatgcaaaacacgctggcttttagcaggaccgtctacgatcaaacgaccgccacgaccgatcgtaaccagatactcatcaccaacgaagacgaaatcagacccaccaactcggtcggtatcgacgcgtggggagcagttcccaccaacaaccagtcgatcgtgacccccggcactcgcgcggccgtcaacaatcaaggggcgcttcccgggatggtgtggcaaaacagagacatttaccctacagggacccatttggccaaaattcccgacactgacaatcacttccatccgtccccgcttattgggcggtttggctgcaagcatccccctccccagattttcattaaaaacacacccgtccctgccaacccttcggaaacgttccagacggccaaagtggcctccttcatcaaccagtactcgaccggacagtgcaccgtcgaaatcttttgggaactcaagaaggaaacctccaagcgctggaaccccgaaatccagttcacctccaactttggcaacgcggccgacatccagtttgccgtctccgacacgggatcctattccgaacctcgtcccatcggtacccgttaccttaccaaacctctgtaaattaaacccttcaataaaccgtttatgcgtaactgtatttccgtctcctgtcgttattcagtcacatgatgcggcattacctcaccggagtgctggccagtttccaagacaggctcgctcgctcactcgggccggggccccaaaggggcccctagcgaccgcttcgcggtcgcggcccgagtgagcgagcgagcctgtcttggaaactggcca

SEQ ID NO: 5191 - DNA, 2211 bp, Artificial Sequence
  Description of Artificial Sequence: Synthetic polynucleotide
atggctgctgatggttatcttccagattggctcgaggacactctctctgaaggaataagacagtggtggaagctcaaacctggcccaccaccaccaaagcccgcagagcggcataaggacgacagcaggggtcttgtgcttcctgggtacaagtacctcggacccttcaacggactcgacaagggagagccggtcaacgaggcagacgcagcggccctcgagcacgacaaggcctacgaccagcagctcaaggccggtgacaacccctacctcaagtacaaccacgccgacgcggagttccagcagcggcttcagggcgacacatcgtttgggggcaacctcggcagagcagtcttccaggccaaaaagagggttcttgaacctcttggtctggttgagcaagcgggtgagacggctcctggaaagaagagaccgttgattgaatccccccagcagcccgactcctccacgggtatcggcaaaaaaggcaagcagccggctaaaaagagactcaattttggtcagactggcgactcagagtcagtccccgacccacaacctctcggagaacctccagcaacccccgctgctgtgggacctactacaatggcttcaggtggtggcgcaccaatggcagacaataacgaaggcgccgacggagtgggtaatgcctcaggaaattggcattgcgattccacatggctgggcgacagagtcatcaccaccagcacccgcacctgggccttgcccacctacaataaccacctctacaagcaaatctccagtgcttcaacgggggccagcaacgacaaccactacttcggctacagcaccccctgggggtattttgacttcaacagattccactgccacttttcaccacgtgactggcagcgactcatcaacaacaattggggattccggcccaagagactcaacttcaaactcttcaacatccaagtcaaggaggtcacgacgaatgatggcgtcacaaccatcgctaataaccttaccagcacggttcaagtcttctcggactcagactatcagctcccgtacgtgctcgggtcggctcacgagggctgcctcccgccgttcccagcagacgtcttcatggtgccacagtatggatacctcaccctgaacaacgggagtcaggcagtaggacgctcttcattttactgcctggagtactttccttctcagatgctgcgtaccggaaacaactttaccttcagctacacttttgaggacgttcctttccacagcagctacgctcacagccagagtctggaccgtctcatgaatcctctcatcgaccagtacctgtattacctgaacagaactcagaatcagtccggaagtgcccaaaacaaggacttgctgtttagccgggggtctccagctggcatgtctgttcagcccaaaaactggctacctggaccctgttatcggcagcagcgcgtttctaaaacaaaaacagacaacaacaacagcaactttacctggactggtgcttcaaaatataaccttaatgggcgtgaatctataatcaaccctggcactgctatggcctcacacaaagacgacaaagacaagttctttcccatgagcggtgtcatgatttttggaaaggagagcgccggagcttcaaacactgcattggacaatgtcatgatcacagacgaagaggaaatcaaagccactaaccccgtggccaccgaaagatttgggactgtggcagtcaatctccagagcagcagcacagaccctgcgaccggagatgtgcatgttatgggagccttacctggaatggtgtggcaagacagagacgtatacctgcagggtcccatttgggccaaaattcctcacacagatggacactttcacccgtctcctcttatgggcggctttggactcaagaacccgcctcctcagatcctcatcaaaaacacgcctgttcctgcgaatcctccggcggagttttcagctacaaagtttgcttcattcatcacccaatactccacaggacaagtgagtgtggaaattgaatgggagctgcagaaagaaaacagcaagcgctggaatcccgaagtgcagtacacatccaattatgcaaaatctgccaacgttgattttactgtggacaacaatggactttatactgagcctcgccccattggcacccgttacctcacccgtcccctgtaa

SEQ ID NO: 5192 - protein, 736 aa, Artificial Sequence
  Description of Artificial Sequence: Synthetic polypeptide
MAADGYLPDWLEDTLSEGIRQWWKLKPGPPPPKPAERHKDDSRGLVLPGYKYLGPFNGLDKGEPVNEADAAALEHDKAYDQQLKAGDNPYLKYNHADAEFQQRLQGDTSFGGNLGRAVFQAKKRVLEPLGLVEQAGETAPGKKRPLIESPQQPDSSTGIGKKGKQPAKKRLNFGQTGDSESVPDPQPLGEPPATPAAVGPTTMASGGGAPMADNNEGADGVGNASGNWHCDSTWLGDRVITTSTRTWALPTYNNHLYKQISSASTGASNDNHYFGYSTPWGYFDFNRFHCHFSPRDWQRLINNNWGFRPKRLNFKLFNIQVKEVTTNDGVTTIANNLTSTVQVFSDSDYQLPYVLGSAHEGCLPPFPADVFMVPQYGYLTLNNGSQAVGRSSFYCLEYFPSQMLRTGNNFTFSYTFEDVPFHSSYAHSQSLDRLMNPLIDQYLYYLNRTQNQSGSAQNKDLLFSRGSPAGMSVQPKNWLPGPCYRQQRVSKTKTDNNNSNFTWTGASKYNLNGRESIINPGTAMASHKDDKDKFFPMSGVMIFGKESAGASNTALDNVMITDEEEIKATNPVATERFGTVAVNLQSSSTDPATGDVHVMGALPGMVWQDRDVYLQGPIWAKIPHTDGHFHPSPLMGGFGLKNPPPQILIKNTPVPANPPAEFSATKFASFITQYSTGQVSVEIEWELQKENSKRWNPEVQYTSNYAKSANVDFTVDNNGLYTEPRPIGTRYLTRPL

SEQ ID NO: 5193 - DNA, 2211 bp, Artificial Sequence
  Description of Artificial Sequence: Synthetic polynucleotide
atggcttccgatggttatcttccagattggctcgaggacaacctctctgagggcatccgcgagtggtgggacttgaaacctggagccccgaaacccaaagccaaccagcaaaagcaggacgacggccggggtctggtgcttcctggctacaagtacctcggacccttcaacggactcgacaagggggagcccgtcaacgcggcggatgcagcggccctcgagcacgacaaggcctacgaccagcagctcagagcgggtgacaatccgtacctgcggtataaccacgccgacgccgagtttcaggagcgtctgcaagaagatacgtcttttgggggcaacctcgggcgagcagtcttccaggccaagaagagggttctcgaaccttttggtctggttgaggaaggtgctaagacggctcctggaaagaaacgtccggtagagcagtcgccacaagagccagactcctcctcgggcattggcaagacaggccagcagcccgctaaaaagagactcaattttggtcagactggcgactcagagtcagtccccgacccacaacctctcggagaacctccagcaacccccgctgctgtgggacctactacaatggcttcaggcggtggcgcaccaatggcagacaataacgaaggcgccgacggagtgggtaatgcctcaggaaattggcattgcgattccacatggctgggcgacagagtcatcaccaccagcacccgaacatgggccttgcccacctataacaaccacctctacaagcaaatctccagtgcttcaacgggggccagcaacgacaaccactacttcggctacagcaccccctgggggtattttgatttcaacagattccactgccatttctcaccacgtgactggcagcgactcatcaacaacaattggggattccggcccaagagactcaacttcaaactcttcaacatccaagtcaaggaggtcacgacgaatgatggcgtcacaaccatcgctaataaccttaccagcacggttcaagtcttctcggactcggagtaccagcttccgtacgtcctcggctctgcgcaccagggctgcctccctccgttcccggcggacgtgttcatgattccgcagtacggctacctaacgctcaacaatggcagccaggcagtgggacggtcatccttttactgcctggaatatttcccatcgcagatgctgagaacgggcaataactttaccttcagctacaccttcgaggacgtgcctttccacagcagctacgcgcacagccagagcctggaccggctgatgaatcctctcatcgaccagtacctgtattacctgaacagaactcagaatcagtccggaagtgcccaaaacaaggacttgctgtttagccgggggtctccagctggcatgtctgttcagcccaaaaactggctacctggaccctgttaccggcagcagcgcgtttctaaaacaaaaacagacaacaacaacagcaactttacctggactggtgcttcaaaatataaccttaatgggcgtgaatctataatcaaccctggcactgctatggcctcacacaaagacgacaaagacaagttctttcccatgagcggtgtcatgatttttggaaaggagagcgccggagcttcaaacactgcattggacaatgtcatgatcacagacgaagaggaaatcaaagccactaaccccgtggccaccgaaagatttgggactgtggcagtcaatctccagagcagcagcacagaccctgcgaccggagatgtgcatgttatgggagccttacctggaatggtgtggcaagacagagacgtatacctgcagggtcccatttgggccaaaattcctcacacagatggacactttcacccgtctcctcttatgggcggctttggacttaagcacccgcctcctcagatcctcatcaaaaacacgcctgttcctgcgaatcctccggcagagttttcggctacaaagtttgcttcattcatcacccagtattctactggccaagtcagcgtggagattgaatgggagctgcagaaagaaaacagcaaacgctggaatcccgaagtgcagtatacatctaactatgcaaaatctgccaacgttgatttcactgtggacaacaatggactttatactgagcctcgtcccattggcacccgttacctcacccgtcccctgtaa

SEQ ID NO: 5194 - protein, 736 aa, Artificial Sequence
  Description of Artificial Sequence: Synthetic polypeptide
MASDGYLPDWLEDNLSEGIREWWDLKPGAPKPKANQQKQDDGRGLVLPGYKYLGPFNGLDKGEPVNAADAAALEHDKAYDQQLRAGDNPYLRYNHADAEFQERLQEDTSFGGNLGRAVFQAKKRVLEPFGLVEEGAKTAPGKKRPVEQSPQEPDSSSGIGKTGQQPAKKRLNFGQTGDSESVPDPQPLGEPPATPAAVGPTTMASGGGAPMADNNEGADGVGNASGNWHCDSTWLGDRVITTSTRTWALPTYNNHLYKQISSASTGASNDNHYFGYSTPWGYFDFNRFHCHFSPRDWQRLINNNWGFRPKRLNFKLFNIQVKEVTTNDGVTTIANNLTSTVQVFSDSEYQLPYVLGSAHQGCLPPFPADVFMIPQYGYLTLNNGSQAVGRSSFYCLEYFPSQMLRTGNNFTFSYTFEDVPFHSSYAHSQSLDRLMNPLIDQYLYYLNRTQNQSGSAQNKDLLFSRGSPAGMSVQPKNWLPGPCYRQQRVSKTKTDNNNSNFTWTGASKYNLNGRESIINPGTAMASHKDDKDKFFPMSGVMIFGKESAGASNTALDNVMITDEEEIKATNPVATERFGTVAVNLQSSSTDPATGDVHVMGALPGMVWQDRDVYLQGPIWAKIPHTDGHFHPSPLMGGFGLKHPPPQILIKNTPVPANPPAEFSATKFASFITQYSTGQVSVEIEWELQKENSKRWNPEVQYTSNYAKSANVDFTVDNNGLYTEPRPIGTRYLTRPL

SEQ ID NO: 5195 - DNA, 2211 bp, Artificial Sequence
  Description of Artificial Sequence: Synthetic polynucleotide
atggctgctgatggttatcttccagattggctcgaggacactctctctgaaggaataagacagtggtggaagctcaaacctggcccaccaccaccaaagcccgcagagcggcataaggacgacagcaggggtcttgtgcttcctgggtacaagtacctcggacccttcaacggactcgacaagggagagccggtcaacgaggcagacgcagcggccctcgagcacgacaaggcctacgaccagcagctcaaggccggtgacaacccctacctcaagtacaaccacgccgacgcggagttccagcagcggcttcagggcgacacatcgtttgggggcaacctcggcagagcagtcttccaggccaaaaagagggttcttgaacctcttggtctggttgagcaagcgggtgagacggctcctggaaagaagagaccgttgattgaatccccccagcagcccgactcctccacgggtatcggcaaaaaaggcaagcagccggctaaaaagagactcaattttggtcagactggcgactcagagtcagtccccgacccacaacctctcggagaacctccagcaacccccgctgctgtgggacctactacaatggcttcaggtggtggcgcaccaatggcagacaataacgaaggcgccgacggagtgggtaatgcctcaggaaattggcattgcgattccacatggctgggcgacagagtcatcaccaccagcacccgcacctgggccttgcccacctacaataaccacctctacaagcaaatctccagtgcttcaacgggggccagcaacgacaaccactacttcggctacagcaccccctgggggtattttgacttcaacagattccactgccacttttcaccacgtgactggcagcgactcatcaacaacaattggggattccggcccaagagactcaacttcaaactcttcaacatccaagtcaaggaggtcacgacgaatgatggcgtcacaaccatcgctaataaccttaccagcacggttcaagtcttctcggactcagactatcagctcccgtacgtgctcgggtcggctcacgagggctgcctcccgccgttcccagcagacgtcttcatggtgccacagtatggatacctcaccctgaacaacgggagtcaggcagtaggacgctcttcattttactgcctggagtactttccttctcagatgctgcgtaccggaaacaactttaccttcagctacacttttgaggacgttcctttccacagcagctacgctcacagccagagtctggaccgtctcatgaatcctctcatcgaccagtacctgtattacctgaacagaactcagaatcagtccggaagtgcccaaaacaaggacttgctgtttagccgggggtctccaactggcatgtctgttcagcccaaaaactggctacctggaccctgttatcggcagcagcgcgtttctaaaacaaaaacagacaacaacaacagcaactttacctggactggtgcttcaaaatataaccttaatgggcgtgaatctataatcaaccctggcactgctatggcctcacacaaagacgacaaagacaagttctttcccatgagcggtgtcatgatttttggaaaggagagcgccggagcttcaaacactgcattggacaatgtcatgatcacagacgaagaggaaatcaaagccactaaccccgtggccactgaaagatttgggactgtggcagtcaatctccagagcagcagcacagaccctgcgaccggagatgtgcatgccatgggagccttacctggaatggtgtggcaagacagagacgtatacctgcagggtcctatttgggccaaaattcctcacacggatggacactttcacccgtctcctctcatgggcggctttggactcaagaacccgcctcctcagatcctcatcaaaaacacgcctgttcctgcgaatcctccggcggagttttcagctacaaagtttgcttcattcatcacccagtattccacaggacaagtgagcgtggagattgaatgggagctgcagaaagaaaacagcaaacgctggaatcccgaagtgcagtatacatctaactatgcaaaatctgccaacgttgatttcactgtggacaacaatggactttatactgagcctcgccccattggcacccgttacctcacccgtcccctgtaa

SEQ ID NO: 5196 - protein, 736 aa, Artificial Sequence
  Description of Artificial Sequence: Synthetic polypeptide
MAADGYLPDWLEDTLSEGIRQWWKLKPGPPPPKPAERHKDDSRGLVLPGYKYLGPFNGLDKGEPVNEADAAALEHDKAYDQQLKAGDNPYLKYNHADAEFQQRLQGDTSFGGNLGRAVFQAKKRVLEPLGLVEQAGETAPGKKRPLIESPQQPDSSTGIGKKGKQPAKKRLNFGQTGDSESVPDPQPLGEPPATPAAVGPTTMASGGGAPMADNNEGADGVGNASGNWHCDSTWLGDRVITTSTRTWALPTYNNHLYKQISSASTGASNDNHYFGYSTPWGYFDFNRFHCHFSPRDWQRLINNNWGFRPKRLNFKLFNIQVKEVTTNDGVTTIANNLTSTVQVFSDSDYQLPYVLGSAHEGCLPPFPADVFMVPQYGYLTLNNGSQAVGRSSFYCLEYFPSQMLRTGNNFTFSYTFEDVPFHSSYAHSQSLDRLMNPLIDQYLYYLNRTQNQSGSAQNKDLLFSRGSPTGMSVQPKNWLPGPCYRQQRVSKTKTDNNNSNFTWTGASKYNLNGRESIINPGTAMASHKDDKDKFFPMSGVMIFGKESAGASNTALDNVMITDEEEIKATNPVATERFGTVAVNLQSSSTDPATGDVHAMGALPGMVWQDRDVYLQGPIWAKIPHTDGHFHPSPLMGGFGLKNPPPQILIKNTPVPANPPAEFSATKFASFITQYSTGQVSVEIEWELQKENSKRWNPEVQYTSNYAKSANVDFTVDNNGLYTEPRPIGTRYLTRPL

SEQ ID NO: 5197 - DNA, 2211 bp, Artificial Sequence
  Description of Artificial Sequence: Synthetic polynucleotide
atggctgccgatggttatcttccagattggctcgaggacaacctctctgagggcattcgcgagtggtgggcgctgaaacctggagccccgaagcccaaagccaaccagcaaaagcaggacgacggccggggtctggtgcttcctggctacaagtacctcggacccttcaacggactcgacaagggggagcccgtcaacgcggcggatgcagcggccctcgagcacgacaaggcctacgaccagcagctcaaagcgggtgacaatccgtacctgcggtataaccacgccgacgccgagtttcaggagcgtctgcaagaagatacgtcttttgggggcaacctcgggcgagcagtcttccaggccaagaagcgggttctcgaacctctcggtctggttgaggaaggcgctaagacggctcctggaaagaaacgtccggtagagcaatcgccacaagagccagactcctcctcgggcatcggcaagacaggccagcagcccgctaaaaagagactcaattttggtcagactggcgactcagagtcagtccccgacccacaacctctcggagaacctccagcaacccccgctgctgtgggacctactacaatggcttcaggcggtggcgcaccaatggcagacaataacgaaggcgccgacggagtgggtaatgcctcaggaaattggcattgcgattccacatggctgggcgacagagtcatcaccaccagcacccgaacatgggccttgcccacctataacaaccacctctacaagcaaatctccagtgcttcgacgggggccagcaacgacaaccactacttcggctacagcaccccctgggggtattttgactttaacagattccactgccacttttcaccacgtgactggcagcgactcatcaacaacaactggggattccggcccaagagactcagcttcaagctcttcaacatccaggtcaaggaggtcacgacgaatgatggcgtcacaaccatcgctaataaccttaccagcacggttcaagtcttctcggactcggagtaccagcttccgtacgtcctcggctctgcgcaccagggctgcctccctccgttcccggcggacgtgttcatgattccgcaatacggctacctgacgctcaacaatggcagccaagccgtgggacgttcatccttttactgcctggaatatttcccttctcagatgctgagaacgggcaacaactttaccttcagctacacctttgaggaagtgcctttccacagcagctacgcgcacagccagagcctggaccggctgatgaatcctctcatcgatcaatacctgtattacctgaacagaactcaaaatcagtccggaagtgcccaaaacaaggacttgctgtttagccgtgggtctccagctggcatgtctgttcagcccaaaaactggctacctggaccctgttatcggcagcagcgcgtttctaaaacaaaaacagacaacaacaacagcaattttacctggactggtgcttcaaaatataacctcaatgggcgtgaatccatcatcaaccctggcactgctatggcctcacataaagacgacgaagacaagttctttcccatgagcggtgtcatgatttttggaaaagagagcgccggagcttcaaacactgcattggacaatgtcatgattacagacgaagaggaaattaaagccactaaccctgtggccaccgaaagatttgggaccgtggcagtcaatttccagagcagcagcacagaccctgcgaccggagatgtgcatgctatgggagcattacctggcatggtgtggcaagatagagacgtgtacctgcagggtcccatttgggccaaaattcctcacacagatggacactttcacccgtctcctcttatgggcggctttggactcaagaacccgcctcctcagatcctcatcaaaaacacgcctgttcctgcgaatcctccggcggagttttcagctacaaagtttgcttcattcatcacccaatactccacaggacaagtgagcgtggagattgaatgggagctgcagaaagaaaacagcaaacgctggaatcccgaagtgcagtatacatctaactatgcaaaatctgccaacattgatttcactgtggacaacaatggactttatactgagcctcgccccattggcacccgttacctcacccgtccccagtaa

SEQ ID NO: 5198 - protein, 736 aa, Artificial Sequence
  Description of Artificial Sequence: Synthetic polypeptide
MAADGYLPDWLEDNLSEGIREWWALKPGAPKPKANQQKQDDGRGLVLPGYKYLGPFNGLDKGEPVNAADAAALEHDKAYDQQLKAGDNPYLRYNHADAEFQERLQEDTSFGGNLGRAVFQAKKRVLEPLGLVEEGAKTAPGKKRPVEQSPQEPDSSSGIGKTGQQPAKKRLNFGQTGDSESVPDPQPLGEPPATPAAVGPTTMASGGGAPMADNNEGADGVGNASGNWHCDSTWLGDRVITTSTRTWALPTYNNHLYKQISSASTGASNDNHYFGYSTPWGYFDFNRFHCHFSPRDWQRLINNNWGFRPKRLSFKLFNIQVKEVTTNDGVTTIANNLTSTVQVFSDSEYQLPYVLGSAHQGCLPPFPADVFMIPQYGYLTLNNGSQAVGRSSFYCLEYFPSQMLRTGNNFTFSYTFEEVPFHSSYAHSQSLDRLMNPLIDQYLYYLNRTQNQSGSAQNKDLLFSRGSPAGMSVQPKNWLPGPCYRQQRVSKTKTDNNNSNFTWTGASKYNLNGRESIINPGTAMASHKDDEDKFFPMSGVMIFGKESAGASNTALDNVMITDEEEIKATNPVATERFGTVAVNFQSSSTDPATGDVHAMGALPGMVWQDRDVYLQGPIWAKIPHTDGHFHPSPLMGGFGLKNPPPQILIKNTPVPANPPAEFSATKFASFITQYSTGQVSVEIEWELQKENSKRWNPEVQYTSNYAKSANIDFTVDNNGLYTEPRPIGTRYLTRPQ

SEQ ID NO: 5199 - DNA, 2211 bp, Artificial Sequence
  Description of Artificial Sequence: Synthetic polynucleotide
atggctgccgatggttatcttccagattggctcgaggacaacctctctgagggcattcgcgagtggtgggacttgaaacctggagccccgaaacccaaagccaaccagcaaaagcaggacgacggccggggtctggtgcttcctggctacaagtacctcggacccttcaacggactcgacaagggggagcccgtcaacgcggcggatgcagcggccctcgagcacgacaaggcctacgaccagcagctcaaagcgggtgacaatccgtaccttcggtataaccacgccgacgccgagtttcaggagcgtctgcaagaagatacgtcttttgggggcaacctcgggcgagcagtcttccaggccaaaaagagggttctcgaacctctcggtctggttgaggaagcggctaagacggctcctggaaagaaacgtccggtagagcagtcgccacaagagccagactcctcctcgggcattggcaagacaggccagcagcccgctaaaaagagactcaattttggtcagactggcgactcagagtcagtccccgacccacaacctctcggagaacctcccgcagccccctcaggtgtgggatctcttacaatggcttcaggtggtggcgcaccaatggcagacaataacgaaggcgccgacggagtgggtaatgcctcaggaaattggcattgcgattccacatggctgggcgacagagtcatcaccaccagcacccgcacctgggccttgcccacctacaataaccacctctacaagcaaatctccagtgcttcaacgggggccagcaacgacaaccactacttcggctacagcaccccctgggggtattttgacttcaacagattccactgccacttttcaccacgtgactggcaaagactcatcaacaacaattggggattccggcccaagagactcaacttcaagctcttcaacatccaagtcaaggaggtcacgacgaatgatggcgtcacgaccatcgctaataaccttaccagcacggttcaagtcttctcggactcggagtaccagttgccgtacgtcctcggctctgcgcaccagggctgcctccctccgttcccggcggacgtgttcatgattccgcagtacggctacctaacgctcaacaatggcagccaggcagtgggacggtcatccttttactgcctggaatatttcccatcgcagatgctgagaacgggcaacaactttaccttcagctacacctttgaggaagtgcctttccacagcagctacgcgcacagccagagcctggaccggctgatgaatcctctcatcgaccagtacctgtattacctgaacagaactcaaaatcagtccggaagtgcccaaaacaaggacttgctgtttagccgtgggtctccagctggcatgtctgttcagcccaaaaactggctacctggaccctgttaccggcagcagtgcgtttctaaaacaaaaacagacaacaacaacagcaactttacctggactggtgcttcaaaatataaccttaatgggcgtgaatctataatcaaccctggcactgctatggcctcacacaaagacgacaaagacaagttctttcccatgagcggtgtcatgatttttggaaaggagagcgccggagcttcaaacactgcattggacaatgtcatgatcacagacgaagaggaaatcaaagccactaaccccgtggccaccgaaagatttgggactgtggcagtcaatctccagagcagcagcacagaccctgcgaccggagatgtgcatgttatgggagccttacctggaatggtgtggcaagacagagacgtatacctgcagggtcctatttgggccaaaattcctcacacagatggacactttcacccgtctcctcttatgggcggctttggactcaagaacccgcctcctcagatcctcatcaaaaacacgcctgttcctgcgaatcctccggcggagttttcagctacaaagtttgcttcattcatcacccaatactccacaggacaagtgagcgtggagattgaatgggagctgcagaaagaaaacagcaagcgctggaatcccgaagtgcagtacacatccaattatgcaaaatctgccaacgttgatttcactgtggacaacaatggactttatactgagcctcgccccattggcacccgttacctcacccgtcccctgtaa

SEQ ID NO: 5200 - protein, 736 aa, Artificial Sequence
  Description of Artificial Sequence: Synthetic polypeptide
MAADGYLPDWLEDNLSEGIREWWDLKPGAPKPKANQQKQDDGRGLVLPGYKYLGPFNGLDKGEPVNAADAAALEHDKAYDQQLKAGDNPYLRYNHADAEFQERLQEDTSFGGNLGRAVFQAKKRVLEPLGLVEEAAKTAPGKKRPVEQSPQEPDSSSGIGKTGQQPAKKRLNFGQTGDSESVPDPQPLGEPPAAPSGVGSLTMASGGGAPMADNNEGADGVGNASGNWHCDSTWLGDRVITTSTRTWALPTYNNHLYKQISSASTGASNDNHYFGYSTPWGYFDFNRFHCHFSPRDWQRLINNNWGFRPKRLNFKLFNIQVKEVTTNDGVTTIANNLTSTVQVFSDSEYQLPYVLGSAHQGCLPPFPADVFMIPQYGYLTLNNGSQAVGRSSFYCLEYFPSQMLRTGNNFTFSYTFEEVPFHSSYAHSQSLDRLMNPLIDQYLYYLNRTQNQSGSAQNKDLLFSRGSPAGMSVQPKNWLPGPCYRQQCVSKTKTDNNNSNFTWTGASKYNLNGRESIINPGTAMASHKDDKDKFFPMSGVMIFGKESAGASNTALDNVMITDEEEIKATNPVATERFGTVAVNLQSSSTDPATGDVHVMGALPGMVWQDRDVYLQGPIWAKIPHTDGHFHPSPLMGGFGLKNPPPQILIKNTPVPANPPAEFSATKFASFITQYSTGQVSVEIEWELQKENSKRWNPEVQYTSNYAKSANVDFTVDNNGLYTEPRPIGTRYLTRPL

SEQ ID NO: 5201 - DNA, 2211 bp, Artificial Sequence
  Description of Artificial Sequence: Synthetic polynucleotide
atggctgccgatggttatcttccagattggctcgaggacaacctctctgagggcattcgcgaatggtgggacttgaaacctggagccccgaaacccaaagtcaaccagcaaaagcaggacaacgctcggggtcttgtgcttccgggttacaaatacctcggacccttcaacggactcgacaagggggagcccgtcaacgcggcggacgcagcggccctcgagcacgacaaggcctacgaccagcagctcaaagcgggtgacaatccgtaccttcggtataaccacgccgacgccgagtttcaggagcgtctgcaagaagatacgtcttttgggggcaaccttggacgagcagtcttccaggccaagaagagggttctcgaaccttttggtctggttgaggaaggtgctaagacggctcctggaaagaaacgtccggtagagcagtcgccacaagagccagactcctcctcgggcattggcaagacaggccagcagcccgctaaaaagagactcaattttggtcagactggcgactcagagtcagtccccgacccacaacctctcggagaacctccagcaacccccgctgctgtgggacctactacaatggcttcaggcggtggcgcaccaatggcagacaataacgaaggcgccgacggagtgggtaatgcctcaggaaattggcattgcgattccacatggctgggcgacagagtcatcaccaccagcacccgcacctgggccttgcccacctacaataaccacctctacaagcaaatctccagtgcttcaacgggggccagcaacgacaaccactacttcggctacagcaccccctgggggtattttgacttcaacagattccactgccacttttcaccacgtgactggcaaagactcatcaacaacaattggggattccggcccaagagactcaacttcaagctcttcaacatccaagtcaaggaggtcacgacgaatgatggcgtcacgaccatcgctaataaccttaccagcacggttcaagtcttctcggactcggagtaccagttgccgtacgtcctcggctctgcgcaccagggctgcctccctccgttcccggcggacgtgttcatgattccgcaatacggctacctgacgctcaacaatggcagccaggcagtgggacggtcatccttttactgcctggaatatttcccatcgcagatgctgagaacgggcaataactttaccttcagctacacttttgaggacgttcctttccacagcagctacgctcacagccagagcctggaccggctgatgaatcctctcatcgaccagtacctgtattacctgaacagaactcagaatcagtccggaagtgcccaaaacaaggacttgctgtttagccgtgggtctccaactggcatgtctgttcagcccaaaaactggctacctggaccctgttatcggcagcagcgcgtttctaaaacaaaaacagacaacaacaacagcaactttacctggactggtgcttcaaaatataaccttaatgggcgtgaatctataatcaaccctggcactgctatggcctcacacaaagacgacgaagacaagttctttcccatgagcggtgtcatgatttttggaaaggagagcgccggagcttcaaacactgcattggacaatgtcatgatcacagacgaagaggaaatcaaagccactaaccccgtggccactgaaagatttgggactgtggcagtcaatctccagagcagcagcacagaccctgcgaccggagatgtgcatgccatgggagccttacctggaatggtgtggcaagacagagacgtatacctgcagggtcctatttgggccaaaattcctcacacggatggacactttcacccgtctcctctcatgggcggctttggacttaagcacccgcctcctcagatcctcatcaaaaacacgcctgttcctgcgaatcctccggcagagttttcggctacaaagtttgcttcattcatcacccagtattccacaggacaagtgagcgtggagattgaatgggagctgcagaaagaaaacagcaaacgctggaatcccgaagtgcagtatacatctaactatgcaaaatctgccaacgttgatttcactgtggacaacaatggactttatactgagcctcgccccattggcacccgttacctcacccgtcccctgtaa

SEQ ID NO: 5202 - protein, 736 aa, Artificial Sequence
  Description of Artificial Sequence: Synthetic polypeptide
MAADGYLPDWLEDNLSEGIREWWDLKPGAPKPKVNQQKQDNARGLVLPGYKYLGPFNGLDKGEPVNAADAAALEHDKAYDQQLKAGDNPYLRYNHADAEFQERLQEDTSFGGNLGRAVFQAKKRVLEPFGLVEEGAKTAPGKKRPVEQSPQEPDSSSGIGKTGQQPAKKRLNFGQTGDSESVPDPQPLGEPPATPAAVGPTTMASGGGAPMADNNEGADGVGNASGNWHCDSTWLGDRVITTSTRTWALPTYNNHLYKQISSASTGASNDNHYFGYSTPWGYFDFNRFHCHFSPRDWQRLINNNWGFRPKRLNFKLFNIQVKEVTTNDGVTTIANNLTSTVQVFSDSEYQLPYVLGSAHQGCLPPFPADVFMIPQYGYLTLNNGSQAVGRSSFYCLEYFPSQMLRTGNNFTFSYTFEDVPFHSSYAHSQSLDRLMNPLIDQYLYYLNRTQNQSGSAQNKDLLFSRGSPTGMSVQPKNWLPGPCYRQQRVSKTKTDNNNSNFTWTGASKYNLNGRESIINPGTAMASHKDDEDKFFPMSGVMIFGKESAGASNTALDNVMITDEEEIKATNPVATERFGTVAVNLQSSSTDPATGDVHAMGALPGMVWQDRDVYLQGPIWAKIPHTDGHFHPSPLMGGFGLKHPPPQILIKNTPVPANPPAEFSATKFASFITQYSTGQVSVEIEWELQKENSKRWNPEVQYTSNYAKSANVDFTVDNNGLYTEPRPIGTRYLTRPL

SEQ ID NO: 5203 - DNA, 2208 bp, Artificial Sequence
  Description of Artificial Sequence: Synthetic polynucleotide
  modified_base (955)..(955): a, c, t or g
  modified_base (971)..(972): a, c, t or g
  modified_base (981)..(981): a, c, t or g
  modified_base (986)..(986): a, c, t or g
  modified_base (1235)..(1235): a, c, t or g
  modified_base (1694)..(1696): a, c, t or g
  modified_base (1698)..(1698): a, c, t or g
  modified_base (1763)..(1765): a, c, t or g
  modified_base (1778)..(1778): a, c, t or g
  modified_base (2204)..(2204): a, c, t or g
atggctgccgatggttatcttccagattggctcgaggacaacctctctgagggcattcgcgaatggtgggacttgaaacctggagccccgaaacccaaagtcaaccagcaaaagcaggacaacgctcggggtcttgtgcttccgggttacaaatacctcggacccttcaacggactcgacaagggggagcccgtcaacgcggcggacgcagcggccctcgagcacgacaaggcctacgaccagcagctcaaagcgggtgacaatccgtaccttcggtataaccacgccgacgccgagtttcaggagcgtctgcaagaagatacgtcttttgggggcaaccttggacgagcagtcttccaggccaagaagagggttctcgaaccttttggtctggttgaggaaggtgctaagacggctcctggaaagaaacgtccggtagagcagtcgccacaagagccagactcctcctcgggcattggcaagacaggccagcagcccgctaaaaagagactcaattttggtcagactggcgactcagagtcagtccccgacccacaacctctcggagaacctccagcaacccccgctgctgtgggacctactacaatggcttcaggcggtggcgcaccaatggcagacaataacgaaggcgccgacggagtgggtaatgcctcaggaaattggcattgcgattccacatggctgggcgacagagtcatcaccaccagcacccgaacatgggccttgcccacctataacaaccacctctacaagcaaatctccagtgcttcaacgggggccagcaacgacaaccactacttcggctacagcaccccctgggggtattttgatttcaacagattccactgccacttttcaccacgtgactggcagcgactcatcaataacaattggggattccggcccaagagactcaacttcaaactcttcaacntccaagtcaaggaggnnacgacgaangatgncgtcacaaccatcgctaataaccttaccagcacggttcaagtcttctcggactcggagtaccagcttccgtacgtcctcggctctgcgcaccagggctgcctccctccgttcccggcggacgtgttcatgattccgcaatacggctacctgacgctcaacaatggcagccaggcagtgggacggtcatccttttactgcctggaatatttcccatcgcagatgctgagaacgggcaataactttacctncagctacacttttgaggacgttcctttccacagcagctacgctcacagccagagcctggaccggctgatgaatcctctcatcgaccagtacctgtattacctgaacagaactcagaatcagtccggaagtgcccaaaacaaggacttgctgtttagccgtgggtctccaactggcatgtctgttcagcccaaaaactggctacctggaccctgttatcggcagcagcgcgtttctaaaacaaaaacagacaacaacaacagcaactttacctggactggtgcttcaaaatataaccttaatgggcgtgaatctataatcaaccctggcactgctatggcctcacacaaagacgacgaagacaagttctttcccatgagcggtgtcatgatttttggaaaggagagcgccggagcttcaaacactgcattggacaatgtcatgatcacagacgaagagannncnaagccactaaccccgtggccactgaaagatttgggactgtggcagtcaatctccaagcagcacannnaccctgcgaccgnagatgtgcatgccatgggagccttacctggaatggtgtggcaagacagagacgtatacctgcagggtcctatttgggccaaaattcctcacacggatggacactttcacccgtctcctctcatgggcggctttggacttaagcacccgcctcctcagatcctcatcaaaaacacgcctgttcctgcgaatcctccggcagagttttcggctacaaagtttgcttcattcatcacccagtattccacaggacaagtgagcgtggagattgaatgggagctgcagaaagaaaacagcaaacgctggaatcccgaagtgcagtatacatctaactatgcaaaatctgccaacgttgatttcactgtggacaacaatggactttatactgagcctcgccccattggcacccgttacctcacccgtccccngtaa

SEQ ID NO: 5204 - protein, 723 aa, Artificial Sequence
  Description of Artificial Sequence: Synthetic polypeptide
MAADGYLPDWLEDNLSEGIREWWDLKPGAPKPKVNQQKQDNARGLVLPGYKYLGPFNGLDKGEPVNAADAAALEHDKAYDQQLKAGDNPYLRYNHADAEFQERLQEDTSFGGNLGRAVFQAKKRVLEPFGLVEEGAKTAPGKKRPVEQSPQEPDSSSGIGKTGQQPAKKRLNFGQTGDSESVPDPQPLGEPPATPAAVGPTTMASGGGAPMADNNEGADGVGNASGNWHCDSTWLGDRVITTSTRTWALPTYNNHLYKQISSASTGASNDNHYFGYSTPWGYFDFNRFHCHFSPRDWQRLINNNWGFRPKRLNFKLFNQVKETTDVTTIANNLTSTVQVFSDSEYQLPYVLGSAHQGCLPPFPADVFMIPQYGYLTLNNGSQAVGRSSFYCLEYFPSQMLRTGNNFTSYTFEDVPFHSSYAHSQSLDRLMNPLIDQYLYYLNRTQNQSGSAQNKDLLFSRGSPTGMSVQPKNWLPGPCYRQQRVSKTKTDNNNSNFTWTGASKYNLNGRESIINPGTAMASHKDDEDKFFPMSGVMIFGKESAGASNTALDNVMITDEEATNPVATERFGTVAVNLQSSPATDVHAMGALPGMVWQDRDVYLQGPIWAKIPHTDGHFHPSPLMGGFGLKHPPPQILIKNTPVPANPPAEFSATKFASFITQYSTGQVSVEIEWELQKENSKRWNPEVQYTSNYAKSANVDFTVDNNGLYTEPRPIGTRYLTRP

SEQ ID NO: 5205 - DNA, 2208 bp, Artificial Sequence
  Description of Artificial Sequence: Synthetic polynucleotide
atggctgccgatggttatcttccagattggctcgaggacactctctctgaaggaataagacagtggtggaagctcaaacctggcccaccaccaccaaagcccgcagagcggcataaggacgacagcaggggtcttgtgcttcctgggtacaagtacctcggacccttcaacggactcgacaagggagagccggtcaacgaggcagacgccgcggccctcgagcacgacaaagcctatgaccggcagctcgacagcggagacaacccgtacctcaagtacaaccacgccgacgcggagtttcaggagcgccttaaagaagatacgtcttttgggggcaacctcggacgagcagtcttccaggcgaaaaagagggttcttgaacctctgggcctggttgaggaacctgttaagacggctccgggaaaaaagaggccggtagagcactctcctgtggagccagactcctcctcgggaaccggaaaggcgggtcagcagcctgcaagaaaaagattgaattttggtcagactggagacgcagactcagtacctgacccccagcctctcggacagccaccagcagccccctctggtctgggaactaatacgatggctacaggcagtggcgcaccaatggcagacaataacgagggcgccgacggagtgggtaattcctcgggaaattggcattgcgattccacatggatgggcgacagagtcatcaccaccagcacccgaacctgggccctgcccacctacaacaaccacctctacaaacaaatttccagccaatcaggagcctcgaacgacaatcactactttggctacagcaccccttgggggtattttgacttcaacagattccactgccacttttcaccacgtgactggcaaagactcatcaacaacaactggggattccgacccaagagactcaagttcaagctctttaacattcaagtcaaagaggtcacgcagaatgacggtacgacgacgattgccaataaccttaccagcacggttcaggtgtttactgactcggagtaccagctcccgtacgtcctcggctcggcgcatcaaggatgcctcccgccgttcccagcagacgtcttcatggtgccacagtatggatacctcaccctgaacaacgggagtcaggcagtaggacgctcttcattttactgcctggagtactttccttctcagatgctgcgtaccggtaacaactttaccttcagctacacttttgaggacgttcctttccacagcagctacgctcacagccagagtctggaccgtctcatgaatcctctcatcgaccagtacctgtattacttgagcagaacagacgctccaagtggaaccaccacgcagtcaaggcttcagttttctcaggccggagcgagtgacattcgggaccagtctaggaactggcttcctggaccctgttaccgccagcagcgagtatcaaagacatctgcggataacaacaacagtgaatactcgtggactggagctaccaagtaccacctcaatggcagagactctctggtgaatccgggcccggccatggcaagccacaaggacgatgaagaaaagttttttcctcagagcggggttctcatctttgggaagcaaggctcagagaaaacaagtgtggacattgaaaaggtcatgattacagacgaagaggaaatcaggacaaccaatcccgtggctacggagcagtatggttctgtatctaccaacctccagagaggcaacagacaagcagctaccgcagatgtcaacacacaaggcgttcttccaggcatggtctggcaggacagagatgtgtaccttcaggggcccatctgggcaaagattccacacacggacggacattttcacccctctcccctcatgggtggattcggacttaaacaccctcctccacagattctcatcaagaacaccccggtacctgcgaatccttcgaccaccttcagtgcggcaaagtttgcttccttcatcacacagtactccacgggacaggtcagcgtggagatcgagtgggagctgcagaaggaaaacagcaaacgctggaatcccgaagttcagtacacttccaactacaacaagtctgttaatgtggactttactgtggacactaatggcgtgtattcagagcctcgccccattggcaccagatacctgactcgtaatctgtaa

SEQ ID NO: 5206 - protein, 735 aa, Artificial Sequence
  Description of Artificial Sequence: Synthetic polypeptide
MAADGYLPDWLEDTLSEGIRQWWKLKPGPPPPKPAERHKDDSRGLVLPGYKYLGPFNGLDKGEPVNEADAAALEHDKAYDRQLDSGDNPYLKYNHADAEFQERLKEDTSFGGNLGRAVFQAKKRVLEPLGLVEEPVKTAPGKKRPVEHSPVEPDSSSGTGKAGQQPARKRLNFGQTGDADSVPDPQPLGQPPAAPSGLGTNTMATGSGAPMADNNEGADGVGNSSGNWHCDSTWMGDRVITTSTRTWALPTYNNHLYKQISSQSGASNDNHYFGYSTPWGYFDFNRFHCHFSPRDWQRLINNNWGFRPKRLKFKLFNIQVKEVTQNDGTTTIANNLTSTVQVFTDSEYQLPYVLGSAHQGCLPPFPADVFMVPQYGYLTLNNGSQAVGRSSFYCLEYFPSQMLRTGNNFTFSYTFEDVPFHSSYAHSQSLDRLMNPLIDQYLYYLSRTDAPSGTTTQSRLQFSQAGASDIRDQSRNWLPGPCYRQQRVSKTSADNNNSEYSWTGATKYHLNGRDSLVNPGPAMASHKDDEEKFFPQSGVLIFGKQGSEKTSVDIEKVMITDEEEIRTTNPVATEQYGSVSTNLQRGNRQAATADVNTQGVLPGMVWQDRDVYLQGPIWAKIPHTDGHFHPSPLMGGFGLKHPPPQILIKNTPVPANPSTTFSAAKFASFITQYSTGQVSVEIEWELQKENSKRWNPEVQYTSNYNKSVNVDFTVDTNGVYSEPRPIGTRYLTRNL

SEQ ID NO: 5207 - DNA, 2208 bp, Artificial Sequence
  Description of Artificial Sequence: Synthetic polynucleotide
atggctgccgatggttatcttccagattggctcgaggacactctctctgaaggaataagacagtggtggaagctcaaacctggcccaccaccaccaaagcccgcagagcggcataaggacgacagcaggggtcttgtgcttcctgggtacaagtacctcggacccttcaacggactcgacaagggagagccggtcaacgaggcagacgccgcggccctcgagcacgacaaagcctatgaccggcagctcgacagcggagacaacccgtacctcaagtacaaccacgccgacgcggagtttcaggagcgccttaaagaagatacgtcttttgggggcaacctcggacgagcagtcttccaggcgaaaaagagggttcttgaacctctgggcctggttgaggaacctgttaagacggctccgggaaaaaagaggccggtagagcactctcctgtggagccagactcctcctcgggaaccggaaaggcgggccagcagcctgcaagaaaaagattgaattttggtcagactggagacgcaaactcagtacctgacccccagcctctcggacagccaccagcagccccctctggtctgggaactaatacgatggctacaggcagtggcgcaccaatggcagacaataacgagggcgccgacggagtgggtaattcctcgggaaattggcattgcgattccacatggatgggcgacagagtcatcaccaccagcacccgaacctgggccctgcccacctacaacaaccacctctacaaacaaatttccagccaatcaggagcctcgaacgacaatcactactttggctacagcaccccttgggggtattttgacttcaacagattccactgccacttttcaccacgtgactggcaaagactcatcaacaacaactggggattccgacccaagagactcaagttcaagctctttaacattcaagtcaaagaggtcacgcagaatgacggtacgacgacgattgccaataaccttaccagcacggttcaggtgtttactgactcggagtaccagctcccgtacgtcctcggctcggcgcatcaaggatgcctcccgccgttcccagcagacgtcttcatggtgccacagtatggatacctcaccctgaacaacgggagtcgggcagtaggacgctcttcattttactgcctggagtactttccttctcagatgctgcgtaccggtaacaactttaccttcagctacacttttgaggacgttcctttccacagcagctacgctcacagccagagtctggaccgtctcatgaatcctctcatcgaccagtacctgtattacttgagcagaacagacactccaagtggaaccaccacgcagtcaaggcttcagttttctcaggccggagcgagtgacattcgggaccagtctaggaactggcttcctggaccctgttaccgccagcagcgagtatcaaagacatctgcggataacaacaacagtgaatactcgtggactggagctaccaagtaccacctcaatggcagagactctctggtgaatccgggcccggccatggcaagccacaaggacgatgaagaaaagttttttcctcagagcggggttctcatctttgggaagcaaggctcagagaaaacaagtgtggacattgaaaaggtcatgattacagacgaagaggaaatcaggacgaccaatcccgtggctacggagcagtatggttctgtatctaccaacctccagagaggcaacagacaagcagctaccgcagatgtcaacacacaaggcgttcttccaggcatggtctggcaggacagagatgtgtaccttcaggggcccatctgggcaaagattccacacacggacggacattttcacccctctcccctcatgggtggattcggacttaaacaccctcctccacagattctcatcaagaacaccccggtacctgcgaatccttcgaccaccttcagtgcggcaaagtttgcttccttcatcacacagtactccacgggacaggtcagcgtggagatcgagtgggagctgcagaaggaaaacagcaaacgctggaatcccgaagttcagtacacttccaactacaacaagtctgttaatgtggactttactgtggacactaatggcgtgtatacagagcctcgccccattggcaccagatacctgactcgtaatctgtaa

SEQ ID NO: 5208 - protein, 735 aa, Artificial Sequence
  Description of Artificial Sequence: Synthetic polypeptide
MAADGYLPDWLEDTLSEGIRQWWKLKPGPPPPKPAERHKDDSRGLVLPGYKYLGPFNGLDKGEPVNEADAAALEHDKAYDRQLDSGDNPYLKYNHADAEFQERLKEDTSFGGNLGRAVFQAKKRVLEPLGLVEEPVKTAPGKKRPVEHSPVEPDSSSGTGKAGQQPARKRLNFGQTGDANSVPDPQPLGQPPAAPSGLGTNTMATGSGAPMADNNEGADGVGNSSGNWHCDSTWMGDRVITTSTRTWALPTYNNHLYKQISSQSGASNDNHYFGYSTPWGYFDFNRFHCHFSPRDWQRLINNNWGFRPKRLKFKLFNIQVKEVTQNDGTTTIANNLTSTVQVFTDSEYQLPYVLGSAHQGCLPPFPADVFMVPQYGYLTLNNGSRAVGRSSFYCLEYFPSQMLRTGNNFTFSYTFEDVPFHSSYAHSQSLDRLMNPLIDQYLYYLSRTDTPSGTTTQSRLQFSQAGASDIRDQSRNWLPGPCYRQQRVSKTSADNNNSEYSWTGATKYHLNGRDSLVNPGPAMASHKDDEEKFFPQSGVLIFGKQGSEKTSVDIEKVMITDEEEIRTTNPVATEQYGSVSTNLQRGNRQAATADVNTQGVLPGMVWQDRDVYLQGPIWAKIPHTDGHFHPSPLMGGFGLKHPPPQILIKNTPVPANPSTTFSAAKFASFITQYSTGQVSVEIEWELQKENSKRWNPEVQYTSNYNKSVNVDFTVDTNGVYTEPRPIGTRYLTRNL

SEQ ID NO: 5209 - DNA, 2211 bp, Artificial Sequence
  Description of Artificial Sequence: Synthetic polynucleotide
atggctgccgatggttatcttccagattggctcgaggacactctctctgaaggaataagacagtggtggaagctcaaacctggcccaccaccaccaaagcccgcagagcggcataaggacgacagcaggggtcttgtgcttcctgggtacaagtacctcggacccttcaacggactcgacaagggagagccggtcaacgaggcagacgccgcggccctcgagcacgacaaggcctacgaccagcagctcaaagcgggtgacaatccgtacctgcggtataaccacgccgacgccgagtttcaggagcgtctgcaagaagatacgtcttttgggggcaacctcgggcgagcagtcttccaggccaagaagcgggttctcgaacctctcggtctggttgaggaaggcgctaagacggctcctggaaagaaacgtccggtagagcagtcgccacaagagccagactcctcctcgggcatcggcaagacaggccagcagcccgctaaaaagagactcaattttggtcagactggcgactcagagtcagtccccgacccacaacctctcggagaacctccagcaacccccgctgctgtgggacctactacaatggcttcaggcggtggcgcaccaatggcagacaataacgaaggcgccgacggagtgggtaatgcctcaggaaattggcattgcgattccacatggctgggcgacagagtcatcaccaccagcacccgaacatgggccttgcccacctataacaaccacctctacaagcaaatctccagtgcttcgacgggggccagcaacgacaaccactacttcggctacagcaccccctgggggtattttgactttaacagattccactgccacttttcaccacgtgactggcagcgactcatcaacaataactggggattccggcccaagagactcagcttcaagctcttcaacatccaggtcaaggaggtcacgacgaatgatggcgtcacaaccatcgctaataaccttaccagcacggttcaagtcttctcggactcggagtaccagcttccgtacgtcctcggctctgcgcaccagggctgcctccctccgttcccggcggacgtgttcatgattccgcaatacggctacctgacgctcaacaatggcagccaagccgtgggacgttcatccttttactgcctggaatatttcccttctcagatgctgagaacgggcaacaactttaccttcagctacacctttgaggaagtgcctttccacagcagctacgcgcacagccagagcctggaccggctgatgaatcctctcatcgatcaatacctgtattacctgaacagaactcaaaatcagtccggaagtgcccaaaacaaggacttgctgtttagccgtgggtctccagctggcatgtctgttcagcccaaaaactggctacctggaccctgttatcggcagcagcgcgtttctaaaacaaaaacagacaacaacaacagcaattttacctggactggtgcttcaaaatataacctcaatgggcgtgaatccatcatcaaccctggcactgctatggcctcacacaaagacgacgaagacaagttctttcccatgagcggtgtcatgatttttggaaaagagagcgccggagcttcaaacactgcattggacaatgtcatgattacggacgaagaggaaattaaagccactaaccctgtggccaccgaaagatttgggaccgtggcagtcaatttccagagcagcagcacagaccctgcgaccggagatgtgcatgctatgggagcattacctggcatggtgtggcaagatagagacgtgtacctgcagggtcccatttgggccaaaattcctcacacagatggacactttcacccgtctcctcttatgggcggctttggactcaagaacccgcctcctcagatcctcatcaaaaacacgcctgttcctgcgaatcctccggcggagttttcagctacaaagtttgcttcattcatcactcaatactccacaggacaagtgagcgtggaaattgaatgggagctgcagaaagaaaacagcaaacgctggaatcccgaagtgcagtatacatctaactatgcaaaatctgccaacgttgatttcactgtggacaacaatggactttatactgagcctcgccccattggcacccgttacctcacccgtcccctgtaa

SEQ ID NO: 5210 - protein, 736 aa, Artificial Sequence
  Description of Artificial Sequence: Synthetic polypeptide
MAADGYLPDWLEDTLSEGIRQWWKLKPGPPPPKPAERHKDDSRGLVLPGYKYLGPFNGLDKGEPVNEADAAALEHDKAYDQQLKAGDNPYLRYNHADAEFQERLQEDTSFGGNLGRAVFQAKKRVLEPLGLVEEGAKTAPGKKRPVEQSPQEPDSSSGIGKTGQQPAKKRLNFGQTGDSESVPDPQPLGEPPATPAAVGPTTMASGGGAPMADNNEGADGVGNASGNWHCDSTWLGDRVITTSTRTWALPTYNNHLYKQISSASTGASNDNHYFGYSTPWGYFDFNRFHCHFSPRDWQRLINNNWGFRPKRLSFKLFNIQVKEVTTNDGVTTIANNLTSTVQVFSDSEYQLPYVLGSAHQGCLPPFPADVFMIPQYGYLTLNNGSQAVGRSSFYCLEYFPSQMLRTGNNFTFSYTFEEVPFHSSYAHSQSLDRLMNPLIDQYLYYLNRTQNQSGSAQNKDLLFSRGSPAGMSVQPKNWLPGPCYRQQRVSKTKTDNNNSNFTWTGASKYNLNGRESIINPGTAMASHKDDEDKFFPMSGVMIFGKESAGASNTALDNVMITDEEEIKATNPVATERFGTVAVNFQSSSTDPATGDVHAMGALPGMVWQDRDVYLQGPIWAKIPHTDGHFHPSPLMGGFGLKNPPPQILIKNTPVPANPPAEFSATKFASFITQYSTGQVSVEIEWELQKENSKRWNPEVQYTSNYAKSANVDFTVDNNGLYTEPRPIGTRYLTRPL

SEQ ID NO: 5211 - protein, 735 aa, Artificial Sequence
  Description of Artificial Sequence: Synthetic polypeptide
MAADGYLPDWLEDTLSEGIRQWWKLKPGPPPPKPAERHKDDSRGLVLPGYKYLGPFNGLDKGEPVNEADAAALEHDKAYDRQLDSGDNPYLKYNHADAEFQERLKEDTSFGGNLGRAVFQAKKRVLEPLGLVEEPVKTAPGKKRPVEHSPVEPDSSSGTGKAGQQPARKRLNFGQTGDADSVPDPQPLGQPPAAPSGLGTNTMATGSGAPMADNNEGADGVGNSSGNWHCDSTWMGDRVITTSTRTWALPTYNNHLYKQISSQSGASNDNHYFGYSTPWGYFDFNRFHCHFSPRDWQRLINNNWGFRPKRLKFKLFNIQVKEVTQNDGTTTIANNLTSTVQVFTDSEYQLPYVLGSAHQGCLPPFPADVFMVPQYGYLTLNNGSQAVGRSSFYCLEYFPSQMLRTGNNFTFSYTFEDVPFHSSYAHSQSLDRLMNPLIDQYLYYLSRTDTPSGTTTQSRLQFSQAGASDIRNQSRNWLPGPCYRQQRVSKTSADNNNSEYSWTGATKYHLNGRDSLVNPGPAMASHKDDEEKFFPQSGVLIFGKQGSEKTSVDIEKVMITDEEEIRTTNPVATEQYGSVSTNLQRGNRQAATADVNTQGVLPGMVWQDRDVYLQGPIWAKIPHTDGHFHPSPLMGGFGLKHPPPQILIKNTPVPANPSTTFSAAKFASFITQYSTGQVSVEIEWELQKENSKRWNPEVQYTSNYNKSVNVDFTVDTNGVYSEPRPIGTRYLTRNQ

SEQ ID NO: 5212 - DNA, 2208 bp, Artificial Sequence
  Description of Artificial Sequence: Synthetic polynucleotide
atggctgccgatggttatcttccagattggctcgaggacactctctctgaaggaataagacagtggtggaagctcaaacctggcccaccaccaccaaagcccgcagagcggcataaggacgacagcaggggtcttgtgcttcctgggtacaagtacctcggacccttcaacggactcgacaagggagagccggtcaacgaggcagacgccgcggccctcgagcacgacaaagcctatgaccggcagctcgacagcggagacaacccgtacctcaagtacaaccacgccgacgcggagtttcaggaacgccttaaagaagatacgtcttttgggggcaacctcggacgagcagtcttccaggcgaaaaagagggttcttgaacctctgggcctggttgaggaacctgttaagacggctccgggaaaaaagaggccggtagagcactctcctgtggagccagactcctcctcgggaaccggaaaggcgggccagcagcctgcaagaaaaagattgaattttggtcagactggagacgcagactcagtacctgacccccagcctctcggacagccaccagcagccccctctggtctgggaactaatacgatggctacaggcagtggcgcaccaatggcagacaataacgagggcgccgacggagtgggtaattcctcgggaaattggcattgcgattccacatggatgggcgacagagtcatcaccaccagcacccgaacctgggccctgcccacctacaacaaccacctctacaaacaaatttccagccaatcaggagcctcgaacgacaatcactactttggctacagcaccccttgggggtattttgacttcaacagattccactgccacttttcaccacgtgactggcaaagactcatcaacaacaactggggattccgacccaagagactcaagttcaagctctttaacattcaagtcaaagaggtcacgcagaatgacggtacgacgacgattgccaataaccttaccagcacggttcaggtgtttactgactcggagtaccagctcccgtacgtcctcggctcggcgcatcaaggatgcctcccgccgttcccagcagacgtcttcatggtgccacagtatggatacctcaccctgaacaacgggagtcaggcagtaggacgctcttcattttactgcctggagtactttccttctcagatgctgcgtaccggtaacaactttaccttcagctacacttttgaggacgttcctttccacagcagctacgctcacagccagagtctggaccgtctcatgaatcctctcatcgaccagtacctgtattacttgagcagaacagacactccaagtggaaccaccacgcagtcaaggcttcagttttctcaggccggagcgagtgacattcggaaccagtctaggaactggcttcctggaccctgttaccgccagcagcgagtatcaaagacatctgcggataacaacaacagtgaatactcgtggactggagctaccaagtaccacctcaatggcagagactctctggtgaatccgggcccggccatggcaagccacaaggacgatgaagaaaagttttttcctcagagcggggttctcatctttgggaagcaaggctcagagaaaacaagtgtggacattgaaaaggtcatgattacagacgaagaggaaatcaggacaaccaatcccgtggctacggagcagtatggttctgtatctaccaacctccagagaggcaacagacaagcagctaccgcagatgtcaacacacaaggcgttcttccaggcatggtctggcaggacagagatgtgtaccttcaggggcccatctgggcaaagattccacacacggacggacattttcacccctctcccctcatgggtggattcggacttaaacaccctcctccacagattctcatcaagaacaccccggtacctgcgaatccttcgaccaccttcagtgcggcaaagtttgcttccttcatcacacagtactccacgggacaggtcagcgtggagatcgagtgggagctgcagaaggaaaacagcaaacgctggaatcccgaagttcagtacacttccaactacaacaagtctgttaatgtggactttactgtggacactaatggcgtgtattcagagcctcgccccattggcaccagatacctgactcgtaatcagtaa

SEQ ID NO: 5213 - DNA, 2208 bp, Artificial Sequence
  Description of Artificial Sequence: Synthetic polynucleotide
atggctgccgatggttatcttccagattggctcgaggacactctctctgaaggaataagacagtggtggaagctcaaacctggcccaccaccaccaaagcccgcagagcggcataaggacgacagcaggggtcttgtgcttcctgggtacaagtacctcggacccttcaacggactcgacaagggagagccggtcaacgaggcagacgccgcggccctcgagcacgacaaagcctatgaccggcagctcgacagcggagacaacccgtacctcaagtacaaccacgccgacgcggagtttcaggagcgccttaaagaagatacgtcttttgggggcaacctcggacgagcagtcttccaggcgaaaaagagggttcttgaacctctgggcctggttgaggaacctgttaagacggctccgggaaaaaagaggccggtagagcactctcctgtggagccagactcctcctcgggaaccggaaaggcgggccagcagcctgcaagaaaaagattgaattttggtcagactggagacgcagactcagtacctgatccccagcctctcggacagccaccagcagccccctctggtctgggaactaatacgatggctacaggcagtggcgcaccaatggcagacaataacgagggcgccgacggagtgggtaattcctcgggaaattggcattgcgattccacatggatgggcgacagagtcatcaccaccagcacccgaacctgggccctgcccacctacaacaaccacctctacaaacaaatttccagccaatcaggagcctcgaacgacaatcactactttggctacagcaccccttgggggtattttgacttcaacagattccactgccacttttcaccacgtgactggcaaagactcatcaacaacaactggggattccgacccaagagactcaagttcaagctctttaacattcaagtcaaagaggtcacgcagaatgacggtacgacgacgattgccaataaccttaccagcacggttcaggtgtttactgactcggagtaccagctcccgtatgtcctcggctcggcgcatcaaggatgcctcccgccgttcccagcagacgtcttcatggtgccacagtatggatacctcaccctgaacaacgggagtcaggcagtaggacgctcttcattttactgcctggagtactttccttctcagatgctgcgtaccggtaacaactttaccttcagctacacttttgaggacgttcctttccacagcagctacgctcacagccagagtctggaccgtctcatgaatcctctcatcgaccagtacctgtattacttgagcagaacagacactccaagtggaaccaccacgcagtcaaggcttcagttttctcaggccggagcgagtgacattcgggaccagtctaggaactggcttcctggaccctgttaccgccagcagcgagtatcaaagacatctgcggataacaacaacagtgaatactcgtggactggagctaccaagtaccacctcaatggcagagactctctggtgaatccgggcccggccatggcaagccacaaggacgatgaagaaaagttttttcctcagagcggggttctcatctttgggaagcaaggctcagagaaaacaagtgtggacattgaaaaggtcatgattacagacgaagaggaaatcaggacaaccaatcccgtggctacggagcagtatggttctgtatctaccaacctccagagaggcaacagacaagcagctaccgcagatgtcaacacacaaggcgttcttccaggcatggtctggcaggacagagatgtgtaccttcaggggcccatctgggcaaagattccacacacggacggacattttcacccctctcccctcatgggtggattcggacttaaacaccctcctccacagattctcatcaagaacaccccggtacctgcgaatccttcgaccaccttcagtgcggcaaagtttgcttccttcatcacacagtactccacgggacaggtcagcgtggagatcgagtgggagctgcagaaggaaaacagcaaacgctggaatcccgaagttcagtacacttccaactacaacaagtctgttaatgtggactttactgtggacactaatggcgtgtattcagagcctcgccccattggcaccagatacctgactcgtaatctgtaa

SEQ ID NO: 5214 - protein, 735 aa, Artificial Sequence
  Description of Artificial Sequence: Synthetic polypeptide
MAADGYLPDWLEDTLSEGIRQWWKLKPGPPPPKPAERHKDDSRGLVLPGYKYLGPFNGLDKGEPVNEADAAALEHDKAYDRQLDSGDNPYLKYNHADAEFQERLKEDTSFGGNLGRAVFQAKKRVLEPLGLVEEPVKTAPGKKRPVEHSPVEPDSSSGTGKAGQQPARKRLNFGQTGDADSVPDPQPLGQPPAAPSGLGTNTMATGSGAPMADNNEGADGVGNSSGNWHCDSTWMGDRVITTSTRTWALPTYNNHLYKQISSQSGASNDNHYFGYSTPWGYFDFNRFHCHFSPRDWQRLINNNWGFRPKRLKFKLFNIQVKEVTQNDGTTTIANNLTSTVQVFTDSEYQLPYVLGSAHQGCLPPFPADVFMVPQYGYLTLNNGSQAVGRSSFYCLEYFPSQMLRTGNNFTFSYTFEDVPFHSSYAHSQSLDRLMNPLIDQYLYYLSRTDTPSGTTTQSRLQFSQAGASDIRDQSRNWLPGPCYRQQRVSKTSADNNNSEYSWTGATKYHLNGRDSLVNPGPAMASHKDDEEKFFPQSGVLIFGKQGSEKTSVDIEKVMITDEEEIRTTNPVATEQYGSVSTNLQRGNRQAATADVNTQGVLPGMVWQDRDVYLQGPIWAKIPHTDGHFHPSPLMGGFGLKHPPPQILIKNTPVPANPSTTFSAAKFASFITQYSTGQVSVEIEWELQKENSKRWNPEVQYTSNYNKSVNVDFTVDTNGVYSEPRPIGTRYLTRNL

SEQ ID NO: 5215 - DNA, 2172 bp, Artificial Sequence
  Description of Artificial Sequence: Synthetic polynucleotide
atgtcttttgttgatcaccctccagattggttggaagaagttggtgaaggtcttcgcgagtttttgggccttgaagcgggcccaccgaaaccaaaacccaatcagcagcatcaagatcaagcccgtggtcttgtgctgcctggttataactatctcggacccggaaacggtctcgatcgaggagagcctgtcaacagggcagacgaggtcgcgcgagagcacgacatctcgtacaacgagcagcttgaggcgggagacaacccctacctcaagtacaaccacgcggacgccgagtttcaggagaagctcgccgacgacacatccttcgggggaaacctcggaaaggcagtctttcaggccaagaaaagggttctcgaaccttttggcctggttgaagagggtgctaagacggcccctaccggaaagcggatagacgaccactttccaaaaagaaagaaggctcggaccgaagaggactccaagccttccacctcgtcagacgccgaagctggacccagcggatcccagcagctgcaaatcccagcccaaccagcctcaagtttgggagctgatacaatgtctgcgggaggtggcggcccattgggcgacaataaccaaggtgccgatggagtgggcaatgcctcgggagattggcattgcgattccacgtggatgggggacagagtcgtcaccaagtccacccgaacctgggtgctgcccagctacaacaaccaccagtaccgagagatcaaaagcggctccgtcgacggaagcaacgccaacgcctactttggatacagcaccccctgggggtactttgactttaaccgcttccacagccactggagcccccgagactggcaaagactcatcaacaactactggggcttcagaccccggtccctcagagtcaaaatcttcaacattcaagtcaaagaggtcacggtgcaggactccaccaccaccatcgccaacaacctcacctccaccgtccaagtgtttacggacgacgactaccagctgccctacgtcgtcggcaacgggaccgagggatgcctgccggccttccctccgcaggtctttacgctgccgcagtacggttacgcgacgctgaaccgcgacaacacagaaaatcccaccgagaggagcagcttcttctgcctagagtactttcccagcaagatgctgagaacgggcaacaactttgagtttacctacaactttgaggaggtgcccttccactccagcttcgctcccagtcagaacctgttcaagctggccaacccgctggtggaccagtacttgtaccgcttcgtgagcacaaataacactggcggagtccagttcaacaagaacctggccgggagatacgccaacacctacaaaaactggttcccggggcccatgggccgaacccagggctggaacctgggctccggggtcaaccgcgccagtgtcagcgccttcgccacgaccaataggatggagctcgagggcgcgagttaccaggtgcccccgcagccgaacggcatgaccaacaacctccagggcagcaacacctatgccctggagaacactatgatcttcaacagccagccggcgaacccgggcaccaccgccacgtacctcgagggcaacatgctcatcaccagcgagagcgagacgcagccggtgaaccgcgtggcgtacaacgtcggcgggcagatggccaccaacaaccagagctccaccactgcccccgcgaccggcacgtacaacctccaggaaatcgtgcccggcagcgtgtggatggagagggacgtgtacctccaaggacccatctgggccaagatcccagagacgggggcgcactttcacccctctccggccatgggcggattcggactcaaacacccaccgcccatgatgctcatcaagaacacgcctgtgcccggaaatatcaccagcttctcggacgtgcccgtcagcagcttcatcacccagtacagcaccgggcaggtcaccgtggagatggagtgggagctcaagaaggaaaactccaagaggtggaacccagagatccagtacacaaacaactacaacgacccccagtttgtggactttgccccggacagcaccggggaatacagaaccaccagacctatcggaacccgataccttacccgacccctt

SEQ ID NO: 5216 - DNA, 2214 bp, Artificial Sequence
  Description of Artificial Sequence: Synthetic polynucleotide
atggctgccgatggttatcttccagattggctcgaggacaacctctctgagggcattcgcgagtggtgggcgctgaaacctggagccccgaagcccaaagccaaccagcaaaagcaggacgacggccggggtctggtgcttcctggctacaagtacctcggacccttcaacggactcgacaagggggagcccgtcaacgcggcggacgcagcggccctcgagcacgacaaggcctacgaccagcagctgcaggcgggtgacaatccgtacctgcggtataaccacgccgacgccgagtttcaggagcgtctgcaagaagatacgtcttttgggggcaacctcgggcgagcagtcttccaggccaagaagcgggttctcgaacctctcggtctggttgaggaaggcgctaagacggctcctggaaagaagagaccggtagagccatcaccccagcgttctccagactcctctacgggcatcggcaagaaaggccaacagcccgccagaaaaagactcaattttggtcagactggcgactcagagtcagttccagaccctcaacctctcggagaacctccagcagcgccctctggtgtgggacctaatacaatggctgcaggcggtggcgcaccaatggcagacaataacgaaggcgccgacggagtgggtagttcctcgggaaattggcattgcgattccacatggctgggcgacagagtcatcaccaccagcacccgaacctgggccctgcccacctacaacaaccacctctacaagcaaatctccaacgggacatcgggaggagccaccaacgacaacacctacttcggctacagcaccccctgggggtattttgactttaacagattccactgccacttttcaccacgtgactggcagcgactcatcaacaacaactggggattccggcccaagagactcagcttcaagctcttcaacatccaggtcaaggaggtcacgcagaatgaaggcaccaagaccatcgccaataacctcaccagcaccatccaggtgtttacggactcggagtaccagctgccgtacgttctcggctctgcccaccagggctgcctgcctccgttcccggcggacgtgttcatgattccccagtacggctacctaacactcaacaacggtagtcaggccgtgggacgctcctccttctactgcctggaatactttccttcgcagatgctgagaaccggcaacaacttccagtttacttacaccttcgaggacgtgcctttccacagcagctacgcccacagccagagcttggaccggctgatgaatcctctgattgaccagtacctgtactacttgtctcggactcaaacaacaggaggcacggcaaatacgcagactctgggcttcagccaaggtgggcctaatacaatggccaatcaggcaaagaactggctgccaggaccctgttaccgccaacaacgcgtctcaacgacaaccgggcaaaacaacaatagcaactttgcctggactgctgggaccaaataccatctgaatggaagaaattcattggctaatcctggcatcgctatggcaacacacaaagacgacgaggagcgtttttttcccagtaacgggatcctgatttttggcaaacaaaatgctgccagagacaatgcggattacagcgatgtcatgctcaccagcgaggaagaaatcaaaaccactaaccctgtggctacagaggaatacggtatcgtggcagataacttgcctgagcggacggcgatgagtcttccgggaactgtcaacagccagggggccttacccggtatggtctggcagaaccgggacgtgtacctgcagggtcccatctgggccaagattcctcacacggacggcaacttccacccgtctccgctgatgggcggctttggcctgaaacatcctccgcctcagatcctgatcaagaacacgcctgtacctgcggatcctccgaccaccttcaaccagtcaaagctgaactctttcatcacgcaatacagcaccggacaggtcagcgtggaaattgaatgggagctgcagaaggaaaacagcaagcgctggaaccccgagatccagtacacctccaactactacaaatctacaagtgtggactttgctgttaatacagaaggcgtgtactctgaaccccgccccattggcacccgttacctcacccgtaatctg

SEQ ID NO: 5217 - protein, 738 aa, Artificial Sequence
  Description of Artificial Sequence: Synthetic polypeptide
MAADGYLPDWLEDNLSEGIREWWALKPGAPKPKANQQKQDDGRGLVLPGYKYLGPFNGLDKGEPVNAADAAALEHDKAYDQQLQAGDNPYLRYNHADAEFQERLQEDTSFGGNLGRAVFQAKKRVLEPLGLVEEGAKTAPGKKRPVEPSPQRSPDSSTGIGKKGQQPARKRLNFGQTGDSESVPDPQPLGEPPAAPSGVGPNTMAAGGGAPMADNNEGADGVGSSSGNWHCDSTWLGDRVITTSTRTWALPTYNNHLYKQISNGTSGGATNDNTYFGYSTPWGYFDFNRFHCHFSPRDWQRLINNNWGFRPKRLSFKLFNIQVKEVTQNEGTKTIANNLTSTIQVFTDSEYQLPYVLGSAHQGCLPPFPADVFMIPQYGYLTLNNGSQAVGRSSFYCLEYFPSQMLRTGNNFQFTYTFEDVPFHSSYAHSQSLDRLMNPLIDQYLYYLSRTQTTGGTANTQTLGFSQGGPNTMANQAKNWLPGPCYRQQRVSTTTGQNNNSNFAWTAGTKYHLNGRNSLANPGIAMATHKDDEERFFPSNGILIFGKQNAARDNADYSDVMLTSEEEIKTTNPVATEEYGIVADNLPERTAMSLPGTVNSQGALPGMVWQNRDVYLQGPIWAKIPHTDGNFHPSPLMGGFGLKHPPPQILIKNTPVPADPPTTFNQSKLNSFITQYSTGQVSVEIEWELQKENSKRWNPEIQYTSNYYKSTSVDFAVNTEGVYSEPRPIGTRYLTRNL

SEQ ID NO: 5218 - DNA, 2214 bp, Artificial Sequence
  Description of Artificial Sequence: Synthetic polynucleotide
atggctgccgatggttatcttccagattggctcgaggacaacctctctgagggcattcgcgagtggtgggcgctgaaacctggagccccgaagcccaaagccaaccagcaaaagcaggacgacggccggggtctggtgcttcctggctacaagtacctcggacccttcaacggactcgacaagggggagcccgtcaacgcggcggacgcagcggccctcgagcacgacaaggcctacgaccagcagctgcaggcgggtgacaatccgtacctgcggtataaccacgccgacgccgagtttcaggagcgtctgcaagaagatacgtcttttgggggcaacctcgggcgagcagtcttccaggccaagaagcgggttctcgaacctctcggtctggttgaggaaggcgctaagacggctcctggaaagaagagaccggtagagccatcaccccagcgttctccagactcctctacgggcatcggcaagaaaggccaacagcccgccagaaaaagactcaattttggtcagactggcgactcagagtcagttccagaccctcaacctctcggagaacctccagcagcgccctctggtgtgggacctaatacaatggctgcaggcggtggcgcaccaatggcagacaataacgaaggcgccgacggagtgggtagttcctcgggaaattggcattgcgattccacatggctgggcgacagagtcatcaccaccagcacccgaacctgggccctgcccacctacaacaaccacctctacaagcaaatctccaacgggacatcgggaggagccaccaacgacaacacctacttcggctacagcaccccctgggggtattttgactttaacagattccactgccacttttcaccacgtgactggcagcgactcatcaacaacaactggggattccggcccaagagactcagcttcaagctcttcaacatccaggtcaaggaggtcacgcagaatgaaggcaccaagaccatcgccaataacctcaccagcaccatccaggtgtttacggactcggagtaccagctgccgtacgttctcggctctgcccaccagggctgcctgcctccgttcccggcggacgtgttcatgattccccagtacggctacctaacactcaacaacggtagtcaggccgtgggacgctcctccttctactgcctggaatactttccttcgcagatgctgagaaccggcaacaacttccagtttacttacaccttcgaggacgtgcctttccacagcagctacgcccacagccagagcttggaccggctgatgaatcctctgattgaccagtacctgtactacttgtctcggactcaaacaacaggaggcacggcaaatacgcagactctgggcttcagccaaggtgggcctaatacaatggccaatcaggcaaagaactggctgccaggaccctgttaccgccaacaacgcgtctcaacgacaaccgggcaaaacaacaatagcaactttgcctggactgctgggaccaaataccatctgaatggaagaaattcattggctaatcctggcatcgctatggcaacacacaaagacgacgaggagcgtttttttcccagtaacgggatcctgatttttggcaaacaaaatgctgccagagacaatgcggattacagcgatgtcatgctcaccagcgaggaagaaatcaaaaccactaaccctgtggctacagaggaatacggtatcgtggcagataacttgagttttagtcgtgcggttctttgtgatggaactgtcaacagccagggggccttacccggtatggtctggcagaaccgggacgtgtacctgcagggtcccatctgggccaagattcctcacacggacggcaacttccacccgtctccgctgatgggcggctttggcctgaaacatcctccgcctcagatcctgatcaagaacacgcctgtacctgcggatcctccgaccaccttcaaccagtcaaagctgaactctttcatcacgcaatacagcaccggacaggtcagcgtggaaattgaatgggagctgcagaaggaaaacagcaagcgctggaaccccgagatccagtacacctccaactactacaaatctacaagtgtggactttgctgttaatacagaaggcgtgtactctgaaccccgccccattggcacccgttacctcacccgtaatctg

SEQ ID NO: 5219 - protein, 738 aa, Artificial Sequence
  Description of Artificial Sequence: Synthetic polypeptide
MAADGYLPDWLEDNLSEGIREWWALKPGAPKPKANQQKQDDGRGLVLPGYKYLGPFNGLDKGEPVNAADAAALEHDKAYDQQLQAGDNPYLRYNHADAEFQERLQEDTSFGGNLGRAVFQAKKRVLEPLGLVEEGAKTAPGKKRPVEPSPQRSPDSSTGIGKKGQQPARKRLNFGQTGDSESVPDPQPLGEPPAAPSGVGPNTMAAGGGAPMADNNEGADGVGSSSGNWHCDSTWLGDRVITTSTRTWALPTYNNHLYKQISNGTSGGATNDNTYFGYSTPWGYFDFNRFHCHFSPRDWQRLINNNWGFRPKRLSFKLFNIQVKEVTQNEGTKTIANNLTSTIQVFTDSEYQLPYVLGSAHQGCLPPFPADVFMIPQYGYLTLNNGSQAVGRSSFYCLEYFPSQMLRTGNNFQFTYTFEDVPFHSSYAHSQSLDRLMNPLIDQYLYYLSRTQTTGGTANTQTLGFSQGGPNTMANQAKNWLPGPCYRQQRVSTTTGQNNNSNFAWTAGTKYHLNGRNSLANPGIAMATHKDDEERFFPSNGILIFGKQNAARDNADYSDVMLTSEEEIKTTNPVATEEYGIVADNLSFSRAVLCDGTVNSQGALPGMVWQNRDVYLQGPIWAKIPHTDGNFHPSPLMGGFGLKHPPPQILIKNTPVPADPPTTFNQSKLNSFITQYSTGQVSVEIEWELQKENSKRWNPEIQYTSNYYKSTSVDFAVNTEGVYSEPRPIGTRYLTRNL

SEQ ID NO: 5220 - DNA, 2215 bp, Artificial Sequence
  Description of Artificial Sequence: Synthetic polynucleotide
atggctgccgatggttatcttccagattggctcgaggacactctctctgaaggaataagacagtggtggaagctcaaacctggcccaccaccaccaaagcccgcagagcggcataaggacgacagcaggggtcttgtgcttcctgggtacaagtacctcggacccttcaacggactcgacaagggagagccggtcaacgaggcagacgccgcggccctcgagcacgacaaagcctacgaccggcagctcgacagcggagacaacccgtacctcaagtacaaccacgccgacgccgagttccaggagcggctcaaagaagatacgtcttttgggggcaacctcgggcgagcagtcttccaggccaaaaagaggcttcttgaacctcttggtctggttgaggaagcggctaagacggctcctggaaagaagaggcctgtagagcactctcctgtggagccagactcctcctcgggaaccggaaaggcgggccagcagcctgcaagaaaaagattgaattttggtcagactggagacgcagactcagtcccagaccctcaaccaatcggagaacctcccgcagccccctcaggtgtgggatctcttacaatggctgcaggcggtggcgcaccaatggcagacaataacgagggcgccgacggagtgggtaattcctcgggaaattggcattgcgattccacatggatgggcgacagagtcatcaccaccagcacccgaacctgggccctgcccacctacaacaaccacctctacaagcaaatctccaacagcacatctggaggatcttcaaatgacaacgcctacttcggctacagcaccccctgggggtattttgactttaacagattccactgccacttttcaccacgtgactggcagcgactcatcaacaacaactggggattccggcccaagagactcagcttcaagctcttcaacatccaggtcaaggaggtcacgcagaatgaaggcaccaagaccatcgccaataacctcaccagcaccatccaggtgtttacggactcggagtaccagctgccgtacgttctcggctctgcccaccagggctgcctgcctccgttcccggcggacgtgttcatgattccccagtacggctacctaacactcaacaacggtagtcaggccgtgggacgctcctccttctactgcctggaatactttccttcgcagatgctgagaaccggcaacaacttccagtttacttacaccttcgaggacgtgcctttccacagcagctacgcccacagccagagcttggaccggctgatgaatcctctgattgaccagtacctgtactacttgtctcggactcaaacaacaggaggcacgacaaatacgcagactctgggcttcagccaaggtgggcctaatacaatggccaatcaggcaaagaactggctgccaggaccctgttaccgccagcagcgagtatcaaagacatctgcggataacaacaacagtgaatactcgtggactggagctaccaagtaccacctcaatggcagagactctctggtgaatccgggcccggccatggcaagccacaaggacgatgaagaaaagtttttttcctcagagcggggttctcatctttgggaagcaaggctcagagaaaacaaatgtggacattgaaaaggtcatgattacagacgaagaggaaatcaggacaaccaatcccgtggctacggagcagtatggttctgtatctaccaacctccagagaggcaacagacaagcagctaccgcagatgtcaacacacaaggcgttcttccaggcatggtctggcaggacagagatgtgtaccttcaggggcccatctgggcaaagattccacacacggacggacattttcacccctctcccctcatgggtggattcggacttaaacaccctccgcctcagatcctgatcaagaacacgcctgtacctgcggatcctccgaccaccttcaaccagtcaaagctgaactctttcatcacccagtattctactggccaagtcagcgtggagatcgagtgggagctgcagaaggaaaacagcaagcgctggaaccccgagatccagtacacctccaactactacaaatctacaagtgtggactttgctgttaatacagaaggcgtgtactctgaaccccgccccattggcacccgttacctcacccgtaatctgtaa

SEQ ID NO: 5221 - protein, 737 aa, Artificial Sequence
  Description of Artificial Sequence: Synthetic polypeptide
MAADGYLPDWLEDTLSEGIRQWWKLKPGPPPPKPAERHKDDSRGLVLPGYKYLGPFNGLDKGEPVNEADAAALEHDKAYDRQLDSGDNPYLKYNHADAEFQERLKEDTSFGGNLGRAVFQAKKRLLEPLGLVEEAAKTAPGKKRPVEHSPVEPDSSSGTGKAGQQPARKRLNFGQTGDADSVPDPQPIGEPPAAPSGVGSLTMAAGGGAPMADNNEGADGVGNSSGNWHCDSTWMGDRVITTSTRTWALPTYNNHLYKQISNSTSGGSSNDNAYFGYSTPWGYFDFNRFHCHFSPRDWQRLINNNWGFRPKRLSFKLFNIQVKEVTQNEGTKTIANNLTSTIQVFTDSEYQLPYVLGSAHQGCLPPFPADVFMIPQYGYLTLNNGSQAVGRSSFYCLEYFPSQMLKTGNNFQFTYTFEDVPFHSSYAHSQSLDRLMNPLIDQYLYYLSRTQTTGGTTNTQTLGFSQGGPNTMANQAKNWLPGPCYRQQRVSKTSADNNNSEYSWTGATKYHLNGRDSLVNPGPAMASHKDDEEKFFPQSGVLIFGKQGSEKTNVDIEKVMITDEEEIRTTNPVATEQYGSVSTNLQRGNRQAATADVNTQGVLPGMVWQDRDVYLQGPIWAKIPHTDGHFHPSPLMGGFGLKHPPPQILIKNTPVPADPPTTFNQSKLNSFITQYSTGQVSVEIEWELQKENSKRWNPEIQYTSNYYKSTSVDFAVNTEGVYSEPRPIGTRYLTRNL

SEQ ID NO: 5222 - protein, 737 aa, Artificial Sequence
  Description of Artificial Sequence: Synthetic polypeptide
MAADGYLPDWLEDTLSEGIRQWWKLKPGPPPPKPAERHKDDSRGLVLPGYKYLGPFNGLDKGEPVNEADAAALEHDKAYDRQLDSGDNPYLKYNHADAEFQERLKEDTSFGGNLGRAVFQAKKRLLEPLGLVEEAAKTAPGKKRPVEHSPVEPDSSSGTGKAGQQPARKRLNFGQTGDADSVPDPQPIGEPPAAPSGVGSLTMAAGGGAPMADNNEGADGVGNSSGNWHCDSTWMGDRVITTSTRTWALPTYNNHLYKQISNSTSGGSSNDNAYFGYSTPWGYFDFNRFHCHFSPRDWQRLINNNWGFRPKRLSFKLFNIQVKEVTQNEGTKTIANNLTSTIQVFTDSEYQLPYVLGSAHQGCLPPFPADVFMIPQYGYLTLNNGSQAVGRSSFYCLEYFPSQMLKTGNNFQFTYTFEDVPFHSSYAHSQSLDRLMNPLIDQYLYYLSRTQTTGGTTNTQTLGFSQGGPNTMANQAKNWLPGPCYRQQRVSKTSADNNNSEYSWTGATKYHLNGRDSLVNPGPAMASHKDDEEKFFPQSGVLIFGKQGSEKTNVDIEKVMITDEEEIRTTNPVATEQYGSVSTNLQQGNTQAATADVNTQGVLPGMVWQDRDVYLQGPIWAKIPHTDGHFHPSPLMGGFGLKHPPPQILIKNTPVPADPPTTFNQSKLNSFITQYSTGQVSVEIEWELQKENSKRWNPEIQYTSNYYKSTSVDFAVNTEGVYSEPRPIGTRYLTRNL

SEQ ID NO: 5223 - protein, 737 aa, Artificial Sequence
  Description of Artificial Sequence: Synthetic polypeptide
MAADGYLPDWLEDTLSEGIRQWWKLKPGPPPPKPAERHKDDSRGLVLPGYKYLGPFNGLDKGEPVNEADAAALEHDKAYDRQLDSGDNPYLKYNHADAEFQERLKEDTSFGGNLGRAVFQAKKRLLEPLGLVEEAAKTAPGKKRPVEHSPVEPDSSSGTGKAGQQPARKRLNFGQTGDADSVPDPQPIGEPPAAPSGVGSLTMAAGGGAPMADNNEGADGVGNSSGNWHCDSTWMGDRVITTSTRTWALPTYNNHLYKQISNSTSGGSSNDNAYFGYSTPWGYFDFNRFHCHFSPRDWQRLINNNWGFRPKRLSFKLFNIQVKEVTQNEGTKTIANNLTSTIQVFTDSEYQLPYVLGSAHQGCLPPFPADVFMIPQYGYLTLNNGSQAVGRSSFYCLEYFPSQMLRTGNNFQFTYTFEDVPFHSSYAHSQSLDRLMNPLIDQYLYYLSRTQTTGGTTNTQTLGFSQGGPNTMANQAKNWLPGPCYRQQRVSKTSADNNNSEYSWTGATKYHLNGRDSLVNPGPAMASHKDDEEKFFPQSGVLIFGKQGSEKTNVDIEKVMITDEEEIRTTNPVATEQYGSVSTNLQQGNTQAATADVNTQGVLPGMVWQDRDVYLQGPIWAKIPHTDGHFHPSPLMGGFGLKHPPPQILIKNTPVPADPPTTFNQSKLNSFITQYSTGQVSVEIEWELQKENSKRWNPEIQYTSNYYKSTSVDFAVNTEGVYSEPRPIGTRYLTRNL

SEQ ID NO: 5224 - DNA, 2214 bp, Artificial Sequence
  Description of Artificial Sequence: Synthetic polynucleotide
atggctgccgatggttatcttccagattggctcgaggacaaccttagtgaaggaattcgcgagtggtgggctttgaaacctggagcccctcaacccaaggcaaatcaacaacatcaagacaacgctcgaggtcttgtgcttccgggttacaaataccttggacccggcaacggactcgacaagggggagccggtcaacgcagcagacgcggcggccctcgagcacgacaaggcctacgaccagcagctgcaggcgggtgacaatccgtacctgcggtataaccacgccgacgccgagtttcaggagcgtctgcaagaagatacgtcttttgggggcaaccttggcagagcagtcttccaggccaaaaagaggatccttgagcctcttggtctggttgaggaagcagctaaaacggctcctggaaagaagaggcctgtagatcagtctcctcaggaaccggactcatcatctggtgttggcaaatcgggcaaacagcctgccagaaaaagactaaatttcggtcagactggcgactcagagtcagtcccagaccctcaacctctcggagaaccaccagcagcccccacaagtttgggatctaatacaatggcttcaggcggtggcgcaccaatggcagacaataacgagggtgccgatggggtgggtagttcctcgggaaattggcattgcgattcccaatggctgggggacagagtcatcaccaccagcacccgaacctgggccctgcccacctacaacaatcacctctacaagcaaatctccaacgggacatcgggaggagccaccaacgacaacacctacttcggctacagcaccccctgggggtattttgactttaacagattccactgccacttttcaccacgtgactggcagcgactcatcaacaacaactggggattccggcccaagagactcagcttcaagctcttcaacatccaggtcaaggaggtcacgcagaatgaaggcaccaagaccatcgccaataacctcaccagcaccatccaggtgtttacggactcggagtaccagctgccgtacgttctcggctctgcgcaccagggctgcctccctccgttcccggcggacgtgttcatgattccgcaatacggctacctgacgctcaacaatggcagccaagccgtgggacgttcatccttttactgcctggaatatttcccttctcagatgctgagaacgggcaacaactttaccttcagctacacctttgaggaagtgcctttccacagcagctacgcgcacagccagagcttggaccggctgatgaatcctctgattgaccagtacctgtactacttgtctcggactcaaacaacaggaggcacggcaaatacgcagactctgggcttcagccaaggtgggcctaatacaatggccaatcaggcaaagaactggctgccaggaccctgttaccgccaacaacgcgtctcaacgacaaccgggcaaaacaacaatagcaactttgcctggactgctgggaccaaataccatctgaatggaagaaattcattggctaatcctggcatcgctatggcaacacacaaagacgacgaggagcgtttttttcccagtaacgggatcctgatttttggcaaacaaaatgctgccagagacaatgcggattacagcgatgtcatgctcaccagcgaggaagaaatcaaaaccactaaccctgtggctacagaggaatacggtatcgtggcagataacttgcagcagcaaaacacggctcctcaaattggaactgtcaacagccagggggccttacccggtatggtctggcagaaccgggacgtgtacctgcagggtcccatctgggccaagattcctcacacggacggcaacttccacccgtctccgctgatgggcggctttggcctgaaacatcctccgcctcagatcctgatcaagaacacgcctgtacctgcggatcctccgaccaccttcaaccagtcaaagctgaactctttcatcacgcaatacagcaccggacaggtcagcgtggagatcgagtgggagctgcagaaggaaaacagcaagcgctggaacccggagatccagtacacttccaactattacaagtctaataatgttgaatttgctgttaatactgaaggtgtatatagtgaaccccgccccattggcaccagatacctgactcgtaatctgtaa

SEQ ID NO: 5225 - protein, 737 aa, Artificial Sequence
  Description of Artificial Sequence: Synthetic polypeptide
MAADGYLPDWLEDNLSEGIREWWALKPGAPQPKANQQHQDNARGLVLPGYKYLGPGNGLDKGEPVNAADAAALEHDKAYDQQLQAGDNPYLRYNHADAEFQERLQEDTSFGGNLGRAVFQAKKRILEPLGLVEEAAKTAPGKKRPVDQSPQEPDSSSGVGKSGKQPARKRLNFGQTGDSESVPDPQPLGEPPAAPTSLGSNTMASGGGAPMADNNEGADGVGSSSGNWHCDSQWLGDRVITTSTRTWALPTYNNHLYKQISNGTSGGATNDNTYFGYSTPWGYFDFNRFHCHFSPRDWQRLINNNWGFRPKRLSFKLFNIQVKEVTQNEGTKTIANNLTSTIQVFTDSEYQLPYVLGSAHQGCLPPFPADVFMIPQYGYLTLNNGSQAVGRSSFYCLEYFPSQMLRTGNNFTFSYTFEEVPFHSSYAHSQSLDRLMNPLIDQYLYYLSRTQTTGGTANTQTLGFSQGGPNTMANQAKNWLPGPCYRQQRVSTTTGQNNNSNFAWTAGTKYHLNGRNSLANPGIAMATHKDDEERFFPSNGILIFGKQNAARDNADYSDVMLTSEEEIKTTNPVATEEYGIVADNLQQQNTAPQIGTVNSQGALPGMVWQNRDVYLQGPIWAKIPHTDGNFHPSPLMGGFGLKHPPPQILIKNTPVPADPPTTFNQSKLNSFITQYSTGQVSVEIEWELQKENSKRWNPEIQYTSNYYKSNNVEFAVNTEGVYSEPRPIGTRYLTRNL

SEQ ID NO: 5226 - DNA, 2211 bp, Artificial Sequence
  Description of Artificial Sequence: Synthetic polynucleotide
atggctgccgatggttatcttccagattggctcgaggacaacctctctgagggcattcgcgagtggtgggacttgaaacctggagccccgaagcccaaagccaaccagcaaaagcaggacgacggccggggtctggtgcttcctggctacaagtacctcggacccttcaacggactcgacaagggggagcccgtcaacgcggcggacgcagcggccctcgagcacgacaaggcctacgaccagcagctcaaagcgggtgacaatccgtacctgcggtataaccacgccgacgccgagtttcaggagcgtctgcaagaagatacgtcttttgggggcaacctcgggcgagcagtcttccaggccaagaagcgggttctcgaacctctcggtctggttgaggaaggcgctaagacggctcctggaaagaaacgtccggtagagcagtcgccacaagagccagactcctcctcgggcatcggcaagacaggccagcagcccgctaaaaagagactcaattttggtcagactggcgactcagagtcagtccccgacccacaacctctcggagaacctccagcaacccccgctgctgtgggacctactacaatggcttcaggcggtggcgcaccaatggcagacaataacgaaggcgccgacggagtgggtaatgcctcaggaaattggcattgcgattccacatggctgggcgacagagtcatcaccaccagcacccgaacatgggccttgcccacctataacaaccacctctacaagcaaatctccagtgcttcaacgggggccagcaacgacaaccactacttcggctacagcaccccctgggggtattttgatttcaacagattccactgccatttctcaccacgtgactggcagcgactcatcaacaacaattggggattccggcccaagagactcaacttcaagctcttcaacatccaagtcaaggaggtcacgacgaatgatggcgtcacgaccatcgctaataaccttaccagcacggttcaagtcttctcggactcggagtaccagctgccgtacgttctcggctctgcccaccagggctgcctgcctccgttcccggcggacgtgttcatgattccccagtacggctacctaacactcaacaacggtagtcaggccgtgggacgctcctccttctactgcctggaatactttccttcgcagatgctgagaaccggcaacaacttccagtttacttacaccttcgaggacgtgcctttccacagcagctacgcccacagccagagcttggaccggctgatgaatcctctgattgaccagtacctgtactacttgtctcggactcaaacaacaggaggcacggcaaatacgcagactctgggcttcagccaaggtgggcctaatacaatggccaatcaggcaaagaactggctgccaggaccctgttaccgccaacaacgcgtctcaacgacaaccgggcaaaacaacaatagcaattttacctggactggtgcttcaaaatataacctcaatgggcgtgaatccatcatcaaccctggcactgctatggcctcacacaaagacgacgaagacaagttctttcccatgagcggtgtcatgatttttggaaaagagagcgccggagcttcaaacactgcattggacaatgtcatgattacagacgaagaggaaattaaagccactaaccctgtggccaccgaaagatttgggaccgtggcagtcaatttccagagcagcagcacagaccctgcgaccggagatgtgcatgctatgggagcattacctggcatggtgtggcaagatagagacgtgtacctgcagggtcccatttgggccaaaattcctcacacagatggacactttcacccgtctcctcttatgggcggctttggactcaagaacccgcctcctcagatcctcatcaaaaacacgcctgttcctgcgaatcctccggcggagttttcagctacaaagtttgcttcattcatcacccaatactccacaggacaagtgagtgtggaaattgaatgggagctgcagaaagaaaacagcaagcgctggaatcccgaagtgcagtacacatccaattatgcaaaatctgccaacgttgattttactgtggacaacaatggactttatactgagcctcgccccattggcacccgttacctcacccgtcccctgtaa

SEQ ID NO: 5227 - protein, 736 aa, Artificial Sequence
  Description of Artificial Sequence: Synthetic polypeptide
MAADGYLPDWLEDNLSEGIREWWDLKPGAPKPKANQQKQDDGRGLVLPGYKYLGPFNGLDKGEPVNAADAAALEHDKAYDQQLKAGDNPYLRYNHADAEFQERLQEDTSFGGNLGRAVFQAKKRVLEPLGLVEEGAKTAPGKKRPVEQSPQEPDSSSGIGKTGQQPAKKRLNFGQTGDSESVPDPQPLGEPPATPAAVGPTTMASGGGAPMADNNEGADGVGNASGNWHCDSTWLGDRVITTSTRTWALPTYNNHLYKQISSASTGASNDNHYFGYSTPWGYFDFNRFHCHFSPRDWQRLINNNWGFRPKRLNFKLFNIQVKEVTTNDGVTTIANNLTSTVQVFSDSEYQLPYVLGSAHQGCLPPFPADVFMIPQYGYLTLNNGSQAVGRSSFYCLEYFPSQMLRTGNNFQFTYTFEDVPFHSSYAHSQSLDRLMNPLIDQYLYYLSRTQTTGGTANTQTLGFSQGGPNTMANQAKNWLPGPCYRQQRVSTTTGQNNNSNFTWTGASKYNLNGRESIINPGTAMASHKDDEDKFFPMSGVMIFGKESAGASNTALDNVMITDEEEIKATNPVATERFGTVAVNFQSSSTDPATGDVHAMGALPGMVWQDRDVYLQGPIWAKIPHTDGHFHPSPLMGGFGLKNPPPQILIKNTPVPANPPAEFSATKFASFITQYSTGQVSVEIEWELQKENSKRWNPEVQYTSNYAKSANVDFTVDNNGLYTEPRPIGTRYLTRPL

SEQ ID NO: 5228 - DNA, 2211 bp, Artificial Sequence
  Description of Artificial Sequence: Synthetic polynucleotide
atggctgctgacggttatcttccagattggctcgaggacaacctttctgaaggcattcgagagtggtgggcgctgcaacctggagcccctaaacccaaggcaaatcaacaacatcaggacaacgctcggggtcttgtgcttccgggttacaaatacctcggacccggcaacggactcgacaagggggaacccgtcaacgcagcggacgcggcagccctcgagcacgacaaggcctacgaccagcagctcaaggccggtgacaacccctacctcaagtacaaccacgccgacgccgagttccaggagcggctcaaagaagatacgtcttttgggggcaacctcgggcgagcagtcttccaggccaaaaagaggcttcttgaacctcttggtctggttgaggaagcggctaagacggctcctggaaagaagaggcctgtagatcagtctcctcaggaaccggactcatcatctggtgttggcaaatcgggcaaacagcctgccagaaaaagactaaatttcggtcagactggcgactcagagtcagtcccagaccctcaacctctcggagaaccaccagcagcccccacaagtttgggatctaatacaatggcttcaggcggtggcgcaccaatggcagacaataacgagggtgccgatggagtgggtaattcctcaggaaattggcattgcgattcccaatggctgggcgacagagtcatcaccaccagcaccagaacctgggccctgcccacttacaacaaccatctctacaagcaaatctccagccaatcaggagcttcaaacgacaaccactactttggctacagcaccccttgggggtattttgactttaacagattccactgccacttctcaccacgtgactggcagcgactcattaacaacaactggggattccggcccaagaaactcagcttcaagctcttcaacatccaagttaaagaggtcacgcagaacgatggcacgacgactattgccaataaccttaccagcacggttcaagtgtttacggactcggagtatcagctcccgtacgtgctcgggtcggcgcaccaaggctgtctcccgccgtttccagcggacgtcttcatggtccctcagtatggatacctcaccctgaacaacggaagtcaagcggtgggacgctcatccttttactgcctggagtacttcccttcgcagatgctaaggactggaaataacttccaattcagctataccttcgaggatgtaccttttcacagcagctacgctcacagccagagtttggatcgcttgatgaatcctcttattgatcagtatctgtactacctgaacagaacgcaaggaacaacctctggaacaaccaaccaatcacggctgctttttagccaggctgggcctcagtctatgtctttgcaggccagaaattggctacctgggccctgctaccggcaacagagactttcaaagactgctaacgacaacaacaacagtaactttccttggacagcggccagcaaatatcatctcaatggccgcgactcgctggtgaatccaggaccagctatggccagtcacaaggacgatgaagaaaaatttttccctatgcacggcaatctaatatttggcaaagaagggacaacggcaagtaacgcagaattagataatgtaatgattacggatgaagaagagattcgtaccaccaatcctgtggcaacagagcagtatggaactgtggcaaataacttgcagagctcaaatacagctcccacgactagaactgtcaatgatcagggggccttacctggcatggtgtggcaagatcgtgacgtgtaccttcaaggacctatctgggcaaagattcctcacacggatggacactttcatccttctcctctgatgggaggctttggactgaaacatccgcctcctcaaatcatgatcaaaaatactccggtaccggcaaatcctccgacgactttcagcccggccaagtttgcttcatttatcactcagtactccactggacaggtcagcgtggaaattgagtgggagctacagaaagaaaacagcaaacgttggaatccagagattcagtacacttccaactacaacaagtctgttaatgtggactttactgtagacactaatggtgtttatagtgaacctcgccccattggcacccgttaccttacccgtcccctgtaa

SEQ ID NO: 5229 - protein, 736 aa, Artificial Sequence
  Description of Artificial Sequence: Synthetic polypeptide
MAADGYLPDWLEDNLSEGIREWWALQPGAPKPKANQQHQDNARGLVLPGYKYLGPGNGLDKGEPVNAADAAALEHDKAYDQQLKAGDNPYLKYNHADAEFQERLKEDTSFGGNLGRAVFQAKKRLLEPLGLVEEAAKTAPGKKRPVDQSPQEPDSSSGVGKSGKQPARKRLNFGQTGDSESVPDPQPLGEPPAAPTSLGSNTMASGGGAPMADNNEGADGVGNSSGNWHCDSQWLGDRVITTSTRTWALPTYNNHLYKQISSQSGASNDNHYFGYSTPWGYFDFNRFHCHFSPRDWQRLINNNWGFRPKKLSFKLFNIQVKEVTQNDGTTTIANNLTSTVQVFTDSEYQLPYVLGSAHQGCLPPFPADVFMVPQYGYLTLNNGSQAVGRSSFYCLEYFPSQMLRTGNNFQFSYTFEDVPFHSSYAHSQSLDRLMNPLIDQYLYYLNRTQGTTSGTTNQSRLLFSQAGPQSMSLQARNWLPGPCYRQQRLSKTANDNNNSNFPWTAASKYHLNGRDSLVNPGPAMASHKDDEEKFFPMHGNLIFGKEGTTASNAELDNVMITDEEEIRTTNPVATEQYGTVANNLQSSNTAPTTRTVNDQGALPGMVWQDRDVYLQGPIWAKIPHTDGHFHPSPLMGGFGLKHPPPQIMIKNTPVPANPPTTFSPAKFASFITQYSTGQVSVEIEWELQKENSKRWNPEIQYTSNYNKSVNVDFTVDTNGVYSEPRPIGTRYLTRPL

SEQ ID NO: 5230 - DNA, 2211 bp, Artificial Sequence
  Description of Artificial Sequence: Synthetic polynucleotide
atggctgccgatggttatcttccagattggctcgaggacaaccttagtgaaggaattcgcgagtggtgggctttgaaacctggagcccctcaacccaaggcaaatcaacaacatcaagacaacgctcgaggtcttgtgcttccgggttacaaataccttggacccggcaacggactcgacaagggggagccggtcaacgcagcagacgcggcggccctcgagcacgacaaggcctacgaccagcagctcaaggccggagacaacccgtacctcaagtacaaccacgccgacgccgagttccaggagcggctcaaagaagatacgtcttttgggggcaacctcgggcgagcagtcttccaggccaaaaagaggcttcttgaacctcttggtctggttgaggaagcggctaagacggctcctggaaagaagagaccggtagagccatcaccccagcgttctccagactcctctacgggcatcggcaagaaaggccaacagcccgctaaaaagagactcaattttggtcagactggcgactcagagtcagtccccgacccacaacctctcggagaacctccagcaacccccgctgctgtgggacctactacaatggcttcaggcggtggcgcaccaatggcagacaataacgagggtgccgatggagtgggtaattcctcaggaaattggcattgcgattcccaatggctgggcgacagagtcatcaccaccagcaccagaacctgggccctgcccacttacaacaaccatctctacaagcaaatctccagccaatcaggagcttcaaacgacaaccactactttggctacagcaccccttgggggtattttgactttaacagattccactgccacttttcaccacgtgactggcaaagactcatcaacaacaactggggattccgacccaagagactcaacttcaagctcttcaacatccaagtcaaggaggtcacgacgaatgatggcgtcacgaccatcgctaataaccttaccagcacggttcaagtcttctcggactcggagtaccagttgccgtacgtcctcggctctgcgcaccagggctgcctccctccgttcccggcggacgtgttcatgattccgcagtacggctacctaacgctcaacaatggcagccaagccgtgggacgttcatccttttactgcctggaatatttcccttctcagatgctgagaacgggcaacaactttaccttcagctacacttttgaggacgttcctttccacagcagctacgctcacagccagagtctggaccgtctcatgaatcctctcatcgaccagtacctgtattacttgagcagaacaaacactccaagtggaaccaccacgcagtcaaggcttcagttttctcaggccggagcgagtgacattcgggaccagtctaggaactggcttcctggaccctgttaccgccagcagcgcgtttctaaaacaaaaacagacaacaacaacagcaattttacctggactggtgcttcaaaatataaccttaatgggcgtgaatctataatcaaccctggcactgctatggcctcacacaaagacgacgaagacaagttctttcccatgagcggtgtcatgatttttggaaaagagagcgccggagcttcaaacactgcattggacaatgtcatgattacagacgaagaggaaattaaagccactaaccctgtggccaccgaaagatttgggaccgtggcagtcaatttccagagcagcagcacagaccctgcgaccggagatgtgcatgttatgggagccttacctggaatggtgtggcaagacagagacgtatacctgcagggtcctatttgggccaaaattcctcacacggatggacactttcacccgtctcctcttatgggcggctttggactcaagaacccgcctcctcagatcctcatcaaaaacacgcctgttcctgcgaatcctccggcggagttttcagctacaaagtttgcttcattcatcacccaatactccacaggacaagtgagtgtggaaattgaatgggagctgcagaaagaaaacagcaagcgctggaatcccgaagtgcagtacacatccaattatgcaaaatctgccaacgttgattttactgtggacaacaatggactttatactgagcctcgccccattggcacccgttaccttacccgtcccctgtaa

SEQ ID NO: 5231 - protein, 736 aa, Artificial Sequence
  Description of Artificial Sequence: Synthetic polypeptide
MAADGYLPDWLEDNLSEGIREWWALKPGAPQPKANQQHQDNARGLVLPGYKYLGPGNGLDKGEPVNAADAAALEHDKAYDQQLKAGDNPYLKYNHADAEFQERLKEDTSFGGNLGRAVFQAKKRLLEPLGLVEEAAKTAPGKKRPVEPSPQRSPDSSTGIGKKGQQPAKKRLNFGQTGDSESVPDPQPLGEPPATPAAVGPTTMASGGGAPMADNNEGADGVGNSSGNWHCDSQWLGDRVITTSTRTWALPTYNNHLYKQISSQSGASNDNHYFGYSTPWGYFDFNRFHCHFSPRDWQRLINNNWGFRPKRLNFKLFNIQVKEVTTNDGVTTIANNLTSTVQVFSDSEYQLPYVLGSAHQGCLPPFPADVFMIPQYGYLTLNNGSQAVGRSSFYCLEYFPSQMLRTGNNFTFSYTFEDVPFHSSYAHSQSLDRLMNPLIDQYLYYLSRTNTPSGTTTQSRLQFSQAGASDIRDQSRNWLPGPCYRQQRVSKTKTDNNNSNFTWTGASKYNLNGRESIINPGTAMASHKDDEDKFFPMSGVMIFGKESAGASNTALDNVMITDEEEIKATNPVATERFGTVAVNFQSSSTDPATGDVHVMGALPGMVWQDRDVYLQGPIWAKIPHTDGHFHPSPLMGGFGLKNPPPQILIKNTPVPANPPAEFSATKFASFITQYSTGQVSVEIEWELQKENSKRWNPEVQYTSNYAKSANVDFTVDNNGLYTEPRPIGTRYLTRPL

SEQ ID NO: 5232 - DNA, 2211 bp, Artificial Sequence
  Description of Artificial Sequence: Synthetic polynucleotide
atggctgccgatggttatcttccagattggctcgaggacaacctctctgagggcattcgcgagtggtgggacttgaaacctggagcccctaaacccaaggcaaatcaacaacatcaggacaacgctcgaggtcttgtgcttccgggttacaaataccttggacccggcaacggactcgacaagggggagccggtcaacgcagcagacgcggcggccctcgagcacgacaaggcctacgaccagcagctcaaggccggagacaacccgtacctcaagtacaaccacgccgacgccgagttccaggagcggctcaaagaagatacgtcttttgggggcaacctcgggcgagcagtcttccaggccaaaaagaggcttcttgaacctcttggtctggttgaggaagcggctaagacggctcctggaaagaagagaccggtagagccatcaccccagcgttctccagactcctctacgggcatcggcaagaaaggccaacagcccgctaaaaagagactcaattttggtcagactggcgactcagagtcagtccccgacccacaacctctcggagaacctccagcaacccccgctgctgtgggacctactacaatggcttcaggcggtggcgcaccaatggcagacaataacgagggtgccgatggagtgggtaattcctcaggaaattggcattgcgattcccaatggctgggcgacagagtcatcaccaccagcaccagaacctgggccctgcccacttacaacaaccatctctacaagcaaatctccagccaatcaggagcttcaaacgacaaccactactttggctacagcaccccttgggggtattttgactttaacagattccactgccacttttcaccacgtgactggcaaagactcatcaacaacaactggggattccgacccaagagactcaacttcaagctcttcaacatccaagtcaaggaggtcacgacgaatgatggcgtcacgaccatcgctaataaccttaccagcacggttcaagtcttctcggactcggagtaccagttgccgtacgtcctcggctctgcgcaccagggctgcctccctccgttcccggcggacgtgttcatgattccgcagtacggctacctaacgctcaacaatggcagccaagccgtgggacgttcatccttttactgcctggaatatttcccttctcagatgctgagaacgggcaacaactttaccttcagctacacttttgaggacgttcctttccacagcagctacgctcacagccagagtctggaccgtctcatgaatcccctcatcgaccagtacctgtattacttgagcagaacaaacactccaagtggaaccaccacgcagtcaaggcttcagttttctcaggccggagcgagtgacattcgggaccagtctaggaactggcttcctggaccctgttaccggcagcagcgcgtttctaaaacaaaaacagacaacaacaacagcaactttacctggactggtgcttcaaaatataaccttaatgggcgtgaatctataatcaaccctggcactgctatggcctcacacaaagacgacgaagacaagttctttcccatgagcggtgtcatgatttttggaaaggagagcgccggagcttcaaacactgcattggacaatgtcatgatcacagacgaagaggaaatcaaagccactaaccccgtggccaccgaaagatttgggactgtggcagtcaatctccagagcagcagcacagaccctgcgaccggagatgtgcatgttatgggagccttacctggaatggtgtggcaagacagagacgtgtacctgcagggtcctatttgggccaaaattcctcacacggatggacactttcacccgtctcctctcatgggcggctttggacttaagcacccgcctcctcagatcctcatcaaaaacacgcctgttcctgcgaatcctccggcagagttttcggctacaaagtttgcttcattcatcacccagtattccacaggacaagtgagtgtggaaattgaatgggagctgcagaaagaaaacagcaagcgctggaatcccgaagtgcagtacacatccaattatgcaaaatctgccaacgttgattttactgtggacaacaatggactttatactgagcctcgccccattggcacccgttacctcacccgtcccctgtaa

SEQ ID NO: 5233 - protein, 736 aa, Artificial Sequence
  Description of Artificial Sequence: Synthetic polypeptide
MAADGYLPDWLEDNLSEGIREWWDLKPGAPKPKANQQHQDNARGLVLPGYKYLGPGNGLDKGEPVNAADAAALEHDKAYDQQLKAGDNPYLKYNHADAEFQERLKEDTSFGGNLGRAVFQAKKRLLEPLGLVEEAAKTAPGKKRPVEPSPQRSPDSSTGIGKKGQQPAKKRLNFGQTGDSESVPDPQPLGEPPATPAAVGPTTMASGGGAPMADNNEGADGVGNSSGNWHCDSQWLGDRVITTSTRTWALPTYNNHLYKQISSQSGASNDNHYFGYSTPWGYFDFNRFHCHFSPRDWQRLINNNWGFRPKRLNFKLFNIQVKEVTTNDGVTTIANNLTSTVQVFSDSEYQLPYVLGSAHQGCLPPFPADVFMIPQYGYLTLNNGSQAVGRSSFYCLEYFPSQMLRTGNNFTFSYTFEDVPFHSSYAHSQSLDRLMNPLIDQYLYYLSRTNTPSGTTTQSRLQFSQAGASDIRDQSRNWLPGPCYRQQRVSKTKTDNNNSNFTWTGASKYNLNGRESIINPGTAMASHKDDEDKFFPMSGVMIFGKESAGASNTALDNVMITDEEEIKATNPVATERFGTVAVNLQSSSTDPATGDVHVMGALPGMVWQDRDVYLQGPIWAKIPHTDGHFHPSPLMGGFGLKHPPPQILIKNTPVPANPPAEFSATKFASFITQYSTGQVSVEIEWELQKENSKRWNPEVQYTSNYAKSANVDFTVDNNGLYTEPRPIGTRYLTRPL

SEQ ID NO: 5234 - DNA, 2214 bp, Artificial Sequence
  Description of Artificial Sequence: Synthetic polynucleotide
atggctgccgatggttatcttccagattggctcgaggacaaccttagtgaaggaattcgcgagtggtgggctttgaaacctggagcccctcaacccaaggcaaatcaacaacatcaagacaacgctcgaggtcttgtgcttccgggttacaaataccttggacccggcaacggactcgacaagggggagccggtcaacgcagcagacgcggcggccctcgagcacgacaaggcctacgaccagcagctgcaggcgggtgacaatccgtacctgcggtataaccacgccgacgccgagtttcaggagcgtctgcaagaagatacgtcttttgggggcaaccttggcagagcagtcttccaggccaaaaagaggatccttgagcctcttggtctggttgaggaagcagctaaaacggctcctggaaagaagaggcctgtagatcagtctcctcaggaaccggactcatcatctggtgttggcaaatcgggcaaacagcctgccagaaaaagactaaatttcggtcagactggcgactcagagtcagtcccagaccctcaacctctcggagaaccaccagcagcccccacaagtttgggatctaatacaatggcttcaggcggtggcgcaccaatggcagacaataacgagggtgccgatggggtgggtagttcctcgggaaattggcattgcgattcccaatgactgggggacagagtcatcaccaccagcacccgaacctgggccctgcccacctacaacaatcacctctacaagcaaatctccaacgggacatcgggaggagccaccaacgacaacacctacttcggctacagcaccccctgggggtattttgactttaacagattccactgccacttttcaccacgtgactggcagcgactcatcaacaacaactggggattccggcccaagagactcagcttcaagctcttcaacatccaggtcaaggaggtcacgcagaatgaaggcaccaagaccatcgccaataacctcaccagcaccatccaggtgtttacggactcggagtaccagctgccgtacgttctcggctctgcgcaccagggctgcctccctccgttcccggcggacgtgttcatgattccgcaatacggctacctgacgctcaacaatggcagccaagccgtgggacgttcatccttttactgcctggaatatttcccttctcagatgctgagaacgggcaacaactttaccttcagctacacctttgaggaagtgcctttccacagcagctacgcgcacagccagagcttggaccggctgatgaatcctctgattgaccagtacctgtactacttgtctcggactcaaacaacaggaggcacggcaaatacgcagactctgggcttcagccaaggtgggcctaatacaatggccaatcaggcaaagaactggctgccaggaccctgttaccgccaacaacgcgtctcaacgacaaccgggcaaaacaacaatagcaactttgcctggactgctgggaccaaataccatctgaatggaagaaattcattggctaatcctggcatcgctatggcaacacacaaagacgacgaggagcgtttttttcccagtaacgggatcctgatttttggcaaacaaaatgctgccagagacaatgcggattacagcgatgtcatgctcaccagcgaggaagaaatcaaaaccactaaccctgtggctacagaggaatacggtatcgtggcagataacttgcagcagcaaaacacggctcctcaaattggaactgtcaacagccagggggccttacccggtatggtctggcagaaccgggacgtgtacctgcagggtcccatctgggccaagattcctcacacggacggcaacttccacccgtctccgctgatgggcggctttggcctgaaacatcctccgcctcagatcctgatcaagaacacgcctgtacctgcggatcctccgaccaccttcaaccagtcaaagctgaactctttcatcacgcaatacagcaccggacaggtcagcgtggagatcgagtgggagctgcagaaggaaaacagcaagcgctggaacccggagatccagtacacttccaactattacaagtctaataatgttgaatttgctgttaatactgaaggtgtatatagtgaaccccgccccattggcaccagatacctgactcgtaatctgtaa

SEQ ID NO: 5235 - protein, 736 aa, Artificial Sequence
  Description of Artificial Sequence: Synthetic polypeptide
MAADGYLPDWLEDNLSEGIREWWALKPGAPQPKANQQHQDNARGLVLPGYKYLGPGNGLDKGEPVNAADAAALEHDKAYDQQLQAGDNPYLRYNHADAEFQERLQEDTSFGGNLGRAVFQAKKRILEPLGLVEEAAKTAPGKKRPVDQSPQEPDSSSGVGKSGKQPARKRLNFGQTGDSESVPDPQPLGEPPAAPTSLGSNTMASGGGAPMADNNEGADGVGSSSGNWHCDSQLGDRVITTSTRTWALPTYNNHLYKQISNGTSGGATNDNTYFGYSTPWGYFDFNRFHCHFSPRDWQRLINNNWGFRPKRLSFKLFNIQVKEVTQNEGTKTIANNLTSTIQVFTDSEYQLPYVLGSAHQGCLPPFPADVFMIPQYGYLTLNNGSQAVGRSSFYCLEYFPSQMLRTGNNFTFSYTFEEVPFHSSYAHSQSLDRLMNPLIDQYLYYLSRTQTTGGTANTQTLGFSQGGPNTMANQAKNWLPGPCYRQQRVSTTTGQNNNSNFAWTAGTKYHLNGRNSLANPGIAMATHKDDEERFFPSNGILIFGKQNAARDNADYSDVMLTSEEEIKTTNPVATEEYGIVADNLQQQNTAPQIGTVNSQGALPGMVWQNRDVYLQGPIWAKIPHTDGNFHPSPLMGGFGLKHPPPQILIKNTPVPADPPTTFNQSKLNSFITQYSTGQVSVEIEWELQKENSKRWNPEIQYTSNYYKSNNVEFAVNTEGVYSEPRPIGTRYLTRNL

SEQ ID NO: 5236 - DNA, 2214 bp, Artificial Sequence
  Description of Artificial Sequence: Synthetic polynucleotide
atggctgccgatggttatcttccagattggctcgaggacaaccttagtgaaggaattcgcgagtggtgggctttgaaacctggagcccctcaacccaaggcaaatcaacaacatcaagacaacgctcgaggtcttgtgcttccgggttacaaataccttggacccggcaacggactcgacaagggggagccggtcaacgcagcagacgcggcggccctcgagcacgacaaggcctacgaccagcagctgcaggcgggtgacaatccgtacctgcggtataaccacgccgacgccgagtttcaggagcgtctgcaagaagatacgtcttttgggggcaaccttggcagagcagtcttccaggccaaaaagaggatccttgagcctcttggtctggttgaggaagcagctaaaacggctcctggaaagaagaggcctgtagatcagtctcctcaggaaccggactcatcatctggtgttggcaaatcgggcaaacagcctgccagaaaaagactaaatttcggtcagactggcgactcagagtcagtcccagaccctcaacctctcggagaaccaccagcagcccccacaagtttgggatctaatacaatggcttcaggcggtggcgcaccaatggcagacaataacgagggtgccgatggggtgggtagttcctcgggaaattggcattgcgattcccaatggctgggggacagagtcatcaccaccagcacccgaacctgggccctgcccacctacaacaatcacctctacaagcaaatctccaacgggacatcgggaggagccaccaacgacaacacctacttcggctacagcaccccctgggggtattttgactttaacagattccactgccacttttcaccacgtgactggcagcgactcatcaacaacaactggggattccggcccaagagactcagcttcaagctcttcaacatccaggtcaaggaggtcacgcagaatgaaggcaccaagaccatcgccaataacctcaccagcaccatccaggtgtttacggactcggagtaccagctgccgtacgttctcggctctgcgcaccagggctgcctccctccgttcccggcggacgtgttcatgattccgcaatacggctacctgacgctcaacaatggcagccaagccgtgggacgttcatccttttactgcctggaatatttcccttctcagatgctgagaacgggcaacaactttaccttcagctacacctttgaggaagtgccttttcacagcagctacgcgcacagccagagcttggaccggctgatgaatcctctgattgaccagtacctgtactacttgtctcggactcaaacaacaggaggcacggcaaatacgcagactctgggcttcagccaaggtgggcctaatacaatggccaatcaggcaaagaactggctgccaggaccctgttaccgccaacaacgcgtctcaacgacaaccgggcaaaacaacaatagcaactttgcctggactgctgggaccaaataccatctgaatggaagaaattcattggctaatcctggcatcgctatggcaacacacaaagacgacgaggagcgtttttttcccagtaacgggatcctgatttttggcaaacaaaatgctgccagagacaatgcggattacagcgatgtcatgctcaccagcgaggaagaaatcaaaaccactaaccctgtggctacagaggaatacggtatcgtggcagataacttgcagcagcaaaacacggctcctcaaattggaactgtcaacagccagggggccttacccggtatggtctggcagaaccgggacgtgtacctgcagggtcccatctgggccaagattcctcacacggacggcaacttccacccgtctccgctgatgggcggctttggcctgaaacatcctccgcctcagatcctgatcaagaacacgcctgtacctgcggatcctccgaccaccttcaaccagtcaaagctgaactctttcatcacgcaatacagcaccggacaggtcagcgtggagatcgagtgggagctgcagaaggaaaacagcaagcgctggaacccggagatccagtacacttccaactattacaagtctaataatgttgaatttgctgttaatactgaaggtgtatatagtgaaccccgccccattggcaccagatacctgactcgtaatctgtaa

SEQ ID NO: 5237 - protein, 737 aa, Artificial Sequence; identical to SEQ ID NO: 5225
  Description of Artificial Sequence: Synthetic polypeptide

SEQ ID NO: 5238 - DNA, 2211 bp, Artificial Sequence
  Description of Artificial Sequence: Synthetic polynucleotide
atggctgccgatggttatcttccagattggctcgaggacaacctctctgagggcattcgcgagtggtgggacttgaaacctggagcccctaaacccaaggcaaatcaacaacatcaggacaacgctcgaggtcttgtgcttccgggttacaaataccttggacccggcaacggactcgacaagggggagccggtcaacgcagcagacgcggcggccctcgagcacgacaaggcctacgaccagcagctcaaggccggagacaacccgtacctcaagtacaaccacgccgacgccgagttccaggagcggctcaaagaagatacgtcttttgggggcaacctcgggcgagcagtcttccaggccaaaaagaggcttcttgaacctcttggtctggttgaggaagcggctaagacggctcctggaaagaagagaccggtagagccatcaccccagcgttctccagactcctctacgggcatcggcaagaaaggccaacagcccgctaaaaagagactcaattttggtcagactggcgactcagagtcagtccccgacccacaacctctcggagaacctccagcaacccccgctgctgtgggacctactacaatggcttcaggcggtggcgcaccaatggcagacaataacgagggtgccgatggagtgggtaattcctcaggaaattggcattgcgattcccaatggctgggcgacagagtcatcaccaccagcaccagaacctgggccctgcccacttacaacaaccatctctacaagcaaatctccagccaatcaggagcttcaaacgacaaccactactttggctacagcaccccttgggggtattttgactttaacagattccactgccacttttcaccacgtgactggcaaagactcatcaacaacaactggggattccgacccaagagactcaacttcaagctcttcaacatccaagtcaaggaggtcacgacgaatgatggcgtcacgaccatcgctaataaccttaccagcacggttcaagtcttctcggactcggagtaccagttgccgtacgtcctcggctctgcgcaccagggctgcctccctccgttcccggcggacgtgttcatgattccgcagtacggctacctaacgctcaacaatggcagccaagccgtgggacgttcatccttttactgcctggaatatttcccttctcagatgctgagaacgggcaacaactttaccttcagctacacttttgaggacgttcctttccacagcagctacgctcacagccagagtctggaccgtctcatgaatcctctcatcgaccagtacctgtattacttgagcagaacaaacactccaagtggaaccaccacgcagtcaaggcttcagttttctcaggccggagcgagtgacattcgggaccagtctaggaactggcttcctggaccctgttaccgccagcagcgcgtttctaaaacaaaaacagacaacaacaacagcaattttacctggactggtgcttcaaaatataaccttaatgggcgtgaatctataatcaaccctggcactgctatggcctcacacaaagacgacgaagacaagttctttcccatgagcggtgtcatgatttttggaaaagagagcgccggagcttcaaacactgcattggacaatgtcatgattacagacgaagaggaaattaaagccactaaccctgtggccaccgaaagatttgggaccgtggcagtcaatttccagagcagcagcacagaccctgcgaccggagatgtgcatgctatgggagcattacctggcatggtgtggcaagatagagacgtgtacctgcagggtcccatttgggccaaaattcctcacacagatggacactttcacccgtctcctcttatgggcggctttggactcaagaacccgcctcctcagatcctcatcaaaaacacgcctgttcctgcgaatcctccggcggagttttcagctacaaagtttgcttcattcatcacccaatactccacaggacaagtgagtgtggaaattgaatgggagctgcagaaagaaaacagcaagcgctggaatcccgaagtgcagtacacatccaattatgcaaaatctgccaacgttgattttactgtggacaacaatggactttatactgagcctcgccccattggcacccgttaccttacccgtcccctgtaa

SEQ ID NO: 5239 - protein, 736 aa, Artificial Sequence
  Description of Artificial Sequence: Synthetic polypeptide
MAADGYLPDWLEDNLSEGIREWWDLKPGAPKPKANQQHQDNARGLVLPGYKYLGPGNGLDKGEPVNAADAAALEHDKAYDQQLKAGDNPYLKYNHADAEFQERLKEDTSFGGNLGRAVFQAKKRLLEPLGLVEEAAKTAPGKKRPVEPSPQRSPDSSTGIGKKGQQPAKKRLNFGQTGDSESVPDPQPLGEPPATPAAVGPTTMASGGGAPMADNNEGADGVGNSSGNWHCDSQWLGDRVITTSTRTWALPTYNNHLYKQISSQSGASNDNHYFGYSTPWGYFDFNRFHCHFSPRDWQRLINNNWGFRPKRLNFKLFNIQVKEVTTNDGVTTIANNLTSTVQVFSDSEYQLPYVLGSAHQGCLPPFPADVFMIPQYGYLTLNNGSQAVGRSSFYCLEYFPSQMLRTGNNFTFSYTFEDVPFHSSYAHSQSLDRLMNPLIDQYLYYLSRTNTPSGTTTQSRLQFSQAGASDIRDQSRNWLPGPCYRQQRVSKTKTDNNNSNFTWTGASKYNLNGRESIINPGTAMASHKDDEDKFFPMSGVMIFGKESAGASNTALDNVMITDEEEIKATNPVATERFGTVAVNFQSSSTDPATGDVHAMGALPGMVWQDRDVYLQGPIWAKIPHTDGHFHPSPLMGGFGLKNPPPQILIKNTPVPANPPAEFSATKFASFITQYSTGQVSVEIEWELQKENSKRWNPEVQYTSNYAKSANVDFTVDNNGLYTEPRPIGTRYLTRPL

SEQ ID NO: 5240 - DNA, 2211 bp, Artificial Sequence
  Description of Artificial Sequence: Synthetic polynucleotide
atggctgccgatggttatcttccagattggctcgaggacaaccttagtgaaggaattcgcgagtggtgggcgctgaaacctggagccccgaagcccaaagccaaccagcaaaagcaggacgacggccggggtctggtgcttccgggttacaaatacctcggacccggtaacggactcgacaaaggagagccggtcaacgaggcggacgcggcagccctcgagcacgacaaggcctacgaccagcagctcaaagcgggtgacaatccgtacctgcggtataaccacgccgacgccgagtttcaggagcgtctgcaagaagatacgtcttttgggggcaacctcgggcgagcagtcttccaggccaagaagcgggttctcgaacctctcggtctggttgaggaaggcgctaagacggctcccggaaagaaacgtccggtagagcagtcgccacaagagccagactcctctacgggcatcggcaagaaaggccaacagcccgccagaaaaagactcaatttcggtcagactggcgactcagagtcagttccagaccctcaacctctcggagaacctccagcagcgccctctggtgtgggacctactacaatggcttcaggcggtggcgcaccaatggcagacaataacgaaggcgccgacggagtgggtaatgcctcaggaaattggcattgcgattccacatggctgggcgacagagtcatcaccaccagcacccgaacatgggccttgcccacctataacaaccacctctacaagcaaatctccagtgcttcaacgggggccagcaacgacaacacctacttcggctacagcaccccctgggggtattttgatttcaacagattccactgccatttctcaccacgtgactggcagcgactcatcaacaacaattggggattccggcccaagagactcaacttcaaactcttcaacatccaagtcaaggaggtcacgacgaatgatggcgtcacgaccatcgctaataaccttaccagcacggttcaagtcttctcggactcggagtaccagttgccgtacgtcctcggctctgcgcaccagggctgcctccctccgttcccggcggacgtgttcatgattccgcagtacggctacctaacgctcaacaatggcagccaggcagtgggacggtcatccttttactgcctggaatatttcccatcgcagatgctgagaacgggcaataactttaccttcagctacaccttcgaggacgtgcctttccacagcagctacgcgcacagccagagcctggaccggctgatgaatcctctcatcgaccagtacctgtattacctgaacagaactcagaatcagtccggaagtgcccaaaacaaggacttgctgtttagccgggggtctccagctggcatgtctgttcagcccaaaaactggctacctggaccctgttatcggcagcagcgcgtttctaaaacaaaaacagacaacaacaacagcaattttacctggactggtgcttcaaaatataacctcaatgggcgtgaatccatcatcaaccctggcactgctatggcctcacacaaagacgacgaagacaagttctttcccatgagcggtgtcatgatttttggaaaagagagcgccggagcttcaaacactgcattggacaatgtcatgattacagacgaagaggaaattaaagccactaaccctgtggccaccgaaagatttgggaccgtggcagtcaatttccagagcagcagcacagaccctgcgaccggagatgtgcatgttatgggagccttacctggaatggtgtggcaagacagagacgtatacctgcagggtcctatttgggccaaaattcctcacacagatggacactttcacccgtctcctcttatgggcggctttggactcaagaacccgcctcctcagatcctcatcaaaaacacgcctgttcctgcgaatcctccggcagagttttcggctacaaagtttgcttcattcatcacccagtattccacaggacaagtgagcgtggagattgaatgggagctgcagaaagaaaacagcaaacgctggaatcccgaagtgcagtatacatctaactatgcaaaatctgccaacgttgatttcactgtggacaacaatggactttatactgagcctcgccccattggcacccgttacctcacccgtcccctgtaa

SEQ ID NO: 5241 - protein, 736 aa, Artificial Sequence
  Description of Artificial Sequence: Synthetic polypeptide
MAADGYLPDWLEDNLSEGIREWWALKPGAPKPKANQQKQDDGRGLVLPGYKYLGPGNGLDKGEPVNEADAAALEHDKAYDQQLKAGDNPYLRYNHADAEFQERLQEDTSFGGNLGRAVFQAKKRVLEPLGLVEEGAKTAPGKKRPVEQSPQEPDSSTGIGKKGQQPARKRLNFGQTGDSESVPDPQPLGEPPAAPSGVGPTTMASGGGAPMADNNEGADGVGNASGNWHCDSTWLGDRVITTSTRTWALPTYNNHLYKQISSASTGASNDNTYFGYSTPWGYFDFNRFHCHFSPRDWQRLINNNWGFRPKRLNFKLFNIQVKEVTTNDGVTTIANNLTSTVQVFSDSEYQLPYVLGSAHQGCLPPFPADVFMIPQYGYLTLNNGSQAVGRSSFYCLEYFPSQMLRTGNNFTFSYTFEDVPFHSSYAHSQSLDRLMNPLIDQYLYYLNRTQNQSGSAQNKDLLFSRGSPAGMSVQPKNWLPGPCYRQQRVSKTKTDNNNSNFTWTGASKYNLNGRESIINPGTAMASHKDDEDKFFPMSGVMIFGKESAGASNTALDNVMITDEEEIKATNPVATERFGTVAVNFQSSSTDPATGDVHVMGALPGMVWQDRDVYLQGPIWAKIPHTDGHFHPSPLMGGFGLKNPPPQILIKNTPVPANPPAEFSATKFASFITQYSTGQVSVEIEWELQKENSKRWNPEVQYTSNYAKSANVDFTVDNNGLYTEPRPIGTRYLTRPL

SEQ ID NO: 5242 - DNA, 2205 bp, Artificial Sequence
  Description of Artificial Sequence: Synthetic polynucleotide
atggctgctgacggttatcttccagattggctcgaggacaacctttctgaaggcattcgtgagtggtgggctctgaaacctggagtccctcaacccaaagcgaaccaacaacaccaggacaaccgtcggggtcttgtgcttccgggttacaaatacctcggacccggtaacggactcgacaaaggagagccggtcaacgaggcggacgcggcagccctcgaacacgacaaggcctacgaccagcagctcaaggccggagacaacccgtacctcaagtacaaccacgccgacgccgagttccaggagcggctcaaagaagatacgtcttttgggggcaacctcgggcgagcagtcttccaggccaaaaagaggcttcttgaacctcttggtctggttgaggaagcggctaagacggctcctggaaagaagaggcctgtagagcagtctcctcaggaaccggactcctccgcgggtattggcaaatcgggtgcacagcccgctaaaaagagactcaatttcggtcagactggcgacacagagtcagtcccagaccctcaaccaatcggagaacctcccgcagccccctcaggtgtgggatctcttacaatggcttcaggtggtggcgcaccagtggcagacaataacgaaggtgccgatggagtgggtagttcctcgggaaattggcattgcgattcccaatggctgggggacagagtcatcaccaccagcacccgaacctgggccctgcccacctacaacaaccacctctacaaacaaatttccagccaatcaggagcctcgaacgacaatcactactttggctacagcaccccttgggggtattttgacttcaacagattccactgccacttttcaccacgtgactggcagcgactcatcaacaacaactggggattccggcccaagagactcagcttcaagctcttcaacatccaggtcaaagaggttacggacaacaatggagtcaagaccatcgccaataaccttaccagcacggtccaggtcttcacggactcagactatcagctcccgtacgtgctcgggtcggctcacgagggctgcctcccgccgttcccagcggacgttttcatgattcctcagtacgggtatctgacgcttaatgatggaagccaggccgtgggtcgttcgtccttttactgcctggaatatttcccgtcgcaaatgctaagaacgggtaacaacttccagttcagctacgagtttgagaacgtacctttccatagcagctacgctcacagccaaagcctggaccgactaatgaatccactcatcgaccaatacttgtactatctctcaaagactattaacggttctggacagaatcaacaaacgctaaaattcagtgtggccggacccagcaacatggctgtccagggaagaaactacatacctggacccagctaccgacaacaacgtgtctcaaccactgtgactcaaaacaacaacagcgaatttgcttggcctggagcttcttcttgggctctcaatggacgtaatagcttgatgaatcctggacctgctatggccagccacaaagaaggagaggaccgtttctttcctttgtctggatctttaatttttggcaaacaaggaactggaagagacaacgtggatgcggacaaagtcatgataaccaacgaagaagaaattaaaactactaacccggtagcaacggagtcctatggacaagtggccacaaaccaccagagtgcccaagcacaggcgcagaccggctgggttcaaaaccaaggaatacttccgggtatggtttggcaggacagagatgtgtacctgcaaggacccatctgggccaagattcctcacacggacggcaacttccacccgtctccgctgatgggcggctttggcctgaaacatcctccgcctcagatcctgatcaagaacacgcctgtacctgcggatcctccgaccaccttcaaccagtcaaagctgaactctttcatcacgcaatacagcaccggacaggtcagcgtggaaattgaatgggagctgcagaaggaaaacagcaagcgctggaatcccgaagtgcagtatacatctaactatgcaaaatctgccaacgttgatttcactgtggacaacaatggactttatactgagcctcgccccattggcacccgttacctcacccgtcccctgtaa

SEQ ID NO: 5243 - protein, 734 aa, Artificial Sequence
  Description of Artificial Sequence: Synthetic polypeptide
MAADGYLPDWLEDNLSEGIREWWALKPGVPQPKANQQHQDNRRGLVLPGYKYLGPGNGLDKGEPVNEADAAALEHDKAYDQQLKAGDNPYLKYNHADAEFQERLKEDTSFGGNLGRAVFQAKKRLLEPLGLVEEAAKTAPGKKRPVEQSPQEPDSSAGIGKSGAQPAKKRLNFGQTGDTESVPDPQPIGEPPAAPSGVGSLTMASGGGAPVADNNEGADGVGSSSGNWHCDSQWLGDRVITTSTRTWALPTYNNHLYKQISSQSGASNDNHYFGYSTPWGYFDFNRFHCHFSPRDWQRLINNNWGFRPKRLSFKLFNIQVKEVTDNNGVKTIANNLTSTVQVFTDSDYQLPYVLGSAHEGCLPPFPADVFMIPQYGYLTLNDGSQAVGRSSFYCLEYFPSQMLRTGNNFQFSYEFENVPFHSSYAHSQSLDRLMNPLIDQYLYYLSKTINGSGQNQQTLKFSVAGPSNMAVQGRNYIPGPSYRQQRVSTTVTQNNNSEFAWPGASSWALNGRNSLMNPGPAMASHKEGEDRFFPLSGSLIFGKQGTGRDNVDADKVMITNEEEIKTTNPVATESYGQVATNHQSAQAQAQTGWVQNQGILPGMVWQDRDVYLQGPIWAKIPHTDGNFHPSPLMGGFGLKHPPPQILIKNTPVPADPPTTFNQSKLNSFITQYSTGQVSVEIEWELQKENSKRWNPEVQYTSNYAKSANVDFTVDNNGLYTEPRPIGTRYLTRPL

SEQ ID NO: 5244 - DNA, 2211 bp, Artificial Sequence
  Description of Artificial Sequence: Synthetic polynucleotide
atggctgccgatggttatcttccagattggctcgaggacaacctctctgagggcattcgcgagtggtgggcgctgaaacctggagccccgaagcccaaagccaaccagcaaaagcaggacgacggccggggtctggtgcttcctggctacaagtacctcggacccttcaacggactcgacaagggggagcccgtcaacgcggcggacgcagcggccctcgagcacgacaaggcctacgaccagcagctgcaggcgggtgacaatccgtacctgcggtataaccacgccgacgccgagtttcaggagcgtctgcaagaagatacgtcttttgggggcaacctcgggcgagcagtcttccaggccaagaagtgggttctcgaacctctcggtctggttgaggaaggcgctaagacggctcctggaaagaaacgtccggtagagcagtcgccacaagagccagactcctcctcgggcatcggcaagacaggccagcagcccgctaaaaagagactcaattttggtcagactggcgactcagagtcagtccccgacccacaacctctcggagaacctccagcaacccccgctgctgtgggacctactacaatggcttcaggcggtggcgcaccaatggcagacaataacgaaggcgccgacggagtgggtaatgcctcaggaaattggcattgcgattccacatggctgggcgacagagtcatcaccaccagcacccgcacctgggccttgcccacctacaataaccacctctacaagcaaatctccagtgcttcaacgggggccagcaacgacaaccactacttcggctacagcaccccctgggggtattttgatttcaacagattccactgccatttctcaccacgtgactggcagcgactcatcaacaacaattggggattccggcccaagagactcaacttcaagctcttcaacatccaagtcaaggaggtcacgacgaatgatggcgtcacaaccatcgctaataaccttaccagcacggttcaagtcttctcggactcggagtaccagcttccgtacgtcctcggctctgcgcaccagggctgcctccctccgttcccggcggacgtgttcatgattccgcaatacggctacctgacgctcaacaatggcagccaagccgtgggacgttcatccttttactgcctggaatatttcccttctcagatgctgagaacgggcaacaactttaccttcagctacacctttgaggaagtgcctttccacagcagctacgcgcacagccagagcctggaccggctgatgaatcctctcatcgaccaatacctgtattacctgaacagaactcaaaatcagtccggaagtgcccaaaacaaggacttgctgtttagccgtgggtctccagctggcatgtctgttcagcccaaaaactggctacctggaccctgttatcggcagcagcgcgtttctaaaacaaaaacagacaacaacaacagcaattttacctggactggtgcttcaaaatataacctcaatgggcgtgaatccatcatcaaccctggcactgctatggcctcacacaaagacgacgaagacaagttctttcccatgagcggtgtcatgatttttggaaaggagagcgccggagcttcaaacactgcattggacaatgtcatgatcaccgacgaagaggaaatcaaagccactaaccccgtggccaccgaaagatttgggactgtggcagtcaatctccagagcagcagcacagaccctgcgaccggagatgtgcatgttatgggagccttacctggcatggtgtggcaagatagagacgtgtacctgcagggtcccatttgggccaaaattcctcacacagatggacactttcacccgtctcctcttatgggcggctttggactcaagaacccgcctcctcagatcctcatcaaaaacacgcctgttcctgcgaatcctccggcggagttttcagctacaaagtttgcttcattcatcacccaatactccacaggacaagtgagtgtggaaattgaatgggagctgcagaaagaaaacagcaagcgctggaatcccgaagtgcagtacacatccaattatgcaaaatctgccaacgttgattttactgtggacaacaatggactttatactgagcctcgccccattggcacccgttacctcacccgtcccctgtaa

SEQ ID NO: 5245 - protein, 736 aa, Artificial Sequence
  Description of Artificial Sequence: Synthetic polypeptide
MAADGYLPDWLEDNLSEGIREWWALKPGAPKPKANQQKQDDGRGLVLPGYKYLGPFNGLDKGEPVNAADAAALEHDKAYDQQLQAGDNPYLRYNHADAEFQERLQEDTSFGGNLGRAVFQAKKWVLEPLGLVEEGAKTAPGKKRPVEQSPQEPDSSSGIGKTGQQPAKKRLNFGQTGDSESVPDPQPLGEPPATPAAVGPTTMASGGGAPMADNNEGADGVGNASGNWHCDSTWLGDRVITTSTRTWALPTYNNHLYKQISSASTGASNDNHYFGYSTPWGYFDFNRFHCHFSPRDWQRLINNNWGFRPKRLNFKLFNIQVKEVTTNDGVTTIANNLTSTVQVFSDSEYQLPYVLGSAHQGCLPPFPADVFMIPQYGYLTLNNGSQAVGRSSFYCLEYFPSQMLRTGNNFTFSYTFEEVPFHSSYAHSQSLDRLMNPLIDQYLYYLNRTQNQSGSAQNKDLLFSRGSPAGMSVQPKNWLPGPCYRQQRVSKTKTDNNNSNFTWTGASKYNLNGRESIINPGTAMASHKDDEDKFFPMSGVMIFGKESAGASNTALDNVMITDEEEIKATNPVATERFGTVAVNLQSSSTDPATGDVHVMGALPGMVWQDRDVYLQGPIWAKIPHTDGHFHPSPLMGGFGLKNPPPQILIKNTPVPANPPAEFSATKFASFITQYSTGQVSVEIEWELQKENSKRWNPEVQYTSNYAKSANVDFTVDNNGLYTEPRPIGTRYLTRPL

SEQ ID NO: 5246 - DNA, 2214 bp, Artificial Sequence
  Description of Artificial Sequence: Synthetic polynucleotide
atggctgccgatggttatcttccagattggctcgaggacaaccttagtgaaggaattcgcgagtggtgggctttgaaacctggagcccctcaacccaaggcaaatcaacaacatcaagacaacgctcgaggtcttgtgcttccgggttacaaataccttggacccggcaacggactcgacaagggggagccggtcaacgcagcagacgcggcggccctcgagcacgacaaggcctacgaccagcagctgcaggcgggtgacaatccgtacctgcggtataaccacgccgacgccgagtttcaggagcgtctgcaagaagatacgtcttttgggggcaaccttggcagagcagtcttccaggccaaaaagaggatccttgagcctcttggtctggttgaggaagcagctaaaacggctcctggaaagaagaggcctgtagatcagtctcctcaggaaccggactcatcatctggtgttggcaaatcgggcaaacagcctgccagaaaaagactaaatttcggtcagactggcgactcagagtcagtcccagaccctcaacctctcggagaaccaccagcagcccccacaagtttgggatctaatacaatggcttcaggcggtggcgcaccaatggcagacaataacgagggtgccgatggggtgggtagttcctcgggaaattggcattgcgattcccaatggctgggggacagagtcatcaccaccagcacccgaacctgggccctgcccacctacaacaatcacctctacaagcaaatctccaacgggacatcgggaggagccaccaacgacaacacctacttcggctacagcaccccctgggggtattttgactttaacagattccactgccacttttcaccacgtgactggcagcgactcatcaacaacaactggggattccggcccaagagactcagcttcaagctcttcaacatccaggtcaaggaggtcacgcagaatgaaggcaccaagaccatcgccaataacctcaccagcaccatccaggtgtttacggactcggagtaccagctgccgtacgttctcggctcggcgcaccagggctgcctccctccgttcccggcggacgtcttcatggtgccacagtatggatacctgacgctcaacaatggcagccaagccgtgggacgttcatccttttactgcctggaatatttcccttctcagatgctgagaacgggcaacaactttaccttcagctacacctttgaggaagtgcctttccacagcagctacgcgcacagccagagcttggaccggctgatgaatcctctgattgaccagtacctgtactacttgtctcggactcaaacaacaggaggcacggcaaatacgcagactctgggcttcagccaaggtgggcctaatacaatggccaatcaggcaaagaactggctgccaggaccctgttaccgccaacaacgcgtctcaacgacaaccgggcaaaacaacaatagcaactttgcctggactgctgggaccaaataccatctgaatggaagaaattcattggctaatcctggcatcgctatggcaacacacaaagacgacgaggagcgtttttttcccagtaacgggatcctgatttttggcaaacaaaatgctgccagagacaatgcggattacagcgatgtcatgctcaccagcgaggaagaaatcaaaaccactaaccctgtggctacagaggaatacggtatcgtggcagataacttgcagcagcaaaacacggctcctcaaattggaactgtcaacagccagggggacttacccggtatggtctggcagaaccgggacgtgtacctgcagggtcccatctgggccaagattcctcacacggacggcaacttccacccgtctccgctgatgggcggctttggcctgaaacatcctccgcctcagatcctgatcaagaacacgcctgtacctgcggatcctccgaccaccttcaaccagtcaaagctgaactctttcatcacgcaatacagcaccggacaggtcagcgtggagatcgagtgggagctgcagaaggaaaacagcaagcgctggaacccggagatccagtacacttccaactattacaagtctaataatgttgaatttgctgttaatactgaaggtgtatatagtgaaccccgccccattggcaccagatacctgactcgtaatctgtaa

SEQ ID NO: 5247 - protein, 737 aa, Artificial Sequence
  Description of Artificial Sequence: Synthetic polypeptide
MAADGYLPDWLEDNLSEGIREWWALKPGAPQPKANQQHQDNARGLVLPGYKYLGPGNGLDKGEPVNAADAAALEHDKAYDQQLQAGDNPYLRYNHADAEFQERLQEDTSFGGNLGRAVFQAKKRILEPLGLVEEAAKTAPGKKRPVDQSPQEPDSSSGVGKSGKQPARKRLNFGQTGDSESVPDPQPLGEPPAAPTSLGSNTMASGGGAPMADNNEGADGVGSSSGNWHCDSQWLGDRVITTSTRTWALPTYNNHLYKQISNGTSGGATNDNTYFGYSTPWGYFDFNRFHCHFSPRDWQRLINNNWGFRPKRLSFKLFNIQVKEVTQNEGTKTIANNLTSTIQVFTDSEYQLPYVLGSAHQGCLPPFPADVFMVPQYGYLTLNNGSQAVGRSSFYCLEYFPSQMLRTGNNFTFSYTFEEVPFHSSYAHSQSLDRLMNPLIDQYLYYLSRTQTTGGTANTQTLGFSQGGPNTMANQAKNWLPGPCYRQQRVSTTTGQNNNSNFAWTAGTKYHLNGRNSLANPGIAMATHKDDEERFFPSNGILIFGKQNAARDNADYSDVMLTSEEEIKTTNPVATEEYGIVADNLQQQNTAPQIGTVNSQGDLPGMVWQNRDVYLQGPIWAKIPHTDGNFHPSPLMGGFGLKHPPPQILIKNTPVPADPPTTFNQSKLNSFITQYSTGQVSVEIEWELQKENSKRWNPEIQYTSNYYKSNNVEFAVNTEGVYSEPRPIGTRYLTRNL

SEQ ID NO: 5248 - DNA, 2205 bp, Artificial Sequence
  Description of Artificial Sequence: Synthetic polynucleotide
atggctgctgacggttatcttccagattggctcgaggacaacctttctgaaggcattcgtgagtggtgggctctgaaacctggagtccctcaacccaaagcgaaccaacaacaccaggacaactgtcggggtcttgtgcttccgggttacaaatacctcggacccggtaacggactcgacaaaggagagccggtcaacgaggcggacgcggcagccctcgaacacgacaaggcctacgaccagcagctcaaggccggagacaacccgtacctcaagtacaaccacgccgacgccgagttccaggagcggctcaaagaagatacgtcttttgggggcaacctcgggcgagcagtcttccagaccaaaaagaggcttcttgaacctcttggtctggttgaggaagcggctaagacggctcctggaaagaagaggcctgtagagcagtctcctcaggaaccggactcctccgcgggtattggcaaatcgggtgcacagcccgctaaaaagagactcaatttcggtcagactggcgacacagagtcagtcccagaccctcaaccaatcggagaacctcccgcagccccctcaggtgtgggatctcttacaatggcttcaggtggtggcgcaccagtggcagacaataacgaaggtgccgatggagtgggtagttcctcgggaaattggcattgcgattcccaatggctgggggacagagtcatcaccaccagcacccgaacctgggccctgcccacctacaacaaccacctctacaaacaaatttccagccaatcaggagcctcgaacgacaatcactactttggctacagcaccccttgggggtattttgacttcaacagattccactgccacttttcaccacgtgactggcagcgactcatcaacaacaactggggattccggcccaagagactcagcttcaagctcttcaacatccaggtcaaagaggttacggacaacaatggagtcaagaccatcgccaataaccttaccagcacggtccaggtcttcacggactcagactatcagctcccgtacgtgctcgggtcggctcacgagggctgcctcccgccgttcccagcggacgttttcatgattcctcagtacgggtatctgacgcttaatgatggaagccaggccgtgggtcgttcgtccttttactgcctggaatatttcccgtcgcaaatgctaagaacgggtaacaacttccagttcagctacgagtttgagaacgtacctttccatagcagctacgctcacagccaaagcctggaccgactaatgaatccactcatcgaccaatacttgtactatctctcaaagactattaacggttctggacagaatcaacaaacgctaaaattcagtgtggccggacccagcaacatggctgtccagggaagaaactacatacctggacccagctaccgacaacaacgtgtctcaaccactgtgactcaaaacaacaacagcgaatttgcttggcctggagcttcttcttgggctctcaatggacgtaatagcttgatgaatcctggacctgctatggccagccacaaagaaggagaggaccgtttctttcctttgtctggatctttaatttttggcaaacaaggaactggaagagacaacgtggatgcggacaaagtcatgataaccaacgaagaagaaattaaaactactaacccggtagcaacggagtcctatggacaagtggccacaaaccaccagagtgcccaagcacaggcgcagaccggctgggttcaaaaccaaggaatacttccgggtatggtttggcaggacagagatgtgtacctgcaaggacccatctgggccaagattcctcacacggacggcaacttccacccgtctccgctgatgggcggctttggcctgaaacatcctccgcctcagatcctgatcaagaacacgcctgttcctgcgaatcctccggcggagttttcagctacaaagtttgcttcattcatcacccagtactccacaggacaagtgagtgtggaaattgaatgggagctgcagaaagaaaacagcaagcgctggaatcccgaagtgcagtacacatccaattatgcaaaatctgccaacgttgattttactgtggacaacaatggactttatactgagcctcgccccattggcacccgttaccttaccaaacctctgtaa

SEQ ID NO: 5249 - protein, 734 aa, Artificial Sequence
  Description of Artificial Sequence: Synthetic polypeptide
MAADGYLPDWLEDNLSEGIREWWALKPGVPQPKANQQHQDNCRGLVLPGYKYLGPGNGLDKGEPVNEADAAALEHDKAYDQQLKAGDNPYLKYNHADAEFQERLKEDTSFGGNLGRAVFQTKKRLLEPLGLVEEAAKTAPGKKRPVEQSPQEPDSSAGIGKSGAQPAKKRLNFGQTGDTESVPDPQPIGEPPAAPSGVGSLTMASGGGAPVADNNEGADGVGSSSGNWHCDSQWLGDRVITTSTRTWALPTYNNHLYKQISSQSGASNDNHYFGYSTPWGYFDFNRFHCHFSPRDWQRLINNNWGFRPKRLSFKLFNIQVKEVTDNNGVKTIANNLTSTVQVFTDSDYQLPYVLGSAHEGCLPPFPADVFMIPQYGYLTLNDGSQAVGRSSFYCLEYFPSQMLRTGNNFQFSYEFENVPFHSSYAHSQSLDRLMNPLIDQYLYYLSKTINGSGQNQQTLKFSVAGPSNMAVQGRNYIPGPSYRQQRVSTTVTQNNNSEFAWPGASSWALNGRNSLMNPGPAMASHKEGEDRFFPLSGSLIFGKQGTGRDNVDADKVMITNEEEIKTTNPVATESYGQVATNHQSAQAQAQTGWVQNQGILPGMVWQDRDVYLQGPIWAKIPHTDGNFHPSPLMGGFGLKHPPPQILIKNTPVPANPPAEFSATKFASFITQYSTGQVSVEIEWELQKENSKRWNPEVQYTSNYAKSANVDFTVDNNGLYTEPRPIGTRYLTKPL

SEQ ID NO: 5250 - DNA, 2211 bp, Artificial Sequence
  Description of Artificial Sequence: Synthetic polynucleotide
atggctgccgatggttatcttccagattggctcgaggacaacctctctgagggcattcgcgagtggtgggacttgaaacctggagcccctaaacccaaggcaaatcaacaacatcaggacaacgctcgaggtcttgtgcttccgggttacaaataccttggacccggcaacggactcgacaagggggagccggtcaacgcagcagacgcggcggccctcgagcacgacaaggcctacgaccagcagctcaaggccggagacaacccgtacctcaagtacaaccacgccgacgccgagttccaggagcggctcaaagaagatacgtcttttgggggcaacctcgggcgagcagtcttccaggccaaaaagaggcttcttgaacctcttggtctggttgaggaagcggctaagacggctcctggaaagaagagaccggtagagccatcaccccagcgttctccagactcctctacgggcatcggcaagaaaggccaacagcccgctaaaaagagactcaattttggtcagactggcgactcagagtcagtccccgacccacaacctctcggagaacctccagcaacccccgctgctgtgggacctactacaatggcttcaggcggtggcgcaccaatggcagacaataacgagggtgccgatggagtgggtaattcctcaggaaattggcattgcgattcccaatggctgggcgacagagtcatcaccaccagcaccagaacctgggccctgcccacttacaacaaccatctctacaagcaaatctccagccaatcaggagcttcaaacgacaaccactactttggctacagcaccccttgggggtattttgactttaacagattccactgccacttttcaccacgtgactggcaaagactcatcaacaacaactggggattccgacccaagagactcaacttcaagctcttcaacatccaagtcaaggaggtcacgacgaatgatggcgtcacgaccatcgctaataaccttaccagcacggttcaagtcttctcggactcggagtaccagttgccgtacgtcctcggctctgcgcaccagggctgcctccctccgttcccggcggacgtgttcatgattccgcagtacggctacctaacgctcaacaatggcagccaagccgtgggacgttcatccttttactgcctggaatatttcccttctcagatgctgagaacgggcaacaactttaccttcagctacacttttgaggacgttcctttccacagcagctacgctcacagccagagtctggaccgtctcatgaatcctctcatcgaccagtacctgtattacttgagcagaacaaacactccaagtggaaccaccacgcagtcaaggcttcagttttctcaggccggagcgagtgacattcgggaccagtctaggaactggcttcctggaccctgttaccgccagcagcgcgtttctaaaacaaaaacagacaacaacaacagcaattttacctggactggtgcttcaaaatataaccttaatgggcgtgaatctataatcaaccctggcactgctatggcctcacacaaagacgacgaagacaagttctttcccatgagcggtgtcatgatttttggaaaagagagcgccggagcttcaaacactgcattggacaatgtcatgatcacagacgaagaggaaatcaaagccactaaccccgtggccaccgaaagatttgggactgtggcagtcaatctccagagcagcagcacagaccctgcgaccggagatgtgcatgttatgggagcattacctggcatggtgtggcaagatagagacgtgtacctgcagggtcccatttgggccaaaattcctcacacagatggacactttcacccgtctcctcttatgggcggctttggactcaagaacccgcctcctcagatcctcatcaaaaacacgcctgttcctgcgaatcctccggcggagttttcagctacaaagtttgcttcattcatcacccaatactccacaggacaagtgagtgtggaaattgaatgggagctgcagaaagaaaacagcaagcgctggaatcccgaagtgcagtacacatccaattatgcaaaatctgccaacgttgattttactgtggacaacaatggactttatactgagcctcgccccattggcacccgttaccttacccgtcccctgtaa

SEQ ID NO: 5251 - protein, 736 aa, Artificial Sequence
  Description of Artificial Sequence: Synthetic polypeptide
MAADGYLPDWLEDNLSEGIREWWDLKPGAPKPKANQQHQDNARGLVLPGYKYLGPGNGLDKGEPVNAADAAALEHDKAYDQQLKAGDNPYLKYNHADAEFQERLKEDTSFGGNLGRAVFQAKKRLLEPLGLVEEAAKTAPGKKRPVEPSPQRSPDSSTGIGKKGQQPAKKRLNFGQTGDSESVPDPQPLGEPPATPAAVGPTTMASGGGAPMADNNEGADGVGNSSGNWHCDSQWLGDRVITTSTRTWALPTYNNHLYKQISSQSGASNDNHYFGYSTPWGYFDFNRFHCHFSPRDWQRLINNNWGFRPKRLNFKLFNIQVKEVTTNDGVTTIANNLTSTVQVFSDSEYQLPYVLGSAHQGCLPPFPADVFMIPQYGYLTLNNGSQAVGRSSFYCLEYFPSQMLRTGNNFTFSYTFEDVPFHSSYAHSQSLDRLMNPLIDQYLYYLSRTNTPSGTTTQSRLQFSQAGASDIRDQSRNWLPGPCYRQQRVSKTKTDNNNSNFTWTGASKYNLNGRESIINPGTAMASHKDDEDKFFPMSGVMIFGKESAGASNTALDNVMITDEEEIKATNPVATERFGTVAVNLQSSSTDPATGDVHVMGALPGMVWQDRDVYLQGPIWAKIPHTDGHFHPSPLMGGFGLKNPPPQILIKNTPVPANPPAEFSATKFASFITQYSTGQVSVEIEWELQKENSKRWNPEVQYTSNYAKSANVDFTVDNNGLYTEPRPIGTRYLTRPL

SEQ ID NO: 5252 - DNA, 2214 bp, Artificial Sequence; identical to SEQ ID NO: 5224
  Description of Artificial Sequence: Synthetic polynucleotide

SEQ ID NO: 5253 - protein, 737 aa, Artificial Sequence; identical to SEQ ID NO: 5225
  Description of Artificial Sequence: Synthetic polypeptide

SEQ ID NO: 5254 - DNA, 2205 bp, Artificial Sequence
  Description of Artificial Sequence: Synthetic polynucleotide
atggctgctgacggttatcttccagattggctcgaggacaacctttctgaaggcattcgtgagtggtgggctctgaaacctggagtccctcaacccaaagcgaaccaacaacaccaggacaaccgtcggggtcttgtgcttccgggttacaaatacctcggacccggtaacggactcgacaaaggagagccggtcaacgaggcggacgcggcagccctcgaacacgacaaggcctacgaccagcagctcaaggccggagacaacccgtacctcaagtacaaccacgccgacgccgagttccaggagcggctcaaagaagatacgtcttttgggggcaacctcgggcgagcagtcttccaggccaaaaagaggcttcttgaacctcttggtctggttgaggaagcggctaagacggctcctggaaagaagaggcctgtagagcagtctcctcaggaaccggactcctccgcgggtattggcaaatcgggtgcacagcccgctaaaaagagactcaatttcggtcagactggcgacacagagtcagtcccagaccctcaaccaatcggagaacctcccgcagccccctcaggtgtgggatctcttacaatggcttcaggtggtggcgcaccagtggcagacaataacgaaggtgccgatggagtgggtagttcctcgggaaattggcattgcgattcccaatggctgggggacagagtcatcaccaccagcacccgaacctgggccctgcccacctacaacaaccacctctacaaacaaatttccagccaatcaggagcctcgaacgacaatcactactttggctacagcaccccttgggggtattttgacttcaacagattccactgccacttttcaccacgtgactggcagcgactcatcaacaacaactggggattccggcccaagagactcagcttcaagctcttcaacatccaggtcaaagaggttacggacaacaatggagtcaagaccatcgccaataaccttaccagcacggtccaggtcttcacggactcagactatcagctcccgtacgtgctcgggtcggctcacgagggctgcctcccgccgttcccagcggacgttttcatgattcctcagtacgggtatctgacgcttaatgatggaagccaggccgtgggtcgttcgtccttttactgcctggaatatttcccgtcgcaaatgctaagaacgggtaacaacttccagttcagctacgagtttgagaacgtacctttccatagcagctacgctcacagccaaagcctggaccgactaatgaatccactcatcgaccaatacttgtactatctctcaaagactattaacggttctggacagaatcaacaaacgctaaaattcagtgtggccggacccagcaacatggctgtccagggaagaaactacatacctggacccagctaccgacaacaacgtgtctcaaccactgtgactcaaaacaacaacagcgaatttgcttggcctggagcttcttcttgggctctcaatggacgtaatagcttgatgaatcctggacctgctatggccagccacaaagaaggagaggaccgtttctttcctttgtctggatctttaatttttggcaaacaaggaactggaagagacaacgtggatgcggacaaagtcatgataaccaacgaagaagaaattaaaactactaacccggtagcaacggagtcctatggacaagtggccacaaaccaccagagtgcccaagcacaggcgcagaccggctgggttcaaaaccaaggaatacttccgggtatggtttggcaggacagagatgtgtacctgcaaggacccatttgggccaaaattcctcacacggacggcaactttcacccttctccgctgatgggagggtttggaatgaaacacccgcctcctcagatcctcatcaaaaacacacctgtacctgcggatcctccaacggccttcaacaaggacaagctgaactctttcatcacccagtattctactggccaagtcagcgtggagatcgagtgggagctgcagaaggaaaacagcaagcgctggaaccccgagatccagtacacctccaactactacaaatctacaagtgtggactttgctgttaatacagaaggcgtgtactctgaaccccgccccattggcacccgttacctcacccgtaatctgtaa

SEQ ID NO: 5255 - protein, 734 aa, Artificial Sequence
  Description of Artificial Sequence: Synthetic polypeptide
MAADGYLPDWLEDNLSEGIREWWALKPGVPQPKANQQHQDNRRGLVLPGYKYLGPGNGLDKGEPVNEADAAALEHDKAYDQQLKAGDNPYLKYNHADAEFQERLKEDTSFGGNLGRAVFQAKKRLLEPLGLVEEAAKTAPGKKRPVEQSPQEPDSSAGIGKSGAQPAKKRLNFGQTGDTESVPDPQPIGEPPAAPSGVGSLTMASGGGAPVADNNEGADGVGSSSGNWHCDSQWLGDRVITTSTRTWALPTYNNHLYKQISSQSGASNDNHYFGYSTPWGYFDFNRFHCHFSPRDWQRLINNNWGFRPKRLSFKLFNIQVKEVTDNNGVKTIANNLTSTVQVFTDSDYQLPYVLGSAHEGCLPPFPADVFMIPQYGYLTLNDGSQAVGRSSFYCLEYFPSQMLRTGNNFQFSYEFENVPFHSSYAHSQSLDRLMNPLIDQYLYYLSKTINGSGQNQQTLKFSVAGPSNMAVQGRNYIPGPSYRQQRVSTTVTQNNNSEFAWPGASSWALNGRNSLMNPGPAMASHKEGEDRFFPLSGSLIFGKQGTGRDNVDADKVMITNEEEIKTTNPVATESYGQVATNHQSAQAQAQTGWVQNQGILPGMVWQDRDVYLQGPIWAKIPHTDGNFHPSPLMGGFGMKHPPPQILIKNTPVPADPPTAFNKDKLNSFITQYSTGQVSVEIEWELQKENSKRWNPEIQYTSNYYKSTSVDFAVNTEGVYSEPRPIGTRYLTRNL

SEQ ID NO: 5256 - DNA, 2217 bp, Artificial Sequence
  Description of Artificial Sequence: Synthetic polynucleotide
atggctgccgatggttatcttccagattggctcgaggacaacctctctgagggcattcgcgagtggtgggcgctgaaacctggagccccgaagcccaaagccaaccagcaaaagcaggacgacggccggggtctggtgcttcctggctacaagtacctcggacccttcaacggactcgacaagggggagcccgtcaacgcggcggacgcagcggccctcgagcacgacaaggcctacgaccagcagctgcaggcgggtgacaatccgtacctgcggtataaccacgccgacgccgagtttcaggagcgtctgcaagaagatacgtcttttgggggcaacctcgggcgagcagtcttccaggccaagaagcgggttctcgaacctctcggtctggttgaggaaggcgctaagacggctcctggaaagaagagaccggtagagccatcaccccagcgttctccagactcctctacgggcatcggcaagaaaggccaacagcccgccagaaaaagactcaattttggtcagactggcgactcagagtcagttccagaccctcaacctctcggagaacctccagcagcgccctctggtgtgggacctaatacaatggctgcaggcggtggcgcaccaatggcagacaataacgaaggcgccgacggagtgggtagttcctcgggaaattggcattgcgattccacatggctgggcgacagagtcatcaccaccagcacccgaacctgggccctgcccacctacaacaaccacctctacaagcaaatctccaacgggacatcgggaggagccaccaacgacaacacctacttcggctacagcaccccctgggggtattttgactttaacagattccactgccacttttcaccacgtgactggcagcgactcatcaacaacaactggggattccggcccaagagactcagcttcaagctcttcaacatccaggtcaaggaggtcacgcagaatgaaggcaccaagaccatcgccaataacctcaccagcaccatccaggtgtttacggactcggagtaccagctgccgtacgttctcggctctgcccaccagggctgcctgcctccgttcccggcggacgtgttcatgattccccagtacggctacctaacactcaacaacggtagtcaggccgtgggacgctcctccttctactgcctggaatactttccttcgcagatgctgagaaccggcaacaacttccagtttacttacaccttcgaggacgtgcctttccacagcagctacgcccacagccagagcttggaccggctgatgaatcctctgattgaccagtacctgtactacttgtctcggactcaaacaacaggaggcacggcaaatacgcagactctgggcttcagccaaggtgggcctaatacaatggccaatcaggcaaagaactggctgccaggaccctgttaccgccaacaacgcgtctcaacgacaaccgggcaaaacaacaatagcaactttgcctggactgctgggaccaaataccatctgaatggaagaaattcattggctaatcctggcatcgctatggcaacacacaaagacgacgaggagcgtttttttcccagtaacgggatcctgatttttggcaaacaaaatgctgccagagacaatgcggattacagcgatgtcatgctcaccagcgaggaagaaatcaaaaccactaaccctgtggctacagaggaatacggtatcgtggcagataacttgcagcagcaaaacacggctcctcaaattggaactgtcaacagccagggggccttacccggtatggtctggcagaaccgggacgtgtacctgcagggtcccatctgggccaagattcctcacacggacggcaacttccacccctctcccctcatgggtggattcggacttaaacatcctccgcctcagatcctgatcaagaacacgcctgtacctgcggatcctccgaccaccttcaaccagtcaaagctgaactctttcatcacgcaatacagcaccggacaggtcagcgtggaaattgaatgggagctgcagaaggaaaacagcaagcgctggaaccccgagatccagtacacctccaactactacaaatctacaagtgtggactttgctgttaatacagaaggcgtgtactctgaaccccgccccattggcacccgttacctcacccgtaatctgtaa

SEQ ID NO: 5257 - protein, 738 aa, Artificial Sequence; identical to SEQ ID NO: 5159
  Description of Artificial Sequence: Synthetic polypeptide

SEQ ID NO: 5258 - DNA, 2211 bp, Artificial Sequence
  Description of Artificial Sequence: Synthetic polynucleotide
atggctgctgacggttatcttccagattggctcgaggacaacctttctgaaggcattcgagagtggtgggcgctgcaacctggagcccctaaacccaaggcaaatcaacaacatcaggacaacgctcggggtcttgtgcttccgggttacaaatacctcggacccggcaacggactcgacaagggggaacccgtcaacgcagcggacgcggcagccctcgagcacgacaaggcctacgaccagcagctcaaggccggtgacaacccctacctcaagtacaaccacgccgacgccgagttccaggagcggctcaaagaagatacgtcttttgggggcaacctcgggcgagcagtcttccaggccaaaaagaggcttcttgaacctcttggtctggttgaggaagcggctaagacggctcctggaaagaagaggcctgtagatcagtctcctcaggaaccggactcatcatctggtgttggcaaatcgggcaaacagcctgccagaaaaagactaaatttcggtcagactggcgactcagagtcagtcccagaccctcaacctctcggagaaccaccagcagcccccacaagtttgggatctaatacaatggcttcaggcggtggcgcaccaatggcagacaataacgagggtgccgatggagtgggtaattcctcaggaaattggcattgcgattcccaatggctgggcgacagagtcatcaccaccagcaccagaacctgggccctgcccacttacaacaaccatctctacaagcaaatctccagccaatcaggagcttcaaacgacaaccactactttggctacagcaccccttgggggtattttgactttaacagattccactgccacttctcaccacgtgactggcagcgactcattaacaacaactggggattccggcccaagaaactcagcttcaagctcttcaacatccaagttaaagaggtcacgcagaacgatggcacgacgactattgccaataaccttaccagcacggttcaggtgtttacggactcggagtatcagctcccgtacgtgctcgggtcggcgcaccaaggctgtctcccgccgtttccagcggacgtcttcatggtccctcagtatggatacctcaccctgaacaacggaagtcaagcggtgggacgctcatccttttactgcctggagtacttcccttcgcagatgctaaggactggaaataacttccaattcagctataccttcgaggatgtaccttttcacagcagctacgctcacagccagagtttggatcgcttgatgaatcctcttattgatcagtatctgtactacctgaacagaacgcaaggaacaacctctggaacaaccaaccaatcacggctgctttttagccaggctgggcctcagtctatgtctttgcaggccagaaattggctacctgggccctgctaccggcaacagagactttcaaagactgctaacgacaacaacaacagtaactttccttggacagcggccagcaaatatcatctcaatggccgcgactcgctggtgaatccaggaccagctatggccagtcacaaggacgatgaagaaaaatttttccctatgcacggcaatctaatatttggcaaagaagggacaacggcaagtaacgcagaattagataatgtaatgattacggatgaagaagagattcgtaccaccaatcctgtggcaacagagcagtatggaactgtggcaaataacttgcagagctcaaatacagctcccacgactagaactgtcaatgatcagggggccttacctggcatggtgtggcaagatcgtgacgtgtaccttcaaggacctatctgggcaaagattcctcacacggatggacactttcatccttctcctctgatgggaggctttggactgaaacatccgcctcctcaaatcatgatcaaaaatactccggtaccggcaaatcctccgacgactttcagcccggccaagtttgcttcatttatcactcagtactccactggacaggtcagcgtggaaattgagtgggagctacagaaagaaaacagcaaacgttggaatccagagattcagtacacttccaactacaacaagtctgttaatgtggactttactgtagacactaatggtgtttatagtgaacctcgccccattggcacccgttaccttacccgtcccctgtaa

SEQ ID NO: 5259 - protein, 736 aa, Artificial Sequence; identical to SEQ ID NO: 5229
  Description of Artificial Sequence: Synthetic polypeptide

SEQ ID NO: 5260 - DNA, 2211 bp, Artificial Sequence; identical to SEQ ID NO: 5228
  Description of Artificial Sequence: Synthetic polynucleotide

SEQ ID NO: 5261 - protein, 736 aa, Artificial Sequence; identical to SEQ ID NO: 5229
  Description of Artificial Sequence: Synthetic polypeptide

SEQ ID NO: 5262 - DNA, 2211 bp, Artificial Sequence
  Description of Artificial Sequence: Synthetic polynucleotide
atggctgctgacggttatcttccagattggctcgaggacaacctttctgaaggcattcgtgagtggtgggctctgaaacctggagtccctcaacccaaagcgaaccaacaacaccaggacaaccgtcggggtcttgtgcttccgggttacaaatacctcggacccggtaacggactcgacaaaggagagcccgtcaacgcggcggatgcagcggccctcgagcacgacaaggcctacgaccagcagctcaaagcgggtgacaatccgtacctgcggtataaccacgccgacgccgagtttcaggagcgtctgcaagaagatacgtcttttgggggcaacctcgggcgagcagtcttccaggccaagaagagggttctcgaaccttttggtctggttgaggaaggtgctaagacggctcctggaaagaaacgtccggtagagcagtcgccacaagagccagactcctcctcgggcatcggcaagacaggccagcagcccgctaaaaagagactcaattttggtcagactggcgactcagagtcagtccccgacccacaacctctcggagaacctccagcaacccccgctgctgtgggacctactacaatggcttcaggcggtggcgcaccaatggcagacaataacgaaggcgccgacggagtgggtaatgcctcaggaaattggcattgcgattccacatggctgggcgacagagtcatcaccaccagcacccgcacctgggccttgcccacctacaataaccacctctacaagcaaatctccagtgcttcaacgggggccagcaacgacaaccactacttcggctacagcaccccctgggggtattttgatttcaacagattccactgccatttctcaccacgtgactggcagcgactcatcaacaacaattggggattccggcccaagagactcaacttcaagctcttcaacatccaagtcaaggaggtcacgacgaatgatggcgtcacgaccatcgctaataaccttaccagcacggttcaagtcttctcggactcggagtaccagcttccgtacgtcctcggctctgcgcaccagggctgcctccctccgttcccggcggacgtgttcatgattccgcaatacggctacctgacgctcaacaatggcagccaagccgtgggacgttcatccttttactgcctggaatatttcccttctcagatgctgagaacgggcaacaactttaccttcagctacacctttgaggaagtgcctttccacagcagctacgcgcacagccagagcctggaccggctgatgaatcctctcatcgaccaatacctgtattacctgaacagaactcaaaatcagtccggaagtgcccaaaacaaggacttgctgtttagccgtgggtctccagctggcatgtctgttcagcccaaaaactggctacctggaccctgttatcggcagcagcgcgtttctaaaacaaaaacagacaacaacaacagcaattttacctggactggtgcttcaaaatataacctcaatgggcgtgaatccatcatcaaccctggcactgctatggcctcacacaaagacgacgaagacaagttctttcccatgagcggtgtcatgatttttggaaaagagagcgccggagcttcaaacactgcattggacaatgtcatgattacagacgaagaggaaattaaagccactaaccctgtggccaccgaaagatttgggaccgtggcagtcaatttccagagcagcagcacagaccctgcgaccggagatgtgcatgttatgggagccttacctggaatggtgtggcaagacagagacgtatacctgcagggtcctatttgggccaaaattcctcacacggatggacactttcacccgtctcctctcatgggcggctttggacttaagcacccgcctcctcagatcctcatcaaaaacacgcctgttcctgcgaatcctccggcagagttttcggctacaaagtttgcttcattcatcacccagtattccacaggacaagtgagcgtggagattgaatgggagctgcagaaagaaaacagcaaacgctggaatcccgaagtgcagtatacatctaactatgcaaaatctgccaacgttgatttcactgtggacaacaatggactttatactgagcctcgccccattggcacccgttacctcacccgtcccctgtaa

SEQ ID NO: 5263 - protein, 736 aa, Artificial Sequence
  Description of Artificial Sequence: Synthetic polypeptide
MAADGYLPDWLEDNLSEGIREWWALKPGVPQPKANQQHQDNRRGLVLPGYKYLGPGNGLDKGEPVNAADAAALEHDKAYDQQLKAGDNPYLRYNHADAEFQERLQEDTSFGGNLGRAVFQAKKRVLEPFGLVEEGAKTAPGKKRPVEQSPQEPDSSSGIGKTGQQPAKKRLNFGQTGDSESVPDPQPLGEPPATPAAVGPTTMASGGGAPMADNNEGADGVGNASGNWHCDSTWLGDRVITTSTRTWALPTYNNHLYKQISSASTGASNDNHYFGYSTPWGYFDFNRFHCHFSPRDWQRLINNNWGFRPKRLNFKLFNIQVKEVTTNDGVTTIANNLTSTVQVFSDSEYQLPYVLGSAHQGCLPPFPADVFMIPQYGYLTLNNGSQAVGRSSFYCLEYFPSQMLRTGNNFTFSYTFEEVPFHSSYAHSQSLDRLMNPLIDQYLYYLNRTQNQSGSAQNKDLLFSRGSPAGMSVQPKNWLPGPCYRQQRVSKTKTDNNNSNFTWTGASKYNLNGRESIINPGTAMASHKDDEDKFFPMSGVMIFGKESAGASNTALDNVMITDEEEIKATNPVATERFGTVAVNFQSSSTDPATGDVHVMGALPGMVWQDRDVYLQGPIWAKIPHTDGHFHPSPLMGGFGLKHPPPQILIKNTPVPANPPAEFSATKFASFITQYSTGQVSVEIEWELQKENSKRWNPEVQYTSNYAKSANVDFTVDNNGLYTEPRPIGTRYLTRPL

SEQ ID NO: 5264 - DNA, 2217 bp, Artificial Sequence
  Description of Artificial Sequence: Synthetic polynucleotide
atggctgccgatggttatcttccagattggctcgaggacaacctctctgagggcattcgcgagtggtgggacttgaaacctggagccccgaaacccaaagccaaccagcaaaagcaggacgacggccggggtctggtgcttcctggctacaagtacctcggacccttcaacggactcgacaagggggagcccgtcaacgcggcggatgcaacggccctcgagcacgacaaggcctacgaccagcagctgcaggcgggtgacaatccgtacctgcggtataaccacgccgacgccgagtttcaggagcgtctgcaagaagatacgtcttttgggggcaacctcgggcgagcagtcttccaggccaagaagcgggttctcgaacctctcggtctggttgaggaaggcgctaagacggctcctggaaagaagagaccggtagagccatcaccccagcgttctccagactcctctacgggcatcggcaagaaaggccaacagcccgccagaaaaagactcaattttggtcagactggcgactcagagtcagttccagaccctcaacctctcggagaaccaccagcagcccccacaagtttgggatctaatacaatggcttcaggcggtggcgcaccaatggcagacaataacgagggtgccgatggagtgggtaattcctcaggaaattggcattgcgattcccaatggctgggcgacagagtcatcaccaccagcacccgcacctgggccttgcccacctacaataaccacctctacaagcaaatctccagtgcttcaacgggggccagcaacgacaaccactacttcggctacagcaccccctgggggtattttgactttaaccgcttccactgccacttctcgccaagagactggcaaagactcatcaacaacaattggggattccggcccaagagactcaacttcaaactcttcaacatccaagtcaaggaggtcacgacgaatgatggcgtcacgaccatcgccaataacctcaccagcaccatccaggtgtttacggactcggagtaccagctgccgtacgttctcggctctgcccaccagggctgcctgcctccgttcccggcggacgtgttcatgattccccagtatggatacctcaccctgaacaacggaagtcaagcggtgggacgctcatccttttactgcctggagtacttcccttcgcagatgctaaggactggaaataacttccaattcagctataccttcgaggatgtaccttttcacagcagctacgctcacagccagagtttggatcgcttgatgaatcctcttattgatcagtatctgtactacctgaacagaacgcaaggaacaacctctggaacaaccaaccaatcacggctgctttttagccaggctgggcctcagtctatgtctttgcaggccagaaattggctacctgggccctgctaccggcaacagagactttcaaagactgctaacgacaacaacaacagtaactttccttggacagcagccagcaaatatcatctcaatggccgcgactcgctggtgaatccaggaccagctatggccagtcacaaggacgatgaagaaaaatttttccctatgcacggcaatctaatatttggcaaagaagggacaacggcaagtaacgcagaattagataatgtaatgattacggatgaagaagagattcgtaccaccaatcctgtggcaacagagcagtatggaactgtggcaaataacttgcagagctcaaatacagctcccacgactagaactgtcaatgatcagggggccttacctggcatggtgtggcaagatcgtgacgtgtaccttcaggggcccatctgggcaaagattccacacacggacggacattttcacccctctcccctcatgggtggattcggacttaaacaccctcctccgcagattctcatcaagaacaccccggtacctgcgaatccttcgaccaccttcagtgcggcaaagtttgcttccttcatcacacagtactccacgggacaggtcagcgtggagatcgagtgggagctgcagaaggaaaacagcaagcgctggaacccggagatccagtacacttccaactattacaagtctaataatgttgaatttgctgttaatactgaaggtgtatatagtgaaccccgccccattggcaccagatacctgactcgtaatctgtaa

SEQ ID NO: 5265 - protein, 738 aa, Artificial Sequence
  Description of Artificial Sequence: Synthetic polypeptide
MAADGYLPDWLEDNLSEGIREWWDLKPGAPKPKANQQKQDDGRGLVLPGYKYLGPFNGLDKGEPVNAADATALEHDKAYDQQLQAGDNPYLRYNHADAEFQERLQEDTSFGGNLGRAVFQAKKRVLEPLGLVEEGAKTAPGKKRPVEPSPQRSPDSSTGIGKKGQQPARKRLNFGQTGDSESVPDPQPLGEPPAAPTSLGSNTMASGGGAPMADNNEGADGVGNSSGNWHCDSQWLGDRVITTSTRTWALPTYNNHLYKQISSASTGASNDNHYFGYSTPWGYFDFNRFHCHFSPRDWQRLINNNWGFRPKRLNFKLFNIQVKEVTTNDGVTTIANNLTSTIQVFTDSEYQLPYVLGSAHQGCLPPFPADVFMIPQYGYLTLNNGSQAVGRSSFYCLEYFPSQMLRTGNNFQFSYTFEDVPFHSSYAHSQSLDRLMNPLIDQYLYYLNRTQGTTSGTTNQSRLLFSQAGPQSMSLQARNWLPGPCYRQQRLSKTANDNNNSNFPWTAASKYHLNGRDSLVNPGPAMASHKDDEEKFFPMHGNLIFGKEGTTASNAELDNVMITDEEEIRTTNPVATEQYGTVANNLQSSNTAPTTRTVNDQGALPGMVWQDRDVYLQGPIWAKIPHTDGHFHPSPLMGGFGLKHPPPQILIKNTPVPANPSTTFSAAKFASFITQYSTGQVSVEIEWELQKENSKRWNPEIQYTSNYYKSNNVEFAVNTEGVYSEPRPIGTRYLTRNL

SEQ ID NO: 5266 - DNA, 2208 bp, Artificial Sequence
  Description of Artificial Sequence: Synthetic polynucleotide
atggctgccgatggttatcttccagattggctcgaggacaaccttagtgaaggaattcgcgagtggtgggacttgaaacctggagccccgaagcccaaagccaaccagcaaaagcaggacgacggccggggtctggtgcttcctggctacaagtacctcggacccttcaacggactcgacaagggggagcccgtcaacgcggcggacgcagcggccctcgagcacgacaaggcctacgaccagcagctcaaagcgggtgacaatccgtacctgcggtataaccacgccgacgccgagtttcaggagcgtctgcaagaagatacgtcttttgggggcaacctcgggcgagcagtcttccaggccaagaagcgggttctcgaacctctcggtctggttgaggaaggtgctaagacggctcctggaaagaaacgtccggtagagcagtcgccacaagagccagactcctcctcgggcattggcaagacaggccagcagcccgctaaaaagagactcaattttggtcagactggcgactcagagtcagtccccgacccacaacctctcggagaacctccagcaacccccgctgctgtgggacctactacaatggcttcaggcggtggcgcaccaatggcagacaataacgaaggcgccgacggagtgggtaatgcctcaggaaattggcattgcgattccacatggctgggcgacagagtcatcaccaccagcacccgaacctgggccctgcccacctacaacaaccacctctacaaacaaatttccagccaatcaggagcctcgaacgacaatcactactttggctacagcaccccttgggggtattttgatttcaacagattccactgccacttttcaccacgtgactggcagcgactcatcaacaacaattggggattccggcccaagagactcagcttcaagctcttcaacatccaggtcaaggaggtcacgcagaatgaaggcaccaagaccatcgccaataaccttaccagcacggttcaagtgtttacggactcggagtatcagctcccgtacgtgctcggctcggcgcatcaaggatgcctcccgccgttcccagcagacgtcttcatggtgccacagtatggatacctcaccctgaacaacgggagtcaggcagtaggacgctcttcattttactgcctggagtactttccttctcagatgctgcgtaccggaaacaactttaccttcagctacacttttgaggacgttcctttccacagcagctacgctcacagccagagtctggaccgtctcatgaatcctctgattgaccagtacctgtattacttgagcagaacaaacactccaagtggaaccaccacgcagtcaaggcttcagttttctcaggccggagcgagtgacattcgggaccagtctaggaactggcttcctggaccctgttaccgccagcagcgagtatcaaagacatctgcggataacaacaacagtgaatactcgtggactggagctaccaagtaccacctcaatggcagagactctctggtgaatccgggcccggccatggcaagccacaaggactatgaagaaaagttttttcctcagagcggggttctcatctttgggaagcaaggctcagagaaaacaaatgtggacattgaaaaggtcatgattacagacgaagaggaaatcaggacaaccaatcccgtggctacggagcagtatggttctgtatctaccaacctccagagaggcaacagacaagcagctaccgcagatgtcaacacacaaggcgttcttccaggcatggtctggcaggacagagatgtgtaccttcaggggcccatctgggcaaagattccacacacggacggacattttcacccgtctccgctgatgggcggctttggcctgaaacatcctccgcctcagatcctgatcaagaacacgcctgtacctgcggatcctccgaccaccttcaaccagtcaaagctgaactctttcatcactcagtattctactggccaagtcagcgtggagatcgagtgggagctgcagaaggaaaacagcaagcgctggaaccccgagatccagtacacctccaactactacaaatctacaagtgtggactttgctgttaatacagaaggcgtgtactctgaaccccgccccattggcacccgttacctcacccgtaatctgtaa

SEQ ID NO: 5267 - protein, 735 aa, Artificial Sequence
  Description of Artificial Sequence: Synthetic polypeptide
MAADGYLPDWLEDNLSEGIREWWDLKPGAPKPKANQQKQDDGRGLVLPGYKYLGPFNGLDKGEPVNAADAAALEHDKAYDQQLKAGDNPYLRYNHADAEFQERLQEDTSFGGNLGRAVFQAKKRVLEPLGLVEEGAKTAPGKKRPVEQSPQEPDSSSGIGKTGQQPAKKRLNFGQTGDSESVPDPQPLGEPPATPAAVGPTTMASGGGAPMADNNEGADGVGNASGNWHCDSTWLGDRVITTSTRTWALPTYNNHLYKQISSQSGASNDNHYFGYSTPWGYFDFNRFHCHFSPRDWQRLINNNWGFRPKRLSFKLFNIQVKEVTQNEGTKTIANNLTSTVQVFTDSEYQLPYVLGSAHQGCLPPFPADVFMVPQYGYLTLNNGSQAVGRSSFYCLEYFPSQMLRTGNNFTFSYTFEDVPFHSSYAHSQSLDRLMNPLIDQYLYYLSRTNTPSGTTTQSRLQFSQAGASDIRDQSRNWLPGPCYRQQRVSKTSADNNNSEYSWTGATKYHLNGRDSLVNPGPAMASHKDYEEKFFPQSGVLIFGKQGSEKTNVDIEKVMITDEEEIRTTNPVATEQYGSVSTNLQRGNRQAATADVNTQGVLPGMVWQDRDVYLQGPIWAKIPHTDGHFHPSPLMGGFGLKHPPPQILIKNTPVPADPPTTFNQSKLNSFITQYSTGQVSVEIEWELQKENSKRWNPEIQYTSNYYKSTSVDFAVNTEGVYSEPRPIGTRYLTRNL

SEQ ID NO: 5268 - DNA, 2214 bp, Artificial Sequence
  Description of Artificial Sequence: Synthetic polynucleotide
atggctgccgatggttatcttccagattggctcgaggacaacctctctgagggcattcgcgagtggtgggacttgaaacctggagccccgaaacccaaagccaaccagcaaaagcaggacgacggccggggtctggtgcttcctggctacaagtacctcggacccttcaacggactcgacaagggggagcccgtcaacgcggcggatgcagcggccctcgagcacgacaaggcctacgaccagcagctcaaagcgggtgacaatccgtacctgcggtataaccacgccgacgccgagtttcaggagcgtctgcaagaagatacgtcttttgggggcaacctcgggcgagcagtcttccaggccaagaagagggttctcgaaccttttggtctggttgaggaaggtgctaagacggctcctggaaagaaacgtccggtagagcagtcgccacaagagccagactcctcctcgggcattggcaagacaggccagcagcctgcaagaaaaagattgaattttggtcagactggagacgcagactcagtacctgacccccagcctctcggacagccaccagcagccccctctggtctgggaactaatacgatggctacaggcagtggcgcaccaatggcagacaataacgagggcgccgacggagtgggtaattcctcgggaaattggcattgcgattcccaatggctgggggacagagtcatcaccaccagcacccgaacctgggccctgcccacctacaacaatcacctctacaagcaaatctccaacagcacatctggaggatcttcaaatgacaacgcctacttcggctacagcaccccctgggggtattttgatttcaacagattccactgccatttctcaccacgtgactggcagcgactcatcaacaacaattggggattccggcccaagagactcaacttcaagctcttcaacatccaggtcaaggaggtcacgcagaatgaaggcaccaagaccatcgccaataacctcaccagcaccatccaggtgtttacggactcggagtaccagctgccgtacgttctcggctctgcccaccagggctgcctgcctccgttcccggcggacgtgttcatgattccccagtacggctacctaacactcaacaacggtagtcaggccgtgggacgctcctccttctactgcctggaatactttccttcgcagatgctgagaaccggcaacaacttccagtttacttacaccttcgaggacgtgcctttccacagcagctacgcccacagccagagcttggaccggctgatgaatcctctgattgaccagtacctgtactacttgtctcggactcaaacaacaggaggcacgacaaatacgcagactctgggcttcagccaaggtgggcctaatacaatggccaatcaggcaaagaactggctgccaggaccctgttaccgccagcagcgagtatcaaagacatttgcggataacaacaacagtgaatactcgtggactggagctaccaagtaccacctcaatggcagagactctctggtgaatccgggcccggccatggcaagccacaaggacgatgaagaaaagttttttcctcagagcggggttctcatctttgggaagcaaggctcagagaaaacaaatgtggacattgaaaaggtcatgattacagacgaagaggaaatcaggacaaccaatcccgtggctacggagcagtatggttctgtatctaccaacctccagagaggcaacagacaagcagctaccgcagatgtcaacacacaaggcgttcttccaggcatggtctggcaggacagagatgtgtaccttcaggggcccatctgggcaaagattccacacacggacggacattttcacccctctcccctcatgggtggattcggacttaaacaccctccgcctcagatcctgatcaagaacacgcctgtacccgcggatcctccgaccaccttcaaccagtcaaagctgaactctttcatcacccagtattctactggccaagtcagcgtggagatcgagtgggagctgcagaaggaaaacagcaagcgctggaaccccgagatccagtacacctccaactactacaaatctacaagtgtggactttgctgttaatacagaaggcgtgtactctgaaccccgccccattggcacccgttacctcacccgtaatctgtaa

SEQ ID NO: 5269 - protein, 737 aa, Artificial Sequence
  Description of Artificial Sequence: Synthetic polypeptide
MAADGYLPDWLEDNLSEGIREWWDLKPGAPKPKANQQKQDDGRGLVLPGYKYLGPFNGLDKGEPVNAADAAALEHDKAYDQQLKAGDNPYLRYNHADAEFQERLQEDTSFGGNLGRAVFQAKKRVLEPFGLVEEGAKTAPGKKRPVEQSPQEPDSSSGIGKTGQQPARKRLNFGQTGDADSVPDPQPLGQPPAAPSGLGTNTMATGSGAPMADNNEGADGVGNSSGNWHCDSQWLGDRVITTSTRTWALPTYNNHLYKQISNSTSGGSSNDNAYFGYSTPWGYFDFNRFHCHFSPRDWQRLINNNWGFRPKRLNFKLFNIQVKEVTQNEGTKTIANNLTSTIQVFTDSEYQLPYVLGSAHQGCLPPFPADVFMIPQYGYLTLNNGSQAVGRSSFYCLEYFPSQMLRTGNNFQFTYTFEDVPFHSSYAHSQSLDRLMNPLIDQYLYYLSRTQTTGGTTNTQTLGFSQGGPNTMANQAKNWLPGPCYRQQRVSKTFADNNNSEYSWTGATKYHLNGRDSLVNPGPAMASHKDDEEKFFPQSGVLIFGKQGSEKTNVDIEKVMITDEEEIRTTNPVATEQYGSVSTNLQRGNRQAATADVNTQGVLPGMVWQDRDVYLQGPIWAKIPHTDGHFHPSPLMGGFGLKHPPPQILIKNTPVPADPPTTFNQSKLNSFITQYSTGQVSVEIEWELQKENSKRWNPEIQYTSNYYKSTSVDFAVNTEGVYSEPRPIGTRYLTRNL

SEQ ID NO: 5270 - DNA, 2217 bp, Artificial Sequence
  Description of Artificial Sequence: Synthetic polynucleotide
atggctgccgatggttatcttccagattggctcgaggacactctctctgaaggaataagacagtggtgggcgctgaaacctggagccccgaagcccaaagccaaccagcaaaagcaggacgacggccggggtctggtgcttcctggctacaagtacctcggacccttcaacggactcgacaagggggagcccgtcaacgcggcggatgcagcggccctcgagcacgacaaggcctacgaccagcagctcaaagcgggtgacaatccgtacctgcggtataaccacgccgacgccgagtttcaggagcgtctgcaagaagatacgtcttttgggggcaacctcgggcgagcagtcttccaggccaagaagcgggttctcgaacctctcggtctggttgaggaaggcgctaagacggctcctggaaagaagagaccggtagagccatcaccccagcgttctccagactcctctacgggcatcggcaagaaaggccaacagcccgccagaaaaagactcaattttggtcagactggcgactcagagtcagttccagaccctcaacctctcggagaaccaccagcagcccccacaagtttgggatctaatacaatggcttcaggcggtggcgcaccaatggcagacaataacgagggtgccgatggagtgggtaattcctcaggaaattggcattgcgattcccaatggctgggcgacagagtcatcaccaccagcacccgcacctgggccttgcccacctacaataaccacctctacaagcaaatctccagtgcttcaacgggggccagcaacgacaaccactacttcggctacagcaccccctgggggtattttgactttaaccgcttccactgccacttctcgccaagagactggcaaagactcatcaacaacaattggggattccggcccaagagactcaacttcaaactcttcaacatccaagtcaaggaggtcacgacgaatgatggcgtcacgaccatcgccaataacctcaccagcaccatccaggtgtttacggactcggagtaccagctgccgtacgttctcggctctgcccaccagggctgcctgcctccgttcccggcggacgtgttcatgattccccagtatggatacctcaccctgaacaacggaagtcaagcggtgggacgctcatccttttactgcctggagtacttcccttcgcagatgctaaggactggaaataacttccaattcagctataccttcgaggatgtaccttttcacagcagctacgctcacagccagagtttggatcgcttgatgaatcctcttattgatcagtatctgtactacctgaacagaacgcaaggaacaacctctggaacaaccaaccaatcacggctgctttttagccaggctgggcctcagtctatgtctttgcaggccagaaattggctacctgggccctgctaccggcaacagagactttcaaagactgctaacgacaacaacaacagtaactttccttggacagcagccagcaaatatcatctcaatggccgcgactcgctggtgaatccaggaccagctatggccagtcacaaggacgatgaagaaaaatttttccctatgcacggcaatctaatatttggcaaagaagggacaacggcaagtaacgcagaattagataatgtaatgattacggatgaagaagagattcgtaccaccaatcctgtggcaacagagcagtatggaactgtggcaaataacttgcagagctcaaatacagctcccacgactagaactgtcaatgatcagggggccttacctggcatggtgtggcaagatcgtgacgtgtaccttcaggggcccatctgggcaaagattccacacacggacggacattttcacccctctcccctcatgggtggattcggacttaaacaccctcctccgcagattctcatcaagaacaccccggtacctgcgaatccttcgaccaccttcagtgcggcaaagtttgcttccttcatcacacagtactccacgggacaggtcagcgtggagatcgagtgggagctgcagaaggaaaacagcaagcgctggaacccggagatccagtacacttccaactattacaagtctaataatgttgaatttgctgttaatactgaaggtgtatatagtgaaccccgccccattggcaccagatacctgactcgtaatctgtaa

SEQ ID NO: 5271 - protein, 738 aa, Artificial Sequence
  Description of Artificial Sequence: Synthetic polypeptide
MAADGYLPDWLEDTLSEGIRQWWALKPGAPKPKANQQKQDDGRGLVLPGYKYLGPFNGLDKGEPVNAADAAALEHDKAYDQQLKAGDNPYLRYNHADAEFQERLQEDTSFGGNLGRAVFQAKKRVLEPLGLVEEGAKTAPGKKRPVEPSPQRSPDSSTGIGKKGQQPARKRLNFGQTGDSESVPDPQPLGEPPAAPTSLGSNTMASGGGAPMADNNEGADGVGNSSGNWHCDSQWLGDRVITTSTRTWALPTYNNHLYKQISSASTGASNDNHYFGYSTPWGYFDFNRFHCHFSPRDWQRLINNNWGFRPKRLNFKLFNIQVKEVTTNDGVTTIANNLTSTIQVFTDSEYQLPYVLGSAHQGCLPPFPADVFMIPQYGYLTLNNGSQAVGRSSFYCLEYFPSQMLRTGNNFQFSYTFEDVPFHSSYAHSQSLDRLMNPLIDQYLYYLNRTQGTTSGTTNQSRLLFSQAGPQSMSLQARNWLPGPCYRQQRLSKTANDNNNSNFPWTAASKYHLNGRDSLVNPGPAMASHKDDEEKFFPMHGNLIFGKEGTTASNAELDNVMITDEEEIRTTNPVATEQYGTVANNLQSSNTAPTTRTVNDQGALPGMVWQDRDVYLQGPIWAKIPHTDGHFHPSPLMGGFGLKHPPPQILIKNTPVPANPSTTFSAAKFASFITQYSTGQVSVEIEWELQKENSKRWNPEIQYTSNYYKSNNVEFAVNTEGVYSEPRPIGTRYLTRNL

SEQ ID NO: 5272 - DNA, 2208 bp, Artificial Sequence; identical to SEQ ID NO: 5102
  Description of Artificial Sequence: Synthetic polynucleotide

SEQ ID NO: 5273 - protein, 735 aa, Artificial Sequence [sequence omitted]

SEQ ID NO: 5274 - DNA, 2208 bp, Artificial Sequence
  Description of Artificial Sequence: Synthetic polynucleotide
atggctgccgatggttatcttccagattggctcgaggacaacctctctgagggcattcgcgagtggtgggcgctgaaacctggagccccgaagcccaaagccaaccagcaaaagcaggacgacggccggggtctggtgcttcctggctacaagtacctcggacccttcaacggactcgacaagggggagcccgtcaacgcggcggacgccgcggccctcgagcacgacaaggcctacgaccagcagctgcaggcgggtgacaatccgtacctgcggtataaccacgccgacgccgagtttcaggagcgtctgcaagaagatacgtcttttgggggcaacctcgggcgagcagtcttccaggccaaaaagaggcttcttgaacctcttggtctggttgaggaagcagctaaaacggctcctggaaagaagaggcctgtagagcagtctcctcaggaaccggactcctccgcgggtattggcaaatcgggtgcacagcccgccaaaaagagactcaatttcggtcagactggcgactcagagtcagtcccagaccctcaacctctcggagaaccaccagcagcccccacaagtttgggatctaatacaatggcttcaggcggtggcgcaccaatggcagacaataacgaaggcgccgacggagtgggtaatgcctcaggaaattggcattgcgattccacatggctgggcgacagagtcatcaccaccagcacccgcacctgggccttgcccacctacagcaaccatctctacaagcaaatctccagccaatcaggagcttcaaacgacaacgactactttggctacagcaccccttgggggtattttgatttcaacagattccactgccacttttcaccacgtgactggcaaagactcatcaacaacaactggggattccgacccaagagactcaacttcaagctctttaacattcaagtcaaagaggtcacgcagaatgacggtacgacgacgattgccaataaccttaccagcacggttcaggtgtttactgactcggagtaccagctcccgtacgtcctcggctcggcgcatcaaggatgcctcccgccgttcccagcagacgtcttcatggtgccacagtatggatacctcaccctgaacaacgggagtcaggcagtaggacgctcttcattttactgcctggagtactttccttctcagatgctgcgtaccggaaacaactttaccttcagctacacttttgaggacgttcctttccacagcagctacgctcacagccagagtctggaccgtctcatgaatcctctcatcgaccagtacctgtattacttgagcagaacaaacactccaagtggaaccaccacgcagtcaaggcttcagttttctcaggccggagcgagtgacattcgggaccagtctaggaactggcttcctggaccctgttaccgccagcagcgagtatcaaagacatctgaggataacaacaacagtgaatactcgtggactggagctaccaagtaccacctcaatggcagagactctctggtgaatccgggcccggccatggcaagccacaaggacgatgaagaaaagttttttcctcagagcggggttctcatctttgggaagcaaggctcagagaaaacaaatgtggacattgaaaaggtcatgattacagacgaagaggaaatcaggacaaccaatcccgtggctacggagcagtatggttctgtatctaccaacctccagagaggcaacagacaagcagctaccgcagatgtcaacacacaaggcgttcttccaggcatggtctggcaggacagagatgtgtaccttcaggggcccatctgggcaaagattccacacacggacggacattttcacccctctcccctcatgggtggattcggacttaaacaccctcctccacagattctcatcaagaacaccccggtacctgcgaatccttcgaccaccttcagtgcggcaaagtttgcttccttcatcacacagtactccacgggacaggtcagcgtggagatcgagtgggagctgcagaaggaaaacagcaaacgctggaatcccgaaattcagtacacttccaactacaacaagtctgttaatgtggactttactgtggacactaatggcgtgtattcagagcctcgccccattggcaccagatacctgactcgtaatctgtaa

SEQ ID NO: 5275 - protein, 735 aa, Artificial Sequence
  Description of Artificial Sequence: Synthetic polypeptide
MAADGYLPDWLEDNLSEGIREWWALKPGAPKPKANQQKQDDGRGLVLPGYKYLGPFNGLDKGEPVNAADAAALEHDKAYDQQLQAGDNPYLRYNHADAEFQERLQEDTSFGGNLGRAVFQAKKRLLEPLGLVEEAAKTAPGKKRPVEQSPQEPDSSAGIGKSGAQPAKKRLNFGQTGDSESVPDPQPLGEPPAAPTSLGSNTMASGGGAPMADNNEGADGVGNASGNWHCDSTWLGDRVITTSTRTWALPTYSNHLYKQISSQSGASNDNDYFGYSTPWGYFDFNRFHCHFSPRDWQRLINNNWGFRPKRLNFKLFNIQVKEVTQNDGTTTIANNLTSTVQVFTDSEYQLPYVLGSAHQGCLPPFPADVFMVPQYGYLTLNNGSQAVGRSSFYCLEYFPSQMLRTGNNFTFSYTFEDVPFHSSYAHSQSLDRLMNPLIDQYLYYLSRTNTPSGTTTQSRLQFSQAGASDIRDQSRNWLPGPCYRQQRVSKTSEDNNNSEYSWTGATKYHLNGRDSLVNPGPAMASHKDDEEKFFPQSGVLIFGKQGSEKTNVDIEKVMITDEEEIRTTNPVATEQYGSVSTNLQRGNRQAATADVNTQGVLPGMVWQDRDVYLQGPIWAKIPHTDGHFHPSPLMGGFGLKHPPPQILIKNTPVPANPSTTFSAAKFASFITQYSTGQVSVEIEWELQKENSKRWNPEIQYTSNYNKSVNVDFTVDTNGVYSEPRPIGTRYLTRNL

SEQ ID NO: 5276 - DNA, 2208 bp, Artificial Sequence
  Description of Artificial Sequence: Synthetic polynucleotide
atggctgccgatggttatcttccagattggctcgaggacaacctctctgagggcattcgcgagtggtgggcgctgaaacctggagccccgaagcccaaagccaaccagcaaaagcaggacgacggccggggtctggtgcttcctggctacaagtacctcggacccttcaacggactcgacaagggggagcccgtcaacgcggcggacgcagcggccctcgagcacgacaaggcctacgaccagcagctgcaggcgggtgacaatccgtacctgcggtataaccacgccgacgccgagttccaggagcgtctgcaagaagatacgtcttttgggggcaacctcgggcgagcagtcttccaggccaagaagagggttctcgaaccttttggtctggttgaggaaggtgctaagacggctcctggaaagaaacgtccggtagagcagtcgccacaagagccagactcctcctcgggcattggcaagacaggccagcagcccgctaaaaagagactcaattttggtcagactggcgactcagagtcagtcccagaccctcaacctctcggagaaccaccagcagcccccacaagtttgggatctaatacaatggcttcaggcggtggcgcaccaatggcagacaataacgagggcgccgacggagtgggtaattcctcgggaaattggcattgcgattccacatggatgggcgacagagtcatcaccaccagcacccgaacctgggccctgcccacctacaacaaccacctctacaaacaaatttccagccaatcaggagcttcaaacgacaaccactactttggctacagcaccccttgggggtattttgactttaacagattccactgccacttttcaccacgtgactggcagcgactcattaacaacaactggggattccggcccaagaaactcaacttcaagctctttaacatccaggtcaaggaggtcacgcagaatgaaggcaccaagaccatcgccaataacctcaccagcaccatccaggtgtttacggactcggagtaccagctgccgtacgttctcggctctgcccaccagggctgcctgcctccgttcccggcggacgtgttcatgattccccagtacggctacctaacactcaacaacggtagtcaggccgtgggacgctcctccttctactgcctggaatactttccttcgcagatgctgagaaccggcaacaacttccagtttacttacaccttcgaggacgtgcctttccacagcagctacgcccacagccagagcttggaccggctgatgaatcctctgattgaccagtacctgtattacttgtctcggactcaaacaacaggaggcacgacaaatacgcagactctgggcttcagccaaggtgggcctaatacaatggccaatcaggcaaagaactggctgcctggaccctgttaccgccagcagcgagtatcaaagacatctgcggataacaacaacagtgaatactcgtggactggagctaccaagtaccacctcaatggcagagactctctggtgaatccgggcccggccatggcaagccacaaggacgatgaagaaaagttttttcctcagagcggggttctcatctttgggaagcaaggctcagagaaaacaaatgtggacattgaaaaggttatgattacagacgaagaggaaatcaggacaaccaatcccgtggctacggagcagtatggttctgtatctaccaacctccagagaggcaacagacaagcagctaccgcagatgtcaacacacagggcgttcttccaggcatggtctggcaggacagagatgtgtaccttcagggtcccatttgggccaaaattcctcacacagatggacactttcacccgtcccctcttatgggcggctttggactcaagaacccgcctcctcagatcctcatcaaaaacacgcctgttcctgcgaatcctccggcagagttttcagctacaaagtttgcttcattcatcacccaatactccacaggacaagtgagtgtggaaattgaatgggagctgcagaaagaaaacagcaagcgctggaatcccgaagtgcagtacacatccaattatgcaaaatctgccaacgttgattttactgtggacactaatggcgtgtattcagagcctcgccccattggcaccagatacctcacccgtaatctgtaa

SEQ ID NO: 5277 - protein, 735 aa, Artificial Sequence
  Description of Artificial Sequence: Synthetic polypeptide
MAADGYLPDWLEDNLSEGIREWWALKPGAPKPKANQQKQDDGRGLVLPGYKYLGPFNGLDKGEPVNAADAAALEHDKAYDQQLQAGDNPYLRYNHADAEFQERLQEDTSFGGNLGRAVFQAKKRVLEPFGLVEEGAKTAPGKKRPVEQSPQEPDSSSGIGKTGQQPAKKRLNFGQTGDSESVPDPQPLGEPPAAPTSLGSNTMASGGGAPMADNNEGADGVGNSSGNWHCDSTWMGDRVITTSTRTWALPTYNNHLYKQISSQSGASNDNHYFGYSTPWGYFDFNRFHCHFSPRDWQRLINNNWGFRPKKLNFKLFNIQVKEVTQNEGTKTIANNLTSTIQVFTDSEYQLPYVLGSAHQGCLPPFPADVFMIPQYGYLTLNNGSQAVGRSSFYCLEYFPSQMLRTGNNFQFTYTFEDVPFHSSYAHSQSLDRLMNPLIDQYLYYLSRTQTTGGTTNTQTLGFSQGGPNTMANQAKNWLPGPCYRQQRVSKTSADNNNSEYSWTGATKYHLNGRDSLVNPGPAMASHKDDEEKFFPQSGVLIFGKQGSEKTNVDIEKVMITDEEEIRTTNPVATEQYGSVSTNLQRGNRQAATADVNTQGVLPGMVWQDRDVYLQGPIWAKIPHTDGHFHPSPLMGGFGLKNPPPQILIKNTPVPANPPAEFSATKFASFITQYSTGQVSVEIEWELQKENSKRWNPEVQYTSNYAKSANVDFTVDTNGVYSEPRPIGTRYLTRNL

SEQ ID NO: 5278 - DNA, 2214 bp, Artificial Sequence; identical to SEQ ID NO: 5268
  Description of Artificial Sequence: Synthetic polynucleotide

SEQ ID NO: 5279 - protein, 737 aa, Artificial Sequence; identical to SEQ ID NO: 5269
  Description of Artificial Sequence: Synthetic polypeptide

SEQ ID NO: 5280 - protein, 736 aa, Artificial Sequence; identical to SEQ ID NO: 5093
  Description of Artificial Sequence: Synthetic polypeptide

SEQ ID NO: 5281 - protein, 736 aa, Artificial Sequence
  Description of Artificial Sequence: Synthetic polypeptide
MAADGYLPDWLEDNLSEGIREWWDLKPGAPKPKANQQKQDDGRGLVLPGYKYLGPFNGLDKGEPVNAADAAALEHDKAYDQQLKAGDNPYLRYNHADAEFQERLQEDTSFGGNLGRAVFQAKKRVLEPLGLVEEGAKTAPGKKRPVEQSPQEPDSSSGIGKTGQQPAKKRLNFGQTGDSESVPDPQPLGEPPAAPSGLGPNTMASGGGAPMADNNEGADGVGNSSGNWHCDSTWLGDRVITTSTRTWALPTYNNHLYKQISNGTSGGSTNDNTYFGYSTPWGYFDFNRFHCHFSPRDWQRLINNNWGFRPKRLNFKLFNIQVKEVTTNEGTKTIANNLTSTVQVFTDSEYQLPYVLGSAHQGCLPPFPADVFMVPQYGYLTLNNGSQALGRSSFYCLEYFPSQMLRTGNNFQFSYTFEDVPFHSSYAHSQSLDRLMNPLIDQYLYYLVRTQTTGTGGTQTLAFSQAGPSSMANQARNWVPGPCYRQQRVSTTTNQNNNSNFAWTGAAKFKLNGRDSLMNPGVAMASHKDDEDRFFPSSGVLIFGKQGAGNDGVDYSQVLITDEEEIKATNPVATEEYGAVAINNQRANTQAQTGLVHNQGVIPGMVWQNRDVYLQGPIWAKIPHTDGNFHPSPLMGGFGLKHPPPQILIKNTPVPADPPLTFNQAKLNSFITQYSTGQVSVEIEWELQKENSKRWNPEIQYTSNYYKSTNVDFAVNTEGVYSEPRPIGTRYLTRNL

SEQ ID NO: 5282 - protein, 736 aa, Artificial Sequence
  Description of Artificial Sequence: Synthetic polypeptide
MAADGYLPDWLEDNLSEGIREWWDLKPGAPKPKANQQKQDDGRGLVLPGYKYLGPFNGLDKGEPVNAADAAALEHDKAYDQQLKAGDNPYLRYNHADAEFQERLQEDTSFGGNLGRAVFQAKKRVLEPLGLVEEGAKTAPGKKRPVEQSPQEPDSSSGIGKTGQQPAKKRLNFGQTGDSESVPDPQPLGEPPAAPSGLGPNTMASGGGAPMADNNEGADGVGNSSGNWHCDSTWLGDRVITTSTRTWALPTYNNHLYKQISNGTSGGSTNDNTYFGYSTPWGYFDFNRFHCHFSPRDWQRLINNNWGFRPKRLNFKLFNIQVKEVTTNEGTKTIANNLTSTVQVFTDSEYQLPYVLGSAHQGCLPPFPADVFMVPQYGYLTLNNGSQALGRSSFYCLEYFPSQMLRTGNNFQFSYTFEDVPFHSSYAHSQSLDRLMNPLIDQYLYYLVRTQTTGTGGTQTLAFSQAGPSSMANQARNWVPGPCYRQQRVSTTTNQNNNSNFAWTGAAKFKLNGRDSLMNPGVAMASHKDDEDAFFPSSGVLIFGKQGAGNDGVDYSQVLITDEEEIKATNPVATEEYGAVAINNQAANTQAQTGLVHNQGVIPGMVWQNRDVYLQGPIWAKIPHTDGNFHPSPLMGGFGLKHPPPQILIKNTPVPADPPLTFNQAKLNSFITQYSTGQVSVEIEWELQKENSKRWNPEIQYTSNYYKSTNVDFAVNTEGVYSEPRPIGTRYLTRNL

SEQ ID NO: 5283 - protein, 538 aa, Artificial Sequence
  Description of Artificial Sequence: Synthetic polypeptide
MRAAAGGNGGDAGQGAEGVGNASGDWHCDSTWSESHVTTTSTRTWVLPTYNNHLYLRLGSSNASDTFNGFSTPWGYFDFNRFHCHFSPRDWQRLINNHWGLRPKSMQVRIFNIQVKEVTTSNGETTVSNNLTSTVQIFADSTYELPYVMDAGQEGSLPPFPNDVFMVPQYGYCGLVTGGSSQNQTDRNAFYCLEYFPSQMLRTGNNFEMVYKFENVPFHSMYAHSQSLDRLMNPLLDQYLWELQSTTSGGTLNQGNSATNFAKLTKTNFSGYRKNWLPGPMMKQQRFSKTASQNYKIPQGRNNSLLHYETRTTLDGRWSNFAPGTAMATAANDATDFSQAQLIFAGPNITGNTTTDANNLMFTSEDELRATNPRDTDLFGHLATNQQNATTVPTVDDVDGVGVYPGMVWQDRDIYYQGPIWAKIPHTDGHFHPSPLIGGFGLKSPPPQIFIKNTPVPANPATTFSPARINSFITQYSTGQVAVKIEWEIQKERSKRWNPEVQFTSNYGAQDSLLWAPDNAGAYKEPRAIGSRYLTNHL

SEQ ID NO: 5284 - protein, 736 aa, Artificial Sequence
  Description of Artificial Sequence: Synthetic polypeptide
MSFVDHPPDWLESIGDGFREFLGLEAGPPKPKANQQKQDNARGLVLPGYKYLGPGNGLDKGDPVNFADEVAREHDLSYQKQLEAGDNPYLKYNHADAEFQEKLASDTSFGGNLGKAVFQAKKRILEPLGLVETPDKTAPAAKKRPLEQSPQEPDSSSGVGKKGKQPARKRLNFDDEPGAGDGPPPEGPSSGAMSTETEMRAAAGGNGGDAGQGAEGVGNASGDWHCDSTWSESHVTTTSTRTWVLPTYNNHLYLRLGSSNASDTFNGFSTPWGYFDFNRFHCHFSPRDWQRLINNHWGLRPKSMQVRIFNIQVKEVTTSNGETTVSNNLTSTVHIFADSTYELPYVMDAGQEGSLPPFPNDVFMVPQYGYCGLVTGGSSQNQTDRNAFYCLEYFPSQMLRTGNNFEMVYKFENVPFHSMYAHSQSLDRLMNPLLDQYLWELQSTTSGGTLNQGNSATNFAKLTNKNFSGYRKNWLPGPMMKQQRFSKTASQNYKIPQGGNNSLLHYETRTTLDRRWSNFAPGTAMATAANDATDFSQAQLIFAGPNITGNTTTDANNLMFTSEDELRATNPRDTDLFGHLATNQQNATTVPTVDDVDGVGVYPGMVWQDRDIYYQGPIWAKIPHTDGHFHPSPLIGGFGLKSPPPQIFIKNTPVPANPATTFSPARINSFITQYSTGQVAVKIEWEIQKERSKRWNPEVQFTSNYGAQDSLLWAPDNAGAYKEPRAIGSRYLTNHL

SEQ ID NO: 5285 - protein, 736 aa, Artificial Sequence
  Description of Artificial Sequence: Synthetic polypeptide
MSFVDHPPDWLESIGDGFREFLGLEAGPPKPKANQQKQDNARGLVLPGYKYLGPGNGLDKGDPVNFADEVAREHDLSYQKQLEAGDNPYLKYNHADAEFQEKLASDTSFGGNLGKAVFQAKKRILEPLGLVETPDKTAPAAKKRPLEQSPQEPDSSSGVGKKGKQPARKRLNFDDEPGAGDGPPPEGPSSGAMSTETEMRAAAGGNGGDAGQGAEGVGNASGDWHCDSTWSESHVTTTSTRTWVLPTYNNHLYLRLGSSNASDTFNGFSTPWGYFDFNRFHCHFSPRDWQRLINNHWGLRPKSMQVRIFNIQVKEVTTSNGETTVSNNLTSTVQIFADSTYELPYVMDAGQEGSLPPFPNDVFMVPQYGYCGLVTGGSSQNQTDRNAFYCLEYFPSQMLRTGNNFEMVYKFENVPFHSMYAHSQSLDRLMNPLLDQYLWELQSTTSGGTLNQGNSATNFAKLTKTNFSGYRKNWLPGPMMKQQRFSKTASQNYKIPQGRNNSLLHYETRTTLDGRWSNFAPGTAMATAANDATDFSQAQLIFAGPNITGNTTTDANNLMFTSEDELRATNPRDTDLFGHLATNQQNATTVPTVDDVDGVGVYPGMVWQDRDIYYQGPIWAKIPHTDGHFHPSPLIGGFGLKSPPPQIFIKNTPVPANPATTFSPARINSFITQYSTGQVAVKIEWEIQKERSKRWNPEVQFTSNYGAQDSLLWAPDNAGAYKEPRAIGSRYLTNHL

SEQ ID NO: 5286 - DNA, 2214 bp, Artificial Sequence
  Description of Artificial Sequence: Synthetic polynucleotide
atggctgccgatggttatcttccagattggctcgaggacactctctctgaaggaataagacagtggtggaagctcaaacctggcccaccaccaccaaagcccgcagagcggcataaggacgacagcaggggtcttgtgcttcctgggtacaagtacctcggacccttcaacggactcgacaagggagagccggtcaacgaggcagacgccgcggccctcgagcacgacaaagcctacgaccggcagctcgacagcggagacaacccgtacctcaagtacaaccacgccgacgcggagtttcaggagcgccttaaagaagatacgtcttttgggggcaacctcgggcgagcagtcttccaggccaaaaagaggcttcttgaacctcttggtctggttgaggaagcggctaagacggctcctggaaagaagaggcctgtagagcagtctcctcaggaaccggactcctcctcgggcatcggcaagacaggccagcagcccgctaaaaagagactcaatttcggtcagactggcgacacagagtcagtcccagaccctcaaccaatcggagaacctcccgcagccccctcaggtgtgggatctcttacaatggcttcaggtggtggcgcaccagtggcagacaataacgaaggtgccgatggagtgggtagttcctcgggaaattggcattgcgattcccaatggctgggggacagagtcatcaccaccagcacccgaacctgggccctgcccacctacaacaatcacctctacaagcaaatctccaacgggacatcgggaggagccaccaacgacaacacctacttcggctacagcaccccctgggggtattttgactttaacagattccactgccacttttcaccacgtgactggcagcgactcatcaacaacaactggggattccggcccaagagactcagcttcaagctcttcaacatccaggtcaaggaggtcacgcagaatgaaggcaccaagaccatcgccaataaccttaccagcacggtccaggtcttcacggactcggagtaccagctgccgtacgttctcggctctgcccaccagggctgcctgcctccgttcccggcggacgtgttcatgattccccagtacggctacctaacactcaacaacggtagtcaggccgtgggacgctcctccttctactgcctggaatactttccttcgcagatgctgagaaccggcaacaacttccagtttacttacaccttcgaggacgtgcctttccacagcagctacgcccacagccagagcttggaccggctgatgaatcctctgattgaccagtacctgtactacttgtctcggactcaaacaacaggaggcacggcaaatacgcagactctgggcttcagccaaggtgggcctaatacaatggccaatcaggcaaagaactggctgccaggaccctgttaccgccaacaacgcgtctcaacgacaaccgggcaaaacaacaatagcaactttgcctggactgctgggaccaaataccatctgaatggaagaaattcattggctaatcctggcatcgctatggcaacacacaaagacgacaaggagcgtttttttcccagtaacgggatcctgatttttggcaaacaaaatgctgccagagacaatgcggattacagcgatgtcatgctcaccagcgaggaagaaatcaaaaccactaaccctgtggctacagaggaatacggtatcgtggcagataacttgcagcagcaaaacacggctcctcaaattggaactgtcaacagccagggggccttacccggtatggtttggcagaaccgggacgtgtacctgcagggtcccatctgggccaagattcctcacacggacggcaacttccacccgtctccgctgatgggcggctttggcctgaaacatcctccgcctcagatcctgatcaagaacacgcctgtacctgcggatcctccgaccaccttcaaccagtcaaagctgaactctttcatcacgcaatacagcaccggacaggtcagcgtggaaattgaatgggagctgcagaaggaaaacagcaagcgctggaaccccgagatccagtacacctccaactactacaaatctacaagtgtggactttgctgttaatacagaaggcgtgtactctgaaccccaccccattggcacccgttacctcacccgtcccctgtaa

SEQ ID NO: 5287 - protein, 737 aa, Artificial Sequence
  Description of Artificial Sequence: Synthetic polypeptide
MAADGYLPDWLEDTLSEGIRQWWKLKPGPPPPKPAERHKDDSRGLVLPGYKYLGPFNGLDKGEPVNEADAAALEHDKAYDRQLDSGDNPYLKYNHADAEFQERLKEDTSFGGNLGRAVFQAKKRLLEPLGLVEEAAKTAPGKKRPVEQSPQEPDSSSGIGKTGQQPAKKRLNFGQTGDTESVPDPQPIGEPPAAPSGVGSLTMASGGGAPVADNNEGADGVGSSSGNWHCDSQWLGDRVITTSTRTWALPTYNNHLYKQISNGTSGGATNDNTYFGYSTPWGYFDFNRFHCHFSPRDWQRLINNNWGFRPKRLSFKLFNIQVKEVTQNEGTKTIANNLTSTVQVFTDSEYQLPYVLGSAHQGCLPPFPADVFMIPQYGYLTLNNGSQAVGRSSFYCLEYFPSQMLRTGNNFQFTYTFEDVPFHSSYAHSQSLDRLMNPLIDQYLYYLSRTQTTGGTANTQTLGFSQGGPNTMANQAKNWLPGPCYRQQRVSTTTGQNNNSNFAWTAGTKYHLNGRNSLANPGIAMATHKDDKERFFPSNGILIFGKQNAARDNADYSDVMLTSEEEIKTTNPVATEEYGIVADNLQQQNTAPQIGTVNSQGALPGMVWQNRDVYLQGPIWAKIPHTDGNFHPSPLMGGFGLKHPPPQILIKNTPVPADPPTTFNQSKLNSFITQYSTGQVSVEIEWELQKENSKRWNPEIQYTSNYYKSTSVDFAVNTEGVYSEPHPIGTRYLTRPL

SEQ ID NO: 5288 - protein, 736 aa, Artificial Sequence
  Description of Artificial Sequence: Synthetic polypeptide
MAADGYLPDWLEDNLSEGIREWWDLKPGAPKPKANQQKQDDGRGLVLPGYKYLGPFNGLDKGEPVNAADAAALEHDKAYDQQLKAGDNPYLRYNHADAEFQERLQEDTSFGGNLGRAVFQAKKRVLEPLGLVEEGAKTAPGKKRPVEQSPQEPDSSSGIGKTGQQPAKKRLNFGQTGDTESVPDPQPIGEPPAAPSGVGSLTMASGGGAPVADNNEGADGVGSSSGNWHCDSQWLGDRVITTSTRTWALPTYNNHLYKQISSASTGASNDNHYFGYSTPWGYFDFNRFHCHFSPRDWQRLINNNWGFRPKRLNFKLFNIQVKEVTDNNGVKTIANNLTSTVQVFTDSDYQLPYVLGSAHQGCLPPFPADVFMIPQYGYLTLNNGSQAVGRSSFYCLEYFPSQMLRTGNNFQFTYTFEDVPFHSSYAHSQSLDRLMNPLIDQYLYYLSRTQTTGGTANTQTLGFSQGGPNTMANQAKNWLPGPCYRQQRVSTTTGQNNNSNFAWTAGTKYHLNGRNSLANPGIAMATHKDDKERFFPSNGILIFGKQNAARDNADYSDVMLTSEEEIKTTNPVATEEYGIVADNLQQQNTAPQIGTVNSQGALPGMVWQNRDVYLQGPIWAKIPHTDGNFHPSPLMGGFGLKHPPPQILIKNTPVPADPPTTFNQSKLNSFITQYSTGQVSVEIEWELQKENSKRWNPEIQYTSNYYKSTSVDFAVNTEGVYSEPHPIGTRYLTRPL

SEQ ID NO: 5289 - protein, 736 aa, Artificial Sequence
  Description of Artificial Sequence: Synthetic polypeptide
MAADGYLPDWLEDTLSEGIRQWWKLKPGPPPPKPAERHKDDSRGLVLPGYKYLGPFNGLDKGEPVNEADAAALEHDKAYDRQLDSGDNPYLKYNHADAEFQERLQGDTSFGGNLGRAVFQAKKRVLEPLGLVEEGAKTAPGKKRPVEQSPQEPDSSSGIGETGQQPAKKRLNFGQTGDSESVPDPQPLGEPPATPAAVGPTTMASGGGAPMADNNEGADGVGSSSGNWHCDSQWLGDRVITTSTRTWALPTYNNHLYKQISSASTGASNDNHYFGYSTPWGYFDFNRFHCHFSPRDWQRLINNNWGFRPKRLSFKLFNIQVKEVTDNNGVKTIANNLTSTVQVFTDSEYQLPYVLGSAHQGCLPPFPADVFMIPQYGYLTLNNGSQAVGRSSFYCLEYFPSQMLRTGNNFTFSYTFEDVPFHSSYAHSQSLDRLMNPLIDQYLYYLSRTQTTGGTANTQTLGFSQGGPNTMANQAKNWLPGPCYRQQRVSTTTGQNNNSNFAWTAGTKYHLNGRNSLANPGIAMATHKDDKERFFPSNGILIFGKQNAARDNADYSDVMLTSEEEIKTTNPVATEEYGIVADNLQQQNTAPQIGTVNSQGALPGMVWQNRDVYLQGPIWAKIPHTDGNFHPSPLMGGFGLKHPPPQILIKNTPVPADPPTTFNQSKLNSFITQYSTGQVSVEIEWELQKENSKRWNPEIQYTSNYYKSTSVDFAVNTEGVYSEPHPIGTRYLTRPL

SEQ ID NO: 5290 - DNA, 2181 bp, Artificial Sequence
  Description of Artificial Sequence: Synthetic polynucleotide
atgtcttttgttgatcaccctccagattggttggaagaagttggtgaaggtcttcgcgagtttttgggccttgaagcgggcccaccgaaaccaaaacccaatcagcagcatcaagatcaagcccgtggtcttgtgctgcctggttataactatctcggacccggaaacggtctcgatcgaggagagcctgtcaacagggcagacgaggtcgcgcgagagcacgacatctcgtacaacgagcagcttgaggcgggagacaacccctacctcaagtacaaccacgcggacgccgagtttcaggagaagctcgccgacgacacatccttcgggggaaacctcggaaaggcagtctttcaggccaagaaaagggttctcgaaccttttggcctggttgaagagggtgctaagacggcccctaccggaaagcggatagacgaccactttccaaaaagaaagaaggctcggaccgaagaggactccaagccttccacctcgtcagacgccgaagctggacccagcggatcccagcagctgcaaatcccagcacaaccagcctcaagtttgggagctgatacaatgtctgcgggaggtggcggcccattgggcgacaataaccaaggtgccgatggagtgggcaatgcctcgggagattggcattgcgattccacgtggatgggggacagagtcgtcaccaagtccacccgcacctgggtgctgcccagctacaacaaccaccagtaccgagagatcaaaagcggctccgtcgacggaagcaacgccaacgcctactttggatacagcaccccctgggggtactttgactttaaccgcttccacagccactggagcccccgagactggcaaagactcatcaacaactattggggcttcagaccccggtctctcagagtcaaaatcttcaacatccaagtcaaagaggtcacggtgcaggactccaccaccaccatcgccaacaacctcacctccaccgtccaagtgtttacggacgacgactaccaactcccgtacgtcgtcggcaacgggaccgagggatgcctgccggccttccccccgcaggtctttacgctgccgcagtacggctacgcgacgctgaaccgagacaacggagacaacccgacagagcggagcagcttcttttgcctagagtactttcccagcaagatgctgaggacgggcaacaactttgagtttacctacagctttgaagaggtgcccttccactgcagcttcgccccgagccagaacctctttaagctggccaacccgctggtggaccagtacctgtaccgcttcgtgagcacctcggccacgggcgccatccagttccaaaagaacctggcgggcagatacgccaacacctacaaaaactggttcccggggcccatgggccgaacccagggctggaacacgagctctggggtcagcagcaccaacagagtcagcgtcaacaacttttccgtctcaaaccggatgaacctggagggggccagctaccaagtgaacccccagcccaacgggatgacaaacacgctccaaggcagcaaccgctacgcgctggaaaacaccatgatcttcaacgctcaaaacgccacgccgggaactacctcggtgtacccagaggacaatctactgctgaccagcgagagcgagactcagcccgtcaaccgggtggcttacaacacgggcggtcagatggccaccaacgcccagaacgccaccacggctcccacggtcgggacctacaacctccaggaagtgcttcctggcagcgtatggatggagagggacgtgtacctccaaggacccatctgggccaagatcccagagacgggggcgcactttcacccctctccggccatgggcggattcggactcaaacacccgccgcccatgatgctcatcaaaaacacgccggtgcccggcaacatcaccagcttctcggacgtgcccgtcagcagcttcatcacccagtacagcaccgggcaggtcaccgtggagatggaatgggagctcaaaaaggaaaactccaagaggtggaacccagagatccagtacaccaacaactacaacgacccccagtttgtggactttgctccagacggctccggcgaatacagaaccaccagagccatcggaacccgatacctcacccgacccctt

SEQ ID NO: 5291 - protein, 726 aa, Artificial Sequence
  Description of Artificial Sequence: Synthetic polypeptide
MSFVDHPPDWLEEVGEGLREFLGLEAGPPKPKPNQQHQDQARGLVLPGYNYLGPGNGLDRGEPVNRADEVAREHDISYNEQLEAGDNPYLKYNHADAEFQEKLADDTSFGGNLGKAVFQAKKRVLEPFGLVEEGAKTAPTGKRIDDHFPKRKKARTEEDSKPSTSSDAEAGPSGSQQLQIPAQPASSLGADTMSAGGGGPLGDNNQGADGVGNASGDWHCDSTWMGDRVVTKSTRTWVLPSYNNHQYREIKSGSVDGSNANAYFGYSTPWGYFDFNRFHSHWSPRDWQRLINNYWGFRPRSLRVKIFNIQVKEVTVQDSTTTIANNLTSTVQVFTDDDYQLPYVVGNGTEGCLPAFPPQVFTLPQYGYATLNRDNGDNPTERSSFFCLEYFPSKMLRTGNNFEFTYSFEEVPFHCSFAPSQNLFKLANPLVDQYLYRFVSTSATGAIQFQKNLAGRYANTYKNWFPGPMGRTQGWNTSSGSSTNRVSVNNFSVSNRMNLEGASYQVNPQPNGMTNTLQGSNRYALENTMIFNAQNATPGTTSVYPEDNLLLTSESETQPVNRVAYNTGGQMATNAQNATTAPTVGTYNLQEVLPGSVWMERDVYLQGPIWAKIPETGAHFHPSPAMGGFGLKHPPPMMLIKNTPVPGNITSFSDVPVSSFITQYSTGQVTVEMEWELKKENSKRWNPEIQYTNNYNDPQFVDFAPDGSGEYRTTRAIGTRYLTRPL

SEQ ID NO: 5292 - protein, 735 aa, Artificial Sequence
  Description of Artificial Sequence: Synthetic polypeptide
MAADGYLPDWLEDTLSEGIRQWWKLKPGPPPPKPAERHKDDSRGLVLPGYKYLGPFNGLDKGEPVNEADAAALEHDKAYDRQLDSGDNPYLKYNHADAEFQERLKEDTSFGGNLGRAVFQAKKRILEPLGLVEEPVKTAPGKKRPVEHSPAEPDSSSGTGKSGQQPARKRLNFGQTGDADSVPDPQPLGQPPAAPSGLGTNTMASGSGAPMADNNEGADGVGNSSGNWHCDSTWMGDRVITTSTRTWALPTYNNHLYKQISSQSGASNDNHYFGYSTPWGYFDFNRFHCHFSPRDWQRLINNNWGFRPKRLSFKLFNIQVKEVTQNDGTTTIANNLTSTVQVFTDSEYQLPYVLGSAHQGCLPPFPADVFMVPQYGYLTLNNGSQAVGRSSFYCLEYFPSQMLRTGNNFTFSYTFEDVPFHSSYAHSQSLDRLMNPLIDQYLYYLSRTNTPSGTTTMSRLQFSQAGASDIRDQSRNWLPGPCYRQQRVSKTAADNNNSDYSWTGATKYHLNGRDSLVNPGPAMASHKDDEEKYFPQSGVLIFGKQDSGKTNVDIEKVMITDEEEIRTTNPVATEQYGSVSTNLQSGNTQAATSDVNTQGVLPGMVWQDRDVYLQGPIWAKIPHTDGHFHPSPLMGGFGLKHPPPQILIKNTPVPANPSTTFSAAKFASFITQYSTGQVSVEIEWELQKENSKRWNPEIQYTSNYNKSVNVDFTVDTNGVYSEPRPIGTRYLTRNL

SEQ ID NO: 5293 - DNA, 1803 bp, Bovine adeno-associated virus
acggcgcctgcggcaaaaaagaggcctctagagcagagtcctcaagagccagactcctcgagcggagttggcaagaaaggcaaacagcctgccagaaagagactcaactttgacgacgaacctggagccggagacgggcctcccccagaaggaccatcttccggagctatgtctactgagactgaaatgcgtgcagcagctggcggaaatggtggcgatgcgggacaaggtgccgagggagtgggtaatgcctccggtgattggcattgcgattccacttggtcagagagccacgtcaccaccacctcaacccgcacctgggtcctgccgacctacaacaaccacctgtacctgcggctcggctcgagcaacgccagcgacaccttcaacggattctccaccccctggggatactttgactttaaccgcttccactgccacttctcgccaagagactggcaaaggctcatcaacaaccactggggactgcgccccaaaagcatgcaagtccgcatcttcaacatccaagttaaggaggtcacgacgtctaacggggagacgaccgtatccaacaacctcaccagcacggtccagatctttgcggacagcacgtacgagctcccgtacgtgatggatgcaggtcaggagggcagcttgcctcctttccccaacgacgtgttcatggtgcctcagtacgggtactgcggactggtaaccggaggcagctctcaaaaccagacagacagaaatgccttctactgtctggagtactttcccagccagatgctgagaaccggaaacaactttgagatggtgtacaagtttgaaaacgtgcccttccactccatgtacgctcacagccagagcctggataggctgatgaacccgctgctggaccagtacctgtgggagctccagtctaccacctctggaggaactctcaaccagggcaattcagccaccaactttgccaagctgaccaaaacaaacttttctggctaccgcaaaaactggctcccggggcccatgatgaagcagcagagattctccaagactgccagtcaaaactacaagattccccagggaagaaacaacagtctgctccattatgagaccagaactaccctcgacggaagatggagcaattttgccccgggaacggccatggcaaccgcagccaacgacgccaccgacttctctcaggcccagctcatctttgcggggcccaacatcaccggcaacaccaccacagatgccaataacctgatgttcacttcagaagatgaacttagggccaccaacccccgggacactgacctgtttggccacctggcaaccaaccagcaaaacgccaccaccgttcctaccgtagacgacgtggacggagtcggcgtgtacccgggaatggtgtggcaggacagagacatttactaccaagggcccatttgggccaaaattccacacacggatggacactttcacccgtctcctctcattggcggatttggactgaaaagcccgcctccacaaatattcatcaaaaacactcctgtacccgccaatcccgcaacgaccttctctccggccagaatcaacagcttcatcacccagtacagcaccggacaggtggctgtcaaaatagaatgggaaatccagaaggagcggtccaagagatggaacccagaggtccagttcacgtccaactacggagcacaggactcgcttctctgggctcccgacaacgccggagcctacaaagagcccagggccattggatcccgatacctcaccaaccacctctag

SEQ ID NO: 5294 - DNA, 1617 bp, Bovine adeno-associated virus
atgcgtgcagcagctggcggaaatggtggcgatgcgggacaaggtgccgagggagtgggtaatgcctccggtgattggcattgcgattccacttggtcagagagccacgtcaccaccacctcaacccgcacctgggtcctgccgacctacaacaaccacctgtacctgcggctcggctcgagcaacgccagcgacaccttcaacggattctccaccccctggggatactttgactttaaccgcttccactgccacttctcgccaagagactggcaaaggctcatcaacaaccactggggactgcgccccaaaagcatgcaagtccgcatcttcaacatccaagttaaggaggtcacgacgtctaacggggagacgaccgtatccaacaacctcaccagcacggtccagatctttgcggacagcacgtacgagctcccgtacgtgatggatgcaggtcaggagggcagcttgcctcctttccccaacgacgtgttcatggtgcctcagtacgggtactgcggactggtaaccggaggcagctctcaaaaccagacagacagaaatgccttctactgtctggagtactttcccagccagatgctgagaaccggaaacaactttgagatggtgtacaagtttgaaaacgtgcccttccactccatgtacgctcacagccagagcctggataggctgatgaacccgctgctggaccagtacctgtgggagctccagtctaccacctctggaggaactctcaaccagggcaattcagccaccaactttgccaagctgaccaaaacaaacttttctggctaccgcaaaaactggctcccggggcccatgatgaagcagcagagattctccaagactgccagtcaaaactacaagattccccagggaagaaacaacagtctgctccattatgagaccagaactaccctcgacggaagatggagcaattttgccccgggaacggccatggcaaccgcagccaacgacgccaccgacttctctcaggcccagctcatctttgcggggcccaacatcaccggcaacaccaccacagatgccaataacctgatgttcacttcagaagatgaacttagggccaccaacccccgggacactgacctgtttggccacctggcaaccaaccagcaaaacgccaccaccgttcctaccgtagacgacgtggacggagtcggcgtgtacccgggaatggtgtggcaggacagagacatttactaccaagggcccatttgggccaaaattccacacacggatggacactttcacccgtctcctctcattggcggatttggactgaaaagcccgcctccacaaatattcatcaaaaacactcctgtacccgccaatcccgcaacgaccttctctccggccagaatcaacagcttcatcacccagtacagcaccggacaggtggctgtcaaaatagaatgggaaatccagaaggagcggtccaagagatggaacccagaggtccagttcacgtccaactacggagcacaggactcgcttctctgggctcccgacaacgccggagcctacaaagagcccagggccattggatcccgatacctcaccaaccacctctag

SEQ ID NO: 5295 - DNA, 1173 bp, Bovine adeno-associated virus
atggcgctggtaagctggctggtggaacatggcatcacttccgagaagcagtggattcaggagaatcaggagagctacctgtccttcaactccacgggaaactctcggagccagattaaagccgcgcttgacaacgcgtcaaaaattatgagtctgaccaaatctgcctcagactatctcgtgggacagactgttccagaggacatttctgaaaacagaatctggcagatttttgatctcaacggctacgacccggcatacgcgggctctgttctctacggctggtgcactcgcgcctttggaaagaggaacaccgtctggctgtatggacccgcgaccaccggaaagaccaacatcgcggaagccatctctcacaccgtgcccttttatggctgtgtgaactggactaatgagaactttccctttaatgactgtgtggaaaaaatgttgatctggtgggaggagggaaagatgaccagcaaggtggtggaacccgccaaggccatcttgggggggtctagagtacgagtggatcaaaaatgtaaatcctctgtacaagtagactctaccccggtgattatcacctccaatactaacatgtgtgtggtggtggatgggaactccacgacctttgaacaccagcagccgctggaagaccgcatgttcagatttgaactcatgcggcggctcccgccagattttggcaagattaccaagcaggaagtcaaagacttttttgcttgggcaaaggtcaaccaggtgccggtgactcacgagtttatggttcccaagaaagtggcgggaactgagagggcggagacttctagaaaacgcccactggatgacgtcaccaataccaactataaaagtccggagaagcgggcccggctctcagttgttcctgagacgcctcgcagttcagacgtgcctgtagagcccgctcctctgcgacctctcaactggtcttccaggtatgaatgcagatgtgactatcatgctaaatttgactctgtaacgggggaatgtgacgagtgtgaatatttgaatcggggcaaaaatggctgtatctttcataatgctacacattgtcaaatttgtcacgctgttcctccatgggaaaaggaaaatgtgtcagattttaatgattttgatgactgtaataaagagcagtaa

SEQ ID NO: 5296 - DNA, 1833 bp, Bovine adeno-associated virus
atggctaccttctatgaagtcattgttcgcgttccatttgatgtggaagagcacctgcctggaatttctgacaactttgtagactgggtaactggtcaaatttgggagctgcctcccgagtcagatttgaatttgactctgattgagcagcctcagctgacggtggctgacagaattcgccgcgtgttcctgtacgagtggaacaaattttccaagcaggagagcaaattctttgtgcagtttgaaaagggatctgaatattttcatctgcacacgctcgtggagacctccggcatctcttctatggtccttggccgctacgtgagtcagattcgcgcccagctggtgaaggtggtgttccagaacattgagccgcggattaacgactgggtcgccatcaccaaggtaaagaagggcggagccaataaggtggtggattctgggtatattcccgcctacctgctgccgaaggtccaaccagagcttcagtgggcgtggactaacctcgaagagtataaattggccgccctcaatctggaggagcgcaaacggctcgtcgctcagtttcagcttgagtcctcgcagcgctcgcaagaggcatcttcccagagggacgtttcggctgacccggtcatcaagagcaagacttcccagaaatacatggcgctggtaagctggctggtggaacatggcatcacttccgagaagcagtggattcaggagaatcaggagagctacctgtccttcaactccacgggaaactctcggagccagattaaagccgcgcttgacaacgcgtcaaaaattatgagtctgaccaaatctgcctcagactatctcgtgggacagactgttccagaggacatttctgaaaacagaatctggcagatttttgatctcaacggctacgacccggcatacgcgggctctgttctctacggctggtgcactcgcgcctttggaaagaggaacaccgtctggctgtatggacccgcgaccaccggaaagaccaacatcgcggaagccatctctcacaccgtgcccttttatggctgtgtgaactggactaatgagaactttccctttaatgactgtgtggaaaaaatgttgatctggtgggaggagggaaagatgaccagcaaggtggtggaacccgccaaggccatcttgggggggtctagagtacgagtggatcaaaaatgtaaatcctctgtacaagtagactctaccccggtgattatcacctccaatactaacatgtgtgtggtggtggatgggaactccacgacctttgaacaccagcagccgctggaagaccgcatgttcagatttgaactcatgcggcggctcccgccagattttggcaagattaccaagcaggaagtcaaagacttttttgcttgggcaaaggtcaaccaggtgccggtgactcacgagtttatggttcccaagaaagtggcgggaactgagagggcggagacttctagaaaacgcccactggatgacgtcaccaataccaactataaaagtccggagaagcgggcccggctctcagttgttcctgagacgcctcgcagttcagacgtgcctgtagagcccgctcctctgcgacctctcaactggtcttccaggtatgaatgcagatgtgactatcatgctaaatttgactctgtaacgggggaatgtgacgagtgtgaatatttgaatcggggcaaaaatggctgtatctttcataatgctacacattgtcaaatttgtcacgctgttcctccatgggaaaaggaaaatgtgtcagattttaatgattttgatgactgtaataaagagcagtaa

SEQ ID NO: 5297 - DNA, 2211 bp, Bovine adeno-associated virus
atgtcttttgttgaccaccctccagattggttggaatcgatcggcgacggctttcgtgaatttctcggccttgaggcgggtcccccgaaacccaaggccaatcaacagaagcaagataacgctcgaggtcttgtgcttcctgggtacaagtatcttggtcctgggaacggccttgataagggcgatcctgtcaattttgctgacgaggttgcccgagagcacgacctctcctaccagaaacagcttgaggcgggcgataacccttacctcaagtacaaccacgcggacgcagagtttcaggagaaactcgcttctgacacttcttttgggggaaaccttgggaaggctgttttccaggctaaaaagaggattctcgaacctcttggcctggttgagacgccggataaaacggcgcctgcggcaaaaaagaggcctctagagcagagtcctcaagagccagactcctcgagcggagttggcaagaaaggcaaacagcctgccagaaagagactcaactttgacgacgaacctggagccggagacgggcctcccccagaaggaccatcttccggagctatgtctactgagactgaaatgcgtgcagcagctggcggaaatggtggcgatgcgggacaaggtgccgagggagtgggtaatgcctccggtgattggcattgcgattccacttggtcagagagccacgtcaccaccacctcaacccgcacctgggtcctgccgacctacaacaaccacctgtacctgcggctcggctcgagcaacgccagcgacaccttcaacggattctccaccccctggggatactttgactttaaccgcttccactgccacttctcgccaagagactggcaaaggctcatcaacaaccactggggactgcgccccaaaagcatgcaagtccgcatcttcaacatccaagttaaggaggtcacgacgtctaacggggagacgaccgtatccaacaacctcaccagcacggtccagatctttgcggacagcacgtacgagctcccgtacgtgatggatgcaggtcaggagggcagcttgcctcctttccccaacgacgtgttcatggtgcctcagtacgggtactgcggactggtaaccggaggcagctctcaaaaccagacagacagaaatgccttctactgtctggagtactttcccagccagatgctgagaaccggaaacaactttgagatggtgtacaagtttgaaaacgtgcccttccactccatgtacgctcacagccagagcctggataggctgatgaacccgctgctggaccagtacctgtgggagctccagtctaccacctctggaggaactctcaaccagggcaattcagccaccaactttgccaagctgaccaaaacaaacttttctggctaccgcaaaaactggctcccggggcccatgatgaagcagcagagattctccaagactgccagtcaaaactacaagattccccagggaagaaacaacagtctgctccattatgagaccagaactaccctcgacggaagatggagcaattttgccccgggaacggccatggcaaccgcagccaacgacgccaccgacttctctcaggcccagctcatctttgcggggcccaacatcaccggcaacaccaccacagatgccaataacctgatgttcacttcagaagatgaacttagggccaccaacccccgggacactgacctgtttggccacctggcaaccaaccagcaaaacgccaccaccgttcctaccgtagacgacgtggacggagtcggcgtgtacccgggaatggtgtggcaggacagagacatttactaccaagggcccatttgggccaaaattccacacacggatggacactttcacccgtctcctctcattggcggatttggactgaaaagcccgcctccacaaatattcatcaaaaacactcctgtacccgccaatcccgcaacgaccttctctccggccagaatcaacagcttcatcacccagtacagcaccggacaggtggctgtcaaaatagaatgggaaatccagaaggagcggtccaagagatggaacccagaggtccagttcacgtccaactacggagcacaggactcgcttctctgggctcccgacaacgccggagcctacaaagagcccagggccattggatcccgatacctcaccaaccacctctag

SEQ ID NO: 5298 - DNA, 4694 bp, Bovine adeno-associated virus
gtggcactcccccccctgtcgcgttcgctcgttcgctggctcgattgggggggtggcagctcaaagagctgccagacgacggccctctgggccgtcgcccccccaatcgagccagcgaacgagcgaacgcgacaggggggggagtgccacactctctagcaagggggttttgtaggtggtgatgtcattgttgatgtcattatagttgtcacgcgatagttaatgattaacagtcatgtgatgtgtgttatccaataggatgaaagcgcgcgaatgagatctcgcgagacttccggggtataaaaggggtgagtgaacgagcccgccgccattctctgctctggactgctagaggaccctcgctgccatggctaccttctatgaagtcattgttcgcgttccatttgatgtggaagagcacctgcctggaatttctgacaactttgtagactgggtaactggtcaaatttgggagctgcctcccgagtcagatttgaatttgactctgattgagcagcctcagctgacggtggctgacagaattcgccgcgtgttcctgtacgagtggaacaaattttccaagcaggagagcaaattctttgtgcagtttgaaaagggatctgaatattttcatctgcacacgctcgtggagacctccggcatctcttctatggtccttggccgctacgtgagtcagattcgcgcccagctggtgaaggtggtgttccagaacattgagccgcggattaacgactgggtcgccatcaccaaggtaaagaagggcggagccaataaggtggtggattctgggtatattcccgcctacctgctgccgaaggtccaaccagagcttcagtgggcgtggactaacctcgaagagtataaattggccgccctcaatctggaggagcgcaaacggctcgtcgctcagtttcagcttgagtcctcgcagcgctcgcaagaggcatcttcccagagggacgtttcggctgacccggtcatcaagagcaagacttcccagaaatacatggcgctggtaagctggctggtggaacatggcatcacttccgagaagcagtggattcaggagaatcaggagagctacctgtccttcaactccacgggaaactctcggagccagattaaagccgcgcttgacaacgcgtcaaaaattatgagtctgaccaaatctgcctcagactatctcgtgggacagactgttccagaggacatttctgaaaacagaatctggcagatttttgatctcaacggctacgacccggcatacgcgggctctgttctctacggctggtgcactcgcgcctttggaaagaggaacaccgtctggctgtatggacccgcgaccaccggaaagaccaacatcgcggaagccatctctcacaccgtgcccttttatggctgtgtgaactggactaatgagaactttccctttaatgactgtgtggaaaaaatgttgatctggtgggaggagggaaagatgaccagcaaggtggtggaacccgccaaggccatcttgggggggtctagagtacgagtggatcaaaaatgtaaatcctctgtacaagtagactctaccccggtgattatcacctccaatactaacatgtgtgtggtggtggatgggaactccacgacctttgaacaccagcagccgctggaagaccgcatgttcagatttgaactcatgcggcggctcccgccagattttggcaagattaccaagcaggaagtcaaagacttttttgcttgggcaaaggtcaaccaggtgccggtgactcacgagtttatggttcccaagaaagtggcgggaactgagagggcggagacttctagaaaacgcccactggatgacgtcaccaataccaactataaaagtccggagaagcgggcccggctctcagttgttcctgagacgcctcgcagttcagacgtgcctgtagagcccgctcctctgcgacctctcaactggtcttccaggtatgaatgcagatgtgactatcatgctaaatttgactctgtaacgggggaatgtgacgagtgtgaatatttgaatcggggcaaaaatggctgtatctttcataatgctacacattgtcaaatttgtcacgctgttcctccatgggaaaaggaaaatgtgtcagattttaatgattttgatgactgtaataaagagcagtaaataaagtgagtagtcatgtcttttgttgaccaccctccagattggttggaatcgatcggcgacggctttcgtgaatttctcggccttgaggcgggtcccccgaaacccaaggccaatcaacagaagcaagataacgctcgaggtcttgtgcttcctgggtacaagtatcttggtcctgggaacggccttgataagggcgatcctgtcaattttgctgacgaggttgcccgagagcacgacctctcctaccagaaacagcttgaggcgggcgataacccttacctcaagtacaaccacgcggacgcagagtttcaggagaaactcgcttctgacacttcttttgggggaaaccttgggaaggctgttttccaggctaaaaagaggattctcgaacctcttggcctggttgagacgccggataaaacggcgcctgcggcaaaaaagaggcctctagagcagagtcctcaagagccagactcctcgagcggagttggcaagaaaggcaaacagcctgccagaaagagactcaactttgacgacgaacctggagccggagacgggcctcccccagaaggaccatcttccggagctatgtctactgagactgaaatgcgtgcagcagctggcggaaatggtggcgatgcgggacaaggtgccgagggagtgggtaatgcctccggtgattggcattgcgattccacttggtcagagagccacgtcaccaccacctcaacccgcacctgggtcctgccgacctacaacaaccacctgtacctgcggctcggctcgagcaacgccagcgacaccttcaacggattctccaccccctggggatactttgactttaaccgcttccactgccacttctcgccaagagactggcaaaggctcatcaacaaccactggggactgcgccccaaaagcatgcaagtccgcatcttcaacatccaagttaaggaggtcacgacgtctaacggggagacgaccgtatccaacaacctcaccagcacggtccagatctttgcggacagcacgtacgagctcccgtacgtgatggatgcaggtcaggagggcagcttgcctcctttccccaacgacgtgttcatggtgcctcagtacgggtactgcggactggtaaccggaggcagctctcaaaaccagacagacagaaatgccttctactgtctggagtactttcccagccagatgctgagaaccggaaacaactttgagatggtgtacaagtttgaaaacgtgcccttccactccatgtacgctcacagccagagcctggataggctgatgaacccgctgctggaccagtacctgtgggagctccagtctaccacctctggaggaactctcaaccagggcaattcagccaccaactttgccaagctgaccaaaacaaacttttctggctaccgcaaaaactggctcccggggcccatgatgaagcagcagagattctccaagactgccagtcaaaactacaagattccccagggaagaaacaacagtctgctccattatgagaccagaactaccctcgacggaagatggagcaattttgccccgggaacggccatggcaaccgcagccaacgacgccaccgacttctctcaggcccagctcatctttgcggggcccaacatcaccggcaacaccaccacagatgccaataacctgatgttcacttcagaagatgaacttagggccaccaacccccgggacactgacctgtttggccacctggcaaccaaccagcaaaacgccaccaccgttcctaccgtagacgacgtggacggagtcggcgtgtacccgggaatggtgtggcaggacagagacatttactaccaagggcccatttgggccaaaattccacacacggatggacactttcacccgtctcctctcattggcggatttggactgaaaagcccgcctccacaaatattcatcaaaaacactcctgtacccgccaatcccgcaacgaccttctctccggccagaatcaacagcttcatcacccagtacagcaccggacaggtggctgtcaaaatagaatgggaaatccagaaggagcggtccaagagatggaacccagaggtccagttcacgtccaactacggagcacaggactcgcttctctgggctcccgacaacgccggagcctacaaagagcccagggccattggatcccgatacctcaccaaccacctctagcccaattctgttgcataccctcaataaaccgtgtattcgtttcagtaaaatactgcctcttgtggtcattcggcgtacaacagcttacaacaacaacaaaacccccttgctagagagtgtggcactcccccccctgtcgcgttcgctcgttcgctggctcgattgggggggtggcagctcaaagagctgccagacgacggccctctgggccgtcgcccccccaatcgagccagcgaacgagcgaacgcgacaggggggggagtgccac

SEQ ID NO: 5299 - protein, 390 aa, Bovine adeno-associated virus
MALVSWLVEHGITSEKQWIQENQESYLSFNSTGNSRSQIKAALDNASKIMSLTKSASDYLVGQTVPEDISENRIWQIFDLNGYDPAYAGSVLYGWCTRAFGKRNTVWLYGPATTGKTNIAEAISHTVPFYGCVNWTNENFPFNDCVEKMLIWWEEGKMTSKVVEPAKAILGGSRVRVDQKCKSSVQVDSTPVIITSNTNMCVVVDGNSTTFEHQQPLEDRMFRFELMRRLPPDFGKITKQEVKDFFAWAKVNQVPVTHEFMVPKKVAGTERAETSRKRPLDDVTNTNYKSPEKRARLSVVPETPRSSDVPVEPAPLRPLNWSSRYECRCDYHAKFDSVTGECDECEYLNRGKNGCIFHNATHCQICHAVPPWEKENVSDFNDFDDCNKEQ

SEQ ID NO: 5300 - protein, 610 aa, Bovine adeno-associated virus
MATFYEVIVRVPFDVEEHLPGISDNFVDWVTGQIWELPPESDLNLTLIEQPQLTVADRIRRVFLYEWNKFSKQESKFFVQFEKGSEYFHLHTLVETSGISSMVLGRYVSQIRAQLVKVVFQNIEPRINDWVAITKVKKGGANKVVDSGYIPAYLLPKVQPELQWAWTNLEEYKLAALNLEERKRLVAQFQLESSQRSQEASSQRDVSADPVIKSKTSQKYMALVSWLVEHGITSEKQWIQENQESYLSFNSTGNSRSQIKAALDNASKIMSLTKSASDYLVGQTVPEDISENRIWQIFDLNGYDPAYAGSVLYGWCTRAFGKRNTVWLYGPATTGKTNIAEAISHTVPFYGCVNWTNENFPFNDCVEKMLIWWEEGKMTSKVVEPAKAILGGSRVRVDQKCKSSVQVDSTPVIITSNTNMCVVVDGNSTTFEHQQPLEDRMFRFELMRRLPPDFGKITKQEVKDFFAWAKVNQVPVTHEFMVPKKVAGTERAETSRKRPLDDVTNTNYKSPEKRARLSVVPETPRSSDVPVEPAPLRPLNWSSRYECRCDYHAKFDSVTGECDECEYLNRGKNGCIFHNATHCQICHAVPPWEKENVSDFNDFDDCNKEQ

SEQ ID NO: 5301 - protein, 736 aa, Bovine adeno-associated virus; identical to SEQ ID NO: 5285

SEQ ID NO: 5302 - protein, 600 aa, Bovine adeno-associated virus
TAPAAKKRPLEQSPQEPDSSSGVGKKGKQPARKRLNFDDEPGAGDGPPPEGPSSGAMSTETEMRAAAGGNGGDAGQGAEGVGNASGDWHCDSTWSESHVTTTSTRTWVLPTYNNHLYLRLGSSNASDTFNGFSTPWGYFDFNRFHCHFSPRDWQRLINNHWGLRPKSMQVRIFNIQVKEVTTSNGETTVSNNLTSTVQIFADSTYELPYVMDAGQEGSLPPFPNDVFMVPQYGYCGLVTGGSSQNQTDRNAFYCLEYFPSQMLRTGNNFEMVYKFENVPFHSMYAHSQSLDRLMNPLLDQYLWELQSTTSGGTLNQGNSATNFAKLTKTNFSGYRKNWLPGPMMKQQRFSKTASQNYKIPQGRNNSLLHYETRTTLDGRWSNFAPGTAMATAANDATDFSQAQLIFAGPNITGNTTTDANNLMFTSEDELRATNPRDTDLFGHLATNQQNATTVPTVDDVDGVGVYPGMVWQDRDIYYQGPIWAKIPHTDGHFHPSPLIGGFGLKSPPPQIFIKNTPVPANPATTFSPARINSFITQYSTGQVAVKIEWEIQKERSKRWNPEVQFTSNYGAQDSLLWAPDNAGAYKEPRAIGSRYLTNHL

SEQ ID NO: 5303 - DNA, 31195 bp, Homo sapiens
gcaagaccaggactcgggctggaggggcgctgggctcggacctgccaaggccacgggggagcaagggacagaggcgggggtcctagctgacggcttttactgcctaggatgacgctgcggcttctggtggccgcgctctgcgccgggatcctggcagaggcgccccgagtgcgagcccagcacagggagagaggtgggcaccgcaagggaggacccggcccggggcactgcaccgtgccaccctccgctccactcggccttcatccccaacaccccccgcccacaacccagccaactccacgacgccccgcggattcctcctaattctgggactccccgaaccctccgcgatcggtgctgggttccctaaaccgcctcctatcctgttcctacccaaattctggctccctggatgcgtgcggggtcccctgccttatgccaatccacgccggcccctagaggctgacctcagtcccaagtccacacccgtgctggcgactctccctcccccgcacacccccaaccctccgcgggagtctgctctgggacccaccgagctcaactccctccaaggccctcaggctcaggccgattcggccctggtttgcataagatgaggcctactctccccaccatcccaagtcccagtgaggccaccgtgcgggtaggcgggtggttggcctcccagaagaggccctgatctctcctgcccgccccagtgacctgcacgcgcctttacgccgctgacattgtgttcttactggatggctcctcatccattggccgcagcaatttccgcgaggtccgcagctttctcgaagggctggtgctgcctttctctggagcagccagtgcacagggtgtgcgctttgccacagtgcagtacagcgatgacccacggtgagtaggggccctgggggctggggaccacgagatccccaccaagactccttccccagagagggaggagaccctggaaaccccaggccaggtctttgcagaaacaagttttggggaacctagagaccccctagccaggacctcctttggagacagaggtaaggattccctaggtagaaccttcgtgccctgaggcacctccaggctactgcaagacaggaaggtgcaagacagtgaggctgtgttttctgatctggagatggggagcccaggagggggcccccacgcctgttggattctccacgttctagccctctaacccttgcagccgttcaccagaggtgctccatctggccagcatccactttcctacatctggacccctcctcctgcaattatttaattaagcagcatcttgttccccacagactgtgagcccctaagggctccttcaggtctgcccaggcccacctgcagatggtgcacaaaggagcccctggggagtttgttaacctgggggttccagaggcaagtgggtgtggagaatgacagaacgaagggacccctcaagagagcctgatacccgtaaccctcaccctagaggcctcctcaaggccagggccagaagagatcctgagtcctagcctgttgccacccctaccctccaacaggacagagttcggcctggatgcacttggctctgggggtgatgtgatccgcgccatccgtgagcttagctacaaggggggcaacactcgcacaggggctgcaattctccatgtggctgaccatgtcttcctgccccagctggcccgacctggtgtccccaaggtgatccctacccctaccatgcctcccaagatgaccccaaatgaagtgtccaggggaaccgtgatttgacccctgcacctgtcccaggtctgcatcctgatcacagacgggaagtcccaggacctggtggacacagctgcccaaaggctgaaggggcagggggtcaagctatttgctgtgggtaaggaccgagcaggagtgacaggtcagctggggggtgggggcagtcagagagcatgtgggtgactgagtcctgatgggtcgtcacttcagggatcaagaatgctgaccctgaggagctgaagcgagttgcctcacagcccaccagtgacttcttcttcttcgtcaatgacttcagcatcttgaggacactactgcccctcgtttcccggagagtgtgcacgactgctggtggcgtgcctgtgacccgacctcgtgagttcctgcccacacggtgtaccctgacctagaccccggaccccaatccccacttggcagtgctgattccatcctatgtgctcctgaccccgaccccaactctgcatcatacatgcccaccccaatcctcctgcctgatcccctgatcccgcattcccagcggatgactcgacctctgctccacgagacctggtgctgtctgagccaagcagccaatccttgagagtacagtggacagcggccagtggccctgtgactggctacaaggtccagtacactcctctgacggggctgggacagccactgccgagtgagcggcaggaggtaggatgtcaggagtgataggtggtggctggggacttggctgggcaagataaagtgacctcttgccctgggcaggtgaacgtcccagctggtgagaccagtgtgcggctgcggggtctccggccactgaccgagtaccaagtgactgtgattgccctctacgccaacagcatcggggaggctgtgagcgggacagctcggaccagtgagcaattctgccagcctctgaccccattcacctaacccccgaccccagtaccccctcccacttctgactccatgaatccctggtgggactctcccccagctgccctagaagggccggaactgaccatccagaataccacagcccacagcctcctggtggcctggcggagtgtgccaggtgccactggctaccgtgtgacatggcgggtcctcagtggtgagtgagagatgtgggctgaggggagtccccgcgcctcagacaaggctgtagagtcctgagtctgcaaggcccactggccccttggtgtcccccatgcaggtgggcccacacagcagcaggagctgggccctgggcagggttcagtgttgctgcgtgacttggagcctggcacggactatgaggtgaccgtgagcaccctatttggccgcagtgtggggcccgccacttccctgatggctcgcactggtgagaaggctgggcactttcttcaggctgggacgggcaggcagggcaaggcccggaggccactgacatcccatgtgccctgggcagacgcttctgttgagcagaccctgcgcccggtcatcctgggccccacatccatcctcctttcctggaacttggtgcctgaggcccgtggctaccggttggaatggcggcgtgagactggtcagtgcgggggaagggatggacaggcaagggtcagggcatggcctctgctggtctgaccctgttatcttgcaggcttggagccaccgcagaaggtggtactgccctctgatgtgacccgctaccagttggatgggctgcagccgggcactgagtaccgcctcacactctacactctgctggagggccacgaggtggccacccctgcaaccgtggttcccactggtgagggctctgtgggctgggccagtgagtgggggaggtgtcggagccccaggctgcctctatgctgtgctctccaacaggaccagagctgcctgtgagccctgtaacagacctgcaagccaccgagctgcccgggcagcgggtgcgagtgtcctggagcccagtccctggtgccacccagtaccgcatcattgtgcgcagcacccagggtgaggtggacgcagccagcacccccaccacacacactgaagttccagcctgaggggtctgagtgtacctccagccctctccttccacacctgggtccctatagtctcctccctgtctcgttatccatctgcttcccaagatggcactgagccctgaactgtcaacagggtgtgtctgcccctaccctaccccaaccaatctcctccctgccccacaccccatccacggctttcacctctgcacagccacaagctcaatcacctgtctttctgttaccctagtggtgaccactgtacaccaacctctcattgcatgtccccatccagcactgacctctgccatcccacatcagtgtctgtcaatggctcatcagttctcactgcagtccactgactcctgtcatcctacatgctaagatcccacagactcctgtcctccagtgtccctgaccatcactggcccctttcatcctatgtccttgtcttgcactcacttttttcagccatatcccagctctctggtccccaccaccccacatccccacccccatggcccttctcactctgcgtccctgtccatcactgccatcgtcccacatccctgtctctttctgacccctgcccacctaccctgacttctctcttaggggttgagcggaccctggtgcttcctgggagtcagacagcattcgacttggatgacgttcaggctgggcttagctacactgtgcgggtgtctgctcgagtgggtccccgtgagggcagtgccagtgtcctcactgtccgccggggtgagtactgcaggaggcttgtggaggacagctgcctgcctcactctggtcctggttctgacttctgacttctgtctgtaactcctagagccggaaactccacttgctgttccagggctgcgggttgtggtgtcagatgcaacgcgagtgagggtggcctggggacccgtccctggagccagtggatttcggattagctggagcacaggcagtggtcagtgtggggtgtgtggggggactgccaaagggaccaatgagggtatgggtgccagaggggacaggcaggagccatgccagcatttccctctgacctcaggtccggagtccagccagacactgcccccagactctactgccacagacatcacagggctgcagcctggaaccacctaccaggtggctgtgtcggtactgcgaggcagagaggagggccctgctgcagtcatcgtggctcgaacgggtcaggccctgcccccgtcccttggctctctgcctccattgctctttcagacccccatgccttcccttgcagacccttgcttctccccagaactcctgcctcccccttcagaatcccactccctcctccctcagagacgctgcttcctcttcagtttcagctgtctccccttaagccctccccgtattcagattcctccgcttctctcctaagactcccacagcctttgccctcaaatatccaccacttcaaccctcagacccccatcccttttttgctggacccaaatctcctctgagatttacactttctcctccatcagacctgctcactgcttcctaaaacctccacctccccactcctccactggacctattcaccatctcctctatcaaattcccgtctcctgttagactcccatcatcttcccctatcagatagccccactccttcctgcctgttccagcagactccccattgcctctccccactagacccactgggcccagtgaggacggtccatgtgactcaggccagcagctcatctgtcaccattacctggaccagggttcctggcgccacaggatacagggtttcctggcactcagcccacggtggggactggggtttgggagggggcaggtcagggtggaatgggggctgggggtttattgggggtccaggtggggctctggggcacagagtttgctagccctggagctgcctccatccctgttcccaggcccagagaaatcccagttggtttctggggaggccacggtggctgagctggatggactggagccagatactgagtatacggtgcatgtgagggcccatgtggctggcgtggatgggccccctgcctctgtggttgtgaggactggtgagtggaccctggccagctactagccacaccgcattagctaccctgccctgctgtgtgttcctgattgcccagctgcctccacccccctgctcagtgactgtcctgtccacactgacccaccccacactgattaagtgtccacccacggtgacctcctggtggccccacactgcccaccccaaggcactgacctcctcctcctcagggctgcctaaagtgacctgtccacactaacctcacactgactttcagatcacccctgcgtcaaccattcctgcactgcctctctgttctctaccaggaccccttaccttgcctctgtccccagcccctgagcctgtgggtcgtgtgtcgaggctgcagatcctcaatgcttccagcgacgttctacggatcacctgggtaggggtcactggagccacagcttacagactggcctggggccggagtgaaggtatggctccctgacgccacccctgtccttcctggctgggactgctcacccctaaccattgctgtatgcccacctggccaggcggccccatgaggcaccagatactcccaggaaacacagactctgcagagatccggggtctcgaaggtggagtcagctactcagtgcgagtgactgcacttgtcggggaccgcgagggcacacctgtctccattgttgtcactacgcgtaggcagagcatgcgctggagagcttcggatgggtggtgtggatggtttggggatccgggcttgtgctctggattggagaaaggaccaggattggtagtgagcctttgggggcagggtctgagaggagggagaggggtctgagaggctgggcggggtgcgtgtgccagggtgggcctgggattggtgcaggggccatgggggcagagcctccctgattcctgagctttctctccagcgcctgaggctccgccagccctggggacgcttcacgtggtgcagcgcggggagcactcgctgaggctgcgctgggagccggtgcccagagcgcagggcttccttctgcactggcaacctgagggtgagaggtgtccccaggaggaagttagggaccattgggggcagggctgtggcagactccgcaaggtaggcgaggacagtgatggtgggcggggtctgtcactgggggtctgcgggatccgtgacagtaggtaagatcaatcaatgaagtgggtgggatcaatgagttcatggagggtcagtctggcagggtccgtaaagtgggcagggtcagtgaggatgaggaagatcagtcaggagggtgaacccagttaacagagccagtgaagtgggcaggccctttaatgcccccaggtgtcactatcccacatgctcttggcccccaccctcacgcctgccccaggtggccaggaacagtcccgggtcctggggcccgagctcagcagctatcacctggacgggctggagccagcgacacagtaccgcgtgaggctgagtgtcctagggccagctggagaagggccctctgcagaggtgactgcgcgcactggtaagcctgcctcaccttggcgtgctcctcccctgctgatgacccaccctgacttcctgcaccccgactctgagtgactcctcctgtacccctacccctcaccctctgaccctgggtgaccccagcatgacctcccatgatgcttcaataagacaaaccggacccaggatctcagatctctcccttctgggttctcaggactcagcctctgatcctcgatctttcattcctccttcagagtcacctcgtgttccaagcattgaactacgtgtggtggacacctcgatcgactcggtgactttggcctggactccagtgtccagggcatccagctacatcctatcctggcggccactcagaggccctggccagggtgagggggaggccaggatttgggtgggctggcagttggggctctgtggagacagctttttaatcaagttctgtctcctgcagaagtgcctgggtccccgcagacacttccagggatctcaagctcccagcgggtgacagggctagagcctggcgtctcttacatcttctccctgacgcctgtcctggatggtgtgcggggtcctgaggcatctgtcacacagacgccaggtatagtgggcgtagtgggaagggcagaaaggtgtgtctgggtgggctgcccgcttcagtaacttgttccccttcctacagtgtgcccccgtggcctggcggatgtggtgttcctaccacatgccactcaagacaatgctcaccgtgcggaggctacgaggagggtcctggagcgtctggtgttggcacttgggcctcttgggccacaggcagttcaggtttggccctggggcagccagattctacctctccctgaggccccccacccaggctccataccagttaccatctcctgaccacccaataggttcaggcattctcccagctctctcacaggctccagacctcacctactgcctggctccctatcctgccatcactgctgactccctaatagatagggtttggtcacacacaccctgatgtgtttctccaggctctgtgcacccccatccctgctctgtcatcctcctcaggctctgtgtttccttccaccccaggttggcctgctgtcttacagtcatcggccctccccactgttcccactgaatggctcccatgaccttggcattatcttgcaaaggatccgtgacatgccctacatggacccaagtgggaacaacctgggtgaggactgcagcaggcatggactcctggggctatccactgggagcttggtgccccagggttctgacatgtccttccttccaggcacagccgtggtcacagctcacagatacatgttggcaccagatgctcctgggcgccgccagcacgtaccaggggtgatggttctgctagtggatgaacccttgagaggtgacatattcagccccatccgtgaggcccaggcttctggtaaggagtaggctgatggggaaggggtctgggaataggggtggccctgaaaaggctatcatgcagccactggaccccaccttagggcttaatgtggtgatgttgggaatggctggagcggacccagagcagctgcgtcgcttggcgccgggtatggactctgtccagaccttcttcgccgtggatgatgggccaagcctggaccaggcagtcagtggtctggccacagccctgtgtcaggcatccttcactactcaggtttggaagaggcctctgggggactgggtggtagaatataaggggtctgggggttcttggtagaaatgttcaacctcaaagagaccctatgtccgcagccccggccagagccctgcccagtgtattgtccaaaggtaagagtccctcatcgagaggtgaacagaggctgcacctggggctagccactctgacccacatctgacatgtctttccccagggccagaagggggaacctggagagatggtgagtgcccctgcgggcggggaatagagaatgggttgagtgtcagtggggcaggagaggttggcagcacaggtctcactgattacccttcctagggcctgagaggacaagttgggcctcctggcgaccctggcctcccggtgagtgtcccccacatctgtccctgcaccctgactggcttatccccacctaactgctatcttctttcagggcaggaccggtgctcccggcccccaggggccccctggaagtgccactgccaagggcgagagggtgagtgtggagaccatcgaggtttctctgaggcactcctcaaagctgtctcggggtttttacaagagagaaggaagaagcagagttagaatcatcgggaattcctagaagcccagctggaggttataaaccaccacagagactttgggggacactctgaaatagaagggccagtggggcctctagccccgctgcagagcctgagcagcagctccaagtcccagaggcagggaagccctctgccttgtcgctgcccttgtgcctggaattgggctctgtgaagctctgaggggccatttctctgcctcactgttccacccccaataacacttgggggtcagtggggtaggcgaccccttgttgatggggtgaggcccctccagcaaaccaggggccttgggggagggtcccttcctgtcctgacctcttcacctcctcagggcttccctggagcagatgggcgtccaggcagccctggccgcgccgggaatcctgggacccctggagcccctggcctaaaggtgagcaagccttgtcctgcaggtcagggtgggcgctgcctgagtgggtggggtggctccgactgttctgcctctggcctccatttgcagggctctccagggttgcctggccctcgtggggacccggtaaggtgccttcccttctttgctctctaagtgtcttcccagggttcttccacagggtgggagcctggggtggtggtgcagtgcccacgttgacattcgcctgagcccaagcaccaccctctgctctgtttcgtcctcagggagagcgaggacctcgaggcccaaagggggagccggtaggtgaagggggaagggaggcggccgggatgtcccagggaggagcaggactgccccacaccagaccctgtgcagggcctaaggcgcgaataggaatagctggacatgtctaggggcttcttccagctcaaggcccccatagcctgaatcctgcccactgctctctgtccttacagggggctcccggacaagtcatcggaggtgaaggacctgggcttcctgggcggaaaggggaccctggaccatcggtaagtgcagggtatgtggaggcaagtgatgtgtagtggggggaccaacacgaggggggcgagagtgaggtctgtggggttgcaccttatactttgtctcctccatcagggcccccctggacctcgtggaccactgggggacccaggaccccgtggccccccagggcttcctggaacagccatgaaggtgacagcctcatgagtgccatgtgatgcagagacctggtgaccccatttgaacccacataacccctgccagttactctggcccttgtgaccctttgattacccccatcctcaccatgacgcctcagttctcccaaaatccttgaaatccaattggaccccatgaccctcatcactcctggtatctttgggagtgaggtgtggcccagggtcatggggtcgtcatctgttttctagggtgacaaaggcgatcgtggggagcgggtaagtgagggacaggttgtgctaggggtggcttggagtctgattcccctgttcattccctgacctgctgttctctcccagggtccccctggaccaggtgaaggtggcattgctcctggggagcctgggctgccggtgaggggccttgaggctctgctgggggccctgctcaggggtgtgggtctctcctggggcagtggttgggtgctgggcttcatagttcttggctcatatttttactcacttcttcctagggtcttcccggaagccctggaccccaaggccccgttggcccccctggaaagaaaggagaaaaagtaggaaggctgacttgatgatgtcccagttctggggtgggaggctgcgtgctgggggcagggcctcccttcggtcttcccacccgtgtgtttctccttcagggtgactctgaggatggagctccaggcctcccaggacaacctgggtctccgggtgagcaggtgagtggaggggccagggattctgaatatggtgggcacagctccagcccctacctcaatcatcaaccactgctccatcctcatgcccaaacccaaatctctgaacccccaaattcatcccttccagggcccacggggacctcctggagctattggccccaaagtgagtaccagttgggggattcaggtgtgaggggtgctactctgggctccccatggtgttaggggaggctggaagataaggagataagagttccctccaggtcagaggtcgtggttttggagggggtggttggagtttgggaccccttgtctggggtttgacgttcaagccccgccaccaaccctctctctctctgtctttctctcaccctctctcttcagggtgaccggggctttccagggcccctgggtgaggctggagagaaggtaagtgcaacctggggggtgccaagggccctggaggatctgggcccaactcagctctgacctcttcttttccatcagggcgaacgtggacccccaggcccagcgggatcccgggtaaacccactggctgcaatgctcataccagctgacctggctgtgccctttctggttctgacttcttgcccttgacccctgctacccctgctcctcacccctcctcaatgaccacttatccctgctgatacaggctctaaccctcagccccagggacctggctttgaacctctgaccctgctgaactgaccttgattttcactgacctggtctctgttctcctgccaagtcttacccctgccaacctaaatcccaatcttccctgacccctctccagcccccaccccagcctctagccctgtctgtccatatcccccgtccccacccacctgcacagctcttcccttcctctcctccaggggctgccaggggttgctggacgtcctggagccaagggtcctgaagtgagtctgtgactgtggtgggaccaggagtgggacttttgtgtgtccctcccctttcccttcccctcctgggctcacactttctctacattcaggggccaccaggacccactggccgccaaggagagaaggtgggtcctcggctgggggtggcactgtctggtactagggatgtggcagatgggacactgggattttgggctcctaggtgactccctgacctgtccctgctcctatcctctctccacagggggagcctggtcgccctggggaccctgcagtggtggtgagtgacgggaggatggcgctctgagcacagcacagcccttgagcagtgaccctcctatagaacactatctgggctgtgattccacagtgctgggcccgtgagcaggctgggagctctgcggctctccttctgctagaacctgcccccagactcttggctatgatcctgtgaccccaagaccgccatgcaggtcatgagctctttgtgtcagtccattttgtataaccccttccctgctgtcagcggtgactctgtgacttctgggcggggactgagctgtatgacttccaattccatgtgacctccattccaatgaagactttgatcatacaaccccaaggcagggccaagctgtatctgtcctgtttgttttcagggacctgctgttgctggacccaaaggagaaaaggtaagcctggtatggggcaaggggaggtttctacagggttgaggtctaggtcatagggcctatctatgggacttggggggtcacaggacttgctgggtcagggggttaactggagcctgggactagcactgatggtctttgtcacctccagggagatgtggggcccgctgggcccagaggagctaccggagtccaaggggaacgggtaagtgaagcgaagtgtttagggggcagttggtgaaggttgtcttcctgacttcttatccttccatccacagggcccacccggcttggttcttcctggagaccctggccccaagggagaccctggagaccgggtgaatcaatgtgggaatggggagtgtgacagagggagatgaggtggtgggaccctgactaagtcctgccccccttctgtccccttcagggtcccattggccttactggcagagcaggacccccagtgagtacccgttaccctgggcaacctcaaggcttctggggtcccctccccttgagaactgcttgcttcgagcgtcctgcatcacctccctcttgcctcctccacagggtgactcagggcctcctggagagaagggagaccctgggcggcctggccccccaggacctgttggcccccgaggacgagatgtaagaggctggagtcgggggagtcatggcgggtaagggagtagggctgttgccagcatcatgggggttcttggaaccagggctgactctcatgtttcacagggtgaagttggagagaaaggtgacgagggtcctccggtgagactccttcccactgtggtttctgatcctttacccttgaactaggatcccagtaggctggtgctccaccagttcatccatccactccctgcctcctgtccagctgctgctcagacccttctctgtcccctctccctgagtgagttagatcctgactgccctgtgcagtatgacttttctctctatcaccagggtgacccgggtttgcctggaaaagcaggcgagcgtggccttcgggtgagtcttggcagagagaagtaacaggggtgatgggaggtgggcatgaaggtgataggaaaggctgaggggggtaaggggtgatgggagtccctgcagggaggcatggggtgatgggaacctctgatgtggattttggagtaatggggaacctggggcagtgtagcgggtcataggggcacctgcaaaatattgggagggtctgtctcaggccagctgctcttcttagggggcacctggagttcgggggcctgtgggtgaaaagggagaccagggagatcctggagaggatggacgaaatgtgagtcccagcctatgactcctcaccccaaccttaaccctccaaccagccaattcccaatacctgatcctaccccccaaccctgtaatgctaaaccctcccaatcttcacttcctttgacccctgcacacacgcatctgaaggctaccaacattcccatgagtcctcatggtgcttccaaagctctcccaaactgctgcctaccttgagtggccctgacccctgcctttctgcagggcagccctggatcatctggacccaagggtgaccgtggggagccggtgagtagggctggtgtcctgggctcagaagggatggagggtcccctggcgctgctgccagtgtgccttcacacaaggggtctggaggtccaggtgggaagcatggatggccacccatgcctgctgggggctggcattggggtgcttcggggaacttgggggcagagttgagcctggggcaaaccagagccatggcctgggacctgagggctcctattgactataatcatttcctttcccagggtcccccaggacccccgggacggctggtaagggctgcgctgggtctggtcctctgtcattgttctcacttgcccctttggctccacatcatgtcccctcattccttccactaactcccacttcccccactgtccctctgaaacctccgcggatccctggagcccctcacagaccctgtatcccctcgccaactcctcttccccttgttgagccattcttctcactggtcattccccccacaggtagacacaggacctggagccagagagaaggtattagggtctgtgggtggagggtaagaaagaccccagtgcccctcccagcaggttctaccttgggcatggcttggcttcaaggctgttcctcagcaagcttatctctgccacagggagagcctggggaccgcggacaagagggtcctcgagggcccaagggtgatcctggcctccctggagcccctggggaaagggtgagtgtgattggtcctcgggggtgcaggcatgggagggcctgctctgatttcttcctcccctatcctcagggcattgaagggtttcggggacccccaggcccacaggtgagtgatgcactttgccccgtctgccaagtccccatcttaccctcacctcttatctgaccctgttccctccagggggacccaggtgtccgaggcccagcaggagaaaaggtgagagggtgtgggggtttctcaggacatgagcctgggttatcagatccacctcagccttggtggcctcttaccactctattttccacagggtgaccggggtccccctgggctggatggccggagcggactggatgggaaaccaggagccgctgggccctctgggccgaatgtgagtcttggtagtcctgcctggttgtccccttcccctaccccttcacatgaggaccctagaccccagcctcattggttggtcttggccttgacgagctctggggcgagacctgttgtctgtgtcttctcccagagccctgcctgggtggggcatgttcttgccatgcaggccttaggctcacagggactagagcccctgaccccatgaccatgatgaactgactttgagtctctcctcagggtgctgcaggcaaagctggggacccagggagagacgtaagtgaggggagatgctgggacagagggggctcggggctgcgtaagctccaaccagatcatcatagtcacagcatccgagagagttggtggggggtcggttcagccttgcctttgggagggtctcagtccctggcacacaggttttagtagaatccccctttctgaccttctttgccttgggggtcttcataggccctccaagtcctgggggttcttcccttgggagtctcagcaggggcccccatccatggggtctgtgcctgagggatctcaatgggacctctcagtcctgggggtctctaccctggagggagatctttttggggtcctcttagtccatggggtgtgccccaagggatatctcagaggccctataaatcttaacaaagactttttccaggggcttccaggcctccgtggagaacagggcctccctggcccctctggtccccctggattaccggtgagaccagactttcatgttacccccttttcccccttactaccctcacccgatccccgacatccaaccagtgatctgttcccacagggaaagccaggcgaggatggcaaacctggcctgaatggaaaaaacgtgagtgtgtccagggcagctgcggcgaaacctgccaagaaacgccagcacacctacacagccaagatctgtagcaacacatgaggcacacgtgtagacacatgcatcctggcccagacatacagatgcatccagaaacatagtttttttttttttgagatggagtttcgctcttgttgcccaggttggagtgcagtggcacaatctcagctcactgcaaccttcgactctcgggttcaagtgattctcctgcctcaacctcccgagtaactgggattacaggcatgcgccaccatgcctggctaattttgtatttttagtagagatggggtttctccatgttagtcaggctgatcacaaactgacctcaggtgatccgcccgcctcggcctcctaaagtgctgggattacaggcgtgagccattgcgccaggcctggaaacatagttctatatgcacacacaggcagcctcacagacacatagggagttaggtgaatgggccaatttatgccaggatgggctgacacatgcccagataacccacagccataggcacaggtgaagagccacagacaggtcgacaggcacaaacacactggtgtgtagccacatttggggcacttagagacatgttgatacccagacacttccacccagactcatgtgctaagacatggacccaagaccgcatgtggacctgtgttgagacatggtgagacacacatggatggctctgacctgtgacatgtgctaggacatgctggcccatgactttatatggtcacccacacgcttatggtcatacacattgagctacacacaagagttgcagacagatgccaagacacatggctctcaaggcatgtataagcccatgctctttggagacatgtataagcccatgcccatatgcagacatgggccaagatgtgcaaacagaccaggacacacagacccatgggtacatgtactaagacacacatggatatgcacacacccaggacatgtggacgatcaccaacccagagatgcataaatgtggagctacctctagagagccagagtcaaaggacatgtgtgcagttgcctgttggggtgagcaggcctatgcaggcacacccttagacatgtagcagctcactcagacggccacaggccatgctccaagacacacacaaccatggagctacaggcacagaaatacagtcacagtcatctgaaatctagcaaggtagtgtcttgcagccagacaccagtgaatgtttgggctgatgtgagtcctctgcccacagggagaacctggggaccctggagaagacgggaggaaggtaaagtcccccacctggggtctctctggtctctgcttggagccatgcctgaagcatccttgtcttccttagggagagaaaggagattcaggcgcctctgggagagaagtgagtattggagttttctgcaacctctgacccctgaccctgaccctgggggaatatgactccactcttttctgaggtctcagggtgctgatgctggctgcatccttcacagggtcgtgatggccccaagggtgagcgtggagctcctggtatccttggaccccaggggcctccaggcctcccagggccagtgggccctcctggccaggtgagtgtcctgggtcattctgggacttcagagcattagaagccatgatgtttcaatgggcaaccctcctgggaagccatgggcctttgtgacccctttgtgttctgccgtatctcagggttttcctggtgtcccaggaggcacgggccccaaggtgagtgcggatgttgggtagggggcgtggtgagggggctgaccaggctgggggccatttccccacctggtcattcttgttttcagggtgaccgtggggagactggatccaaaggggagcaggtgaggcccccaccttttccacatgcccaggtagccacagcacccacatgtgcacatgcacacccataggctggttcctagcagtttgtcttcatctctccagggcctccctggagagcgtggcctgcgaggagagcctggaagtgtgccggtgagccaggcttgggatgtccccttgactctgttttgcatgcccattggggccaccttgccatccccttccccttgccatgaggctccataggttctgtgctgtgtgttcagtgccctgccccattggggttcttgtagcccacactcaagggaacttgggcagtggggacacaccagaaaggggctcccaggagtctccagccatgcctcaaccaagtgctaaagggtgctctgggcaagaggcctagggaaaagggtgtgaaggtgctttcctgaggccgtgcggggcagaaggcaggagcttctctgtcatgggcagcccttcacccagactttgtccccagaatgtggatcggttgctggaaactgctggcatcaaggtgggttgtttaggggctgggggtagggacaagtgggggcccttggggctagtggtgcccacaggcataggggctgcggcgacgcaccccgctcctctgacctcttgctgtccctcaggcatctgccctgcgggagatcgtggagacctgggatgagagctctggtagcttcctgcctgtgcccgaacggcgtcgaggccccaagggggactcaggcgaacagggccccccaggcaaggaggtgagcagaagtggctcagtgggttgtgccccgtggagtggggtgtagctgtacagccaccagcattctctcttccactcctgcagggccccatcggctttcctggagaacgcgggctgaagggcgaccgtggagaccctggccctcaggggccacctggtctggcccttggggagaggggcccccccgggccttccggccttgccggggagcctggaaagcctggtattcccgggctcccaggcagggctgggggtgtgggagaggcaggaaggccaggagagagggtgaggctgggggctggccaggagagtgagggaagaggggttgggaggggtgggaccccccatgggcttggccctcacccgctatttgcatttcagggagaacggggagagaaaggagaacgtggagaacaggtgggctgcgatgggcttcgtggggcaggctgtctggaggctgtgctggggctgccaccccattttcttgtttcctgcagggcagagatggccctcctggactccctggaacccctgggccccccggaccccctggccccaaggtgatcaccccatccctgccttagtcctgtgactagtgaccaggaagccacccttagcttggtccccagaaatatggtagtgtgtgccataaccctggaatttctgaccctataaccctctgtgatcctgagatctgtgatgactcccccatgcctctatgacagagacatctctcccctgtgaccttgtgtttgtaggtgtctgtggatgagccaggtcctggactctctggagaacagggaccccctggactcaagggtgctaaggtcagtgtgtggaatcagctcggggccaccctctgccatggcactagggactgacttgacatctcatccccacagggggagccgggcagcaatggtgaccaaggtcccaaaggagacagggtgaggcctctctccacccttccatagagtccccctcctttctgggggcacactagaggtggtgtgcatatgcacctgggcacgtggcagggactgggggctcagggcacgacactctgccttcagggtgtgccaggcatcaaaggagaccggggagagcctggaccgaggggtcaggacggcaacccggtaagtccttgcccaacagccacacatgtgcaagaaggtggctctcacatgtattgtcctgtgtgcagggctggggtctgtactgcctgggactgtctgggtcctgactctgtctagggggatggtgggtggaggggaagttggaactgggaaactaaggccttaaacctattctctgcagggtctaccaggagagcgtggtatggctgggcctgaagggaagccggtgagtggtggctgaagcacctggccccaggctccggaccctccgctaggtgctgctgctgctgtgtgtgtgcatgtctgtgtgtgtgtgtttgtgtgtacctgtgtctgtgtgcctctctgtgtgtgcctgcttgtgtgtgcctgtgtctgtgtgtgcctgtgtgtgcctgtgtctgtgtgtggttgtatgtggatgtgtgtgtgcaggcccgtgtgtgctatctatgagaggcagtccatgggtaggtattatctgtgactggaaagggtgaggtatggaaattgacccccaaggaaaaagcccccagaggttgggaacaggcccaagtgaggcccagattgaggctcatcagtgccctctctatgtagggtctgcagggtccaagaggcccccctggcccagtggtgagtacccaagaaccttcacctgtcttgcccccatcctgtgccctgccccagtgaccagtactgcctcagtttccttggtggggtgcggctaactccccctcatcagactctttttcgccacaacagggtggtcatggagaccctggaccacctggtgccccggtgagtgaccagggaacactgcctggtgagggtctggaagggctgggataggcattggccacagctgatgagccaggccttctctgtgttaatccctgagccctgttccctgcccttgacccttttctctagggtcttgctggccctgcaggaccccaaggaccttctggcctgaaggtgagtctaggtgtgtggataggaggaggaggctccttcaagctgtgtccatgcctggggtagtgtgcgccaacctcctgggctgtcatctcctgcaatgaggatgagctccaggagccctggccacgtgggctctgctcatgcagtctctgggttgtttgcagggggagcctggagagacaggacctccaggacgggtgagtggcctagctcacaggttagggtcatagggagatgggtggggttggcactgccctgaactttctcttcctccagggcctgactggacctactggagctgtgggacttcctggaccccccggcccttcaggccttgtggtgagtgagtccctgtggcccctgtagggacaccgtgttttcactccttggggcccatgttctctcatgtcgtcctgtgtccattgtcaccctgacatccgacttgttctccgtcagggtccacaggggtctccaggtttgcctggacaagtggtgagttctgggggtcaagggttgggctccaggggtcaagggtcgacaggcagccctgacagagctcttccctctcagggggagacagggaagccgggagccccaggtcgagatggtgccagtggaaaagatggagacagagggagccctggtgtgccagtatgtgttctgggggcagctcgctagggtgtggtgcccagctgtgggcctgaaatatgaggagtggggcagcaggggtggtggtggagaggcactgagttcctcacgctgctctgccataggggtcaccaggtctgcctggccctgtcggacctaaaggagaacctggccccacgggggcccctggacaggtgatctttgaccctgacttccaccccctgcagcaactcctctgcctcacccacaagcctgtttccaaatgccatgggggtggcagggtgggggcgggggaggaggaggaaactcactagcattccccacaggctgtggtcgggctccctggagcaaagggagagaaggtgagtgtgtgtggggctgccagtgagggggggtcaactggtgggggccaaggaatcccactgacctctcccccttaccagggagcccctggaggccttgctggagacctggtgggtgagccggtaagtagggaacttctgacagcagatgttctgggggtcctgtctctccagtggcctaacttctgaccttcgacccatagtttacccaccctcatgaccctcagctttcatagtagaccgcatatttaagctctggccccatgcctccctccggagtctcatctttctgtgactgatgcctgtgttgcctcctgacctctgtcaacagggagccaaaggtgaccgaggactgccagggccgcgaggcgagaaggtgaggtgggttggccctggggcctgactactgagcagagaaggctcagtccagacacccctcacctgccattctgtgcagggtgaagctggccgtgcaggggagcccggagaccctggggaagatgtgagtccggggcctaggcaagggcgagcctggcctgaggagtgtgatggcgggcataaggggccactcttgggccggggcacatgtctgagcccctgagtcgggctgcatgtcccaacatccaggagcctgctctctggatcacagggagccacacactgtcggcttccacactctgagctctgggggccctgtcttggcttctgtgtgcccatccttggtctgtttctcaccacatctgggcacacgtgtgctctggtctgatctcccagatcccaggacacacctgagttcttgtgaacctctccttggtcctgtgtttacaatcctcctttcccctgcccctggctgccagcgttcagcctgtggccatgcctgctctacccgggagtggacgtgttggggttcccctctgagcgcccgtgtgtccgcactcacgtctgtggagccagatgtctgcactcgcgtgtgggctccctgtgcctgtgccatgcctgaactcccacctgtctatggtagtatctgagcgtccctctgtctgtgctgtcctgagataggccatggtcatgtctgagctcctgtgagccaattcttggtcgcatgtctgagttcccatgtgttcatggtcacatcagaactcccctgggaatattttcagcccgtgtctgaactctgtgctcatgttcctaccctctcaaatgctgtttgctgggttttcttagggtcagaaaggggctccaggacccaaaggtttcaaggtatgtgtacccagaagggtccctgctggggtcctggtcgtgagactccctgagcttgatccgatgcctcttttcctcaaagggtgacccaggagtcggggtcccgggctcccctgggcctcctggccctccaggtgtgaaggtaagtcaatgccccatcaccagttgtaggggcagcaggccgggcccccacaggaggaagagggagttctgatgagagtcctgggaggggtcctgcattgaccattccctccctttgctgtttttatttcagggagatctgggcctccctggcctgcccggtgctcctggtgttgttgggttcccgggtcagacaggccctcgaggagagatgggtcagccaggccctagtggagagcgggtgaggggctgggaacagcatgtaggggcatggtgaatccatggtgggtgaggagggggccctgccttgggggttcccagtcttgagggggcagagggtaggagggttcccaagtcactctctgcctctcttgccccatttttctggtagggtctggcaggccccccagggagagaaggaatcccaggacccctggggccacctggaccaccggggtcagtggtgagtagaggtgccctaaagccccacgtatttgatttcctgtcctcgtgaggacttaggatggggcgggccacactgtggggtgttgggggaggcgctttgagagccacaggaccctcacctcactctgacctacagggaccacctggggcctctggactcaaaggagacaaggtaggtgggacaagtgctgctgactctctcttgtgccctggtcacccccttcagcctccactgacctcccatgaccctgcgtcccccactgattcccctcactgatccccggtgtcctgttggtctccagggagaccctggagtagggctgcctgggccccgaggcgagcgtggggagccaggcatccgggtacgtatgtcttactccacagccgaactcccttcatcccagctcttgcctctgatttccaacctctgagtcaatgaacctaatgtcaccatccagggtgaagatggccgccccggccaggagggaccccgaggactcacggtgggtcccgctggggaaagtgacagtgctgtgacttcagtcccctgcctgtgccctttgtaccccaggactctctgccatcctccctagccctctggccctcctcgtctacccctgtcccctttgtctggtccccactgtttccctcctccccctgatcctcctccgtcctccactgccctggttcctgtagctcacggtcaccttctctcacacaggggccccctggcagcaggggagagcgtggggagaaggtaggaacgtggggaaggtcctggcatgagtgggggggtgagtggatcttgtatgatattagaattcaggtgcggggcctccccagtttgggcgggactcacactcttttgcccaatagggtgatgttgggagtgcaggactaaagggtgacaaggtgagtgtgggcatggggagggcagggcaggggccagggtgctcccgactcctctgattcctgcctgccccctcagggagactcagctgtgatcctggggcctccaggcccacggggtgccaagggggacatggtgagtgggcccacgtgtggactgggtctcccctgggtgcgagagggaccccgtggggctggcccagggcatctgagagctcaaactcccagagggtgagggaccttcagccccttaccgtgacttcttacccaaaccaacccagggtgaacgagggcctcggggcttggatggtgacaaaggacctcggggagacaatggggaccctggtgacaaggtacagggaagagggtggtgtactctctgtggggtcctgtggctgtggtggttccacagcatctgtgagggcaggaggggaggacaggaggaggctttctggggtttagggggaaggggttctgtggctgactatggagtggccgagaggaggggctctagggagggctcaaggccttggtgtgaggttaggagagctctgtggactggccctatgaaggggccctatagggacaggaaaggggctccttgggtgtccccatctgaaggtgcttcagatgggatgaggaacccagtgataagagggcggggcaagggtctggagtccttggggtgagaaatgagccagtctgtggactacagcccccagttccacccgctatggcacaggctgggaggacgtgctgctagggccgttcgggagtgacttgagctctgccccagctggcgggctcgttgtattctaagcccccagcctgatctggtcctgactgaatccctctcctggtcactcccacagggcagcaagggagagcctggtgacaagggctcagccgggttgccaggactgcgtggactcctgggaccccaggcaagttctgccccaggcccaggcccaggcccaggtccagagccagcatcacacacacacatatcctgggggtcctcttaagtgctgggggttctggctcccttgctgccggccccatgtgtgttcacccgggatctgtgtgtggcctgggccctggccgctgagcatctgagtggccacacatgcagcggatgggccagtgttggggacagtcccactgaagggctcccccatctgtgtttctcacagggtcaacctggtgcagcagggatccctggtgacccggtaagatgcccctgctcccacaggggccccctgtccccagagggcccccgtcaccatggtggtcccaccagtgtggtagcttttgaccttatagtgacccagtgctctcatggtgtcctcatgtcacccagggtcccccacctccacagtagccgcctatgatggtgtcccctgcctatggtgacccttgtccccatggcaagccccagtggctctggcctccagaggtgactcccaccccatggtgttccctacccactatccagggcgattctctttggtccctcactgacctcctctgacctcacatggaccctctccctgctagggatccccaggaaaggatggagtgcctggtatccgaggagaaaaaggagatgttggcttcatgggtccccggggcctcaaggtaggaaagaaacaagattggtttttttctggtcaggaaggcctaatgttgaagggcgagggacctggggtcagatattagggcactgggtcagaggttggagtagctgaggcctgtttggagagttagtttcagggtgaagggggtcacagagtgaggtgtctgggaatcacttcttcatctgcttttctccctcagggtgaacggggagtgaagggagcctgtggccttgatggagagaagggagacaaggtacagaggggatgggggctggggggctacgtggcctggggcctaaggctcaccccactgcctgatgcctgcagggagaagctggtcccccaggccgccccgggctggcaggacacaaaggagagatggtgagtgtgggcacgctcagaatgagggggccacgggtggacgggggccaagttcatgtctttttttctccagggggagcctggtgtgccgggccagtcgggggcccctggcaaggagggcctgatcggtcccaaggtacagggtctgtggacagtggacatgacagggagtcaggatggggcagggaagctcatggtcgggtcatgggggtgtagggacaaggaaggctgtagagggttgggactttgggggctgaagtggggctggtctcgaggtgtcaaggtgggttggggtcacagtggagttaggatgaaagcatgggaggtggagggggcatgtgcatcagggcagggggctatagtggagttggagtcatggggatcacatctggttggctcacaggtgcttgggttacagaaggtttgggcattaggccagggagctcatgggagttcagggaggttccagagctgagggaggtcagggcagaaggtctctcatgcttcttctgttcccagggtgaccgaggctttgacgggcagccaggccccaagggtgaccagggcgagaaaggggagcgggtgagttgaagccatggtcatggtgaattgaggggagcgtgcactttgggagagggtccatctctggggcctctgattactgactctgtcctatatctccccagggaaccccaggaattgggggcttcccaggccccagtggaaatgatggctctgctggtcccccagggccacctggcagtgttggtcccagaggccccgaaggacttcagggccagaaggtaaggggccccagctctgactcctgatccctgaaccttccctacccttccaacctcataaccatcttccagcctgcctgccccaacctctgaagctgtggcccccaacctgcctgactctgatccccactgcctctgaccctgctcacttggtccctgtgtctgacagggtgagcgaggtccccccggagagagagtggtgggggctcctggggtccctggagctcctggcgagagaggggagcaggtgagtagggattccaaggcttgggtcagagatcggggtgacttctgttgtccctgaggtcagaggtcacagcctggtcccatctgttgcacataggggcggccagggcctgccggtcctcgaggcgagaagggagaagctgcactgacggtgagtgtgggcctggatgggcctgggagggcctgggtgggcctgggtgggctggggccctacctccctcacccagcaccctgacccctgggccctggctccatgcagtctcaccatagtccctgtattatgtgccctatgtccttcctgtgggccatgggttctttatggtccctgtggtcttctgctcccaggaggatgacatccggggctttgtgcgccaagagatgagtcagcactgtggtgagtggtgcccagcccgcagtctcccactccaccccagcaccctaggcaagggcaggcaggcccctagaacttacagggcaagcagtcaagaagatggggggatggatggatacacagaaggacacatgtgctgcaggactgacacatgacatgtgtccccagtggagggagacacacaggcagatgaggattgccatgcagtgctctcagatgtccagcttggctgtgtggggagtgggatgatggtgggagcagagctggtccccttgggcctgacctggacccggtgggaggggcatcagagtgaagctgtctcttcccgtctctgtctgcaccacctgcctgtttctgtgtctggcctgcttctgtctcttgccttttgttggcctgttcccaacttccctctcctctgccttcttctctttttccatctctctatctacctcccaccctctctcttcctctctctcctgttaccctctcctgctatctctttgtgtatctctacccctctgcctgtgtgtctctgtctgtctctccatcttcccatccttctctctgtcattgtctctctatccctctctgccccctctagcctgccagggccagttcatcgcatctggatcacgtgagtagttttctactcccagaactttcttcaccccaggccctgccctgcctatcaactggggtcctctcaggggggttggctgggatggctgcccatggtgacttcagggccctgaggcccctgctcttggctccaggacccctccctagttatgctgcagacactgccggctcccagctccatgctgtgcctgtgctccgcgtctctcatgcagaggaggaaggtgaggacagctgaacccgtggggcagctatgggtggggccgagacacgcacatgggtgtccatgaatgcagggcacacgccaagcacgtagggtctgcatgcagggcacacgcatgggcactgtgtgcacacagtggaaatcagtgctgcccaccttgccccggggccagcagccactgctcccagcacaccctgccctacctgcagagcgggtaccccctgaggatgatgagtactctgaatactccgagtattctgtggaggagtaccaggaccctgaagctccttgggatagtgatggtgagaatggggggctgccagcggggtctggggaggggcaggcagggctgagccctgctgacctccccctgacctttcaaccctctctgattcccacaaaccctgctgacttgaccccattggcccagacccctgttccctgccactggatgagggctcctgcactgcctacaccctgcgctggtaccatcgggctgtgacaggcagcacagaggcctgtcacccttttgtctatggtggctgtggagggaatgccaaccgttttgggacccgtgaggcctgcgagcgccgctgcccaccccgggtggtccagagccaggggacaggtatgggctgagcccccaccgtggggaactgggcactgagcctgcctggatcgggttctgggggaggagtccttgggccagggttccaggtcagggtcctggaggagacgctccctcgcagtaggggacctggggcagacgcccagaccaaagagctgaatatagagccccagccgtggagcccccagtagggtccccttccatgttccctcctttaaagacctaagtatggacccctctgaggtcagagcccccacttcctgttgtagcctccgctccctccccttggcggtgcctctgcctgagcgtctccggggaaggtcagatggctgacgaccgtttccaacctgtcctcaccaggtactgcccaggactgaggcccagataatgagctgagattcagcatcccctggaggagtcggggtctcagcagaaccccactgtccctccccttggtgctagaggcttgtgtgcacgtgagcgtgcgtgtgcacgtccgttatttcagtgacttggtcccgtgggtctagccttcccccctgtggacaaacccccattgtggctcctgccaccctggcagatgactcactgtgggggggtggctgtgggcagtgagcggatgtgactggcgtctgacccgccccttgacccaagcctgtgatgacatggtgctgattctggggggcattaaagctgctgttttaaaaggc

SEQ ID NO: 5304 - DNA, 41195 bp, Homo sapiens
ctgagtcagcatgaggtcagggaggtccttgtcaacctgaggctggagattgtttgtgtacctgtgggtccaggattgggctgggtggacctctgagccttctctcacccttaaaggcactactcctgtgtgtgaggacatcggacgcagcctcctgacctatggccgccgcatccccctggctgaatgggaaagccggattgcggtaacatggacccctgggagaggttctggagtcttggcctggcagacacctgggaggtgtagggttggggcctggcatagcgcagcctgctcctataggcatccctggtgtcctaggcagctgtcacctgcaggggtagcatagtgggagggcagggcataggtgctgatggctgtggagatgggcggggcccatggaggtctatagcagggatcccttctgcctttcctcttttgggctggggacagctgcatgctgcctgtgggagatctctgctagttggatgatgctgactggctgaggtggtggccaggtgcccgttagccagtatgccctctgcctcaccctgcaggaggtggatgccagtgtggtacgtgagatctgctccaagtacatctatgaccagtgcccagcagtggctggatatggtaagtggcctagggggtctgctctttgtttatttcctcaggccgttctcttggcctccccttccacctctgctcccgcactgctgctcagcttacagagcagccagttaaggccccaagcagctctccccagtcccctggctgccagggagttcttgctcagaaaacctgtcccagcagttccttgactgcctgccaaggtgccttcatcaataccctgcacccgtcaggtaacgggcacctccatgtggggtggggcttcaagggccagaacatgaagggacaggctcagcacccctgggggaatgttctctcctctctttccactcaaagcctgtcttgtgctgctctgggcagcatctccgagctgggtgcggcacagggccaggtgtccctgtgcaggccaggtaccccaccctgacgctccaccctatccccacaggccccattgagcagctcccagactacaaccggatccgtagcggcatgttctggctgcgcttctaggcgggaagcctatgtaagcaagagggcagggccggggtttgtggtcccccccccaccacaaacacagcacttcggctcctctaacctgtgccacaggtgaccaccaataaaatcctctgctgagaagtgtgtcatccctcttttggcattggcatggagtccatggggcagtagatggggagcaaggacttccctctagttctgtggctcctggatcctcctgccttcccacaggctgatgtgtcctcagccaggggcaagcgtgggggttgcagctgaggccggaagtctttgatgcctacagggagctgagcccagatgtttccactcagccacttaggggagttcctcagccagctggtcccaagattgggctgtgggagtccataggaagtgtaaacccagcctttgcccctgtaggagtcccagcctggaatccctgcaggctcaggtgggaaacccctcactgtggaccttgtgccaagtcaccccctggtggtccctggtggaccagaaggggccaaggggtgtctccaaggatgcctcttgtgtgtgtttactctgcattctgggaggaggatagcctggggcatagtgttctcatttggtttctaactgctgcctggacaagcagggcaggaatcctttgcctccgctgactcaggctccaagaatagccctgagctcagtggggcccgagccccctccctctactacatttgtcccaggcaagtccagagctgctggcctgacaatcccctccccattttcctgaggcagccaggacctggtacagctcttagctacctagtccctctgttatctcttttggctctggtccccatggtgggtgcgcaggtaggctgctcctcctgcaccccccagtgcttccacagtcaggttctctgggatcccagggggaagttgaaagcgaggggcccaattttcctttgaggaagtcgctgcctggcagtcacaagcagggtgctgggacaaggtcttttagaagatggctgttcagaagtccccccagcatcgtagcttggaagtagcccaaggaacccttgtatcactatcaccctgccccactgcctttccctcaccattggttgccatacgttgccaattcggagacatttgttaagcaccttctacggcccgggactggggcattgcgcagatcattctactttgtgaacggctggagagaagatgctgggcagcgcagaaccctgacaggcccaaccctgggtgctcatggaggtgcaacacccaggcaggggaacaagtgccaagtctgttgtcaagtttgagctcctggaggatggggcttcatttctaagcccagcctggcccttagaggctacaggtgtgctggacacgagagcttgagttgctgggagtggtctggttctaagggaccttgcgtaccaagccagggactctggtctttaccctggagccatgctggggaggtgtgttggaggttactgtgaagagaagtgacttggtcagagttgagattcagcatggggactctcaggccatatttctgtatcagtcttggtgagctgtgctgtggcagaacagaggtcatggccacacgaactggagccagctgtaggggacacaaagaggactacattcccagcagggctgggagacgcggaggcacgagtgggttggaggagggtaatcttccatagtccagtgaggagtttggtggtgtccagggtacagtgggatgtgtggggctgggacctgataaagaggccctggttggaaacagatggggtgaggtagtgactgaggccagggaaggaaatgttcagggaaagcttgggagggagaaggatgtgctctgggggctccaccgccctgatggggttgcaggtaggcactggcctcgggctgtgccctaggctgtgttcctcccaggaggccagagctggggcttcagagggccacactcctgctcgtgagtctcatagaagctccagacgtggagtcattccaaccttactcctaccttctcaacagcctctcccagcaccctttgagagaccctctcacagcagcctgtcctttcttttggaggcacctcaattctgatgaggtttgcctgagcacccaccctcccagctgggcctcctgtctcccctaagactggcccacgtgtgcacatatgtctgtaccgtactgtccatgccactggcctgctcttgcccgccctggctgcacgggaggaggtgacagtcttagggggaaggggctgcctgtgtgataacatacctggttctctgcagccccccacctggagcacaccttgcagggatggggggtcctgggacatggctgaggagaccctgaccttggaataaggtcatagcactatgccccaggatagtttggggggtcagtaataagggatagagccccagccttccttgggcaataggaaagcaggcagcatggatggtcttcactgcctccagctctggccacaccagagtcctcgggctgtggaggagtccagccagtgctgtccccatatctccctgtggatcccaggggaggctgtggggccgggcatattagaaggggcccagcagccttggtgagtatagatgtgctttctgggctgcccagagttattcaggattagcaggaaaaaaagggggagcaggacccagatgggggcctgcccttcttagcagtgcctctctgccttagtgtcacccatctaatggagagatatgcatatacagagccccacctccttcggacagtggccctggcgtggtgtgtgttggaggactgtccacagcctcagaagcgaagctgggggagggtgtgaagtcagcctgggtaaggggacaggagtaaggtagggggcagttatgaagctggaagctacaggtaccatgagggcagtgaggaaaggaggaaggggcccaaggggacctcggcctggtaggggagatgggtggcagggacctacaagaaaagtagatggaaggagaggatgcctgtgggtgaggacatgtaggtagggggacctggcctggggcatggagggctcgattcctgagagatgagctgtcactgtgggtggtcccgccctccacagatgggcggccccctccctgcaggcacagctggattgcatctgcctgtgacatggtaggggatgtgggacactgggatgtatgcataagcatgacacaggttctctcctccttccggcttatcccctacaaagagggggtgagttacttggatccaggccaaggggaccttggtttccctaagaccggcccagagtcactcatttgccagggcttcttgcctgtcaaggagatccgggtggggcccaggaggcccaccagacagatggctgaatcacaggagtggccggcgggacccatggcctgagggcttgtctgggcacccccactggattgggggtgagtcatccccaactgcagccccaccccccacggcgctgctgccttgtggctctgcaggaacctgtccactcctcagcctggtcactgtgattgacctaaagcagccaagacctgtgaccttagatggagttaggggtactccctcagcatctgcccatgcagaaccttctgggaaattcccagaagccacggggggtcggggggtttatagttaagtgcgtcatatcgtttgtctgggggaggggtggggggggcggcgacctctcagggatatgggtgagggcgggtgcctgggttcccgcctgccgctccgccccccgagatcagggacttttctctgctctgcccgagagactgcagcggcggcggcgggagcgggcggacgcgcaggcaagaccaggactcgggctggaggggcgctgggctcggacctgccaaggccacgggggagcaagggacagaggcgggggtcctagctgacggcttttactgcctaggatgacgctgcggcttctggtggccgcgctctgcgccgggatcctggcagaggcgccccgagtgcgagcccagcacagggagagaggtgggcaccgcaagggaggacccggcccggggcactgcaccgtgccaccctccgctccactcggccttcatccccaacaccccccgcccacaacccagccaactccacgacgccccgcggattcctcctaattctgggactccccgaaccctccgcgatcggtgctgggttccctaaaccgcctcctatcctgttcctacccaaattctggctccctggatgcgtgcggggtcccctgccttatgccaatccacgccggcccctagaggctgacctcagtcccaagtccacacccgtgctggcgactctccctcccccgcacacccccaaccctccgcgggagtctgctctgggacccaccgagctcaactccctccaaggccctcaggctcaggccgattcggccctggtttgcataagatgaggcctactctccccaccatcccaagtcccagtgaggccaccgtgcgggtaggcgggtggttggcctcccagaagaggccctgatctctcctgcccgccccagtgacctgcacgcgcctttacgccgctgacattgtgttcttactggatggctcctcatccattggccgcagcaatttccgcgaggtccgcagctttctcgaagggctggtgctgcctttctctggagcagccagtgcacagggtgtgcgctttgccacagtgcagtacagcgatgacccacggtgagtaggggccctgggggctggggaccacgagatccccaccaagactccttccccagagagggaggagaccctggaaaccccaggccaggtctttgcagaaacaagttttggggaacctagagaccccctagccaggacctcctttggagacagaggtaaggattccctaggtagaaccttcgtgccctgaggcacctccaggctactgcaagacaggaaggtgcaagacagtgaggctgtgttttctgatctggagatggggagcccaggagggggcccccacgcctgttggattctccacgttctagccctctaacccttgcagccgttcaccagaggtgctccatctggccagcatccactttcctacatctggacccctcctcctgcaattatttaattaagcagcatcttgttccccacagactgtgagcccctaagggctccttcaggtctgcccaggcccacctgcagatggtgcacaaaggagcccctggggagtttgttaacctgggggttccagaggcaagtgggtgtggagaatgacagaacgaagggacccctcaagagagcctgatacccgtaaccctcaccctagaggcctcctcaaggccagggccagaagagatcctgagtcctagcctgttgccacccctaccctccaacaggacagagttcggcctggatgcacttggctctgggggtgatgtgatccgcgccatccgtgagcttagctacaaggggggcaacactcgcacaggggctgcaattctccatgtggctgaccatgtcttcctgccccagctggcccgacctggtgtccccaaggtgatccctacccctaccatgcctcccaagatgaccccaaatgaagtgtccaggggaaccgtgatttgacccctgcacctgtcccaggtctgcatcctgatcacagacgggaagtcccaggacctggtggacacagctgcccaaaggctgaaggggcagggggtcaagctatttgctgtgggtaaggaccgagcaggagtgacaggtcagctggggggtgggggcagtcagagagcatgtgggtgactgagtcctgatgggtcgtcacttcagggatcaagaatgctgaccctgaggagctgaagcgagttgcctcacagcccaccagtgacttcttcttcttcgtcaatgacttcagcatcttgaggacactactgcccctcgtttcccggagagtgtgcacgactgctggtggcgtgcctgtgacccgacctcgtgagttcctgcccacacggtgtaccctgacctagaccccggaccccaatccccacttggcagtgctgattccatcctatgtgctcctgaccccgaccccaactctgcatcatacatgcccaccccaatcctcctgcctgatcccctgatcccgcattcccagcggatgactcgacctctgctccacgagacctggtgctgtctgagccaagcagccaatccttgagagtacagtggacagcggccagtggccctgtgactggctacaaggtccagtacactcctctgacggggctgggacagccactgccgagtgagcggcaggaggtaggatgtcaggagtgataggtggtggctggggacttggctgggcaagataaagtgacctcttgccctgggcaggtgaacgtcccagctggtgagaccagtgtgcggctgcggggtctccggccactgaccgagtaccaagtgactgtgattgccctctacgccaacagcatcggggaggctgtgagcgggacagctcggaccagtgagcaattctgccagcctctgaccccattcacctaacccccgaccccagtaccccctcccacttctgactccatgaatccctggtgggactctcccccagctgccctagaagggccggaactgaccatccagaataccacagcccacagcctcctggtggcctggcggagtgtgccaggtgccactggctaccgtgtgacatggcgggtcctcagtggtgagtgagagatgtgggctgaggggagtccccgcgcctcagacaaggctgtagagtcctgagtctgcaaggcccactggccccttggtgtcccccatgcaggtgggcccacacagcagcaggagctgggccctgggcagggttcagtgttgctgcgtgacttggagcctggcacggactatgaggtgaccgtgagcaccctatttggccgcagtgtggggcccgccacttccctgatggctcgcactggtgagaaggctgggcactttcttcaggctgggacgggcaggcagggcaaggcccggaggccactgacatcccatgtgccctgggcagacgcttctgttgagcagaccctgcgcccggtcatcctgggccccacatccatcctcctttcctggaacttggtgcctgaggcccgtggctaccggttggaatggcggcgtgagactggtcagtgcgggggaagggatggacaggcaagggtcagggcatggcctctgctggtctgaccctgttatcttgcaggcttggagccaccgcagaaggtggtactgccctctgatgtgacccgctaccagttggatgggctgcagccgggcactgagtaccgcctcacactctacactctgctggagggccacgaggtggccacccctgcaaccgtggttcccactggtgagggctctgtgggctgggccagtgagtgggggaggtgtcggagccccaggctgcctctatgctgtgctctccaacaggaccagagctgcctgtgagccctgtaacagacctgcaagccaccgagctgcccgggcagcgggtgcgagtgtcctggagcccagtccctggtgccacccagtaccgcatcattgtgcgcagcacccagggtgaggtggacgcagccagcacccccaccacacacactgaagttccagcctgaggggtctgagtgtacctccagccctctccttccacacctgggtccctatagtctcctccctgtctcgttatccatctgcttcccaagatggcactgagccctgaactgtcaacagggtgtgtctgcccctaccctaccccaaccaatctcctccctgccccacaccccatccacggctttcacctctgcacagccacaagctcaatcacctgtctttctgttaccctagtggtgaccactgtacaccaacctctcattgcatgtccccatccagcactgacctctgccatcccacatcagtgtctgtcaatggctcatcagttctcactgcagtccactgactcctgtcatcctacatgctaagatcccacagactcctgtcctccagtgtccctgaccatcactggcccctttcatcctatgtccttgtcttgcactcacttttttcagccatatcccagctctctggtccccaccaccccacatccccacccccatggcccttctcactctgcgtccctgtccatcactgccatcgtcccacatccctgtctctttctgacccctgcccacctaccctgacttctctcttaggggttgagcggaccctggtgcttcctgggagtcagacagcattcgacttggatgacgttcaggctgggcttagctacactgtgcgggtgtctgctcgagtgggtccccgtgagggcagtgccagtgtcctcactgtccgccggggtgagtactgcaggaggcttgtggaggacagctgcctgcctcactctggtcctggttctgacttctgacttctgtctgtaactcctagagccggaaactccacttgctgttccagggctgcgggttgtggtgtcagatgcaacgcgagtgagggtggcctggggacccgtccctggagccagtggatttcggattagctggagcacaggcagtggtcagtgtggggtgtgtggggggactgccaaagggaccaatgagggtatgggtgccagaggggacaggcaggagccatgccagcatttccctctgacctcaggtccggagtccagccagacactgcccccagactctactgccacagacatcacagggctgcagcctggaaccacctaccaggtggctgtgtcggtactgcgaggcagagaggagggccctgctgcagtcatcgtggctcgaacgggtcaggccctgcccccgtcccttggctctctgcctccattgctctttcagacccccatgccttcccttgcagacccttgcttctccccagaactcctgcctcccccttcagaatcccactccctcctccctcagagacgctgcttcctcttcagtttcagctgtctccccttaagccctccccgtattcagattcctccgcttctctcctaagactcccacagcctttgccctcaaatatccaccacttcaaccctcagacccccatcccttttttgctggacccaaatctcctctgagatttacactttctcctccatcagacctgctcactgcttcctaaaacctccacctccccactcctccactggacctattcaccatctcctctatcaaattcccgtctcctgttagactcccatcatcttcccctatcagatagccccactccttcctgcctgttccagcagactccccattgcctctccccactagacccactgggcccagtgaggacggtccatgtgactcaggccagcagctcatctgtcaccattacctggaccagggttcctggcgccacaggatacagggtttcctggcactcagcccacggtggggactggggtttgggagggggcaggtcagggtggaatgggggctgggggtttattgggggtccaggtggggctctggggcacagagtttgctagccctggagctgcctccatccctgttcccaggcccagagaaatcccagttggtttctggggaggccacggtggctgagctggatggactggagccagatactgagtatacggtgcatgtgagggcccatgtggctggcgtggatgggccccctgcctctgtggttgtgaggactggtgagtggaccctggccagctactagccacaccgcattagctaccctgccctgctgtgtgttcctgattgcccagctgcctccacccccctgctcagtgactgtcctgtccacactgacccaccccacactgattaagtgtccacccacggtgacctcctggtggccccacactgcccaccccaaggcactgacctcctcctcctcagggctgcctaaagtgacctgtccacactaacctcacactgactttcagatcacccctgcgtcaaccattcctgcactgcctctctgttctctaccaggaccccttaccttgcctctgtccccagcccctgagcctgtgggtcgtgtgtcgaggctgcagatcctcaatgcttccagcgacgttctacggatcacctgggtaggggtcactggagccacagcttacagactggcctggggccggagtgaaggtatggctccctgacgccacccctgtccttcctggctgggactgctcacccctaaccattgctgtatgcccacctggccaggcggccccatgaggcaccagatactcccaggaaacacagactctgcagagatccggggtctcgaaggtggagtcagctactcagtgcgagtgactgcacttgtcggggaccgcgagggcacacctgtctccattgttgtcactacgcgtaggcagagcatgcgctggagagcttcggatgggtggtgtggatggtttggggatccgggcttgtgctctggattggagaaaggaccaggattggtagtgagcctttgggggcagggtctgagaggagggagaggggtctgagaggctgggcggggtgcgtgtgccagggtgggcctgggattggtgcaggggccatgggggcagagcctccctgattcctgagctttctctccagcgcctgaggctccgccagccctggggacgcttcacgtggtgcagcgcggggagcactcgctgaggctgcgctgggagccggtgcccagagcgcagggcttccttctgcactggcaacctgagggtgagaggtgtccccaggaggaagttagggaccattgggggcagggctgtggcagactccgcaaggtaggcgaggacagtgatggtgggcggggtctgtcactgggggtctgcgggatccgtgacagtaggtaagatcaatcaatgaagtgggtgggatcaatgagttcatggagggtcagtctggcagggtccgtaaagtgggcagggtcagtgaggatgaggaagatcagtcaggagggtgaacccagttaacagagccagtgaagtgggcaggccctttaatgcccccaggtgtcactatcccacatgctcttggcccccaccctcacgcctgccccaggtggccaggaacagtcccgggtcctggggcccgagctcagcagctatcacctggacgggctggagccagcgacacagtaccgcgtgaggctgagtgtcctagggccagctggagaagggccctctgcagaggtgactgcgcgcactggtaagcctgcctcaccttggcgtgctcctcccctgctgatgacccaccctgacttcctgcaccccgactctgagtgactcctcctgtacccctacccctcaccctctgaccctgggtgaccccagcatgacctcccatgatgcttcaataagacaaaccggacccaggatctcagatctctcccttctgggttctcaggactcagcctctgatcctcgatctttcattcctccttcagagtcacctcgtgttccaagcattgaactacgtgtggtggacacctcgatcgactcggtgactttggcctggactccagtgtccagggcatccagctacatcctatcctggcggccactcagaggccctggccagggtgagggggaggccaggatttgggtgggctggcagttggggctctgtggagacagctttttaatcaagttctgtctcctgcagaagtgcctgggtccccgcagacacttccagggatctcaagctcccagcgggtgacagggctagagcctggcgtctcttacatcttctccctgacgcctgtcctggatggtgtgcggggtcctgaggcatctgtcacacagacgccaggtatagtgggcgtagtgggaagggcagaaaggtgtgtctgggtgggctgcccgcttcagtaacttgttccccttcctacagtgtgcccccgtggcctggcggatgtggtgttcctaccacatgccactcaagacaatgctcaccgtgcggaggctacgaggagggtcctggagcgtctggtgttggcacttgggcctcttgggccacaggcagttcaggtttggccctggggcagccagattctacctctccctgaggccccccacccaggctccataccagttaccatctcctgaccacccaataggttcaggcattctcccagctctctcacaggctccagacctcacctactgcctggctccctatcctgccatcactgctgactccctaatagatagggtttggtcacacacaccctgatgtgtttctccaggctctgtgcacccccatccctgctctgtcatcctcctcaggctctgtgtttccttccaccccaggttggcctgctgtcttacagtcatcggccctccccactgttcccactgaatggctcccatgaccttggcattatcttgcaaaggatccgtgacatgccctacatggacccaagtgggaacaacctgggtgaggactgcagcaggcatggactcctggggctatccactgggagcttggtgccccagggttctgacatgtccttccttccaggcacagccgtggtcacagctcacagatacatgttggcaccagatgctcctgggcgccgccagcacgtaccaggggtgatggttctgctagtggatgaacccttgagaggtgacatattcagccccatccgtgaggcccaggcttctggtaaggagtaggctgatggggaaggggtctgggaataggggtggccctgaaaaggctatcatgcagccactggaccccaccttagggcttaatgtggtgatgttgggaatggctggagcggacccagagcagctgcgtcgcttggcgccgggtatggactctgtccagaccttcttcgccgtggatgatgggccaagcctggaccaggcagtcagtggtctggccacagccctgtgtcaggcatccttcactactcaggtttggaagaggcctctgggggactgggtggtagaatataaggggtctgggggttcttggtagaaatgttcaacctcaaagagaccctatgtccgcagccccggccagagccctgcccagtgtattgtccaaaggtaagagtccctcatcgagaggtgaacagaggctgcacctggggctagccactctgacccacatctgacatgtctttccccagggccagaagggggaacctggagagatggtgagtgcccctgcgggcggggaatagagaatgggttgagtgtcagtggggcaggagaggttggcagcacaggtctcactgattacccttcctagggcctgagaggacaagttgggcctcctggcgaccctggcctcccggtgagtgtcccccacatctgtccctgcaccctgactggcttatccccacctaactgctatcttctttcagggcaggaccggtgctcccggcccccaggggccccctggaagtgccactgccaagggcgagagggtgagtgtggagaccatcgaggtttctctgaggcactcctcaaagctgtctcggggtttttacaagagagaaggaagaagcagagttagaatcatcgggaattcctagaagcccagctggaggttataaaccaccacagagactttgggggacactctgaaatagaagggccagtggggcctctagccccgctgcagagcctgagcagcagctccaagtcccagaggcagggaagccctctgccttgtcgctgcccttgtgcctggaattgggctctgtgaagctctgaggggccatttctctgcctcactgttccacccccaataacacttgggggtcagtggggtaggcgaccccttgttgatggggtgaggcccctccagcaaaccaggggccttgggggagggtcccttcctgtcctgacctcttcacctcctcagggcttccctggagcagatgggcgtccaggcagccctggccgcgccgggaatcctgggacccctggagcccctggcctaaaggtgagcaagccttgtcctgcaggtcagggtgggcgctgcctgagtgggtggggtggctccgactgttctgcctctggcctccatttgcagggctctccagggttgcctggccctcgtggggacccggtaaggtgccttcccttctttgctctctaagtgtcttcccagggttcttccacagggtgggagcctggggtggtggtgcagtgcccacgttgacattcgcctgagcccaagcaccaccctctgctctgtttcgtcctcagggagagcgaggacctcgaggcccaaagggggagccggtaggtgaagggggaagggaggcggccgggatgtcccagggaggagcaggactgccccacaccagaccctgtgcagggcctaaggcgcgaataggaatagctggacatgtctaggggcttcttccagctcaaggcccccatagcctgaatcctgcccactgctctctgtccttacagggggctcccggacaagtcatcggaggtgaaggacctgggcttcctgggcggaaaggggaccctggaccatcggtaagtgcagggtatgtggaggcaagtgatgtgtagtggggggaccaacacgaggggggcgagagtgaggtctgtggggttgcaccttatactttgtctcctccatcagggcccccctggacctcgtggaccactgggggacccaggaccccgtggccccccagggcttcctggaacagccatgaaggtgacagcctcatgagtgccatgtgatgcagagacctggtgaccccatttgaacccacataacccctgccagttactctggcccttgtgaccctttgattacccccatcctcaccatgacgcctcagttctcccaaaatccttgaaatccaattggaccccatgaccctcatcactcctggtatctttgggagtgaggtgtggcccagggtcatggggtcgtcatctgttttctagggtgacaaaggcgatcgtggggagcgggtaagtgagggacaggttgtgctaggggtggcttggagtctgattcccctgttcattccctgacctgctgttctctcccagggtccccctggaccaggtgaaggtggcattgctcctggggagcctgggctgccggtgaggggccttgaggctctgctgggggccctgctcaggggtgtgggtctctcctggggcagtggttgggtgctgggcttcatagttcttggctcatatttttactcacttcttcctagggtcttcccggaagccctggaccccaaggccccgttggcccccctggaaagaaaggagaaaaagtaggaaggctgacttgatgatgtcccagttctggggtgggaggctgcgtgctgggggcagggcctcccttcggtcttcccacccgtgtgtttctccttcagggtgactctgaggatggagctccaggcctcccaggacaacctgggtctccgggtgagcaggtgagtggaggggccagggattctgaatatggtgggcacagctccagcccctacctcaatcatcaaccactgctccatcctcatgcccaaacccaaatctctgaacccccaaattcatcccttccagggcccacggggacctcctggagctattggccccaaagtgagtaccagttgggggattcaggtgtgaggggtgctactctgggctccccatggtgttaggggaggctggaagataaggagataagagttccctccaggtcagaggtcgtggttttggagggggtggttggagtttgggaccccttgtctggggtttgacgttcaagccccgccaccaaccctctctctctctgtctttctctcaccctctctcttcagggtgaccggggctttccagggcccctgggtgaggctggagagaaggtaagtgcaacctggggggtgccaagggccctggaggatctgggcccaactcagctctgacctcttcttttccatcagggcgaacgtggacccccaggcccagcgggatcccgggtaaacccactggctgcaatgctcataccagctgacctggctgtgccctttctggttctgacttcttgcccttgacccctgctacccctgctcctcacccctcctcaatgaccacttatccctgctgatacaggctctaaccctcagccccagggacctggctttgaacctctgaccctgctgaactgaccttgattttcactgacctggtctctgttctcctgccaagtcttacccctgccaacctaaatcccaatcttccctgacccctctccagcccccaccccagcctctagccctgtctgtccatatcccccgtccccacccacctgcacagctcttcccttcctctcctccaggggctgccaggggttgctggacgtcctggagccaagggtcctgaagtgagtctgtgactgtggtgggaccaggagtgggacttttgtgtgtccctcccctttcccttcccctcctgggctcacactttctctacattcaggggccaccaggacccactggccgccaaggagagaaggtgggtcctcggctgggggtggcactgtctggtactagggatgtggcagatgggacactgggattttgggctcctaggtgactccctgacctgtccctgctcctatcctctctccacagggggagcctggtcgccctggggaccctgcagtggtggtgagtgacgggaggatggcgctctgagcacagcacagcccttgagcagtgaccctcctatagaacactatctgggctgtgattccacagtgctgggcccgtgagcaggctgggagctctgcggctctccttctgctagaacctgcccccagactcttggctatgatcctgtgaccccaagaccgccatgcaggtcatgagctctttgtgtcagtccattttgtataaccccttccctgctgtcagcggtgactctgtgacttctgggcggggactgagctgtatgacttccaattccatgtgacctccattccaatgaagactttgatcatacaaccccaaggcagggccaagctgtatctgtcctgtttgttttcagggacctgctgttgctggacccaaaggagaaaaggtaagcctggtatggggcaaggggaggtttctacagggttgaggtctaggtcatagggcctatctatgggacttggggggtcacaggacttgctgggtcagggggttaactggagcctgggactagcactgatggtctttgtcacctccagggagatgtggggcccgctgggcccagaggagctaccggagtccaaggggaacgggtaagtgaagcgaagtgtttagggggcagttggtgaaggttgtcttcctgacttcttatccttccatccacagggcccacccggcttggttcttcctggagaccctggccccaagggagaccctggagaccgggtgaatcaatgtgggaatggggagtgtgacagagggagatgaggtggtgggaccctgactaagtcctgccccccttctgtccccttcagggtcccattggccttactggcagagcaggacccccagtgagtacccgttaccctgggcaacctcaaggcttctggggtcccctccccttgagaactgcttgcttcgagcgtcctgcatcacctccctcttgcctcctccacagggtgactcagggcctcctggagagaagggagaccctgggcggcctggccccccaggacctgttggcccccgaggacgagatgtaagaggctggagtcgggggagtcatggcgggtaagggagtagggctgttgccagcatcatgggggttcttggaaccagggctgactctcatgtttcacagggtgaagttggagagaaaggtgacgagggtcctccggtgagactccttcccactgtggtttctgatcctttacccttgaactaggatcccagtaggctggtgctccaccagttcatccatccactccctgcctcctgtccagctgctgctcagacccttctctgtcccctctccctgagtgagttagatcctgactgccctgtgcagtatgacttttctctctatcaccagggtgacccgggtttgcctggaaaagcaggcgagcgtggccttcgggtgagtcttggcagagagaagtaacaggggtgatgggaggtgggcatgaaggtgataggaaaggctgaggggggtaaggggtgatgggagtccctgcagggaggcatggggtgatgggaacctctgatgtggattttggagtaatggggaacctggggcagtgtagcgggtcataggggcacctgcaaaatattgggagggtctgtctcaggccagctgctcttcttagggggcacctggagttcgggggcctgtgggtgaaaagggagaccagggagatcctggagaggatggacgaaatgtgagtcccagcctatgactcctcaccccaaccttaaccctccaaccagccaattcccaatacctgatcctaccccccaaccctgtaatgctaaaccctcccaatcttcacttcctttgacccctgcacacacgcatctgaaggctaccaacattcccatgagtcctcatggtgcttccaaagctctcccaaactgctgcctaccttgagtggccctgacccctgcctttctgcagggcagccctggatcatctggacccaagggtgaccgtggggagccggtgagtagggctggtgtcctgggctcagaagggatggagggtcccctggcgctgctgccagtgtgccttcacacaaggggtctggaggtccaggtgggaagcatggatggccacccatgcctgctgggggctggcattggggtgcttcggggaacttgggggcagagttgagcctggggcaaaccagagccatggcctgggacctgagggctcctattgactataatcatttcctttcccagggtcccccaggacccccgggacggctggtaagggctgcgctgggtctggtcctctgtcattgttctcacttgcccctttggctccacatcatgtcccctcattccttccactaactcccacttcccccactgtccctctgaaacctccgcggatccctggagcccctcacagaccctgtatcccctcgccaactcctcttccccttgttgagccattcttctcactggtcattccccccacaggtagacacaggacctggagccagagagaaggtattagggtctgtgggtggagggtaagaaagaccccagtgcccctcccagcaggttctaccttgggcatggcttggcttcaaggctgttcctcagcaagcttatctctgccacagggagagcctggggaccgcggacaagagggtcctcgagggcccaagggtgatcctggcctccctggagcccctggggaaagggtgagtgtgattggtcctcgggggtgcaggcatgggagggcctgctctgatttcttcctcccctatcctcagggcattgaagggtttcggggacccccaggcccacaggtgagtgatgcactttgccccgtctgccaagtccccatcttaccctcacctcttatctgaccctgttccctccagggggacccaggtgtccgaggcccagcaggagaaaaggtgagagggtgtgggggtttctcaggacatgagcctgggttatcagatccacctcagccttggtggcctcttaccactctattttccacagggtgaccggggtccccctgggctggatggccggagcggactggatgggaaaccaggagccgctgggccctctgggccgaatgtgagtcttggtagtcctgcctggttgtccccttcccctaccccttcacatgaggaccctagaccccagcctcattggttggtcttggccttgacgagctctggggcgagacctgttgtctgtgtcttctcccagagccctgcctgggtggggcatgttcttgccatgcaggccttaggctcacagggactagagcccctgaccccatgaccatgatgaactgactttgagtctctcctcagggtgctgcaggcaaagctggggacccagggagagacgtaagtgaggggagatgctgggacagagggggctcggggctgcgtaagctccaaccagatcatcatagtcacagcatccgagagagttggtggggggtcggttcagccttgcctttgggagggtctcagtccctggcacacaggttttagtagaatccccctttctgaccttctttgccttgggggtcttcataggccctccaagtcctgggggttcttcccttgggagtctcagcaggggcccccatccatggggtctgtgcctgagggatctcaatgggacctctcagtcctgggggtctctaccctggagggagatctttttggggtcctcttagtccatggggtgtgccccaagggatatctcagaggccctataaatcttaacaaagactttttccaggggcttccaggcctccgtggagaacagggcctccctggcccctctggtccccctggattaccggtgagaccagactttcatgttacccccttttcccccttactaccctcacccgatccccgacatccaaccagtgatctgttcccacagggaaagccaggcgaggatggcaaacctggcctgaatggaaaaaacgtgagtgtgtccagggcagctgcggcgaaacctgccaagaaacgccagcacacctacacagccaagatctgtagcaacacatgaggcacacgtgtagacacatgcatcctggcccagacatacagatgcatccagaaacatagtttttttttttttgagatggagtttcgctcttgttgcccaggttggagtgcagtggcacaatctcagctcactgcaaccttcgactctcgggttcaagtgattctcctgcctcaacctcccgagtaactgggattacaggcatgcgccaccatgcctggctaattttgtatttttagtagagatggggtttctccatgttagtcaggctgatcacaaactgacctcaggtgatccgcccgcctcggcctcctaaagtgctgggattacaggcgtgagccattgcgccaggcctggaaacatagttctatatgcacacacaggcagcctcacagacacatagggagttaggtgaatgggccaatttatgccaggatgggctgacacatgcccagataacccacagccataggcacaggtgaagagccacagacaggtcgacaggcacaaacacactggtgtgtagccacatttggggcacttagagacatgttgatacccagacacttccacccagactcatgtgctaagacatggacccaagaccgcatgtggacctgtgttgagacatggtgagacacacatggatggctctgacctgtgacatgtgctaggacatgctggcccatgactttatatggtcacccacacgcttatggtcatacacattgagctacacacaagagttgcagacagatgccaagacacatggctctcaaggcatgtataagcccatgctctttggagacatgtataagcccatgcccatatgcagacatgggccaagatgtgcaaacagaccaggacacacagacccatgggtacatgtactaagacacacatggatatgcacacacccaggacatgtggacgatcaccaacccagagatgcataaatgtggagctacctctagagagccagagtcaaaggacatgtgtgcagttgcctgttggggtgagcaggcctatgcaggcacacccttagacatgtagcagctcactcagacggccacaggccatgctccaagacacacacaaccatggagctacaggcacagaaatacagtcacagtcatctgaaatctagcaaggtagtgtcttgcagccagacaccagtgaatgtttgggctgatgtgagtcctctgcccacagggagaacctggggaccctggagaagacgggaggaaggtaaagtcccccacctggggtctctctggtctctgcttggagccatgcctgaagcatccttgtcttccttagggagagaaaggagattcaggcgcctctgggagagaagtgagtattggagttttctgcaacctctgacccctgaccctgaccctgggggaatatgactccactcttttctgaggtctcagggtgctgatgctggctgcatccttcacagggtcgtgatggccccaagggtgagcgtggagctcctggtatccttggaccccaggggcctccaggcctcccagggccagtgggccctcctggccaggtgagtgtcctgggtcattctgggacttcagagcattagaagccatgatgtttcaatgggcaaccctcctgggaagccatgggcctttgtgacccctttgtgttctgccgtatctcagggttttcctggtgtcccaggaggcacgggccccaaggtgagtgcggatgttgggtagggggcgtggtgagggggctgaccaggctgggggccatttccccacctggtcattcttgttttcagggtgaccgtggggagactggatccaaaggggagcaggtgaggcccccaccttttccacatgcccaggtagccacagcacccacatgtgcacatgcacacccataggctggttcctagcagtttgtcttcatctctccagggcctccctggagagcgtggcctgcgaggagagcctggaagtgtgccggtgagccaggcttgggatgtccccttgactctgttttgcatgcccattggggccaccttgccatccccttccccttgccatgaggctccataggttctgtgctgtgtgttcagtgccctgccccattggggttcttgtagcccacactcaagggaacttgggcagtggggacacaccagaaaggggctcccaggagtctccagccatgcctcaaccaagtgctaaagggtgctctgggcaagaggcctagggaaaagggtgtgaaggtgctttcctgaggccgtgcggggcagaaggcaggagcttctctgtcatgggcagcccttcacccagactttgtccccagaatgtggatcggttgctggaaactgctggcatcaaggtgggttgtttaggggctgggggtagggacaagtgggggcccttggggctagtggtgcccacaggcataggggctgcggcgacgcaccccgctcctctgacctcttgctgtccctcaggcatctgccctgcgggagatcgtggagacctgggatgagagctctggtagcttcctgcctgtgcccgaacggcgtcgaggccccaagggggactcaggcgaacagggccccccaggcaaggaggtgagcagaagtggctcagtgggttgtgccccgtggagtggggtgtagctgtacagccaccagcattctctcttccactcctgcagggccccatcggctttcctggagaacgcgggctgaagggcgaccgtggagaccctggccctcaggggccacctggtctggcccttggggagaggggcccccccgggccttccggccttgccggggagcctggaaagcctggtattcccgggctcccaggcagggctgggggtgtgggagaggcaggaaggccaggagagagggtgaggctgggggctggccaggagagtgagggaagaggggttgggaggggtgggaccccccatgggcttggccctcacccgctatttgcatttcagggagaacggggagagaaaggagaacgtggagaacaggtgggctgcgatgggcttcgtggggcaggctgtctggaggctgtgctggggctgccaccccattttcttgtttcctgcagggcagagatggccctcctggactccctggaacccctgggccccccggaccccctggccccaaggtgatcaccccatccctgccttagtcctgtgactagtgaccaggaagccacccttagcttggtccccagaaatatggtagtgtgtgccataaccctggaatttctgaccctataaccctctgtgatcctgagatctgtgatgactcccccatgcctctatgacagagacatctctcccctgtgaccttgtgtttgtaggtgtctgtggatgagccaggtcctggactctctggagaacagggaccccctggactcaagggtgctaaggtcagtgtgtggaatcagctcggggccaccctctgccatggcactagggactgacttgacatctcatccccacagggggagccgggcagcaatggtgaccaaggtcccaaaggagacagggtgaggcctctctccacccttccatagagtccccctcctttctgggggcacactagaggtggtgtgcatatgcacctgggcacgtggcagggactgggggctcagggcacgacactctgccttcagggtgtgccaggcatcaaaggagaccggggagagcctggaccgaggggtcaggacggcaacccggtaagtccttgcccaacagccacacatgtgcaagaaggtggctctcacatgtattgtcctgtgtgcagggctggggtctgtactgcctgggactgtctgggtcctgactctgtctagggggatggtgggtggaggggaagttggaactgggaaactaaggccttaaacctattctctgcagggtctaccaggagagcgtggtatggctgggcctgaagggaagccggtgagtggtggctgaagcacctggccccaggctccggaccctccgctaggtgctgctgctgctgtgtgtgtgcatgtctgtgtgtgtgtgtttgtgtgtacctgtgtctgtgtgcctctctgtgtgtgcctgcttgtgtgtgcctgtgtctgtgtgtgcctgtgtgtgcctgtgtctgtgtgtggttgtatgtggatgtgtgtgtgcaggcccgtgtgtgctatctatgagaggcagtccatgggtaggtattatctgtgactggaaagggtgaggtatggaaattgacccccaaggaaaaagcccccagaggttgggaacaggcccaagtgaggcccagattgaggctcatcagtgccctctctatgtagggtctgcagggtccaagaggcccccctggcccagtggtgagtacccaagaaccttcacctgtcttgcccccatcctgtgccctgccccagtgaccagtactgcctcagtttccttggtggggtgcggctaactccccctcatcagactctttttcgccacaacagggtggtcatggagaccctggaccacctggtgccccggtgagtgaccagggaacactgcctggtgagggtctggaagggctgggataggcattggccacagctgatgagccaggccttctctgtgttaatccctgagccctgttccctgcccttgacccttttctctagggtcttgctggccctgcaggaccccaaggaccttctggcctgaaggtgagtctaggtgtgtggataggaggaggaggctccttcaagctgtgtccatgcctggggtagtgtgcgccaacctcctgggctgtcatctcctgcaatgaggatgagctccaggagccctggccacgtgggctctgctcatgcagtctctgggttgtttgcagggggagcctggagagacaggacctccaggacgggtgagtggcctagctcacaggttagggtcatagggagatgggtggggttggcactgccctgaactttctcttcctccagggcctgactggacctactggagctgtgggacttcctggaccccccggcccttcaggccttgtggtgagtgagtccctgtggcccctgtagggacaccgtgttttcactccttggggcccatgttctctcatgtcgtcctgtgtccattgtcaccctgacatccgacttgttctccgtcagggtccacaggggtctccaggtttgcctggacaagtggtgagttctgggggtcaagggttgggctccaggggtcaagggtcgacaggcagccctgacagagctcttccctctcagggggagacagggaagccgggagccccaggtcgagatggtgccagtggaaaagatggagacagagggagccctggtgtgccagtatgtgttctgggggcagctcgctagggtgtggtgcccagctgtgggcctgaaatatgaggagtggggcagcaggggtggtggtggagaggcactgagttcctcacgctgctctgccataggggtcaccaggtctgcctggccctgtcggacctaaaggagaacctggccccacgggggcccctggacaggtgatctttgaccctgacttccaccccctgcagcaactcctctgcctcacccacaagcctgtttccaaatgccatgggggtggcagggtgggggcgggggaggaggaggaaactcactagcattccccacaggctgtggtcgggctccctggagcaaagggagagaaggtgagtgtgtgtggggctgccagtgagggggggtcaactggtgggggccaaggaatcccactgacctctcccccttaccagggagcccctggaggccttgctggagacctggtgggtgagccggtaagtagggaacttctgacagcagatgttctgggggtcctgtctctccagtggcctaacttctgaccttcgacccatagtttacccaccctcatgaccctcagctttcatagtagaccgcatatttaagctctggccccatgcctccctccggagtctcatctttctgtgactgatgcctgtgttgcctcctgacctctgtcaacagggagccaaaggtgaccgaggactgccagggccgcgaggcgagaaggtgaggtgggttggccctggggcctgactactgagcagagaaggctcagtccagacacccctcacctgccattctgtgcagggtgaagctggccgtgcaggggagcccggagaccctggggaagatgtgagtccggggcctaggcaagggcgagcctggcctgaggagtgtgatggcgggcataaggggccactcttgggccggggcacatgtctgagcccctgagtcgggctgcatgtcccaacatccaggagcctgctctctggatcacagggagccacacactgtcggcttccacactctgagctctgggggccctgtcttggcttctgtgtgcccatccttggtctgtttctcaccacatctgggcacacgtgtgctctggtctgatctcccagatcccaggacacacctgagttcttgtgaacctctccttggtcctgtgtttacaatcctcctttcccctgcccctggctgccagcgttcagcctgtggccatgcctgctctacccgggagtggacgtgttggggttcccctctgagcgcccgtgtgtccgcactcacgtctgtggagccagatgtctgcactcgcgtgtgggctccctgtgcctgtgccatgcctgaactcccacctgtctatggtagtatctgagcgtccctctgtctgtgctgtcctgagataggccatggtcatgtctgagctcctgtgagccaattcttggtcgcatgtctgagttcccatgtgttcatggtcacatcagaactcccctgggaatattttcagcccgtgtctgaactctgtgctcatgttcctaccctctcaaatgctgtttgctgggttttcttagggtcagaaaggggctccaggacccaaaggtttcaaggtatgtgtacccagaagggtccctgctggggtcctggtcgtgagactccctgagcttgatccgatgcctcttttcctcaaagggtgacccaggagtcggggtcccgggctcccctgggcctcctggccctccaggtgtgaaggtaagtcaatgccccatcaccagttgtaggggcagcaggccgggcccccacaggaggaagagggagttctgatgagagtcctgggaggggtcctgcattgaccattccctccctttgctgtttttatttcagggagatctgggcctccctggcctgcccggtgctcctggtgttgttgggttcccgggtcagacaggccctcgaggagagatgggtcagccaggccctagtggagagcgggtgaggggctgggaacagcatgtaggggcatggtgaatccatggtgggtgaggagggggccctgccttgggggttcccagtcttgagggggcagagggtaggagggttcccaagtcactctctgcctctcttgccccatttttctggtagggtctggcaggccccccagggagagaaggaatcccaggacccctggggccacctggaccaccggggtcagtggtgagtagaggtgccctaaagccccacgtatttgatttcctgtcctcgtgaggacttaggatggggcgggccacactgtggggtgttgggggaggcgctttgagagccacaggaccctcacctcactctgacctacagggaccacctggggcctctggactcaaaggagacaaggtaggtgggacaagtgctgctgactctctcttgtgccctggtcacccccttcagcctccactgacctcccatgaccctgcgtcccccactgattcccctcactgatccccggtgtcctgttggtctccagggagaccctggagtagggctgcctgggccccgaggcgagcgtggggagccaggcatccgggtacgtatgtcttactccacagccgaactcccttcatcccagctcttgcctctgatttccaacctctgagtcaatgaacctaatgtcaccatccagggtgaagatggccgccccggccaggagggaccccgaggactcacggtgggtcccgctggggaaagtgacagtgctgtgacttcagtcccctgcctgtgccctttgtaccccaggactctctgccatcctccctagccctctggccctcctcgtctacccctgtcccctttgtctggtccccactgtttccctcctccccctgatcctcctccgtcctccactgccctggttcctgtagctcacggtcaccttctctcacacaggggccccctggcagcaggggagagcgtggggagaaggtaggaacgtggggaaggtcctggcatgagtgggggggtgagtggatcttgtatgatattagaattcaggtgcggggcctccccagtttgggcgggactcacactcttttgcccaatagggtgatgttgggagtgcaggactaaagggtgacaaggtgagtgtgggcatggggagggcagggcaggggccagggtgctcccgactcctctgattcctgcctgccccctcagggagactcagctgtgatcctggggcctccaggcccacggggtgccaagggggacatggtgagtgggcccacgtgtggactgggtctcccctgggtgcgagagggaccccgtggggctggcccagggcatctgagagctcaaactcccagagggtgagggaccttcagccccttaccgtgacttcttacccaaaccaacccagggtgaacgagggcctcggggcttggatggtgacaaaggacctcggggagacaatggggaccctggtgacaaggtacagggaagagggtggtgtactctctgtggggtcctgtggctgtggtggttccacagcatctgtgagggcaggaggggaggacaggaggaggctttctggggtttagggggaaggggttctgtggctgactatggagtggccgagaggaggggctctagggagggctcaaggccttggtgtgaggttaggagagctctgtggactggccctatgaaggggccctatagggacaggaaaggggctccttgggtgtccccatctgaaggtgcttcagatgggatgaggaacccagtgataagagggcggggcaagggtctggagtccttggggtgagaaatgagccagtctgtggactacagcccccagttccacccgctatggcacaggctgggaggacgtgctgctagggccgttcgggagtgacttgagctctgccccagctggcgggctcgttgtattctaagcccccagcctgatctggtcctgactgaatccctctcctggtcactcccacagggcagcaagggagagcctggtgacaagggctcagccgggttgccaggactgcgtggactcctgggaccccaggcaagttctgccccaggcccaggcccaggcccaggtccagagccagcatcacacacacacatatcctgggggtcctcttaagtgctgggggttctggctcccttgctgccggccccatgtgtgttcacccgggatctgtgtgtggcctgggccctggccgctgagcatctgagtggccacacatgcagcggatgggccagtgttggggacagtcccactgaagggctcccccatctgtgtttctcacagggtcaacctggtgcagcagggatccctggtgacccggtaagatgcccctgctcccacaggggccccctgtccccagagggcccccgtcaccatggtggtcccaccagtgtggtagcttttgaccttatagtgacccagtgctctcatggtgtcctcatgtcacccagggtcccccacctccacagtagccgcctatgatggtgtcccctgcctatggtgacccttgtccccatggcaagccccagtggctctggcctccagaggtgactcccaccccatggtgttccctacccactatccagggcgattctctttggtccctcactgacctcctctgacctcacatggaccctctccctgctagggatccccaggaaaggatggagtgcctggtatccgaggagaaaaaggagatgttggcttcatgggtccccggggcctcaaggtaggaaagaaacaagattggtttttttctggtcaggaaggcctaatgttgaagggcgagggacctggggtcagatattagggcactgggtcagaggttggagtagctgaggcctgtttggagagttagtttcagggtgaagggggtcacagagtgaggtgtctgggaatcacttcttcatctgcttttctccctcagggtgaacggggagtgaagggagcctgtggccttgatggagagaagggagacaaggtacagaggggatgggggctggggggctacgtggcctggggcctaaggctcaccccactgcctgatgcctgcagggagaagctggtcccccaggccgccccgggctggcaggacacaaaggagagatggtgagtgtgggcacgctcagaatgagggggccacgggtggacgggggccaagttcatgtctttttttctccagggggagcctggtgtgccgggccagtcgggggcccctggcaaggagggcctgatcggtcccaaggtacagggtctgtggacagtggacatgacagggagtcaggatggggcagggaagctcatggtcgggtcatgggggtgtagggacaaggaaggctgtagagggttgggactttgggggctgaagtggggctggtctcgaggtgtcaaggtgggttggggtcacagtggagttaggatgaaagcatgggaggtggagggggcatgtgcatcagggcagggggctatagtggagttggagtcatggggatcacatctggttggctcacaggtgcttgggttacagaaggtttgggcattaggccagggagctcatgggagttcagggaggttccagagctgagggaggtcagggcagaaggtctctcatgcttcttctgttcccagggtgaccgaggctttgacgggcagccaggccccaagggtgaccagggcgagaaaggggagcgggtgagttgaagccatggtcatggtgaattgaggggagcgtgcactttgggagagggtccatctctggggcctctgattactgactctgtcctatatctccccagggaaccccaggaattgggggcttcccaggccccagtggaaatgatggctctgctggtcccccagggccacctggcagtgttggtcccagaggccccgaaggacttcagggccagaaggtaaggggccccagctctgactcctgatccctgaaccttccctacccttccaacctcataaccatcttccagcctgcctgccccaacctctgaagctgtggcccccaacctgcctgactctgatccccactgcctctgaccctgctcacttggtccctgtgtctgacagggtgagcgaggtccccccggagagagagtggtgggggctcctggggtccctggagctcctggcgagagaggggagcaggtgagtagggattccaaggcttgggtcagagatcggggtgacttctgttgtccctgaggtcagaggtcacagcctggtcccatctgttgcacataggggcggccagggcctgccggtcctcgaggcgagaagggagaagctgcactgacggtgagtgtgggcctggatgggcctgggagggcctgggtgggcctgggtgggctggggccctacctccctcacccagcaccctgacccctgggccctggctccatgcagtctcaccatagtccctgtattatgtgccctatgtccttcctgtgggccatgggttctttatggtccctgtggtcttctgctcccaggaggatgacatccggggctttgtgcgccaagagatgagtcagcactgtggtgagtggtgcccagcccgcagtctcccactccaccccagcaccctaggcaagggcaggcaggcccctagaacttacagggcaagcagtcaagaagatggggggatggatggatacacagaaggacacatgtgctgcaggactgacacatgacatgtgtccccagtggagggagacacacaggcagatgaggattgccatgcagtgctctcagatgtccagcttggctgtgtggggagtgggatgatggtgggagcagagctggtccccttgggcctgacctggacccggtgggaggggcatcagagtgaagctgtctcttcccgtctctgtctgcaccacctgcctgtttctgtgtctggcctgcttctgtctcttgccttttgttggcctgttcccaacttccctctcctctgccttcttctctttttccatctctctatctacctcccaccctctctcttcctctctctcctgttaccctctcctgctatctctttgtgtatctctacccctctgcctgtgtgtctctgtctgtctctccatcttcccatccttctctctgtcattgtctctctatccctctctgccccctctagcctgccagggccagttcatcgcatctggatcacgtgagtagttttctactcccagaactttcttcaccccaggccctgccctgcctatcaactggggtcctctcaggggggttggctgggatggctgcccatggtgacttcagggccctgaggcccctgctcttggctccaggacccctccctagttatgctgcagacactgccggctcccagctccatgctgtgcctgtgctccgcgtctctcatgcagaggaggaaggtgaggacagctgaacccgtggggcagctatgggtggggccgagacacgcacatgggtgtccatgaatgcagggcacacgccaagcacgtagggtctgcatgcagggcacacgcatgggcactgtgtgcacacagtggaaatcagtgctgcccaccttgccccggggccagcagccactgctcccagcacaccctgccctacctgcagagcgggtaccccctgaggatgatgagtactctgaatactccgagtattctgtggaggagtaccaggaccctgaagctccttgggatagtgatggtgagaatggggggctgccagcggggtctggggaggggcaggcagggctgagccctgctgacctccccctgacctttcaaccctctctgattcccacaaaccctgctgacttgaccccattggcccagacccctgttccctgccactggatgagggctcctgcactgcctacaccctgcgctggtaccatcgggctgtgacaggcagcacagaggcctgtcacccttttgtctatggtggctgtggagggaatgccaaccgttttgggacccgtgaggcctgcgagcgccgctgcccaccccgggtggtccagagccaggggacaggtatgggctgagcccccaccgtggggaactgggcactgagcctgcctggatcgggttctgggggaggagtccttgggccagggttccaggtcagggtcctggaggagacgctccctcgcagtaggggacctggggcagacgcccagaccaaagagctgaatatagagccccagccgtggagcccccagtagggtccccttccatgttccctcctttaaagacctaagtatggacccctctgaggtcagagcccccacttcctgttgtagcctccgctccctccccttggcggtgcctctgcctgagcgtctccggggaaggtcagatggctgacgaccgtttccaacctgtcctcaccaggtactgcccaggactgaggcccagataatgagctgagattcagcatcccctggaggagtcggggtctcagcagaaccccactgtccctccccttggtgctagaggcttgtgtgcacgtgagcgtgcgtgtgcacgtccgttatttcagtgacttggtcccgtgggtctagccttcccccctgtggacaaacccccattgtggctcctgccaccctggcagatgactcactgtgggggggtggctgtgggcagtgagcggatgtgactggcgtctgacccgccccttgacccaagcctgtgatgacatggtgctgattctggggggcattaaagctgctgttttaaaaggctcctgttgtgactgtttgggaagatggggggtttcaagggggaaggttttccttggggggttggtattattctgcatgggtacagagtccctctgcccagtcctggtcactgtcttgtgattctcagtccccaacttgtccccggaaaagagtagatagggtgggggctaaggacacccccgggagggatgagtcataggtggggggctgcctcatgccaggaagcatgtaccagctcccaccccagggggctgagggagataaatgggccctgaagcggggtagagggtcagaccacaggacagtagtgcctggccccagccccaggcagccacagcaggctgccttaccccagaagcagctggtggcggtaggactgggttgggtcgggatgggaagggtcttggaggttgagtggatgtggggtttggctttatggagggcttggacccaggggactctgggatctctggctgcttttctgcctctgagatccgattcctgcccttctgtttcctggatcagctgcaagctctcctgctgagaaccgcctgccctcctgtggactctgtgtttctgtctgaatctttctttccatcatgctgtctgtctctgggatggtttctgtctgtctttttcttctagtctccattttgctctgcctccatctccttcatctccctctcttgctgtccctctgtctctggatttctttgtttctttttttctgtcttgctttctgcctctttgtctcattctggctctcctcttgtctccccttctctgtctctggcctggcctggcctctctaacccctttctcggtgtcttcctctctctccatcccccgctctgtcactctgcccttgccatctgtctctgtccatggaccccagttgaccagagcccctgccctgagcccattttctccttgcagcctgacctcacgatgaccaggtgtgctctgctgttgctgatggtcctgatgttgggcagagtcctggttgtcccagtgacccctatcccaaccttccagctccgccctcagaattctccccagaccactccccgacctgcggcctcagagagcccctcagctgctcccacatggccgtgggctgcccagagccactgcagccccacccgccaccctggctcgcgcattgtcctatcgctggatgtccccatcggcctcttgcagatcttactggagcaagcccgggccagggctgccagggagcaggccaccaccaacgcccgcatcctggcccgtgtcggccactgctgagcctgagagagggggtcacagtgatagggccaccctggatgggaagacctggagggcagccacacagctggacggatgctgccacatctgggcatacagtgtctggacgctgccacatctgggcatacagtgtctggacactgccacatggagccactgtcatgcaggtcatatcagatctgagtgccccacagagtcacagtgtgtctggacagcctggacattggacattgctaagttgggtcactgccacatggagtcttgccatgcctgtgtgccccacagacctaatatatgtccggacagcttggatgctgccacgtaaggtcactgctgtggcgagtcttgctatgtctgggtgccccatagtcacagaacacctggacaccgccacatgcagtcatcatcatgttactttcaggagcctcaacacgagagctcaacactgcctccgaccagtccctctgaggcccacaggtctgtcatcccataggccaccacacagagaaatgctggctgagggtcacttgcttgctctgtgccccatgaggcagcacctgccccagatggacggggctgtgaggggtgtctccaggcacaaaggcccgaacacaggaagcctgtgaccatggcagccttgtcttatgggcgcatatgtgcgtgtgtggctgagtctctgacagctgtgagtgtgtgtgagcagggtaagggtacgtgaggggtctgagaggagtgggtgcttgtcccccaaacctgcatgaagcaagaacaactcctggccaggccctgtcctccccacgtacccctgcatccccagcctcgacccagggacatgcagggctcacaggagacagggctcaggctgccggagctccaaccaaactctgtcccacttcacgcacggactgtcctgggcaaaggtgttcacctttccgagcctcggtttccttatctgtaaagcaaagcgacaccagcaagcctgtgagcattgtgtatatagcagacatggaggtcctgcagcaggaggtgctcaataaacacaaagcgactgaaggatgggaccagcaagcctgtgagcattgtgtatgtagcagacatggaggtcctgcagcaggaggtgctcaataaacacaaagcgactgaaggatgggatgtgcgagaatcccagtggtgtgcacccaggccgcgacacatggtgggtgagtcatacctggcttctctgccttcctccctagctccccggttaactgacctggtcccttggtttggaaggactaggttttgcctgatttcacagcccaactccattgctgggccagagacagaactgactttccaggcagtgtggacgggcttgcccgcagagggggcaggcactctgggctgtgcagacaactctaggtggacatgaaggcagacgctgggtggcatgggcagctctggcgggagagggagactgtactggccacagcgtggccggctgactggagtgggggcactggcgctgccctcacagttgtaagcagccctgtgggggcgggcctacagtgggctggggaggcggggctgcaggagccgcaggagtcgcttctctctcttcagagtgctaggcggggttaccccactctggagctgcagggggcagtggccctggccagtttggttgcaggatggacagaggctcgttaggaggcagctccctgaccgacctggggccggggagcagcaggcggggtaggcacgggacagcgtggggagggtggagggttagggaaagacctggatgaagtcagggtggtgctggaggggtgcgagagtgttggggggtctctcctggtttaggggtgctctgagggccattcatctgtcagtggcccgaaggagggggaaaactgtcgccctgcaagggagagggggctgggccaagggggaactataaatagtgtcttcctccagcccagggggagggaccgccagctggcgctgcccaggccctcctgctctgctctttgctggcctccaagggatcatgtttgtccaggtttcctcttggggtcacaccagtttggggaagtctagaggctcatttaggatgggtttcacatgatgtggctttagcccttaaaccagcacttctagggtgtctgctgtgtgccctgtgccagtcctgagcttctctgaacacctgctgtgtactcagtttggtcatgaacctctctgaaccctttctgtgtgcccttgctggtcctgaatccctaagcacctactgtacgccctgtggcaggctggaaggaggaagtgcagatcagggttcccaggctgcttggtgacatggttctataacctgaagtcagaacttcacactccttgtgagccctgggcccagggagacacaggggacaatcctttgctggaaatggccagaggaagctggaattcctggaaactcctgaacctcccagtggacagcagggctgggggtggagagatatatgtgggaagggaggcagcagagagcagcaggccccactgcagcctgcctgtctctgcacatgctggggtgcaggacttgtgagtgtgtgtgcgtctgtgtgtgcatgtgcagctgtgccagtgtctctgtgtgcatcagtgtgtgggcctgtgtggcatgcactgaaacccctgggtctttatgctgcaaagggtggtttgtgggccagatgtggtggctaatggctataaacccagggctttgggaggttgaggcgggaggatcgcttgaggccaggagttcaaggctgcagtgagccatgattgcactatgtgctccaggctgggtaacaggagcgagactgtgtgtgtgtgtgtgtgtgtgtgtgtgtgtgtgtgtgtgtgtgtgtgtgtggtgggatggtttggcagttctgtcaggactggccagtagatacagggactgggaagagtttgagctttgagaactggccaccacatggcttctaggctgggacactgggaggaagtccagtggtcagtgcagagggcaccctgggagccaaccagggtcaggccagccaggttcatggtgggcagaggctgagcagaacatgttcacacgtgtgtacagacatcccagcatacttcccacgcctgggacagaacagctggctcactttcggatatactgaggaggaaaaagccatgagggccagagattctaccgggcatccgctgatgctgagagagcagacgctgggacagcatctccatggagaggacacaggggagtgggagcacacatgtgaaggtggactgtgcgattccactgtagtgtggcaggcaaggtctggaaggctgggagttgagctgagtccatgctgcactgtggactcgctttgtgatcttggacccttctccctcttcctgaccctcagtttcccacctgacaaacagggccatgggaggggagatggagaatatcctcagagcagatgtggacggtggccttggggaggaaccccaggcatctcctgatgttgacctgtggccttccagctggacatagggccttgaaggagggtgcctgggtcagccacgggtagactttctggggaagagaggaaggtgcagagctgttgcatttcctgggaaccaggctcatcctgtctgggtgtgaggatgccttcccagagatagccctggccccctgcccaggccagctgtcctctaccccc

SEQ ID NO: 5305 - DNA, 20 bp, Artificial Sequence
  Description of Artificial Sequence: Synthetic oligonucleotide
  Target: COL7A1; (-) strand; PAM type: NAAAAC; PAM sequence: GAAAAC
tcagtggcccgaaggagggg

SEQ ID NO: 5306 - DNA, 20 bp, Artificial Sequence
  Description of Artificial Sequence: Synthetic oligonucleotide
  Target: COL7A1; (-) strand; PAM type: NAAAAC; PAM sequence: AAAAAC
gcaaacctggcctgaatgga

SEQ ID NO: 5307 - DNA, 20 bp, Artificial Sequence
  Description of Artificial Sequence: Synthetic oligonucleotide
  Target: COL7A1; (-) strand; PAM type: NAAAAC; PAM sequence: TAAAAC
cagacctgctcactgcttcc

SEQ ID NO: 5308 - DNA, 20 bp, Artificial Sequence
  Description of Artificial Sequence: Synthetic oligonucleotide
  Target: COL7A1; (-) strand; PAM type: NAAAAC; PAM sequence: GAAAAC
tgccagggagttcttgctca

SEQ ID NO: 5309 - DNA, 20 bp, Artificial Sequence
  Description of Artificial Sequence: Synthetic oligonucleotide
  Target: COL7A1; (+) strand; PAM type: NAAAAC; PAM sequence: CAAAAC
agttgggctgtgaaatcagg

SEQ ID NO: 5310 - DNA, 20 bp, Artificial Sequence
  Description of Artificial Sequence: Synthetic oligonucleotide
  Target: COL7A1; (+) strand; PAM type: NAAAAC; PAM sequence: GAAAAC
aataataccaaccccccaag

SEQ ID NO: 5311 - DNA, 20 bp, Artificial Sequence
  Description of Artificial Sequence: Synthetic oligonucleotide
  Target: COL7A1; (+) strand; PAM type: NAAAAC; PAM sequence: TAAAAC
cagtcacaacaggagccttt

SEQ ID NO: 5312 - DNA, 20 bp, Artificial Sequence
  Description of Artificial Sequence: Synthetic oligonucleotide
  Target: COL7A1; (+) strand; PAM type: NAAAAC; PAM sequence: CAAAAC
ctcgcaggcctcacgggtcc

SEQ ID NO: 5313 - DNA, 20 bp, Artificial Sequence
  Description of Artificial Sequence: Synthetic oligonucleotide
  Target: COL7A1; (+) strand; PAM type: NAAAAC; PAM sequence: GAAAAC
tgaagaaagttctgggagta

SEQ ID NO: 5314 - DNA, 20 bp, Artificial Sequence
  Description of Artificial Sequence: Synthetic oligonucleotide
  Target: COL7A1; (+) strand; PAM type: NAAAAC; PAM sequence: AAAAAC
ttaggccttcctgaccagaa

SEQ ID NO: 5315 - DNA, 20 bp, Artificial Sequence
  Description of Artificial Sequence: Synthetic oligonucleotide
  Target: COL7A1; (+) strand; PAM type: NAAAAC; PAM sequence: AAAAAC
ggcccagatctccctgaaat

SEQ ID NO: 5316 - DNA, 20 bp, Artificial Sequence
  Description of Artificial Sequence: Synthetic oligonucleotide
  Target: COL7A1; (+) strand; PAM type: NAAAAC; PAM sequence: GAAAAC
gagcccctttctgaccctaa

SEQ ID NO: 5317 - DNA, 20 bp, Artificial Sequence
  Description of Artificial Sequence: Synthetic oligonucleotide
  Target: COL7A1; (+) strand; PAM type: NAAAAC; PAM sequence: GAAAAC
gaacatgggccccaaggagt

SEQ ID NO: 5318 - DNA, 20 bp, Artificial Sequence
  Description of Artificial Sequence: Synthetic oligonucleotide
  Target: COL7A1; (+) strand; PAM type: NAAAAC; PAM sequence: CAAAAC
aggtggccccaatgggcatg

SEQ ID NO: 5319 - DNA, 20 bp, Artificial Sequence
  Description of Artificial Sequence: Synthetic oligonucleotide
  Target: COL7A1; (+) strand; PAM type: NAAAAC; PAM sequence: GAAAAC
agtctccccacggtcaccct

SEQ ID NO: 5320 - DNA, 20 bp, Artificial Sequence
  Description of Artificial Sequence: Synthetic oligonucleotide
  Target: COL7A1; (+) strand; PAM type: NAAAAC; PAM sequence: GAAAAC
cgtgcctcctgggacaccag

SEQ ID NO: 5321 - DNA, 20 bp, Artificial Sequence
  Description of Artificial Sequence: Synthetic oligonucleotide
  Target: COL7A1; (+) strand; PAM type: NAAAAC; PAM sequence: GAAAAC
gtcaggggtcagaggttgca

SEQ ID NO: 5322 - DNA, 20 bp, Artificial Sequence
  Description of Artificial Sequence: Synthetic oligonucleotide
  Target: COL7A1; (+) strand; PAM type: NAAAAC; PAM sequence: AAAAAC
aaactccatctcaaaaaaaa

SEQ ID NO: 5323 - DNA, 20 bp, Artificial Sequence
  Description of Artificial Sequence: Synthetic oligonucleotide
  Target: COL7A1; (+) strand; PAM type: NAAAAC; PAM sequence: TAAAAC
gtcagaaagggggattctac

SEQ ID NO: 5324 - DNA, 20 bp, Artificial Sequence
  Description of Artificial Sequence: Synthetic oligonucleotide
  Target: COL7A1; (+) strand; PAM type: NAAAAC; PAM sequence: GAAAAC
tccagcaacagcaggtccct

SEQ ID NO: 5325 - DNA, 20 bp, Artificial Sequence
  Description of Artificial Sequence: Synthetic oligonucleotide
  Target: COL7A1; (+) strand; PAM type: NAAAAC; PAM sequence: CAAAAC
caaactccaaccaccccctc

SEQ ID NO: 5326 - DNA, 20 bp, Artificial Sequence
  Description of Artificial Sequence: Synthetic oligonucleotide
  Target: COL7A1; (+) strand; PAM type: NAAAAC; PAM sequence: GAAAAC
cgatcgcctttgtcacccta

SEQ ID NO: 5327 - DNA, 20 bp, Artificial Sequence
  Description of Artificial Sequence: Synthetic oligonucleotide
  Target: COL7A1; (+) strand; PAM type: NAAAAC; PAM sequence: AAAAAC
gcttcttccttctctcttgt

SEQ ID NO: 5328 - DNA, 20 bp, Artificial Sequence
  Description of Artificial Sequence: Synthetic oligonucleotide
  Target: COL7A1; (+) strand; PAM type: NAAAAC; PAM sequence: GAAAAC
ggctccccatctccagatca

SEQ ID NO: 5329 - DNA, 20 bp, Artificial Sequence
  Description of Artificial Sequence: Synthetic oligonucleotide
  Target: COL7A1; (+) strand; PAM type: NAAAAC; PAM sequence: CAAAAC
tagggggtctctaggttccc

SEQ ID NO: 5330 - DNA, 20 bp, Artificial Sequence
  Description of Artificial Sequence: Synthetic oligonucleotide
  Target: COL7A1; (-) strand; PAM type: NNAGAAW; PAM sequence: GGAGAAT
agggccatgggaggggagat

SEQ ID NO: 5331 - DNA, 20 bp, Artificial Sequence
  Description of Artificial Sequence: Synthetic oligonucleotide
  Target: COL7A1; (-) strand; PAM type: NNAGAAW; PAM sequence: CGAGAAT
cgactgaaggatgggatgtg

SEQ ID NO: 5332 - DNA, 20 bp, Artificial Sequence
  Description of Artificial Sequence: Synthetic oligonucleotide
  Target: COL7A1; (-) strand; PAM type: NNAGAAW; PAM sequence: AGAGAAA
catcccataggccaccacac

SEQ ID NO: 5333 - DNA, 20 bp, Artificial Sequence
  Description of Artificial Sequence: Synthetic oligonucleotide
  Target: COL7A1; (-) strand; PAM type: NNAGAAW; PAM sequence: TCAGAAT
ccaaccttccagctccgccc

SEQ ID NO: 5334 - DNA, 20 bp, Artificial Sequence
  Description of Artificial Sequence: Synthetic oligonucleotide
  Target: COL7A1; (-) strand; PAM type: NNAGAAW; PAM sequence: TGAGAAT
gctccttgggatagtgatgg

SEQ ID NO: 5335 - DNA, 20 bp, Artificial Sequence
  Description of Artificial Sequence: Synthetic oligonucleotide
  Target: COL7A1; (-) strand; PAM type: NNAGAAW; PAM sequence: CGAGAAA
ggccccaagggtgaccaggg

SEQ ID NO: 5336 - DNA, 20 bp, Artificial Sequence
  Description of Artificial Sequence: Synthetic oligonucleotide
  Target: COL7A1; (-) strand; PAM type: NNAGAAW; PAM sequence: TCAGAAT
gatggtgagtgtgggcacgc

SEQ ID NO: 5337 - DNA, 20 bp, Artificial Sequence
  Description of Artificial Sequence: Synthetic oligonucleotide
  Target: COL7A1; (-) strand; PAM type: NNAGAAW; PAM sequence: AAAGAAA
ccccggggcctcaaggtagg

SEQ ID NO: 5338 - DNA, 20 bp, Artificial Sequence
  Description of Artificial Sequence: Synthetic oligonucleotide
  Target: COL7A1; (-) strand; PAM type: NNAGAAW; PAM sequence: GGAGAAA
atggagtgcctggtatccga

SEQ ID NO: 5339 - DNA, 20 bp, Artificial Sequence
  Description of Artificial Sequence: Synthetic oligonucleotide
  Target: COL7A1; (-) strand; PAM type: NNAGAAW; PAM sequence: TGAGAAA
agggtctggagtccttgggg

SEQ ID NO: 5340 - DNA, 20 bp, Artificial Sequence
  Description of Artificial Sequence: Synthetic oligonucleotide
  Target: COL7A1; (-) strand; PAM type: NNAGAAW; PAM sequence: TTAGAAT
tgagtggatcttgtatgata

SEQ ID NO: 5341 - DNA, 20 bp, Artificial Sequence
  Description of Artificial Sequence: Synthetic oligonucleotide
  Target: COL7A1; (-) strand; PAM type: NNAGAAW; PAM sequence: TCAGAAA
tttgctgggttttcttaggg

SEQ ID NO: 5342 - DNA, 20 bp, Artificial Sequence
  Description of Artificial Sequence: Synthetic oligonucleotide
  Target: COL7A1; (-) strand; PAM type: NNAGAAW; PAM sequence: CCAGAAA
agccacccttagcttggtcc

SEQ ID NO: 5343 - DNA, 20 bp, Artificial Sequence
  Description of Artificial Sequence: Synthetic oligonucleotide
  Target: COL7A1; (-) strand; PAM type: NNAGAAW; PAM sequence: AGAGAAA
gcatttcagggagaacgggg

SEQ ID NO: 5344 - DNA, 20 bp, Artificial Sequence
  Description of Artificial Sequence: Synthetic oligonucleotide
  Target: COL7A1; (-) strand; PAM type: NNAGAAW; PAM sequence: CCAGAAT
ccttcacccagactttgtcc

SEQ ID NO: 5345 - DNA, 20 bp, Artificial Sequence
  Description of Artificial Sequence: Synthetic oligonucleotide
  Target: COL7A1; (-) strand; PAM type: NNAGAAW; PAM sequence: CCAGAAA
acttgggcagtggggacaca

SEQ ID NO: 5346 - DNA, 20 bp, Artificial Sequence
  Description of Artificial Sequence: Synthetic oligonucleotide
  Target: COL7A1; (-) strand; PAM type: NNAGAAW; PAM sequence: AGAGAAA
catccttgtcttccttaggg

SEQ ID NO: 5347 - DNA, 20 bp, Artificial Sequence
  Description of Artificial Sequence: Synthetic oligonucleotide
  Target: COL7A1; (-) strand; PAM type: NNAGAAW; PAM sequence: ACAGAAA
acaaccatggagctacaggc

SEQ ID NO: 5348 - DNA, 20 bp, Artificial Sequence
  Description of Artificial Sequence: Synthetic oligonucleotide
  Target: COL7A1; (-) strand; PAM type: NNAGAAW; PAM sequence: CCAGAAA
gcccagacatacagatgcat

SEQ ID NO: 5349 - DNA, 20 bp, Artificial Sequence
  Description of Artificial Sequence: Synthetic oligonucleotide
  Target: COL7A1; (-) strand; PAM type: NNAGAAW; PAM sequence: CAAGAAA
gcagctgcggcgaaacctgc

SEQ ID NO: 5350 - DNA, 20 bp, Artificial Sequence
  Description of Artificial Sequence: Synthetic oligonucleotide
  Target: COL7A1; (-) strand; PAM type: NNAGAAW; PAM sequence: GTAGAAT
tccctggcacacaggtttta

SEQ ID NO: 5351 - DNA, 20 bp, Artificial Sequence
  Description of Artificial Sequence: Synthetic oligonucleotide
  Target: COL7A1; (-) strand; PAM type: NNAGAAW; PAM sequence: GGAGAAA
caggtgtccgaggcccagca

SEQ ID NO: 5352 - DNA, 20 bp, Artificial Sequence
  Description of Artificial Sequence: Synthetic oligonucleotide
  Target: COL7A1; (-) strand; PAM type: NNAGAAW; PAM sequence: TAAGAAA
tagggtctgtgggtggaggg

SEQ ID NO: 5353 - DNA, 20 bp, Artificial Sequence
  Description of Artificial Sequence: Synthetic oligonucleotide
  Target: COL7A1; (-) strand; PAM type: NNAGAAW; PAM sequence: AGAGAAA
gtttcacagggtgaagttgg

SEQ ID NO: 5354 - DNA, 20 bp, Artificial Sequence
  Description of Artificial Sequence: Synthetic oligonucleotide
  Target: COL7A1; (-) strand; PAM type: NNAGAAW; PAM sequence: GGAGAAA
ctgctgttgctggacccaaa

SEQ ID NO: 5355 - DNA, 20 bp, Artificial Sequence
  Description of Artificial Sequence: Synthetic oligonucleotide
  Target: COL7A1; (-) strand; PAM type: NNAGAAW; PAM sequence: GGAGAAA
ttggcccccctggaaagaaa

SEQ ID NO: 5356 - DNA, 20 bp, Artificial Sequence
  Description of Artificial Sequence: Synthetic oligonucleotide
  Target: COL7A1; (-) strand; PAM type: NNAGAAW; PAM sequence: AAAGAAA
ggccccgttggcccccctgg

SEQ ID NO: 5357 - DNA, 20 bp, Artificial Sequence
  Description of Artificial Sequence: Synthetic oligonucleotide
  Target: COL7A1; (-) strand; PAM type: NNAGAAW; PAM sequence: TTAGAAT
gagagaaggaagaagcagag

SEQ ID NO: 5358 - DNA, 20 bp, Artificial Sequence
  Description of Artificial Sequence: Synthetic oligonucleotide
  Target: COL7A1; (-) strand; PAM type: NNAGAAW; PAM sequence: AGAGAAT
tgcccctgcgggcggggaat

SEQ ID NO: 5359 - DNA, 20 bp, Artificial Sequence
  Description of Artificial Sequence: Synthetic oligonucleotide
  Target: COL7A1; (-) strand; PAM type: NNAGAAW; PAM sequence: GTAGAAA
aaggggtctgggggttcttg

SEQ ID NO: 5360 - DNA, 20 bp, Artificial Sequence
  Description of Artificial Sequence: Synthetic oligonucleotide
  Target: COL7A1; (-) strand; PAM type: NNAGAAW; PAM sequence: GTAGAAT
ggcctctgggggactgggtg

SEQ ID NO: 5361 - DNA, 20 bp, Artificial Sequence
  Description of Artificial Sequence: Synthetic oligonucleotide
  Target: COL7A1; (-) strand; PAM type: NNAGAAW; PAM sequence: GCAGAAA
tagtgggcgtagtgggaagg

SEQ ID NO: 5362 - DNA, 20 bp, Artificial Sequence
  Description of Artificial Sequence: Synthetic oligonucleotide
  Target: COL7A1; (-) strand; PAM type: NNAGAAW; PAM sequence: GGAGAAA
ccgggcttgtgctctggatt

SEQ ID NO: 5363 - DNA, 20 bp, Artificial Sequence
  Description of Artificial Sequence: Synthetic oligonucleotide
  Target: COL7A1; (-) strand; PAM type: NNAGAAW; PAM sequence: AGAGAAA
ccatccctgttcccaggccc

SEQ ID NO: 5364 - DNA, 20 bp, Artificial Sequence
  Description of Artificial Sequence: Synthetic oligonucleotide
  Target: COL7A1; (-) strand; PAM type: NNAGAAW; PAM sequence: TCAGAAT
cagaactcctgcctccccct

SEQ ID NO: 5365 - DNA, 20 bp, Artificial Sequence
  Description of Artificial Sequence: Synthetic oligonucleotide
  Target: COL7A1; (-) strand; PAM type: NNAGAAW; PAM sequence: CCAGAAT
gaagggccggaactgaccat

SEQ ID NO: 5366 - DNA, 20 bp, Artificial Sequence
  Description of Artificial Sequence: Synthetic oligonucleotide
  Target: COL7A1; (-) strand; PAM type: NNAGAAW; PAM sequence: CAAGAAT
tgggtcgtcacttcagggat

SEQ ID NO: 5367 - DNA, 20 bp, Artificial Sequence
  Description of Artificial Sequence: Synthetic oligonucleotide
  Target: COL7A1; (-) strand; PAM type: NNAGAAW; PAM sequence: GGAGAAT
ttccagaggcaagtgggtgt

SEQ ID NO: 5368 - DNA, 20 bp, Artificial Sequence
  Description of Artificial Sequence: Synthetic oligonucleotide
  Target: COL7A1; (-) strand; PAM type: NNAGAAW; PAM sequence: GCAGAAA
aaaccccaggccaggtcttt

SEQ ID NO: 5369 - DNA, 20 bp, Artificial Sequence
  Description of Artificial Sequence: Synthetic oligonucleotide
  Target: COL7A1; (-) strand; PAM type: NNAGAAW; PAM sequence: CAAGAAA
agatgggtggcagggaccta

SEQ ID NO: 5370 - DNA, 20 bp, Artificial Sequence
  Description of Artificial Sequence: Synthetic oligonucleotide
  Target: COL7A1; (-) strand; PAM type: NNAGAAW; PAM sequence: CAAGAAT
gcctccgctgactcaggctc

SEQ ID NO: 5371 - DNA, 20 bp, Artificial Sequence
  Description of Artificial Sequence: Synthetic oligonucleotide
  Target: COL7A1; (-) strand; PAM type: NNAGAAW; PAM sequence: TCAGAAA
ggctgccagggagttcttgc

SEQ ID NO: 5372 - DNA, 20 bp, Artificial Sequence
  Description of Artificial Sequence: Synthetic oligonucleotide
  Target: COL7A1; (+) strand; PAM type: NNAGAAW; PAM sequence: CCAGAAA
tctgcaccttcctctcttcc

SEQ ID NO: 5373 - DNA, 20 bp, Artificial Sequence
  Description of Artificial Sequence: Synthetic oligonucleotide
  Target: COL7A1; (+) strand; PAM type: NNAGAAW; PAM sequence: GTAGAAT
tcagcatcagcggatgcccg

SEQ ID NO: 5374 - DNA, 20 bp, Artificial Sequence
  Description of Artificial Sequence: Synthetic oligonucleotide
  Target: COL7A1; (+) strand; PAM type: NNAGAAW; PAM sequence: ACAGAAA
ttcaggaccagcaagggcac

SEQ ID NO: 5375 - DNA, 20 bp, Artificial Sequence
  Description of Artificial Sequence: Synthetic oligonucleotide
  Target: COL7A1; (+) strand; PAM type: NNAGAAW; PAM sequence: GGAGAAT
caggtcggggagtggtctgg

SEQ ID NO: 5376 - DNA, 20 bp, Artificial Sequence
  Description of Artificial Sequence: Synthetic oligonucleotide
  Target: COL7A1; (+) strand; PAM type: NNAGAAW; PAM sequence: GGAGAAA
atcgtgaggtcaggctgcaa

SEQ ID NO: 5377 - DNA, 20 bp, Artificial Sequence
  Description of Artificial Sequence: Synthetic oligonucleotide
  Target: COL7A1; (+) strand; PAM type: NNAGAAW; PAM sequence: CGAGAAA
atggagagagaggaagacac

SEQ ID NO: 5378 - DNA, 20 bp, Artificial Sequence
  Description of Artificial Sequence: Synthetic oligonucleotide
  Target: COL7A1; (+) strand; PAM type: NNAGAAW; PAM sequence: CCAGAAT
aaggggagacaagaggagag

SEQ ID NO: 5379 - DNA, 20 bp, Artificial Sequence
  Description of Artificial Sequence: Synthetic oligonucleotide
  Target: COL7A1; (+) strand; PAM type: NNAGAAW; PAM sequence: GCAGAAA
agccagaatgagacaaagag

SEQ ID NO: 5380 - DNA, 20 bp, Artificial Sequence
  Description of Artificial Sequence: Synthetic oligonucleotide
  Target: COL7A1; (+) strand; PAM type: NNAGAAW; PAM sequence: ACAGAAA
acaaagaggcagaaagcaag

SEQ ID NO: 5381 - DNA, 20 bp, Artificial Sequence
  Description of Artificial Sequence: Synthetic oligonucleotide
  Target: COL7A1; (+) strand; PAM type: NNAGAAW; PAM sequence: AAAGAAA
gcagaaagcaagacagaaaa

SEQ ID NO: 5382 - DNA, 20 bp, Artificial Sequence
  Description of Artificial Sequence: Synthetic oligonucleotide
  Target: COL7A1; (+) strand; PAM type: NNAGAAW; PAM sequence: AAAGAAA
caagacagaaaaaaagaaac

SEQ ID NO: 5383 - DNA, 20 bp, Artificial Sequence
  Description of Artificial Sequence: Synthetic oligonucleotide
  Target: COL7A1; (+) strand; PAM type: NNAGAAW; PAM sequence: GAAGAAA
gcagagcaaaatggagacta

SEQ ID NO: 5384 - DNA, 20 bp, Artificial Sequence
  Description of Artificial Sequence: Synthetic oligonucleotide
  Target: COL7A1; (+) strand; PAM type: NNAGAAW; PAM sequence: ACAGAAA
agactagaagaaaaagacag

SEQ ID NO: 5385 - DNA, 20 bp, Artificial Sequence
  Description of Artificial Sequence: Synthetic oligonucleotide
  Target: COL7A1; (+) strand; PAM type: NNAGAAW; PAM sequence: AAAGAAA
agagacagacagcatgatgg

SEQ ID NO: 5386 - DNA, 20 bp, Artificial Sequence
  Description of Artificial Sequence: Synthetic oligonucleotide
  Target: COL7A1; (+) strand; PAM type: NNAGAAW; PAM sequence: ACAGAAA
tgatggaaagaaagattcag

SEQ ID NO: 5387 - DNA, 20 bp, Artificial Sequence
  Description of Artificial Sequence: Synthetic oligonucleotide
  Target: COL7A1; (+) strand; PAM type: NNAGAAW; PAM sequence: GCAGAAA
gcaggaatcggatctcagag

SEQ ID NO: 5388 - DNA, 20 bp, Artificial Sequence
  Description of Artificial Sequence: Synthetic oligonucleotide
  Target: COL7A1; (+) strand; PAM type: NNAGAAW; PAM sequence: TGAGAAT
tccggggacaagttggggac

SEQ ID NO: 5389 - DNA, 20 bp, Artificial Sequence
  Description of Artificial Sequence: Synthetic oligonucleotide
  Target: COL7A1; (+) strand; PAM type: NNAGAAW; PAM sequence: GCAGAAT
cagagggactctgtacccat

SEQ ID NO: 5390 - DNA, 20 bp, Artificial Sequence
  Description of Artificial Sequence: Synthetic oligonucleotide
  Target: COL7A1; (+) strand; PAM type: NNAGAAW; PAM sequence: CCAGAAT
aacagcagctttaatgcccc

SEQ ID NO: 5391 - DNA, 20 bp, Artificial Sequence
  Description of Artificial Sequence: Synthetic oligonucleotide
  Target: COL7A1; (+) strand; PAM type: NNAGAAW; PAM sequence: ACAGAAT
cagggtcctggtactcctcc

SEQ ID NO: 5392 - DNA, 20 bp, Artificial Sequence
  Description of Artificial Sequence: Synthetic oligonucleotide
  Target: COL7A1; (+) strand; PAM type: NNAGAAW; PAM sequence: GAAGAAA
ggcagggcagggcctggggt

SEQ ID NO: 5393 - DNA, 20 bp, Artificial Sequence
  Description of Artificial Sequence: Synthetic oligonucleotide
  Target: COL7A1; (+) strand; PAM type: NNAGAAW; PAM sequence: GTAGAAA
gggtgaagaaagttctggga

SEQ ID NO: 5394 - DNA, 20 bp, Artificial Sequence
  Description of Artificial Sequence: Synthetic oligonucleotide
  Target: COL7A1; (+) strand; PAM type: NNAGAAW; PAM sequence: ACAGAAA
gagacagaagcaggccagac

SEQ ID NO: 5395 - DNA, 20 bp, Artificial Sequence
  Description of Artificial Sequence: Synthetic oligonucleotide
  Target: COL7A1; (+) strand; PAM type: NNAGAAW; PAM sequence: GGAGAAA
cggcacaccaggctccccct

SEQ ID NO: 5396 - DNA, 20 bp, Artificial Sequence
  Description of Artificial Sequence: Synthetic oligonucleotide
  Target: COL7A1; (+) strand; PAM type: NNAGAAW; PAM sequence: GGAGAAA
cactccccgttcaccctgag

SEQ ID NO: 5397 - DNA, 20 bp, Artificial Sequence
  Description of Artificial Sequence: Synthetic oligonucleotide
  Target: COL7A1; (+) strand; PAM type: NNAGAAW; PAM sequence: CCAGAAA
tcaacattaggccttcctga

SEQ ID NO: 5398 - DNA, 20 bp, Artificial Sequence
  Description of Artificial Sequence: Synthetic oligonucleotide
  Target: COL7A1; (+) strand; PAM type: NNAGAAW; PAM sequence: AGAGAAT
ggaggtcagtgagggaccaa

SEQ ID NO: 5399 - DNA, 20 bp, Artificial Sequence
  Description of Artificial Sequence: Synthetic oligonucleotide
  Target: COL7A1; (+) strand; PAM type: NNAGAAW; PAM sequence: TGAGAAA
gctgcaccaggttgaccctg

SEQ ID NO: 5400 - DNA, 20 bp, Artificial Sequence
  Description of Artificial Sequence: Synthetic oligonucleotide
  Target: COL7A1; (+) strand; PAM type: NNAGAAW; PAM sequence: TTAGAAT
gaccagatcaggctgggggc

SEQ ID NO: 5401 - DNA, 20 bp, Artificial Sequence
  Description of Artificial Sequence: Synthetic oligonucleotide
  Target: COL7A1; (+) strand; PAM type: NNAGAAW; PAM sequence: CCAGAAA
gaaccccttccccctaaacc

SEQ ID NO: 5402 - DNA, 20 bp, Artificial Sequence
  Description of Artificial Sequence: Synthetic oligonucleotide
  Target: COL7A1; (+) strand; PAM type: NNAGAAW; PAM sequence: CCAGAAA
ggggggcctgccagacccta

SEQ ID NO: 5403 - DNA, 20 bp, Artificial Sequence
  Description of Artificial Sequence: Synthetic oligonucleotide
  Target: COL7A1; (+) strand; PAM type: NNAGAAW; PAM sequence: TAAGAAA
ctggagcccctttctgaccc

SEQ ID NO: 5404 - DNA, 20 bp, Artificial Sequence
  Description of Artificial Sequence: Synthetic oligonucleotide
  Target: COL7A1; (+) strand; PAM type: NNAGAAW; PAM sequence: CAAGAAT
tgggaactcagacatgcgac

SEQ ID NO: 5405 - DNA, 20 bp, Artificial Sequence
  Description of Artificial Sequence: Synthetic oligonucleotide
  Target: COL7A1; (+) strand; PAM type: NNAGAAW; PAM sequence: TGAGAAA
acacgtgtgcccagatgtgg

SEQ ID NO: 5406 - DNA, 20 bp, Artificial Sequence
  Description of Artificial Sequence: Synthetic oligonucleotide
  Target: COL7A1; (+) strand; PAM type: NNAGAAW; PAM sequence: ACAGAAT
cacggccagcttcaccctgc

SEQ ID NO: 5407 - DNA, 20 bp, Artificial Sequence
  Description of Artificial Sequence: Synthetic oligonucleotide
  Target: COL7A1; (+) strand; PAM type: NNAGAAW; PAM sequence: ACAGAAA
aggcaacacaggcatcagtc

SEQ ID NO: 5408 - DNA, 20 bp, Artificial Sequence
  Description of Artificial Sequence: Synthetic oligonucleotide
  Target: COL7A1; (+) strand; PAM type: NNAGAAW; PAM sequence: AGAGAAA
tccagtcaggccctggagga

SEQ ID NO: 5409 - DNA, 20 bp, Artificial Sequence
  Description of Artificial Sequence: Synthetic oligonucleotide
  Target: COL7A1; (+) strand; PAM type: NNAGAAW; PAM sequence: AGAGAAA
tgcagggccagcaagaccct

SEQ ID NO: 5410 - DNA, 20 bp, Artificial Sequence
  Description of Artificial Sequence: Synthetic oligonucleotide
  Target: COL7A1; (+) strand; PAM type: NNAGAAW; PAM sequence: AGAGAAT
gctctcctggtagaccctgc

SEQ ID NO: 5411 - DNA, 20 bp, Artificial Sequence
  Description of Artificial Sequence: Synthetic oligonucleotide
  Target: COL7A1; (+) strand; PAM type: NNAGAAW; PAM sequence: CCAGAAA
acaccacctctagtgtgccc

SEQ ID NO: 5412 - DNA, 20 bp, Artificial Sequence
  Description of Artificial Sequence: Synthetic oligonucleotide
  Target: COL7A1; (+) strand; PAM type: NNAGAAW; PAM sequence: TCAGAAA
gatcacagagggttataggg

SEQ ID NO: 5413 - DNA, 20 bp, Artificial Sequence
  Description of Artificial Sequence: Synthetic oligonucleotide
  Target: COL7A1; (+) strand; PAM type: NNAGAAW; PAM sequence: CAAGAAA
catctctgccctgcaggaaa

SEQ ID NO: 5414 - DNA, 20 bp, Artificial Sequence
  Description of Artificial Sequence: Synthetic oligonucleotide
  Target: COL7A1; (+) strand; PAM type: NNAGAAW; PAM sequence: AGAGAAT
gggccctgcaggagtggaag

SEQ ID NO: 5415 - DNA, 20 bp, Artificial Sequence
  Description of Artificial Sequence: Synthetic oligonucleotide
  Target: COL7A1; (+) strand; PAM type: NNAGAAW; PAM sequence: CAAGAAT
ccccacggtcaccctgaaaa

SEQ ID NO: 5416 - DNA, 20 bp, Artificial Sequence
  Description of Artificial Sequence: Synthetic oligonucleotide
  Target: COL7A1; (+) strand; PAM type: NNAGAAW; PAM sequence: CCAGAAT
gcttctaatgctctgaagtc

SEQ ID NO: 5417 - DNA, 20 bp, Artificial Sequence
  Description of Artificial Sequence: Synthetic oligonucleotide
  Target: COL7A1; (+) strand; PAM type: NNAGAAW; PAM sequence: TCAGAAA
agcatcagcaccctgagacc

SEQ ID NO: 5418 - DNA, 20 bp, Artificial Sequence
  Description of Artificial Sequence: Synthetic oligonucleotide
  Target: COL7A1; (+) strand; PAM type: NNAGAAW; PAM sequence: GCAGAAA
agggtcaggggtcagaggtt

SEQ ID NO: 5419 - DNA, 20 bp, Artificial Sequence
  Description of Artificial Sequence: Synthetic oligonucleotide
  Target: COL7A1; (+) strand; PAM type: NNAGAAW; PAM sequence: GGAGAAA
gtgatcagcctgactaacat

SEQ ID NO: 5420 - DNA, 20 bp, Artificial Sequence
  Description of Artificial Sequence: Synthetic oligonucleotide
  Target: COL7A1; (+) strand; PAM type: NNAGAAW; PAM sequence: GGAGAAT
ttactcgggaggttgaggca

SEQ ID NO: 5421 - DNA, 20 bp, Artificial Sequence
  Description of Artificial Sequence: Synthetic oligonucleotide
  Target: COL7A1; (+) strand; PAM type: NNAGAAW; PAM sequence: TCAGAAA
gacccccaaggcaaagaagg

SEQ ID NO: 5422 - DNA, 20 bp, Artificial Sequence
  Description of Artificial Sequence: Synthetic oligonucleotide
  Target: COL7A1; (+) strand; PAM type: NNAGAAW; PAM sequence: TGAGAAA
gataacccaggctcatgtcc

SEQ ID NO: 5423 - DNA, 20 bp, Artificial Sequence
  Description of Artificial Sequence: Synthetic oligonucleotide
  Target: COL7A1; (+) strand; PAM type: NNAGAAW; PAM sequence: GAAGAAA
atgccctgaggataggggag

SEQ ID NO: 5424 - DNA, 20 bp, Artificial Sequence
  Description of Artificial Sequence: Synthetic oligonucleotide
  Target: COL7A1; (+) strand; PAM type: NNAGAAW; PAM sequence: GAAGAAT
gtggggggaatgaccagtga

SEQ ID NO: 5425 - DNA, 20 bp, Artificial Sequence
  Description of Artificial Sequence: Synthetic oligonucleotide
  Target: COL7A1; (+) strand; PAM type: NNAGAAW; PAM sequence: GCAGAAA
agatgatccagggctgccct

SEQ ID NO: 5426 - DNA, 20 bp, Artificial Sequence
  Description of Artificial Sequence: Synthetic oligonucleotide
  Target: COL7A1; (+) strand; PAM type: NNAGAAW; PAM sequence: AGAGAAA
ccgggtcaccctggtgatag

SEQ ID NO: 5427 - DNA, 20 bp, Artificial Sequence
  Description of Artificial Sequence: Synthetic oligonucleotide
  Target: COL7A1; (+) strand; PAM type: NNAGAAW; PAM sequence: TCAGAAA
cctagttcaagggtaaagga

SEQ ID NO: 5428 - DNA, 20 bp, Artificial Sequence
  Description of Artificial Sequence: Synthetic oligonucleotide
  Target: COL7A1; (+) strand; PAM type: NNAGAAW; PAM sequence: GTAGAAA
atgacctagacctcaaccct

SEQ ID NO: 5429 - DNA, 20 bp, Artificial Sequence
  Description of Artificial Sequence: Synthetic oligonucleotide
  Target: COL7A1; (+) strand; PAM type: NNAGAAW; PAM sequence: AGAGAAA
tcctggtggcccctgaatgt

SEQ ID NO: 5430 - DNA, 20 bp, Artificial Sequence
  Description of Artificial Sequence: Synthetic oligonucleotide
  Target: COL7A1; (+) strand; PAM type: NNAGAAW; PAM sequence: CCAGAAA
tcaagggcaagaagtcagaa

SEQ ID NO: 5431 - DNA, 20 bp, Artificial Sequence
  Description of Artificial Sequence: Synthetic oligonucleotide
  Target: COL7A1; (+) strand; PAM type: NNAGAAW; PAM sequence: AGAGAAA
caccctgaagagagagggtg

SEQ ID NO: 5432 - DNA, 20 bp, Artificial Sequence
  Description of Artificial Sequence: Synthetic oligonucleotide
  Target: COL7A1; (+) strand; PAM type: NNAGAAW; PAM sequence: TCAGAAT
tggagctgtgcccaccatat

SEQ ID NO: 5433 - DNA, 20 bp, Artificial Sequence
  Description of Artificial Sequence: Synthetic oligonucleotide
  Target: COL7A1; (+) strand; PAM type: NNAGAAW; PAM sequence: GGAGAAA
atcctcagagtcaccctgaa

SEQ ID NO: 5434 - DNA, 20 bp, Artificial Sequence
  Description of Artificial Sequence: Synthetic oligonucleotide
  Target: COL7A1; (+) strand; PAM type: NNAGAAW; PAM sequence: CTAGAAA
ccacgatcgcctttgtcacc

SEQ ID NO: 5435 - DNA, 20 bp, Artificial Sequence
  Description of Artificial Sequence: Synthetic oligonucleotide
  Target: COL7A1; (+) strand; PAM type: NNAGAAW; PAM sequence: AGAGAAA
tgggggtggaacagtgaggc

SEQ ID NO: 5436 - DNA, 20 bp, Artificial Sequence
  Description of Artificial Sequence: Synthetic oligonucleotide
  Target: COL7A1; (+) strand; PAM type: NNAGAAW; PAM sequence: AGAGAAA
acagctttgaggagtgcctc

SEQ ID NO: 5437 - DNA, 20 bp, Artificial Sequence
  Description of Artificial Sequence: Synthetic oligonucleotide
  Target: COL7A1; (+) strand; PAM type: NNAGAAW; PAM sequence: GGAGAAA
gatgggggtgcacagagcct

SEQ ID NO: 5438 - DNA, 20 bp, Artificial Sequence
  Description of Artificial Sequence: Synthetic oligonucleotide
  Target: COL7A1; (+) strand; PAM type: NNAGAAW; PAM sequence: GGAGAAT
tggagcctgtgagagagctg

SEQ ID NO: 5439 - DNA, 20 bp, Artificial Sequence
  Description of Artificial Sequence: Synthetic oligonucleotide
  Target: COL7A1; (+) strand; PAM type: NNAGAAW; PAM sequence: GTAGAAT
gtggggggcctcagggagag

SEQ ID NO: 5440 - DNA, 20 bp, Artificial Sequence
  Description of Artificial Sequence: Synthetic oligonucleotide
  Target: COL7A1; (+) strand; PAM type: NNAGAAW; PAM sequence: AGAGAAA
ggcggagcctcaggcgctgg

SEQ ID NO: 5441 - DNA, 20 bp, Artificial Sequence
  Description of Artificial Sequence: Synthetic oligonucleotide
  Target: COL7A1; (+) strand; PAM type: NNAGAAW; PAM sequence: CCAGAAA
gctcagccaccgtggcctcc

SEQ ID NO: 5442 - DNA, 20 bp, Artificial Sequence
  Description of Artificial Sequence: Synthetic oligonucleotide
  Target: COL7A1; (+) strand; PAM type: NNAGAAW; PAM sequence: GGAGAAA
cagtgagcaggtctgatgga

SEQ ID NO: 5443 - DNA, 20 bp, Artificial Sequence
  Description of Artificial Sequence: Synthetic oligonucleotide
  Target: COL7A1; (+) strand; PAM type: NNAGAAW; PAM sequence: TCAGAAA
tcagggtaggtgggcagggg

SEQ ID NO: 5444 - DNA, 20 bp, Artificial Sequence
  Description of Artificial Sequence: Synthetic oligonucleotide
  Target: COL7A1; (+) strand; PAM type: NNAGAAW; PAM sequence: ACAGAAA
cagtggtcaccactagggta

SEQ ID NO: 5445 - DNA, 20 bp, Artificial Sequence
  Description of Artificial Sequence: Synthetic oligonucleotide
  Target: COL7A1; (+) strand; PAM type: NNAGAAW; PAM sequence: GAAGAAA
ctgcctgcccgtcccagcct

SEQ ID NO: 5446 - DNA, 20 bp, Artificial Sequence
  Description of Artificial Sequence: Synthetic oligonucleotide
  Target: COL7A1; (+) strand; PAM type: NNAGAAW; PAM sequence: GCAGAAT
gtgaatggggtcagaggctg

SEQ ID NO: 5447 - DNA, 20 bp, Artificial Sequence
  Description of Artificial Sequence: Synthetic oligonucleotide
  Target: COL7A1; (+) strand; PAM type: NNAGAAW; PAM sequence: GGAGAAT
gaagacatggtcagccacat

SEQ ID NO: 5448 - DNA, 20 bp, Artificial Sequence
  Description of Artificial Sequence: Synthetic oligonucleotide
  Target: COL7A1; (+) strand; PAM type: NNAGAAW; PAM sequence: GGAGAAT
gggttagagggctagaacgt

SEQ ID NO: 5449 - DNA, 20 bp, Artificial Sequence
  Description of Artificial Sequence: Synthetic oligonucleotide
  Target: COL7A1; (+) strand; PAM type: NNAGAAW; PAM sequence: TCAGAAA
ctgggctccccatctccaga

SEQ ID NO: 5450 - DNA, 20 bp, Artificial Sequence
  Description of Artificial Sequence: Synthetic oligonucleotide
  Target: COL7A1; (+) strand; PAM type: NNAGAAW; PAM sequence: AGAGAAA
ccctgtgcactggctgctcc

SEQ ID NO: 5451 - DNA, 20 bp, Artificial Sequence
  Description of Artificial Sequence: Synthetic oligonucleotide
  Target: COL7A1; (+) strand; PAM type: NNAGAAW; PAM sequence: CGAGAAA
gaaaggcagcaccagccctt

SEQ ID NO: 5452 - DNA, 20 bp, Artificial Sequence
  Description of Artificial Sequence: Synthetic oligonucleotide
  Target: COL7A1; (+) strand; PAM type: NNAGAAW; PAM sequence: CCAGAAT
ccccgcacgcatccagggag

SEQ ID NO: 5453 - DNA, 20 bp, Artificial Sequence
  Description of Artificial Sequence: Synthetic oligonucleotide
  Target: COL7A1; (+) strand; PAM type: NNAGAAW; PAM sequence: CCAGAAT
cgcggagggttcggggagtc

SEQ ID NO: 5454 - DNA, 20 bp, Artificial Sequence
  Description of Artificial Sequence: Synthetic oligonucleotide
  Target: COL7A1; (+) strand; PAM type: NNAGAAW; PAM sequence: AGAGAAA
tgcagtctctcgggcagagc

SEQ ID NO: 5455 - DNA, 20 bp, Artificial Sequence
  Description of Artificial Sequence: Synthetic oligonucleotide
  Target: COL7A1; (+) strand; PAM type: NNAGAAW; PAM sequence: CCAGAAA
cctgaataactctgggcagc

SEQ ID NO: 5456 - DNA, 20 bp, Artificial Sequence
  Description of Artificial Sequence: Synthetic oligonucleotide
  Target: COL7A1; (+) strand; PAM type: NNAGAAW; PAM sequence: TCAGAAT
gggtgctcaggcaaacctca

SEQ ID NO: 5457 - DNA, 20 bp, Artificial Sequence
  Description of Artificial Sequence: Synthetic oligonucleotide
  Target: COL7A1; (+) strand; PAM type: NNAGAAW; PAM sequence: AAAGAAA
tcagaattgaggtgcctcca

SEQ ID NO: 5458 - DNA, 20 bp, Artificial Sequence
  Description of Artificial Sequence: Synthetic oligonucleotide
  Target: COL7A1; (+) strand; PAM type: NNAGAAW; PAM sequence: ACAGAAA
cacagctcaccaagactgat

SEQ ID NO: 5459 - DNA, 20 bp, Artificial Sequence
  Description of Artificial Sequence: Synthetic oligonucleotide
  Target: COL7A1; (+) strand; PAM type: NNAGAAW; PAM sequence: TTAGAAA
ctctaagggccaggctgggc

SEQ ID NO: 5460 - DNA, 20 bp, Artificial Sequence
  Description of Artificial Sequence: Synthetic oligonucleotide
  Target: COL7A1; (+) strand; PAM type: NNAGAAW; PAM sequence: GTAGAAT
tctctccagccgttcacaaa

SEQ ID NO: 5461 - DNA, 20 bp, Artificial Sequence
  Description of Artificial Sequence: Synthetic oligonucleotide
  Target: COL7A1; (+) strand; PAM type: NNAGAAW; PAM sequence: TTAGAAA
cctgcttgtccaggcagcag

SEQ ID NO: 5462 - DNA, 20 bp, Artificial Sequence
  Description of Artificial Sequence: Synthetic oligonucleotide
  Target: COL7A1; (+) strand; PAM type: NNAGAAW; PAM sequence: CCAGAAT
tgccccaggctatcctcctc

SEQ ID NO: 5463 - DNA, 20 bp, Artificial Sequence
  Description of Artificial Sequence: Synthetic oligonucleotide
  Target: COL7A1; (-) strand; PAM type: NNGRRT; PAM sequence: GAGGAT
ggctcatcctgtctgggtgt

SEQ ID NO: 5464 - DNA, 20 bp, Artificial Sequence
  Description of Artificial Sequence: Synthetic oligonucleotide
  Target: COL7A1; (-) strand; PAM type: NNGRRT; PAM sequence: CTGGGT
gggaaccaggctcatcctgt

SEQ ID NO: 5465 - DNA, 20 bp, Artificial Sequence
  Description of Artificial Sequence: Synthetic oligonucleotide
  Target: COL7A1; (-) strand; PAM type: NNGRRT; PAM sequence: ACGGGT
ggagggtgcctgggtcagcc

SEQ ID NO: 5466 - DNA, 20 bp, Artificial Sequence
  Description of Artificial Sequence: Synthetic oligonucleotide
  Target: COL7A1; (-) strand; PAM type: NNGRRT; PAM sequence: CTGGGT
agggccttgaaggagggtgc

SEQ ID NO: 5467 - DNA, 20 bp, Artificial Sequence
  Description of Artificial Sequence: Synthetic oligonucleotide
  Target: COL7A1; (-) strand; PAM type: NNGRRT; PAM sequence: GAGGGT
ctggacatagggccttgaag

SEQ ID NO: 5468 - DNA, 20 bp, Artificial Sequence
  Description of Artificial Sequence: Synthetic oligonucleotide
  Target: COL7A1; (-) strand; PAM type: NNGRRT; PAM sequence: GAGAAT
gggccatgggaggggagatg

SEQ ID NO: 5469 - DNA, 20 bp, Artificial Sequence
  Description of Artificial Sequence: Synthetic oligonucleotide
  Target: COL7A1; (-) strand; PAM type: NNGRRT; PAM sequence: CTGAGT
ctggaaggctgggagttgag

SEQ ID NO: 5470 - DNA, 20 bp, Artificial Sequence
  Description of Artificial Sequence: Synthetic oligonucleotide
  Target: COL7A1; (-) strand; PAM type: NNGRRT; PAM sequence: GGGAGT
caggcaaggtctggaaggct

SEQ ID NO: 5471 - DNA, 20 bp, Artificial Sequence
  Description of Artificial Sequence: Synthetic oligonucleotide
  Target: COL7A1; (-) strand; PAM type: NNGRRT; PAM sequence: GGGAGT
tctccatggagaggacacag

SEQ ID NO: 5472 - DNA, 20 bp, Artificial Sequence
  Description of Artificial Sequence: Synthetic oligonucleotide
  Target: COL7A1; (-) strand; PAM type: NNGRRT; PAM sequence: TCGGAT
acagaacagctggctcactt

SEQ ID NO: 5473 - DNA, 20 bp, Artificial Sequence
  Description of Artificial Sequence: Synthetic oligonucleotide
  Target: COL7A1; (-) strand; PAM type: NNGRRT; PAM sequence: CAGGGT
agggcaccctgggagccaac

SEQ ID NO: 5474 - DNA, 20 bp, Artificial Sequence
  Description of Artificial Sequence: Synthetic oligonucleotide
  Target: COL7A1; (-) strand; PAM type: NNGRRT; PAM sequence: AAGAGT
cagtagatacagggactggg

SEQ ID NO: 5475 - DNA, 20 bp, Artificial Sequence
  Description of Artificial Sequence: Synthetic oligonucleotide
  Target: COL7A1; (-) strand; PAM type: NNGRRT; PAM sequence: TGGGAT
gtgtgtgtgtgtgtgtgtgg

SEQ ID NO: 5476 - DNA, 20 bp, Artificial Sequence
  Description of Artificial Sequence: Synthetic oligonucleotide
  Target: COL7A1; (-) strand; PAM type: NNGRRT; PAM sequence: CTGGGT
attgcactatgtgctccagg

SEQ ID NO: 5477 - DNA, 20 bp, Artificial Sequence
  Description of Artificial Sequence: Synthetic oligonucleotide
  Target: COL7A1; (-) strand; PAM type: NNGRRT; PAM sequence: AGGAGT
cgggaggatcgcttgaggcc

SEQ ID NO: 5478 - DNA, 20 bp, Artificial Sequence
  Description of Artificial Sequence: Synthetic oligonucleotide
  Target: COL7A1; (-) strand; PAM type: NNGRRT; PAM sequence: GAGGAT
gctttgggaggttgaggcgg

SEQ ID NO: 5479 - DNA, 20 bp, Artificial Sequence
  Description of Artificial Sequence: Synthetic oligonucleotide
  Target: COL7A1; (-) strand; PAM type: NNGRRT; PAM sequence: AAGGGT
ccctgggtctttatgctgca

SEQ ID NO: 5480 - DNA, 20 bp, Artificial Sequence
  Description of Artificial Sequence: Synthetic oligonucleotide
  Target: COL7A1; (-) strand; PAM type: NNGRRT; PAM sequence: CTGGGT
tgtggcatgcactgaaaccc

SEQ ID NO: 5481 - DNA, 20 bp, Artificial Sequence
  Description of Artificial Sequence: Synthetic oligonucleotide
  Target: COL7A1; (-) strand; PAM type: NNGRRT; PAM sequence: GTGAGT
catgctggggtgcaggactt

SEQ ID NO: 5482 - DNA, 20 bp, Artificial Sequence
  Description of Artificial Sequence: Synthetic oligonucleotide
  Target: COL7A1; (-) strand; PAM type: NNGRRT; PAM sequence: TGGGGT
ctgcctgtctctgcacatgc

SEQ ID NO: 5483 - DNA, 20 bp, Artificial Sequence
  Description of Artificial Sequence: Synthetic oligonucleotide
  Target: COL7A1; (-) strand; PAM type: NNGRRT; PAM sequence: GGGGGT
tcccagtggacagcagggct

SEQ ID NO: 5484 - DNA, 20 bp, Artificial Sequence
  Description of Artificial Sequence: Synthetic oligonucleotide
  Target: COL7A1; (-) strand; PAM type: NNGRRT; PAM sequence: TGGAAT
tggaaatggccagaggaagc

SEQ ID NO: 5485 - DNA, 20 bp, Artificial Sequence
  Description of Artificial Sequence: Synthetic oligonucleotide
  Target: COL7A1; (-) strand; PAM type: NNGRRT; PAM sequence: CAGGGT
tggaaggaggaagtgcagat

SEQ ID NO: 5486 - DNA, 20 bp, Artificial Sequence
  Description of Artificial Sequence: Synthetic oligonucleotide
  Target: COL7A1; (-) strand; PAM type: NNGRRT; PAM sequence: CTGAAT
tctgtgtgcccttgctggtc

SEQ ID NO: 5487 - DNA, 20 bp, Artificial Sequence
  Description of Artificial Sequence: Synthetic oligonucleotide
  Target: COL7A1; (-) strand; PAM type: NNGRRT; PAM sequence: TAGGGT
agcccttaaaccagcacttc

SEQ ID NO: 5488 - DNA, 20 bp, Artificial Sequence
  Description of Artificial Sequence: Synthetic oligonucleotide
  Target: COL7A1; (-) strand; PAM type: NNGRRT; PAM sequence: ATGGGT
agtctagaggctcatttagg

SEQ ID NO: 5489 - DNA, 20 bp, Artificial Sequence
  Description of Artificial Sequence: Synthetic oligonucleotide
  Target: COL7A1; (-) strand; PAM type: NNGRRT; PAM sequence: TAGGAT
gggaagtctagaggctcatt

SEQ ID NO: 5490 - DNA, 20 bp, Artificial Sequence
  Description of Artificial Sequence: Synthetic oligonucleotide
  Target: COL7A1; (-) strand; PAM type: NNGRRT; PAM sequence: TGGGGT
tgtttgtccaggtttcctct

SEQ ID NO: 5491 - DNA, 20 bp, Artificial Sequence
  Description of Artificial Sequence: Synthetic oligonucleotide
  Target: COL7A1; (-) strand; PAM type: NNGRRT; PAM sequence: AGGGAT
ctgctctttgctggcctcca

SEQ ID NO: 5492 - DNA, 20 bp, Artificial Sequence
  Description of Artificial Sequence: Synthetic oligonucleotide
  Target: COL7A1; (-) strand; PAM type: NNGRRT; PAM sequence: AGGGGT
tggggggtctctcctggttt

SEQ ID NO: 5493 - DNA, 20 bp, Artificial Sequence
  Description of Artificial Sequence: Synthetic oligonucleotide
  Target: COL7A1; (-) strand; PAM type: NNGRRT; PAM sequence: GGGGGT
ggaggggtgcgagagtgttg

SEQ ID NO: 5494 - DNA, 20 bp, Artificial Sequence
  Description of Artificial Sequence: Synthetic oligonucleotide
  Target: COL7A1; (-) strand; PAM type: NNGRRT; PAM sequence: GAGAGT
gggtggtgctggaggggtgc

SEQ ID NO: 5495 - DNA, 20 bp, Artificial Sequence
  Description of Artificial Sequence: Synthetic oligonucleotide
  Target: COL7A1; (-) strand; PAM type: NNGRRT; PAM sequence: AGGGGT
tgaagtcagggtggtgctgg

SEQ ID NO: 5496 - DNA, 20 bp, Artificial Sequence
  Description of Artificial Sequence: Synthetic oligonucleotide
  Target: COL7A1; (-) strand; PAM type: NNGRRT; PAM sequence: CAGGGT
gggaaagacctggatgaagt

SEQ ID NO: 5497 - DNA, 20 bp, Artificial Sequence
  Description of Artificial Sequence: Synthetic oligonucleotide
  Target: COL7A1; (-) strand; PAM type: NNGRRT; PAM sequence: CTGGAT
gtggagggttagggaaagac

SEQ ID NO: 5498 - DNA, 20 bp, Artificial Sequence
  Description of Artificial Sequence: Synthetic oligonucleotide
  Target: COL7A1; (-) strand; PAM type: NNGRRT; PAM sequence: GAGGGT
gggacagcgtggggagggtg

SEQ ID NO: 5499 - DNA, 20 bp, Artificial Sequence
  Description of Artificial Sequence: Synthetic oligonucleotide
  Target: COL7A1; (-) strand; PAM type: NNGRRT; PAM sequence: GAGGGT
taggcacgggacagcgtggg

SEQ ID NO: 5500 - DNA, 20 bp, Artificial Sequence
  Description of Artificial Sequence: Synthetic oligonucleotide
  Target: COL7A1; (-) strand; PAM type: NNGRRT; PAM sequence: CGGGGT
tggggccggggagcagcagg

SEQ ID NO: 5501 - DNA, 20 bp, Artificial Sequence
  Description of Artificial Sequence: Synthetic oligonucleotide
  Target: COL7A1; (-) strand; PAM type: NNGRRT; PAM sequence: CAGGAT
ggccctggccagtttggttg

SEQ ID NO: 5502 - DNA, 20 bp, Artificial Sequence
  Description of Artificial Sequence: Synthetic oligonucleotide
  Target: COL7A1; (-) strand; PAM type: NNGRRT; PAM sequence: CGGGGT
tctctcttcagagtgctagg

SEQ ID NO: 5503 - DNA, 20 bp, Artificial Sequence
  Description of Artificial Sequence: Synthetic oligonucleotide
  Target: COL7A1; (-) strand; PAM type: NNGRRT; PAM sequence: CAGAGT
aggagtcgcttctctctctt

SEQ ID NO: 5504 - DNA, 20 bp, Artificial Sequence
  Description of Artificial Sequence: Synthetic oligonucleotide
  Target: COL7A1; (-) strand; PAM type: NNGRRT; PAM sequence: AGGAGT
ggcggggctgcaggagccgc

SEQ ID NO: 5505 - DNA, 20 bp, Artificial Sequence
  Description of Artificial Sequence: Synthetic oligonucleotide
  Target: COL7A1; (-) strand; PAM type: NNGRRT; PAM sequence: TGGAGT
ccacagcgtggccggctgac

SEQ ID NO: 5506 - DNA, 20 bp, Artificial Sequence
  Description of Artificial Sequence: Synthetic oligonucleotide
  Target: COL7A1; (-) strand; PAM type: NNGRRT; PAM sequence: CTGGGT
ggtggacatgaaggcagacg

SEQ ID NO: 5507 - DNA, 20 bp, Artificial Sequence
  Description of Artificial Sequence: Synthetic oligonucleotide
  Target: COL7A1; (-) strand; PAM type: NNGRRT; PAM sequence: GTGAGT
caggccgcgacacatggtgg

SEQ ID NO: 5508 - DNA, 20 bp, Artificial Sequence
  Description of Artificial Sequence: Synthetic oligonucleotide
  Target: COL7A1; (-) strand; PAM type: NNGRRT; PAM sequence: GTGGGT
cacccaggccgcgacacatg

SEQ ID NO: 5509 - DNA, 20 bp, Artificial Sequence
  Description of Artificial Sequence: Synthetic oligonucleotide
  Target: COL7A1; (-) strand; PAM type: NNGRRT; PAM sequence: GAGAAT
gactgaaggatgggatgtgc

SEQ ID NO: 5510 - DNA, 20 bp, Artificial Sequence
  Description of Artificial Sequence: Synthetic oligonucleotide
  Target: COL7A1; (-) strand; PAM type: NNGRRT; PAM sequence: TGGGAT
aacacaaagcgactgaagga

SEQ ID NO: 5511 - DNA, 20 bp, Artificial Sequence
  Description of Artificial Sequence: Synthetic oligonucleotide
  Target: COL7A1; (-) strand; PAM type: NNGRRT; PAM sequence: AAGGAT
caataaacacaaagcgactg

SEQ ID NO: 5512 - DNA, 20 bp, Artificial Sequence
  Description of Artificial Sequence: Synthetic oligonucleotide
  Target: COL7A1; (-) strand; PAM type: NNGRRT; PAM sequence: AAGGAT
caataaacacaaagcgactg

SEQ ID NO: 5513 - DNA, 20 bp, Artificial Sequence
  Description of Artificial Sequence: Synthetic oligonucleotide
  Target: COL7A1; (-) strand; PAM type: NNGRRT; PAM sequence: GTGGGT
acgtgaggggtctgagagga

SEQ ID NO: 5514 - DNA, 20 bp, Artificial Sequence
  Description of Artificial Sequence: Synthetic oligonucleotide
  Target: COL7A1; (-) strand; PAM type: NNGRRT; PAM sequence: AGGAGT
gggtacgtgaggggtctgag

SEQ ID NO: 5515 - DNA, 20 bp, Artificial Sequence
  Description of Artificial Sequence: Synthetic oligonucleotide
  Target: COL7A1; (-) strand; PAM type: NNGRRT; PAM sequence: AGGGGT
gagcagggtaagggtacgtg

SEQ ID NO: 5516 - DNA, 20 bp, Artificial Sequence
  Description of Artificial Sequence: Synthetic oligonucleotide
  Target: COL7A1; (-) strand; PAM type: NNGRRT; PAM sequence: AAGGGT
tgagtgtgtgtgagcagggt

SEQ ID NO: 5517 - DNA, 20 bp, Artificial Sequence
  Description of Artificial Sequence: Synthetic oligonucleotide
  Target: COL7A1; (-) strand; PAM type: NNGRRT; PAM sequence: CAGGGT
cagctgtgagtgtgtgtgag

SEQ ID NO: 5518 - DNA, 20 bp, Artificial Sequence
  Description of Artificial Sequence: Synthetic oligonucleotide
  Target: COL7A1; (-) strand; PAM type: NNGRRT; PAM sequence: GTGAGT
tggctgagtctctgacagct

SEQ ID NO: 5519 - DNA, 20 bp, Artificial Sequence
  Description of Artificial Sequence: Synthetic oligonucleotide
  Target: COL7A1; (-) strand; PAM type: NNGRRT; PAM sequence: CTGAGT
gcgcatatgtgcgtgtgtgg

SEQ ID NO: 5520 - DNA, 20 bp, Artificial Sequence
  Description of Artificial Sequence: Synthetic oligonucleotide
  Target: COL7A1; (-) strand; PAM type: NNGRRT; PAM sequence: AGGGGT
cccagatggacggggctgtg

SEQ ID NO: 5521 - DNA, 20 bp, Artificial Sequence
  Description of Artificial Sequence: Synthetic oligonucleotide
  Target: COL7A1; (-) strand; PAM type: NNGRRT; PAM sequence: GAGGGT
cacacagagaaatgctggct

SEQ ID NO: 5522 - DNA, 20 bp, Artificial Sequence
  Description of Artificial Sequence: Synthetic oligonucleotide
  Target: COL7A1; (-) strand; PAM type: NNGRRT; PAM sequence: CTGGGT
tgtggcgagtcttgctatgt

SEQ ID NO: 5523 - DNA, 20 bp, Artificial Sequence
  Description of Artificial Sequence: Synthetic oligonucleotide
  Target: COL7A1; (-) strand; PAM type: NNGRRT; PAM sequence: GCGAGT
cacgtaaggtcactgctgtg

SEQ ID NO: 5524 - DNA, 20 bp, Artificial Sequence
  Description of Artificial Sequence: Synthetic oligonucleotide
  Target: COL7A1; (-) strand; PAM type: NNGRRT; PAM sequence: TTGGAT
ctaatatatgtccggacagc

SEQ ID NO: 5525 - DNA, 20 bp, Artificial Sequence
  Description of Artificial Sequence: Synthetic oligonucleotide
  Target: COL7A1; (-) strand; PAM type: NNGRRT; PAM sequence: TGGAGT
taagttgggtcactgccaca

SEQ ID NO: 5526 - DNA, 20 bp, Artificial Sequence
  Description of Artificial Sequence: Synthetic oligonucleotide
  Target: COL7A1; (-) strand; PAM type: NNGRRT; PAM sequence: TTGGGT
ggacattggacattgctaag

SEQ ID NO: 5527 - DNA, 20 bp, Artificial Sequence
  Description of Artificial Sequence: Synthetic oligonucleotide
  Target: COL7A1; (-) strand; PAM type: NNGRRT; PAM sequence: CAGAGT
tatcagatctgagtgcccca

SEQ ID NO: 5528 - DNA, 20 bp, Artificial Sequence
  Description of Artificial Sequence: Synthetic oligonucleotide
  Target: COL7A1; (-) strand; PAM type: NNGRRT; PAM sequence: CTGAGT
tcatgcaggtcatatcagat

SEQ ID NO: 5529 - DNA, 20 bp, Artificial Sequence
  Description of Artificial Sequence: Synthetic oligonucleotide
  Target: COL7A1; (-) strand; PAM type: NNGRRT; PAM sequence: ACGGAT
gagggcagccacacagctgg

SEQ ID NO: 5530 - DNA, 20 bp, Artificial Sequence
  Description of Artificial Sequence: Synthetic oligonucleotide
  Target: COL7A1; (-) strand; PAM type: NNGRRT; PAM sequence: CTGGAT
gtcacagtgatagggccacc

SEQ ID NO: 5531 - DNA, 20 bp, Artificial Sequence
  Description of Artificial Sequence: Synthetic oligonucleotide
  Target: COL7A1; (-) strand; PAM type: NNGRRT; PAM sequence: GGGGGT
ccactgctgagcctgagaga

SEQ ID NO: 5532 - DNA, 20 bp, Artificial Sequence
  Description of Artificial Sequence: Synthetic oligonucleotide
  Target: COL7A1; (-) strand; PAM type: NNGRRT; PAM sequence: CTGGAT
gctcgcgcattgtcctatcg

SEQ ID NO: 5533 - DNA, 20 bp, Artificial Sequence
  Description of Artificial Sequence: Synthetic oligonucleotide
  Target: COL7A1; (-) strand; PAM type: NNGRRT; PAM sequence: CAGAAT
caaccttccagctccgccct

SEQ ID NO: 5534 - DNA, 20 bp, Artificial Sequence
  Description of Artificial Sequence: Synthetic oligonucleotide
  Target: COL7A1; (-) strand; PAM type: NNGRRT; PAM sequence: CAGAGT
ctgatggtcctgatgttggg

SEQ ID NO: 5535 - DNA, 20 bp, Artificial Sequence
  Description of Artificial Sequence: Synthetic oligonucleotide
  Target: COL7A1; (-) strand; PAM type: NNGRRT; PAM sequence: CTGGAT
ctcttgctgtccctctgtct

SEQ ID NO: 5536 - DNA, 20 bp, Artificial Sequence
  Description of Artificial Sequence: Synthetic oligonucleotide
  Target: COL7A1; (-) strand; PAM type: NNGRRT; PAM sequence: TGGGAT
tccatcatgctgtctgtctc

SEQ ID NO: 5537 - DNA, 20 bp, Artificial Sequence
  Description of Artificial Sequence: Synthetic oligonucleotide
  Target: COL7A1; (-) strand; PAM type: NNGRRT; PAM sequence: CTGAAT
tgtggactctgtgtttctgt

SEQ ID NO: 5538 - DNA, 20 bp, Artificial Sequence
  Description of Artificial Sequence: Synthetic oligonucleotide
  Target: COL7A1; (-) strand; PAM type: NNGRRT; PAM sequence: CTGGAT
gattcctgcccttctgtttc

SEQ ID NO: 5539 - DNA, 20 bp, Artificial Sequence
  Description of Artificial Sequence: Synthetic oligonucleotide
  Target: COL7A1; (-) strand; PAM type: NNGRRT; PAM sequence: TGGGAT
ggcttggacccaggggactc

SEQ ID NO: 5540 - DNA, 20 bp, Artificial Sequence
  Description of Artificial Sequence: Synthetic oligonucleotide
  Target: COL7A1; (-) strand; PAM type: NNGRRT; PAM sequence: TGGGGT
tcttggaggttgagtggatg

SEQ ID NO: 5541 - DNA, 20 bp, Artificial Sequence
  Description of Artificial Sequence: Synthetic oligonucleotide
  Target: COL7A1; (-) strand; PAM type: NNGRRT; PAM sequence: GTGGAT
ggaagggtcttggaggttga

SEQ ID NO: 5542 - DNA, 20 bp, Artificial Sequence
  Description of Artificial Sequence: Synthetic oligonucleotide
  Target: COL7A1; (-) strand; PAM type: NNGRRT; PAM sequence: TTGAGT
gatgggaagggtcttggagg

SEQ ID NO: 5543 - DNA, 20 bp, Artificial Sequence
  Description of Artificial Sequence: Synthetic oligonucleotide
  Target: COL7A1; (-) strand; PAM type: NNGRRT; PAM sequence: AAGGGT
ctgggttgggtcgggatggg

SEQ ID NO: 5544 - DNA, 20 bp, Artificial Sequence
  Description of Artificial Sequence: Synthetic oligonucleotide
  Target: COL7A1; (-) strand; PAM type: NNGRRT; PAM sequence: CGGGAT
gcggtaggactgggttgggt

SEQ ID NO: 5545 - DNA, 20 bp, Artificial Sequence
  Description of Artificial Sequence: Synthetic oligonucleotide
  Target: COL7A1; (-) strand; PAM type: NNGRRT; PAM sequence: TTGGGT
ctggtggcggtaggactggg

SEQ ID NO: 5546 - DNA, 20 bp, Artificial Sequence
  Description of Artificial Sequence: Synthetic oligonucleotide
  Target: COL7A1; (-) strand; PAM type: NNGRRT; PAM sequence: CTGGGT
agcagctggtggcggtagga

SEQ ID NO: 5547 - DNA, 20 bp, Artificial Sequence
  Description of Artificial Sequence: Synthetic oligonucleotide
  Target: COL7A1; (-) strand; PAM type: NNGRRT; PAM sequence: GAGGGT
atgggccctgaagcggggta

SEQ ID NO: 5548 - DNA, 20 bp, Artificial Sequence
  Description of Artificial Sequence: Synthetic oligonucleotide
  Target: COL7A1; (-) strand; PAM type: NNGRRT; PAM sequence: CGGGGT
gagataaatgggccctgaag

SEQ ID NO: 5549 - DNA, 20 bp, Artificial Sequence
  Description of Artificial Sequence: Synthetic oligonucleotide
  Target: COL7A1; (-) strand; PAM type: NNGRRT; PAM sequence: ATGAGT
taaggacacccccgggaggg

SEQ ID NO: 5550 - DNA, 20 bp, Artificial Sequence
  Description of Artificial Sequence: Synthetic oligonucleotide
  Target: COL7A1; (-) strand; PAM type: NNGRRT; PAM sequence: AGGGAT
gggctaaggacacccccggg

SEQ ID NO: 5551 - DNA, 20 bp, Artificial Sequence
  Description of Artificial Sequence: Synthetic oligonucleotide
  Target: COL7A1; (-) strand; PAM type: NNGRRT; PAM sequence: TAGGGT
tgtccccggaaaagagtaga

SEQ ID NO: 5552 - DNA, 20 bp, Artificial Sequence
  Description of Artificial Sequence: Synthetic oligonucleotide
  Target: COL7A1; (-) strand; PAM type: NNGRRT; PAM sequence: AAGAGT
tccccaacttgtccccggaa

SEQ ID NO: 5553 - DNA, 20 bp, Artificial Sequence
  Description of Artificial Sequence: Synthetic oligonucleotide
  Target: COL7A1; (-) strand; PAM type: NNGRRT; PAM sequence: CAGAGT
ggtattattctgcatgggta

SEQ ID NO: 5554 - DNA, 20 bp, Artificial Sequence
  Description of Artificial Sequence: Synthetic oligonucleotide
  Target: COL7A1; (-) strand; PAM type: NNGRRT; PAM sequence: ATGGGT
gggggttggtattattctgc

SEQ ID NO: 5555 - DNA, 20 bp, Artificial Sequence
  Description of Artificial Sequence: Synthetic oligonucleotide
  Target: COL7A1; (-) strand; PAM type: NNGRRT; PAM sequence: GGGGGT
aagggggaaggttttccttg

SEQ ID NO: 5556 - DNA, 20 bp, Artificial Sequence
  Description of Artificial Sequence: Synthetic oligonucleotide
  Target: COL7A1; (-) strand; PAM type: NNGRRT; PAM sequence: GGGGGT
tgtgactgtttgggaagatg

SEQ ID NO: 5557 - DNA, 20 bp, Artificial Sequence
  Description of Artificial Sequence: Synthetic oligonucleotide
  Target: COL7A1; (-) strand; PAM type: NNGRRT; PAM sequence: GCGGAT
ggggtggctgtgggcagtga

SEQ ID NO: 5558 - DNA, 20 bp, Artificial Sequence
  Description of Artificial Sequence: Synthetic oligonucleotide
  Target: COL7A1; (-) strand; PAM type: NNGRRT; PAM sequence: GGGGGT
tggcagatgactcactgtgg

SEQ ID NO: 5559 - DNA, 20 bp, Artificial Sequence
  Description of Artificial Sequence: Synthetic oligonucleotide
  Target: COL7A1; (-) strand; PAM type: NNGRRT; PAM sequence: GTGGGT
tatttcagtgacttggtccc

SEQ ID NO: 5560 - DNA, 20 bp, Artificial Sequence
  Description of Artificial Sequence: Synthetic oligonucleotide
  Target: COL7A1; (-) strand; PAM type: NNGRRT; PAM sequence: CGGGGT
tcagcatcccctggaggagt

SEQ ID NO: 5561 - DNA, 20 bp, Artificial Sequence
  Description of Artificial Sequence: Synthetic oligonucleotide
  Target: COL7A1; (-) strand; PAM type: NNGRRT; PAM sequence: AGGAGT
tgagattcagcatcccctgg

SEQ ID NO: 5562 - DNA, 20 bp, Artificial Sequence
  Description of Artificial Sequence: Synthetic oligonucleotide
  Target: COL7A1; (-) strand; PAM type: NNGRRT; PAM sequence: TAGGGT
cccagccgtggagcccccag

SEQ ID NO: 5563 - DNA, 20 bp, Artificial Sequence
  Description of Artificial Sequence: Synthetic oligonucleotide
  Target: COL7A1; (-) strand; PAM type: NNGRRT; PAM sequence: CTGAAT
cagacgcccagaccaaagag

SEQ ID NO: 5564 - DNA, 20 bp, Artificial Sequence
  Description of Artificial Sequence: Synthetic oligonucleotide
  Target: COL7A1; (-) strand; PAM type: NNGRRT; PAM sequence: CAGGGT
cttgggccagggttccaggt

SEQ ID NO: 5565 - DNA, 20 bp, Artificial Sequence
  Description of Artificial Sequence: Synthetic oligonucleotide
  Target: COL7A1; (-) strand; PAM type: NNGRRT; PAM sequence: CAGGGT
tgggggaggagtccttgggc

SEQ ID NO: 5566 - DNA, 20 bp, Artificial Sequence
  Description of Artificial Sequence: Synthetic oligonucleotide
  Target: COL7A1; (-) strand; PAM type: NNGRRT; PAM sequence: AGGAGT
cctggatcgggttctggggg

SEQ ID NO: 5567 - DNA, 20 bp, Artificial Sequence
  Description of Artificial Sequence: Synthetic oligonucleotide
  Target: COL7A1; (-) strand; PAM type: NNGRRT; PAM sequence: TCGGGT
gggcactgagcctgcctgga

SEQ ID NO: 5568 - DNA, 20 bp, Artificial Sequence
  Description of Artificial Sequence: Synthetic oligonucleotide
  Target: COL7A1; (-) strand; PAM type: NNGRRT; PAM sequence: CTGGAT
gaactgggcactgagcctgc

SEQ ID NO: 5569 - DNA, 20 bp, Artificial Sequence
  Description of Artificial Sequence: Synthetic oligonucleotide
  Target: COL7A1; (-) strand; PAM type: NNGRRT; PAM sequence: CCGGGT
tgcgagcgccgctgcccacc

SEQ ID NO: 5570 - DNA, 20 bp, Artificial Sequence
  Description of Artificial Sequence: Synthetic oligonucleotide
  Target: COL7A1; (-) strand; PAM type: NNGRRT; PAM sequence: GGGAAT
ttgtctatggtggctgtgga

SEQ ID NO: 5571 - DNA, 20 bp, Artificial Sequence
  Description of Artificial Sequence: Synthetic oligonucleotide
  Target: COL7A1; (-) strand; PAM type: NNGRRT; PAM sequence: CTGGAT
cagacccctgttccctgcca

SEQ ID NO: 5572 - DNA, 20 bp, Artificial Sequence
  Description of Artificial Sequence: Synthetic oligonucleotide
  Target: COL7A1; (-) strand; PAM type: NNGRRT; PAM sequence: CGGGGT
tgagaatggggggctgccag

SEQ ID NO: 5573 - DNA, 20 bp, Artificial Sequence
  Description of Artificial Sequence: Synthetic oligonucleotide
  Target: COL7A1; (-) strand; PAM type: NNGRRT; PAM sequence: GAGAAT
ctccttgggatagtgatggt

SEQ ID NO: 5574 - DNA, 20 bp, Artificial Sequence
  Description of Artificial Sequence: Synthetic oligonucleotide
  Target: COL7A1; (-) strand; PAM type: NNGRRT; PAM sequence: TGGGAT
accaggaccctgaagctcct

SEQ ID NO: 5575 - DNA, 20 bp, Artificial Sequence
  Description of Artificial Sequence: Synthetic oligonucleotide
  Target: COL7A1; (-) strand; PAM type: NNGRRT; PAM sequence: AGGAGT
atactccgagtattctgtgg

SEQ ID NO: 5576 - DNA, 20 bp, Artificial Sequence
  Description of Artificial Sequence: Synthetic oligonucleotide
  Target: COL7A1; (-) strand; PAM type: NNGRRT; PAM sequence: CCGAGT
tgatgagtactctgaatact

SEQ ID NO: 5577 - DNA, 20 bp, Artificial Sequence
  Description of Artificial Sequence: Synthetic oligonucleotide
  Target: COL7A1; (-) strand; PAM type: NNGRRT; PAM sequence: CTGAAT
ccctgaggatgatgagtact

SEQ ID NO: 5578 - DNA, 20 bp, Artificial Sequence
  Description of Artificial Sequence: Synthetic oligonucleotide
  Target: COL7A1; (-) strand; PAM type: NNGRRT; PAM sequence: ATGAGT
gcgggtaccccctgaggatg

SEQ ID NO: 5579 - DNA, 20 bp, Artificial Sequence
  Description of Artificial Sequence: Synthetic oligonucleotide
  Target: COL7A1; (-) strand; PAM type: NNGRRT; PAM sequence: GAGGAT
ctgcagagcgggtaccccct

SEQ ID NO: 5580 - DNA, 20 bp, Artificial Sequence
  Description of Artificial Sequence: Synthetic oligonucleotide
  Target: COL7A1; (-) strand; PAM type: NNGRRT; PAM sequence: GCGGGT
caccctgccctacctgcaga

SEQ ID NO: 5581 - DNA, 20 bp, Artificial Sequence
  Description of Artificial Sequence: Synthetic oligonucleotide
  Target: COL7A1; (-) strand; PAM type: NNGRRT; PAM sequence: TAGGGT
cagggcacacgccaagcacg

SEQ ID NO: 5582 - DNA, 20 bp, Artificial Sequence
  Description of Artificial Sequence: Synthetic oligonucleotide
  Target: COL7A1; (-) strand; PAM type: NNGRRT; PAM sequence: ATGAAT
agacacgcacatgggtgtcc

SEQ ID NO: 5583 - DNA, 20 bp, Artificial Sequence
  Description of Artificial Sequence: Synthetic oligonucleotide
  Target: COL7A1; (-) strand; PAM type: NNGRRT; PAM sequence: ATGGGT
ggtggggccgagacacgcac

SEQ ID NO: 5584 - DNA, 20 bp, Artificial Sequence
  Description of Artificial Sequence: Synthetic oligonucleotide
  Target: COL7A1; (-) strand; PAM type: NNGRRT; PAM sequence: ATGGGT
gctgaacccgtggggcagct

SEQ ID NO: 5585 - DNA, 20 bp, Artificial Sequence
  Description of Artificial Sequence: Synthetic oligonucleotide
  Target: COL7A1; (-) strand; PAM type: NNGRRT; PAM sequence: TGGGAT
gtcctctcaggggggttggc

SEQ ID NO: 5586 - DNA, 20 bp, Artificial Sequence
  Description of Artificial Sequence: Synthetic oligonucleotide
  Target: COL7A1; (-) strand; PAM type: NNGRRT; PAM sequence: GGGGGT
atcaactggggtcctctcag

SEQ ID NO: 5587 - DNA, 20 bp, Artificial Sequence
  Description of Artificial Sequence: Synthetic oligonucleotide
  Target: COL7A1; (-) strand; PAM type: NNGRRT; PAM sequence: TGGGGT
gccctgccctgcctatcaac

SEQ ID NO: 5588 - DNA, 20 bp, Artificial Sequence
  Description of Artificial Sequence: Synthetic oligonucleotide
  Target: COL7A1; (-) strand; PAM type: NNGRRT; PAM sequence: GTGAGT
gttcatcgcatctggatcac

SEQ ID NO: 5589 - DNA, 20 bp, Artificial Sequence
  Description of Artificial Sequence: Synthetic oligonucleotide
  Target: COL7A1; (-) strand; PAM type: NNGRRT; PAM sequence: CTGGAT
ccagggccagttcatcgcat

SEQ ID NO: 5590 - DNA, 20 bp, Artificial Sequence
  Description of Artificial Sequence: Synthetic oligonucleotide
  Target: COL7A1; (-) strand; PAM type: NNGRRT; PAM sequence: CAGAGT
ggacccggtgggaggggcat

SEQ ID NO: 5591 - DNA, 20 bp, Artificial Sequence
  Description of Artificial Sequence: Synthetic oligonucleotide
  Target: COL7A1; (-) strand; PAM type: NNGRRT; PAM sequence: TGGGAT
cagcttggctgtgtggggag

SEQ ID NO: 5592 - DNA, 20 bp, Artificial Sequence
  Description of Artificial Sequence: Synthetic oligonucleotide
  Target: COL7A1; (-) strand; PAM type: NNGRRT; PAM sequence: GGGAGT
atgtccagcttggctgtgtg

SEQ ID NO: 5593 - DNA, 20 bp, Artificial Sequence
  Description of Artificial Sequence: Synthetic oligonucleotide
  Target: COL7A1; (-) strand; PAM type: NNGRRT; PAM sequence: GAGGAT
agggagacacacaggcagat

SEQ ID NO: 5594 - DNA, 20 bp, Artificial Sequence
  Description of Artificial Sequence: Synthetic oligonucleotide
  Target: COL7A1; (-) strand; PAM type: NNGRRT; PAM sequence: ATGGAT
tcaagaagatggggggatgg

SEQ ID NO: 5595 - DNA, 20 bp, Artificial Sequence
  Description of Artificial Sequence: Synthetic oligonucleotide
  Target: COL7A1; (-) strand; PAM type: NNGRRT; PAM sequence: ATGGAT
gcagtcaagaagatgggggg

SEQ ID NO: 5596 - DNA, 20 bp, Artificial Sequence
  Description of Artificial Sequence: Synthetic oligonucleotide
  Target: COL7A1; (-) strand; PAM type: NNGRRT; PAM sequence: GGGGAT
gcaagcagtcaagaagatgg

SEQ ID NO: 5597 - DNA, 20 bp, Artificial Sequence
  Description of Artificial Sequence: Synthetic oligonucleotide
  Target: COL7A1; (-) strand; PAM type: NNGRRT; PAM sequence: GTGAGT
agagatgagtcagcactgtg

SEQ ID NO: 5598 - DNA, 20 bp, Artificial Sequence
  Description of Artificial Sequence: Synthetic oligonucleotide
  Target: COL7A1; (-) strand; PAM type: NNGRRT; PAM sequence: ATGAGT
ggggctttgtgcgccaagag

SEQ ID NO: 5599 - DNA, 20 bp, Artificial Sequence
  Description of Artificial Sequence: Synthetic oligonucleotide
  Target: COL7A1; (-) strand; PAM type: NNGRRT; PAM sequence: GAGGAT
ctgtggtcttctgctcccag

SEQ ID NO: 5600 - DNA, 20 bp, Artificial Sequence
  Description of Artificial Sequence: Synthetic oligonucleotide
  Target: COL7A1; (-) strand; PAM type: NNGRRT; PAM sequence: ATGGGT
ctatgtccttcctgtgggcc

SEQ ID NO: 5601 - DNA, 20 bp, Artificial Sequence
  Description of Artificial Sequence: Synthetic oligonucleotide
  Target: COL7A1; (-) strand; PAM type: NNGRRT; PAM sequence: CTGGGT
ctgggagggcctgggtgggc

SEQ ID NO: 5602 - DNA, 20 bp, Artificial Sequence
  Description of Artificial Sequence: Synthetic oligonucleotide
  Target: COL7A1; (-) strand; PAM type: NNGRRT; PAM sequence: CTGGGT
ctggatgggcctgggagggc

SEQ ID NO: 5603 - DNA, 20 bp, Artificial Sequence
  Description of Artificial Sequence: Synthetic oligonucleotide
  Target: COL7A1; (-) strand; PAM type: NNGRRT; PAM sequence: CTGGAT
cactgacggtgagtgtgggc

SEQ ID NO: 5604 - DNA, 20 bp, Artificial Sequence
  Description of Artificial Sequence: Synthetic oligonucleotide
  Target: COL7A1; (-) strand; PAM type: NNGRRT; PAM sequence: GTGAGT
agggagaagctgcactgacg

SEQ ID NO: 5605 - DNA, 20 bp, Artificial Sequence
  Description of Artificial Sequence: Synthetic oligonucleotide
  Target: COL7A1; (-) strand; PAM type: NNGRRT; PAM sequence: CGGGGT
ccaaggcttgggtcagagat

SEQ ID NO: 5606 - DNA, 20 bp, Artificial Sequence
  Description of Artificial Sequence: Synthetic oligonucleotide
  Target: COL7A1; (-) strand; PAM type: NNGRRT; PAM sequence: TTGGGT
gtgagtagggattccaaggc

SEQ ID NO: 5607 - DNA, 20 bp, Artificial Sequence
  Description of Artificial Sequence: Synthetic oligonucleotide
  Target: COL7A1; (-) strand; PAM type: NNGRRT; PAM sequence: AGGGAT
agagaggggagcaggtgagt

SEQ ID NO: 5608 - DNA, 20 bp, Artificial Sequence
  Description of Artificial Sequence: Synthetic oligonucleotide
  Target: COL7A1; (-) strand; PAM type: NNGRRT; PAM sequence: GTGAGT
ctggcgagagaggggagcag

SEQ ID NO: 5609 - DNA, 20 bp, Artificial Sequence
  Description of Artificial Sequence: Synthetic oligonucleotide
  Target: COL7A1; (-) strand; PAM type: NNGRRT; PAM sequence: TGGGGT
gagagagtggtgggggctcc

SEQ ID NO: 5610 - DNA, 20 bp, Artificial Sequence
  Description of Artificial Sequence: Synthetic oligonucleotide
  Target: COL7A1; (-) strand; PAM type: NNGRRT; PAM sequence: GAGAGT
gagcgaggtccccccggaga

SEQ ID NO: 5611 - DNA, 20 bp, Artificial Sequence
  Description of Artificial Sequence: Synthetic oligonucleotide
  Target: COL7A1; (-) strand; PAM type: NNGRRT; PAM sequence: CAGGGT
cacttggtccctgtgtctga

SEQ ID NO: 5612 - DNA, 20 bp, Artificial Sequence
  Description of Artificial Sequence: Synthetic oligonucleotide
  Target: COL7A1; (-) strand; PAM type: NNGRRT; PAM sequence: AGGAAT
atatctccccagggaacccc

SEQ ID NO: 5613 - DNA, 20 bp, Artificial Sequence
  Description of Artificial Sequence: Synthetic oligonucleotide
  Target: COL7A1; (-) strand; PAM type: NNGRRT; PAM sequence: GAGGGT
ggggagcgtgcactttggga

SEQ ID NO: 5614 - DNA, 20 bp, Artificial Sequence
  Description of Artificial Sequence: Synthetic oligonucleotide
  Target: COL7A1; (-) strand; PAM type: NNGRRT; PAM sequence: GTGAAT
gagttgaagccatggtcatg

SEQ ID NO: 5615 - DNA, 20 bp, Artificial Sequence
  Description of Artificial Sequence: Synthetic oligonucleotide
  Target: COL7A1; (-) strand; PAM type: NNGRRT; PAM sequence: GTGAGT
agggcgagaaaggggagcgg

SEQ ID NO: 5616 - DNA, 20 bp, Artificial Sequence
  Description of Artificial Sequence: Synthetic oligonucleotide
  Target: COL7A1; (-) strand; PAM type: NNGRRT; PAM sequence: GCGGGT
gaccagggcgagaaagggga

SEQ ID NO: 5617 - DNA, 20 bp, Artificial Sequence
  Description of Artificial Sequence: Synthetic oligonucleotide
  Target: COL7A1; (-) strand; PAM type: NNGRRT; PAM sequence: AAGGGT
ttgacgggcagccaggcccc

SEQ ID NO: 5618 - DNA, 20 bp, Artificial Sequence
  Description of Artificial Sequence: Synthetic oligonucleotide
  Target: COL7A1; (-) strand; PAM type: NNGRRT; PAM sequence: CAGGGT
tctcatgcttcttctgttcc

SEQ ID NO: 5619 - DNA, 20 bp, Artificial Sequence
  Description of Artificial Sequence: Synthetic oligonucleotide
  Target: COL7A1; (-) strand; PAM type: NNGRRT; PAM sequence: GGGAGT
cattaggccagggagctcat

SEQ ID NO: 5620 - DNA, 20 bp, Artificial Sequence
  Description of Artificial Sequence: Synthetic oligonucleotide
  Target: COL7A1; (-) strand; PAM type: NNGRRT; PAM sequence: TTGGGT
tctggttggctcacaggtgc

SEQ ID NO: 5621 - DNA, 20 bp, Artificial Sequence
  Description of Artificial Sequence: Synthetic oligonucleotide
  Target: COL7A1; (-) strand; PAM type: NNGRRT; PAM sequence: GGGGAT
tatagtggagttggagtcat

SEQ ID NO: 5622 - DNA, 20 bp, Artificial Sequence
  Description of Artificial Sequence: Synthetic oligonucleotide
  Target: COL7A1; (-) strand; PAM type: NNGRRT; PAM sequence: TGGAGT
gcagggggctatagtggagt

SEQ ID NO: 5623 - DNA, 20 bp, Artificial Sequence
  Description of Artificial Sequence: Synthetic oligonucleotide
  Target: COL7A1; (-) strand; PAM type: NNGRRT; PAM sequence: TGGAGT
atcagggcagggggctatag

SEQ ID NO: 5624 - DNA, 20 bp, Artificial Sequence
  Description of Artificial Sequence: Synthetic oligonucleotide
  Target: COL7A1; (-) strand; PAM type: NNGRRT; PAM sequence: TAGGAT
ggttggggtcacagtggagt

SEQ ID NO: 5625 - DNA, 20 bp, Artificial Sequence
  Description of Artificial Sequence: Synthetic oligonucleotide
  Target: COL7A1; (-) strand; PAM type: NNGRRT; PAM sequence: TGGAGT
aaggtgggttggggtcacag

SEQ ID NO: 5626 - DNA, 20 bp, Artificial Sequence
  Description of Artificial Sequence: Synthetic oligonucleotide
  Target: COL7A1; (-) strand; PAM type: NNGRRT; PAM sequence: TGGGGT
ctcgaggtgtcaaggtgggt

SEQ ID NO: 5627 - DNA, 20 bp, Artificial Sequence
  Description of Artificial Sequence: Synthetic oligonucleotide
  Target: COL7A1; (-) strand; PAM type: NNGRRT; PAM sequence: GTGGGT
gctggtctcgaggtgtcaag

SEQ ID NO: 5628 - DNA, 20 bp, Artificial Sequence
  Description of Artificial Sequence: Synthetic oligonucleotide
  Target: COL7A1; (-) strand; PAM type: NNGRRT; PAM sequence: GAGGGT
tagggacaaggaaggctgta

SEQ ID NO: 5629 - DNA, 20 bp, Artificial Sequence
  Description of Artificial Sequence: Synthetic oligonucleotide
  Target: COL7A1; (-) strand; PAM type: NNGRRT; PAM sequence: GGGGGT
gaagctcatggtcgggtcat

SEQ ID NO: 5630 - DNA, 20 bp, Artificial Sequence
  Description of Artificial Sequence: Synthetic oligonucleotide
  Target: COL7A1; (-) strand; PAM type: NNGRRT; PAM sequence: TCGGGT
tggggcagggaagctcatgg

SEQ ID NO: 5631 - DNA, 20 bp, Artificial Sequence
  Description of Artificial Sequence: Synthetic oligonucleotide
  Target: COL7A1; (-) strand; PAM type: NNGRRT; PAM sequence: CAGGAT
cagtggacatgacagggagt

SEQ ID NO: 5632 - DNA, 20 bp, Artificial Sequence
  Description of Artificial Sequence: Synthetic oligonucleotide
  Target: COL7A1; (-) strand; PAM type: NNGRRT; PAM sequence: GGGAGT
tgtggacagtggacatgaca

SEQ ID NO: 5633 - DNA, 20 bp, Artificial Sequence
  Description of Artificial Sequence: Synthetic oligonucleotide
  Target: COL7A1; (-) strand; PAM type: NNGRRT; PAM sequence: CAGGGT
gcctgatcggtcccaaggta

SEQ ID NO: 5634 - DNA, 20 bp, Artificial Sequence
  Description of Artificial Sequence: Synthetic oligonucleotide
  Target: COL7A1; (-) strand; PAM type: NNGRRT; PAM sequence: ACGGGT
acgctcagaatgagggggcc

SEQ ID NO: 5635 - DNA, 20 bp, Artificial Sequence
  Description of Artificial Sequence: Synthetic oligonucleotide
  Target: COL7A1; (-) strand; PAM type: NNGRRT; PAM sequence: CAGAAT
atggtgagtgtgggcacgct

SEQ ID NO: 5636 - DNA, 20 bp, Artificial Sequence
  Description of Artificial Sequence: Synthetic oligonucleotide
  Target: COL7A1; (-) strand; PAM type: NNGRRT; PAM sequence: GTGAGT
caggacacaaaggagagatg

SEQ ID NO: 5637 - DNA, 20 bp, Artificial Sequence
  Description of Artificial Sequence: Synthetic oligonucleotide
  Target: COL7A1; (-) strand; PAM type: NNGRRT; PAM sequence: GGGGAT
gaagggagacaaggtacaga

SEQ ID NO: 5638 - DNA, 20 bp, Artificial Sequence
  Description of Artificial Sequence: Synthetic oligonucleotide
  Target: COL7A1; (-) strand; PAM type: NNGRRT; PAM sequence: GGGAGT
tttctccctcagggtgaacg

SEQ ID NO: 5639 - DNA, 20 bp, Artificial Sequence
  Description of Artificial Sequence: Synthetic oligonucleotide
  Target: COL7A1; (-) strand; PAM type: NNGRRT; PAM sequence: CAGGGT
cttcatctgcttttctccct

SEQ ID NO: 5640 - DNA, 20 bp, Artificial Sequence
  Description of Artificial Sequence: Synthetic oligonucleotide
  Target: COL7A1; (-) strand; PAM type: NNGRRT; PAM sequence: GGGAAT
ggtcacagagtgaggtgtct

SEQ ID NO: 5641 - DNA, 20 bp, Artificial Sequence
  Description of Artificial Sequence: Synthetic oligonucleotide
  Target: COL7A1; (-) strand; PAM type: NNGRRT; PAM sequence: CAGAGT
tttcagggtgaagggggtca

SEQ ID NO: 5642 - DNA, 20 bp, Artificial Sequence
  Description of Artificial Sequence: Synthetic oligonucleotide
  Target: COL7A1; (-) strand; PAM type: NNGRRT; PAM sequence: GGGGGT
agagttagtttcagggtgaa

SEQ ID NO: 5643 - DNA, 20 bp, Artificial Sequence
  Description of Artificial Sequence: Synthetic oligonucleotide
  Target: COL7A1; (-) strand; PAM type: NNGRRT; PAM sequence: CAGGGT
cctgtttggagagttagttt

SEQ ID NO: 5644 - DNA, 20 bp, Artificial Sequence
  Description of Artificial Sequence: Synthetic oligonucleotide
  Target: COL7A1; (-) strand; PAM type: NNGRRT; PAM sequence: GAGAGT
gagtagctgaggcctgtttg

SEQ ID NO: 5645 - DNA, 20 bp, Artificial Sequence
  Description of Artificial Sequence: Synthetic oligonucleotide
  Target: COL7A1; (-) strand; PAM type: NNGRRT; PAM sequence: TGGAGT
tagggcactgggtcagaggt

SEQ ID NO: 5646 - DNA, 20 bp, Artificial Sequence
  Description of Artificial Sequence: Synthetic oligonucleotide
  Target: COL7A1; (-) strand; PAM type: NNGRRT; PAM sequence: CTGGGT
tggggtcagatattagggca

SEQ ID NO: 5647 - DNA, 20 bp, Artificial Sequence
  Description of Artificial Sequence: Synthetic oligonucleotide
  Target: COL7A1; (-) strand; PAM type: NNGRRT; PAM sequence: TGGGGT
atgttgaagggcgagggacc

SEQ ID NO: 5648 - DNA, 20 bp, Artificial Sequence
  Description of Artificial Sequence: Synthetic oligonucleotide
  Target: COL7A1; (-) strand; PAM type: NNGRRT; PAM sequence: ATGGGT
aaaaaggagatgttggcttc

SEQ ID NO: 5649 - DNA, 20 bp, Artificial Sequence
  Description of Artificial Sequence: Synthetic oligonucleotide
  Target: COL7A1; (-) strand; PAM type: NNGRRT; PAM sequence: TGGAGT
tagggatccccaggaaagga

SEQ ID NO: 5650 - DNA, 20 bp, Artificial Sequence
  Description of Artificial Sequence: Synthetic oligonucleotide
  Target: COL7A1; (-) strand; PAM type: NNGRRT; PAM sequence: AAGGAT
cctgctagggatccccagga

SEQ ID NO: 5651 - DNA, 20 bp, Artificial Sequence
  Description of Artificial Sequence: Synthetic oligonucleotide
  Target: COL7A1; (-) strand; PAM type: NNGRRT; PAM sequence: AGGGAT
acatggaccctctccctgct

SEQ ID NO: 5652 - DNA, 20 bp, Artificial Sequence
  Description of Artificial Sequence: Synthetic oligonucleotide
  Target: COL7A1; (-) strand; PAM type: NNGRRT; PAM sequence: CAGGGT
catggtgtcctcatgtcacc

SEQ ID NO: 5653 - DNA, 20 bp, Artificial Sequence
  Description of Artificial Sequence: Synthetic oligonucleotide
  Target: COL7A1; (-) strand; PAM type: NNGRRT; PAM sequence: AGGGAT
cagggtcaacctggtgcagc

SEQ ID NO: 5654 - DNA, 20 bp, Artificial Sequence
  Description of Artificial Sequence: Synthetic oligonucleotide
  Target: COL7A1; (-) strand; PAM type: NNGRRT; PAM sequence: CAGGGT
tcccccatctgtgtttctca

SEQ ID NO: 5655 - DNA, 20 bp, Artificial Sequence
  Description of Artificial Sequence: Synthetic oligonucleotide
  Target: COL7A1; (-) strand; PAM type: NNGRRT; PAM sequence: GCGGAT
tctgagtggccacacatgca

SEQ ID NO: 5656 - DNA, 20 bp, Artificial Sequence
  Description of Artificial Sequence: Synthetic oligonucleotide
  Target: COL7A1; (-) strand; PAM type: NNGRRT; PAM sequence: CTGAGT
gggccctggccgctgagcat

SEQ ID NO: 5657 - DNA, 20 bp, Artificial Sequence
  Description of Artificial Sequence: Synthetic oligonucleotide
  Target: COL7A1; (-) strand; PAM type: NNGRRT; PAM sequence: CGGGAT
cggccccatgtgtgttcacc

SEQ ID NO: 5658 - DNA, 20 bp, Artificial Sequence
  Description of Artificial Sequence: Synthetic oligonucleotide
  Target: COL7A1; (-) strand; PAM type: NNGRRT; PAM sequence: GGGGGT
tgggggtcctcttaagtgct

SEQ ID NO: 5659 - DNA, 20 bp, Artificial Sequence
  Description of Artificial Sequence: Synthetic oligonucleotide
  Target: COL7A1; (-) strand; PAM type: NNGRRT; PAM sequence: GGGGGT
atcacacacacacatatcct

SEQ ID NO: 5660 - DNA, 20 bp, Artificial Sequence
  Description of Artificial Sequence: Synthetic oligonucleotide
  Target: COL7A1; (-) strand; PAM type: NNGRRT; PAM sequence: CCGGGT
gcctggtgacaagggctcag

SEQ ID NO: 5661 - DNA, 20 bp, Artificial Sequence
  Description of Artificial Sequence: Synthetic oligonucleotide
  Target: COL7A1; (-) strand; PAM type: NNGRRT; PAM sequence: CTGAAT
ccagcctgatctggtcctga

SEQ ID NO: 5662 - DNA, 20 bp, Artificial Sequence
  Description of Artificial Sequence: Synthetic oligonucleotide
  Target: COL7A1; (-) strand; PAM type: NNGRRT; PAM sequence: GGGAGT
acgtgctgctagggccgttc

SEQ ID NO: 5663 - DNA, 20 bp, Artificial Sequence
  Description of Artificial Sequence: Synthetic oligonucleotide
  Target: COL7A1; (-) strand; PAM type: NNGRRT; PAM sequence: TGGGGT
gggcaagggtctggagtcct

SEQ ID NO: 5664 - DNA, 20 bp, Artificial Sequence
  Description of Artificial Sequence: Synthetic oligonucleotide
  Target: COL7A1; (-) strand; PAM type: NNGRRT; PAM sequence: TGGAGT
aagagggcggggcaagggtc

SEQ ID NO: 5665 - DNA, 20 bp, Artificial Sequence
  Description of Artificial Sequence: Synthetic oligonucleotide
  Target: COL7A1; (-) strand; PAM type: NNGRRT; PAM sequence: AAGGGT
cagtgataagagggcggggc

SEQ ID NO: 5666 - DNA, 20 bp, Artificial Sequence
  Description of Artificial Sequence: Synthetic oligonucleotide
  Target: COL7A1; (-) strand; PAM type: NNGRRT; PAM sequence: TGGGAT
ccatctgaaggtgcttcaga

SEQ ID NO: 5667 - DNA, 20 bp, Artificial Sequence
  Description of Artificial Sequence: Synthetic oligonucleotide
  Target: COL7A1; (-) strand; PAM type: NNGRRT; PAM sequence: TTGGGT
agggacaggaaaggggctcc

SEQ ID NO: 5668 - DNA, 20 bp, Artificial Sequence
  Description of Artificial Sequence: Synthetic oligonucleotide
  Target: COL7A1; (-) strand; PAM type: NNGRRT; PAM sequence: TGGAGT
aggggttctgtggctgacta

SEQ ID NO: 5669 - DNA, 20 bp, Artificial Sequence
  Description of Artificial Sequence: Synthetic oligonucleotide
  Target: COL7A1; (-) strand; PAM type: NNGRRT; PAM sequence: AGGGGT
ctttctggggtttaggggga

SEQ ID NO: 5670 - DNA, 20 bp, Artificial Sequence
  Description of Artificial Sequence: Synthetic oligonucleotide
  Target: COL7A1; (-) strand; PAM type: NNGRRT; PAM sequence: TGGGGT
gaggacaggaggaggctttc

SEQ ID NO: 5671 - DNA, 20 bp, Artificial Sequence
  Description of Artificial Sequence: Synthetic oligonucleotide
  Target: COL7A1; (-) strand; PAM type: NNGRRT; PAM sequence: TGGGGT
agagggtggtgtactctctg

SEQ ID NO: 5672 - DNA, 20 bp, Artificial Sequence
  Description of Artificial Sequence: Synthetic oligonucleotide
  Target: COL7A1; (-) strand; PAM type: NNGRRT; PAM sequence: GAGGGT
tggtgacaaggtacagggaa

SEQ ID NO: 5673 - DNA, 20 bp, Artificial Sequence
  Description of Artificial Sequence: Synthetic oligonucleotide
  Target: COL7A1; (-) strand; PAM type: NNGRRT; PAM sequence: TTGGAT
gtgaacgagggcctcggggc

SEQ ID NO: 5674 - DNA, 20 bp, Artificial Sequence
  Description of Artificial Sequence: Synthetic oligonucleotide
  Target: COL7A1; (-) strand; PAM type: NNGRRT; PAM sequence: CAGGGT
acttcttacccaaaccaacc

SEQ ID NO: 5675 - DNA, 20 bp, Artificial Sequence
  Description of Artificial Sequence: Synthetic oligonucleotide
  Target: COL7A1; (-) strand; PAM type: NNGRRT; PAM sequence: GAGGGT
tctgagagctcaaactccca

SEQ ID NO: 5676 - DNA, 20 bp, Artificial Sequence
  Description of Artificial Sequence: Synthetic oligonucleotide
  Target: COL7A1; (-) strand; PAM type: NNGRRT; PAM sequence: CTGGGT
acgtgtggactgggtctccc

SEQ ID NO: 5677 - DNA, 20 bp, Artificial Sequence
  Description of Artificial Sequence: Synthetic oligonucleotide
  Target: COL7A1; (-) strand; PAM type: NNGRRT; PAM sequence: CTGGGT
tgagtgggcccacgtgtgga

SEQ ID NO: 5678 - DNA, 20 bp, Artificial Sequence
  Description of Artificial Sequence: Synthetic oligonucleotide
  Target: COL7A1; (-) strand; PAM type: NNGRRT; PAM sequence: GTGAGT
ggggtgccaagggggacatg

SEQ ID NO: 5679 - DNA, 20 bp, Artificial Sequence
  Description of Artificial Sequence: Synthetic oligonucleotide
  Target: COL7A1; (-) strand; PAM type: NNGRRT; PAM sequence: CGGGGT
tcctggggcctccaggccca

SEQ ID NO: 5680 - DNA, 20 bp, Artificial Sequence
  Description of Artificial Sequence: Synthetic oligonucleotide
  Target: COL7A1; (-) strand; PAM type: NNGRRT; PAM sequence: CAGGGT
ggggagggcagggcaggggc

SEQ ID NO: 5681 - DNA, 20 bp, Artificial Sequence
  Description of Artificial Sequence: Synthetic oligonucleotide
  Target: COL7A1; (-) strand; PAM type: NNGRRT; PAM sequence: GTGAGT
caggactaaagggtgacaag

SEQ ID NO: 5682 - DNA, 20 bp, Artificial Sequence
  Description of Artificial Sequence: Synthetic oligonucleotide
  Target: COL7A1; (-) strand; PAM type: NNGRRT; PAM sequence: AAGGGT
atgttgggagtgcaggacta

SEQ ID NO: 5683 - DNA, 20 bp, Artificial Sequence
  Description of Artificial Sequence: Synthetic oligonucleotide
  Target: COL7A1; (-) strand; PAM type: NNGRRT; PAM sequence: GGGAGT
ttgcccaatagggtgatgtt

SEQ ID NO: 5684 - DNA, 20 bp, Artificial Sequence
  Description of Artificial Sequence: Synthetic oligonucleotide
  Target: COL7A1; (-) strand; PAM type: NNGRRT; PAM sequence: TAGGGT
actcacactcttttgcccaa

SEQ ID NO: 5685 - DNA, 20 bp, Artificial Sequence
  Description of Artificial Sequence: Synthetic oligonucleotide
  Target: COL7A1; (-) strand; PAM type: NNGRRT; PAM sequence: TAGAAT
gagtggatcttgtatgatat

SEQ ID NO: 5686 - DNA, 20 bp, Artificial Sequence
  Description of Artificial Sequence: Synthetic oligonucleotide
  Target: COL7A1; (-) strand; PAM type: NNGRRT; PAM sequence: GTGGAT
tggcatgagtgggggggtga

SEQ ID NO: 5687 - DNA, 20 bp, Artificial Sequence
  Description of Artificial Sequence: Synthetic oligonucleotide
  Target: COL7A1; (-) strand; PAM type: NNGRRT; PAM sequence: GTGAGT
gtcctggcatgagtgggggg

SEQ ID NO: 5688 - DNA, 20 bp, Artificial Sequence
  Description of Artificial Sequence: Synthetic oligonucleotide
  Target: COL7A1; (-) strand; PAM type: NNGRRT; PAM sequence: GGGGGT
gaaggtcctggcatgagtgg

SEQ ID NO: 5689 - DNA, 20 bp, Artificial Sequence
  Description of Artificial Sequence: Synthetic oligonucleotide
  Target: COL7A1; (-) strand; PAM type: NNGRRT; PAM sequence: ATGAGT
aacgtggggaaggtcctggc

SEQ ID NO: 5690 - DNA, 20 bp, Artificial Sequence
  Description of Artificial Sequence: Synthetic oligonucleotide
  Target: COL7A1; (-) strand; PAM type: NNGRRT; PAM sequence: GTGGGT
agggaccccgaggactcacg

SEQ ID NO: 5691 - DNA, 20 bp, Artificial Sequence
  Description of Artificial Sequence: Synthetic oligonucleotide
  Target: COL7A1; (-) strand; PAM type: NNGRRT; PAM sequence: CAGGGT
atgaacctaatgtcaccatc

SEQ ID NO: 5692 - DNA, 20 bp, Artificial Sequence
  Description of Artificial Sequence: Synthetic oligonucleotide
  Target: COL7A1; (-) strand; PAM type: NNGRRT; PAM sequence: CTGAGT
ttgcctctgatttccaacct

SEQ ID NO: 5693 - DNA, 20 bp, Artificial Sequence
  Description of Artificial Sequence: Synthetic oligonucleotide
  Target: COL7A1; (-) strand; PAM type: NNGRRT; PAM sequence: CCGGGT
gagcgtggggagccaggcat

SEQ ID NO: 5694 - DNA, 20 bp, Artificial Sequence
  Description of Artificial Sequence: Synthetic oligonucleotide
  Target: COL7A1; (-) strand; PAM type: NNGRRT; PAM sequence: TGGAGT
gttggtctccagggagaccc

SEQ ID NO: 5695 - DNA, 20 bp, Artificial Sequence
  Description of Artificial Sequence: Synthetic oligonucleotide
  Target: COL7A1; (-) strand; PAM type: NNGRRT; PAM sequence: TGGGGT
ggatggggcgggccacactg

SEQ ID NO: 5696 - DNA, 20 bp, Artificial Sequence
  Description of Artificial Sequence: Synthetic oligonucleotide
  Target: COL7A1; (-) strand; PAM type: NNGRRT; PAM sequence: TAGGAT
ttcctgtcctcgtgaggact

SEQ ID NO: 5697 - DNA, 20 bp, Artificial Sequence
  Description of Artificial Sequence: Synthetic oligonucleotide
  Target: COL7A1; (-) strand; PAM type: NNGRRT; PAM sequence: GTGAGT
ctggaccaccggggtcagtg

SEQ ID NO: 5698 - DNA, 20 bp, Artificial Sequence
  Description of Artificial Sequence: Synthetic oligonucleotide
  Target: COL7A1; (-) strand; PAM type: NNGRRT; PAM sequence: CGGGGT
cctggggccacctggaccac

SEQ ID NO: 5699 - DNA, 20 bp, Artificial Sequence
  Description of Artificial Sequence: Synthetic oligonucleotide
  Target: COL7A1; (-) strand; PAM type: NNGRRT; PAM sequence: AGGAAT
gcaggccccccagggagaga

SEQ ID NO: 5700 - DNA, 20 bp, Artificial Sequence
  Description of Artificial Sequence: Synthetic oligonucleotide
  Target: COL7A1; (-) strand; PAM type: NNGRRT; PAM sequence: TAGGGT
ctcttgccccatttttctgg

SEQ ID NO: 5701 - DNA, 20 bp, Artificial Sequence
  Description of Artificial Sequence: Synthetic oligonucleotide
  Target: COL7A1; (-) strand; PAM type: NNGRRT; PAM sequence: GAGGGT
cttgagggggcagagggtag

SEQ ID NO: 5702 - DNA, 20 bp, Artificial Sequence
  Description of Artificial Sequence: Synthetic oligonucleotide
  Target: COL7A1; (-) strand; PAM type: NNGRRT; PAM sequence: GAGGGT
ttcccagtcttgagggggca

SEQ ID NO: 5703 - DNA, 20 bp, Artificial Sequence
  Description of Artificial Sequence: Synthetic oligonucleotide
  Target: COL7A1; (-) strand; PAM type: NNGRRT; PAM sequence: GGGGGT
tgaggagggggccctgcctt

SEQ ID NO: 5704 - DNA, 20 bp, Artificial Sequence
  Description of Artificial Sequence: Synthetic oligonucleotide
  Target: COL7A1; (-) strand; PAM type: NNGRRT; PAM sequence: GTGGGT
aggggcatggtgaatccatg

SEQ ID NO: 5705 - DNA, 20 bp, Artificial Sequence
  Description of Artificial Sequence: Synthetic oligonucleotide
  Target: COL7A1; (-) strand; PAM type: NNGRRT; PAM sequence: GTGAAT
gaacagcatgtaggggcatg

SEQ ID NO: 5706 - DNA, 20 bp, Artificial Sequence
  Description of Artificial Sequence: Synthetic oligonucleotide
  Target: COL7A1; (-) strand; PAM type: NNGRRT; PAM sequence: GCGGGT
cagccaggccctagtggaga

SEQ ID NO: 5707 - DNA, 20 bp, Artificial Sequence
  Description of Artificial Sequence: Synthetic oligonucleotide
  Target: COL7A1; (-) strand; PAM type: NNGRRT; PAM sequence: ATGGGT
agacaggccctcgaggagag

SEQ ID NO: 5708 - DNA, 20 bp, Artificial Sequence
  Description of Artificial Sequence: Synthetic oligonucleotide
  Target: COL7A1; (-) strand; PAM type: NNGRRT; PAM sequence: CCGGGT
ctcctggtgttgttgggttc

SEQ ID NO: 5709 - DNA, 20 bp, Artificial Sequence
  Description of Artificial Sequence: Synthetic oligonucleotide
  Target: COL7A1; (-) strand; PAM type: NNGRRT; PAM sequence: TTGGGT
gcccggtgctcctggtgttg

SEQ ID NO: 5710 - DNA, 20 bp, Artificial Sequence
  Description of Artificial Sequence: Synthetic oligonucleotide
  Target: COL7A1; (-) strand; PAM type: NNGRRT; PAM sequence: AGGGGT
gttctgatgagagtcctggg

SEQ ID NO: 5711 - DNA, 20 bp, Artificial Sequence
  Description of Artificial Sequence: Synthetic oligonucleotide
  Target: COL7A1; (-) strand; PAM type: NNGRRT; PAM sequence: GAGAGT
gaggaagagggagttctgat

SEQ ID NO: 5712 - DNA, 20 bp, Artificial Sequence
  Description of Artificial Sequence: Synthetic oligonucleotide
  Target: COL7A1; (-) strand; PAM type: NNGRRT; PAM sequence: GGGAGT
gggcccccacaggaggaaga

SEQ ID NO: 5713 - DNA, 20 bp, Artificial Sequence
  Description of Artificial Sequence: Synthetic oligonucleotide
  Target: COL7A1; (-) strand; PAM type: NNGRRT; PAM sequence: CGGGGT
tcaaagggtgacccaggagt

SEQ ID NO: 5714 - DNA, 20 bp, Artificial Sequence
  Description of Artificial Sequence: Synthetic oligonucleotide
  Target: COL7A1; (-) strand; PAM type: NNGRRT; PAM sequence: AGGAGT
ttttcctcaaagggtgaccc

SEQ ID NO: 5715 - DNA, 20 bp, Artificial Sequence
  Description of Artificial Sequence: Synthetic oligonucleotide
  Target: COL7A1; (-) strand; PAM type: NNGRRT; PAM sequence: AAGGGT
tccgatgcctcttttcctca

SEQ ID NO: 5716 - DNA, 20 bp, Artificial Sequence
  Description of Artificial Sequence: Synthetic oligonucleotide
  Target: COL7A1; (-) strand; PAM type: NNGRRT; PAM sequence: TGGGGT
gtacccagaagggtccctgc

SEQ ID NO: 5717 - DNA, 20 bp, Artificial Sequence
  Description of Artificial Sequence: Synthetic oligonucleotide
  Target: COL7A1; (-) strand; PAM type: NNGRRT; PAM sequence: AAGGGT
ttcaaggtatgtgtacccag

SEQ ID NO: 5718 - DNA, 20 bp, Artificial Sequence
  Description of Artificial Sequence: Synthetic oligonucleotide
  Target: COL7A1; (-) strand; PAM type: NNGRRT; PAM sequence: TAGGGT
tgctgtttgctgggttttct

SEQ ID NO: 5719 - DNA, 20 bp, Artificial Sequence
  Description of Artificial Sequence: Synthetic oligonucleotide
  Target: COL7A1; (-) strand; PAM type: NNGRRT; PAM sequence: CTGGGT
accctctcaaatgctgtttg

SEQ ID NO: 5720 - DNA, 20 bp, Artificial Sequence
  Description of Artificial Sequence: Synthetic oligonucleotide
  Target: COL7A1; (-) strand; PAM type: NNGRRT; PAM sequence: GGGAAT
ggtcacatcagaactcccct

SEQ ID NO: 5721 - DNA, 20 bp, Artificial Sequence
  Description of Artificial Sequence: Synthetic oligonucleotide
  Target: COL7A1; (-) strand; PAM type: NNGRRT; PAM sequence: CTGAGT
gccaattcttggtcgcatgt

SEQ ID NO: 5722 - DNA, 20 bp, Artificial Sequence
  Description of Artificial Sequence: Synthetic oligonucleotide
  Target: COL7A1; (-) strand; PAM type: NNGRRT; PAM sequence: TGGGGT
ctacccgggagtggacgtgt

SEQ ID NO: 5723 - DNA, 20 bp, Artificial Sequence
  Description of Artificial Sequence: Synthetic oligonucleotide
  Target: COL7A1; (-) strand; PAM type: NNGRRT; PAM sequence: GGGAGT
tggccatgcctgctctaccc

SEQ ID NO: 5724 - DNA, 20 bp, Artificial Sequence
  Description of Artificial Sequence: Synthetic oligonucleotide
  Target: COL7A1; (-) strand; PAM type: NNGRRT; PAM sequence: CTGAGT
tcccagatcccaggacacac

SEQ ID NO: 5725 - DNA, 20 bp, Artificial Sequence
  Description of Artificial Sequence: Synthetic oligonucleotide
  Target: COL7A1; (-) strand; PAM type: NNGRRT; PAM sequence: CTGGAT
aacatccaggagcctgctct

SEQ ID NO: 5726 - DNA, 20 bp, Artificial Sequence
  Description of Artificial Sequence: Synthetic oligonucleotide
  Target: COL7A1; (-) strand; PAM type: NNGRRT; PAM sequence: CTGAGT
cggggcacatgtctgagccc

SEQ ID NO: 5727 - DNA, 20 bp, Artificial Sequence
  Description of Artificial Sequence: Synthetic oligonucleotide
  Target: COL7A1; (-) strand; PAM type: NNGRRT; PAM sequence: AGGAGT
gcaagggcgagcctggcctg

SEQ ID NO: 5728 - DNA, 20 bp, Artificial Sequence
  Description of Artificial Sequence: Synthetic oligonucleotide
  Target: COL7A1; (-) strand; PAM type: NNGRRT; PAM sequence: GTGAGT
ccggagaccctggggaagat

SEQ ID NO: 5729 - DNA, 20 bp, Artificial Sequence
  Description of Artificial Sequence: Synthetic oligonucleotide
  Target: COL7A1; (-) strand; PAM type: NNGRRT; PAM sequence: CAGGGT
ccctcacctgccattctgtg

SEQ ID NO: 5730 - DNA, 20 bp, Artificial Sequence
  Description of Artificial Sequence: Synthetic oligonucleotide
  Target: COL7A1; (-) strand; PAM type: NNGRRT; PAM sequence: GTGGGT
ccgcgaggcgagaaggtgag

SEQ ID NO: 5731 - DNA, 20 bp, Artificial Sequence
  Description of Artificial Sequence: Synthetic oligonucleotide
  Target: COL7A1; (-) strand; PAM type: NNGRRT; PAM sequence: CGGAGT
tctggccccatgcctccctc

SEQ ID NO: 5732 - DNA, 20 bp, Artificial Sequence
  Description of Artificial Sequence: Synthetic oligonucleotide
  Target: COL7A1; (-) strand; PAM type: NNGRRT; PAM sequence: GGGGGT
cttctgacagcagatgttct

SEQ ID NO: 5733 - DNA, 20 bp, Artificial Sequence
  Description of Artificial Sequence: Synthetic oligonucleotide
  Target: COL7A1; (-) strand; PAM type: NNGRRT; PAM sequence: GTGGGT
gaggccttgctggagacctg

SEQ ID NO: 5734 - DNA, 20 bp, Artificial Sequence
  Description of Artificial Sequence: Synthetic oligonucleotide
  Target: COL7A1; (-) strand; PAM type: NNGRRT; PAM sequence: AGGAAT
gggtcaactggtgggggcca

SEQ ID NO: 5735 - DNA, 20 bp, Artificial Sequence
  Description of Artificial Sequence: Synthetic oligonucleotide
  Target: COL7A1; (-) strand; PAM type: NNGRRT; PAM sequence: GGGGGT
gtgtggggctgccagtgagg

SEQ ID NO: 5736 - DNA, 20 bp, Artificial Sequence
  Description of Artificial Sequence: Synthetic oligonucleotide
  Target: COL7A1; (-) strand; PAM type: NNGRRT; PAM sequence: GTGAGT
ctggagcaaagggagagaag

SEQ ID NO: 5737 - DNA, 20 bp, Artificial Sequence
  Description of Artificial Sequence: Synthetic oligonucleotide
  Target: COL7A1; (-) strand; PAM type: NNGRRT; PAM sequence: CAGGGT
tccaaatgccatgggggtgg

SEQ ID NO: 5738 - DNA, 20 bp, Artificial Sequence
  Description of Artificial Sequence: Synthetic oligonucleotide
  Target: COL7A1; (-) strand; PAM type: NNGRRT; PAM sequence: GGGGGT
agcctgtttccaaatgccat

SEQ ID NO: 5739 - DNA, 20 bp, Artificial Sequence
  Description of Artificial Sequence: Synthetic oligonucleotide
  Target: COL7A1; (-) strand; PAM type: NNGRRT; PAM sequence: AGGGGT
tcctcacgctgctctgccat

SEQ ID NO: 5740 - DNA, 20 bp, Artificial Sequence
  Description of Artificial Sequence: Synthetic oligonucleotide
  Target: COL7A1; (-) strand; PAM type: NNGRRT; PAM sequence: CTGAGT
ggggtggtggtggagaggca

SEQ ID NO: 5741 - DNA, 20 bp, Artificial Sequence
  Description of Artificial Sequence: Synthetic oligonucleotide
  Target: COL7A1; (-) strand; PAM type: NNGRRT; PAM sequence: AGGGGT
aatatgaggagtggggcagc

SEQ ID NO: 5742 - DNA, 20 bp, Artificial Sequence
  Description of Artificial Sequence: Synthetic oligonucleotide
  Target: COL7A1; (-) strand; PAM type: NNGRRT; PAM sequence: AGGAGT
agctgtgggcctgaaatatg

SEQ ID NO: 5743 - DNA, 20 bp, Artificial Sequence
  Description of Artificial Sequence: Synthetic oligonucleotide
  Target: COL7A1; (-) strand; PAM type: NNGRRT; PAM sequence: TAGGGT
gtgttctgggggcagctcgc

SEQ ID NO: 5744 - DNA, 20 bp, Artificial Sequence
  Description of Artificial Sequence: Synthetic oligonucleotide
  Target: COL7A1; (-) strand; PAM type: NNGRRT; PAM sequence: AAGGGT
agggttgggctccaggggtc

SEQ ID NO: 5745 - DNA, 20 bp, Artificial Sequence
  Description of Artificial Sequence: Synthetic oligonucleotide
  Target: COL7A1; (-) strand; PAM type: NNGRRT; PAM sequence: AGGGGT
ggggtcaagggttgggctcc

SEQ ID NO: 5746 - DNA, 20 bp, Artificial Sequence
  Description of Artificial Sequence: Synthetic oligonucleotide
  Target: COL7A1; (-) strand; PAM type: NNGRRT; PAM sequence: AAGGGT
agtggtgagttctgggggtc

SEQ ID NO: 5747 - DNA, 20 bp, Artificial Sequence
  Description of Artificial Sequence: Synthetic oligonucleotide
  Target: COL7A1; (-) strand; PAM type: NNGRRT; PAM sequence: GGGGGT
ctggacaagtggtgagttct

SEQ ID NO: 5748 - DNA, 20 bp, Artificial Sequence
  Description of Artificial Sequence: Synthetic oligonucleotide
  Target: COL7A1; (-) strand; PAM type: NNGRRT; PAM sequence: GTGAGT
caggtttgcctggacaagtg

SEQ ID NO: 5749 - DNA, 20 bp, Artificial Sequence
  Description of Artificial Sequence: Synthetic oligonucleotide
  Target: COL7A1; (-) strand; PAM type: NNGRRT; PAM sequence: AGGGGT
tgttctccgtcagggtccac

SEQ ID NO: 5750 - DNA, 20 bp, Artificial Sequence
  Description of Artificial Sequence: Synthetic oligonucleotide
  Target: COL7A1; (-) strand; PAM type: NNGRRT; PAM sequence: CAGGGT
acatccgacttgttctccgt

SEQ ID NO: 5751 - DNA, 20 bp, Artificial Sequence
  Description of Artificial Sequence: Synthetic oligonucleotide
  Target: COL7A1; (-) strand; PAM type: NNGRRT; PAM sequence: GTGAGT
cccttcaggccttgtggtga

SEQ ID NO: 5752 - DNA, 20 bp, Artificial Sequence
  Description of Artificial Sequence: Synthetic oligonucleotide
  Target: COL7A1; (-) strand; PAM type: NNGRRT; PAM sequence: GTGAGT
ccggcccttcaggccttgtg

SEQ ID NO: 5753 - DNA, 20 bp, Artificial Sequence
  Description of Artificial Sequence: Synthetic oligonucleotide
  Target: COL7A1; (-) strand; PAM type: NNGRRT; PAM sequence: TGGGGT
tagggtcatagggagatggg

SEQ ID NO: 5754 - DNA, 20 bp, Artificial Sequence
  Description of Artificial Sequence: Synthetic oligonucleotide
  Target: COL7A1; (-) strand; PAM type: NNGRRT; PAM sequence: ATGGGT
caggttagggtcatagggag

SEQ ID NO: 5755 - DNA, 20 bp, Artificial Sequence
  Description of Artificial Sequence: Synthetic oligonucleotide
  Target: COL7A1; (-) strand; PAM type: NNGRRT; PAM sequence: TAGGGT
gagtggcctagctcacaggt

SEQ ID NO: 5756 - DNA, 20 bp, Artificial Sequence
  Description of Artificial Sequence: Synthetic oligonucleotide
  Target: COL7A1; (-) strand; PAM type: NNGRRT; PAM sequence: GTGAGT
agacaggacctccaggacgg

SEQ ID NO: 5757 - DNA, 20 bp, Artificial Sequence
  Description of Artificial Sequence: Synthetic oligonucleotide
  Target: COL7A1; (-) strand; PAM type: NNGRRT; PAM sequence: ACGGGT
ggagagacaggacctccagg

SEQ ID NO: 5758 - DNA, 20 bp, Artificial Sequence
  Description of Artificial Sequence: Synthetic oligonucleotide
  Target: COL7A1; (-) strand; PAM type: NNGRRT; PAM sequence: CTGGGT
gggctctgctcatgcagtct

SEQ ID NO: 5759 - DNA, 20 bp, Artificial Sequence
  Description of Artificial Sequence: Synthetic oligonucleotide
  Target: COL7A1; (-) strand; PAM type: NNGRRT; PAM sequence: GAGGAT
gggctgtcatctcctgcaat

SEQ ID NO: 5760 - DNA, 20 bp, Artificial Sequence
  Description of Artificial Sequence: Synthetic oligonucleotide
  Target: COL7A1; (-) strand; PAM type: NNGRRT; PAM sequence: TGGGGT
cttcaagctgtgtccatgcc

SEQ ID NO: 5761 - DNA, 20 bp, Artificial Sequence
  Description of Artificial Sequence: Synthetic oligonucleotide
  Target: COL7A1; (-) strand; PAM type: NNGRRT; PAM sequence: GTGGAT
ctgaaggtgagtctaggtgt

SEQ ID NO: 5762 - DNA, 20 bp, Artificial Sequence
  Description of Artificial Sequence: Synthetic oligonucleotide
  Target: COL7A1; (-) strand; PAM type: NNGRRT; PAM sequence: GTGAGT
aaggaccttctggcctgaag

SEQ ID NO: 5763 - DNA, 20 bp, Artificial Sequence
  Description of Artificial Sequence: Synthetic oligonucleotide
  Target: COL7A1; (-) strand; PAM type: NNGRRT; PAM sequence: TAGGGT
ctgcccttgacccttttctc

SEQ ID NO: 5764 - DNA, 20 bp, Artificial Sequence
  Description of Artificial Sequence: Synthetic oligonucleotide
  Target: COL7A1; (-) strand; PAM type: NNGRRT; PAM sequence: TGGGAT
tggtgagggtctggaagggc

SEQ ID NO: 5765 - DNA, 20 bp, Artificial Sequence
  Description of Artificial Sequence: Synthetic oligonucleotide
  Target: COL7A1; (-) strand; PAM type: NNGRRT; PAM sequence: GAGGGT
accagggaacactgcctggt

SEQ ID NO: 5766 - DNA, 20 bp, Artificial Sequence
  Description of Artificial Sequence: Synthetic oligonucleotide
  Target: COL7A1; (-) strand; PAM type: NNGRRT; PAM sequence: GTGAGT
ctggaccacctggtgccccg

SEQ ID NO: 5767 - DNA, 20 bp, Artificial Sequence
  Description of Artificial Sequence: Synthetic oligonucleotide
  Target: COL7A1; (-) strand; PAM type: NNGRRT; PAM sequence: CAGGGT
cagactctttttcgccacaa

SEQ ID NO: 5768 - DNA, 20 bp, Artificial Sequence
  Description of Artificial Sequence: Synthetic oligonucleotide
  Target: COL7A1; (-) strand; PAM type: NNGRRT; PAM sequence: TGGGGT
tactgcctcagtttccttgg

SEQ ID NO: 5769 - DNA, 20 bp, Artificial Sequence
  Description of Artificial Sequence: Synthetic oligonucleotide
  Target: COL7A1; (-) strand; PAM type: NNGRRT; PAM sequence: GTGAGT
gaggcccccctggcccagtg

SEQ ID NO: 5770 - DNA, 20 bp, Artificial Sequence
  Description of Artificial Sequence: Synthetic oligonucleotide
  Target: COL7A1; (-) strand; PAM type: NNGRRT; PAM sequence: CAGGGT
ccctctctatgtagggtctg

SEQ ID NO: 5771 - DNA, 20 bp, Artificial Sequence
  Description of Artificial Sequence: Synthetic oligonucleotide
  Target: COL7A1; (-) strand; PAM type: NNGRRT; PAM sequence: TAGGGT
tcatcagtgccctctctatg

SEQ ID NO: 5772 - DNA, 20 bp, Artificial Sequence
  Description of Artificial Sequence: Synthetic oligonucleotide
  Target: COL7A1; (-) strand; PAM type: NNGRRT; PAM sequence: AAGGGT
aggtattatctgtgactgga

SEQ ID NO: 5773 - DNA, 20 bp, Artificial Sequence
  Description of Artificial Sequence: Synthetic oligonucleotide
  Target: COL7A1; (-) strand; PAM type: NNGRRT; PAM sequence: ATGGGT
ctatctatgagaggcagtcc

SEQ ID NO: 5774 - DNA, 20 bp, Artificial Sequence
  Description of Artificial Sequence: Synthetic oligonucleotide
  Target: COL7A1; (-) strand; PAM type: NNGRRT; PAM sequence: GTGGAT
gtgtctgtgtgtggttgtat

SEQ ID NO: 5775 - DNA, 20 bp, Artificial Sequence
  Description of Artificial Sequence: Synthetic oligonucleotide
  Target: COL7A1; (-) strand; PAM type: NNGRRT; PAM sequence: GTGAGT
ctgggcctgaagggaagccg

SEQ ID NO: 5776 - DNA, 20 bp, Artificial Sequence
  Description of Artificial Sequence: Synthetic oligonucleotide
  Target: COL7A1; (-) strand; PAM type: NNGRRT; PAM sequence: CAGGGT
ggccttaaacctattctctg

SEQ ID NO: 5777 - DNA, 20 bp, Artificial Sequence
  Description of Artificial Sequence: Synthetic oligonucleotide
  Target: COL7A1; (-) strand; PAM type: NNGRRT; PAM sequence: GTGGGT
tgactctgtctagggggatg

SEQ ID NO: 5778 - DNA, 20 bp, Artificial Sequence
  Description of Artificial Sequence: Synthetic oligonucleotide
  Target: COL7A1; (-) strand; PAM type: NNGRRT; PAM sequence: GGGGAT
tgggtcctgactctgtctag

SEQ ID NO: 5779 - DNA, 20 bp, Artificial Sequence
  Description of Artificial Sequence: Synthetic oligonucleotide
  Target: COL7A1; (-) strand; PAM type: NNGRRT; PAM sequence: CTGGGT
tctgtactgcctgggactgt

SEQ ID NO: 5780 - DNA, 20 bp, Artificial Sequence
  Description of Artificial Sequence: Synthetic oligonucleotide
  Target: COL7A1; (-) strand; PAM type: NNGRRT; PAM sequence: TGGGGT
tattgtcctgtgtgcagggc

SEQ ID NO: 5781 - DNA, 20 bp, Artificial Sequence
  Description of Artificial Sequence: Synthetic oligonucleotide
  Target: COL7A1; (-) strand; PAM type: NNGRRT; PAM sequence: AGGGGT
accggggagagcctggaccg

SEQ ID NO: 5782 - DNA, 20 bp, Artificial Sequence
  Description of Artificial Sequence: Synthetic oligonucleotide
  Target: COL7A1; (-) strand; PAM type: NNGRRT; PAM sequence: CAGGGT
agggcacgacactctgcctt

SEQ ID NO: 5783 - DNA, 20 bp, Artificial Sequence
  Description of Artificial Sequence: Synthetic oligonucleotide
  Target: COL7A1; (-) strand; PAM type: NNGRRT; PAM sequence: TAGAGT
ggcctctctccacccttcca

SEQ ID NO: 5784 - DNA, 20 bp, Artificial Sequence
  Description of Artificial Sequence: Synthetic oligonucleotide
  Target: COL7A1; (-) strand; PAM type: NNGRRT; PAM sequence: CAGGGT
gaccaaggtcccaaaggaga

SEQ ID NO: 5785 - DNA, 20 bp, Artificial Sequence
  Description of Artificial Sequence: Synthetic oligonucleotide
  Target: COL7A1; (-) strand; PAM type: NNGRRT; PAM sequence: TGGAAT
agggtgctaaggtcagtgtg

SEQ ID NO: 5786 - DNA, 20 bp, Artificial Sequence
  Description of Artificial Sequence: Synthetic oligonucleotide
  Target: COL7A1; (-) strand; PAM type: NNGRRT; PAM sequence: AAGGGT
aacagggaccccctggactc

SEQ ID NO: 5787 - DNA, 20 bp, Artificial Sequence
  Description of Artificial Sequence: Synthetic oligonucleotide
  Target: COL7A1; (-) strand; PAM type: NNGRRT; PAM sequence: GTGGAT
ccttgtgtttgtaggtgtct

SEQ ID NO: 5788 - DNA, 20 bp, Artificial Sequence
  Description of Artificial Sequence: Synthetic oligonucleotide
  Target: COL7A1; (-) strand; PAM type: NNGRRT; PAM sequence: TGGAAT
ggtagtgtgtgccataaccc

SEQ ID NO: 5789 - DNA, 20 bp, Artificial Sequence
  Description of Artificial Sequence: Synthetic oligonucleotide
  Target: COL7A1; (-) strand; PAM type: NNGRRT; PAM sequence: AGGGGT
gtgagggaagaggggttggg

SEQ ID NO: 5790 - DNA, 20 bp, Artificial Sequence
  Description of Artificial Sequence: Synthetic oligonucleotide
  Target: COL7A1; (-) strand; PAM type: NNGRRT; PAM sequence: AGGGGT
ggccaggagagtgagggaag

SEQ ID NO: 5791 - DNA, 20 bp, Artificial Sequence
  Description of Artificial Sequence: Synthetic oligonucleotide
  Target: COL7A1; (-) strand; PAM type: NNGRRT; PAM sequence: GAGAGT
tgaggctgggggctggccag

SEQ ID NO: 5792 - DNA, 20 bp, Artificial Sequence
  Description of Artificial Sequence: Synthetic oligonucleotide
  Target: COL7A1; (-) strand; PAM type: NNGRRT; PAM sequence: GAGGGT
gaggcaggaaggccaggaga

SEQ ID NO: 5793 - DNA, 20 bp, Artificial Sequence
  Description of Artificial Sequence: Synthetic oligonucleotide
  Target: COL7A1; (-) strand; PAM type: NNGRRT; PAM sequence: GGGGGT
ccgggctcccaggcagggct

SEQ ID NO: 5794 - DNA, 20 bp, Artificial Sequence
  Description of Artificial Sequence: Synthetic oligonucleotide
  Target: COL7A1; (-) strand; PAM type: NNGRRT; PAM sequence: TGGGGT
gtgggttgtgccccgtggag

SEQ ID NO: 5795 - DNA, 20 bp, Artificial Sequence
  Description of Artificial Sequence: Synthetic oligonucleotide
  Target: COL7A1; (-) strand; PAM type: NNGRRT; PAM sequence: TGGAGT
gctcagtgggttgtgccccg

SEQ ID NO: 5796 - DNA, 20 bp, Artificial Sequence
  Description of Artificial Sequence: Synthetic oligonucleotide
  Target: COL7A1; (-) strand; PAM type: NNGRRT; PAM sequence: GTGGGT
aggtgagcagaagtggctca

SEQ ID NO: 5797 - DNA, 20 bp, Artificial Sequence
  Description of Artificial Sequence: Synthetic oligonucleotide
  Target: COL7A1; (-) strand; PAM type: NNGRRT; PAM sequence: TGGGAT
tgcgggagatcgtggagacc

SEQ ID NO: 5798 - DNA, 20 bp, Artificial Sequence
  Description of Artificial Sequence: Synthetic oligonucleotide
  Target: COL7A1; (-) strand; PAM type: NNGRRT; PAM sequence: GGGGGT
aggtgggttgtttaggggct

SEQ ID NO: 5799 - DNA, 20 bp, Artificial Sequence
  Description of Artificial Sequence: Synthetic oligonucleotide
  Target: COL7A1; (-) strand; PAM type: NNGRRT; PAM sequence: GTGGGT
tggaaactgctggcatcaag

SEQ ID NO: 5800 - DNA, 20 bp, Artificial Sequence
  Description of Artificial Sequence: Synthetic oligonucleotide
  Target: COL7A1; (-) strand; PAM type: NNGRRT; PAM sequence: GTGGAT
ccagactttgtccccagaat

SEQ ID NO: 5801 - DNA, 20 bp, Artificial Sequence
  Description of Artificial Sequence: Synthetic oligonucleotide
  Target: COL7A1; (-) strand; PAM type: NNGRRT; PAM sequence: CAGAAT
cttcacccagactttgtccc

SEQ ID NO: 5802 - DNA, 20 bp, Artificial Sequence
  Description of Artificial Sequence: Synthetic oligonucleotide
  Target: COL7A1; (-) strand; PAM type: NNGRRT; PAM sequence: AAGGGT
tgggcaagaggcctagggaa

SEQ ID NO: 5803 - DNA, 20 bp, Artificial Sequence
  Description of Artificial Sequence: Synthetic oligonucleotide
  Target: COL7A1; (-) strand; PAM type: NNGRRT; PAM sequence: AAGGGT
catgcctcaaccaagtgcta

SEQ ID NO: 5804 - DNA, 20 bp, Artificial Sequence
  Description of Artificial Sequence: Synthetic oligonucleotide
  Target: COL7A1; (-) strand; PAM type: NNGRRT; PAM sequence: AGGAGT
cacaccagaaaggggctccc

SEQ ID NO: 5805 - DNA, 20 bp, Artificial Sequence
  Description of Artificial Sequence: Synthetic oligonucleotide
  Target: COL7A1; (-) strand; PAM type: NNGRRT; PAM sequence: TGGGGT
tgttcagtgccctgccccat

SEQ ID NO: 5806 - DNA, 20 bp, Artificial Sequence
  Description of Artificial Sequence: Synthetic oligonucleotide
  Target: COL7A1; (-) strand; PAM type: NNGRRT; PAM sequence: TGGGAT
gtgtgccggtgagccaggct

SEQ ID NO: 5807 - DNA, 20 bp, Artificial Sequence
  Description of Artificial Sequence: Synthetic oligonucleotide
  Target: COL7A1; (-) strand; PAM type: NNGRRT; PAM sequence: CTGGAT
tcagggtgaccgtggggaga

SEQ ID NO: 5808 - DNA, 20 bp, Artificial Sequence
  Description of Artificial Sequence: Synthetic oligonucleotide
  Target: COL7A1; (-) strand; PAM type: NNGRRT; PAM sequence: CAGGGT
cacctggtcattcttgtttt

SEQ ID NO: 5809 - DNA, 20 bp, Artificial Sequence
  Description of Artificial Sequence: Synthetic oligonucleotide
  Target: COL7A1; (-) strand; PAM type: NNGRRT; PAM sequence: TTGGGT
ccccaaggtgagtgcggatg

SEQ ID NO: 5810 - DNA, 20 bp, Artificial Sequence
  Description of Artificial Sequence: Synthetic oligonucleotide
  Target: COL7A1; (-) strand; PAM type: NNGRRT; PAM sequence: GCGGAT
gcacgggccccaaggtgagt

SEQ ID NO: 5811 - DNA, 20 bp, Artificial Sequence
  Description of Artificial Sequence: Synthetic oligonucleotide
  Target: COL7A1; (-) strand; PAM type: NNGRRT; PAM sequence: GTGAGT
caggaggcacgggccccaag

SEQ ID NO: 5812 - DNA, 20 bp, Artificial Sequence
  Description of Artificial Sequence: Synthetic oligonucleotide
  Target: COL7A1; (-) strand; PAM type: NNGRRT; PAM sequence: CAGGGT
ctttgtgttctgccgtatct

SEQ ID NO: 5813 - DNA, 20 bp, Artificial Sequence
  Description of Artificial Sequence: Synthetic oligonucleotide
  Target: COL7A1; (-) strand; PAM type: NNGRRT; PAM sequence: CTGGGT
ctcctggccaggtgagtgtc

SEQ ID NO: 5814 - DNA, 20 bp, Artificial Sequence
  Description of Artificial Sequence: Synthetic oligonucleotide
  Target: COL7A1; (-) strand; PAM type: NNGRRT; PAM sequence: GTGAGT
cagtgggccctcctggccag

SEQ ID NO: 5815 - DNA, 20 bp, Artificial Sequence
  Description of Artificial Sequence: Synthetic oligonucleotide
  Target: COL7A1; (-) strand; PAM type: NNGRRT; PAM sequence: AAGGGT
cacagggtcgtgatggcccc

SEQ ID NO: 5816 - DNA, 20 bp, Artificial Sequence
  Description of Artificial Sequence: Synthetic oligonucleotide
  Target: COL7A1; (-) strand; PAM type: NNGRRT; PAM sequence: CAGGGT
gatgctggctgcatccttca

SEQ ID NO: 5817 - DNA, 20 bp, Artificial Sequence
  Description of Artificial Sequence: Synthetic oligonucleotide
  Target: COL7A1; (-) strand; PAM type: NNGRRT; PAM sequence: CAGGGT
tccactcttttctgaggtct

SEQ ID NO: 5818 - DNA, 20 bp, Artificial Sequence
  Description of Artificial Sequence: Synthetic oligonucleotide
  Target: COL7A1; (-) strand; PAM type: NNGRRT; PAM sequence: GGGAAT
acccctgaccctgaccctgg

SEQ ID NO: 5819 - DNA, 20 bp, Artificial Sequence
  Description of Artificial Sequence: Synthetic oligonucleotide
  Target: COL7A1; (-) strand; PAM type: NNGRRT; PAM sequence: TGGAGT
tctgggagagaagtgagtat

SEQ ID NO: 5820 - DNA, 20 bp, Artificial Sequence
  Description of Artificial Sequence: Synthetic oligonucleotide
  Target: COL7A1; (-) strand; PAM type: NNGRRT; PAM sequence: GTGAGT
caggcgcctctgggagagaa

SEQ ID NO: 5821 - DNA, 20 bp, Artificial Sequence
  Description of Artificial Sequence: Synthetic oligonucleotide
  Target: COL7A1; (-) strand; PAM type: NNGRRT; PAM sequence: TGGGGT
ggaaggtaaagtcccccacc

SEQ ID NO: 5822 - DNA, 20 bp, Artificial Sequence
  Description of Artificial Sequence: Synthetic oligonucleotide
  Target: COL7A1; (-) strand; PAM type: NNGRRT; PAM sequence: GTGAGT
cagtgaatgtttgggctgat

SEQ ID NO: 5823 - DNA, 20 bp, Artificial Sequence
  Description of Artificial Sequence: Synthetic oligonucleotide
  Target: COL7A1; (-) strand; PAM type: NNGRRT; PAM sequence: GTGAAT
tgtcttgcagccagacacca

SEQ ID NO: 5824 - DNA, 20 bp, Artificial Sequence
  Description of Artificial Sequence: Synthetic oligonucleotide
  Target: COL7A1; (-) strand; PAM type: NNGRRT; PAM sequence: TGGGGT
acatgtgtgcagttgcctgt

SEQ ID NO: 5825 - DNA, 20 bp, Artificial Sequence
  Description of Artificial Sequence: Synthetic oligonucleotide
  Target: COL7A1; (-) strand; PAM type: NNGRRT; PAM sequence: CAGAGT
tggagctacctctagagagc

SEQ ID NO: 5826 - DNA, 20 bp, Artificial Sequence
  Description of Artificial Sequence: Synthetic oligonucleotide
  Target: COL7A1; (-) strand; PAM type: NNGRRT; PAM sequence: ATGGAT
gtacatgtactaagacacac

SEQ ID NO: 5827 - DNA, 20 bp, Artificial Sequence
  Description of Artificial Sequence: Synthetic oligonucleotide
  Target: COL7A1; (-) strand; PAM type: NNGRRT; PAM sequence: ATGGGT
agaccaggacacacagaccc

SEQ ID NO: 5828 - DNA, 20 bp, Artificial Sequence
  Description of Artificial Sequence: Synthetic oligonucleotide
  Target: COL7A1; (-) strand; PAM type: NNGRRT; PAM sequence: AAGAGT
atacacattgagctacacac

SEQ ID NO: 5829 - DNA, 20 bp, Artificial Sequence
  Description of Artificial Sequence: Synthetic oligonucleotide
  Target: COL7A1; (-) strand; PAM type: NNGRRT; PAM sequence: ATGGAT
tgagacatggtgagacacac

SEQ ID NO: 5830 - DNA, 20 bp, Artificial Sequence
  Description of Artificial Sequence: Synthetic oligonucleotide
  Target: COL7A1; (-) strand; PAM type: NNGRRT; PAM sequence: CAGGAT
gtgaatgggccaatttatgc

SEQ ID NO: 5831 - DNA, 20 bp, Artificial Sequence
  Description of Artificial Sequence: Synthetic oligonucleotide
  Target: COL7A1; (-) strand; PAM type: NNGRRT; PAM sequence: GTGAAT
acagacacatagggagttag

SEQ ID NO: 5832 - DNA, 20 bp, Artificial Sequence
  Description of Artificial Sequence: Synthetic oligonucleotide
  Target: COL7A1; (-) strand; PAM type: NNGRRT; PAM sequence: GGGAGT
ggcagcctcacagacacata

SEQ ID NO: 5833 - DNA, 20 bp, Artificial Sequence
  Description of Artificial Sequence: Synthetic oligonucleotide
  Target: COL7A1; (-) strand; PAM type: NNGRRT; PAM sequence: TGGGAT
gcctcggcctcctaaagtgc

SEQ ID NO: 5834 - DNA, 20 bp, Artificial Sequence
  Description of Artificial Sequence: Synthetic oligonucleotide
  Target: COL7A1; (-) strand; PAM type: NNGRRT; PAM sequence: TGGGGT
ttttgtatttttagtagaga

SEQ ID NO: 5835 - DNA, 20 bp, Artificial Sequence
  Description of Artificial Sequence: Synthetic oligonucleotide
  Target: COL7A1; (-) strand; PAM type: NNGRRT; PAM sequence: TGGGAT
gcctcaacctcccgagtaac

SEQ ID NO: 5836 - DNA, 20 bp, Artificial Sequence
  Description of Artificial Sequence: Synthetic oligonucleotide
  Target: COL7A1; (-) strand; PAM type: NNGRRT; PAM sequence: CCGAGT
gattctcctgcctcaacctc

SEQ ID NO: 5837 - DNA, 20 bp, Artificial Sequence
  Description of Artificial Sequence: Synthetic oligonucleotide
  Target: COL7A1; (-) strand; PAM type: NNGRRT; PAM sequence: TCGGGT
ctcactgcaaccttcgactc

SEQ ID NO: 5838 - DNA, 20 bp, Artificial Sequence
  Description of Artificial Sequence: Synthetic oligonucleotide
  Target: COL7A1; (-) strand; PAM type: NNGRRT; PAM sequence: TGGAGT
ttcgctcttgttgcccaggt

SEQ ID NO: 5839 - DNA, 20 bp, Artificial Sequence
  Description of Artificial Sequence: Synthetic oligonucleotide
  Target: COL7A1; (-) strand; PAM type: NNGRRT; PAM sequence: TGGAGT
tagtttttttttttttgaga

SEQ ID NO: 5840 - DNA, 20 bp, Artificial Sequence
  Description of Artificial Sequence: Synthetic oligonucleotide
  Target: COL7A1; (-) strand; PAM type: NNGRRT; PAM sequence: GTGAGT
ctggcctgaatggaaaaaac

SEQ ID NO: 5841 - DNA, 20 bp, Artificial Sequence
  Description of Artificial Sequence: Synthetic oligonucleotide
  Target: COL7A1; (-) strand; PAM type: NNGRRT; PAM sequence: CTGAAT
gcgaggatggcaaacctggc

SEQ ID NO: 5842 - DNA, 20 bp, Artificial Sequence
  Description of Artificial Sequence: Synthetic oligonucleotide
  Target: COL7A1; (-) strand; PAM type: NNGRRT; PAM sequence: GAGGAT
tcccacagggaaagccaggc

SEQ ID NO: 5843 - DNA, 20 bp, Artificial Sequence
  Description of Artificial Sequence: Synthetic oligonucleotide
  Target: COL7A1; (-) strand; PAM type: NNGRRT; PAM sequence: CTGGAT
ccctggcccctctggtcccc

SEQ ID NO: 5844 - DNA, 20 bp, Artificial Sequence
  Description of Artificial Sequence: Synthetic oligonucleotide
  Target: COL7A1; (-) strand; PAM type: NNGRRT; PAM sequence: AGGGAT
agtccatggggtgtgcccca

SEQ ID NO: 5845 - DNA, 20 bp, Artificial Sequence
  Description of Artificial Sequence: Synthetic oligonucleotide
  Target: COL7A1; (-) strand; PAM type: NNGRRT; PAM sequence: TGGGGT
tttggggtcctcttagtcca

SEQ ID NO: 5846 - DNA, 20 bp, Artificial Sequence
  Description of Artificial Sequence: Synthetic oligonucleotide
  Target: COL7A1; (-) strand; PAM type: NNGRRT; PAM sequence: TGGGGT
accctggagggagatctttt

SEQ ID NO: 5847 - DNA, 20 bp, Artificial Sequence
  Description of Artificial Sequence: Synthetic oligonucleotide
  Target: COL7A1; (-) strand; PAM type: NNGRRT; PAM sequence: GGGGGT
caatgggacctctcagtcct

SEQ ID NO: 5848 - DNA, 20 bp, Artificial Sequence
  Description of Artificial Sequence: Synthetic oligonucleotide
  Target: COL7A1; (-) strand; PAM type: NNGRRT; PAM sequence: AGGGAT
atccatggggtctgtgcctg

SEQ ID NO: 5849 - DNA, 20 bp, Artificial Sequence
  Description of Artificial Sequence: Synthetic oligonucleotide
  Target: COL7A1; (-) strand; PAM type: NNGRRT; PAM sequence: TGGGGT
tcagcaggggcccccatcca

SEQ ID NO: 5850 - DNA, 20 bp, Artificial Sequence
  Description of Artificial Sequence: Synthetic oligonucleotide
  Target: COL7A1; (-) strand; PAM type: NNGRRT; PAM sequence: GGGAGT
gtcctgggggttcttccctt

SEQ ID NO: 5851 - DNA, 20 bp, Artificial Sequence
  Description of Artificial Sequence: Synthetic oligonucleotide
  Target: COL7A1; (-) strand; PAM type: NNGRRT; PAM sequence: GGGGGT
tcataggccctccaagtcct

SEQ ID NO: 5852 - DNA, 20 bp, Artificial Sequence
  Description of Artificial Sequence: Synthetic oligonucleotide
  Target: COL7A1; (-) strand; PAM type: NNGRRT; PAM sequence: GGGGGT
tttctgaccttctttgcctt

SEQ ID NO: 5853 - DNA, 20 bp, Artificial Sequence
  Description of Artificial Sequence: Synthetic oligonucleotide
  Target: COL7A1; (-) strand; PAM type: NNGRRT; PAM sequence: TAGAAT
ccctggcacacaggttttag

SEQ ID NO: 5854 - DNA, 20 bp, Artificial Sequence
  Description of Artificial Sequence: Synthetic oligonucleotide
  Target: COL7A1; (-) strand; PAM type: NNGRRT; PAM sequence: GAGGGT
cggttcagccttgcctttgg

SEQ ID NO: 5855 - DNA, 20 bp, Artificial Sequence
  Description of Artificial Sequence: Synthetic oligonucleotide
  Target: COL7A1; (-) strand; PAM type: NNGRRT; PAM sequence: GGGGGT
agcatccgagagagttggtg

SEQ ID NO: 5856 - DNA, 20 bp, Artificial Sequence
  Description of Artificial Sequence: Synthetic oligonucleotide
  Target: COL7A1; (-) strand; PAM type: NNGRRT; PAM sequence: GAGAGT
atcatagtcacagcatccga

SEQ ID NO: 5857 - DNA, 20 bp, Artificial Sequence
  Description of Artificial Sequence: Synthetic oligonucleotide
  Target: COL7A1; (-) strand; PAM type: NNGRRT; PAM sequence: CAGGGT
actgactttgagtctctcct

SEQ ID NO: 5858 - DNA, 20 bp, Artificial Sequence
  Description of Artificial Sequence: Synthetic oligonucleotide
  Target: COL7A1; (-) strand; PAM type: NNGRRT; PAM sequence: TTGAGT
atgaccatgatgaactgact

SEQ ID NO: 5859 - DNA, 20 bp, Artificial Sequence
  Description of Artificial Sequence: Synthetic oligonucleotide
  Target: COL7A1; (-) strand; PAM type: NNGRRT; PAM sequence: CTGGGT
gtcttctcccagagccctgc

SEQ ID NO: 5860 - DNA, 20 bp, Artificial Sequence
  Description of Artificial Sequence: Synthetic oligonucleotide
  Target: COL7A1; (-) strand; PAM type: NNGRRT; PAM sequence: GTGAGT
ctgggccctctgggccgaat

SEQ ID NO: 5861 - DNA, 20 bp, Artificial Sequence
  Description of Artificial Sequence: Synthetic oligonucleotide
  Target: COL7A1; (-) strand; PAM type: NNGRRT; PAM sequence: CCGAAT
gagccgctgggccctctggg

SEQ ID NO: 5862 - DNA, 20 bp, Artificial Sequence
  Description of Artificial Sequence: Synthetic oligonucleotide
  Target: COL7A1; (-) strand; PAM type: NNGRRT; PAM sequence: CTGGAT
ggctggatggccggagcgga

SEQ ID NO: 5863 - DNA, 20 bp, Artificial Sequence
  Description of Artificial Sequence: Synthetic oligonucleotide
  Target: COL7A1; (-) strand; PAM type: NNGRRT; PAM sequence: CTGGAT
gtgaccggggtccccctggg

SEQ ID NO: 5864 - DNA, 20 bp, Artificial Sequence
  Description of Artificial Sequence: Synthetic oligonucleotide
  Target: COL7A1; (-) strand; PAM type: NNGRRT; PAM sequence: CGGGGT
tctattttccacagggtgac

SEQ ID NO: 5865 - DNA, 20 bp, Artificial Sequence
  Description of Artificial Sequence: Synthetic oligonucleotide
  Target: COL7A1; (-) strand; PAM type: NNGRRT; PAM sequence: CAGGGT
tcttaccactctattttcca

SEQ ID NO: 5866 - DNA, 20 bp, Artificial Sequence
  Description of Artificial Sequence: Synthetic oligonucleotide
  Target: COL7A1; (-) strand; PAM type: NNGRRT; PAM sequence: CTGGGT
gggtttctcaggacatgagc

SEQ ID NO: 5867 - DNA, 20 bp, Artificial Sequence
  Description of Artificial Sequence: Synthetic oligonucleotide
  Target: COL7A1; (-) strand; PAM type: NNGRRT; PAM sequence: GGGGGT
gagaaaaggtgagagggtgt

SEQ ID NO: 5868 - DNA, 20 bp, Artificial Sequence
  Description of Artificial Sequence: Synthetic oligonucleotide
  Target: COL7A1; (-) strand; PAM type: NNGRRT; PAM sequence: GAGGGT
cccagcaggagaaaaggtga

SEQ ID NO: 5869 - DNA, 20 bp, Artificial Sequence
  Description of Artificial Sequence: Synthetic oligonucleotide
  Target: COL7A1; (-) strand; PAM type: NNGRRT; PAM sequence: GTGAGT
ggggacccccaggcccacag

SEQ ID NO: 5870 - DNA, 20 bp, Artificial Sequence
  Description of Artificial Sequence: Synthetic oligonucleotide
  Target: COL7A1; (-) strand; PAM type: NNGRRT; PAM sequence: AAGGGT
cccctatcctcagggcattg

SEQ ID NO: 5871 - DNA, 20 bp, Artificial Sequence
  Description of Artificial Sequence: Synthetic oligonucleotide
  Target: COL7A1; (-) strand; PAM type: NNGRRT; PAM sequence: GGGGGT
ggtgagtgtgattggtcctc

SEQ ID NO: 5872 - DNA, 20 bp, Artificial Sequence
  Description of Artificial Sequence: Synthetic oligonucleotide
  Target: COL7A1; (-) strand; PAM type: NNGRRT; PAM sequence: GTGAGT
ctggagcccctggggaaagg

SEQ ID NO: 5873 - DNA, 20 bp, Artificial Sequence
  Description of Artificial Sequence: Synthetic oligonucleotide
  Target: COL7A1; (-) strand; PAM type: NNGRRT; PAM sequence: AAGGGT
ctccctggagcccctgggga

SEQ ID NO: 5874 - DNA, 20 bp, Artificial Sequence
  Description of Artificial Sequence: Synthetic oligonucleotide
  Target: COL7A1; (-) strand; PAM type: NNGRRT; PAM sequence: AAGGGT
aagagggtcctcgagggccc

SEQ ID NO: 5875 - DNA, 20 bp, Artificial Sequence
  Description of Artificial Sequence: Synthetic oligonucleotide
  Target: COL7A1; (-) strand; PAM type: NNGRRT; PAM sequence: GAGGGT
agcctggggaccgcggacaa

SEQ ID NO: 5876 - DNA, 20 bp, Artificial Sequence
  Description of Artificial Sequence: Synthetic oligonucleotide
  Target: COL7A1; (-) strand; PAM type: NNGRRT; PAM sequence: GAGGGT
ggtattagggtctgtgggtg

SEQ ID NO: 5877 - DNA, 20 bp, Artificial Sequence
  Description of Artificial Sequence: Synthetic oligonucleotide
  Target: COL7A1; (-) strand; PAM type: NNGRRT; PAM sequence: GTGGGT
gagagaaggtattagggtct

SEQ ID NO: 5878 - DNA, 20 bp, Artificial Sequence
  Description of Artificial Sequence: Synthetic oligonucleotide
  Target: COL7A1; (-) strand; PAM type: NNGRRT; PAM sequence: TAGGGT
tggagccagagagaaggtat

SEQ ID NO: 5879 - DNA, 20 bp, Artificial Sequence
  Description of Artificial Sequence: Synthetic oligonucleotide
  Target: COL7A1; (-) strand; PAM type: NNGRRT; PAM sequence: GCGGAT
actgtccctctgaaacctcc

SEQ ID NO: 5880 - DNA, 20 bp, Artificial Sequence
  Description of Artificial Sequence: Synthetic oligonucleotide
  Target: COL7A1; (-) strand; PAM type: NNGRRT; PAM sequence: CTGGGT
gacggctggtaagggctgcg

SEQ ID NO: 5881 - DNA, 20 bp, Artificial Sequence
  Description of Artificial Sequence: Synthetic oligonucleotide
  Target: COL7A1; (-) strand; PAM type: NNGRRT; PAM sequence: CAGGGT
actataatcatttcctttcc

SEQ ID NO: 5882 - DNA, 20 bp, Artificial Sequence
  Description of Artificial Sequence: Synthetic oligonucleotide
  Target: COL7A1; (-) strand; PAM type: NNGRRT; PAM sequence: CAGAGT
tgcttcggggaacttggggg

SEQ ID NO: 5883 - DNA, 20 bp, Artificial Sequence
  Description of Artificial Sequence: Synthetic oligonucleotide
  Target: COL7A1; (-) strand; PAM type: NNGRRT; PAM sequence: TGGGGT
tgcctgctgggggctggcat

SEQ ID NO: 5884 - DNA, 20 bp, Artificial Sequence
  Description of Artificial Sequence: Synthetic oligonucleotide
  Target: COL7A1; (-) strand; PAM type: NNGRRT; PAM sequence: ATGGAT
tggaggtccaggtgggaagc

SEQ ID NO: 5885 - DNA, 20 bp, Artificial Sequence
  Description of Artificial Sequence: Synthetic oligonucleotide
  Target: COL7A1; (-) strand; PAM type: NNGRRT; PAM sequence: AGGGGT
tgccagtgtgccttcacaca

SEQ ID NO: 5886 - DNA, 20 bp, Artificial Sequence
  Description of Artificial Sequence: Synthetic oligonucleotide
  Target: COL7A1; (-) strand; PAM type: NNGRRT; PAM sequence: GAGGGT
tcctgggctcagaagggatg

SEQ ID NO: 5887 - DNA, 20 bp, Artificial Sequence
  Description of Artificial Sequence: Synthetic oligonucleotide
  Target: COL7A1; (-) strand; PAM type: NNGRRT; PAM sequence: AGGGAT
gctggtgtcctgggctcaga

SEQ ID NO: 5888 - DNA, 20 bp, Artificial Sequence
  Description of Artificial Sequence: Synthetic oligonucleotide
  Target: COL7A1; (-) strand; PAM type: NNGRRT; PAM sequence: GTGAGT
agggtgaccgtggggagccg

SEQ ID NO: 5889 - DNA, 20 bp, Artificial Sequence
  Description of Artificial Sequence: Synthetic oligonucleotide
  Target: COL7A1; (-) strand; PAM type: NNGRRT; PAM sequence: AAGGGT
gccctggatcatctggaccc

SEQ ID NO: 5890 - DNA, 20 bp, Artificial Sequence
  Description of Artificial Sequence: Synthetic oligonucleotide
  Target: COL7A1; (-) strand; PAM type: NNGRRT; PAM sequence: CTGGAT
tgcctttctgcagggcagcc

SEQ ID NO: 5891 - DNA, 20 bp, Artificial Sequence
  Description of Artificial Sequence: Synthetic oligonucleotide
  Target: COL7A1; (-) strand; PAM type: NNGRRT; PAM sequence: TTGAGT
ctcccaaactgctgcctacc

SEQ ID NO: 5892 - DNA, 20 bp, Artificial Sequence
  Description of Artificial Sequence: Synthetic oligonucleotide
  Target: COL7A1; (-) strand; PAM type: NNGRRT; PAM sequence: ATGAGT
tgaaggctaccaacattccc

SEQ ID NO: 5893 - DNA, 20 bp, Artificial Sequence
  Description of Artificial Sequence: Synthetic oligonucleotide
  Target: COL7A1; (-) strand; PAM type: NNGRRT; PAM sequence: GTGAGT
ctggagaggatggacgaaat

SEQ ID NO: 5894 - DNA, 20 bp, Artificial Sequence
  Description of Artificial Sequence: Synthetic oligonucleotide
  Target: COL7A1; (-) strand; PAM type: NNGRRT; PAM sequence: GAGGAT
gagaccagggagatcctgga

SEQ ID NO: 5895 - DNA, 20 bp, Artificial Sequence
  Description of Artificial Sequence: Synthetic oligonucleotide
  Target: COL7A1; (-) strand; PAM type: NNGRRT; PAM sequence: GTGGGT
cacctggagttcgggggcct

SEQ ID NO: 5896 - DNA, 20 bp, Artificial Sequence
  Description of Artificial Sequence: Synthetic oligonucleotide
  Target: COL7A1; (-) strand; PAM type: NNGRRT; PAM sequence: TGGAGT
tgctcttcttagggggcacc

SEQ ID NO: 5897 - DNA, 20 bp, Artificial Sequence
  Description of Artificial Sequence: Synthetic oligonucleotide
  Target: COL7A1; (-) strand; PAM type: NNGRRT; PAM sequence: GAGGGT
gggcacctgcaaaatattgg

SEQ ID NO: 5898 - DNA, 20 bp, Artificial Sequence
  Description of Artificial Sequence: Synthetic oligonucleotide
  Target: COL7A1; (-) strand; PAM type: NNGRRT; PAM sequence: GCGGGT
ggggaacctggggcagtgta

SEQ ID NO: 5899 - DNA, 20 bp, Artificial Sequence
  Description of Artificial Sequence: Synthetic oligonucleotide
  Target: COL7A1; (-) strand; PAM type: NNGRRT; PAM sequence: TGGAGT
ggaacctctgatgtggattt

SEQ ID NO: 5900 - DNA, 20 bp, Artificial Sequence
  Description of Artificial Sequence: Synthetic oligonucleotide
  Target: COL7A1; (-) strand; PAM type: NNGRRT; PAM sequence: GTGGAT
gggtgatgggaacctctgat

SEQ ID NO: 5901 - DNA, 20 bp, Artificial Sequence
  Description of Artificial Sequence: Synthetic oligonucleotide
  Target: COL7A1; (-) strand; PAM type: NNGRRT; PAM sequence: TGGGGT
ggagtccctgcagggaggca

SEQ ID NO: 5902 - DNA, 20 bp, Artificial Sequence
  Description of Artificial Sequence: Synthetic oligonucleotide
  Target: COL7A1; (-) strand; PAM type: NNGRRT; PAM sequence: GGGAGT
tgaggggggtaaggggtgat

SEQ ID NO: 5903 - DNA, 20 bp, Artificial Sequence
  Description of Artificial Sequence: Synthetic oligonucleotide
  Target: COL7A1; (-) strand; PAM type: NNGRRT; PAM sequence: AGGGGT
aggaaaggctgaggggggta

SEQ ID NO: 5904 - DNA, 20 bp, Artificial Sequence
  Description of Artificial Sequence: Synthetic oligonucleotide
  Target: COL7A1; (-) strand; PAM type: NNGRRT; PAM sequence: GGGGGT
aggtgataggaaaggctgag

SEQ ID NO: 5905 - DNA, 20 bp, Artificial Sequence
  Description of Artificial Sequence: Synthetic oligonucleotide
  Target: COL7A1; (-) strand; PAM type: NNGRRT; PAM sequence: AGGGGT
tcttggcagagagaagtaac

SEQ ID NO: 5906 - DNA, 20 bp, Artificial Sequence
  Description of Artificial Sequence: Synthetic oligonucleotide
  Target: COL7A1; (-) strand; PAM type: NNGRRT; PAM sequence: GTGAGT
caggcgagcgtggccttcgg

SEQ ID NO: 5907 - DNA, 20 bp, Artificial Sequence
  Description of Artificial Sequence: Synthetic oligonucleotide
  Target: COL7A1; (-) strand; PAM type: NNGRRT; PAM sequence: TCGGGT
aaagcaggcgagcgtggcct

SEQ ID NO: 5908 - DNA, 20 bp, Artificial Sequence
  Description of Artificial Sequence: Synthetic oligonucleotide
  Target: COL7A1; (-) strand; PAM type: NNGRRT; PAM sequence: CCGGGT
ctctctatcaccagggtgac

SEQ ID NO: 5909 - DNA, 20 bp, Artificial Sequence
  Description of Artificial Sequence: Synthetic oligonucleotide
  Target: COL7A1; (-) strand; PAM type: NNGRRT; PAM sequence: CAGGGT
atgacttttctctctatcac

SEQ ID NO: 5910 - DNA, 20 bp, Artificial Sequence
  Description of Artificial Sequence: Synthetic oligonucleotide
  Target: COL7A1; (-) strand; PAM type: NNGRRT; PAM sequence: GTGAGT
tctctgtcccctctccctga

SEQ ID NO: 5911 - DNA, 20 bp, Artificial Sequence
  Description of Artificial Sequence: Synthetic oligonucleotide
  Target: COL7A1; (-) strand; PAM type: NNGRRT; PAM sequence: CTGAGT
cccttctctgtcccctctcc

SEQ ID NO: 5912 - DNA, 20 bp, Artificial Sequence
  Description of Artificial Sequence: Synthetic oligonucleotide
  Target: COL7A1; (-) strand; PAM type: NNGRRT; PAM sequence: TAGGAT
ctgatcctttacccttgaac

SEQ ID NO: 5913 - DNA, 20 bp, Artificial Sequence
  Description of Artificial Sequence: Synthetic oligonucleotide
  Target: COL7A1; (-) strand; PAM type: NNGRRT; PAM sequence: GAGGGT
aagttggagagaaaggtgac

SEQ ID NO: 5914 - DNA, 20 bp, Artificial Sequence
  Description of Artificial Sequence: Synthetic oligonucleotide
  Target: COL7A1; (-) strand; PAM type: NNGRRT; PAM sequence: CAGGGT
gggctgactctcatgtttca

SEQ ID NO: 5915 - DNA, 20 bp, Artificial Sequence
  Description of Artificial Sequence: Synthetic oligonucleotide
  Target: COL7A1; (-) strand; PAM type: NNGRRT; PAM sequence: GGGGGT
agggctgttgccagcatcat

SEQ ID NO: 5916 - DNA, 20 bp, Artificial Sequence
  Description of Artificial Sequence: Synthetic oligonucleotide
  Target: COL7A1; (-) strand; PAM type: NNGRRT; PAM sequence: GGGAGT
gggggagtcatggcgggtaa

SEQ ID NO: 5917 - DNA, 20 bp, Artificial Sequence
  Description of Artificial Sequence: Synthetic oligonucleotide
  Target: COL7A1; (-) strand; PAM type: NNGRRT; PAM sequence: GCGGGT
ctggagtcgggggagtcatg

SEQ ID NO: 5918 - DNA, 20 bp, Artificial Sequence
  Description of Artificial Sequence: Synthetic oligonucleotide
  Target: COL7A1; (-) strand; PAM type: NNGRRT; PAM sequence: GGGAGT
atgtaagaggctggagtcgg

SEQ ID NO: 5919 - DNA, 20 bp, Artificial Sequence
  Description of Artificial Sequence: Synthetic oligonucleotide
  Target: COL7A1; (-) strand; PAM type: NNGRRT; PAM sequence: TGGAGT
gaggacgagatgtaagaggc

SEQ ID NO: 5920 - DNA, 20 bp, Artificial Sequence
  Description of Artificial Sequence: Synthetic oligonucleotide
  Target: COL7A1; (-) strand; PAM type: NNGRRT; PAM sequence: CAGGGT
cctccctcttgcctcctcca

SEQ ID NO: 5921 - DNA, 20 bp, Artificial Sequence
  Description of Artificial Sequence: Synthetic oligonucleotide
  Target: COL7A1; (-) strand; PAM type: NNGRRT; PAM sequence: TGGGGT
ctgggcaacctcaaggcttc

SEQ ID NO: 5922 - DNA, 20 bp, Artificial Sequence
  Description of Artificial Sequence: Synthetic oligonucleotide
  Target: COL7A1; (-) strand; PAM type: NNGRRT; PAM sequence: GTGAGT
ctggcagagcaggaccccca

SEQ ID NO: 5923 - DNA, 20 bp, Artificial Sequence
  Description of Artificial Sequence: Synthetic oligonucleotide
  Target: COL7A1; (-) strand; PAM type: NNGRRT; PAM sequence: CAGGGT
tgccccccttctgtcccctt

SEQ ID NO: 5924 - DNA, 20 bp, Artificial Sequence
  Description of Artificial Sequence: Synthetic oligonucleotide
  Target: COL7A1; (-) strand; PAM type: NNGRRT; PAM sequence: GGGAGT
ggtgaatcaatgtgggaatg

SEQ ID NO: 5925 - DNA, 20 bp, Artificial Sequence
  Description of Artificial Sequence: Synthetic oligonucleotide
  Target: COL7A1; (-) strand; PAM type: NNGRRT; PAM sequence: GGGAAT
gagaccgggtgaatcaatgt

SEQ ID NO: 5926 - DNA, 20 bp, Artificial Sequence
  Description of Artificial Sequence: Synthetic oligonucleotide
  Target: COL7A1; (-) strand; PAM type: NNGRRT; PAM sequence: GTGAAT
agggagaccctggagaccgg

SEQ ID NO: 5927 - DNA, 20 bp, Artificial Sequence
  Description of Artificial Sequence: Synthetic oligonucleotide
  Target: COL7A1; (-) strand; PAM type: NNGRRT; PAM sequence: CCGGGT
cccaagggagaccctggaga

SEQ ID NO: 5928 - DNA, 20 bp, Artificial Sequence
  Description of Artificial Sequence: Synthetic oligonucleotide
  Target: COL7A1; (-) strand; PAM type: NNGRRT; PAM sequence: ACGGGT
gctaccggagtccaagggga

SEQ ID NO: 5929 - DNA, 20 bp, Artificial Sequence
  Description of Artificial Sequence: Synthetic oligonucleotide
  Target: COL7A1; (-) strand; PAM type: NNGRRT; PAM sequence: CGGAGT
gctgggcccagaggagctac

SEQ ID NO: 5930 - DNA, 20 bp, Artificial Sequence
  Description of Artificial Sequence: Synthetic oligonucleotide
  Target: COL7A1; (-) strand; PAM type: NNGRRT; PAM sequence: GGGGGT
tcacaggacttgctgggtca

SEQ ID NO: 5931 - DNA, 20 bp, Artificial Sequence
  Description of Artificial Sequence: Synthetic oligonucleotide
  Target: COL7A1; (-) strand; PAM type: NNGRRT; PAM sequence: CTGGGT
ttggggggtcacaggacttg

SEQ ID NO: 5932 - DNA, 20 bp, Artificial Sequence
  Description of Artificial Sequence: Synthetic oligonucleotide
  Target: COL7A1; (-) strand; PAM type: NNGRRT; PAM sequence: GGGGGT
gggcctatctatgggacttg

SEQ ID NO: 5933 - DNA, 20 bp, Artificial Sequence
  Description of Artificial Sequence: Synthetic oligonucleotide
  Target: COL7A1; (-) strand; PAM type: NNGRRT; PAM sequence: CAGGGT
ggggcaaggggaggtttcta

SEQ ID NO: 5934 - DNA, 20 bp, Artificial Sequence
  Description of Artificial Sequence: Synthetic oligonucleotide
  Target: COL7A1; (-) strand; PAM type: NNGRRT; PAM sequence: GAGGAT
gcagtggtggtgagtgacgg

SEQ ID NO: 5935 - DNA, 20 bp, Artificial Sequence
  Description of Artificial Sequence: Synthetic oligonucleotide
  Target: COL7A1; (-) strand; PAM type: NNGRRT; PAM sequence: GTGAGT
ctggggaccctgcagtggtg

SEQ ID NO: 5936 - DNA, 20 bp, Artificial Sequence
  Description of Artificial Sequence: Synthetic oligonucleotide
  Target: COL7A1; (-) strand; PAM type: NNGRRT; PAM sequence: TGGGAT
ggatgtggcagatgggacac

SEQ ID NO: 5937 - DNA, 20 bp, Artificial Sequence
  Description of Artificial Sequence: Synthetic oligonucleotide
  Target: COL7A1; (-) strand; PAM type: NNGRRT; PAM sequence: AGGGAT
gggtggcactgtctggtact

SEQ ID NO: 5938 - DNA, 20 bp, Artificial Sequence
  Description of Artificial Sequence: Synthetic oligonucleotide
  Target: COL7A1; (-) strand; PAM type: NNGRRT; PAM sequence: GGGGGT
gagaaggtgggtcctcggct

SEQ ID NO: 5939 - DNA, 20 bp, Artificial Sequence
  Description of Artificial Sequence: Synthetic oligonucleotide
  Target: COL7A1; (-) strand; PAM type: NNGRRT; PAM sequence: GTGGGT
ctggccgccaaggagagaag

SEQ ID NO: 5940 - DNA, 20 bp, Artificial Sequence
  Description of Artificial Sequence: Synthetic oligonucleotide
  Target: COL7A1; (-) strand; PAM type: NNGRRT; PAM sequence: AGGAGT
tctgtgactgtggtgggacc

SEQ ID NO: 5941 - DNA, 20 bp, Artificial Sequence
  Description of Artificial Sequence: Synthetic oligonucleotide
  Target: COL7A1; (-) strand; PAM type: NNGRRT; PAM sequence: GTGAGT
ctggagccaagggtcctgaa

SEQ ID NO: 5942 - DNA, 20 bp, Artificial Sequence
  Description of Artificial Sequence: Synthetic oligonucleotide
  Target: COL7A1; (-) strand; PAM type: NNGRRT; PAM sequence: AAGGGT
ttgctggacgtcctggagcc

SEQ ID NO: 5943 - DNA, 20 bp, Artificial Sequence
  Description of Artificial Sequence: Synthetic oligonucleotide
  Target: COL7A1; (-) strand; PAM type: NNGRRT; PAM sequence: AGGGGT
cctctcctccaggggctgcc

SEQ ID NO: 5944 - DNA, 20 bp, Artificial Sequence
  Description of Artificial Sequence: Synthetic oligonucleotide
  Target: COL7A1; (-) strand; PAM type: NNGRRT; PAM sequence: CCGGGT
cccccaggcccagcgggatc

SEQ ID NO: 5945 - DNA, 20 bp, Artificial Sequence
  Description of Artificial Sequence: Synthetic oligonucleotide
  Target: COL7A1; (-) strand; PAM type: NNGRRT; PAM sequence: CGGGAT
acgtggacccccaggcccag

SEQ ID NO: 5946 - DNA, 20 bp, Artificial Sequence
  Description of Artificial Sequence: Synthetic oligonucleotide
  Target: COL7A1; (-) strand; PAM type: NNGRRT; PAM sequence: GAGGAT
ggggggtgccaagggccctg

SEQ ID NO: 5947 - DNA, 20 bp, Artificial Sequence
  Description of Artificial Sequence: Synthetic oligonucleotide
  Target: COL7A1; (-) strand; PAM type: NNGRRT; PAM sequence: GGGGGT
gagaaggtaagtgcaacctg

SEQ ID NO: 5948 - DNA, 20 bp, Artificial Sequence
  Description of Artificial Sequence: Synthetic oligonucleotide
  Target: COL7A1; (-) strand; PAM type: NNGRRT; PAM sequence: CTGGGT
accggggctttccagggccc

SEQ ID NO: 5949 - DNA, 20 bp, Artificial Sequence
  Description of Artificial Sequence: Synthetic oligonucleotide
  Target: COL7A1; (-) strand; PAM type: NNGRRT; PAM sequence: CAGGGT
tttctctcaccctctctctt

SEQ ID NO: 5950 - DNA, 20 bp, Artificial Sequence
  Description of Artificial Sequence: Synthetic oligonucleotide
  Target: COL7A1; (-) strand; PAM type: NNGRRT; PAM sequence: TGGGGT
ggagtttgggaccccttgtc

SEQ ID NO: 5951 - DNA, 20 bp, Artificial Sequence
  Description of Artificial Sequence: Synthetic oligonucleotide
  Target: COL7A1; (-) strand; PAM type: NNGRRT; PAM sequence: TGGAGT
gtggttttggagggggtggt

SEQ ID NO: 5952 - DNA, 20 bp, Artificial Sequence
  Description of Artificial Sequence: Synthetic oligonucleotide
  Target: COL7A1; (-) strand; PAM type: NNGRRT; PAM sequence: GGGGGT
tcagaggtcgtggttttgga

SEQ ID NO: 5953 - DNA, 20 bp, Artificial Sequence
  Description of Artificial Sequence: Synthetic oligonucleotide
  Target: COL7A1; (-) strand; PAM type: NNGRRT; PAM sequence: AAGAGT
aggctggaagataaggagat

SEQ ID NO: 5954 - DNA, 20 bp, Artificial Sequence
  Description of Artificial Sequence: Synthetic oligonucleotide
  Target: COL7A1; (-) strand; PAM type: NNGRRT; PAM sequence: AGGGGT
agttgggggattcaggtgtg

SEQ ID NO: 5955 - DNA, 20 bp, Artificial Sequence
  Description of Artificial Sequence: Synthetic oligonucleotide
  Target: COL7A1; (-) strand; PAM type: NNGRRT; PAM sequence: GGGGAT
cccaaagtgagtaccagttg

SEQ ID NO: 5956 - DNA, 20 bp, Artificial Sequence
  Description of Artificial Sequence: Synthetic oligonucleotide
  Target: COL7A1; (-) strand; PAM type: NNGRRT; PAM sequence: GTGAGT
ctggagctattggccccaaa

SEQ ID NO: 5957 - DNA, 20 bp, Artificial Sequence
  Description of Artificial Sequence: Synthetic oligonucleotide
  Target: COL7A1; (-) strand; PAM type: NNGRRT; PAM sequence: CTGAAT
gagtggaggggccagggatt

SEQ ID NO: 5958 - DNA, 20 bp, Artificial Sequence
  Description of Artificial Sequence: Synthetic oligonucleotide
  Target: COL7A1; (-) strand; PAM type: NNGRRT; PAM sequence: AGGGAT
agcaggtgagtggaggggcc

SEQ ID NO: 5959 - DNA, 20 bp, Artificial Sequence
  Description of Artificial Sequence: Synthetic oligonucleotide
  Target: COL7A1; (-) strand; PAM type: NNGRRT; PAM sequence: GTGAGT
ctgggtctccgggtgagcag

SEQ ID NO: 5960 - DNA, 20 bp, Artificial Sequence
  Description of Artificial Sequence: Synthetic oligonucleotide
  Target: COL7A1; (-) strand; PAM type: NNGRRT; PAM sequence: CCGGGT
tcccaggacaacctgggtct

SEQ ID NO: 5961 - DNA, 20 bp, Artificial Sequence
  Description of Artificial Sequence: Synthetic oligonucleotide
  Target: COL7A1; (-) strand; PAM type: NNGRRT; PAM sequence: CTGGGT
tccaggcctcccaggacaac

SEQ ID NO: 5962 - DNA, 20 bp, Artificial Sequence
  Description of Artificial Sequence: Synthetic oligonucleotide
  Target: COL7A1; (-) strand; PAM type: NNGRRT; PAM sequence: GAGGAT
ttctccttcagggtgactct

SEQ ID NO: 5963 - DNA, 20 bp, Artificial Sequence
  Description of Artificial Sequence: Synthetic oligonucleotide
  Target: COL7A1; (-) strand; PAM type: NNGRRT; PAM sequence: CAGGGT
ccacccgtgtgtttctcctt

SEQ ID NO: 5964 - DNA, 20 bp, Artificial Sequence
  Description of Artificial Sequence: Synthetic oligonucleotide
  Target: COL7A1; (-) strand; PAM type: NNGRRT; PAM sequence: TGGGGT
acttgatgatgtcccagttc

SEQ ID NO: 5965 - DNA, 20 bp, Artificial Sequence
  Description of Artificial Sequence: Synthetic oligonucleotide
  Target: COL7A1; (-) strand; PAM type: NNGRRT; PAM sequence: TAGGGT
tatttttactcacttcttcc

SEQ ID NO: 5966 - DNA, 20 bp, Artificial Sequence
  Description of Artificial Sequence: Synthetic oligonucleotide
  Target: COL7A1; (-) strand; PAM type: NNGRRT; PAM sequence: TTGGGT
ggtctctcctggggcagtgg

SEQ ID NO: 5967 - DNA, 20 bp, Artificial Sequence
  Description of Artificial Sequence: Synthetic oligonucleotide
  Target: COL7A1; (-) strand; PAM type: NNGRRT; PAM sequence: GTGGGT
tgggggccctgctcaggggt

SEQ ID NO: 5968 - DNA, 20 bp, Artificial Sequence
  Description of Artificial Sequence: Synthetic oligonucleotide
  Target: COL7A1; (-) strand; PAM type: NNGRRT; PAM sequence: AGGGGT
ctctgctgggggccctgctc

SEQ ID NO: 5969 - DNA, 20 bp, Artificial Sequence
  Description of Artificial Sequence: Synthetic oligonucleotide
  Target: COL7A1; (-) strand; PAM type: NNGRRT; PAM sequence: CAGGGT
cctgacctgctgttctctcc

SEQ ID NO: 5970 - DNA, 20 bp, Artificial Sequence
  Description of Artificial Sequence: Synthetic oligonucleotide
  Target: COL7A1; (-) strand; PAM type: NNGRRT; PAM sequence: TGGAGT
aggttgtgctaggggtggct

SEQ ID NO: 5971 - DNA, 20 bp, Artificial Sequence
  Description of Artificial Sequence: Synthetic oligonucleotide
  Target: COL7A1; (-) strand; PAM type: NNGRRT; PAM sequence: AGGGGT
agtgagggacaggttgtgct

SEQ ID NO: 5972 - DNA, 20 bp, Artificial Sequence
  Description of Artificial Sequence: Synthetic oligonucleotide
  Target: COL7A1; (-) strand; PAM type: NNGRRT; PAM sequence: GCGGGT
gacaaaggcgatcgtgggga

SEQ ID NO: 5973 - DNA, 20 bp, Artificial Sequence
  Description of Artificial Sequence: Synthetic oligonucleotide
  Target: COL7A1; (-) strand; PAM type: NNGRRT; PAM sequence: TAGGGT
tggggtcgtcatctgttttc

SEQ ID NO: 5974 - DNA, 20 bp, Artificial Sequence
  Description of Artificial Sequence: Synthetic oligonucleotide
  Target: COL7A1; (-) strand; PAM type: NNGRRT; PAM sequence: TGGGGT
tgaggtgtggcccagggtca

SEQ ID NO: 5975 - DNA, 20 bp, Artificial Sequence
  Description of Artificial Sequence: Synthetic oligonucleotide
  Target: COL7A1; (-) strand; PAM type: NNGRRT; PAM sequence: CAGGGT
tttgggagtgaggtgtggcc

SEQ ID NO: 5976 - DNA, 20 bp, Artificial Sequence
  Description of Artificial Sequence: Synthetic oligonucleotide
  Target: COL7A1; (-) strand; PAM type: NNGRRT; PAM sequence: GGGAGT
tcatcactcctggtatcttt

SEQ ID NO: 5977 - DNA, 20 bp, Artificial Sequence
  Description of Artificial Sequence: Synthetic oligonucleotide
  Target: COL7A1; (-) strand; PAM type: NNGRRT; PAM sequence: ATGAGT
gccatgaaggtgacagcctc

SEQ ID NO: 5978 - DNA, 20 bp, Artificial Sequence
  Description of Artificial Sequence: Synthetic oligonucleotide
  Target: COL7A1; (-) strand; PAM type: NNGRRT; PAM sequence: TGGGGT
gggggcgagagtgaggtctg

SEQ ID NO: 5979 - DNA, 20 bp, Artificial Sequence
  Description of Artificial Sequence: Synthetic oligonucleotide
  Target: COL7A1; (-) strand; PAM type: NNGRRT; PAM sequence: GAGAGT
gggaccaacacgaggggggc

SEQ ID NO: 5980 - DNA, 20 bp, Artificial Sequence
  Description of Artificial Sequence: Synthetic oligonucleotide
  Target: COL7A1; (-) strand; PAM type: NNGRRT; PAM sequence: CAGGGT
ccctggaccatcggtaagtg

SEQ ID NO: 5981 - DNA, 20 bp, Artificial Sequence
  Description of Artificial Sequence: Synthetic oligonucleotide
  Target: COL7A1; (-) strand; PAM type: NNGRRT; PAM sequence: CTGAAT
cagctcaaggcccccatagc

SEQ ID NO: 5982 - DNA, 20 bp, Artificial Sequence
  Description of Artificial Sequence: Synthetic oligonucleotide
  Target: COL7A1; (-) strand; PAM type: NNGRRT; PAM sequence: AGGAAT
gcagggcctaaggcgcgaat

SEQ ID NO: 5983 - DNA, 20 bp, Artificial Sequence
  Description of Artificial Sequence: Synthetic oligonucleotide
  Target: COL7A1; (-) strand; PAM type: NNGRRT; PAM sequence: GCGAAT
ccctgtgcagggcctaaggc

SEQ ID NO: 5984 - DNA, 20 bp, Artificial Sequence
  Description of Artificial Sequence: Synthetic oligonucleotide
  Target: COL7A1; (-) strand; PAM type: NNGRRT; PAM sequence: CGGGAT
gaagggggaagggaggcggc

SEQ ID NO: 5985 - DNA, 20 bp, Artificial Sequence
  Description of Artificial Sequence: Synthetic oligonucleotide
  Target: COL7A1; (-) strand; PAM type: NNGRRT; PAM sequence: TGGGGT
tcttccacagggtgggagcc

SEQ ID NO: 5986 - DNA, 20 bp, Artificial Sequence
  Description of Artificial Sequence: Synthetic oligonucleotide
  Target: COL7A1; (-) strand; PAM type: NNGRRT; PAM sequence: CAGGGT
gtcttcccagggttcttcca

SEQ ID NO: 5987 - DNA, 20 bp, Artificial Sequence
  Description of Artificial Sequence: Synthetic oligonucleotide
  Target: COL7A1; (-) strand; PAM type: NNGRRT; PAM sequence: CAGGGT
ttgctctctaagtgtcttcc

SEQ ID NO: 5988 - DNA, 20 bp, Artificial Sequence
  Description of Artificial Sequence: Synthetic oligonucleotide
  Target: COL7A1; (-) strand; PAM type: NNGRRT; PAM sequence: CAGGGT
cctccatttgcagggctctc

SEQ ID NO: 5989 - DNA, 20 bp, Artificial Sequence
  Description of Artificial Sequence: Synthetic oligonucleotide
  Target: COL7A1; (-) strand; PAM type: NNGRRT; PAM sequence: TGGGGT
gtgggcgctgcctgagtggg

SEQ ID NO: 5990 - DNA, 20 bp, Artificial Sequence
  Description of Artificial Sequence: Synthetic oligonucleotide
  Target: COL7A1; (-) strand; PAM type: NNGRRT; PAM sequence: GTGGGT
tcagggtgggcgctgcctga

SEQ ID NO: 5991 - DNA, 20 bp, Artificial Sequence
  Description of Artificial Sequence: Synthetic oligonucleotide
  Target: COL7A1; (-) strand; PAM type: NNGRRT; PAM sequence: CTGAGT
caggtcagggtgggcgctgc

SEQ ID NO: 5992 - DNA, 20 bp, Artificial Sequence
  Description of Artificial Sequence: Synthetic oligonucleotide
  Target: COL7A1; (-) strand; PAM type: NNGRRT; PAM sequence: CAGGGT
gcaagccttgtcctgcaggt

SEQ ID NO: 5993 - DNA, 20 bp, Artificial Sequence
  Description of Artificial Sequence: Synthetic oligonucleotide
  Target: COL7A1; (-) strand; PAM type: NNGRRT; PAM sequence: GGGAAT
caggcagccctggccgcgcc

SEQ ID NO: 5994 - DNA, 20 bp, Artificial Sequence
  Description of Artificial Sequence: Synthetic oligonucleotide
  Target: COL7A1; (-) strand; PAM type: NNGRRT; PAM sequence: GAGGGT
gcaaaccaggggccttgggg

SEQ ID NO: 5995 - DNA, 20 bp, Artificial Sequence
  Description of Artificial Sequence: Synthetic oligonucleotide
  Target: COL7A1; (-) strand; PAM type: NNGRRT; PAM sequence: TGGGGT
ggtaggcgaccccttgttga

SEQ ID NO: 5996 - DNA, 20 bp, Artificial Sequence
  Description of Artificial Sequence: Synthetic oligonucleotide
  Target: COL7A1; (-) strand; PAM type: NNGRRT; PAM sequence: TGGGGT
caataacacttgggggtcag

SEQ ID NO: 5997 - DNA, 20 bp, Artificial Sequence
  Description of Artificial Sequence: Synthetic oligonucleotide
  Target: COL7A1; (-) strand; PAM type: NNGRRT; PAM sequence: GGGGGT
ttccacccccaataacactt

SEQ ID NO: 5998 - DNA, 20 bp, Artificial Sequence
  Description of Artificial Sequence: Synthetic oligonucleotide
  Target: COL7A1; (-) strand; PAM type: NNGRRT; PAM sequence: TGGAAT
cttgtcgctgcccttgtgcc

SEQ ID NO: 5999 - DNA, 20 bp, Artificial Sequence
  Description of Artificial Sequence: Synthetic oligonucleotide
  Target: COL7A1; (-) strand; PAM type: NNGRRT; PAM sequence: GGGAAT
gaagcagagttagaatcatc

SEQ ID NO: 6000 - DNA, 20 bp, Artificial Sequence
  Description of Artificial Sequence: Synthetic oligonucleotide
  Target: COL7A1; (-) strand; PAM type: NNGRRT; PAM sequence: TAGAAT
agagaaggaagaagcagagt

SEQ ID NO: 6001 - DNA, 20 bp, Artificial Sequence
  Description of Artificial Sequence: Synthetic oligonucleotide
  Target: COL7A1; (-) strand; PAM type: NNGRRT; PAM sequence: CAGAGT
tacaagagagaaggaagaag

SEQ ID NO: 6002 - DNA, 20 bp, Artificial Sequence
  Description of Artificial Sequence: Synthetic oligonucleotide
  Target: COL7A1; (-) strand; PAM type: NNGRRT; PAM sequence: CGGGGT
ggcactcctcaaagctgtct

SEQ ID NO: 6003 - DNA, 20 bp, Artificial Sequence
  Description of Artificial Sequence: Synthetic oligonucleotide
  Target: COL7A1; (-) strand; PAM type: NNGRRT; PAM sequence: GTGAGT
ccactgccaagggcgagagg

SEQ ID NO: 6004 - DNA, 20 bp, Artificial Sequence
  Description of Artificial Sequence: Synthetic oligonucleotide
  Target: COL7A1; (-) strand; PAM type: NNGRRT; PAM sequence: GAGGGT
agtgccactgccaagggcga

SEQ ID NO: 6005 - DNA, 20 bp, Artificial Sequence
  Description of Artificial Sequence: Synthetic oligonucleotide
  Target: COL7A1; (-) strand; PAM type: NNGRRT; PAM sequence: GTGAGT
ctggcgaccctggcctcccg

SEQ ID NO: 6006 - DNA, 20 bp, Artificial Sequence
  Description of Artificial Sequence: Synthetic oligonucleotide
  Target: COL7A1; (-) strand; PAM type: NNGRRT; PAM sequence: TTGAGT
ggcggggaatagagaatggg

SEQ ID NO: 6007 - DNA, 20 bp, Artificial Sequence
  Description of Artificial Sequence: Synthetic oligonucleotide
  Target: COL7A1; (-) strand; PAM type: NNGRRT; PAM sequence: ATGGGT
ctgcgggcggggaatagaga

SEQ ID NO: 6008 - DNA, 20 bp, Artificial Sequence
  Description of Artificial Sequence: Synthetic oligonucleotide
  Target: COL7A1; (-) strand; PAM type: NNGRRT; PAM sequence: GAGAAT
gcccctgcgggcggggaata

SEQ ID NO: 6009 - DNA, 20 bp, Artificial Sequence
  Description of Artificial Sequence: Synthetic oligonucleotide
  Target: COL7A1; (-) strand; PAM type: NNGRRT; PAM sequence: GGGAAT
ggtgagtgcccctgcgggcg

SEQ ID NO: 6010 - DNA, 20 bp, Artificial Sequence
  Description of Artificial Sequence: Synthetic oligonucleotide
  Target: COL7A1; (-) strand; PAM type: NNGRRT; PAM sequence: GTGAGT
agggggaacctggagagatg

SEQ ID NO: 6011 - DNA, 20 bp, Artificial Sequence
  Description of Artificial Sequence: Synthetic oligonucleotide
  Target: COL7A1; (-) strand; PAM type: NNGRRT; PAM sequence: AAGAGT
ccagtgtattgtccaaaggt

SEQ ID NO: 6012 - DNA, 20 bp, Artificial Sequence
  Description of Artificial Sequence: Synthetic oligonucleotide
  Target: COL7A1; (-) strand; PAM type: NNGRRT; PAM sequence: GGGGGT
tggtagaatataaggggtct

SEQ ID NO: 6013 - DNA, 20 bp, Artificial Sequence
  Description of Artificial Sequence: Synthetic oligonucleotide
  Target: COL7A1; (-) strand; PAM type: NNGRRT; PAM sequence: AGGGGT
ggactgggtggtagaatata

SEQ ID NO: 6014 - DNA, 20 bp, Artificial Sequence
  Description of Artificial Sequence: Synthetic oligonucleotide
  Target: COL7A1; (-) strand; PAM type: NNGRRT; PAM sequence: TAGAAT
gcctctgggggactgggtgg

SEQ ID NO: 6015 - DNA, 20 bp, Artificial Sequence
  Description of Artificial Sequence: Synthetic oligonucleotide
  Target: COL7A1; (-) strand; PAM type: NNGRRT; PAM sequence: CTGGGT
tggaagaggcctctggggga

SEQ ID NO: 6016 - DNA, 20 bp, Artificial Sequence
  Description of Artificial Sequence: Synthetic oligonucleotide
  Target: COL7A1; (-) strand; PAM type: NNGRRT; PAM sequence: GTGGAT
ctgtccagaccttcttcgcc

SEQ ID NO: 6017 - DNA, 20 bp, Artificial Sequence
  Description of Artificial Sequence: Synthetic oligonucleotide
  Target: COL7A1; (-) strand; PAM type: NNGRRT; PAM sequence: CCGGGT
agcagctgcgtcgcttggcg

SEQ ID NO: 6018 - DNA, 20 bp, Artificial Sequence
  Description of Artificial Sequence: Synthetic oligonucleotide
  Target: COL7A1; (-) strand; PAM type: NNGRRT; PAM sequence: GGGAAT
gggcttaatgtggtgatgtt

SEQ ID NO: 6019 - DNA, 20 bp, Artificial Sequence
  Description of Artificial Sequence: Synthetic oligonucleotide
  Target: COL7A1; (-) strand; PAM type: NNGRRT; PAM sequence: AGGGGT
tggggaaggggtctgggaat

SEQ ID NO: 6020 - DNA, 20 bp, Artificial Sequence
  Description of Artificial Sequence: Synthetic oligonucleotide
  Target: COL7A1; (-) strand; PAM type: NNGRRT; PAM sequence: GGGAAT
ggctgatggggaaggggtct

SEQ ID NO: 6021 - DNA, 20 bp, Artificial Sequence
  Description of Artificial Sequence: Synthetic oligonucleotide
  Target: COL7A1; (-) strand; PAM type: NNGRRT; PAM sequence: AGGGGT
aaggagtaggctgatgggga

SEQ ID NO: 6022 - DNA, 20 bp, Artificial Sequence
  Description of Artificial Sequence: Synthetic oligonucleotide
  Target: COL7A1; (-) strand; PAM type: NNGRRT; PAM sequence: AGGAGT
tgaggcccaggcttctggta

SEQ ID NO: 6023 - DNA, 20 bp, Artificial Sequence
  Description of Artificial Sequence: Synthetic oligonucleotide
  Target: COL7A1; (-) strand; PAM type: NNGRRT; PAM sequence: GTGGAT
caggggtgatggttctgcta

SEQ ID NO: 6024 - DNA, 20 bp, Artificial Sequence
  Description of Artificial Sequence: Synthetic oligonucleotide
  Target: COL7A1; (-) strand; PAM type: NNGRRT; PAM sequence: AGGGGT
gggcgccgccagcacgtacc

SEQ ID NO: 6025 - DNA, 20 bp, Artificial Sequence
  Description of Artificial Sequence: Synthetic oligonucleotide
  Target: COL7A1; (-) strand; PAM type: NNGRRT; PAM sequence: CAGGGT
ccactgggagcttggtgccc

SEQ ID NO: 6026 - DNA, 20 bp, Artificial Sequence
  Description of Artificial Sequence: Synthetic oligonucleotide
  Target: COL7A1; (-) strand; PAM type: NNGRRT; PAM sequence: CTGGGT
tggacccaagtgggaacaac

SEQ ID NO: 6027 - DNA, 20 bp, Artificial Sequence
  Description of Artificial Sequence: Synthetic oligonucleotide
  Target: COL7A1; (-) strand; PAM type: NNGRRT; PAM sequence: AAGGAT
gaccttggcattatcttgca

SEQ ID NO: 6028 - DNA, 20 bp, Artificial Sequence
  Description of Artificial Sequence: Synthetic oligonucleotide
  Target: COL7A1; (-) strand; PAM type: NNGRRT; PAM sequence: CTGAAT
ggccctccccactgttccca

SEQ ID NO: 6029 - DNA, 20 bp, Artificial Sequence
  Description of Artificial Sequence: Synthetic oligonucleotide
  Target: COL7A1; (-) strand; PAM type: NNGRRT; PAM sequence: TAGGGT
actgctgactccctaataga

SEQ ID NO: 6030 - DNA, 20 bp, Artificial Sequence
  Description of Artificial Sequence: Synthetic oligonucleotide
  Target: COL7A1; (-) strand; PAM type: NNGRRT; PAM sequence: GAGGGT
caccgtgcggaggctacgag

SEQ ID NO: 6031 - DNA, 20 bp, Artificial Sequence
  Description of Artificial Sequence: Synthetic oligonucleotide
  Target: COL7A1; (-) strand; PAM type: NNGRRT; PAM sequence: GCGGAT
cagtgtgcccccgtggcctg

SEQ ID NO: 6032 - DNA, 20 bp, Artificial Sequence
  Description of Artificial Sequence: Synthetic oligonucleotide
  Target: COL7A1; (-) strand; PAM type: NNGRRT; PAM sequence: CTGGGT
ggaagggcagaaaggtgtgt

SEQ ID NO: 6033 - DNA, 20 bp, Artificial Sequence
  Description of Artificial Sequence: Synthetic oligonucleotide
  Target: COL7A1; (-) strand; PAM type: NNGRRT; PAM sequence: CGGGGT
cgcctgtcctggatggtgtg

SEQ ID NO: 6034 - DNA, 20 bp, Artificial Sequence
  Description of Artificial Sequence: Synthetic oligonucleotide
  Target: COL7A1; (-) strand; PAM type: NNGRRT; PAM sequence: CTGGAT
tcttctccctgacgcctgtc

SEQ ID NO: 6035 - DNA, 20 bp, Artificial Sequence
  Description of Artificial Sequence: Synthetic oligonucleotide
  Target: COL7A1; (-) strand; PAM type: NNGRRT; PAM sequence: GCGGGT
ccagggatctcaagctccca

SEQ ID NO: 6036 - DNA, 20 bp, Artificial Sequence
  Description of Artificial Sequence: Synthetic oligonucleotide
  Target: COL7A1; (-) strand; PAM type: NNGRRT; PAM sequence: AGGGAT
gggtccccgcagacacttcc

SEQ ID NO: 6037 - DNA, 20 bp, Artificial Sequence
  Description of Artificial Sequence: Synthetic oligonucleotide
  Target: COL7A1; (-) strand; PAM type: NNGRRT; PAM sequence: CTGGGT
tctgtctcctgcagaagtgc

SEQ ID NO: 6038 - DNA, 20 bp, Artificial Sequence
  Description of Artificial Sequence: Synthetic oligonucleotide
  Target: COL7A1; (-) strand; PAM type: NNGRRT; PAM sequence: TTGGGT
ggtgagggggaggccaggat

SEQ ID NO: 6039 - DNA, 20 bp, Artificial Sequence
  Description of Artificial Sequence: Synthetic oligonucleotide
  Target: COL7A1; (-) strand; PAM type: NNGRRT; PAM sequence: CAGGAT
ggccagggtgagggggaggc

SEQ ID NO: 6040 - DNA, 20 bp, Artificial Sequence
  Description of Artificial Sequence: Synthetic oligonucleotide
  Target: COL7A1; (-) strand; PAM type: NNGRRT; PAM sequence: CAGGGT
ggccactcagaggccctggc

SEQ ID NO: 6041 - DNA, 20 bp, Artificial Sequence
  Description of Artificial Sequence: Synthetic oligonucleotide
  Target: COL7A1; (-) strand; PAM type: NNGRRT; PAM sequence: CAGAGT
tcgatctttcattcctcctt

SEQ ID NO: 6042 - DNA, 20 bp, Artificial Sequence
  Description of Artificial Sequence: Synthetic oligonucleotide
  Target: COL7A1; (-) strand; PAM type: NNGRRT; PAM sequence: CTGGGT
ggatctcagatctctccctt

SEQ ID NO: 6043 - DNA, 20 bp, Artificial Sequence
  Description of Artificial Sequence: Synthetic oligonucleotide
  Target: COL7A1; (-) strand; PAM type: NNGRRT; PAM sequence: CAGGAT
tcaataagacaaaccggacc

SEQ ID NO: 6044 - DNA, 20 bp, Artificial Sequence
  Description of Artificial Sequence: Synthetic oligonucleotide
  Target: COL7A1; (-) strand; PAM type: NNGRRT; PAM sequence: CTGGGT
ctacccctcaccctctgacc

SEQ ID NO: 6045 - DNA, 20 bp, Artificial Sequence
  Description of Artificial Sequence: Synthetic oligonucleotide
  Target: COL7A1; (-) strand; PAM type: NNGRRT; PAM sequence: CTGAGT
tgacttcctgcaccccgact

SEQ ID NO: 6046 - DNA, 20 bp, Artificial Sequence
  Description of Artificial Sequence: Synthetic oligonucleotide
  Target: COL7A1; (-) strand; PAM type: NNGRRT; PAM sequence: CTGAGT
cgacacagtaccgcgtgagg

SEQ ID NO: 6047 - DNA, 20 bp, Artificial Sequence
  Description of Artificial Sequence: Synthetic oligonucleotide
  Target: COL7A1; (-) strand; PAM type: NNGRRT; PAM sequence: CCGGGT
ccaggtggccaggaacagtc

SEQ ID NO: 6048 - DNA, 20 bp, Artificial Sequence
  Description of Artificial Sequence: Synthetic oligonucleotide
  Target: COL7A1; (-) strand; PAM type: NNGRRT; PAM sequence: GAGGGT
ggatgaggaagatcagtcag

SEQ ID NO: 6049 - DNA, 20 bp, Artificial Sequence
  Description of Artificial Sequence: Synthetic oligonucleotide
  Target: COL7A1; (-) strand; PAM type: NNGRRT; PAM sequence: GAGGAT
gtaaagtgggcagggtcagt

SEQ ID NO: 6050 - DNA, 20 bp, Artificial Sequence
  Description of Artificial Sequence: Synthetic oligonucleotide
  Target: COL7A1; (-) strand; PAM type: NNGRRT; PAM sequence: CAGGGT
ggcagggtccgtaaagtggg

SEQ ID NO: 6051 - DNA, 20 bp, Artificial Sequence
  Description of Artificial Sequence: Synthetic oligonucleotide
  Target: COL7A1; (-) strand; PAM type: NNGRRT; PAM sequence: CAGGGT
ttcatggagggtcagtctgg

SEQ ID NO: 6052 - DNA, 20 bp, Artificial Sequence
  Description of Artificial Sequence: Synthetic oligonucleotide
  Target: COL7A1; (-) strand; PAM type: NNGRRT; PAM sequence: GAGGGT
gtgggatcaatgagttcatg

SEQ ID NO: 6053 - DNA, 20 bp, Artificial Sequence
  Description of Artificial Sequence: Synthetic oligonucleotide
  Target: COL7A1; (-) strand; PAM type: NNGRRT; PAM sequence: ATGAGT
caatgaagtgggtgggatca

SEQ ID NO: 6054 - DNA, 20 bp, Artificial Sequence
  Description of Artificial Sequence: Synthetic oligonucleotide
  Target: COL7A1; (-) strand; PAM type: NNGRRT; PAM sequence: TGGGAT
agatcaatcaatgaagtggg

SEQ ID NO: 6055 - DNA, 20 bp, Artificial Sequence
  Description of Artificial Sequence: Synthetic oligonucleotide
  Target: COL7A1; (-) strand; PAM type: NNGRRT; PAM sequence: GTGGGT
aggtaagatcaatcaatgaa

SEQ ID NO: 6056 - DNA, 20 bp, Artificial Sequence
  Description of Artificial Sequence: Synthetic oligonucleotide
  Target: COL7A1; (-) strand; PAM type: NNGRRT; PAM sequence: CGGGAT
ggtctgtcactgggggtctg

SEQ ID NO: 6057 - DNA, 20 bp, Artificial Sequence
  Description of Artificial Sequence: Synthetic oligonucleotide
  Target: COL7A1; (-) strand; PAM type: NNGRRT; PAM sequence: GGGGGT
ggtgggcggggtctgtcact

SEQ ID NO: 6058 - DNA, 20 bp, Artificial Sequence
  Description of Artificial Sequence: Synthetic oligonucleotide
  Target: COL7A1; (-) strand; PAM type: NNGRRT; PAM sequence: CGGGGT
gcgaggacagtgatggtggg

SEQ ID NO: 6059 - DNA, 20 bp, Artificial Sequence
  Description of Artificial Sequence: Synthetic oligonucleotide
  Target: COL7A1; (-) strand; PAM type: NNGRRT; PAM sequence: GAGGGT
tccttctgcactggcaacct

SEQ ID NO: 6060 - DNA, 20 bp, Artificial Sequence
  Description of Artificial Sequence: Synthetic oligonucleotide
  Target: COL7A1; (-) strand; PAM type: NNGRRT; PAM sequence: TGGGAT
tgcgtgtgccagggtgggcc

SEQ ID NO: 6061 - DNA, 20 bp, Artificial Sequence
  Description of Artificial Sequence: Synthetic oligonucleotide
  Target: COL7A1; (-) strand; PAM type: NNGRRT; PAM sequence: CAGGGT
gctgggcggggtgcgtgtgc

SEQ ID NO: 6062 - DNA, 20 bp, Artificial Sequence
  Description of Artificial Sequence: Synthetic oligonucleotide
  Target: COL7A1; (-) strand; PAM type: NNGRRT; PAM sequence: CGGGGT
gaggggtctgagaggctggg

SEQ ID NO: 6063 - DNA, 20 bp, Artificial Sequence
  Description of Artificial Sequence: Synthetic oligonucleotide
  Target: COL7A1; (-) strand; PAM type: NNGRRT; PAM sequence: AGGGGT
cagggtctgagaggagggag

SEQ ID NO: 6064 - DNA, 20 bp, Artificial Sequence
  Description of Artificial Sequence: Synthetic oligonucleotide
  Target: COL7A1; (-) strand; PAM type: NNGRRT; PAM sequence: CAGGGT
tggtagtgagcctttggggg

SEQ ID NO: 6065 - DNA, 20 bp, Artificial Sequence
  Description of Artificial Sequence: Synthetic oligonucleotide
  Target: COL7A1; (-) strand; PAM type: NNGRRT; PAM sequence: CAGGAT
ctctggattggagaaaggac

SEQ ID NO: 6066 - DNA, 20 bp, Artificial Sequence
  Description of Artificial Sequence: Synthetic oligonucleotide
  Target: COL7A1; (-) strand; PAM type: NNGRRT; PAM sequence: CTGGAT
tggggatccgggcttgtgct

SEQ ID NO: 6067 - DNA, 20 bp, Artificial Sequence
  Description of Artificial Sequence: Synthetic oligonucleotide
  Target: COL7A1; (-) strand; PAM type: NNGRRT; PAM sequence: GGGGAT
atgggtggtgtggatggttt

SEQ ID NO: 6068 - DNA, 20 bp, Artificial Sequence
  Description of Artificial Sequence: Synthetic oligonucleotide
  Target: COL7A1; (-) strand; PAM type: NNGRRT; PAM sequence: GTGGAT
gagagcttcggatgggtggt

SEQ ID NO: 6069 - DNA, 20 bp, Artificial Sequence
  Description of Artificial Sequence: Synthetic oligonucleotide
  Target: COL7A1; (-) strand; PAM type: NNGRRT; PAM sequence: ATGGGT
catgcgctggagagcttcgg

SEQ ID NO: 6070 - DNA, 20 bp, Artificial Sequence
  Description of Artificial Sequence: Synthetic oligonucleotide
  Target: COL7A1; (-) strand; PAM type: NNGRRT; PAM sequence: TCGGAT
agagcatgcgctggagagct

SEQ ID NO: 6071 - DNA, 20 bp, Artificial Sequence
  Description of Artificial Sequence: Synthetic oligonucleotide
  Target: COL7A1; (-) strand; PAM type: NNGRRT; PAM sequence: GCGAGT
ggtggagtcagctactcagt

SEQ ID NO: 6072 - DNA, 20 bp, Artificial Sequence
  Description of Artificial Sequence: Synthetic oligonucleotide
  Target: COL7A1; (-) strand; PAM type: NNGRRT; PAM sequence: TGGAGT
gagatccggggtctcgaagg

SEQ ID NO: 6073 - DNA, 20 bp, Artificial Sequence
  Description of Artificial Sequence: Synthetic oligonucleotide
  Target: COL7A1; (-) strand; PAM type: NNGRRT; PAM sequence: CGGGGT
acacagactctgcagagatc

SEQ ID NO: 6074 - DNA, 20 bp, Artificial Sequence
  Description of Artificial Sequence: Synthetic oligonucleotide
  Target: COL7A1; (-) strand; PAM type: NNGRRT; PAM sequence: CGGAGT
cttacagactggcctggggc

SEQ ID NO: 6075 - DNA, 20 bp, Artificial Sequence
  Description of Artificial Sequence: Synthetic oligonucleotide
  Target: COL7A1; (-) strand; PAM type: NNGRRT; PAM sequence: AGGGGT
gttctacggatcacctgggt

SEQ ID NO: 6076 - DNA, 20 bp, Artificial Sequence
  Description of Artificial Sequence: Synthetic oligonucleotide
  Target: COL7A1; (-) strand; PAM type: NNGRRT; PAM sequence: CTGGGT
agcgacgttctacggatcac

SEQ ID NO: 6077 - DNA, 20 bp, Artificial Sequence
  Description of Artificial Sequence: Synthetic oligonucleotide
  Target: COL7A1; (-) strand; PAM type: NNGRRT; PAM sequence: ACGGAT
aatgcttccagcgacgttct

SEQ ID NO: 6078 - DNA, 20 bp, Artificial Sequence
  Description of Artificial Sequence: Synthetic oligonucleotide
  Target: COL7A1; (-) strand; PAM type: NNGRRT; PAM sequence: GTGGGT
tgtccccagcccctgagcct

SEQ ID NO: 6079 - DNA, 20 bp, Artificial Sequence
  Description of Artificial Sequence: Synthetic oligonucleotide
  Target: COL7A1; (-) strand; PAM type: NNGRRT; PAM sequence: GTGAGT
ctctgtggttgtgaggactg

SEQ ID NO: 6080 - DNA, 20 bp, Artificial Sequence
  Description of Artificial Sequence: Synthetic oligonucleotide
  Target: COL7A1; (-) strand; PAM type: NNGRRT; PAM sequence: GTGGAT
tgagggcccatgtggctggc

SEQ ID NO: 6081 - DNA, 20 bp, Artificial Sequence
  Description of Artificial Sequence: Synthetic oligonucleotide
  Target: COL7A1; (-) strand; PAM type: NNGRRT; PAM sequence: CTGAGT
ggatggactggagccagata

SEQ ID NO: 6082 - DNA, 20 bp, Artificial Sequence
  Description of Artificial Sequence: Synthetic oligonucleotide
  Target: COL7A1; (-) strand; PAM type: NNGRRT; PAM sequence: CTGGAT
gggaggccacggtggctgag

SEQ ID NO: 6083 - DNA, 20 bp, Artificial Sequence
  Description of Artificial Sequence: Synthetic oligonucleotide
  Target: COL7A1; (-) strand; PAM type: NNGRRT; PAM sequence: CAGAGT
ccaggtggggctctggggca

SEQ ID NO: 6084 - DNA, 20 bp, Artificial Sequence
  Description of Artificial Sequence: Synthetic oligonucleotide
  Target: COL7A1; (-) strand; PAM type: NNGRRT; PAM sequence: GGGGGT
atgggggctgggggtttatt

SEQ ID NO: 6085 - DNA, 20 bp, Artificial Sequence
  Description of Artificial Sequence: Synthetic oligonucleotide
  Target: COL7A1; (-) strand; PAM type: NNGRRT; PAM sequence: GGGGGT
gtcagggtggaatgggggct

SEQ ID NO: 6086 - DNA, 20 bp, Artificial Sequence
  Description of Artificial Sequence: Synthetic oligonucleotide
  Target: COL7A1; (-) strand; PAM type: NNGRRT; PAM sequence: TGGAAT
tgggagggggcaggtcaggg

SEQ ID NO: 6087 - DNA, 20 bp, Artificial Sequence
  Description of Artificial Sequence: Synthetic oligonucleotide
  Target: COL7A1; (-) strand; PAM type: NNGRRT; PAM sequence: CAGGGT
gggtttgggagggggcaggt

SEQ ID NO: 6088 - DNA, 20 bp, Artificial Sequence
  Description of Artificial Sequence: Synthetic oligonucleotide
  Target: COL7A1; (-) strand; PAM type: NNGRRT; PAM sequence: TGGGGT
actcagcccacggtggggac

SEQ ID NO: 6089 - DNA, 20 bp, Artificial Sequence
  Description of Artificial Sequence: Synthetic oligonucleotide
  Target: COL7A1; (-) strand; PAM type: NNGRRT; PAM sequence: CAGGGT
gttcctggcgccacaggata

SEQ ID NO: 6090 - DNA, 20 bp, Artificial Sequence
  Description of Artificial Sequence: Synthetic oligonucleotide
  Target: COL7A1; (-) strand; PAM type: NNGRRT; PAM sequence: CAGGAT
gaccagggttcctggcgcca

SEQ ID NO: 6091 - DNA, 20 bp, Artificial Sequence
  Description of Artificial Sequence: Synthetic oligonucleotide
  Target: COL7A1; (-) strand; PAM type: NNGRRT; PAM sequence: CAGGGT
tctgtcaccattacctggac

SEQ ID NO: 6092 - DNA, 20 bp, Artificial Sequence
  Description of Artificial Sequence: Synthetic oligonucleotide
  Target: COL7A1; (-) strand; PAM type: NNGRRT; PAM sequence: CAGAAT
agaactcctgcctccccctt

SEQ ID NO: 6093 - DNA, 20 bp, Artificial Sequence
  Description of Artificial Sequence: Synthetic oligonucleotide
  Target: COL7A1; (-) strand; PAM type: NNGRRT; PAM sequence: ACGGGT
ctgcagtcatcgtggctcga

SEQ ID NO: 6094 - DNA, 20 bp, Artificial Sequence
  Description of Artificial Sequence: Synthetic oligonucleotide
  Target: COL7A1; (-) strand; PAM type: NNGRRT; PAM sequence: CGGAGT
tttccctctgacctcaggtc

SEQ ID NO: 6095 - DNA, 20 bp, Artificial Sequence
  Description of Artificial Sequence: Synthetic oligonucleotide
  Target: COL7A1; (-) strand; PAM type: NNGRRT; PAM sequence: ATGGGT
ccaaagggaccaatgagggt

SEQ ID NO: 6096 - DNA, 20 bp, Artificial Sequence
  Description of Artificial Sequence: Synthetic oligonucleotide
  Target: COL7A1; (-) strand; PAM type: NNGRRT; PAM sequence: GAGGGT
ggactgccaaagggaccaat

SEQ ID NO: 6097 - DNA, 20 bp, Artificial Sequence
  Description of Artificial Sequence: Synthetic oligonucleotide
  Target: COL7A1; (-) strand; PAM type: NNGRRT; PAM sequence: TGGGGT
agcacaggcagtggtcagtg

SEQ ID NO: 6098 - DNA, 20 bp, Artificial Sequence
  Description of Artificial Sequence: Synthetic oligonucleotide
  Target: COL7A1; (-) strand; PAM type: NNGRRT; PAM sequence: TCGGAT
gtccctggagccagtggatt

SEQ ID NO: 6099 - DNA, 20 bp, Artificial Sequence
  Description of Artificial Sequence: Synthetic oligonucleotide
  Target: COL7A1; (-) strand; PAM type: NNGRRT; PAM sequence: GTGGAT
gggacccgtccctggagcca

SEQ ID NO: 6100 - DNA, 20 bp, Artificial Sequence
  Description of Artificial Sequence: Synthetic oligonucleotide
  Target: COL7A1; (-) strand; PAM type: NNGRRT; PAM sequence: GAGGGT
gtgtcagatgcaacgcgagt

SEQ ID NO: 6101 - DNA, 20 bp, Artificial Sequence
  Description of Artificial Sequence: Synthetic oligonucleotide
  Target: COL7A1; (-) strand; PAM type: NNGRRT; PAM sequence: GCGAGT
gttgtggtgtcagatgcaac

SEQ ID NO: 6102 - DNA, 20 bp, Artificial Sequence
  Description of Artificial Sequence: Synthetic oligonucleotide
  Target: COL7A1; (-) strand; PAM type: NNGRRT; PAM sequence: GCGGGT
ccacttgctgttccagggct

SEQ ID NO: 6103 - DNA, 20 bp, Artificial Sequence
  Description of Artificial Sequence: Synthetic oligonucleotide
  Target: COL7A1; (-) strand; PAM type: NNGRRT; PAM sequence: GTGAGT
tgtcctcactgtccgccggg

SEQ ID NO: 6104 - DNA, 20 bp, Artificial Sequence
  Description of Artificial Sequence: Synthetic oligonucleotide
  Target: COL7A1; (-) strand; PAM type: NNGRRT; PAM sequence: CGGGGT
ccagtgtcctcactgtccgc

SEQ ID NO: 6105 - DNA, 20 bp, Artificial Sequence
  Description of Artificial Sequence: Synthetic oligonucleotide
  Target: COL7A1; (-) strand; PAM type: NNGRRT; PAM sequence: GTGGGT
ctgtgcgggtgtctgctcga

SEQ ID NO: 6106 - DNA, 20 bp, Artificial Sequence
  Description of Artificial Sequence: Synthetic oligonucleotide
  Target: COL7A1; (-) strand; PAM type: NNGRRT; PAM sequence: TCGAGT
tacactgtgcgggtgtctgc

SEQ ID NO: 6107 - DNA, 20 bp, Artificial Sequence
  Description of Artificial Sequence: Synthetic oligonucleotide
  Target: COL7A1; (-) strand; PAM type: NNGRRT; PAM sequence: GCGGGT
gctgggcttagctacactgt

SEQ ID NO: 6108 - DNA, 20 bp, Artificial Sequence
  Description of Artificial Sequence: Synthetic oligonucleotide
  Target: COL7A1; (-) strand; PAM type: NNGRRT; PAM sequence: TTGGAT
ggagtcagacagcattcgac

SEQ ID NO: 6109 - DNA, 20 bp, Artificial Sequence
  Description of Artificial Sequence: Synthetic oligonucleotide
  Target: COL7A1; (-) strand; PAM type: NNGRRT; PAM sequence: GGGAGT
agcggaccctggtgcttcct

SEQ ID NO: 6110 - DNA, 20 bp, Artificial Sequence
  Description of Artificial Sequence: Synthetic oligonucleotide
  Target: COL7A1; (-) strand; PAM type: NNGRRT; PAM sequence: AGGGGT
cctaccctgacttctctctt

SEQ ID NO: 6111 - DNA, 20 bp, Artificial Sequence
  Description of Artificial Sequence: Synthetic oligonucleotide
  Target: COL7A1; (-) strand; PAM type: NNGRRT; PAM sequence: CAGGGT
actgagccctgaactgtcaa

SEQ ID NO: 6112 - DNA, 20 bp, Artificial Sequence
  Description of Artificial Sequence: Synthetic oligonucleotide
  Target: COL7A1; (-) strand; PAM type: NNGRRT; PAM sequence: CTGGGT
ccagccctctccttccacac

SEQ ID NO: 6113 - DNA, 20 bp, Artificial Sequence
  Description of Artificial Sequence: Synthetic oligonucleotide
  Target: COL7A1; (-) strand; PAM type: NNGRRT; PAM sequence: CTGAGT
gaagttccagcctgaggggt

SEQ ID NO: 6114 - DNA, 20 bp, Artificial Sequence
  Description of Artificial Sequence: Synthetic oligonucleotide
  Target: COL7A1; (-) strand; PAM type: NNGRRT; PAM sequence: AGGGGT
cacactgaagttccagcctg

SEQ ID NO: 6115 - DNA, 20 bp, Artificial Sequence
  Description of Artificial Sequence: Synthetic oligonucleotide
  Target: COL7A1; (-) strand; PAM type: NNGRRT; PAM sequence: CAGGGT
gcatcattgtgcgcagcacc

SEQ ID NO: 6116 - DNA, 20 bp, Artificial Sequence
  Description of Artificial Sequence: Synthetic oligonucleotide
  Target: COL7A1; (-) strand; PAM type: NNGRRT; PAM sequence: GCGAGT
gagctgcccgggcagcgggt

SEQ ID NO: 6117 - DNA, 20 bp, Artificial Sequence
  Description of Artificial Sequence: Synthetic oligonucleotide
  Target: COL7A1; (-) strand; PAM type: NNGRRT; PAM sequence: GCGGGT
gccaccgagctgcccgggca

SEQ ID NO: 6118 - DNA, 20 bp, Artificial Sequence
  Description of Artificial Sequence: Synthetic oligonucleotide
  Target: COL7A1; (-) strand; PAM type: NNGRRT; PAM sequence: GTGAGT
gggctctgtgggctgggcca

SEQ ID NO: 6119 - DNA, 20 bp, Artificial Sequence
  Description of Artificial Sequence: Synthetic oligonucleotide
  Target: COL7A1; (-) strand; PAM type: NNGRRT; PAM sequence: CTGAGT
ggatgggctgcagccgggca

SEQ ID NO: 6120 - DNA, 20 bp, Artificial Sequence
  Description of Artificial Sequence: Synthetic oligonucleotide
  Target: COL7A1; (-) strand; PAM type: NNGRRT; PAM sequence: TTGGAT
ctgatgtgacccgctaccag

SEQ ID NO: 6121 - DNA, 20 bp, Artificial Sequence
  Description of Artificial Sequence: Synthetic oligonucleotide
  Target: COL7A1; (-) strand; PAM type: NNGRRT; PAM sequence: AAGGGT
gggggaagggatggacaggc

SEQ ID NO: 6122 - DNA, 20 bp, Artificial Sequence
  Description of Artificial Sequence: Synthetic oligonucleotide
  Target: COL7A1; (-) strand; PAM type: NNGRRT; PAM sequence: AGGGAT
agactggtcagtgcggggga

SEQ ID NO: 6123 - DNA, 20 bp, Artificial Sequence
  Description of Artificial Sequence: Synthetic oligonucleotide
  Target: COL7A1; (-) strand; PAM type: NNGRRT; PAM sequence: TGGAAT
tgaggcccgtggctaccggt

SEQ ID NO: 6124 - DNA, 20 bp, Artificial Sequence
  Description of Artificial Sequence: Synthetic oligonucleotide
  Target: COL7A1; (-) strand; PAM type: NNGRRT; PAM sequence: CAGGGT
agcaggagctgggccctggg

SEQ ID NO: 6125 - DNA, 20 bp, Artificial Sequence
  Description of Artificial Sequence: Synthetic oligonucleotide
  Target: COL7A1; (-) strand; PAM type: NNGRRT; PAM sequence: CTGAGT
tcagacaaggctgtagagtc

SEQ ID NO: 6126 - DNA, 20 bp, Artificial Sequence
  Description of Artificial Sequence: Synthetic oligonucleotide
  Target: COL7A1; (-) strand; PAM type: NNGRRT; PAM sequence: TAGAGT
ccgcgcctcagacaaggctg

SEQ ID NO: 6127 - DNA, 20 bp, Artificial Sequence
  Description of Artificial Sequence: Synthetic oligonucleotide
  Target: COL7A1; (-) strand; PAM type: NNGRRT; PAM sequence: GGGAGT
agtgagagatgtgggctgag

SEQ ID NO: 6128 - DNA, 20 bp, Artificial Sequence
  Description of Artificial Sequence: Synthetic oligonucleotide
  Target: COL7A1; (-) strand; PAM type: NNGRRT; PAM sequence: GTGAGT
gacatggcgggtcctcagtg

SEQ ID NO: 6129 - DNA, 20 bp, Artificial Sequence
  Description of Artificial Sequence: Synthetic oligonucleotide
  Target: COL7A1; (-) strand; PAM type: NNGRRT; PAM sequence: GCGGGT
actggctaccgtgtgacatg

SEQ ID NO: 6130 - DNA, 20 bp, Artificial Sequence
  Description of Artificial Sequence: Synthetic oligonucleotide
  Target: COL7A1; (-) strand; PAM type: NNGRRT; PAM sequence: CGGAGT
acagcctcctggtggcctgg

SEQ ID NO: 6131 - DNA, 20 bp, Artificial Sequence
  Description of Artificial Sequence: Synthetic oligonucleotide
  Target: COL7A1; (-) strand; PAM type: NNGRRT; PAM sequence: CAGAAT
aagggccggaactgaccatc

SEQ ID NO: 6132 - DNA, 20 bp, Artificial Sequence
  Description of Artificial Sequence: Synthetic oligonucleotide
  Target: COL7A1; (-) strand; PAM type: NNGRRT; PAM sequence: ATGAAT
cccctcccacttctgactcc

SEQ ID NO: 6133 - DNA, 20 bp, Artificial Sequence
  Description of Artificial Sequence: Synthetic oligonucleotide
  Target: COL7A1; (-) strand; PAM type: NNGRRT; PAM sequence: CCGAGT
gcggggtctccggccactga

SEQ ID NO: 6134 - DNA, 20 bp, Artificial Sequence
  Description of Artificial Sequence: Synthetic oligonucleotide
  Target: COL7A1; (-) strand; PAM type: NNGRRT; PAM sequence: CGGGGT
gtgagaccagtgtgcggctg

SEQ ID NO: 6135 - DNA, 20 bp, Artificial Sequence
  Description of Artificial Sequence: Synthetic oligonucleotide
  Target: COL7A1; (-) strand; PAM type: NNGRRT; PAM sequence: AGGAGT
gcggcaggaggtaggatgtc

SEQ ID NO: 6136 - DNA, 20 bp, Artificial Sequence
  Description of Artificial Sequence: Synthetic oligonucleotide
  Target: COL7A1; (-) strand; PAM type: NNGRRT; PAM sequence: TAGGAT
gccgagtgagcggcaggagg

SEQ ID NO: 6137 - DNA, 20 bp, Artificial Sequence
  Description of Artificial Sequence: Synthetic oligonucleotide
  Target: COL7A1; (-) strand; PAM type: NNGRRT; PAM sequence: CCGAGT
cggggctgggacagccactg

SEQ ID NO: 6138 - DNA, 20 bp, Artificial Sequence
  Description of Artificial Sequence: Synthetic oligonucleotide
  Target: COL7A1; (-) strand; PAM type: NNGRRT; PAM sequence: GAGAGT
gagccaagcagccaatcctt

SEQ ID NO: 6139 - DNA, 20 bp, Artificial Sequence
  Description of Artificial Sequence: Synthetic oligonucleotide
  Target: COL7A1; (-) strand; PAM type: NNGRRT; PAM sequence: GCGGAT
cccctgatcccgcattccca

SEQ ID NO: 6140 - DNA, 20 bp, Artificial Sequence
  Description of Artificial Sequence: Synthetic oligonucleotide
  Target: COL7A1; (-) strand; PAM type: NNGRRT; PAM sequence: GTGAGT
cgtgcctgtgacccgacctc

SEQ ID NO: 6141 - DNA, 20 bp, Artificial Sequence
  Description of Artificial Sequence: Synthetic oligonucleotide
  Target: COL7A1; (-) strand; PAM type: NNGRRT; PAM sequence: GAGAGT
ctactgcccctcgtttcccg

SEQ ID NO: 6142 - DNA, 20 bp, Artificial Sequence
  Description of Artificial Sequence: Synthetic oligonucleotide
  Target: COL7A1; (-) strand; PAM type: NNGRRT; PAM sequence: GCGAGT
gctgaccctgaggagctgaa

SEQ ID NO: 6143 - DNA, 20 bp, Artificial Sequence
  Description of Artificial Sequence: Synthetic oligonucleotide
  Target: COL7A1; (-) strand; PAM type: NNGRRT; PAM sequence: AAGAAT
gggtcgtcacttcagggatc

SEQ ID NO: 6144 - DNA, 20 bp, Artificial Sequence
  Description of Artificial Sequence: Synthetic oligonucleotide
  Target: COL7A1; (-) strand; PAM type: NNGRRT; PAM sequence: AGGGAT
tcctgatgggtcgtcacttc

SEQ ID NO: 6145 - DNA, 20 bp, Artificial Sequence
  Description of Artificial Sequence: Synthetic oligonucleotide
  Target: COL7A1; (-) strand; PAM type: NNGRRT; PAM sequence: ATGGGT
atgtgggtgactgagtcctg

SEQ ID NO: 6146 - DNA, 20 bp, Artificial Sequence
  Description of Artificial Sequence: Synthetic oligonucleotide
  Target: COL7A1; (-) strand; PAM type: NNGRRT; PAM sequence: CTGAGT
gtcagagagcatgtgggtga

SEQ ID NO: 6147 - DNA, 20 bp, Artificial Sequence
  Description of Artificial Sequence: Synthetic oligonucleotide
  Target: COL7A1; (-) strand; PAM type: NNGRRT; PAM sequence: GTGGGT
tgggggcagtcagagagcat

SEQ ID NO: 6148 - DNA, 20 bp, Artificial Sequence
  Description of Artificial Sequence: Synthetic oligonucleotide
  Target: COL7A1; (-) strand; PAM type: NNGRRT; PAM sequence: GGGGGT
caggagtgacaggtcagctg

SEQ ID NO: 6149 - DNA, 20 bp, Artificial Sequence
  Description of Artificial Sequence: Synthetic oligonucleotide
  Target: COL7A1; (-) strand; PAM type: NNGRRT; PAM sequence: AGGAGT
gctgtgggtaaggaccgagc

SEQ ID NO: 6150 - DNA, 20 bp, Artificial Sequence
  Description of Artificial Sequence: Synthetic oligonucleotide
  Target: COL7A1; (-) strand; PAM type: NNGRRT; PAM sequence: GTGGGT
agggggtcaagctatttgct

SEQ ID NO: 6151 - DNA, 20 bp, Artificial Sequence
  Description of Artificial Sequence: Synthetic oligonucleotide
  Target: COL7A1; (-) strand; PAM type: NNGRRT; PAM sequence: GGGGGT
gcccaaaggctgaaggggca

SEQ ID NO: 6152 - DNA, 20 bp, Artificial Sequence
  Description of Artificial Sequence: Synthetic oligonucleotide
  Target: COL7A1; (-) strand; PAM type: NNGRRT; PAM sequence: GGGGGT
gcctggatgcacttggctct

SEQ ID NO: 6153 - DNA, 20 bp, Artificial Sequence
  Description of Artificial Sequence: Synthetic oligonucleotide
  Target: COL7A1; (-) strand; PAM type: NNGRRT; PAM sequence: CTGGAT
ccaacaggacagagttcggc

SEQ ID NO: 6154 - DNA, 20 bp, Artificial Sequence
  Description of Artificial Sequence: Synthetic oligonucleotide
  Target: COL7A1; (-) strand; PAM type: NNGRRT; PAM sequence: CAGAGT
acccctaccctccaacagga

SEQ ID NO: 6155 - DNA, 20 bp, Artificial Sequence
  Description of Artificial Sequence: Synthetic oligonucleotide
  Target: COL7A1; (-) strand; PAM type: NNGRRT; PAM sequence: CTGAGT
ggccagggccagaagagatc

SEQ ID NO: 6156 - DNA, 20 bp, Artificial Sequence
  Description of Artificial Sequence: Synthetic oligonucleotide
  Target: COL7A1; (-) strand; PAM type: NNGRRT; PAM sequence: GAGAAT
tccagaggcaagtgggtgtg

SEQ ID NO: 6157 - DNA, 20 bp, Artificial Sequence
  Description of Artificial Sequence: Synthetic oligonucleotide
  Target: COL7A1; (-) strand; PAM type: NNGRRT; PAM sequence: GTGGGT
cctgggggttccagaggcaa

SEQ ID NO: 6158 - DNA, 20 bp, Artificial Sequence
  Description of Artificial Sequence: Synthetic oligonucleotide
  Target: COL7A1; (-) strand; PAM type: NNGRRT; PAM sequence: GGGGGT
cctggggagtttgttaacct

SEQ ID NO: 6159 - DNA, 20 bp, Artificial Sequence
  Description of Artificial Sequence: Synthetic oligonucleotide
  Target: COL7A1; (-) strand; PAM type: NNGRRT; PAM sequence: GGGAGT
ggtgcacaaaggagcccctg

SEQ ID NO: 6160 - DNA, 20 bp, Artificial Sequence
  Description of Artificial Sequence: Synthetic oligonucleotide
  Target: COL7A1; (-) strand; PAM type: NNGRRT; PAM sequence: TTGGAT
ggagggggcccccacgcctg

SEQ ID NO: 6161 - DNA, 20 bp, Artificial Sequence
  Description of Artificial Sequence: Synthetic oligonucleotide
  Target: COL7A1; (-) strand; PAM type: NNGRRT; PAM sequence: AAGGAT
cctcctttggagacagaggt

SEQ ID NO: 6162 - DNA, 20 bp, Artificial Sequence
  Description of Artificial Sequence: Synthetic oligonucleotide
  Target: COL7A1; (-) strand; PAM type: NNGRRT; PAM sequence: GTGAGT
cagtacagcgatgacccacg

SEQ ID NO: 6163 - DNA, 20 bp, Artificial Sequence
  Description of Artificial Sequence: Synthetic oligonucleotide
  Target: COL7A1; (-) strand; PAM type: NNGRRT; PAM sequence: CAGGGT
tctctggagcagccagtgca

SEQ ID NO: 6164 - DNA, 20 bp, Artificial Sequence
  Description of Artificial Sequence: Synthetic oligonucleotide
  Target: COL7A1; (-) strand; PAM type: NNGRRT; PAM sequence: CTGGAT
ccgctgacattgtgttctta

SEQ ID NO: 6165 - DNA, 20 bp, Artificial Sequence
  Description of Artificial Sequence: Synthetic oligonucleotide
  Target: COL7A1; (-) strand; PAM type: NNGRRT; PAM sequence: GCGGGT
tgaggccaccgtgcgggtag

SEQ ID NO: 6166 - DNA, 20 bp, Artificial Sequence
  Description of Artificial Sequence: Synthetic oligonucleotide
  Target: COL7A1; (-) strand; PAM type: NNGRRT; PAM sequence: GCGGGT
agtcccagtgaggccaccgt

SEQ ID NO: 6167 - DNA, 20 bp, Artificial Sequence
  Description of Artificial Sequence: Synthetic oligonucleotide
  Target: COL7A1; (-) strand; PAM type: NNGRRT; PAM sequence: GGGAGT
gcacacccccaaccctccgc

SEQ ID NO: 6168 - DNA, 20 bp, Artificial Sequence
  Description of Artificial Sequence: Synthetic oligonucleotide
  Target: COL7A1; (-) strand; PAM type: NNGRRT; PAM sequence: CGGGGT
tctggctccctggatgcgtg

SEQ ID NO: 6169 - DNA, 20 bp, Artificial Sequence
  Description of Artificial Sequence: Synthetic oligonucleotide
  Target: COL7A1; (-) strand; PAM type: NNGRRT; PAM sequence: CTGGAT
cctacccaaattctggctcc

SEQ ID NO: 6170 - DNA, 20 bp, Artificial Sequence
  Description of Artificial Sequence: Synthetic oligonucleotide
  Target: COL7A1; (-) strand; PAM type: NNGRRT; PAM sequence: CTGGGT
cgaaccctccgcgatcggtg

SEQ ID NO: 6171 - DNA, 20 bp, Artificial Sequence
  Description of Artificial Sequence: Synthetic oligonucleotide
  Target: COL7A1; (-) strand; PAM type: NNGRRT; PAM sequence: GCGGAT
agccaactccacgacgcccc

SEQ ID NO: 6172 - DNA, 20 bp, Artificial Sequence
  Description of Artificial Sequence: Synthetic oligonucleotide
  Target: COL7A1; (-) strand; PAM type: NNGRRT; PAM sequence: CCGAGT
gggatcctggcagaggcgcc

SEQ ID NO: 6173 - DNA, 20 bp, Artificial Sequence
  Description of Artificial Sequence: Synthetic oligonucleotide
  Target: COL7A1; (-) strand; PAM type: NNGRRT; PAM sequence: CGGGAT
ctggtggccgcgctctgcgc

SEQ ID NO: 6174 - DNA, 20 bp, Artificial Sequence
  Description of Artificial Sequence: Synthetic oligonucleotide
  Target: COL7A1; (-) strand; PAM type: NNGRRT; PAM sequence: TAGGAT
agctgacggcttttactgcc

SEQ ID NO: 6175 - DNA, 20 bp, Artificial Sequence
  Description of Artificial Sequence: Synthetic oligonucleotide
  Target: COL7A1; (-) strand; PAM type: NNGRRT; PAM sequence: GGGGGT
ggggagcaagggacagaggc

SEQ ID NO: 6176 - DNA, 20 bp, Artificial Sequence
  Description of Artificial Sequence: Synthetic oligonucleotide
  Target: COL7A1; (-) strand; PAM type: NNGRRT; PAM sequence: CTGGGT
atatgggtgagggcgggtgc

SEQ ID NO: 6177 - DNA, 20 bp, Artificial Sequence
  Description of Artificial Sequence: Synthetic oligonucleotide
  Target: COL7A1; (-) strand; PAM type: NNGRRT; PAM sequence: GCGGGT
tctcagggatatgggtgagg

SEQ ID NO: 6178 - DNA, 20 bp, Artificial Sequence
  Description of Artificial Sequence: Synthetic oligonucleotide
  Target: COL7A1; (-) strand; PAM type: NNGRRT; PAM sequence: ATGGGT
ggcggcgacctctcagggat

SEQ ID NO: 6179 - DNA, 20 bp, Artificial Sequence
  Description of Artificial Sequence: Synthetic oligonucleotide
  Target: COL7A1; (-) strand; PAM type: NNGRRT; PAM sequence: AGGGAT
ggggggggcggcgacctctc

SEQ ID NO: 6180 - DNA, 20 bp, Artificial Sequence
  Description of Artificial Sequence: Synthetic oligonucleotide
  Target: COL7A1; (-) strand; PAM type: NNGRRT; PAM sequence: AGGGGT
tcatatcgtttgtctggggg

SEQ ID NO: 6181 - DNA, 20 bp, Artificial Sequence
  Description of Artificial Sequence: Synthetic oligonucleotide
  Target: COL7A1; (-) strand; PAM type: NNGRRT; PAM sequence: GGGGGT
ccagaagccacggggggtcg

SEQ ID NO: 6182 - DNA, 20 bp, Artificial Sequence
  Description of Artificial Sequence: Synthetic oligonucleotide
  Target: COL7A1; (-) strand; PAM type: NNGRRT; PAM sequence: GGGGGT
ggaaattcccagaagccacg

SEQ ID NO: 6183 - DNA, 20 bp, Artificial Sequence
  Description of Artificial Sequence: Synthetic oligonucleotide
  Target: COL7A1; (-) strand; PAM type: NNGRRT; PAM sequence: AGGGGT
ctgtgaccttagatggagtt

SEQ ID NO: 6184 - DNA, 20 bp, Artificial Sequence
  Description of Artificial Sequence: Synthetic oligonucleotide
  Target: COL7A1; (-) strand; PAM type: NNGRRT; PAM sequence: TGGAGT
ccaagacctgtgaccttaga

SEQ ID NO: 6185 - DNA, 20 bp, Artificial Sequence
  Description of Artificial Sequence: Synthetic oligonucleotide
  Target: COL7A1; (-) strand; PAM type: NNGRRT; PAM sequence: GTGAGT
gcacccccactggattgggg

SEQ ID NO: 6186 - DNA, 20 bp, Artificial Sequence
  Description of Artificial Sequence: Synthetic oligonucleotide
  Target: COL7A1; (-) strand; PAM type: NNGRRT; PAM sequence: GGGGGT
ctgggcacccccactggatt

SEQ ID NO: 6187 - DNA, 20 bp, Artificial Sequence
  Description of Artificial Sequence: Synthetic oligonucleotide
  Target: COL7A1; (-) strand; PAM type: NNGRRT; PAM sequence: CTGGAT
ggcttgtctgggcaccccca

SEQ ID NO: 6188 - DNA, 20 bp, Artificial Sequence
  Description of Artificial Sequence: Synthetic oligonucleotide
  Target: COL7A1; (-) strand; PAM type: NNGRRT; PAM sequence: AGGAGT
cagacagatggctgaatcac

SEQ ID NO: 6189 - DNA, 20 bp, Artificial Sequence
  Description of Artificial Sequence: Synthetic oligonucleotide
  Target: COL7A1; (-) strand; PAM type: NNGRRT; PAM sequence: CTGAAT
gaggcccaccagacagatgg

SEQ ID NO: 6190 - DNA, 20 bp, Artificial Sequence
  Description of Artificial Sequence: Synthetic oligonucleotide
  Target: COL7A1; (-) strand; PAM type: NNGRRT; PAM sequence: CCGGGT
ttcttgcctgtcaaggagat

SEQ ID NO: 6191 - DNA, 20 bp, Artificial Sequence
  Description of Artificial Sequence: Synthetic oligonucleotide
  Target: COL7A1; (-) strand; PAM type: NNGRRT; PAM sequence: CAGAGT
tggtttccctaagaccggcc

SEQ ID NO: 6192 - DNA, 20 bp, Artificial Sequence
  Description of Artificial Sequence: Synthetic oligonucleotide
  Target: COL7A1; (-) strand; PAM type: NNGRRT; PAM sequence: TTGGAT
acaaagagggggtgagttac

SEQ ID NO: 6193 - DNA, 20 bp, Artificial Sequence
  Description of Artificial Sequence: Synthetic oligonucleotide
  Target: COL7A1; (-) strand; PAM type: NNGRRT; PAM sequence: GTGAGT
ttatcccctacaaagagggg

SEQ ID NO: 6194 - DNA, 20 bp, Artificial Sequence
  Description of Artificial Sequence: Synthetic oligonucleotide
  Target: COL7A1; (-) strand; PAM type: NNGRRT; PAM sequence: GGGGGT
cggcttatcccctacaaaga

SEQ ID NO: 6195 - DNA, 20 bp, Artificial Sequence
  Description of Artificial Sequence: Synthetic oligonucleotide
  Target: COL7A1; (-) strand; PAM type: NNGRRT; PAM sequence: TGGGAT
tggtaggggatgtgggacac

SEQ ID NO: 6196 - DNA, 20 bp, Artificial Sequence
  Description of Artificial Sequence: Synthetic oligonucleotide
  Target: COL7A1; (-) strand; PAM type: NNGRRT; PAM sequence: GGGGAT
catctgcctgtgacatggta

SEQ ID NO: 6197 - DNA, 20 bp, Artificial Sequence
  Description of Artificial Sequence: Synthetic oligonucleotide
  Target: COL7A1; (-) strand; PAM type: NNGRRT; PAM sequence: CTGGAT
ccccctccctgcaggcacag

SEQ ID NO: 6198 - DNA, 20 bp, Artificial Sequence
  Description of Artificial Sequence: Synthetic oligonucleotide
  Target: COL7A1; (-) strand; PAM type: NNGRRT; PAM sequence: GTGGGT
ctgagagatgagctgtcact

SEQ ID NO: 6199 - DNA, 20 bp, Artificial Sequence
  Description of Artificial Sequence: Synthetic oligonucleotide
  Target: COL7A1; (-) strand; PAM type: NNGRRT; PAM sequence: GTGGGT
gatggaaggagaggatgcct

SEQ ID NO: 6200 - DNA, 20 bp, Artificial Sequence
  Description of Artificial Sequence: Synthetic oligonucleotide
  Target: COL7A1; (-) strand; PAM type: NNGRRT; PAM sequence: GAGGAT
aagaaaagtagatggaagga

SEQ ID NO: 6201 - DNA, 20 bp, Artificial Sequence
  Description of Artificial Sequence: Synthetic oligonucleotide
  Target: COL7A1; (-) strand; PAM type: NNGRRT; PAM sequence: ATGGGT
acctcggcctggtaggggag

SEQ ID NO: 6202 - DNA, 20 bp, Artificial Sequence
  Description of Artificial Sequence: Synthetic oligonucleotide
  Target: COL7A1; (-) strand; PAM type: NNGRRT; PAM sequence: AGGAGT
gtcagcctgggtaaggggac

SEQ ID NO: 6203 - DNA, 20 bp, Artificial Sequence
  Description of Artificial Sequence: Synthetic oligonucleotide
  Target: COL7A1; (-) strand; PAM type: NNGRRT; PAM sequence: CTGGGT
ggggagggtgtgaagtcagc

SEQ ID NO: 6204 - DNA, 20 bp, Artificial Sequence
  Description of Artificial Sequence: Synthetic oligonucleotide
  Target: COL7A1; (-) strand; PAM type: NNGRRT; PAM sequence: GAGGGT
cctcagaagcgaagctgggg

SEQ ID NO: 6205 - DNA, 20 bp, Artificial Sequence
  Description of Artificial Sequence: Synthetic oligonucleotide
  Target: COL7A1; (-) strand; PAM type: NNGRRT; PAM sequence: CAGGAT
ctgggctgcccagagttatt

SEQ ID NO: 6206 - DNA, 20 bp, Artificial Sequence
  Description of Artificial Sequence: Synthetic oligonucleotide
  Target: COL7A1; (-) strand; PAM type: NNGRRT; PAM sequence: CAGAGT
gatgtgctttctgggctgcc

SEQ ID NO: 6207 - DNA, 20 bp, Artificial Sequence
  Description of Artificial Sequence: Synthetic oligonucleotide
  Target: COL7A1; (-) strand; PAM type: NNGRRT; PAM sequence: GTGAGT
gaaggggcccagcagccttg

SEQ ID NO: 6208 - DNA, 20 bp, Artificial Sequence
  Description of Artificial Sequence: Synthetic oligonucleotide
  Target: COL7A1; (-) strand; PAM type: NNGRRT; PAM sequence: GTGGAT
tgctgtccccatatctccct

SEQ ID NO: 6209 - DNA, 20 bp, Artificial Sequence
  Description of Artificial Sequence: Synthetic oligonucleotide
  Target: COL7A1; (-) strand; PAM type: NNGRRT; PAM sequence: AGGAGT
ccagagtcctcgggctgtgg

SEQ ID NO: 6210 - DNA, 20 bp, Artificial Sequence
  Description of Artificial Sequence: Synthetic oligonucleotide
  Target: COL7A1; (-) strand; PAM type: NNGRRT; PAM sequence: CAGAGT
gcctccagctctggccacac

SEQ ID NO: 6211 - DNA, 20 bp, Artificial Sequence
  Description of Artificial Sequence: Synthetic oligonucleotide
  Target: COL7A1; (-) strand; PAM type: NNGRRT; PAM sequence: ATGGAT
gcaataggaaagcaggcagc

SEQ ID NO: 6212 - DNA, 20 bp, Artificial Sequence
  Description of Artificial Sequence: Synthetic oligonucleotide
  Target: COL7A1; (-) strand; PAM type: NNGRRT; PAM sequence: AGGGAT
agtttggggggtcagtaata

SEQ ID NO: 6213 - DNA, 20 bp, Artificial Sequence
  Description of Artificial Sequence: Synthetic oligonucleotide
  Target: COL7A1; (-) strand; PAM type: NNGRRT; PAM sequence: GGGGGT
ctatgccccaggatagtttg

SEQ ID NO: 6214 - DNA, 20 bp, Artificial Sequence
  Description of Artificial Sequence: Synthetic oligonucleotide
  Target: COL7A1; (-) strand; PAM type: NNGRRT; PAM sequence: CAGGAT
aaggtcatagcactatgccc

SEQ ID NO: 6215 - DNA, 20 bp, Artificial Sequence
  Description of Artificial Sequence: Synthetic oligonucleotide
  Target: COL7A1; (-) strand; PAM type: NNGRRT; PAM sequence: TGGAAT
ggctgaggagaccctgacct

SEQ ID NO: 6216 - DNA, 20 bp, Artificial Sequence
  Description of Artificial Sequence: Synthetic oligonucleotide
  Target: COL7A1; (-) strand; PAM type: NNGRRT; PAM sequence: GGGGGT
gagcacaccttgcagggatg

SEQ ID NO: 6217 - DNA, 20 bp, Artificial Sequence
  Description of Artificial Sequence: Synthetic oligonucleotide
  Target: COL7A1; (-) strand; PAM type: NNGRRT; PAM sequence: AGGGAT
ccacctggagcacaccttgc

SEQ ID NO: 6218 - DNA, 20 bp, Artificial Sequence
  Description of Artificial Sequence: Synthetic oligonucleotide
  Target: COL7A1; (-) strand; PAM type: NNGRRT; PAM sequence: TGGAGT
tctcatagaagctccagacg

SEQ ID NO: 6219 - DNA, 20 bp, Artificial Sequence
  Description of Artificial Sequence: Synthetic oligonucleotide
  Target: COL7A1; (-) strand; PAM type: NNGRRT; PAM sequence: GTGAGT
agagggccacactcctgctc

SEQ ID NO: 6220 - DNA, 20 bp, Artificial Sequence
  Description of Artificial Sequence: Synthetic oligonucleotide
  Target: COL7A1; (-) strand; PAM type: NNGRRT; PAM sequence: TGGGGT
tgggggctccaccgccctga

SEQ ID NO: 6221 - DNA, 20 bp, Artificial Sequence
  Description of Artificial Sequence: Synthetic oligonucleotide
  Target: COL7A1; (-) strand; PAM type: NNGRRT; PAM sequence: AAGGAT
agggaaagcttgggagggag

SEQ ID NO: 6222 - DNA, 20 bp, Artificial Sequence
  Description of Artificial Sequence: Synthetic oligonucleotide
  Target: COL7A1; (-) strand; PAM type: NNGRRT; PAM sequence: TGGGGT
aggccctggttggaaacaga

SEQ ID NO: 6223 - DNA, 20 bp, Artificial Sequence
  Description of Artificial Sequence: Synthetic oligonucleotide
  Target: COL7A1; (-) strand; PAM type: NNGRRT; PAM sequence: TGGGAT
tggtggtgtccagggtacag

SEQ ID NO: 6224 - DNA, 20 bp, Artificial Sequence
  Description of Artificial Sequence: Synthetic oligonucleotide
  Target: COL7A1; (-) strand; PAM type: NNGRRT; PAM sequence: CAGGGT
gtgaggagtttggtggtgtc

SEQ ID NO: 6225 - DNA, 20 bp, Artificial Sequence
  Description of Artificial Sequence: Synthetic oligonucleotide
  Target: COL7A1; (-) strand; PAM type: NNGRRT; PAM sequence: AGGAGT
taatcttccatagtccagtg

SEQ ID NO: 6226 - DNA, 20 bp, Artificial Sequence
  Description of Artificial Sequence: Synthetic oligonucleotide
  Target: COL7A1; (-) strand; PAM type: NNGRRT; PAM sequence: GAGGGT
gaggcacgagtgggttggag

SEQ ID NO: 6227 - DNA, 20 bp, Artificial Sequence
  Description of Artificial Sequence: Synthetic oligonucleotide
  Target: COL7A1; (-) strand; PAM type: NNGRRT; PAM sequence: GTGGGT
tgggagacgcggaggcacga

SEQ ID NO: 6228 - DNA, 20 bp, Artificial Sequence
  Description of Artificial Sequence: Synthetic oligonucleotide
  Target: COL7A1; (-) strand; PAM type: NNGRRT; PAM sequence: ACGAGT
gggctgggagacgcggaggc

SEQ ID NO: 6229 - DNA, 20 bp, Artificial Sequence
  Description of Artificial Sequence: Synthetic oligonucleotide
  Target: COL7A1; (-) strand; PAM type: NNGRRT; PAM sequence: CAGAGT
gtgaagagaagtgacttggt

SEQ ID NO: 6230 - DNA, 20 bp, Artificial Sequence
  Description of Artificial Sequence: Synthetic oligonucleotide
  Target: COL7A1; (-) strand; PAM type: NNGRRT; PAM sequence: GGGAGT
acacgagagcttgagttgct

SEQ ID NO: 6231 - DNA, 20 bp, Artificial Sequence
  Description of Artificial Sequence: Synthetic oligonucleotide
  Target: COL7A1; (-) strand; PAM type: NNGRRT; PAM sequence: TTGAGT
ggtgtgctggacacgagagc

SEQ ID NO: 6232 - DNA, 20 bp, Artificial Sequence
  Description of Artificial Sequence: Synthetic oligonucleotide
  Target: COL7A1; (-) strand; PAM type: NNGRRT; PAM sequence: GAGGAT
ttgtcaagtttgagctcctg

SEQ ID NO: 6233 - DNA, 20 bp, Artificial Sequence
  Description of Artificial Sequence: Synthetic oligonucleotide
  Target: COL7A1; (-) strand; PAM type: NNGRRT; PAM sequence: CTGGGT
gaaccctgacaggcccaacc

SEQ ID NO: 6234 - DNA, 20 bp, Artificial Sequence
  Description of Artificial Sequence: Synthetic oligonucleotide
  Target: COL7A1; (-) strand; PAM type: NNGRRT; PAM sequence: CAGGGT
cgctgcctggcagtcacaag

SEQ ID NO: 6235 - DNA, 20 bp, Artificial Sequence
  Description of Artificial Sequence: Synthetic oligonucleotide
  Target: COL7A1; (-) strand; PAM type: NNGRRT; PAM sequence: TGGGAT
gcttccacagtcaggttctc

SEQ ID NO: 6236 - DNA, 20 bp, Artificial Sequence
  Description of Artificial Sequence: Synthetic oligonucleotide
  Target: COL7A1; (-) strand; PAM type: NNGRRT; PAM sequence: GTGGGT
ttttggctctggtccccatg

SEQ ID NO: 6237 - DNA, 20 bp, Artificial Sequence
  Description of Artificial Sequence: Synthetic oligonucleotide
  Target: COL7A1; (-) strand; PAM type: NNGRRT; PAM sequence: AAGAAT
cctccgctgactcaggctcc

SEQ ID NO: 6238 - DNA, 20 bp, Artificial Sequence
  Description of Artificial Sequence: Synthetic oligonucleotide
  Target: COL7A1; (-) strand; PAM type: NNGRRT; PAM sequence: AGGAAT
gctgcctggacaagcagggc

SEQ ID NO: 6239 - DNA, 20 bp, Artificial Sequence
  Description of Artificial Sequence: Synthetic oligonucleotide
  Target: COL7A1; (-) strand; PAM type: NNGRRT; PAM sequence: GAGGAT
tttactctgcattctgggag

SEQ ID NO: 6240 - DNA, 20 bp, Artificial Sequence
  Description of Artificial Sequence: Synthetic oligonucleotide
  Target: COL7A1; (-) strand; PAM type: NNGRRT; PAM sequence: AAGGAT
aggggccaaggggtgtctcc

SEQ ID NO: 6241 - DNA, 20 bp, Artificial Sequence
  Description of Artificial Sequence: Synthetic oligonucleotide
  Target: COL7A1; (-) strand; PAM type: NNGRRT; PAM sequence: AGGGGT
tggtggaccagaaggggcca

SEQ ID NO: 6242 - DNA, 20 bp, Artificial Sequence
  Description of Artificial Sequence: Synthetic oligonucleotide
  Target: COL7A1; (-) strand; PAM type: NNGRRT; PAM sequence: TGGAAT
cccctgtaggagtcccagcc

SEQ ID NO: 6243 - DNA, 20 bp, Artificial Sequence
  Description of Artificial Sequence: Synthetic oligonucleotide
  Target: COL7A1; (-) strand; PAM type: NNGRRT; PAM sequence: AGGAGT
aacccagcctttgcccctgt

SEQ ID NO: 6244 - DNA, 20 bp, Artificial Sequence
  Description of Artificial Sequence: Synthetic oligonucleotide
  Target: COL7A1; (-) strand; PAM type: NNGRRT; PAM sequence: GGGAGT
tggtcccaagattgggctgt

SEQ ID NO: 6245 - DNA, 20 bp, Artificial Sequence
  Description of Artificial Sequence: Synthetic oligonucleotide
  Target: COL7A1; (-) strand; PAM type: NNGRRT; PAM sequence: GGGAGT
gtttccactcagccacttag

SEQ ID NO: 6246 - DNA, 20 bp, Artificial Sequence
  Description of Artificial Sequence: Synthetic oligonucleotide
  Target: COL7A1; (-) strand; PAM type: NNGRRT; PAM sequence: GGGGGT
cctcagccaggggcaagcgt

SEQ ID NO: 6247 - DNA, 20 bp, Artificial Sequence
  Description of Artificial Sequence: Synthetic oligonucleotide
  Target: COL7A1; (-) strand; PAM type: NNGRRT; PAM sequence: CTGGAT
tccctctagttctgtggctc

SEQ ID NO: 6248 - DNA, 20 bp, Artificial Sequence
  Description of Artificial Sequence: Synthetic oligonucleotide
  Target: COL7A1; (-) strand; PAM type: NNGRRT; PAM sequence: TGGAGT
tccctcttttggcattggca

SEQ ID NO: 6249 - DNA, 20 bp, Artificial Sequence
  Description of Artificial Sequence: Synthetic oligonucleotide
  Target: COL7A1; (-) strand; PAM type: NNGRRT; PAM sequence: CGGGGT
tgtaagcaagagggcagggc

SEQ ID NO: 6250 - DNA, 20 bp, Artificial Sequence
  Description of Artificial Sequence: Synthetic oligonucleotide
  Target: COL7A1; (-) strand; PAM type: NNGRRT; PAM sequence: CCGGAT
gagcagctcccagactacaa

SEQ ID NO: 6251 - DNA, 20 bp, Artificial Sequence
  Description of Artificial Sequence: Synthetic oligonucleotide
  Target: COL7A1; (-) strand; PAM type: NNGRRT; PAM sequence: CTGGGT
ctctgggcagcatctccgag

SEQ ID NO: 6252 - DNA, 20 bp, Artificial Sequence
  Description of Artificial Sequence: Synthetic oligonucleotide
  Target: COL7A1; (-) strand; PAM type: NNGRRT; PAM sequence: GGGAAT
gacaggctcagcacccctgg

SEQ ID NO: 6253 - DNA, 20 bp, Artificial Sequence
  Description of Artificial Sequence: Synthetic oligonucleotide
  Target: COL7A1; (-) strand; PAM type: NNGRRT; PAM sequence: TGGGGT
aggtaacgggcacctccatg

SEQ ID NO: 6254 - DNA, 20 bp, Artificial Sequence
  Description of Artificial Sequence: Synthetic oligonucleotide
  Target: COL7A1; (-) strand; PAM type: NNGRRT; PAM sequence: GGGAGT
ccccagtcccctggctgcca

SEQ ID NO: 6255 - DNA, 20 bp, Artificial Sequence
  Description of Artificial Sequence: Synthetic oligonucleotide
  Target: COL7A1; (-) strand; PAM type: NNGRRT; PAM sequence: GGGGGT
tggatatggtaagtggccta

SEQ ID NO: 6256 - DNA, 20 bp, Artificial Sequence
  Description of Artificial Sequence: Synthetic oligonucleotide
  Target: COL7A1; (-) strand; PAM type: NNGRRT; PAM sequence: CTGGAT
tgaccagtgcccagcagtgg

SEQ ID NO: 6257 - DNA, 20 bp, Artificial Sequence
  Description of Artificial Sequence: Synthetic oligonucleotide
  Target: COL7A1; (-) strand; PAM type: NNGRRT; PAM sequence: GTGGAT
tctgcctcaccctgcaggag

SEQ ID NO: 6258 - DNA, 20 bp, Artificial Sequence
  Description of Artificial Sequence: Synthetic oligonucleotide
  Target: COL7A1; (-) strand; PAM type: NNGRRT; PAM sequence: TTGGAT
ctgtgggagatctctgctag

SEQ ID NO: 6259 - DNA, 20 bp, Artificial Sequence
  Description of Artificial Sequence: Synthetic oligonucleotide
  Target: COL7A1; (-) strand; PAM type: NNGRRT; PAM sequence: AGGGAT
ggcccatggaggtctatagc

SEQ ID NO: 6260 - DNA, 20 bp, Artificial Sequence
  Description of Artificial Sequence: Synthetic oligonucleotide
  Target: COL7A1; (-) strand; PAM type: NNGRRT; PAM sequence: AGGGGT
cctaggcagctgtcacctgc

SEQ ID NO: 6261 - DNA, 20 bp, Artificial Sequence
  Description of Artificial Sequence: Synthetic oligonucleotide
  Target: COL7A1; (-) strand; PAM type: NNGRRT; PAM sequence: TAGGGT
tggcagacacctgggaggtg

SEQ ID NO: 6262 - DNA, 20 bp, Artificial Sequence
  Description of Artificial Sequence: Synthetic oligonucleotide
  Target: COL7A1; (-) strand; PAM type: NNGRRT; PAM sequence: TGGAGT
tggacccctgggagaggttc

SEQ ID NO: 6263 - DNA, 20 bp, Artificial Sequence
  Description of Artificial Sequence: Synthetic oligonucleotide
  Target: COL7A1; (-) strand; PAM type: NNGRRT; PAM sequence: CCGGAT
cccctggctgaatgggaaag

SEQ ID NO: 6264 - DNA, 20 bp, Artificial Sequence
  Description of Artificial Sequence: Synthetic oligonucleotide
  Target: COL7A1; (-) strand; PAM type: NNGRRT; PAM sequence: CTGAAT
tggccgccgcatccccctgg

SEQ ID NO: 6265 - DNA, 20 bp, Artificial Sequence
  Description of Artificial Sequence: Synthetic oligonucleotide
  Target: COL7A1; (-) strand; PAM type: NNGRRT; PAM sequence: CTGGGT
cctgtgggtccaggattggg

SEQ ID NO: 6266 - DNA, 20 bp, Artificial Sequence
  Description of Artificial Sequence: Synthetic oligonucleotide
  Target: COL7A1; (-) strand; PAM type: NNGRRT; PAM sequence: CAGGAT
tgtttgtgtacctgtgggtc

SEQ ID NO: 6267 - DNA, 20 bp, Artificial Sequence
  Description of Artificial Sequence: Synthetic oligonucleotide
  Target: COL7A1; (-) strand; PAM type: NNGRRT; PAM sequence: GTGGGT
tggagattgtttgtgtacct

SEQ ID NO: 6268 - DNA, 20 bp, Artificial Sequence
  Description of Artificial Sequence: Synthetic oligonucleotide
  Target: COL7A1; (+) strand; PAM type: NNGRRT; PAM sequence: CAGGAT
aaggcatcctcacacccaga

SEQ ID NO: 6269 - DNA, 20 bp, Artificial Sequence
  Description of Artificial Sequence: Synthetic oligonucleotide
  Target: COL7A1; (+) strand; PAM type: NNGRRT; PAM sequence: TGGGGT
ggtcaacatcaggagatgcc

SEQ ID NO: 6270 - DNA, 20 bp, Artificial Sequence
  Description of Artificial Sequence: Synthetic oligonucleotide
  Target: COL7A1; (+) strand; PAM type: NNGRRT; PAM sequence: GAGGAT
ccaccgtccacatctgctct

SEQ ID NO: 6271 - DNA, 20 bp, Artificial Sequence
  Description of Artificial Sequence: Synthetic oligonucleotide
  Target: COL7A1; (+) strand; PAM type: NNGRRT; PAM sequence: GAGGGT
tgtttgtcaggtgggaaact

SEQ ID NO: 6272 - DNA, 20 bp, Artificial Sequence
  Description of Artificial Sequence: Synthetic oligonucleotide
  Target: COL7A1; (+) strand; PAM type: NNGRRT; PAM sequence: AAGGGT
tgagggtcaggaagagggag

SEQ ID NO: 6273 - DNA, 20 bp, Artificial Sequence
  Description of Artificial Sequence: Synthetic oligonucleotide
  Target: COL7A1; (+) strand; PAM type: NNGRRT; PAM sequence: GCGAGT
gaagggtccaagatcacaaa

SEQ ID NO: 6274 - DNA, 20 bp, Artificial Sequence
  Description of Artificial Sequence: Synthetic oligonucleotide
  Target: COL7A1; (+) strand; PAM type: NNGRRT; PAM sequence: TGGAAT
ccttgcctgccacactacag

SEQ ID NO: 6275 - DNA, 20 bp, Artificial Sequence
  Description of Artificial Sequence: Synthetic oligonucleotide
  Target: COL7A1; (+) strand; PAM type: NNGRRT; PAM sequence: GCGGAT
cgtctgctctctcagcatca

SEQ ID NO: 6276 - DNA, 20 bp, Artificial Sequence
  Description of Artificial Sequence: Synthetic oligonucleotide
  Target: COL7A1; (+) strand; PAM type: NNGRRT; PAM sequence: TAGAAT
cagcatcagcggatgcccgg

SEQ ID NO: 6277 - DNA, 20 bp, Artificial Sequence
  Description of Artificial Sequence: Synthetic oligonucleotide
  Target: COL7A1; (+) strand; PAM type: NNGRRT; PAM sequence: TGGGAT
cccaggcgtgggaagtatgc

SEQ ID NO: 6278 - DNA, 20 bp, Artificial Sequence
  Description of Artificial Sequence: Synthetic oligonucleotide
  Target: COL7A1; (+) strand; PAM type: NNGRRT; PAM sequence: CAGGGT
gcctgaccctggttggctcc

SEQ ID NO: 6279 - DNA, 20 bp, Artificial Sequence
  Description of Artificial Sequence: Synthetic oligonucleotide
  Target: COL7A1; (+) strand; PAM type: NNGRRT; PAM sequence: CTGGGT
cgcctcaacctcccaaagcc

SEQ ID NO: 6280 - DNA, 20 bp, Artificial Sequence
  Description of Artificial Sequence: Synthetic oligonucleotide
  Target: COL7A1; (+) strand; PAM type: NNGRRT; PAM sequence: AGGGGT
cctttgcagcataaagaccc

SEQ ID NO: 6281 - DNA, 20 bp, Artificial Sequence
  Description of Artificial Sequence: Synthetic oligonucleotide
  Target: COL7A1; (+) strand; PAM type: NNGRRT; PAM sequence: AGGAGT
tgctgtccactgggaggttc

SEQ ID NO: 6282 - DNA, 20 bp, Artificial Sequence
  Description of Artificial Sequence: Synthetic oligonucleotide
  Target: COL7A1; (+) strand; PAM type: NNGRRT; PAM sequence: AGGAAT
tgggaggttcaggagtttcc

SEQ ID NO: 6283 - DNA, 20 bp, Artificial Sequence
  Description of Artificial Sequence: Synthetic oligonucleotide
  Target: COL7A1; (+) strand; PAM type: NNGRRT; PAM sequence: AAGGAT
tcctctggccatttccagca

SEQ ID NO: 6284 - DNA, 20 bp, Artificial Sequence
  Description of Artificial Sequence: Synthetic oligonucleotide
  Target: COL7A1; (+) strand; PAM type: NNGRRT; PAM sequence: AGGAGT
ccctgggcccagggctcaca

SEQ ID NO: 6285 - DNA, 20 bp, Artificial Sequence
  Description of Artificial Sequence: Synthetic oligonucleotide
  Target: COL7A1; (+) strand; PAM type: NNGRRT; PAM sequence: AGGGAT
agggcgtacagtaggtgctt

SEQ ID NO: 6286 - DNA, 20 bp, Artificial Sequence
  Description of Artificial Sequence: Synthetic oligonucleotide
  Target: COL7A1; (+) strand; PAM type: NNGRRT; PAM sequence: AAGGGT
gaccagcaagggcacacaga

SEQ ID NO: 6287 - DNA, 20 bp, Artificial Sequence
  Description of Artificial Sequence: Synthetic oligonucleotide
  Target: COL7A1; (+) strand; PAM type: NNGRRT; PAM sequence: CTGAGT
cagagaggttcatgaccaaa

SEQ ID NO: 6288 - DNA, 20 bp, Artificial Sequence
  Description of Artificial Sequence: Synthetic oligonucleotide
  Target: COL7A1; (+) strand; PAM type: NNGRRT; PAM sequence: ATGAAT
ctccttcgggccactgacag

SEQ ID NO: 6289 - DNA, 20 bp, Artificial Sequence
  Description of Artificial Sequence: Synthetic oligonucleotide
  Target: COL7A1; (+) strand; PAM type: NNGRRT; PAM sequence: CAGAGT
gccactgccccctgcagctc

SEQ ID NO: 6290 - DNA, 20 bp, Artificial Sequence
  Description of Artificial Sequence: Synthetic oligonucleotide
  Target: COL7A1; (+) strand; PAM type: NNGRRT; PAM sequence: TGGGGT
tgccccctgcagctccagag

SEQ ID NO: 6291 - DNA, 20 bp, Artificial Sequence
  Description of Artificial Sequence: Synthetic oligonucleotide
  Target: COL7A1; (+) strand; PAM type: NNGRRT; PAM sequence: TAGAGT
cgtctgccttcatgtccacc

SEQ ID NO: 6292 - DNA, 20 bp, Artificial Sequence
  Description of Artificial Sequence: Synthetic oligonucleotide
  Target: COL7A1; (+) strand; PAM type: NNGRRT; PAM sequence: CAGAGT
ctagagttgtctgcacagcc

SEQ ID NO: 6293 - DNA, 20 bp, Artificial Sequence
  Description of Artificial Sequence: Synthetic oligonucleotide
  Target: COL7A1; (+) strand; PAM type: NNGRRT; PAM sequence: TGGAGT
ttctgtctctggcccagcaa

SEQ ID NO: 6294 - DNA, 20 bp, Artificial Sequence
  Description of Artificial Sequence: Synthetic oligonucleotide
  Target: COL7A1; (+) strand; PAM type: NNGRRT; PAM sequence: CTGGGT
cacccaccatgtgtcgcggc

SEQ ID NO: 6295 - DNA, 20 bp, Artificial Sequence
  Description of Artificial Sequence: Synthetic oligonucleotide
  Target: COL7A1; (+) strand; PAM type: NNGRRT; PAM sequence: TGGGAT
gcggcctgggtgcacaccac

SEQ ID NO: 6296 - DNA, 20 bp, Artificial Sequence
  Description of Artificial Sequence: Synthetic oligonucleotide
  Target: COL7A1; (+) strand; PAM type: NNGRRT; PAM sequence: CAGAGT
agtccgtgcgtgaagtggga

SEQ ID NO: 6297 - DNA, 20 bp, Artificial Sequence
  Description of Artificial Sequence: Synthetic oligonucleotide
  Target: COL7A1; (+) strand; PAM type: NNGRRT; PAM sequence: CTGGGT
cctgtgagccctgcatgtcc

SEQ ID NO: 6298 - DNA, 20 bp, Artificial Sequence
  Description of Artificial Sequence: Synthetic oligonucleotide
  Target: COL7A1; (+) strand; PAM type: NNGRRT; PAM sequence: GGGGAT
catgtccctgggtcgaggct

SEQ ID NO: 6299 - DNA, 20 bp, Artificial Sequence
  Description of Artificial Sequence: Synthetic oligonucleotide
  Target: COL7A1; (+) strand; PAM type: NNGRRT; PAM sequence: AGGGGT
tgggtcgaggctggggatgc

SEQ ID NO: 6300 - DNA, 20 bp, Artificial Sequence
  Description of Artificial Sequence: Synthetic oligonucleotide
  Target: COL7A1; (+) strand; PAM type: NNGRRT; PAM sequence: AGGAGT
ggggaggacagggcctggcc

SEQ ID NO: 6301 - DNA, 20 bp, Artificial Sequence
  Description of Artificial Sequence: Synthetic oligonucleotide
  Target: COL7A1; (+) strand; PAM type: NNGRRT; PAM sequence: TGGGAT
tttctctgtgtggtggccta

SEQ ID NO: 6302 - DNA, 20 bp, Artificial Sequence
  Description of Artificial Sequence: Synthetic oligonucleotide
  Target: COL7A1; (+) strand; PAM type: NNGRRT; PAM sequence: CAGGGT
gccctccaggtcttcccatc

SEQ ID NO: 6303 - DNA, 20 bp, Artificial Sequence
  Description of Artificial Sequence: Synthetic oligonucleotide
  Target: COL7A1; (+) strand; PAM type: NNGRRT; PAM sequence: CAGGAT
cagcagtggccgacacgggc

SEQ ID NO: 6304 - DNA, 20 bp, Artificial Sequence
  Description of Artificial Sequence: Synthetic oligonucleotide
  Target: COL7A1; (+) strand; PAM type: NNGRRT; PAM sequence: CAGGGT
cgataggacaatgcgcgagc

SEQ ID NO: 6305 - DNA, 20 bp, Artificial Sequence
  Description of Artificial Sequence: Synthetic oligonucleotide
  Target: COL7A1; (+) strand; PAM type: NNGRRT; PAM sequence: GCGGGT
acaatgcgcgagccagggtg

SEQ ID NO: 6306 - DNA, 20 bp, Artificial Sequence
  Description of Artificial Sequence: Synthetic oligonucleotide
  Target: COL7A1; (+) strand; PAM type: NNGRRT; PAM sequence: GGGAGT
ctctctgaggccgcaggtcg

SEQ ID NO: 6307 - DNA, 20 bp, Artificial Sequence
  Description of Artificial Sequence: Synthetic oligonucleotide
  Target: COL7A1; (+) strand; PAM type: NNGRRT; PAM sequence: GAGAAT
aggtcggggagtggtctggg

SEQ ID NO: 6308 - DNA, 20 bp, Artificial Sequence
  Description of Artificial Sequence: Synthetic oligonucleotide
  Target: COL7A1; (+) strand; PAM type: NNGRRT; PAM sequence: TGGGAT
tgagggcggagctggaaggt

SEQ ID NO: 6309 - DNA, 20 bp, Artificial Sequence
  Description of Artificial Sequence: Synthetic oligonucleotide
  Target: COL7A1; (+) strand; PAM type: NNGRRT; PAM sequence: AGGGGT
cggagctggaaggttgggat

SEQ ID NO: 6310 - DNA, 20 bp, Artificial Sequence
  Description of Artificial Sequence: Synthetic oligonucleotide
  Target: COL7A1; (+) strand; PAM type: NNGRRT; PAM sequence: TGGGGT
gggcaggggctctggtcaac

SEQ ID NO: 6311 - DNA, 20 bp, Artificial Sequence
  Description of Artificial Sequence: Synthetic oligonucleotide
  Target: COL7A1; (+) strand; PAM type: NNGRRT; PAM sequence: CAGAGT
acagagacagatggcaaggg

SEQ ID NO: 6312 - DNA, 20 bp, Artificial Sequence
  Description of Artificial Sequence: Synthetic oligonucleotide
  Target: COL7A1; (+) strand; PAM type: NNGRRT; PAM sequence: GGGGAT
aagggcagagtgacagagcg

SEQ ID NO: 6313 - DNA, 20 bp, Artificial Sequence
  Description of Artificial Sequence: Synthetic oligonucleotide
  Target: COL7A1; (+) strand; PAM type: NNGRRT; PAM sequence: AGGGGT
agagaggaagacaccgagaa

SEQ ID NO: 6314 - DNA, 20 bp, Artificial Sequence
  Description of Artificial Sequence: Synthetic oligonucleotide
  Target: COL7A1; (+) strand; PAM type: NNGRRT; PAM sequence: CAGAAT
aggggagacaagaggagagc

SEQ ID NO: 6315 - DNA, 20 bp, Artificial Sequence
  Description of Artificial Sequence: Synthetic oligonucleotide
  Target: COL7A1; (+) strand; PAM type: NNGRRT; PAM sequence: CAGAGT
gaaagattcagacagaaaca

SEQ ID NO: 6316 - DNA, 20 bp, Artificial Sequence
  Description of Artificial Sequence: Synthetic oligonucleotide
  Target: COL7A1; (+) strand; PAM type: NNGRRT; PAM sequence: AGGAAT
gatccaggaaacagaagggc

SEQ ID NO: 6317 - DNA, 20 bp, Artificial Sequence
  Description of Artificial Sequence: Synthetic oligonucleotide
  Target: COL7A1; (+) strand; PAM type: NNGRRT; PAM sequence: TCGGAT
aggaaacagaagggcaggaa

SEQ ID NO: 6318 - DNA, 20 bp, Artificial Sequence
  Description of Artificial Sequence: Synthetic oligonucleotide
  Target: COL7A1; (+) strand; PAM type: NNGRRT; PAM sequence: CAGAGT
agaaaagcagccagagatcc

SEQ ID NO: 6319 - DNA, 20 bp, Artificial Sequence
  Description of Artificial Sequence: Synthetic oligonucleotide
  Target: COL7A1; (+) strand; PAM type: NNGRRT; PAM sequence: CTGGGT
gccagagatcccagagtccc

SEQ ID NO: 6320 - DNA, 20 bp, Artificial Sequence
  Description of Artificial Sequence: Synthetic oligonucleotide
  Target: COL7A1; (+) strand; PAM type: NNGRRT; PAM sequence: TGGGGT
ctaccgccaccagctgcttc

SEQ ID NO: 6321 - DNA, 20 bp, Artificial Sequence
  Description of Artificial Sequence: Synthetic oligonucleotide
  Target: COL7A1; (+) strand; PAM type: NNGRRT; PAM sequence: TGGGGT
atttatctccctcagccccc

SEQ ID NO: 6322 - DNA, 20 bp, Artificial Sequence
  Description of Artificial Sequence: Synthetic oligonucleotide
  Target: COL7A1; (+) strand; PAM type: NNGRRT; PAM sequence: GGGGGT
acctatgactcatccctccc

SEQ ID NO: 6323 - DNA, 20 bp, Artificial Sequence
  Description of Artificial Sequence: Synthetic oligonucleotide
  Target: COL7A1; (+) strand; PAM type: NNGRRT; PAM sequence: GAGAAT
ccggggacaagttggggact

SEQ ID NO: 6324 - DNA, 20 bp, Artificial Sequence
  Description of Artificial Sequence: Synthetic oligonucleotide
  Target: COL7A1; (+) strand; PAM type: NNGRRT; PAM sequence: CAGAAT
agagggactctgtacccatg

SEQ ID NO: 6325 - DNA, 20 bp, Artificial Sequence
  Description of Artificial Sequence: Synthetic oligonucleotide
  Target: COL7A1; (+) strand; PAM type: NNGRRT; PAM sequence: CAGAAT
acagcagctttaatgccccc

SEQ ID NO: 6326 - DNA, 20 bp, Artificial Sequence
  Description of Artificial Sequence: Synthetic oligonucleotide
  Target: COL7A1; (+) strand; PAM type: NNGRRT; PAM sequence: TTGGGT
agcaccatgtcatcacaggc

SEQ ID NO: 6327 - DNA, 20 bp, Artificial Sequence
  Description of Artificial Sequence: Synthetic oligonucleotide
  Target: COL7A1; (+) strand; PAM type: NNGRRT; PAM sequence: GCGGGT
tcacaggcttgggtcaaggg

SEQ ID NO: 6328 - DNA, 20 bp, Artificial Sequence
  Description of Artificial Sequence: Synthetic oligonucleotide
  Target: COL7A1; (+) strand; PAM type: NNGRRT; PAM sequence: GTGAGT
cccacagccacccccccaca

SEQ ID NO: 6329 - DNA, 20 bp, Artificial Sequence
  Description of Artificial Sequence: Synthetic oligonucleotide
  Target: COL7A1; (+) strand; PAM type: NNGRRT; PAM sequence: CAGGGT
ccccacagtgagtcatctgc

SEQ ID NO: 6330 - DNA, 20 bp, Artificial Sequence
  Description of Artificial Sequence: Synthetic oligonucleotide
  Target: COL7A1; (+) strand; PAM type: NNGRRT; PAM sequence: GGGGGT
agggtggcaggagccacaat

SEQ ID NO: 6331 - DNA, 20 bp, Artificial Sequence
  Description of Artificial Sequence: Synthetic oligonucleotide
  Target: COL7A1; (+) strand; PAM type: NNGRRT; PAM sequence: TGGGGT
agcaccaaggggagggacag

SEQ ID NO: 6332 - DNA, 20 bp, Artificial Sequence
  Description of Artificial Sequence: Synthetic oligonucleotide
  Target: COL7A1; (+) strand; PAM type: NNGRRT; PAM sequence: GGGGAT
ctgagaccccgactcctcca

SEQ ID NO: 6333 - DNA, 20 bp, Artificial Sequence
  Description of Artificial Sequence: Synthetic oligonucleotide
  Target: COL7A1; (+) strand; PAM type: NNGRRT; PAM sequence: CTGAAT
cccgactcctccaggggatg

SEQ ID NO: 6334 - DNA, 20 bp, Artificial Sequence
  Description of Artificial Sequence: Synthetic oligonucleotide
  Target: COL7A1; (+) strand; PAM type: NNGRRT; PAM sequence: AGGGGT
agtgggggctctgacctcag

SEQ ID NO: 6335 - DNA, 20 bp, Artificial Sequence
  Description of Artificial Sequence: Synthetic oligonucleotide
  Target: COL7A1; (+) strand; PAM type: NNGRRT; PAM sequence: CGGGGT
tcccctggctctggaccacc

SEQ ID NO: 6336 - DNA, 20 bp, Artificial Sequence
  Description of Artificial Sequence: Synthetic oligonucleotide
  Target: COL7A1; (+) strand; PAM type: NNGRRT; PAM sequence: ACGGGT
cagcggcgctcgcaggcctc

SEQ ID NO: 6337 - DNA, 20 bp, Artificial Sequence
  Description of Artificial Sequence: Synthetic oligonucleotide
  Target: COL7A1; (+) strand; PAM type: NNGRRT; PAM sequence: AAGGGT
tccacagccaccatagacaa

SEQ ID NO: 6338 - DNA, 20 bp, Artificial Sequence
  Description of Artificial Sequence: Synthetic oligonucleotide
  Target: COL7A1; (+) strand; PAM type: NNGRRT; PAM sequence: CAGGGT
acagcccgatggtaccagcg

SEQ ID NO: 6339 - DNA, 20 bp, Artificial Sequence
  Description of Artificial Sequence: Synthetic oligonucleotide
  Target: COL7A1; (+) strand; PAM type: NNGRRT; PAM sequence: AGGGGT
ctcatccagtggcagggaac

SEQ ID NO: 6340 - DNA, 20 bp, Artificial Sequence
  Description of Artificial Sequence: Synthetic oligonucleotide
  Target: COL7A1; (+) strand; PAM type: NNGRRT; PAM sequence: TGGGGT
ggaacaggggtctgggccaa

SEQ ID NO: 6341 - DNA, 20 bp, Artificial Sequence
  Description of Artificial Sequence: Synthetic oligonucleotide
  Target: COL7A1; (+) strand; PAM type: NNGRRT; PAM sequence: CAGGGT
ggccaatggggtcaagtcag

SEQ ID NO: 6342 - DNA, 20 bp, Artificial Sequence
  Description of Artificial Sequence: Synthetic oligonucleotide
  Target: COL7A1; (+) strand; PAM type: NNGRRT; PAM sequence: GGGAAT
gtcaagtcagcagggtttgt

SEQ ID NO: 6343 - DNA, 20 bp, Artificial Sequence
  Description of Artificial Sequence: Synthetic oligonucleotide
  Target: COL7A1; (+) strand; PAM type: NNGRRT; PAM sequence: GAGGGT
cagggtttgtgggaatcaga

SEQ ID NO: 6344 - DNA, 20 bp, Artificial Sequence
  Description of Artificial Sequence: Synthetic oligonucleotide
  Target: COL7A1; (+) strand; PAM type: NNGRRT; PAM sequence: CAGGGT
atcactatcccaaggagctt

SEQ ID NO: 6345 - DNA, 20 bp, Artificial Sequence
  Description of Artificial Sequence: Synthetic oligonucleotide
  Target: COL7A1; (+) strand; PAM type: NNGRRT; PAM sequence: CAGAAT
agggtcctggtactcctcca

SEQ ID NO: 6346 - DNA, 20 bp, Artificial Sequence
  Description of Artificial Sequence: Synthetic oligonucleotide
  Target: COL7A1; (+) strand; PAM type: NNGRRT; PAM sequence: CGGAGT
gtactcctccacagaatact

SEQ ID NO: 6347 - DNA, 20 bp, Artificial Sequence
  Description of Artificial Sequence: Synthetic oligonucleotide
  Target: COL7A1; (+) strand; PAM type: NNGRRT; PAM sequence: CAGAGT
cacagaatactcggagtatt

SEQ ID NO: 6348 - DNA, 20 bp, Artificial Sequence
  Description of Artificial Sequence: Synthetic oligonucleotide
  Target: COL7A1; (+) strand; PAM type: NNGRRT; PAM sequence: GGGGGT
cagagtactcatcatcctca

SEQ ID NO: 6349 - DNA, 20 bp, Artificial Sequence
  Description of Artificial Sequence: Synthetic oligonucleotide
  Target: COL7A1; (+) strand; PAM type: NNGRRT; PAM sequence: CAGGGT
tacccgctctgcaggtaggg

SEQ ID NO: 6350 - DNA, 20 bp, Artificial Sequence
  Description of Artificial Sequence: Synthetic oligonucleotide
  Target: COL7A1; (+) strand; PAM type: NNGRRT; PAM sequence: ACGGGT
gccccacccatagctgcccc

SEQ ID NO: 6351 - DNA, 20 bp, Artificial Sequence
  Description of Artificial Sequence: Synthetic oligonucleotide
  Target: COL7A1; (+) strand; PAM type: NNGRRT; PAM sequence: AGGGGT
tgtctgcagcataactaggg

SEQ ID NO: 6352 - DNA, 20 bp, Artificial Sequence
  Description of Artificial Sequence: Synthetic oligonucleotide
  Target: COL7A1; (+) strand; PAM type: NNGRRT; PAM sequence: TGGGGT
ttgataggcagggcagggcc

SEQ ID NO: 6353 - DNA, 20 bp, Artificial Sequence
  Description of Artificial Sequence: Synthetic oligonucleotide
  Target: COL7A1; (+) strand; PAM type: NNGRRT; PAM sequence: GGGAGT
cctggggtgaagaaagttct

SEQ ID NO: 6354 - DNA, 20 bp, Artificial Sequence
  Description of Artificial Sequence: Synthetic oligonucleotide
  Target: COL7A1; (+) strand; PAM type: NNGRRT; PAM sequence: AGGGAT
gcaggctagagggggcagag

SEQ ID NO: 6355 - DNA, 20 bp, Artificial Sequence
  Description of Artificial Sequence: Synthetic oligonucleotide
  Target: COL7A1; (+) strand; PAM type: NNGRRT; PAM sequence: AAGGAT
agagagacaatgacagagag

SEQ ID NO: 6356 - DNA, 20 bp, Artificial Sequence
  Description of Artificial Sequence: Synthetic oligonucleotide
  Target: COL7A1; (+) strand; PAM type: NNGRRT; PAM sequence: AGGGGT
agacagagacacacaggcag

SEQ ID NO: 6357 - DNA, 20 bp, Artificial Sequence
  Description of Artificial Sequence: Synthetic oligonucleotide
  Target: COL7A1; (+) strand; PAM type: NNGRRT; PAM sequence: GAGGGT
tacacaaagagatagcagga

SEQ ID NO: 6358 - DNA, 20 bp, Artificial Sequence
  Description of Artificial Sequence: Synthetic oligonucleotide
  Target: COL7A1; (+) strand; PAM type: NNGRRT; PAM sequence: GAGGGT
acaggagagagaggaagaga

SEQ ID NO: 6359 - DNA, 20 bp, Artificial Sequence
  Description of Artificial Sequence: Synthetic oligonucleotide
  Target: COL7A1; (+) strand; PAM type: NNGRRT; PAM sequence: CCGGGT
tcactctgatgcccctccca

SEQ ID NO: 6360 - DNA, 20 bp, Artificial Sequence
  Description of Artificial Sequence: Synthetic oligonucleotide
  Target: COL7A1; (+) strand; PAM type: NNGRRT; PAM sequence: TAGGGT
ggggcctgcctgcccttgcc

SEQ ID NO: 6361 - DNA, 20 bp, Artificial Sequence
  Description of Artificial Sequence: Synthetic oligonucleotide
  Target: COL7A1; (+) strand; PAM type: NNGRRT; PAM sequence: TGGGGT
cctgcccttgcctagggtgc

SEQ ID NO: 6362 - DNA, 20 bp, Artificial Sequence
  Description of Artificial Sequence: Synthetic oligonucleotide
  Target: COL7A1; (+) strand; PAM type: NNGRRT; PAM sequence: TGGAGT
ccttgcctagggtgctgggg

SEQ ID NO: 6363 - DNA, 20 bp, Artificial Sequence
  Description of Artificial Sequence: Synthetic oligonucleotide
  Target: COL7A1; (+) strand; PAM type: NNGRRT; PAM sequence: CCGGAT
atctcttggcgcacaaagcc

SEQ ID NO: 6364 - DNA, 20 bp, Artificial Sequence
  Description of Artificial Sequence: Synthetic oligonucleotide
  Target: COL7A1; (+) strand; PAM type: NNGRRT; PAM sequence: AGGGGT
actgcatggagccagggccc

SEQ ID NO: 6365 - DNA, 20 bp, Artificial Sequence
  Description of Artificial Sequence: Synthetic oligonucleotide
  Target: COL7A1; (+) strand; PAM type: NNGRRT; PAM sequence: CAGGGT
tggagccagggcccaggggt

SEQ ID NO: 6366 - DNA, 20 bp, Artificial Sequence
  Description of Artificial Sequence: Synthetic oligonucleotide
  Target: COL7A1; (+) strand; PAM type: NNGRRT; PAM sequence: CTGGGT
agggcccaggggtcagggtg

SEQ ID NO: 6367 - DNA, 20 bp, Artificial Sequence
  Description of Artificial Sequence: Synthetic oligonucleotide
  Target: COL7A1; (+) strand; PAM type: NNGRRT; PAM sequence: TGGAAT
ccgatctctgacccaagcct

SEQ ID NO: 6368 - DNA, 20 bp, Artificial Sequence
  Description of Artificial Sequence: Synthetic oligonucleotide
  Target: COL7A1; (+) strand; PAM type: NNGRRT; PAM sequence: CAGGGT
agacacagggaccaagtgag

SEQ ID NO: 6369 - DNA, 20 bp, Artificial Sequence
  Description of Artificial Sequence: Synthetic oligonucleotide
  Target: COL7A1; (+) strand; PAM type: NNGRRT; PAM sequence: GGGGAT
tgagcagggtcagaggcagt

SEQ ID NO: 6370 - DNA, 20 bp, Artificial Sequence
  Description of Artificial Sequence: Synthetic oligonucleotide
  Target: COL7A1; (+) strand; PAM type: NNGRRT; PAM sequence: CAGAGT
gggtcagaggcagtggggat

SEQ ID NO: 6371 - DNA, 20 bp, Artificial Sequence
  Description of Artificial Sequence: Synthetic oligonucleotide
  Target: COL7A1; (+) strand; PAM type: NNGRRT; PAM sequence: AAGGGT
gaagatggttatgaggttgg

SEQ ID NO: 6372 - DNA, 20 bp, Artificial Sequence
  Description of Artificial Sequence: Synthetic oligonucleotide
  Target: COL7A1; (+) strand; PAM type: NNGRRT; PAM sequence: AGGGAT
tggaagggtagggaaggttc

SEQ ID NO: 6373 - DNA, 20 bp, Artificial Sequence
  Description of Artificial Sequence: Synthetic oligonucleotide
  Target: COL7A1; (+) strand; PAM type: NNGRRT; PAM sequence: AGGAGT
gtagggaaggttcagggatc

SEQ ID NO: 6374 - DNA, 20 bp, Artificial Sequence
  Description of Artificial Sequence: Synthetic oligonucleotide
  Target: COL7A1; (+) strand; PAM type: NNGRRT; PAM sequence: TGGGGT
cctgggaagcccccaattcc

SEQ ID NO: 6375 - DNA, 20 bp, Artificial Sequence
  Description of Artificial Sequence: Synthetic oligonucleotide
  Target: COL7A1; (+) strand; PAM type: NNGRRT; PAM sequence: CAGAGT
ttccctggggagatatagga

SEQ ID NO: 6376 - DNA, 20 bp, Artificial Sequence
  Description of Artificial Sequence: Synthetic oligonucleotide
  Target: COL7A1; (+) strand; PAM type: NNGRRT; PAM sequence: TGGGGT
tccctgcaggcatcaggcag

SEQ ID NO: 6377 - DNA, 20 bp, Artificial Sequence
  Description of Artificial Sequence: Synthetic oligonucleotide
  Target: COL7A1; (+) strand; PAM type: NNGRRT; PAM sequence: TCGGAT
ccaacatctcctttttctcc

SEQ ID NO: 6378 - DNA, 20 bp, Artificial Sequence
  Description of Artificial Sequence: Synthetic oligonucleotide
  Target: COL7A1; (+) strand; PAM type: NNGRRT; PAM sequence: GGGGAT
caggcactccatcctttcct

SEQ ID NO: 6379 - DNA, 20 bp, Artificial Sequence
  Description of Artificial Sequence: Synthetic oligonucleotide
  Target: COL7A1; (+) strand; PAM type: NNGRRT; PAM sequence: GAGGGT
ctggggatccctagcaggga

SEQ ID NO: 6380 - DNA, 20 bp, Artificial Sequence
  Description of Artificial Sequence: Synthetic oligonucleotide
  Target: COL7A1; (+) strand; PAM type: NNGRRT; PAM sequence: GAGAAT
gaggtcagtgagggaccaaa

SEQ ID NO: 6381 - DNA, 20 bp, Artificial Sequence
  Description of Artificial Sequence: Synthetic oligonucleotide
  Target: COL7A1; (+) strand; PAM type: NNGRRT; PAM sequence: CTGGAT
agggaccaaagagaatcgcc

SEQ ID NO: 6382 - DNA, 20 bp, Artificial Sequence
  Description of Artificial Sequence: Synthetic oligonucleotide
  Target: COL7A1; (+) strand; PAM type: NNGRRT; PAM sequence: GTGGGT
aaagagaatcgccctggata

SEQ ID NO: 6383 - DNA, 20 bp, Artificial Sequence
  Description of Artificial Sequence: Synthetic oligonucleotide
  Target: COL7A1; (+) strand; PAM type: NNGRRT; PAM sequence: TGGGGT
atagtgggtagggaacacca

SEQ ID NO: 6384 - DNA, 20 bp, Artificial Sequence
  Description of Artificial Sequence: Synthetic oligonucleotide
  Target: COL7A1; (+) strand; PAM type: NNGRRT; PAM sequence: GGGAGT
ggtagggaacaccatggggt

SEQ ID NO: 6385 - DNA, 20 bp, Artificial Sequence
  Description of Artificial Sequence: Synthetic oligonucleotide
  Target: COL7A1; (+) strand; PAM type: NNGRRT; PAM sequence: AAGGGT
ctggggcttgccatggggac

SEQ ID NO: 6386 - DNA, 20 bp, Artificial Sequence
  Description of Artificial Sequence: Synthetic oligonucleotide
  Target: COL7A1; (+) strand; PAM type: NNGRRT; PAM sequence: CTGGGT
tactgtggaggtgggggacc

SEQ ID NO: 6387 - DNA, 20 bp, Artificial Sequence
  Description of Artificial Sequence: Synthetic oligonucleotide
  Target: COL7A1; (+) strand; PAM type: NNGRRT; PAM sequence: CTGGGT
atgaggacaccatgagagca

SEQ ID NO: 6388 - DNA, 20 bp, Artificial Sequence
  Description of Artificial Sequence: Synthetic oligonucleotide
  Target: COL7A1; (+) strand; PAM type: NNGRRT; PAM sequence: CCGGGT
gtgggagcaggggcatctta

SEQ ID NO: 6389 - DNA, 20 bp, Artificial Sequence
  Description of Artificial Sequence: Synthetic oligonucleotide
  Target: COL7A1; (+) strand; PAM type: NNGRRT; PAM sequence: AGGGAT
gggcatcttaccgggtcacc

SEQ ID NO: 6390 - DNA, 20 bp, Artificial Sequence
  Description of Artificial Sequence: Synthetic oligonucleotide
  Target: COL7A1; (+) strand; PAM type: NNGRRT; PAM sequence: CCGGGT
gcccaggccacacacagatc

SEQ ID NO: 6391 - DNA, 20 bp, Artificial Sequence
  Description of Artificial Sequence: Synthetic oligonucleotide
  Target: COL7A1; (+) strand; PAM type: NNGRRT; PAM sequence: CAGGAT
ccagcacttaagaggacccc

SEQ ID NO: 6392 - DNA, 20 bp, Artificial Sequence
  Description of Artificial Sequence: Synthetic oligonucleotide
  Target: COL7A1; (+) strand; PAM type: NNGRRT; PAM sequence: TGGGGT
ggcctggggcagaacttgcc

SEQ ID NO: 6393 - DNA, 20 bp, Artificial Sequence
  Description of Artificial Sequence: Synthetic oligonucleotide
  Target: COL7A1; (+) strand; PAM type: NNGRRT; PAM sequence: AGGAGT
cagaacttgcctggggtccc

SEQ ID NO: 6394 - DNA, 20 bp, Artificial Sequence
  Description of Artificial Sequence: Synthetic oligonucleotide
  Target: COL7A1; (+) strand; PAM type: NNGRRT; PAM sequence: GGGAGT
gctctcccttgctgccctgt

SEQ ID NO: 6395 - DNA, 20 bp, Artificial Sequence
  Description of Artificial Sequence: Synthetic oligonucleotide
  Target: COL7A1; (+) strand; PAM type: NNGRRT; PAM sequence: AGGGAT
cctgtgggagtgaccaggag

SEQ ID NO: 6396 - DNA, 20 bp, Artificial Sequence
  Description of Artificial Sequence: Synthetic oligonucleotide
  Target: COL7A1; (+) strand; PAM type: NNGRRT; PAM sequence: TAGAAT
accagatcaggctgggggct

SEQ ID NO: 6397 - DNA, 20 bp, Artificial Sequence
  Description of Artificial Sequence: Synthetic oligonucleotide
  Target: COL7A1; (+) strand; PAM type: NNGRRT; PAM sequence: GCGGGT
tcctcccagcctgtgccata

SEQ ID NO: 6398 - DNA, 20 bp, Artificial Sequence
  Description of Artificial Sequence: Synthetic oligonucleotide
  Target: COL7A1; (+) strand; PAM type: NNGRRT; PAM sequence: CTGGGT
cttgccccgccctcttatca

SEQ ID NO: 6399 - DNA, 20 bp, Artificial Sequence
  Description of Artificial Sequence: Synthetic oligonucleotide
  Target: COL7A1; (+) strand; PAM type: NNGRRT; PAM sequence: GAGAGT
cacagccacaggaccccaca

SEQ ID NO: 6400 - DNA, 20 bp, Artificial Sequence
  Description of Artificial Sequence: Synthetic oligonucleotide
  Target: COL7A1; (+) strand; PAM type: NNGRRT; PAM sequence: CAGGGT
tcttccctgtaccttgtcac

SEQ ID NO: 6401 - DNA, 20 bp, Artificial Sequence
  Description of Artificial Sequence: Synthetic oligonucleotide
  Target: COL7A1; (+) strand; PAM type: NNGRRT; PAM sequence: CTGGGT
ccccgaggccctcgttcacc

SEQ ID NO: 6402 - DNA, 20 bp, Artificial Sequence
  Description of Artificial Sequence: Synthetic oligonucleotide
  Target: COL7A1; (+) strand; PAM type: NNGRRT; PAM sequence: TTGGGT
ctcgttcaccctgggttggt

SEQ ID NO: 6403 - DNA, 20 bp, Artificial Sequence
  Description of Artificial Sequence: Synthetic oligonucleotide
  Target: COL7A1; (+) strand; PAM type: NNGRRT; PAM sequence: GGGAGT
ctgaaggtccctcaccctct

SEQ ID NO: 6404 - DNA, 20 bp, Artificial Sequence
  Description of Artificial Sequence: Synthetic oligonucleotide
  Target: COL7A1; (+) strand; PAM type: NNGRRT; PAM sequence: CGGGGT
gatgccctgggccagcccca

SEQ ID NO: 6405 - DNA, 20 bp, Artificial Sequence
  Description of Artificial Sequence: Synthetic oligonucleotide
  Target: COL7A1; (+) strand; PAM type: NNGRRT; PAM sequence: CAGGAT
ccccgtgggcctggaggccc

SEQ ID NO: 6406 - DNA, 20 bp, Artificial Sequence
  Description of Artificial Sequence: Synthetic oligonucleotide
  Target: COL7A1; (+) strand; PAM type: NNGRRT; PAM sequence: CTGAGT
tggaggccccaggatcacag

SEQ ID NO: 6407 - DNA, 20 bp, Artificial Sequence
  Description of Artificial Sequence: Synthetic oligonucleotide
  Target: COL7A1; (+) strand; PAM type: NNGRRT; PAM sequence: AGGAAT
gtctccctgagggggcaggc

SEQ ID NO: 6408 - DNA, 20 bp, Artificial Sequence
  Description of Artificial Sequence: Synthetic oligonucleotide
  Target: COL7A1; (+) strand; PAM type: NNGRRT; PAM sequence: AGGAGT
agggggcaggcaggaatcag

SEQ ID NO: 6409 - DNA, 20 bp, Artificial Sequence
  Description of Artificial Sequence: Synthetic oligonucleotide
  Target: COL7A1; (+) strand; PAM type: NNGRRT; PAM sequence: AAGAGT
aacatcaccctattgggcaa

SEQ ID NO: 6410 - DNA, 20 bp, Artificial Sequence
  Description of Artificial Sequence: Synthetic oligonucleotide
  Target: COL7A1; (+) strand; PAM type: NNGRRT; PAM sequence: GTGAGT
accctattgggcaaaagagt

SEQ ID NO: 6411 - DNA, 20 bp, Artificial Sequence
  Description of Artificial Sequence: Synthetic oligonucleotide
  Target: COL7A1; (+) strand; PAM type: NNGRRT; PAM sequence: CTGAAT
aaactggggaggccccgcac

SEQ ID NO: 6412 - DNA, 20 bp, Artificial Sequence
  Description of Artificial Sequence: Synthetic oligonucleotide
  Target: COL7A1; (+) strand; PAM type: NNGRRT; PAM sequence: GAGGAT
cagggcagtggaggacggag

SEQ ID NO: 6413 - DNA, 20 bp, Artificial Sequence
  Description of Artificial Sequence: Synthetic oligonucleotide
  Target: COL7A1; (+) strand; PAM type: NNGRRT; PAM sequence: AGGGGT
ggggaccagacaaaggggac

SEQ ID NO: 6414 - DNA, 20 bp, Artificial Sequence
  Description of Artificial Sequence: Synthetic oligonucleotide
  Target: COL7A1; (+) strand; PAM type: NNGRRT; PAM sequence: GAGGAT
aggagggccagagggctagg

SEQ ID NO: 6415 - DNA, 20 bp, Artificial Sequence
  Description of Artificial Sequence: Synthetic oligonucleotide
  Target: COL7A1; (+) strand; PAM type: NNGRRT; PAM sequence: GAGAGT
gagggctagggaggatggca

SEQ ID NO: 6416 - DNA, 20 bp, Artificial Sequence
  Description of Artificial Sequence: Synthetic oligonucleotide
  Target: COL7A1; (+) strand; PAM type: NNGRRT; PAM sequence: TGGGGT
gggaggatggcagagagtcc

SEQ ID NO: 6417 - DNA, 20 bp, Artificial Sequence
  Description of Artificial Sequence: Synthetic oligonucleotide
  Target: COL7A1; (+) strand; PAM type: NNGRRT; PAM sequence: GTGAGT
tttccccagcgggacccacc

SEQ ID NO: 6418 - DNA, 20 bp, Artificial Sequence
  Description of Artificial Sequence: Synthetic oligonucleotide
  Target: COL7A1; (+) strand; PAM type: NNGRRT; PAM sequence: CGGGGT
cgggacccaccgtgagtcct

SEQ ID NO: 6419 - DNA, 20 bp, Artificial Sequence
  Description of Artificial Sequence: Synthetic oligonucleotide
  Target: COL7A1; (+) strand; PAM type: NNGRRT; PAM sequence: CTGGAT
ccggggcggccatcttcacc

SEQ ID NO: 6420 - DNA, 20 bp, Artificial Sequence
  Description of Artificial Sequence: Synthetic oligonucleotide
  Target: COL7A1; (+) strand; PAM type: NNGRRT; PAM sequence: TGGGAT
tggaaatcagaggcaagagc

SEQ ID NO: 6421 - DNA, 20 bp, Artificial Sequence
  Description of Artificial Sequence: Synthetic oligonucleotide
  Target: COL7A1; (+) strand; PAM type: NNGRRT; PAM sequence: GGGAGT
gaggcaagagctgggatgaa

SEQ ID NO: 6422 - DNA, 20 bp, Artificial Sequence
  Description of Artificial Sequence: Synthetic oligonucleotide
  Target: COL7A1; (+) strand; PAM type: NNGRRT; PAM sequence: TGGAGT
ggatgaagggagttcggctg

SEQ ID NO: 6423 - DNA, 20 bp, Artificial Sequence
  Description of Artificial Sequence: Synthetic oligonucleotide
  Target: COL7A1; (+) strand; PAM type: NNGRRT; PAM sequence: CCGGAT
gtggagtaagacatacgtac

SEQ ID NO: 6424 - DNA, 20 bp, Artificial Sequence
  Description of Artificial Sequence: Synthetic oligonucleotide
  Target: COL7A1; (+) strand; PAM type: NNGRRT; PAM sequence: CAGGGT
gggcccaggcagccctactc

SEQ ID NO: 6425 - DNA, 20 bp, Artificial Sequence
  Description of Artificial Sequence: Synthetic oligonucleotide
  Target: COL7A1; (+) strand; PAM type: NNGRRT; PAM sequence: GGGGAT
ctggagaccaacaggacacc

SEQ ID NO: 6426 - DNA, 20 bp, Artificial Sequence
  Description of Artificial Sequence: Synthetic oligonucleotide
  Target: COL7A1; (+) strand; PAM type: NNGRRT; PAM sequence: GGGAAT
ggacaccggggatcagtgag

SEQ ID NO: 6427 - DNA, 20 bp, Artificial Sequence
  Description of Artificial Sequence: Synthetic oligonucleotide
  Target: COL7A1; (+) strand; PAM type: NNGRRT; PAM sequence: CAGGGT
aggggaatcagtgggggacg

SEQ ID NO: 6428 - DNA, 20 bp, Artificial Sequence
  Description of Artificial Sequence: Synthetic oligonucleotide
  Target: COL7A1; (+) strand; PAM type: NNGRRT; PAM sequence: GGGGGT
ggaggtcagtggaggctgaa

SEQ ID NO: 6429 - DNA, 20 bp, Artificial Sequence
  Description of Artificial Sequence: Synthetic oligonucleotide
  Target: COL7A1; (+) strand; PAM type: NNGRRT; PAM sequence: GAGAGT
ggggtgaccagggcacaaga

SEQ ID NO: 6430 - DNA, 20 bp, Artificial Sequence
  Description of Artificial Sequence: Synthetic oligonucleotide
  Target: COL7A1; (+) strand; PAM type: NNGRRT; PAM sequence: TTGAGT
tcccacctaccttgtctcct

SEQ ID NO: 6431 - DNA, 20 bp, Artificial Sequence
  Description of Artificial Sequence: Synthetic oligonucleotide
  Target: COL7A1; (+) strand; PAM type: NNGRRT; PAM sequence: CAGAGT
cccaggtggtccctgtaggt

SEQ ID NO: 6432 - DNA, 20 bp, Artificial Sequence
  Description of Artificial Sequence: Synthetic oligonucleotide
  Target: COL7A1; (+) strand; PAM type: NNGRRT; PAM sequence: GAGGGT
cctgtaggtcagagtgaggt

SEQ ID NO: 6433 - DNA, 20 bp, Artificial Sequence
  Description of Artificial Sequence: Synthetic oligonucleotide
  Target: COL7A1; (+) strand; PAM type: NNGRRT; PAM sequence: AGGGGT
ccggtggtccaggtggcccc

SEQ ID NO: 6434 - DNA, 20 bp, Artificial Sequence
  Description of Artificial Sequence: Synthetic oligonucleotide
  Target: COL7A1; (+) strand; PAM type: NNGRRT; PAM sequence: TGGGAT
ccaggtggccccaggggtcc

SEQ ID NO: 6435 - DNA, 20 bp, Artificial Sequence
  Description of Artificial Sequence: Synthetic oligonucleotide
  Target: COL7A1; (+) strand; PAM type: NNGRRT; PAM sequence: GAGAGT
aaaatggggcaagagaggca

SEQ ID NO: 6436 - DNA, 20 bp, Artificial Sequence
  Description of Artificial Sequence: Synthetic oligonucleotide
  Target: COL7A1; (+) strand; PAM type: NNGRRT; PAM sequence: ATGGAT
gggccccctcctcacccacc

SEQ ID NO: 6437 - DNA, 20 bp, Artificial Sequence
  Description of Artificial Sequence: Synthetic oligonucleotide
  Target: COL7A1; (+) strand; PAM type: NNGRRT; PAM sequence: GGGAAT
aaataaaaacagcaaaggga

SEQ ID NO: 6438 - DNA, 20 bp, Artificial Sequence
  Description of Artificial Sequence: Synthetic oligonucleotide
  Target: COL7A1; (+) strand; PAM type: NNGRRT; PAM sequence: CTGGGT
ggagcccgggaccccgactc

SEQ ID NO: 6439 - DNA, 20 bp, Artificial Sequence
  Description of Artificial Sequence: Synthetic oligonucleotide
  Target: COL7A1; (+) strand; PAM type: NNGRRT; PAM sequence: TCGGAT
ccctttgaggaaaagaggca

SEQ ID NO: 6440 - DNA, 20 bp, Artificial Sequence
  Description of Artificial Sequence: Synthetic oligonucleotide
  Target: COL7A1; (+) strand; PAM type: NNGRRT; PAM sequence: GGGAGT
gaggcatcggatcaagctca

SEQ ID NO: 6441 - DNA, 20 bp, Artificial Sequence
  Description of Artificial Sequence: Synthetic oligonucleotide
  Target: COL7A1; (+) strand; PAM type: NNGRRT; PAM sequence: CTGGGT
ggaccccagcagggaccctt

SEQ ID NO: 6442 - DNA, 20 bp, Artificial Sequence
  Description of Artificial Sequence: Synthetic oligonucleotide
  Target: COL7A1; (+) strand; PAM type: NNGRRT; PAM sequence: TTGGGT
gtacacataccttgaaacct

SEQ ID NO: 6443 - DNA, 20 bp, Artificial Sequence
  Description of Artificial Sequence: Synthetic oligonucleotide
  Target: COL7A1; (+) strand; PAM type: NNGRRT; PAM sequence: GAGGGT
acccagcaaacagcatttga

SEQ ID NO: 6444 - DNA, 20 bp, Artificial Sequence
  Description of Artificial Sequence: Synthetic oligonucleotide
  Target: COL7A1; (+) strand; PAM type: NNGRRT; PAM sequence: CAGAGT
agagggtaggaacatgagca

SEQ ID NO: 6445 - DNA, 20 bp, Artificial Sequence
  Description of Artificial Sequence: Synthetic oligonucleotide
  Target: COL7A1; (+) strand; PAM type: NNGRRT; PAM sequence: GGGAGT
cgggctgaaaatattcccag

SEQ ID NO: 6446 - DNA, 20 bp, Artificial Sequence
  Description of Artificial Sequence: Synthetic oligonucleotide
  Target: COL7A1; (+) strand; PAM type: NNGRRT; PAM sequence: AAGAAT
gggaactcagacatgcgacc

SEQ ID NO: 6447 - DNA, 20 bp, Artificial Sequence
  Description of Artificial Sequence: Synthetic oligonucleotide
  Target: COL7A1; (+) strand; PAM type: NNGRRT; PAM sequence: GGGAGT
agatactaccatagacaggt

SEQ ID NO: 6448 - DNA, 20 bp, Artificial Sequence
  Description of Artificial Sequence: Synthetic oligonucleotide
  Target: COL7A1; (+) strand; PAM type: NNGRRT; PAM sequence: GCGAGT
caggcacagggagcccacac

SEQ ID NO: 6449 - DNA, 20 bp, Artificial Sequence
  Description of Artificial Sequence: Synthetic oligonucleotide
  Target: COL7A1; (+) strand; PAM type: NNGRRT; PAM sequence: GTGAGT
agacatctggctccacagac

SEQ ID NO: 6450 - DNA, 20 bp, Artificial Sequence
  Description of Artificial Sequence: Synthetic oligonucleotide
  Target: COL7A1; (+) strand; PAM type: NNGRRT; PAM sequence: CCGGGT
gaaccccaacacgtccactc

SEQ ID NO: 6451 - DNA, 20 bp, Artificial Sequence
  Description of Artificial Sequence: Synthetic oligonucleotide
  Target: COL7A1; (+) strand; PAM type: NNGRRT; PAM sequence: GAGGAT
cagccaggggcaggggaaag

SEQ ID NO: 6452 - DNA, 20 bp, Artificial Sequence
  Description of Artificial Sequence: Synthetic oligonucleotide
  Target: COL7A1; (+) strand; PAM type: NNGRRT; PAM sequence: TGGGAT
acaagaactcaggtgtgtcc

SEQ ID NO: 6453 - DNA, 20 bp, Artificial Sequence
  Description of Artificial Sequence: Synthetic oligonucleotide
  Target: COL7A1; (+) strand; PAM type: NNGRRT; PAM sequence: AAGGAT
gatgtggtgagaaacagacc

SEQ ID NO: 6454 - DNA, 20 bp, Artificial Sequence
  Description of Artificial Sequence: Synthetic oligonucleotide
  Target: COL7A1; (+) strand; PAM type: NNGRRT; PAM sequence: CAGAGT
aagacagggcccccagagct

SEQ ID NO: 6455 - DNA, 20 bp, Artificial Sequence
  Description of Artificial Sequence: Synthetic oligonucleotide
  Target: COL7A1; (+) strand; PAM type: NNGRRT; PAM sequence: CTGGAT
gtgatccagagagcaggctc

SEQ ID NO: 6456 - DNA, 20 bp, Artificial Sequence
  Description of Artificial Sequence: Synthetic oligonucleotide
  Target: COL7A1; (+) strand; PAM type: NNGRRT; PAM sequence: AAGAGT
tcagacatgtgccccggccc

SEQ ID NO: 6457 - DNA, 20 bp, Artificial Sequence
  Description of Artificial Sequence: Synthetic oligonucleotide
  Target: COL7A1; (+) strand; PAM type: NNGRRT; PAM sequence: CAGGGT
ccccggactcacatcttccc

SEQ ID NO: 6458 - DNA, 20 bp, Artificial Sequence
  Description of Artificial Sequence: Synthetic oligonucleotide
  Target: COL7A1; (+) strand; PAM type: NNGRRT; PAM sequence: CAGAAT
acggccagcttcaccctgca

SEQ ID NO: 6459 - DNA, 20 bp, Artificial Sequence
  Description of Artificial Sequence: Synthetic oligonucleotide
  Target: COL7A1; (+) strand; PAM type: NNGRRT; PAM sequence: AGGGGT
cctgcacagaatggcaggtg

SEQ ID NO: 6460 - DNA, 20 bp, Artificial Sequence
  Description of Artificial Sequence: Synthetic oligonucleotide
  Target: COL7A1; (+) strand; PAM type: NNGRRT; PAM sequence: GAGGGT
tgcggtctactatgaaagct

SEQ ID NO: 6461 - DNA, 20 bp, Artificial Sequence
  Description of Artificial Sequence: Synthetic oligonucleotide
  Target: COL7A1; (+) strand; PAM type: NNGRRT; PAM sequence: GAGGGT
ctatgaaagctgagggtcat

SEQ ID NO: 6462 - DNA, 20 bp, Artificial Sequence
  Description of Artificial Sequence: Synthetic oligonucleotide
  Target: COL7A1; (+) strand; PAM type: NNGRRT; PAM sequence: GTGGGT
gaaagctgagggtcatgagg

SEQ ID NO: 6463 - DNA, 20 bp, Artificial Sequence
  Description of Artificial Sequence: Synthetic oligonucleotide
  Target: COL7A1; (+) strand; PAM type: NNGRRT; PAM sequence: ATGGGT
gtcatgagggtgggtaaact

SEQ ID NO: 6464 - DNA, 20 bp, Artificial Sequence
  Description of Artificial Sequence: Synthetic oligonucleotide
  Target: COL7A1; (+) strand; PAM type: NNGRRT; PAM sequence: TGGGAT
tggtaagggggagaggtcag

SEQ ID NO: 6465 - DNA, 20 bp, Artificial Sequence
  Description of Artificial Sequence: Synthetic oligonucleotide
  Target: COL7A1; (+) strand; PAM type: NNGRRT; PAM sequence: GGGAAT
gagcccgaccacagcctgtg

SEQ ID NO: 6466 - DNA, 20 bp, Artificial Sequence
  Description of Artificial Sequence: Synthetic oligonucleotide
  Target: COL7A1; (+) strand; PAM type: NNGRRT; PAM sequence: GTGAGT
acagcctgtggggaatgcta

SEQ ID NO: 6467 - DNA, 20 bp, Artificial Sequence
  Description of Artificial Sequence: Synthetic oligonucleotide
  Target: COL7A1; (+) strand; PAM type: NNGRRT; PAM sequence: GTGGGT
tggcatttggaaacaggctt

SEQ ID NO: 6468 - DNA, 20 bp, Artificial Sequence
  Description of Artificial Sequence: Synthetic oligonucleotide
  Target: COL7A1; (+) strand; PAM type: NNGRRT; PAM sequence: AGGAGT
caggcttgtgggtgaggcag

SEQ ID NO: 6469 - DNA, 20 bp, Artificial Sequence
  Description of Artificial Sequence: Synthetic oligonucleotide
  Target: COL7A1; (+) strand; PAM type: NNGRRT; PAM sequence: GGGGGT
gaggcagaggagttgctgca

SEQ ID NO: 6470 - DNA, 20 bp, Artificial Sequence
  Description of Artificial Sequence: Synthetic oligonucleotide
  Target: COL7A1; (+) strand; PAM type: NNGRRT; PAM sequence: CAGGGT
ttgctgcagggggtggaagt

SEQ ID NO: 6471 - DNA, 20 bp, Artificial Sequence
  Description of Artificial Sequence: Synthetic oligonucleotide
  Target: COL7A1; (+) strand; PAM type: NNGRRT; PAM sequence: TCGGAT
ggaccctgacggagaacaag

SEQ ID NO: 6472 - DNA, 20 bp, Artificial Sequence
  Description of Artificial Sequence: Synthetic oligonucleotide
  Target: COL7A1; (+) strand; PAM type: NNGRRT; PAM sequence: CAGGGT
acggagaacaagtcggatgt

SEQ ID NO: 6473 - DNA, 20 bp, Artificial Sequence
  Description of Artificial Sequence: Synthetic oligonucleotide
  Target: COL7A1; (+) strand; PAM type: NNGRRT; PAM sequence: AGGAGT
atgagagaacatgggcccca

SEQ ID NO: 6474 - DNA, 20 bp, Artificial Sequence
  Description of Artificial Sequence: Synthetic oligonucleotide
  Target: COL7A1; (+) strand; PAM type: NNGRRT; PAM sequence: GGGGGT
ccacaaggcctgaagggccg

SEQ ID NO: 6475 - DNA, 20 bp, Artificial Sequence
  Description of Artificial Sequence: Synthetic oligonucleotide
  Target: COL7A1; (+) strand; PAM type: NNGRRT; PAM sequence: TGGGGT
ccttcaggccagaaggtcct

SEQ ID NO: 6476 - DNA, 20 bp, Artificial Sequence
  Description of Artificial Sequence: Synthetic oligonucleotide
  Target: COL7A1; (+) strand; PAM type: NNGRRT; PAM sequence: AAGGGT
gccagcaagaccctagagaa

SEQ ID NO: 6477 - DNA, 20 bp, Artificial Sequence
  Description of Artificial Sequence: Synthetic oligonucleotide
  Target: COL7A1; (+) strand; PAM type: NNGRRT; PAM sequence: AGGGAT
aagggcagggaacagggctc

SEQ ID NO: 6478 - DNA, 20 bp, Artificial Sequence
  Description of Artificial Sequence: Synthetic oligonucleotide
  Target: COL7A1; (+) strand; PAM type: NNGRRT; PAM sequence: CAGGGT
caccggggcaccaggtggtc

SEQ ID NO: 6479 - DNA, 20 bp, Artificial Sequence
  Description of Artificial Sequence: Synthetic oligonucleotide
  Target: COL7A1; (+) strand; PAM type: NNGRRT; PAM sequence: AAGAGT
accaccctgttgtggcgaaa

SEQ ID NO: 6480 - DNA, 20 bp, Artificial Sequence
  Description of Artificial Sequence: Synthetic oligonucleotide
  Target: COL7A1; (+) strand; PAM type: NNGRRT; PAM sequence: GGGAGT
cgaaaaagagtctgatgagg

SEQ ID NO: 6481 - DNA, 20 bp, Artificial Sequence
  Description of Artificial Sequence: Synthetic oligonucleotide
  Target: COL7A1; (+) strand; PAM type: NNGRRT; PAM sequence: CAGGAT
ctggtcactggggcagggca

SEQ ID NO: 6482 - DNA, 20 bp, Artificial Sequence
  Description of Artificial Sequence: Synthetic oligonucleotide
  Target: COL7A1; (+) strand; PAM type: NNGRRT; PAM sequence: TTGGGT
ggcaagacaggtgaaggttc

SEQ ID NO: 6483 - DNA, 20 bp, Artificial Sequence
  Description of Artificial Sequence: Synthetic oligonucleotide
  Target: COL7A1; (+) strand; PAM type: NNGRRT; PAM sequence: GGGGGT
cctctgggggctttttcctt

SEQ ID NO: 6484 - DNA, 20 bp, Artificial Sequence
  Description of Artificial Sequence: Synthetic oligonucleotide
  Target: COL7A1; (+) strand; PAM type: NNGRRT; PAM sequence: GAGGGT
agcagcagcagcacctagcg

SEQ ID NO: 6485 - DNA, 20 bp, Artificial Sequence
  Description of Artificial Sequence: Synthetic oligonucleotide
  Target: COL7A1; (+) strand; PAM type: NNGRRT; PAM sequence: GAGAAT
ctctcctggtagaccctgca

SEQ ID NO: 6486 - DNA, 20 bp, Artificial Sequence
  Description of Artificial Sequence: Synthetic oligonucleotide
  Target: COL7A1; (+) strand; PAM type: NNGRRT; PAM sequence: CAGAGT
ccacccaccatccccctaga

SEQ ID NO: 6487 - DNA, 20 bp, Artificial Sequence
  Description of Artificial Sequence: Synthetic oligonucleotide
  Target: COL7A1; (+) strand; PAM type: NNGRRT; PAM sequence: CCGGGT
ggctgttgggcaaggactta

SEQ ID NO: 6488 - DNA, 20 bp, Artificial Sequence
  Description of Artificial Sequence: Synthetic oligonucleotide
  Target: COL7A1; (+) strand; PAM type: NNGRRT; PAM sequence: CAGAGT
tgcctggcacaccctgaagg

SEQ ID NO: 6489 - DNA, 20 bp, Artificial Sequence
  Description of Artificial Sequence: Synthetic oligonucleotide
  Target: COL7A1; (+) strand; PAM type: NNGRRT; PAM sequence: AAGGGT
aaaggagggggactctatgg

SEQ ID NO: 6490 - DNA, 20 bp, Artificial Sequence
  Description of Artificial Sequence: Synthetic oligonucleotide
  Target: COL7A1; (+) strand; PAM type: NNGRRT; PAM sequence: GGGGAT
tgctgcccggctccccctgt

SEQ ID NO: 6491 - DNA, 20 bp, Artificial Sequence
  Description of Artificial Sequence: Synthetic oligonucleotide
  Target: COL7A1; (+) strand; PAM type: NNGRRT; PAM sequence: GAGGGT
cagtccctagtgccatggca

SEQ ID NO: 6492 - DNA, 20 bp, Artificial Sequence
  Description of Artificial Sequence: Synthetic oligonucleotide
  Target: COL7A1; (+) strand; PAM type: NNGRRT; PAM sequence: TTGAGT
acacactgaccttagcaccc

SEQ ID NO: 6493 - DNA, 20 bp, Artificial Sequence
  Description of Artificial Sequence: Synthetic oligonucleotide
  Target: COL7A1; (+) strand; PAM type: NNGRRT; PAM sequence: GGGGGT
ccttagcacccttgagtcca

SEQ ID NO: 6494 - DNA, 20 bp, Artificial Sequence
  Description of Artificial Sequence: Synthetic oligonucleotide
  Target: COL7A1; (+) strand; PAM type: NNGRRT; PAM sequence: GAGAGT
cagggggtccctgttctcca

SEQ ID NO: 6495 - DNA, 20 bp, Artificial Sequence
  Description of Artificial Sequence: Synthetic oligonucleotide
  Target: COL7A1; (+) strand; PAM type: NNGRRT; PAM sequence: GGGAGT
tctctgtcatagaggcatgg

SEQ ID NO: 6496 - DNA, 20 bp, Artificial Sequence
  Description of Artificial Sequence: Synthetic oligonucleotide
  Target: COL7A1; (+) strand; PAM type: NNGRRT; PAM sequence: CAGGAT
gggggagtcatcacagatct

SEQ ID NO: 6497 - DNA, 20 bp, Artificial Sequence
  Description of Artificial Sequence: Synthetic oligonucleotide
  Target: COL7A1; (+) strand; PAM type: NNGRRT; PAM sequence: GAGGGT
tcacagatctcaggatcaca

SEQ ID NO: 6498 - DNA, 20 bp, Artificial Sequence
  Description of Artificial Sequence: Synthetic oligonucleotide
  Target: COL7A1; (+) strand; PAM type: NNGRRT; PAM sequence: TAGGGT
ctcaggatcacagagggtta

SEQ ID NO: 6499 - DNA, 20 bp, Artificial Sequence
  Description of Artificial Sequence: Synthetic oligonucleotide
  Target: COL7A1; (+) strand; PAM type: NNGRRT; PAM sequence: CAGGGT
ggttatagggtcagaaattc

SEQ ID NO: 6500 - DNA, 20 bp, Artificial Sequence
  Description of Artificial Sequence: Synthetic oligonucleotide
  Target: COL7A1; (+) strand; PAM type: NNGRRT; PAM sequence: AAGGGT
atatttctggggaccaagct

SEQ ID NO: 6501 - DNA, 20 bp, Artificial Sequence
  Description of Artificial Sequence: Synthetic oligonucleotide
  Target: COL7A1; (+) strand; PAM type: NNGRRT; PAM sequence: AGGGAT
actagtcacaggactaaggc

SEQ ID NO: 6502 - DNA, 20 bp, Artificial Sequence
  Description of Artificial Sequence: Synthetic oligonucleotide
  Target: COL7A1; (+) strand; PAM type: NNGRRT; PAM sequence: TGGGGT
tcacaggactaaggcaggga

SEQ ID NO: 6503 - DNA, 20 bp, Artificial Sequence
  Description of Artificial Sequence: Synthetic oligonucleotide
  Target: COL7A1; (+) strand; PAM type: NNGRRT; PAM sequence: GGGGGT
gggtgatcaccttggggcca

SEQ ID NO: 6504 - DNA, 20 bp, Artificial Sequence
  Description of Artificial Sequence: Synthetic oligonucleotide
  Target: COL7A1; (+) strand; PAM type: NNGRRT; PAM sequence: AGGGGT
ccagggggtccggggggccc

SEQ ID NO: 6505 - DNA, 20 bp, Artificial Sequence
  Description of Artificial Sequence: Synthetic oligonucleotide
  Target: COL7A1; (+) strand; PAM type: NNGRRT; PAM sequence: GGGAGT
cggggggcccaggggttcca

SEQ ID NO: 6506 - DNA, 20 bp, Artificial Sequence
  Description of Artificial Sequence: Synthetic oligonucleotide
  Target: COL7A1; (+) strand; PAM type: NNGRRT; PAM sequence: TGGGGT
ccctgcaggaaacaagaaaa

SEQ ID NO: 6507 - DNA, 20 bp, Artificial Sequence
  Description of Artificial Sequence: Synthetic oligonucleotide
  Target: COL7A1; (+) strand; PAM type: NNGRRT; PAM sequence: GCGGGT
ttctccctgaaatgcaaata

SEQ ID NO: 6508 - DNA, 20 bp, Artificial Sequence
  Description of Artificial Sequence: Synthetic oligonucleotide
  Target: COL7A1; (+) strand; PAM type: NNGRRT; PAM sequence: GGGGGT
gggtgagggccaagcccatg

SEQ ID NO: 6509 - DNA, 20 bp, Artificial Sequence
  Description of Artificial Sequence: Synthetic oligonucleotide
  Target: COL7A1; (+) strand; PAM type: NNGRRT; PAM sequence: GGGAAT
ccagccctgcctgggagccc

SEQ ID NO: 6510 - DNA, 20 bp, Artificial Sequence
  Description of Artificial Sequence: Synthetic oligonucleotide
  Target: COL7A1; (+) strand; PAM type: NNGRRT; PAM sequence: CAGGGT
accaggtggcccctgagggc

SEQ ID NO: 6511 - DNA, 20 bp, Artificial Sequence
  Description of Artificial Sequence: Synthetic oligonucleotide
  Target: COL7A1; (+) strand; PAM type: NNGRRT; PAM sequence: AGGAGT
gaaagccgatggggccctgc

SEQ ID NO: 6512 - DNA, 20 bp, Artificial Sequence
  Description of Artificial Sequence: Synthetic oligonucleotide
  Target: COL7A1; (+) strand; PAM type: NNGRRT; PAM sequence: GAGAAT
ggccctgcaggagtggaaga

SEQ ID NO: 6513 - DNA, 20 bp, Artificial Sequence
  Description of Artificial Sequence: Synthetic oligonucleotide
  Target: COL7A1; (+) strand; PAM type: NNGRRT; PAM sequence: CTGAGT
gcctggggggccctgttcgc

SEQ ID NO: 6514 - DNA, 20 bp, Artificial Sequence
  Description of Artificial Sequence: Synthetic oligonucleotide
  Target: COL7A1; (+) strand; PAM type: NNGRRT; PAM sequence: CGGGGT
acagcaagaggtcagaggag

SEQ ID NO: 6515 - DNA, 20 bp, Artificial Sequence
  Description of Artificial Sequence: Synthetic oligonucleotide
  Target: COL7A1; (+) strand; PAM type: NNGRRT; PAM sequence: CTGGGT
ccacattctggggacaaagt

SEQ ID NO: 6516 - DNA, 20 bp, Artificial Sequence
  Description of Artificial Sequence: Synthetic oligonucleotide
  Target: COL7A1; (+) strand; PAM type: NNGRRT; PAM sequence: TTGAGT
tccccactgcccaagttccc

SEQ ID NO: 6517 - DNA, 20 bp, Artificial Sequence
  Description of Artificial Sequence: Synthetic oligonucleotide
  Target: COL7A1; (+) strand; PAM type: NNGRRT; PAM sequence: GGGGAT
gagcctcatggcaaggggaa

SEQ ID NO: 6518 - DNA, 20 bp, Artificial Sequence
  Description of Artificial Sequence: Synthetic oligonucleotide
  Target: COL7A1; (+) strand; PAM type: NNGRRT; PAM sequence: CAGAGT
gccccaatgggcatgcaaaa

SEQ ID NO: 6519 - DNA, 20 bp, Artificial Sequence
  Description of Artificial Sequence: Synthetic oligonucleotide
  Target: COL7A1; (+) strand; PAM type: NNGRRT; PAM sequence: ATGGGT
aaactgctaggaaccagcct

SEQ ID NO: 6520 - DNA, 20 bp, Artificial Sequence
  Description of Artificial Sequence: Synthetic oligonucleotide
  Target: COL7A1; (+) strand; PAM type: NNGRRT; PAM sequence: GTGGGT
atgggtgtgcatgtgcacat

SEQ ID NO: 6521 - DNA, 20 bp, Artificial Sequence
  Description of Artificial Sequence: Synthetic oligonucleotide
  Target: COL7A1; (+) strand; PAM type: NNGRRT; PAM sequence: TTGGAT
ggggcctcacctgctcccct

SEQ ID NO: 6522 - DNA, 20 bp, Artificial Sequence
  Description of Artificial Sequence: Synthetic oligonucleotide
  Target: COL7A1; (+) strand; PAM type: NNGRRT; PAM sequence: AAGAAT
cccacggtcaccctgaaaac

SEQ ID NO: 6523 - DNA, 20 bp, Artificial Sequence
  Description of Artificial Sequence: Synthetic oligonucleotide
  Target: COL7A1; (+) strand; PAM type: NNGRRT; PAM sequence: AGGGGT
tgagatacggcagaacacaa

SEQ ID NO: 6524 - DNA, 20 bp, Artificial Sequence
  Description of Artificial Sequence: Synthetic oligonucleotide
  Target: COL7A1; (+) strand; PAM type: NNGRRT; PAM sequence: GAGGGT
aaaggcccatggcttcccag

SEQ ID NO: 6525 - DNA, 20 bp, Artificial Sequence
  Description of Artificial Sequence: Synthetic oligonucleotide
  Target: COL7A1; (+) strand; PAM type: NNGRRT; PAM sequence: CAGAAT
cttctaatgctctgaagtcc

SEQ ID NO: 6526 - DNA, 20 bp, Artificial Sequence
  Description of Artificial Sequence: Synthetic oligonucleotide
  Target: COL7A1; (+) strand; PAM type: NNGRRT; PAM sequence: TGGGGT
ctgggaggcctggaggcccc

SEQ ID NO: 6527 - DNA, 20 bp, Artificial Sequence
  Description of Artificial Sequence: Synthetic oligonucleotide
  Target: COL7A1; (+) strand; PAM type: NNGRRT; PAM sequence: AAGGAT
cctggaggcccctggggtcc

SEQ ID NO: 6528 - DNA, 20 bp, Artificial Sequence
  Description of Artificial Sequence: Synthetic oligonucleotide
  Target: COL7A1; (+) strand; PAM type: NNGRRT; PAM sequence: AAGGAT
ggggccatcacgaccctgtg

SEQ ID NO: 6529 - DNA, 20 bp, Artificial Sequence
  Description of Artificial Sequence: Synthetic oligonucleotide
  Target: COL7A1; (+) strand; PAM type: NNGRRT; PAM sequence: AAGAGT
agcaccctgagacctcagaa

SEQ ID NO: 6530 - DNA, 20 bp, Artificial Sequence
  Description of Artificial Sequence: Synthetic oligonucleotide
  Target: COL7A1; (+) strand; PAM type: NNGRRT; PAM sequence: TGGAGT
cctgagacctcagaaaagag

SEQ ID NO: 6531 - DNA, 20 bp, Artificial Sequence
  Description of Artificial Sequence: Synthetic oligonucleotide
  Target: COL7A1; (+) strand; PAM type: NNGRRT; PAM sequence: CAGGGT
agagtggagtcatattcccc

SEQ ID NO: 6532 - DNA, 20 bp, Artificial Sequence
  Description of Artificial Sequence: Synthetic oligonucleotide
  Target: COL7A1; (+) strand; PAM type: NNGRRT; PAM sequence: CAGGGT
gagtcatattcccccagggt

SEQ ID NO: 6533 - DNA, 20 bp, Artificial Sequence
  Description of Artificial Sequence: Synthetic oligonucleotide
  Target: COL7A1; (+) strand; PAM type: NNGRRT; PAM sequence: AGGGGT
attcccccagggtcagggtc

SEQ ID NO: 6534 - DNA, 20 bp, Artificial Sequence
  Description of Artificial Sequence: Synthetic oligonucleotide
  Target: COL7A1; (+) strand; PAM type: NNGRRT; PAM sequence: CTGAAT
cacttctctcccagaggcgc

SEQ ID NO: 6535 - DNA, 20 bp, Artificial Sequence
  Description of Artificial Sequence: Synthetic oligonucleotide
  Target: COL7A1; (+) strand; PAM type: NNGRRT; PAM sequence: AAGGAT
tttctctccctaaggaagac

SEQ ID NO: 6536 - DNA, 20 bp, Artificial Sequence
  Description of Artificial Sequence: Synthetic oligonucleotide
  Target: COL7A1; (+) strand; PAM type: NNGRRT; PAM sequence: CAGGGT
taccttcctcccgtcttctc

SEQ ID NO: 6537 - DNA, 20 bp, Artificial Sequence
  Description of Artificial Sequence: Synthetic oligonucleotide
  Target: COL7A1; (+) strand; PAM type: NNGRRT; PAM sequence: CTGAGT
ggagcatggcctgtggccgt

SEQ ID NO: 6538 - DNA, 20 bp, Artificial Sequence
  Description of Artificial Sequence: Synthetic oligonucleotide
  Target: COL7A1; (+) strand; PAM type: NNGRRT; PAM sequence: AAGGGT
gagtgagctgctacatgtct

SEQ ID NO: 6539 - DNA, 20 bp, Artificial Sequence
  Description of Artificial Sequence: Synthetic oligonucleotide
  Target: COL7A1; (+) strand; PAM type: NNGRRT; PAM sequence: CTGGGT
agctccacatttatgcatct

SEQ ID NO: 6540 - DNA, 20 bp, Artificial Sequence
  Description of Artificial Sequence: Synthetic oligonucleotide
  Target: COL7A1; (+) strand; PAM type: NNGRRT; PAM sequence: CTGGGT
ttggtgatcgtccacatgtc

SEQ ID NO: 6541 - DNA, 20 bp, Artificial Sequence
  Description of Artificial Sequence: Synthetic oligonucleotide
  Target: COL7A1; (+) strand; PAM type: NNGRRT; PAM sequence: ATGGGT
gtgtcttagtacatgtaccc

SEQ ID NO: 6542 - DNA, 20 bp, Artificial Sequence
  Description of Artificial Sequence: Synthetic oligonucleotide
  Target: COL7A1; (+) strand; PAM type: NNGRRT; PAM sequence: GTGGGT
atgtgtatgaccataagcgt

SEQ ID NO: 6543 - DNA, 20 bp, Artificial Sequence
  Description of Artificial Sequence: Synthetic oligonucleotide
  Target: COL7A1; (+) strand; PAM type: NNGRRT; PAM sequence: TTGGGT
acacaggtccacatgcggtc

SEQ ID NO: 6544 - DNA, 20 bp, Artificial Sequence
  Description of Artificial Sequence: Synthetic oligonucleotide
  Target: COL7A1; (+) strand; PAM type: NNGRRT; PAM sequence: ATGAGT
ttgggtccatgtcttagcac

SEQ ID NO: 6545 - DNA, 20 bp, Artificial Sequence
  Description of Artificial Sequence: Synthetic oligonucleotide
  Target: COL7A1; (+) strand; PAM type: NNGRRT; PAM sequence: CTGGGT
ccatgtcttagcacatgagt

SEQ ID NO: 6546 - DNA, 20 bp, Artificial Sequence
  Description of Artificial Sequence: Synthetic oligonucleotide
  Target: COL7A1; (+) strand; PAM type: NNGRRT; PAM sequence: CTGGGT
atgagtctgggtggaagtgt

SEQ ID NO: 6547 - DNA, 20 bp, Artificial Sequence
  Description of Artificial Sequence: Synthetic oligonucleotide
  Target: COL7A1; (+) strand; PAM type: NNGRRT; PAM sequence: GTGGGT
cttcacctgtgcctatggct

SEQ ID NO: 6548 - DNA, 20 bp, Artificial Sequence
  Description of Artificial Sequence: Synthetic oligonucleotide
  Target: COL7A1; (+) strand; PAM type: NNGRRT; PAM sequence: GCGGAT
actttaggaggccgaggcgg

SEQ ID NO: 6549 - DNA, 20 bp, Artificial Sequence
  Description of Artificial Sequence: Synthetic oligonucleotide
  Target: COL7A1; (+) strand; PAM type: NNGRRT; PAM sequence: GAGAAT
tactcgggaggttgaggcag

SEQ ID NO: 6550 - DNA, 20 bp, Artificial Sequence
  Description of Artificial Sequence: Synthetic oligonucleotide
  Target: COL7A1; (+) strand; PAM type: NNGRRT; PAM sequence: GAGAGT
caggagaatcacttgaaccc

SEQ ID NO: 6551 - DNA, 20 bp, Artificial Sequence
  Description of Artificial Sequence: Synthetic oligonucleotide
  Target: COL7A1; (+) strand; PAM type: NNGRRT; PAM sequence: CTGGAT
aaaaaaaaaaaactatgttt

SEQ ID NO: 6552 - DNA, 20 bp, Artificial Sequence
  Description of Artificial Sequence: Synthetic oligonucleotide
  Target: COL7A1; (+) strand; PAM type: NNGRRT; PAM sequence: CAGGAT
atgcatctgtatgtctgggc

SEQ ID NO: 6553 - DNA, 20 bp, Artificial Sequence
  Description of Artificial Sequence: Synthetic oligonucleotide
  Target: COL7A1; (+) strand; PAM type: NNGRRT; PAM sequence: TTGGAT
ctgtgggaacagatcactgg

SEQ ID NO: 6554 - DNA, 20 bp, Artificial Sequence
  Description of Artificial Sequence: Synthetic oligonucleotide
  Target: COL7A1; (+) strand; PAM type: NNGRRT; PAM sequence: GGGGAT
cagatcactggttggatgtc

SEQ ID NO: 6555 - DNA, 20 bp, Artificial Sequence
  Description of Artificial Sequence: Synthetic oligonucleotide
  Target: COL7A1; (+) strand; PAM type: NNGRRT; PAM sequence: TCGGGT
cactggttggatgtcgggga

SEQ ID NO: 6556 - DNA, 20 bp, Artificial Sequence
  Description of Artificial Sequence: Synthetic oligonucleotide
  Target: COL7A1; (+) strand; PAM type: NNGRRT; PAM sequence: GAGGGT
ttggatgtcggggatcgggt

SEQ ID NO: 6557 - DNA, 20 bp, Artificial Sequence
  Description of Artificial Sequence: Synthetic oligonucleotide
  Target: COL7A1; (+) strand; PAM type: NNGRRT; PAM sequence: GGGGGT
gagggtagtaagggggaaaa

SEQ ID NO: 6558 - DNA, 20 bp, Artificial Sequence
  Description of Artificial Sequence: Synthetic oligonucleotide
  Target: COL7A1; (+) strand; PAM type: NNGRRT; PAM sequence: CAGGGT
accccaaaaagatctccctc

SEQ ID NO: 6559 - DNA, 20 bp, Artificial Sequence
  Description of Artificial Sequence: Synthetic oligonucleotide
  Target: COL7A1; (+) strand; PAM type: NNGRRT; PAM sequence: ATGGAT
atccctcaggcacagacccc

SEQ ID NO: 6560 - DNA, 20 bp, Artificial Sequence
  Description of Artificial Sequence: Synthetic oligonucleotide
  Target: COL7A1; (+) strand; PAM type: NNGRRT; PAM sequence: GGGGAT
aggcaaagaaggtcagaaag

SEQ ID NO: 6561 - DNA, 20 bp, Artificial Sequence
  Description of Artificial Sequence: Synthetic oligonucleotide
  Target: COL7A1; (+) strand; PAM type: NNGRRT; PAM sequence: TCGGAT
ccgaccccccaccaactctc

SEQ ID NO: 6562 - DNA, 20 bp, Artificial Sequence
  Description of Artificial Sequence: Synthetic oligonucleotide
  Target: COL7A1; (+) strand; PAM type: NNGRRT; PAM sequence: CTGGGT
cccctcacttacgtctctcc

SEQ ID NO: 6563 - DNA, 20 bp, Artificial Sequence
  Description of Artificial Sequence: Synthetic oligonucleotide
  Target: COL7A1; (+) strand; PAM type: NNGRRT; PAM sequence: TGGGGT
aagtcagttcatcatggtca

SEQ ID NO: 6564 - DNA, 20 bp, Artificial Sequence
  Description of Artificial Sequence: Synthetic oligonucleotide
  Target: COL7A1; (+) strand; PAM type: NNGRRT; PAM sequence: TGGGGT
ccaagaccaaccaatgaggc

SEQ ID NO: 6565 - DNA, 20 bp, Artificial Sequence
  Description of Artificial Sequence: Synthetic oligonucleotide
  Target: COL7A1; (+) strand; PAM type: NNGRRT; PAM sequence: TAGGGT
caaccaatgaggctggggtc

SEQ ID NO: 6566 - DNA, 20 bp, Artificial Sequence
  Description of Artificial Sequence: Synthetic oligonucleotide
  Target: COL7A1; (+) strand; PAM type: NNGRRT; PAM sequence: AGGGGT
ggtctagggtcctcatgtga

SEQ ID NO: 6567 - DNA, 20 bp, Artificial Sequence
  Description of Artificial Sequence: Synthetic oligonucleotide
  Target: COL7A1; (+) strand; PAM type: NNGRRT; PAM sequence: TAGAGT
cccggtcaccctgtggaaaa

SEQ ID NO: 6568 - DNA, 20 bp, Artificial Sequence
  Description of Artificial Sequence: Synthetic oligonucleotide
  Target: COL7A1; (+) strand; PAM type: NNGRRT; PAM sequence: GTGGAT
aagaggccaccaaggctgag

SEQ ID NO: 6569 - DNA, 20 bp, Artificial Sequence
  Description of Artificial Sequence: Synthetic oligonucleotide
  Target: COL7A1; (+) strand; PAM type: NNGRRT; PAM sequence: CTGGGT
tcctgctgggcctcggacac

SEQ ID NO: 6570 - DNA, 20 bp, Artificial Sequence
  Description of Artificial Sequence: Synthetic oligonucleotide
  Target: COL7A1; (+) strand; PAM type: NNGRRT; PAM sequence: CAGGGT
ctgggtccccctggagggaa

SEQ ID NO: 6571 - DNA, 20 bp, Artificial Sequence
  Description of Artificial Sequence: Synthetic oligonucleotide
  Target: COL7A1; (+) strand; PAM type: NNGRRT; PAM sequence: GAGGGT
aacagggtcagataagaggt

SEQ ID NO: 6572 - DNA, 20 bp, Artificial Sequence
  Description of Artificial Sequence: Synthetic oligonucleotide
  Target: COL7A1; (+) strand; PAM type: NNGRRT; PAM sequence: GGGGGT
catcactcacctgtgggcct

SEQ ID NO: 6573 - DNA, 20 bp, Artificial Sequence
  Description of Artificial Sequence: Synthetic oligonucleotide
  Target: COL7A1; (+) strand; PAM type: NNGRRT; PAM sequence: GAGGAT
ccgaaacccttcaatgccct

SEQ ID NO: 6574 - DNA, 20 bp, Artificial Sequence
  Description of Artificial Sequence: Synthetic oligonucleotide
  Target: COL7A1; (+) strand; PAM type: NNGRRT; PAM sequence: CAGGAT
cccaggggctccagggaggc

SEQ ID NO: 6575 - DNA, 20 bp, Artificial Sequence
  Description of Artificial Sequence: Synthetic oligonucleotide
  Target: COL7A1; (+) strand; PAM type: NNGRRT; PAM sequence: TGGGGT
gaacctgctgggaggggcac

SEQ ID NO: 6576 - DNA, 20 bp, Artificial Sequence
  Description of Artificial Sequence: Synthetic oligonucleotide
  Target: COL7A1; (+) strand; PAM type: NNGRRT; PAM sequence: GGGAAT
gtcctgtgtctacctgtggg

SEQ ID NO: 6577 - DNA, 20 bp, Artificial Sequence
  Description of Artificial Sequence: Synthetic oligonucleotide
  Target: COL7A1; (+) strand; PAM type: NNGRRT; PAM sequence: AAGAAT
tggggggaatgaccagtgag

SEQ ID NO: 6578 - DNA, 20 bp, Artificial Sequence
  Description of Artificial Sequence: Synthetic oligonucleotide
  Target: COL7A1; (+) strand; PAM type: NNGRRT; PAM sequence: AGGAGT
aatggctcaacaaggggaag

SEQ ID NO: 6579 - DNA, 20 bp, Artificial Sequence
  Description of Artificial Sequence: Synthetic oligonucleotide
  Target: COL7A1; (+) strand; PAM type: NNGRRT; PAM sequence: GGGGAT
aggggaagaggagttggcga

SEQ ID NO: 6580 - DNA, 20 bp, Artificial Sequence
  Description of Artificial Sequence: Synthetic oligonucleotide
  Target: COL7A1; (+) strand; PAM type: NNGRRT; PAM sequence: CAGGGT
gaggagttggcgaggggata

SEQ ID NO: 6581 - DNA, 20 bp, Artificial Sequence
  Description of Artificial Sequence: Synthetic oligonucleotide
  Target: COL7A1; (+) strand; PAM type: NNGRRT; PAM sequence: AGGGAT
cagggtctgtgaggggctcc

SEQ ID NO: 6582 - DNA, 20 bp, Artificial Sequence
  Description of Artificial Sequence: Synthetic oligonucleotide
  Target: COL7A1; (+) strand; PAM type: NNGRRT; PAM sequence: GGGAGT
agagggacagtgggggaagt

SEQ ID NO: 6583 - DNA, 20 bp, Artificial Sequence
  Description of Artificial Sequence: Synthetic oligonucleotide
  Target: COL7A1; (+) strand; PAM type: NNGRRT; PAM sequence: AGGAAT
gggaagtgggagttagtgga

SEQ ID NO: 6584 - DNA, 20 bp, Artificial Sequence
  Description of Artificial Sequence: Synthetic oligonucleotide
  Target: COL7A1; (+) strand; PAM type: NNGRRT; PAM sequence: GGGGGT
cagcccttaccagccgtccc

SEQ ID NO: 6585 - DNA, 20 bp, Artificial Sequence
  Description of Artificial Sequence: Synthetic oligonucleotide
  Target: COL7A1; (+) strand; PAM type: NNGRRT; PAM sequence: ATGGGT
aatgccagcccccagcaggc

SEQ ID NO: 6586 - DNA, 20 bp, Artificial Sequence
  Description of Artificial Sequence: Synthetic oligonucleotide
  Target: COL7A1; (+) strand; PAM type: NNGRRT; PAM sequence: TTGGGT
ccggctccccacggtcaccc

SEQ ID NO: 6587 - DNA, 20 bp, Artificial Sequence
  Description of Artificial Sequence: Synthetic oligonucleotide
  Target: COL7A1; (+) strand; PAM type: NNGRRT; PAM sequence: AGGGGT
gggctgccctgcagaaaggc

SEQ ID NO: 6588 - DNA, 20 bp, Artificial Sequence
  Description of Artificial Sequence: Synthetic oligonucleotide
  Target: COL7A1; (+) strand; PAM type: NNGRRT; PAM sequence: GGGAAT
gaagcaccatgaggactcat

SEQ ID NO: 6589 - DNA, 20 bp, Artificial Sequence
  Description of Artificial Sequence: Synthetic oligonucleotide
  Target: COL7A1; (+) strand; PAM type: NNGRRT; PAM sequence: AGGGGT
gccttcagatgcgtgtgtgc

SEQ ID NO: 6590 - DNA, 20 bp, Artificial Sequence
  Description of Artificial Sequence: Synthetic oligonucleotide
  Target: COL7A1; (+) strand; PAM type: NNGRRT; PAM sequence: GAGGGT
tcaaaggaagtgaagattgg

SEQ ID NO: 6591 - DNA, 20 bp, Artificial Sequence
  Description of Artificial Sequence: Synthetic oligonucleotide
  Target: COL7A1; (+) strand; PAM type: NNGRRT; PAM sequence: CAGGGT
attgggagggtttagcatta

SEQ ID NO: 6592 - DNA, 20 bp, Artificial Sequence
  Description of Artificial Sequence: Synthetic oligonucleotide
  Target: COL7A1; (+) strand; PAM type: NNGRRT; PAM sequence: GGGGGT
ggtttagcattacagggttg

SEQ ID NO: 6593 - DNA, 20 bp, Artificial Sequence
  Description of Artificial Sequence: Synthetic oligonucleotide
  Target: COL7A1; (+) strand; PAM type: NNGRRT; PAM sequence: TAGGAT
agcattacagggttgggggg

SEQ ID NO: 6594 - DNA, 20 bp, Artificial Sequence
  Description of Artificial Sequence: Synthetic oligonucleotide
  Target: COL7A1; (+) strand; PAM type: NNGRRT; PAM sequence: GGGAAT
ggggggtaggatcaggtatt

SEQ ID NO: 6595 - DNA, 20 bp, Artificial Sequence
  Description of Artificial Sequence: Synthetic oligonucleotide
  Target: COL7A1; (+) strand; PAM type: NNGRRT; PAM sequence: GAGGGT
tattgggaattggctggttg

SEQ ID NO: 6596 - DNA, 20 bp, Artificial Sequence
  Description of Artificial Sequence: Synthetic oligonucleotide
  Target: COL7A1; (+) strand; PAM type: NNGRRT; PAM sequence: TGGGGT
gctggttggagggttaaggt

SEQ ID NO: 6597 - DNA, 20 bp, Artificial Sequence
  Description of Artificial Sequence: Synthetic oligonucleotide
  Target: COL7A1; (+) strand; PAM type: NNGRRT; PAM sequence: AGGAGT
ggagggttaaggttggggtg

SEQ ID NO: 6598 - DNA, 20 bp, Artificial Sequence
  Description of Artificial Sequence: Synthetic oligonucleotide
  Target: COL7A1; (+) strand; PAM type: NNGRRT; PAM sequence: CAGGAT
cacatttcgtccatcctctc

SEQ ID NO: 6599 - DNA, 20 bp, Artificial Sequence
  Description of Artificial Sequence: Synthetic oligonucleotide
  Target: COL7A1; (+) strand; PAM type: NNGRRT; PAM sequence: CCGGGT
gcctgcttttccaggcaaac

SEQ ID NO: 6600 - DNA, 20 bp, Artificial Sequence
  Description of Artificial Sequence: Synthetic oligonucleotide
  Target: COL7A1; (+) strand; PAM type: NNGRRT; PAM sequence: CAGGAT
gtcatactgcacagggcagt

SEQ ID NO: 6601 - DNA, 20 bp, Artificial Sequence
  Description of Artificial Sequence: Synthetic oligonucleotide
  Target: COL7A1; (+) strand; PAM type: NNGRRT; PAM sequence: AAGGGT
ctcagggagaggggacagag

SEQ ID NO: 6602 - DNA, 20 bp, Artificial Sequence
  Description of Artificial Sequence: Synthetic oligonucleotide
  Target: COL7A1; (+) strand; PAM type: NNGRRT; PAM sequence: GGGAGT
cagcagctggacaggaggca

SEQ ID NO: 6603 - DNA, 20 bp, Artificial Sequence
  Description of Artificial Sequence: Synthetic oligonucleotide
  Target: COL7A1; (+) strand; PAM type: NNGRRT; PAM sequence: GTGGAT
agctggacaggaggcaggga

SEQ ID NO: 6604 - DNA, 20 bp, Artificial Sequence
  Description of Artificial Sequence: Synthetic oligonucleotide
  Target: COL7A1; (+) strand; PAM type: NNGRRT; PAM sequence: ATGGAT
ggacaggaggcagggagtgg

SEQ ID NO: 6605 - DNA, 20 bp, Artificial Sequence
  Description of Artificial Sequence: Synthetic oligonucleotide
  Target: COL7A1; (+) strand; PAM type: NNGRRT; PAM sequence: TGGGAT
ctggtggagcaccagcctac

SEQ ID NO: 6606 - DNA, 20 bp, Artificial Sequence
  Description of Artificial Sequence: Synthetic oligonucleotide
  Target: COL7A1; (+) strand; PAM type: NNGRRT; PAM sequence: AAGGGT
gcctactgggatcctagttc

SEQ ID NO: 6607 - DNA, 20 bp, Artificial Sequence
  Description of Artificial Sequence: Synthetic oligonucleotide
  Target: COL7A1; (+) strand; PAM type: NNGRRT; PAM sequence: AAGGAT
gggatcctagttcaagggta

SEQ ID NO: 6608 - DNA, 20 bp, Artificial Sequence
  Description of Artificial Sequence: Synthetic oligonucleotide
  Target: COL7A1; (+) strand; PAM type: NNGRRT; PAM sequence: AGGAGT
gatcagaaaccacagtggga

SEQ ID NO: 6609 - DNA, 20 bp, Artificial Sequence
  Description of Artificial Sequence: Synthetic oligonucleotide
  Target: COL7A1; (+) strand; PAM type: NNGRRT; PAM sequence: GAGAGT
aacttcaccctgtgaaacat

SEQ ID NO: 6610 - DNA, 20 bp, Artificial Sequence
  Description of Artificial Sequence: Synthetic oligonucleotide
  Target: COL7A1; (+) strand; PAM type: NNGRRT; PAM sequence: CAGGGT
tcctggggggccaggccgcc

SEQ ID NO: 6611 - DNA, 20 bp, Artificial Sequence
  Description of Artificial Sequence: Synthetic oligonucleotide
  Target: COL7A1; (+) strand; PAM type: NNGRRT; PAM sequence: CTGAGT
tcccttctctccaggaggcc

SEQ ID NO: 6612 - DNA, 20 bp, Artificial Sequence
  Description of Artificial Sequence: Synthetic oligonucleotide
  Target: COL7A1; (+) strand; PAM type: NNGRRT; PAM sequence: CAGGGT
ccagaagccttgaggttgcc

SEQ ID NO: 6613 - DNA, 20 bp, Artificial Sequence
  Description of Artificial Sequence: Synthetic oligonucleotide
  Target: COL7A1; (+) strand; PAM type: NNGRRT; PAM sequence: ACGGGT
ccttgaggttgcccagggta

SEQ ID NO: 6614 - DNA, 20 bp, Artificial Sequence
  Description of Artificial Sequence: Synthetic oligonucleotide
  Target: COL7A1; (+) strand; PAM type: NNGRRT; PAM sequence: GGGGGT
cagggtaacgggtactcact

SEQ ID NO: 6615 - DNA, 20 bp, Artificial Sequence
  Description of Artificial Sequence: Synthetic oligonucleotide
  Target: COL7A1; (+) strand; PAM type: NNGRRT; PAM sequence: CAGGGT
gaaggggggcaggacttagt

SEQ ID NO: 6616 - DNA, 20 bp, Artificial Sequence
  Description of Artificial Sequence: Synthetic oligonucleotide
  Target: COL7A1; (+) strand; PAM type: NNGRRT; PAM sequence: CAGGGT
acattgattcacccggtctc

SEQ ID NO: 6617 - DNA, 20 bp, Artificial Sequence
  Description of Artificial Sequence: Synthetic oligonucleotide
  Target: COL7A1; (+) strand; PAM type: NNGRRT; PAM sequence: CAGGGT
tccagggtctcccttggggc

SEQ ID NO: 6618 - DNA, 20 bp, Artificial Sequence
  Description of Artificial Sequence: Synthetic oligonucleotide
  Target: COL7A1; (+) strand; PAM type: NNGRRT; PAM sequence: CCGGGT
ggtctccaggaagaaccaag

SEQ ID NO: 6619 - DNA, 20 bp, Artificial Sequence
  Description of Artificial Sequence: Synthetic oligonucleotide
  Target: COL7A1; (+) strand; PAM type: NNGRRT; PAM sequence: GTGGAT
aaccaagccgggtgggccct

SEQ ID NO: 6620 - DNA, 20 bp, Artificial Sequence
  Description of Artificial Sequence: Synthetic oligonucleotide
  Target: COL7A1; (+) strand; PAM type: NNGRRT; PAM sequence: AAGGAT
cgggtgggccctgtggatgg

SEQ ID NO: 6621 - DNA, 20 bp, Artificial Sequence
  Description of Artificial Sequence: Synthetic oligonucleotide
  Target: COL7A1; (+) strand; PAM type: NNGRRT; PAM sequence: TTGGGT
ccaggcttaccttttctcct

SEQ ID NO: 6622 - DNA, 20 bp, Artificial Sequence
  Description of Artificial Sequence: Synthetic oligonucleotide
  Target: COL7A1; (+) strand; PAM type: NNGRRT; PAM sequence: TGGGGT
gatacagcttggccctgcct

SEQ ID NO: 6623 - DNA, 20 bp, Artificial Sequence
  Description of Artificial Sequence: Synthetic oligonucleotide
  Target: COL7A1; (+) strand; PAM type: NNGRRT; PAM sequence: TGGAAT
tgtatgatcaaagtcttcat

SEQ ID NO: 6624 - DNA, 20 bp, Artificial Sequence
  Description of Artificial Sequence: Synthetic oligonucleotide
  Target: COL7A1; (+) strand; PAM type: NNGRRT; PAM sequence: TGGAAT
tcattggaatggaggtcaca

SEQ ID NO: 6625 - DNA, 20 bp, Artificial Sequence
  Description of Artificial Sequence: Synthetic oligonucleotide
  Target: COL7A1; (+) strand; PAM type: NNGRRT; PAM sequence: CAGAGT
cagtccccgcccagaagtca

SEQ ID NO: 6626 - DNA, 20 bp, Artificial Sequence
  Description of Artificial Sequence: Synthetic oligonucleotide
  Target: COL7A1; (+) strand; PAM type: NNGRRT; PAM sequence: AGGGGT
gtcaccgctgacagcaggga

SEQ ID NO: 6627 - DNA, 20 bp, Artificial Sequence
  Description of Artificial Sequence: Synthetic oligonucleotide
  Target: COL7A1; (+) strand; PAM type: NNGRRT; PAM sequence: TGGGGT
catgacctgcatggcggtct

SEQ ID NO: 6628 - DNA, 20 bp, Artificial Sequence
  Description of Artificial Sequence: Synthetic oligonucleotide
  Target: COL7A1; (+) strand; PAM type: NNGRRT; PAM sequence: CAGGAT
gcatggcggtcttggggtca

SEQ ID NO: 6629 - DNA, 20 bp, Artificial Sequence
  Description of Artificial Sequence: Synthetic oligonucleotide
  Target: COL7A1; (+) strand; PAM type: NNGRRT; PAM sequence: AAGAGT
ggggtcacaggatcatagcc

SEQ ID NO: 6630 - DNA, 20 bp, Artificial Sequence
  Description of Artificial Sequence: Synthetic oligonucleotide
  Target: COL7A1; (+) strand; PAM type: NNGRRT; PAM sequence: TGGAAT
tgctcacgggcccagcactg

SEQ ID NO: 6631 - DNA, 20 bp, Artificial Sequence
  Description of Artificial Sequence: Synthetic oligonucleotide
  Target: COL7A1; (+) strand; PAM type: NNGRRT; PAM sequence: GAGGGT
gcccagatagtgttctatag

SEQ ID NO: 6632 - DNA, 20 bp, Artificial Sequence
  Description of Artificial Sequence: Synthetic oligonucleotide
  Target: COL7A1; (+) strand; PAM type: NNGRRT; PAM sequence: CAGGGT
cccgtcactcaccaccactg

SEQ ID NO: 6633 - DNA, 20 bp, Artificial Sequence
  Description of Artificial Sequence: Synthetic oligonucleotide
  Target: COL7A1; (+) strand; PAM type: NNGRRT; PAM sequence: GAGGAT
ccaggctccccctgtggaga

SEQ ID NO: 6634 - DNA, 20 bp, Artificial Sequence
  Description of Artificial Sequence: Synthetic oligonucleotide
  Target: COL7A1; (+) strand; PAM type: NNGRRT; PAM sequence: GGGAGT
ataggagcagggacaggtca

SEQ ID NO: 6635 - DNA, 20 bp, Artificial Sequence
  Description of Artificial Sequence: Synthetic oligonucleotide
  Target: COL7A1; (+) strand; PAM type: NNGRRT; PAM sequence: GTGGGT
ccttctctccttggcggcca

SEQ ID NO: 6636 - DNA, 20 bp, Artificial Sequence
  Description of Artificial Sequence: Synthetic oligonucleotide
  Target: COL7A1; (+) strand; PAM type: NNGRRT; PAM sequence: CTGAAT
ccagtgggtcctggtggccc

SEQ ID NO: 6637 - DNA, 20 bp, Artificial Sequence
  Description of Artificial Sequence: Synthetic oligonucleotide
  Target: COL7A1; (+) strand; PAM type: NNGRRT; PAM sequence: GTGGGT
ggaagggaagagctgtgcag

SEQ ID NO: 6638 - DNA, 20 bp, Artificial Sequence
  Description of Artificial Sequence: Synthetic oligonucleotide
  Target: COL7A1; (+) strand; PAM type: NNGRRT; PAM sequence: GGGGAT
tgtgcaggtgggtggggacg

SEQ ID NO: 6639 - DNA, 20 bp, Artificial Sequence
  Description of Artificial Sequence: Synthetic oligonucleotide
  Target: COL7A1; (+) strand; PAM type: NNGRRT; PAM sequence: TGGGGT
ggacagacagggctagaggc

SEQ ID NO: 6640 - DNA, 20 bp, Artificial Sequence
  Description of Artificial Sequence: Synthetic oligonucleotide
  Target: COL7A1; (+) strand; PAM type: NNGRRT; PAM sequence: AGGGGT
ggctggggtgggggctggag

SEQ ID NO: 6641 - DNA, 20 bp, Artificial Sequence
  Description of Artificial Sequence: Synthetic oligonucleotide
  Target: COL7A1; (+) strand; PAM type: NNGRRT; PAM sequence: TGGGAT
ggagaggggtcagggaagat

SEQ ID NO: 6642 - DNA, 20 bp, Artificial Sequence
  Description of Artificial Sequence: Synthetic oligonucleotide
  Target: COL7A1; (+) strand; PAM type: NNGRRT; PAM sequence: AGGGGT
agattgggatttaggttggc

SEQ ID NO: 6643 - DNA, 20 bp, Artificial Sequence
  Description of Artificial Sequence: Synthetic oligonucleotide
  Target: COL7A1; (+) strand; PAM type: NNGRRT; PAM sequence: CAGGGT
gaaaatcaaggtcagttcag

SEQ ID NO: 6644 - DNA, 20 bp, Artificial Sequence
  Description of Artificial Sequence: Synthetic oligonucleotide
  Target: COL7A1; (+) strand; PAM type: NNGRRT; PAM sequence: GAGGGT
aaagccaggtccctggggct

SEQ ID NO: 6645 - DNA, 20 bp, Artificial Sequence
  Description of Artificial Sequence: Synthetic oligonucleotide
  Target: COL7A1; (+) strand; PAM type: NNGRRT; PAM sequence: AGGGAT
gggttagagcctgtatcagc

SEQ ID NO: 6646 - DNA, 20 bp, Artificial Sequence
  Description of Artificial Sequence: Synthetic oligonucleotide
  Target: COL7A1; (+) strand; PAM type: NNGRRT; PAM sequence: AGGGGT
gggataagtggtcattgagg

SEQ ID NO: 6647 - DNA, 20 bp, Artificial Sequence
  Description of Artificial Sequence: Synthetic oligonucleotide
  Target: COL7A1; (+) strand; PAM type: NNGRRT; PAM sequence: AGGGGT
attgaggaggggtgaggagc

SEQ ID NO: 6648 - DNA, 20 bp, Artificial Sequence
  Description of Artificial Sequence: Synthetic oligonucleotide
  Target: COL7A1; (+) strand; PAM type: NNGRRT; PAM sequence: AGGGGT
gggtgaggagcaggggtagc

SEQ ID NO: 6649 - DNA, 20 bp, Artificial Sequence
  Description of Artificial Sequence: Synthetic oligonucleotide
  Target: COL7A1; (+) strand; PAM type: NNGRRT; PAM sequence: GTGGGT
tggtatgagcattgcagcca

SEQ ID NO: 6650 - DNA, 20 bp, Artificial Sequence
  Description of Artificial Sequence: Synthetic oligonucleotide
  Target: COL7A1; (+) strand; PAM type: NNGRRT; PAM sequence: CGGGAT
ttgcagccagtgggtttacc

SEQ ID NO: 6651 - DNA, 20 bp, Artificial Sequence
  Description of Artificial Sequence: Synthetic oligonucleotide
  Target: COL7A1; (+) strand; PAM type: NNGRRT; PAM sequence: GGGGGT
cccgggatcccgctgggcct

SEQ ID NO: 6652 - DNA, 20 bp, Artificial Sequence
  Description of Artificial Sequence: Synthetic oligonucleotide
  Target: COL7A1; (+) strand; PAM type: NNGRRT; PAM sequence: CTGAGT
tggaaaagaagaggtcagag

SEQ ID NO: 6653 - DNA, 20 bp, Artificial Sequence
  Description of Artificial Sequence: Synthetic oligonucleotide
  Target: COL7A1; (+) strand; PAM type: NNGRRT; PAM sequence: GAGGGT
ccccggtcaccctgaagaga

SEQ ID NO: 6654 - DNA, 20 bp, Artificial Sequence
  Description of Artificial Sequence: Synthetic oligonucleotide
  Target: COL7A1; (+) strand; PAM type: NNGRRT; PAM sequence: GAGGGT
gagagaaagacagagagaga

SEQ ID NO: 6655 - DNA, 20 bp, Artificial Sequence
  Description of Artificial Sequence: Synthetic oligonucleotide
  Target: COL7A1; (+) strand; PAM type: NNGRRT; PAM sequence: AGGGGT
tgaacgtcaaaccccagaca

SEQ ID NO: 6656 - DNA, 20 bp, Artificial Sequence
  Description of Artificial Sequence: Synthetic oligonucleotide
  Target: COL7A1; (+) strand; PAM type: NNGRRT; PAM sequence: CAGAGT
ccctaacaccatggggagcc

SEQ ID NO: 6657 - DNA, 20 bp, Artificial Sequence
  Description of Artificial Sequence: Synthetic oligonucleotide
  Target: COL7A1; (+) strand; PAM type: NNGRRT; PAM sequence: CTGAAT
cagagtagcacccctcacac

SEQ ID NO: 6658 - DNA, 20 bp, Artificial Sequence
  Description of Artificial Sequence: Synthetic oligonucleotide
  Target: COL7A1; (+) strand; PAM type: NNGRRT; PAM sequence: AGGGAT
aggtccccgtgggccctgga

SEQ ID NO: 6659 - DNA, 20 bp, Artificial Sequence
  Description of Artificial Sequence: Synthetic oligonucleotide
  Target: COL7A1; (+) strand; PAM type: NNGRRT; PAM sequence: ATGAAT
ccccgtgggccctggaaggg

SEQ ID NO: 6660 - DNA, 20 bp, Artificial Sequence
  Description of Artificial Sequence: Synthetic oligonucleotide
  Target: COL7A1; (+) strand; PAM type: NNGRRT; PAM sequence: GGGGGT
gccctggaagggatgaattt

SEQ ID NO: 6661 - DNA, 20 bp, Artificial Sequence
  Description of Artificial Sequence: Synthetic oligonucleotide
  Target: COL7A1; (+) strand; PAM type: NNGRRT; PAM sequence: TTGGGT
gaatttgggggttcagagat

SEQ ID NO: 6662 - DNA, 20 bp, Artificial Sequence
  Description of Artificial Sequence: Synthetic oligonucleotide
  Target: COL7A1; (+) strand; PAM type: NNGRRT; PAM sequence: GAGGAT
agagatttgggtttgggcat

SEQ ID NO: 6663 - DNA, 20 bp, Artificial Sequence
  Description of Artificial Sequence: Synthetic oligonucleotide
  Target: COL7A1; (+) strand; PAM type: NNGRRT; PAM sequence: CAGAAT
ggagctgtgcccaccatatt

SEQ ID NO: 6664 - DNA, 20 bp, Artificial Sequence
  Description of Artificial Sequence: Synthetic oligonucleotide
  Target: COL7A1; (+) strand; PAM type: NNGRRT; PAM sequence: CAGAGT
gaggcctggagctccatcct

SEQ ID NO: 6665 - DNA, 20 bp, Artificial Sequence
  Description of Artificial Sequence: Synthetic oligonucleotide
  Target: COL7A1; (+) strand; PAM type: NNGRRT; PAM sequence: ACGGGT
tcaccctgaaggagaaacac

SEQ ID NO: 6666 - DNA, 20 bp, Artificial Sequence
  Description of Artificial Sequence: Synthetic oligonucleotide
  Target: COL7A1; (+) strand; PAM type: NNGRRT; PAM sequence: TGGGGT
caggggggccaacggggcct

SEQ ID NO: 6667 - DNA, 20 bp, Artificial Sequence
  Description of Artificial Sequence: Synthetic oligonucleotide
  Target: COL7A1; (+) strand; PAM type: NNGRRT; PAM sequence: GTGAGT
cgggaagaccctaggaagaa

SEQ ID NO: 6668 - DNA, 20 bp, Artificial Sequence
  Description of Artificial Sequence: Synthetic oligonucleotide
  Target: COL7A1; (+) strand; PAM type: NNGRRT; PAM sequence: GGGAAT
tgggagagaacagcaggtca

SEQ ID NO: 6669 - DNA, 20 bp, Artificial Sequence
  Description of Artificial Sequence: Synthetic oligonucleotide
  Target: COL7A1; (+) strand; PAM type: NNGRRT; PAM sequence: GGGAAT
gcaggtcagggaatgaacag

SEQ ID NO: 6670 - DNA, 20 bp, Artificial Sequence
  Description of Artificial Sequence: Synthetic oligonucleotide
  Target: COL7A1; (+) strand; PAM type: NNGRRT; PAM sequence: AGGAGT
acctcactcccaaagatacc

SEQ ID NO: 6671 - DNA, 20 bp, Artificial Sequence
  Description of Artificial Sequence: Synthetic oligonucleotide
  Target: COL7A1; (+) strand; PAM type: NNGRRT; PAM sequence: GAGGGT
ccaaagataccaggagtgat

SEQ ID NO: 6672 - DNA, 20 bp, Artificial Sequence
  Description of Artificial Sequence: Synthetic oligonucleotide
  Target: COL7A1; (+) strand; PAM type: NNGRRT; PAM sequence: TGGGGT
accaggagtgatgagggtca

SEQ ID NO: 6673 - DNA, 20 bp, Artificial Sequence
  Description of Artificial Sequence: Synthetic oligonucleotide
  Target: COL7A1; (+) strand; PAM type: NNGRRT; PAM sequence: TTGGAT
atgagggtcatggggtccaa

SEQ ID NO: 6674 - DNA, 20 bp, Artificial Sequence
  Description of Artificial Sequence: Synthetic oligonucleotide
  Target: COL7A1; (+) strand; PAM type: NNGRRT; PAM sequence: AAGGAT
atggggtccaattggatttc

SEQ ID NO: 6675 - DNA, 20 bp, Artificial Sequence
  Description of Artificial Sequence: Synthetic oligonucleotide
  Target: COL7A1; (+) strand; PAM type: NNGRRT; PAM sequence: GAGGAT
gagaactgaggcgtcatggt

SEQ ID NO: 6676 - DNA, 20 bp, Artificial Sequence
  Description of Artificial Sequence: Synthetic oligonucleotide
  Target: COL7A1; (+) strand; PAM type: NNGRRT; PAM sequence: GGGGGT
tgaggcgtcatggtgaggat

SEQ ID NO: 6677 - DNA, 20 bp, Artificial Sequence
  Description of Artificial Sequence: Synthetic oligonucleotide
  Target: COL7A1; (+) strand; PAM type: NNGRRT; PAM sequence: AAGGGT
ggtgaggatgggggtaatca

SEQ ID NO: 6678 - DNA, 20 bp, Artificial Sequence
  Description of Artificial Sequence: Synthetic oligonucleotide
  Target: COL7A1; (+) strand; PAM type: NNGRRT; PAM sequence: CAGAGT
aatcaaagggtcacaagggc

SEQ ID NO: 6679 - DNA, 20 bp, Artificial Sequence
  Description of Artificial Sequence: Synthetic oligonucleotide
  Target: COL7A1; (+) strand; PAM type: NNGRRT; PAM sequence: AGGGGT
caagggccagagtaactggc

SEQ ID NO: 6680 - DNA, 20 bp, Artificial Sequence
  Description of Artificial Sequence: Synthetic oligonucleotide
  Target: COL7A1; (+) strand; PAM type: NNGRRT; PAM sequence: GTGGGT
gagtaactggcaggggttat

SEQ ID NO: 6681 - DNA, 20 bp, Artificial Sequence
  Description of Artificial Sequence: Synthetic oligonucleotide
  Target: COL7A1; (+) strand; PAM type: NNGRRT; PAM sequence: TGGGGT
aggggttatgtgggttcaaa

SEQ ID NO: 6682 - DNA, 20 bp, Artificial Sequence
  Description of Artificial Sequence: Synthetic oligonucleotide
  Target: COL7A1; (+) strand; PAM type: NNGRRT; PAM sequence: CGGGGT
caggaagccctggggggcca

SEQ ID NO: 6683 - DNA, 20 bp, Artificial Sequence
  Description of Artificial Sequence: Synthetic oligonucleotide
  Target: COL7A1; (+) strand; PAM type: NNGRRT; PAM sequence: CTGGGT
ccctggggggccacggggtc

SEQ ID NO: 6684 - DNA, 20 bp, Artificial Sequence
  Description of Artificial Sequence: Synthetic oligonucleotide
  Target: COL7A1; (+) strand; PAM type: NNGRRT; PAM sequence: CAGGGT
ccctgcacttaccgatggtc

SEQ ID NO: 6685 - DNA, 20 bp, Artificial Sequence
  Description of Artificial Sequence: Synthetic oligonucleotide
  Target: COL7A1; (+) strand; PAM type: NNGRRT; PAM sequence: CAGGAT
taaggacagagagcagtggg

SEQ ID NO: 6686 - DNA, 20 bp, Artificial Sequence
  Description of Artificial Sequence: Synthetic oligonucleotide
  Target: COL7A1; (+) strand; PAM type: NNGRRT; PAM sequence: CAGGGT
ttcgcgccttaggccctgca

SEQ ID NO: 6687 - DNA, 20 bp, Artificial Sequence
  Description of Artificial Sequence: Synthetic oligonucleotide
  Target: COL7A1; (+) strand; PAM type: NNGRRT; PAM sequence: GAGGGT
cctgaggacgaaacagagca

SEQ ID NO: 6688 - DNA, 20 bp, Artificial Sequence
  Description of Artificial Sequence: Synthetic oligonucleotide
  Target: COL7A1; (+) strand; PAM type: NNGRRT; PAM sequence: GCGAAT
agggtggtgcttgggctcag

SEQ ID NO: 6689 - DNA, 20 bp, Artificial Sequence
  Description of Artificial Sequence: Synthetic oligonucleotide
  Target: COL7A1; (+) strand; PAM type: NNGRRT; PAM sequence: CCGGGT
aaagaagggaaggcacctta

SEQ ID NO: 6690 - DNA, 20 bp, Artificial Sequence
  Description of Artificial Sequence: Synthetic oligonucleotide
  Target: COL7A1; (+) strand; PAM type: NNGRRT; PAM sequence: AGGGGT
acctttaggccaggggctcc

SEQ ID NO: 6691 - DNA, 20 bp, Artificial Sequence
  Description of Artificial Sequence: Synthetic oligonucleotide
  Target: COL7A1; (+) strand; PAM type: NNGRRT; PAM sequence: CAGGAT
gccaggggctccaggggtcc

SEQ ID NO: 6692 - DNA, 20 bp, Artificial Sequence
  Description of Artificial Sequence: Synthetic oligonucleotide
  Target: COL7A1; (+) strand; PAM type: NNGRRT; PAM sequence: AGGGGT
ggggcctcaccccatcaaca

SEQ ID NO: 6693 - DNA, 20 bp, Artificial Sequence
  Description of Artificial Sequence: Synthetic oligonucleotide
  Target: COL7A1; (+) strand; PAM type: NNGRRT; PAM sequence: GGGGGT
actgacccccaagtgttatt

SEQ ID NO: 6694 - DNA, 20 bp, Artificial Sequence
  Description of Artificial Sequence: Synthetic oligonucleotide
  Target: COL7A1; (+) strand; PAM type: NNGRRT; PAM sequence: CAGAGT
ccccactggcccttctattt

SEQ ID NO: 6695 - DNA, 20 bp, Artificial Sequence
  Description of Artificial Sequence: Synthetic oligonucleotide
  Target: COL7A1; (+) strand; PAM type: NNGRRT; PAM sequence: AGGAAT
taacctccagctgggcttct

SEQ ID NO: 6696 - DNA, 20 bp, Artificial Sequence
  Description of Artificial Sequence: Synthetic oligonucleotide
  Target: COL7A1; (+) strand; PAM type: NNGRRT; PAM sequence: AGGAGT
aaaaccccgagacagctttg

SEQ ID NO: 6697 - DNA, 20 bp, Artificial Sequence
  Description of Artificial Sequence: Synthetic oligonucleotide
  Target: COL7A1; (+) strand; PAM type: NNGRRT; PAM sequence: GGGGAT
aaagaagatagcagttaggt

SEQ ID NO: 6698 - DNA, 20 bp, Artificial Sequence
  Description of Artificial Sequence: Synthetic oligonucleotide
  Target: COL7A1; (+) strand; PAM type: NNGRRT; PAM sequence: CAGGGT
ttaggtggggataagccagt

SEQ ID NO: 6699 - DNA, 20 bp, Artificial Sequence
  Description of Artificial Sequence: Synthetic oligonucleotide
  Target: COL7A1; (+) strand; PAM type: NNGRRT; PAM sequence: CAGGGT
ggggacactcaccgggaggc

SEQ ID NO: 6700 - DNA, 20 bp, Artificial Sequence
  Description of Artificial Sequence: Synthetic oligonucleotide
  Target: COL7A1; (+) strand; PAM type: NNGRRT; PAM sequence: AAGGGT
ttgtcctctcaggccctagg

SEQ ID NO: 6701 - DNA, 20 bp, Artificial Sequence
  Description of Artificial Sequence: Synthetic oligonucleotide
  Target: COL7A1; (+) strand; PAM type: NNGRRT; PAM sequence: GTGGGT
tggggaaagacatgtcagat

SEQ ID NO: 6702 - DNA, 20 bp, Artificial Sequence
  Description of Artificial Sequence: Synthetic oligonucleotide
  Target: COL7A1; (+) strand; PAM type: NNGRRT; PAM sequence: CAGAGT
aagacatgtcagatgtgggt

SEQ ID NO: 6703 - DNA, 20 bp, Artificial Sequence
  Description of Artificial Sequence: Synthetic oligonucleotide
  Target: COL7A1; (+) strand; PAM type: NNGRRT; PAM sequence: TAGGGT
tctggccggggctgcggaca

SEQ ID NO: 6704 - DNA, 20 bp, Artificial Sequence
  Description of Artificial Sequence: Synthetic oligonucleotide
  Target: COL7A1; (+) strand; PAM type: NNGRRT; PAM sequence: CTGAGT
cccagaggcctcttccaaac

SEQ ID NO: 6705 - DNA, 20 bp, Artificial Sequence
  Description of Artificial Sequence: Synthetic oligonucleotide
  Target: COL7A1; (+) strand; PAM type: NNGRRT; PAM sequence: AAGGAT
tcttccaaacctgagtagtg

SEQ ID NO: 6706 - DNA, 20 bp, Artificial Sequence
  Description of Artificial Sequence: Synthetic oligonucleotide
  Target: COL7A1; (+) strand; PAM type: NNGRRT; PAM sequence: CAGAGT
cacggcgaagaaggtctgga

SEQ ID NO: 6707 - DNA, 20 bp, Artificial Sequence
  Description of Artificial Sequence: Synthetic oligonucleotide
  Target: COL7A1; (+) strand; PAM type: NNGRRT; PAM sequence: CTGGGT
cgccaagcgacgcagctgct

SEQ ID NO: 6708 - DNA, 20 bp, Artificial Sequence
  Description of Artificial Sequence: Synthetic oligonucleotide
  Target: COL7A1; (+) strand; PAM type: NNGRRT; PAM sequence: TGGGGT
caccacattaagccctaagg

SEQ ID NO: 6709 - DNA, 20 bp, Artificial Sequence
  Description of Artificial Sequence: Synthetic oligonucleotide
  Target: COL7A1; (+) strand; PAM type: NNGRRT; PAM sequence: ACGGAT
ttaccagaagcctgggcctc

SEQ ID NO: 6710 - DNA, 20 bp, Artificial Sequence
  Description of Artificial Sequence: Synthetic oligonucleotide
  Target: COL7A1; (+) strand; PAM type: NNGRRT; PAM sequence: CTGAAT
cctgggcctcacggatgggg

SEQ ID NO: 6711 - DNA, 20 bp, Artificial Sequence
  Description of Artificial Sequence: Synthetic oligonucleotide
  Target: COL7A1; (+) strand; PAM type: NNGRRT; PAM sequence: AAGGGT
ggctgaatatgtcacctctc

SEQ ID NO: 6712 - DNA, 20 bp, Artificial Sequence
  Description of Artificial Sequence: Synthetic oligonucleotide
  Target: COL7A1; (+) strand; PAM type: NNGRRT; PAM sequence: GTGGAT
cctggggcaccaagctccca

SEQ ID NO: 6713 - DNA, 20 bp, Artificial Sequence
  Description of Artificial Sequence: Synthetic oligonucleotide
  Target: COL7A1; (+) strand; PAM type: NNGRRT; PAM sequence: AGGAGT
agctcccagtggatagcccc

SEQ ID NO: 6714 - DNA, 20 bp, Artificial Sequence
  Description of Artificial Sequence: Synthetic oligonucleotide
  Target: COL7A1; (+) strand; PAM type: NNGRRT; PAM sequence: TTGGGT
ctcacccaggttgttcccac

SEQ ID NO: 6715 - DNA, 20 bp, Artificial Sequence
  Description of Artificial Sequence: Synthetic oligonucleotide
  Target: COL7A1; (+) strand; PAM type: NNGRRT; PAM sequence: ACGGAT
gggtccatgtagggcatgtc

SEQ ID NO: 6716 - DNA, 20 bp, Artificial Sequence
  Description of Artificial Sequence: Synthetic oligonucleotide
  Target: COL7A1; (+) strand; PAM type: NNGRRT; PAM sequence: TGGGGT
tgtaagacagcaggccaacc

SEQ ID NO: 6717 - DNA, 20 bp, Artificial Sequence
  Description of Artificial Sequence: Synthetic oligonucleotide
  Target: COL7A1; (+) strand; PAM type: NNGRRT; PAM sequence: GAGGAT
aaggaaacacagagcctgag

SEQ ID NO: 6718 - DNA, 20 bp, Artificial Sequence
  Description of Artificial Sequence: Synthetic oligonucleotide
  Target: COL7A1; (+) strand; PAM type: NNGRRT; PAM sequence: AGGGAT
cctgaggaggatgacagagc

SEQ ID NO: 6719 - DNA, 20 bp, Artificial Sequence
  Description of Artificial Sequence: Synthetic oligonucleotide
  Target: COL7A1; (+) strand; PAM type: NNGRRT; PAM sequence: GGGGGT
gaggatgacagagcagggat

SEQ ID NO: 6720 - DNA, 20 bp, Artificial Sequence
  Description of Artificial Sequence: Synthetic oligonucleotide
  Target: COL7A1; (+) strand; PAM type: NNGRRT; PAM sequence: CAGGGT
cagagcctggagaaacacat

SEQ ID NO: 6721 - DNA, 20 bp, Artificial Sequence
  Description of Artificial Sequence: Synthetic oligonucleotide
  Target: COL7A1; (+) strand; PAM type: NNGRRT; PAM sequence: GGGAGT
tgaccaaaccctatctatta

SEQ ID NO: 6722 - DNA, 20 bp, Artificial Sequence
  Description of Artificial Sequence: Synthetic oligonucleotide
  Target: COL7A1; (+) strand; PAM type: NNGRRT; PAM sequence: CAGGAT
tagggagtcagcagtgatgg

SEQ ID NO: 6723 - DNA, 20 bp, Artificial Sequence
  Description of Artificial Sequence: Synthetic oligonucleotide
  Target: COL7A1; (+) strand; PAM type: NNGRRT; PAM sequence: GAGAAT
ggagcctgtgagagagctgg

SEQ ID NO: 6724 - DNA, 20 bp, Artificial Sequence
  Description of Artificial Sequence: Synthetic oligonucleotide
  Target: COL7A1; (+) strand; PAM type: NNGRRT; PAM sequence: TTGGGT
tgggagaatgcctgaaccta

SEQ ID NO: 6725 - DNA, 20 bp, Artificial Sequence
  Description of Artificial Sequence: Synthetic oligonucleotide
  Target: COL7A1; (+) strand; PAM type: NNGRRT; PAM sequence: CTGGGT
gatggtaactggtatggagc

SEQ ID NO: 6726 - DNA, 20 bp, Artificial Sequence
  Description of Artificial Sequence: Synthetic oligonucleotide
  Target: COL7A1; (+) strand; PAM type: NNGRRT; PAM sequence: TAGAAT
tggggggcctcagggagagg

SEQ ID NO: 6727 - DNA, 20 bp, Artificial Sequence
  Description of Artificial Sequence: Synthetic oligonucleotide
  Target: COL7A1; (+) strand; PAM type: NNGRRT; PAM sequence: TTGAGT
tccgcacggtgagcattgtc

SEQ ID NO: 6728 - DNA, 20 bp, Artificial Sequence
  Description of Artificial Sequence: Synthetic oligonucleotide
  Target: COL7A1; (+) strand; PAM type: NNGRRT; PAM sequence: CTGAGT
cctcaccctggccagggcct

SEQ ID NO: 6729 - DNA, 20 bp, Artificial Sequence
  Description of Artificial Sequence: Synthetic oligonucleotide
  Target: COL7A1; (+) strand; PAM type: NNGRRT; PAM sequence: CAGGAT
cagggcctctgagtggccgc

SEQ ID NO: 6730 - DNA, 20 bp, Artificial Sequence
  Description of Artificial Sequence: Synthetic oligonucleotide
  Target: COL7A1; (+) strand; PAM type: NNGRRT; PAM sequence: TAGGAT
cctctgagtggccgccagga

SEQ ID NO: 6731 - DNA, 20 bp, Artificial Sequence
  Description of Artificial Sequence: Synthetic oligonucleotide
  Target: COL7A1; (+) strand; PAM type: NNGRRT; PAM sequence: CTGGAT
gccgccaggataggatgtag

SEQ ID NO: 6732 - DNA, 20 bp, Artificial Sequence
  Description of Artificial Sequence: Synthetic oligonucleotide
  Target: COL7A1; (+) strand; PAM type: NNGRRT; PAM sequence: TGGAGT
tagctggatgccctggacac

SEQ ID NO: 6733 - DNA, 20 bp, Artificial Sequence
  Description of Artificial Sequence: Synthetic oligonucleotide
  Target: COL7A1; (+) strand; PAM type: NNGRRT; PAM sequence: CCGAGT
tggagtccaggccaaagtca

SEQ ID NO: 6734 - DNA, 20 bp, Artificial Sequence
  Description of Artificial Sequence: Synthetic oligonucleotide
  Target: COL7A1; (+) strand; PAM type: NNGRRT; PAM sequence: AGGAAT
acacgaggtgactctgaagg

SEQ ID NO: 6735 - DNA, 20 bp, Artificial Sequence
  Description of Artificial Sequence: Synthetic oligonucleotide
  Target: COL7A1; (+) strand; PAM type: NNGRRT; PAM sequence: GAGGAT
tgaaggaggaatgaaagatc

SEQ ID NO: 6736 - DNA, 20 bp, Artificial Sequence
  Description of Artificial Sequence: Synthetic oligonucleotide
  Target: COL7A1; (+) strand; PAM type: NNGRRT; PAM sequence: CTGAGT
gaaagatcgaggatcagagg

SEQ ID NO: 6737 - DNA, 20 bp, Artificial Sequence
  Description of Artificial Sequence: Synthetic oligonucleotide
  Target: COL7A1; (+) strand; PAM type: NNGRRT; PAM sequence: CTGGGT
gaagggagagatctgagatc

SEQ ID NO: 6738 - DNA, 20 bp, Artificial Sequence
  Description of Artificial Sequence: Synthetic oligonucleotide
  Target: COL7A1; (+) strand; PAM type: NNGRRT; PAM sequence: TGGGGT
agcatcatgggaggtcatgc

SEQ ID NO: 6739 - DNA, 20 bp, Artificial Sequence
  Description of Artificial Sequence: Synthetic oligonucleotide
  Target: COL7A1; (+) strand; PAM type: NNGRRT; PAM sequence: CAGGGT
gaggtcatgctggggtcacc

SEQ ID NO: 6740 - DNA, 20 bp, Artificial Sequence
  Description of Artificial Sequence: Synthetic oligonucleotide
  Target: COL7A1; (+) strand; PAM type: NNGRRT; PAM sequence: GAGGGT
gctggggtcacccagggtca

SEQ ID NO: 6741 - DNA, 20 bp, Artificial Sequence
  Description of Artificial Sequence: Synthetic oligonucleotide
  Target: COL7A1; (+) strand; PAM type: NNGRRT; PAM sequence: AGGGGT
tcacccagggtcagagggtg

SEQ ID NO: 6742 - DNA, 20 bp, Artificial Sequence
  Description of Artificial Sequence: Synthetic oligonucleotide
  Target: COL7A1; (+) strand; PAM type: NNGRRT; PAM sequence: AGGGGT
agggtcagagggtgaggggt

SEQ ID NO: 6743 - DNA, 20 bp, Artificial Sequence
  Description of Artificial Sequence: Synthetic oligonucleotide
  Target: COL7A1; (+) strand; PAM type: NNGRRT; PAM sequence: AGGAGT
gtgaggggtaggggtacagg

SEQ ID NO: 6744 - DNA, 20 bp, Artificial Sequence
  Description of Artificial Sequence: Synthetic oligonucleotide
  Target: COL7A1; (+) strand; PAM type: NNGRRT; PAM sequence: CAGAGT
ggggtacaggaggagtcact

SEQ ID NO: 6745 - DNA, 20 bp, Artificial Sequence
  Description of Artificial Sequence: Synthetic oligonucleotide
  Target: COL7A1; (+) strand; PAM type: NNGRRT; PAM sequence: CGGGGT
caggaggagtcactcagagt

SEQ ID NO: 6746 - DNA, 20 bp, Artificial Sequence
  Description of Artificial Sequence: Synthetic oligonucleotide
  Target: COL7A1; (+) strand; PAM type: NNGRRT; PAM sequence: CAGGGT
agagtcggggtgcaggaagt

SEQ ID NO: 6747 - DNA, 20 bp, Artificial Sequence
  Description of Artificial Sequence: Synthetic oligonucleotide
  Target: COL7A1; (+) strand; PAM type: NNGRRT; PAM sequence: GTGGGT
tcggggtgcaggaagtcagg

SEQ ID NO: 6748 - DNA, 20 bp, Artificial Sequence
  Description of Artificial Sequence: Synthetic oligonucleotide
  Target: COL7A1; (+) strand; PAM type: NNGRRT; PAM sequence: GAGGGT
tggccacctggggcaggcgt

SEQ ID NO: 6749 - DNA, 20 bp, Artificial Sequence
  Description of Artificial Sequence: Synthetic oligonucleotide
  Target: COL7A1; (+) strand; PAM type: NNGRRT; PAM sequence: TGGGAT
gggtgggggccaagagcatg

SEQ ID NO: 6750 - DNA, 20 bp, Artificial Sequence
  Description of Artificial Sequence: Synthetic oligonucleotide
  Target: COL7A1; (+) strand; PAM type: NNGRRT; PAM sequence: CTGGGT
cacttcactggctctgttaa

SEQ ID NO: 6751 - DNA, 20 bp, Artificial Sequence
  Description of Artificial Sequence: Synthetic oligonucleotide
  Target: COL7A1; (+) strand; PAM type: NNGRRT; PAM sequence: ACGGAT
gattgatcttacctactgtc

SEQ ID NO: 6752 - DNA, 20 bp, Artificial Sequence
  Description of Artificial Sequence: Synthetic oligonucleotide
  Target: COL7A1; (+) strand; PAM type: NNGRRT; PAM sequence: CGGAGT
cactgtcctcgcctaccttg

SEQ ID NO: 6753 - DNA, 20 bp, Artificial Sequence
  Description of Artificial Sequence: Synthetic oligonucleotide
  Target: COL7A1; (+) strand; PAM type: NNGRRT; PAM sequence: GCGAGT
cggctcccagcgcagcctca

SEQ ID NO: 6754 - DNA, 20 bp, Artificial Sequence
  Description of Artificial Sequence: Synthetic oligonucleotide
  Target: COL7A1; (+) strand; PAM type: NNGRRT; PAM sequence: AGGAAT
aggcgctggagagaaagctc

SEQ ID NO: 6755 - DNA, 20 bp, Artificial Sequence
  Description of Artificial Sequence: Synthetic oligonucleotide
  Target: COL7A1; (+) strand; PAM type: NNGRRT; PAM sequence: CCGGAT
ctccaatccagagcacaagc

SEQ ID NO: 6756 - DNA, 20 bp, Artificial Sequence
  Description of Artificial Sequence: Synthetic oligonucleotide
  Target: COL7A1; (+) strand; PAM type: NNGRRT; PAM sequence: CTGAGT
gacaagtgcagtcactcgca

SEQ ID NO: 6757 - DNA, 20 bp, Artificial Sequence
  Description of Artificial Sequence: Synthetic oligonucleotide
  Target: COL7A1; (+) strand; PAM type: NNGRRT; PAM sequence: CCGGAT
ctgactccaccttcgagacc

SEQ ID NO: 6758 - DNA, 20 bp, Artificial Sequence
  Description of Artificial Sequence: Synthetic oligonucleotide
  Target: COL7A1; (+) strand; PAM type: NNGRRT; PAM sequence: CAGAGT
ttcgagaccccggatctctg

SEQ ID NO: 6759 - DNA, 20 bp, Artificial Sequence
  Description of Artificial Sequence: Synthetic oligonucleotide
  Target: COL7A1; (+) strand; PAM type: NNGRRT; PAM sequence: GGGAGT
ctgcagagtctgtgtttcct

SEQ ID NO: 6760 - DNA, 20 bp, Artificial Sequence
  Description of Artificial Sequence: Synthetic oligonucleotide
  Target: COL7A1; (+) strand; PAM type: NNGRRT; PAM sequence: AGGGGT
gtgggcatacagcaatggtt

SEQ ID NO: 6761 - DNA, 20 bp, Artificial Sequence
  Description of Artificial Sequence: Synthetic oligonucleotide
  Target: COL7A1; (+) strand; PAM type: NNGRRT; PAM sequence: AGGGGT
cagtcccagccaggaaggac

SEQ ID NO: 6762 - DNA, 20 bp, Artificial Sequence
  Description of Artificial Sequence: Synthetic oligonucleotide
  Target: COL7A1; (+) strand; PAM type: NNGRRT; PAM sequence: GAGGAT
agaacgtcgctggaagcatt

SEQ ID NO: 6763 - DNA, 20 bp, Artificial Sequence
  Description of Artificial Sequence: Synthetic oligonucleotide
  Target: COL7A1; (+) strand; PAM type: NNGRRT; PAM sequence: AGGGGT
ctggggacagaggcaaggta

SEQ ID NO: 6764 - DNA, 20 bp, Artificial Sequence
  Description of Artificial Sequence: Synthetic oligonucleotide
  Target: COL7A1; (+) strand; PAM type: NNGRRT; PAM sequence: AGGAAT
agagaacagagaggcagtgc

SEQ ID NO: 6765 - DNA, 20 bp, Artificial Sequence
  Description of Artificial Sequence: Synthetic oligonucleotide
  Target: COL7A1; (+) strand; PAM type: NNGRRT; PAM sequence: AGGGGT
agtgcaggaatggttgacgc

SEQ ID NO: 6766 - DNA, 20 bp, Artificial Sequence
  Description of Artificial Sequence: Synthetic oligonucleotide
  Target: COL7A1; (+) strand; PAM type: NNGRRT; PAM sequence: TGGGGT
ggaggaggaggtcagtgcct

SEQ ID NO: 6767 - DNA, 20 bp, Artificial Sequence
  Description of Artificial Sequence: Synthetic oligonucleotide
  Target: COL7A1; (+) strand; PAM type: NNGRRT; PAM sequence: GTGGGT
ggggccaccaggaggtcacc

SEQ ID NO: 6768 - DNA, 20 bp, Artificial Sequence
  Description of Artificial Sequence: Synthetic oligonucleotide
  Target: COL7A1; (+) strand; PAM type: NNGRRT; PAM sequence: TGGGGT
gggtggacacttaatcagtg

SEQ ID NO: 6769 - DNA, 20 bp, Artificial Sequence
  Description of Artificial Sequence: Synthetic oligonucleotide
  Target: COL7A1; (+) strand; PAM type: NNGRRT; PAM sequence: GTGGGT
ggacacttaatcagtgtggg

SEQ ID NO: 6770 - DNA, 20 bp, Artificial Sequence
  Description of Artificial Sequence: Synthetic oligonucleotide
  Target: COL7A1; (+) strand; PAM type: NNGRRT; PAM sequence: GGGGGT
acaggacagtcactgagcag

SEQ ID NO: 6771 - DNA, 20 bp, Artificial Sequence
  Description of Artificial Sequence: Synthetic oligonucleotide
  Target: COL7A1; (+) strand; PAM type: NNGRRT; PAM sequence: CAGGGT
atcaggaacacacagcaggg

SEQ ID NO: 6772 - DNA, 20 bp, Artificial Sequence
  Description of Artificial Sequence: Synthetic oligonucleotide
  Target: COL7A1; (+) strand; PAM type: NNGRRT; PAM sequence: CAGGGT
cggtgtggctagtagctggc

SEQ ID NO: 6773 - DNA, 20 bp, Artificial Sequence
  Description of Artificial Sequence: Synthetic oligonucleotide
  Target: COL7A1; (+) strand; PAM type: NNGRRT; PAM sequence: TGGGAT
tggcctccccagaaaccaac

SEQ ID NO: 6774 - DNA, 20 bp, Artificial Sequence
  Description of Artificial Sequence: Synthetic oligonucleotide
  Target: COL7A1; (+) strand; PAM type: NNGRRT; PAM sequence: AGGGAT
atttctctgggcctgggaac

SEQ ID NO: 6775 - DNA, 20 bp, Artificial Sequence
  Description of Artificial Sequence: Synthetic oligonucleotide
  Target: COL7A1; (+) strand; PAM type: NNGRRT; PAM sequence: CTGAGT
accccagtccccaccgtggg

SEQ ID NO: 6776 - DNA, 20 bp, Artificial Sequence
  Description of Artificial Sequence: Synthetic oligonucleotide
  Target: COL7A1; (+) strand; PAM type: NNGRRT; PAM sequence: CTGAGT
gtgacagatgagctgctggc

SEQ ID NO: 6777 - DNA, 20 bp, Artificial Sequence
  Description of Artificial Sequence: Synthetic oligonucleotide
  Target: COL7A1; (+) strand; PAM type: NNGRRT; PAM sequence: GTGGGT
gaccgtcctcactgggccca

SEQ ID NO: 6778 - DNA, 20 bp, Artificial Sequence
  Description of Artificial Sequence: Synthetic oligonucleotide
  Target: COL7A1; (+) strand; PAM type: NNGRRT; PAM sequence: GGGAGT
tctagtggggagaggcaatg

SEQ ID NO: 6779 - DNA, 20 bp, Artificial Sequence
  Description of Artificial Sequence: Synthetic oligonucleotide
  Target: COL7A1; (+) strand; PAM type: NNGRRT; PAM sequence: AGGAGT
gtctgctggaacaggcagga

SEQ ID NO: 6780 - DNA, 20 bp, Artificial Sequence
  Description of Artificial Sequence: Synthetic oligonucleotide
  Target: COL7A1; (+) strand; PAM type: NNGRRT; PAM sequence: GGGAGT
atctgataggggaagatgat

SEQ ID NO: 6781 - DNA, 20 bp, Artificial Sequence
  Description of Artificial Sequence: Synthetic oligonucleotide
  Target: COL7A1; (+) strand; PAM type: NNGRRT; PAM sequence: GGGAAT
atgggagtctaacaggagac

SEQ ID NO: 6782 - DNA, 20 bp, Artificial Sequence
  Description of Artificial Sequence: Synthetic oligonucleotide
  Target: COL7A1; (+) strand; PAM type: NNGRRT; PAM sequence: GTGAAT
ggaatttgatagaggagatg

SEQ ID NO: 6783 - DNA, 20 bp, Artificial Sequence
  Description of Artificial Sequence: Synthetic oligonucleotide
  Target: COL7A1; (+) strand; PAM type: NNGRRT; PAM sequence: AGGAGT
atggtgaataggtccagtgg

SEQ ID NO: 6784 - DNA, 20 bp, Artificial Sequence
  Description of Artificial Sequence: Synthetic oligonucleotide
  Target: COL7A1; (+) strand; PAM type: NNGRRT; PAM sequence: TTGGGT
gtgtaaatctcagaggagat

SEQ ID NO: 6785 - DNA, 20 bp, Artificial Sequence
  Description of Artificial Sequence: Synthetic oligonucleotide
  Target: COL7A1; (+) strand; PAM type: NNGRRT; PAM sequence: AGGGAT
agatttgggtccagcaaaaa

SEQ ID NO: 6786 - DNA, 20 bp, Artificial Sequence
  Description of Artificial Sequence: Synthetic oligonucleotide
  Target: COL7A1; (+) strand; PAM type: NNGRRT; PAM sequence: GGGGGT
gggtccagcaaaaaagggat

SEQ ID NO: 6787 - DNA, 20 bp, Artificial Sequence
  Description of Artificial Sequence: Synthetic oligonucleotide
  Target: COL7A1; (+) strand; PAM type: NNGRRT; PAM sequence: GAGGGT
caaaaaagggatgggggtct

SEQ ID NO: 6788 - DNA, 20 bp, Artificial Sequence
  Description of Artificial Sequence: Synthetic oligonucleotide
  Target: COL7A1; (+) strand; PAM type: NNGRRT; PAM sequence: GTGGAT
ggggtctgagggttgaagtg

SEQ ID NO: 6789 - DNA, 20 bp, Artificial Sequence
  Description of Artificial Sequence: Synthetic oligonucleotide
  Target: COL7A1; (+) strand; PAM type: NNGRRT; PAM sequence: GGGAGT
tatttgagggcaaaggctgt

SEQ ID NO: 6790 - DNA, 20 bp, Artificial Sequence
  Description of Artificial Sequence: Synthetic oligonucleotide
  Target: COL7A1; (+) strand; PAM type: NNGRRT; PAM sequence: AGGAAT
gagtcttaggagagaagcgg

SEQ ID NO: 6791 - DNA, 20 bp, Artificial Sequence
  Description of Artificial Sequence: Synthetic oligonucleotide
  Target: COL7A1; (+) strand; PAM type: NNGRRT; PAM sequence: CTGAAT
taggagagaagcggaggaat

SEQ ID NO: 6792 - DNA, 20 bp, Artificial Sequence
  Description of Artificial Sequence: Synthetic oligonucleotide
  Target: COL7A1; (+) strand; PAM type: NNGRRT; PAM sequence: GGGAGT
gcagcgtctctgagggagga

SEQ ID NO: 6793 - DNA, 20 bp, Artificial Sequence
  Description of Artificial Sequence: Synthetic oligonucleotide
  Target: COL7A1; (+) strand; PAM type: NNGRRT; PAM sequence: TGGGAT
gtctctgagggaggagggag

SEQ ID NO: 6794 - DNA, 20 bp, Artificial Sequence
  Description of Artificial Sequence: Synthetic oligonucleotide
  Target: COL7A1; (+) strand; PAM type: NNGRRT; PAM sequence: AGGAGT
gggattctgaagggggaggc

SEQ ID NO: 6795 - DNA, 20 bp, Artificial Sequence
  Description of Artificial Sequence: Synthetic oligonucleotide
  Target: COL7A1; (+) strand; PAM type: NNGRRT; PAM sequence: AAGGGT
caggagttctggggagaagc

SEQ ID NO: 6796 - DNA, 20 bp, Artificial Sequence
  Description of Artificial Sequence: Synthetic oligonucleotide
  Target: COL7A1; (+) strand; PAM type: NNGRRT; PAM sequence: GGGGGT
gggtctgcaagggaaggcat

SEQ ID NO: 6797 - DNA, 20 bp, Artificial Sequence
  Description of Artificial Sequence: Synthetic oligonucleotide
  Target: COL7A1; (+) strand; PAM type: NNGRRT; PAM sequence: TAGAGT
ccctgtgatgtctgtggcag

SEQ ID NO: 6798 - DNA, 20 bp, Artificial Sequence
  Description of Artificial Sequence: Synthetic oligonucleotide
  Target: COL7A1; (+) strand; PAM type: NNGRRT; PAM sequence: ACGGGT
gaaatccactggctccaggg

SEQ ID NO: 6799 - DNA, 20 bp, Artificial Sequence
  Description of Artificial Sequence: Synthetic oligonucleotide
  Target: COL7A1; (+) strand; PAM type: NNGRRT; PAM sequence: TGGAGT
cgcagccctggaacagcaag

SEQ ID NO: 6800 - DNA, 20 bp, Artificial Sequence
  Description of Artificial Sequence: Synthetic oligonucleotide
  Target: COL7A1; (+) strand; PAM type: NNGRRT; PAM sequence: AGGAGT
caagtggagtttccggctct

SEQ ID NO: 6801 - DNA, 20 bp, Artificial Sequence
  Description of Artificial Sequence: Synthetic oligonucleotide
  Target: COL7A1; (+) strand; PAM type: NNGRRT; PAM sequence: CAGAGT
tcagaagtcagaaccaggac

SEQ ID NO: 6802 - DNA, 20 bp, Artificial Sequence
  Description of Artificial Sequence: Synthetic oligonucleotide
  Target: COL7A1; (+) strand; PAM type: NNGRRT; PAM sequence: TCGAAT
cagcctgaacgtcatccaag

SEQ ID NO: 6803 - DNA, 20 bp, Artificial Sequence
  Description of Artificial Sequence: Synthetic oligonucleotide
  Target: COL7A1; (+) strand; PAM type: NNGRRT; PAM sequence: CAGGGT
gtctgactcccaggaagcac

SEQ ID NO: 6804 - DNA, 20 bp, Artificial Sequence
  Description of Artificial Sequence: Synthetic oligonucleotide
  Target: COL7A1; (+) strand; PAM type: NNGRRT; PAM sequence: CAGGGT
tcaacccctaagagagaagt

SEQ ID NO: 6805 - DNA, 20 bp, Artificial Sequence
  Description of Artificial Sequence: Synthetic oligonucleotide
  Target: COL7A1; (+) strand; PAM type: NNGRRT; PAM sequence: AGGGGT
agaagtcagggtaggtgggc

SEQ ID NO: 6806 - DNA, 20 bp, Artificial Sequence
  Description of Artificial Sequence: Synthetic oligonucleotide
  Target: COL7A1; (+) strand; PAM type: NNGRRT; PAM sequence: AGGGAT
ggcaggggtcagaaagagac

SEQ ID NO: 6807 - DNA, 20 bp, Artificial Sequence
  Description of Artificial Sequence: Synthetic oligonucleotide
  Target: COL7A1; (+) strand; PAM type: NNGRRT; PAM sequence: CAGAGT
ggcagtgatggacagggacg

SEQ ID NO: 6808 - DNA, 20 bp, Artificial Sequence
  Description of Artificial Sequence: Synthetic oligonucleotide
  Target: COL7A1; (+) strand; PAM type: NNGRRT; PAM sequence: GGGGGT
cgcagagtgagaagggccat

SEQ ID NO: 6809 - DNA, 20 bp, Artificial Sequence
  Description of Artificial Sequence: Synthetic oligonucleotide
  Target: COL7A1; (+) strand; PAM type: NNGRRT; PAM sequence: GGGGAT
gtgagaagggccatgggggt

SEQ ID NO: 6810 - DNA, 20 bp, Artificial Sequence
  Description of Artificial Sequence: Synthetic oligonucleotide
  Target: COL7A1; (+) strand; PAM type: NNGRRT; PAM sequence: TGGGGT
gggccatgggggtggggatg

SEQ ID NO: 6811 - DNA, 20 bp, Artificial Sequence
  Description of Artificial Sequence: Synthetic oligonucleotide
  Target: COL7A1; (+) strand; PAM type: NNGRRT; PAM sequence: TGGGAT
ggtggtggggaccagagagc

SEQ ID NO: 6812 - DNA, 20 bp, Artificial Sequence
  Description of Artificial Sequence: Synthetic oligonucleotide
  Target: COL7A1; (+) strand; PAM type: NNGRRT; PAM sequence: GTGAGT
ctgggatatggctgaaaaaa

SEQ ID NO: 6813 - DNA, 20 bp, Artificial Sequence
  Description of Artificial Sequence: Synthetic oligonucleotide
  Target: COL7A1; (+) strand; PAM type: NNGRRT; PAM sequence: TAGGAT
gtgagtgcaagacaaggaca

SEQ ID NO: 6814 - DNA, 20 bp, Artificial Sequence
  Description of Artificial Sequence: Synthetic oligonucleotide
  Target: COL7A1; (+) strand; PAM type: NNGRRT; PAM sequence: AGGAGT
ggtcagggacactggaggac

SEQ ID NO: 6815 - DNA, 20 bp, Artificial Sequence
  Description of Artificial Sequence: Synthetic oligonucleotide
  Target: COL7A1; (+) strand; PAM type: NNGRRT; PAM sequence: TGGGAT
cactggaggacaggagtctg

SEQ ID NO: 6816 - DNA, 20 bp, Artificial Sequence
  Description of Artificial Sequence: Synthetic oligonucleotide
  Target: COL7A1; (+) strand; PAM type: NNGRRT; PAM sequence: TAGGAT
gtctgtgggatcttagcatg

SEQ ID NO: 6817 - DNA, 20 bp, Artificial Sequence
  Description of Artificial Sequence: Synthetic oligonucleotide
  Target: COL7A1; (+) strand; PAM type: NNGRRT; PAM sequence: AGGAGT
atcttagcatgtaggatgac

SEQ ID NO: 6818 - DNA, 20 bp, Artificial Sequence
  Description of Artificial Sequence: Synthetic oligonucleotide
  Target: COL7A1; (+) strand; PAM type: NNGRRT; PAM sequence: TGGGAT
gccattgacagacactgatg

SEQ ID NO: 6819 - DNA, 20 bp, Artificial Sequence
  Description of Artificial Sequence: Synthetic oligonucleotide
  Target: COL7A1; (+) strand; PAM type: NNGRRT; PAM sequence: CTGGAT
tgggatggcagaggtcagtg

SEQ ID NO: 6820 - DNA, 20 bp, Artificial Sequence
  Description of Artificial Sequence: Synthetic oligonucleotide
  Target: COL7A1; (+) strand; PAM type: NNGRRT; PAM sequence: TAGGGT
tggtgtacagtggtcaccac

SEQ ID NO: 6821 - DNA, 20 bp, Artificial Sequence
  Description of Artificial Sequence: Synthetic oligonucleotide
  Target: COL7A1; (+) strand; PAM type: NNGRRT; PAM sequence: GTGGAT
gctgtgcagaggtgaaagcc

SEQ ID NO: 6822 - DNA, 20 bp, Artificial Sequence
  Description of Artificial Sequence: Synthetic oligonucleotide
  Target: COL7A1; (+) strand; PAM type: NNGRRT; PAM sequence: TGGGGT
gcagaggtgaaagccgtgga

SEQ ID NO: 6823 - DNA, 20 bp, Artificial Sequence
  Description of Artificial Sequence: Synthetic oligonucleotide
  Target: COL7A1; (+) strand; PAM type: NNGRRT; PAM sequence: TGGGGT
ggggcagggaggagattggt

SEQ ID NO: 6824 - DNA, 20 bp, Artificial Sequence
  Description of Artificial Sequence: Synthetic oligonucleotide
  Target: COL7A1; (+) strand; PAM type: NNGRRT; PAM sequence: TAGGGT
agggaggagattggttgggg

SEQ ID NO: 6825 - DNA, 20 bp, Artificial Sequence
  Description of Artificial Sequence: Synthetic oligonucleotide
  Target: COL7A1; (+) strand; PAM type: NNGRRT; PAM sequence: ATGGAT
agtgccatcttgggaagcag

SEQ ID NO: 6826 - DNA, 20 bp, Artificial Sequence
  Description of Artificial Sequence: Synthetic oligonucleotide
  Target: COL7A1; (+) strand; PAM type: NNGRRT; PAM sequence: GGGGGT
ggaacttcagtgtgtgtggt

SEQ ID NO: 6827 - DNA, 20 bp, Artificial Sequence
  Description of Artificial Sequence: Synthetic oligonucleotide
  Target: COL7A1; (+) strand; PAM type: NNGRRT; PAM sequence: CTGGGT
ctggctgcgtccacctcacc

SEQ ID NO: 6828 - DNA, 20 bp, Artificial Sequence
  Description of Artificial Sequence: Synthetic oligonucleotide
  Target: COL7A1; (+) strand; PAM type: NNGRRT; PAM sequence: CTGGGT
ctgcgcacaatgatgcggta

SEQ ID NO: 6829 - DNA, 20 bp, Artificial Sequence
  Description of Artificial Sequence: Synthetic oligonucleotide
  Target: COL7A1; (+) strand; PAM type: NNGRRT; PAM sequence: AGGGGT
ccagtgggaaccacggttgc

SEQ ID NO: 6830 - DNA, 20 bp, Artificial Sequence
  Description of Artificial Sequence: Synthetic oligonucleotide
  Target: COL7A1; (+) strand; PAM type: NNGRRT; PAM sequence: CAGAGT
gccacctcgtggccctccag

SEQ ID NO: 6831 - DNA, 20 bp, Artificial Sequence
  Description of Artificial Sequence: Synthetic oligonucleotide
  Target: COL7A1; (+) strand; PAM type: NNGRRT; PAM sequence: TAGAGT
cgtggccctccagcagagtg

SEQ ID NO: 6832 - DNA, 20 bp, Artificial Sequence
  Description of Artificial Sequence: Synthetic oligonucleotide
  Target: COL7A1; (+) strand; PAM type: NNGRRT; PAM sequence: GCGGGT
tgcagcccatccaactggta

SEQ ID NO: 6833 - DNA, 20 bp, Artificial Sequence
  Description of Artificial Sequence: Synthetic oligonucleotide
  Target: COL7A1; (+) strand; PAM type: NNGRRT; PAM sequence: CAGGGT
gctccaagcctgcaagataa

SEQ ID NO: 6834 - DNA, 20 bp, Artificial Sequence
  Description of Artificial Sequence: Synthetic oligonucleotide
  Target: COL7A1; (+) strand; PAM type: NNGRRT; PAM sequence: GAGGAT
ggcaccaagttccaggaaag

SEQ ID NO: 6835 - DNA, 20 bp, Artificial Sequence
  Description of Artificial Sequence: Synthetic oligonucleotide
  Target: COL7A1; (+) strand; PAM type: NNGRRT; PAM sequence: ATGGAT
ccaagttccaggaaaggagg

SEQ ID NO: 6836 - DNA, 20 bp, Artificial Sequence
  Description of Artificial Sequence: Synthetic oligonucleotide
  Target: COL7A1; (+) strand; PAM type: NNGRRT; PAM sequence: CAGGAT
aggaggatggatgtggggcc

SEQ ID NO: 6837 - DNA, 20 bp, Artificial Sequence
  Description of Artificial Sequence: Synthetic oligonucleotide
  Target: COL7A1; (+) strand; PAM type: NNGRRT; PAM sequence: CAGGGT
gggcccaggatgaccgggcg

SEQ ID NO: 6838 - DNA, 20 bp, Artificial Sequence
  Description of Artificial Sequence: Synthetic oligonucleotide
  Target: COL7A1; (+) strand; PAM type: NNGRRT; PAM sequence: TGGGAT
aagcgtctgcccagggcaca

SEQ ID NO: 6839 - DNA, 20 bp, Artificial Sequence
  Description of Artificial Sequence: Synthetic oligonucleotide
  Target: COL7A1; (+) strand; PAM type: NNGRRT; PAM sequence: TAGGGT
ggccccacactgcggccaaa

SEQ ID NO: 6840 - DNA, 20 bp, Artificial Sequence
  Description of Artificial Sequence: Synthetic oligonucleotide
  Target: COL7A1; (+) strand; PAM type: NNGRRT; PAM sequence: CTGGAT
aggctgtgggctgtggtatt

SEQ ID NO: 6841 - DNA, 20 bp, Artificial Sequence
  Description of Artificial Sequence: Synthetic oligonucleotide
  Target: COL7A1; (+) strand; PAM type: NNGRRT; PAM sequence: GAGAGT
cccttctagggcagctgggg

SEQ ID NO: 6842 - DNA, 20 bp, Artificial Sequence
  Description of Artificial Sequence: Synthetic oligonucleotide
  Target: COL7A1; (+) strand; PAM type: NNGRRT; PAM sequence: AGGGAT
agctgggggagagtcccacc

SEQ ID NO: 6843 - DNA, 20 bp, Artificial Sequence
  Description of Artificial Sequence: Synthetic oligonucleotide
  Target: COL7A1; (+) strand; PAM type: NNGRRT; PAM sequence: TGGAGT
agagtcccaccagggattca

SEQ ID NO: 6844 - DNA, 20 bp, Artificial Sequence
  Description of Artificial Sequence: Synthetic oligonucleotide
  Target: COL7A1; (+) strand; PAM type: NNGRRT; PAM sequence: GGGGGT
tcatggagtcagaagtggga

SEQ ID NO: 6845 - DNA, 20 bp, Artificial Sequence
  Description of Artificial Sequence: Synthetic oligonucleotide
  Target: COL7A1; (+) strand; PAM type: NNGRRT; PAM sequence: TGGGGT
tcagaagtgggagggggtac

SEQ ID NO: 6846 - DNA, 20 bp, Artificial Sequence
  Description of Artificial Sequence: Synthetic oligonucleotide
  Target: COL7A1; (+) strand; PAM type: NNGRRT; PAM sequence: GGGGGT
tgggagggggtactggggtc

SEQ ID NO: 6847 - DNA, 20 bp, Artificial Sequence
  Description of Artificial Sequence: Synthetic oligonucleotide
  Target: COL7A1; (+) strand; PAM type: NNGRRT; PAM sequence: GTGAAT
gtactggggtcgggggttag

SEQ ID NO: 6848 - DNA, 20 bp, Artificial Sequence
  Description of Artificial Sequence: Synthetic oligonucleotide
  Target: COL7A1; (+) strand; PAM type: NNGRRT; PAM sequence: TGGGGT
ggggtcgggggttaggtgaa

SEQ ID NO: 6849 - DNA, 20 bp, Artificial Sequence
  Description of Artificial Sequence: Synthetic oligonucleotide
  Target: COL7A1; (+) strand; PAM type: NNGRRT; PAM sequence: CAGAAT
tgaatggggtcagaggctgg

SEQ ID NO: 6850 - DNA, 20 bp, Artificial Sequence
  Description of Artificial Sequence: Synthetic oligonucleotide
  Target: COL7A1; (+) strand; PAM type: NNGRRT; PAM sequence: AGGAGT
ggctgtcccagccccgtcag

SEQ ID NO: 6851 - DNA, 20 bp, Artificial Sequence
  Description of Artificial Sequence: Synthetic oligonucleotide
  Target: COL7A1; (+) strand; PAM type: NNGRRT; PAM sequence: AAGGAT
ccgctgtccactgtactctc

SEQ ID NO: 6852 - DNA, 20 bp, Artificial Sequence
  Description of Artificial Sequence: Synthetic oligonucleotide
  Target: COL7A1; (+) strand; PAM type: NNGRRT; PAM sequence: TCGAGT
caggtctcgtggagcagagg

SEQ ID NO: 6853 - DNA, 20 bp, Artificial Sequence
  Description of Artificial Sequence: Synthetic oligonucleotide
  Target: COL7A1; (+) strand; PAM type: NNGRRT; PAM sequence: GGGAAT
cagaggtcgagtcatccgct

SEQ ID NO: 6854 - DNA, 20 bp, Artificial Sequence
  Description of Artificial Sequence: Synthetic oligonucleotide
  Target: COL7A1; (+) strand; PAM type: NNGRRT; PAM sequence: CGGGAT
cgagtcatccgctgggaatg

SEQ ID NO: 6855 - DNA, 20 bp, Artificial Sequence
  Description of Artificial Sequence: Synthetic oligonucleotide
  Target: COL7A1; (+) strand; PAM type: NNGRRT; PAM sequence: GGGGAT
ccgctgggaatgcgggatca

SEQ ID NO: 6856 - DNA, 20 bp, Artificial Sequence
  Description of Artificial Sequence: Synthetic oligonucleotide
  Target: COL7A1; (+) strand; PAM type: NNGRRT; PAM sequence: GAGGAT
gggatcaggggatcaggcag

SEQ ID NO: 6857 - DNA, 20 bp, Artificial Sequence
  Description of Artificial Sequence: Synthetic oligonucleotide
  Target: COL7A1; (+) strand; PAM type: NNGRRT; PAM sequence: TGGGGT
aggggatcaggcaggaggat

SEQ ID NO: 6858 - DNA, 20 bp, Artificial Sequence
  Description of Artificial Sequence: Synthetic oligonucleotide
  Target: COL7A1; (+) strand; PAM type: NNGRRT; PAM sequence: CAGAGT
tggggtgggcatgtatgatg

SEQ ID NO: 6859 - DNA, 20 bp, Artificial Sequence
  Description of Artificial Sequence: Synthetic oligonucleotide
  Target: COL7A1; (+) strand; PAM type: NNGRRT; PAM sequence: TGGGGT
gggcatgtatgatgcagagt

SEQ ID NO: 6860 - DNA, 20 bp, Artificial Sequence
  Description of Artificial Sequence: Synthetic oligonucleotide
  Target: COL7A1; (+) strand; PAM type: NNGRRT; PAM sequence: CGGGGT
gtatgatgcagagttggggt

SEQ ID NO: 6861 - DNA, 20 bp, Artificial Sequence
  Description of Artificial Sequence: Synthetic oligonucleotide
  Target: COL7A1; (+) strand; PAM type: NNGRRT; PAM sequence: TAGGAT
gggtcggggtcaggagcaca

SEQ ID NO: 6862 - DNA, 20 bp, Artificial Sequence
  Description of Artificial Sequence: Synthetic oligonucleotide
  Target: COL7A1; (+) strand; PAM type: NNGRRT; PAM sequence: TGGAAT
ggggtcaggagcacatagga

SEQ ID NO: 6863 - DNA, 20 bp, Artificial Sequence
  Description of Artificial Sequence: Synthetic oligonucleotide
  Target: COL7A1; (+) strand; PAM type: NNGRRT; PAM sequence: GGGGAT
tggaatcagcactgccaagt

SEQ ID NO: 6864 - DNA, 20 bp, Artificial Sequence
  Description of Artificial Sequence: Synthetic oligonucleotide
  Target: COL7A1; (+) strand; PAM type: NNGRRT; PAM sequence: TGGGGT
cagcactgccaagtggggat

SEQ ID NO: 6865 - DNA, 20 bp, Artificial Sequence
  Description of Artificial Sequence: Synthetic oligonucleotide
  Target: COL7A1; (+) strand; PAM type: NNGRRT; PAM sequence: CGGGGT
gccaagtggggattggggtc

SEQ ID NO: 6866 - DNA, 20 bp, Artificial Sequence
  Description of Artificial Sequence: Synthetic oligonucleotide
  Target: COL7A1; (+) strand; PAM type: NNGRRT; PAM sequence: CAGGGT
ttggggtccggggtctaggt

SEQ ID NO: 6867 - DNA, 20 bp, Artificial Sequence
  Description of Artificial Sequence: Synthetic oligonucleotide
  Target: COL7A1; (+) strand; PAM type: NNGRRT; PAM sequence: TCGGGT
gtgggcaggaactcacgagg

SEQ ID NO: 6868 - DNA, 20 bp, Artificial Sequence
  Description of Artificial Sequence: Synthetic oligonucleotide
  Target: COL7A1; (+) strand; PAM type: NNGRRT; PAM sequence: CAGGGT
ggcaactcgcttcagctcct

SEQ ID NO: 6869 - DNA, 20 bp, Artificial Sequence
  Description of Artificial Sequence: Synthetic oligonucleotide
  Target: COL7A1; (+) strand; PAM type: NNGRRT; PAM sequence: CAGGAT
tgggacttcccgtctgtgat

SEQ ID NO: 6870 - DNA, 20 bp, Artificial Sequence
  Description of Artificial Sequence: Synthetic oligonucleotide
  Target: COL7A1; (+) strand; PAM type: NNGRRT; PAM sequence: AGGGGT
tgcagacctgggacaggtgc

SEQ ID NO: 6871 - DNA, 20 bp, Artificial Sequence
  Description of Artificial Sequence: Synthetic oligonucleotide
  Target: COL7A1; (+) strand; PAM type: NNGRRT; PAM sequence: TGGGGT
gttcccctggacacttcatt

SEQ ID NO: 6872 - DNA, 20 bp, Artificial Sequence
  Description of Artificial Sequence: Synthetic oligonucleotide
  Target: COL7A1; (+) strand; PAM type: NNGRRT; PAM sequence: AGGGGT
gtcatcttgggaggcatggt

SEQ ID NO: 6873 - DNA, 20 bp, Artificial Sequence
  Description of Artificial Sequence: Synthetic oligonucleotide
  Target: COL7A1; (+) strand; PAM type: NNGRRT; PAM sequence: AGGGAT
ttgggaggcatggtaggggt

SEQ ID NO: 6874 - DNA, 20 bp, Artificial Sequence
  Description of Artificial Sequence: Synthetic oligonucleotide
  Target: COL7A1; (+) strand; PAM type: NNGRRT; PAM sequence: GAGAAT
aagacatggtcagccacatg

SEQ ID NO: 6875 - DNA, 20 bp, Artificial Sequence
  Description of Artificial Sequence: Synthetic oligonucleotide
  Target: COL7A1; (+) strand; PAM type: NNGRRT; PAM sequence: GCGAGT
tggagaattgcagcccctgt

SEQ ID NO: 6876 - DNA, 20 bp, Artificial Sequence
  Description of Artificial Sequence: Synthetic oligonucleotide
  Target: COL7A1; (+) strand; PAM type: NNGRRT; PAM sequence: ACGGAT
ccccccttgtagctaagctc

SEQ ID NO: 6877 - DNA, 20 bp, Artificial Sequence
  Description of Artificial Sequence: Synthetic oligonucleotide
  Target: COL7A1; (+) strand; PAM type: NNGRRT; PAM sequence: GCGGAT
tagctaagctcacggatggc

SEQ ID NO: 6878 - DNA, 20 bp, Artificial Sequence
  Description of Artificial Sequence: Synthetic oligonucleotide
  Target: COL7A1; (+) strand; PAM type: NNGRRT; PAM sequence: GAGGGT
ggccgaactctgtcctgttg

SEQ ID NO: 6879 - DNA, 20 bp, Artificial Sequence
  Description of Artificial Sequence: Synthetic oligonucleotide
  Target: COL7A1; (+) strand; PAM type: NNGRRT; PAM sequence: AGGGGT
actctgtcctgttggagggt

SEQ ID NO: 6880 - DNA, 20 bp, Artificial Sequence
  Description of Artificial Sequence: Synthetic oligonucleotide
  Target: COL7A1; (+) strand; PAM type: NNGRRT; PAM sequence: CAGGAT
ggtggcaacaggctaggact

SEQ ID NO: 6881 - DNA, 20 bp, Artificial Sequence
  Description of Artificial Sequence: Synthetic oligonucleotide
  Target: COL7A1; (+) strand; PAM type: NNGRRT; PAM sequence: TAGGGT
cctggccttgaggaggcctc

SEQ ID NO: 6882 - DNA, 20 bp, Artificial Sequence
  Description of Artificial Sequence: Synthetic oligonucleotide
  Target: COL7A1; (+) strand; PAM type: NNGRRT; PAM sequence: GAGGGT
cttgaggaggcctctagggt

SEQ ID NO: 6883 - DNA, 20 bp, Artificial Sequence
  Description of Artificial Sequence: Synthetic oligonucleotide
  Target: COL7A1; (+) strand; PAM type: NNGRRT; PAM sequence: ACGGGT
aggcctctagggtgagggtt

SEQ ID NO: 6884 - DNA, 20 bp, Artificial Sequence
  Description of Artificial Sequence: Synthetic oligonucleotide
  Target: COL7A1; (+) strand; PAM type: NNGRRT; PAM sequence: AGGGGT
acgggtatcaggctctcttg

SEQ ID NO: 6885 - DNA, 20 bp, Artificial Sequence
  Description of Artificial Sequence: Synthetic oligonucleotide
  Target: COL7A1; (+) strand; PAM type: NNGRRT; PAM sequence: AGGGGT
aattaaataattgcaggagg

SEQ ID NO: 6886 - DNA, 20 bp, Artificial Sequence
  Description of Artificial Sequence: Synthetic oligonucleotide
  Target: COL7A1; (+) strand; PAM type: NNGRRT; PAM sequence: GTGGAT
aggggtccagatgtaggaaa

SEQ ID NO: 6887 - DNA, 20 bp, Artificial Sequence
  Description of Artificial Sequence: Synthetic oligonucleotide
  Target: COL7A1; (+) strand; PAM type: NNGRRT; PAM sequence: AAGGGT
cacctctggtgaacggctgc

SEQ ID NO: 6888 - DNA, 20 bp, Artificial Sequence
  Description of Artificial Sequence: Synthetic oligonucleotide
  Target: COL7A1; (+) strand; PAM type: NNGRRT; PAM sequence: GAGAAT
ggttagagggctagaacgtg

SEQ ID NO: 6889 - DNA, 20 bp, Artificial Sequence
  Description of Artificial Sequence: Synthetic oligonucleotide
  Target: COL7A1; (+) strand; PAM type: NNGRRT; PAM sequence: GGGAAT
gggcacgaaggttctaccta

SEQ ID NO: 6890 - DNA, 20 bp, Artificial Sequence
  Description of Artificial Sequence: Synthetic oligonucleotide
  Target: COL7A1; (+) strand; PAM type: NNGRRT; PAM sequence: GGGGGT
tccaaaggaggtcctggcta

SEQ ID NO: 6891 - DNA, 20 bp, Artificial Sequence
  Description of Artificial Sequence: Synthetic oligonucleotide
  Target: COL7A1; (+) strand; PAM type: NNGRRT; PAM sequence: TGGGGT
gtttctgcaaagacctggcc

SEQ ID NO: 6892 - DNA, 20 bp, Artificial Sequence
  Description of Artificial Sequence: Synthetic oligonucleotide
  Target: COL7A1; (+) strand; PAM type: NNGRRT; PAM sequence: CAGGGT
aagacctggcctggggtttc

SEQ ID NO: 6893 - DNA, 20 bp, Artificial Sequence
  Description of Artificial Sequence: Synthetic oligonucleotide
  Target: COL7A1; (+) strand; PAM type: NNGRRT; PAM sequence: AGGAGT
gtctcctccctctctgggga

SEQ ID NO: 6894 - DNA, 20 bp, Artificial Sequence
  Description of Artificial Sequence: Synthetic oligonucleotide
  Target: COL7A1; (+) strand; PAM type: NNGRRT; PAM sequence: GGGGAT
tctggggaaggagtcttggt

SEQ ID NO: 6895 - DNA, 20 bp, Artificial Sequence
  Description of Artificial Sequence: Synthetic oligonucleotide
  Target: COL7A1; (+) strand; PAM type: NNGRRT; PAM sequence: GTGGGT
ccccagggcccctactcacc

SEQ ID NO: 6896 - DNA, 20 bp, Artificial Sequence
  Description of Artificial Sequence: Synthetic oligonucleotide
  Target: COL7A1; (+) strand; PAM type: NNGRRT; PAM sequence: ATGGAT
cgcggaaattgctgcggcca

SEQ ID NO: 6897 - DNA, 20 bp, Artificial Sequence
  Description of Artificial Sequence: Synthetic oligonucleotide
  Target: COL7A1; (+) strand; PAM type: NNGRRT; PAM sequence: TGGGAT
acggtggcctcactgggact

SEQ ID NO: 6898 - DNA, 20 bp, Artificial Sequence
  Description of Artificial Sequence: Synthetic oligonucleotide
  Target: COL7A1; (+) strand; PAM type: NNGRRT; PAM sequence: GAGAGT
ctgggacttgggatggtggg

SEQ ID NO: 6899 - DNA, 20 bp, Artificial Sequence
  Description of Artificial Sequence: Synthetic oligonucleotide
  Target: COL7A1; (+) strand; PAM type: NNGRRT; PAM sequence: CCGAAT
tcatcttatgcaaaccaggg

SEQ ID NO: 6900 - DNA, 20 bp, Artificial Sequence
  Description of Artificial Sequence: Synthetic oligonucleotide
  Target: COL7A1; (+) strand; PAM type: NNGRRT; PAM sequence: GGGAGT
ctgagcctgagggccttgga

SEQ ID NO: 6901 - DNA, 20 bp, Artificial Sequence
  Description of Artificial Sequence: Synthetic oligonucleotide
  Target: COL7A1; (+) strand; PAM type: NNGRRT; PAM sequence: GTGGGT
cttggagggagttgagctcg

SEQ ID NO: 6902 - DNA, 20 bp, Artificial Sequence
  Description of Artificial Sequence: Synthetic oligonucleotide
  Target: COL7A1; (+) strand; PAM type: NNGRRT; PAM sequence: GAGGGT
tcccagagcagactcccgcg

SEQ ID NO: 6903 - DNA, 20 bp, Artificial Sequence
  Description of Artificial Sequence: Synthetic oligonucleotide
  Target: COL7A1; (+) strand; PAM type: NNGRRT; PAM sequence: GGGGGT
gcagactcccgcggagggtt

SEQ ID NO: 6904 - DNA, 20 bp, Artificial Sequence
  Description of Artificial Sequence: Synthetic oligonucleotide
  Target: COL7A1; (+) strand; PAM type: NNGRRT; PAM sequence: GAGAGT
ttgggggtgtgcgggggagg

SEQ ID NO: 6905 - DNA, 20 bp, Artificial Sequence
  Description of Artificial Sequence: Synthetic oligonucleotide
  Target: COL7A1; (+) strand; PAM type: NNGRRT; PAM sequence: ACGGGT
ggggagggagagtcgccagc

SEQ ID NO: 6906 - DNA, 20 bp, Artificial Sequence
  Description of Artificial Sequence: Synthetic oligonucleotide
  Target: COL7A1; (+) strand; PAM type: NNGRRT; PAM sequence: GTGGAT
gtcagcctctaggggccggc

SEQ ID NO: 6907 - DNA, 20 bp, Artificial Sequence
  Description of Artificial Sequence: Synthetic oligonucleotide
  Target: COL7A1; (+) strand; PAM type: NNGRRT; PAM sequence: CAGAAT
cccgcacgcatccagggagc

SEQ ID NO: 6908 - DNA, 20 bp, Artificial Sequence
  Description of Artificial Sequence: Synthetic oligonucleotide
  Target: COL7A1; (+) strand; PAM type: NNGRRT; PAM sequence: TTGGGT
cgcatccagggagccagaat

SEQ ID NO: 6909 - DNA, 20 bp, Artificial Sequence
  Description of Artificial Sequence: Synthetic oligonucleotide
  Target: COL7A1; (+) strand; PAM type: NNGRRT; PAM sequence: CAGGAT
agccagaatttgggtaggaa

(The sequence listing continues in the following parts.)

1. A method for editing a Collagen Type VII Alpha 1 Chain (COL7A1) gene in a cell by genome editing comprising: introducing into the cell one or more deoxyribonucleic acid (DNA) endonucleases to effect one or more single-strand breaks (SSBs) or double-strand breaks (DSBs) within or near the COL7A1 gene or COL7A1 regulatory elements that results in a permanent correction of one or more mutations or replacement of one or more exons and/or introns within or near the COL7A1 gene, thereby restoring the COL7A1 protein activity.

2. A method for editing a Collagen Type VII Alpha 1 Chain (COL7A1) gene in a cell by genome editing comprising: introducing into the cell one or more deoxyribonucleic acid (DNA) endonucleases to effect one or more single-strand breaks (SSBs) or double-strand breaks (DSBs) within or near the COL7A1 gene or COL7A1 regulatory elements that results in a permanent insertion of one or more exons and/or introns within or near the COL7A1 gene, wherein the one or more exons and/or introns comprise the corrected COL7A1 gene sequence, thereby restoring expression of the corrected COL7A1 transcript.

3. An ex vivo method for treating a patient having a COL7A1 related condition or disorder comprising:
editing a keratinocyte or fibroblast within or near a Collagen Type VII Alpha 1 Chain (COL7A1) gene or other DNA sequences that encode regulatory elements of the COL7A1 gene; and
implanting the edited keratinocyte or fibroblast into the patient.

4. The method of claim 3, wherein the editing step comprises introducing into the keratinocyte or fibroblast one or more deoxyribonucleic acid (DNA) endonucleases to effect one or more single-strand breaks (SSBs) or double-strand breaks (DSBs) within or near the COL7A1 gene or COL7A1 regulatory elements that results in a permanent correction of one or more mutations or replacement of one or more exons and/or introns within or near the COL7A1 gene, thereby restoring the COL7A1 protein activity.

5. The method of claim 3, wherein the editing step comprises introducing into the keratinocyte or fibroblast one or more deoxyribonucleic acid (DNA) endonucleases to effect one or more single-strand breaks (SSBs) or double-strand breaks (DSBs) within or near the COL7A1 gene or COL7A1 regulatory elements that results in a permanent insertion of one or more exons and/or introns within or near the COL7A1 gene, wherein the one or more exons and/or introns comprise the corrected COL7A1 gene sequence, thereby restoring expression of the corrected COL7A1 transcript.

6. The method of claims 3-5, further comprising: isolating the keratinocyte or fibroblast from the patient.

7. The method of claims 3-6, wherein the implanting comprises culturing the keratinocyte or fibroblast to form sheets of skin and implanting the skin grafts onto the patient's skin.

8. An ex vivo method for treating a patient having a COL7A1 related condition or disorder comprising:
editing a patient specific induced pluripotent stem cell (iPSC) within or near a Collagen Type VII Alpha 1 Chain (COL7A1) gene or other DNA sequences that encode regulatory elements of the COL7A1 gene;
differentiating the edited iPSC into a keratinocyte or fibroblast; and
implanting the keratinocyte or fibroblast into the patient.

9. The method of claim 8, wherein the editing step comprises introducing into the iPSC one or more deoxyribonucleic acid (DNA) endonucleases to effect one or more single-strand breaks (SSBs) or double-strand breaks (DSBs) within or near the COL7A1 gene or COL7A1 regulatory elements that results in a permanent correction of one or more mutations or replacement of one or more exons and/or introns within or near the COL7A1 gene, thereby restoring the COL7A1 protein activity.

10. The method of claim 8, wherein the editing step comprises introducing into the iPSC one or more deoxyribonucleic acid (DNA) endonucleases to effect one or more single-strand breaks (SSBs) or double-strand breaks (DSBs) within or near the COL7A1 gene or COL7A1 regulatory elements that results in a permanent insertion of one or more exons and/or introns within or near the COL7A1 gene, wherein the one or more exons and/or introns comprise the corrected COL7A1 gene sequence, thereby restoring expression of the corrected COL7A1 transcript.

11. The method of claims 8-10, further comprising:
creating the iPSC, wherein the creating step comprises:
isolating a somatic cell from the patient; and
introducing a set of pluripotency-associated genes into the somatic cell to induce the somatic cell to become the iPSC.

12. The method of claim 11, wherein the somatic cell is a fibroblast.

13. The method of claim 11, wherein the set of pluripotency-associated genes is one or more of the genes selected from the group consisting of: OCT4, SOX2, KLF4, Lin28, NANOG and cMYC.

14. The method of claims 8-13, wherein the implanting comprises culturing the keratinocyte or fibroblast to form sheets of skin and implanting the skin grafts onto the patient's skin.

15. An ex vivo method for treating a patient having a COL7A1 related condition or disorder comprising:
editing a CD34+ cell within or near a Collagen Type VII Alpha 1 Chain (COL7A1) gene or other DNA sequences that encode regulatory elements of the COL7A1 gene; and
implanting the edited CD34+ cell into the patient.

16. The method of claim 15, wherein the editing step comprises introducing into the CD34+ cell one or more deoxyribonucleic acid (DNA) endonucleases to effect one or more single-strand breaks (SSBs) or double-strand breaks (DSBs) within or near the COL7A1 gene or COL7A1 regulatory elements that results in a permanent correction of one or more mutations or replacement of one or more exons and/or introns within or near the COL7A1 gene, thereby restoring the COL7A1 protein activity.

17. The method of claim 15, wherein the editing step comprises introducing into the CD34+ cell one or more deoxyribonucleic acid (DNA) endonucleases to effect one or more single-strand breaks (SSBs) or double-strand breaks (DSBs) within or near the COL7A1 gene or COL7A1 regulatory elements that results in a permanent insertion of one or more exons and/or introns within or near the COL7A1 gene, wherein the one or more exons and/or introns comprise the corrected COL7A1 gene sequence, thereby restoring expression of the corrected COL7A1 transcript.

18. The method of any one of claims 15-17, wherein the CD34+ cell is a hematopoietic progenitor cell.

19. The method of any one of claims 15-18, further comprising: isolating a CD34+ cell from the patient.

20. The method of claims 15-19, wherein the method further comprises treating the patient with granulocyte colony stimulating factor (GCSF) prior to the isolating step.

21. The method of claim 20, wherein the treating step is performed in combination with Plerixaflor.

22. An ex vivo method for treating a patient having a COL7A1 related condition or disorder comprising:
editing a mesenchymal stem cell within or near a Collagen Type VII Alpha 1 Chain (COL7A1) gene or other DNA sequences that encode regulatory elements of the COL7A1 gene;
differentiating the edited mesenchymal stem cell into a keratinocyte or fibroblast; and
implanting the keratinocyte or fibroblast into the patient.

23. The method of claim 22, wherein the editing step comprises introducing into the mesenchymal stem cell one or more deoxyribonucleic acid (DNA) endonucleases to effect one or more single-strand breaks (SSBs) or double-strand breaks (DSBs) within or near the COL7A1 gene or COL7A1 regulatory elements that results in a permanent correction of one or more mutations or replacement of one or more exons and/or introns within or near the COL7A1 gene, thereby restoring the COL7A1 protein activity.

24. The method of claim 22, wherein the editing step comprises introducing into the mesenchymal stem cell one or more deoxyribonucleic acid (DNA) endonucleases to effect one or more single-strand breaks (SSBs) or double-strand breaks (DSBs) within or near the COL7A1 gene or COL7A1 regulatory elements that results in a permanent insertion of one or more exons and/or introns within or near the COL7A1 gene, wherein the one or more exons and/or introns comprise the corrected COL7A1 gene sequence, thereby restoring expression of the corrected COL7A1 transcript.

25. The method of claims 22-24, further comprising: isolating the mesenchymal stem cell from the patient, wherein the mesenchymal stem cell is isolated from the patient's bone marrow or peripheral blood.

26. The method of claim 25, wherein the isolating step comprises: aspiration of bone marrow and isolation of mesenchymal cells using density gradient centrifugation media.

27. The method of claims 22-25, wherein the implanting step comprises culturing the keratinocyte or fibroblast to form sheets of skin and implanting the skin grafts onto the patient's skin.

28. An in vivo method for treating a patient with a COL7A1 related disorder comprising: editing the Collagen Type VII Alpha 1 Chain (COL7A1) gene in a cell of the patient.

29. The method of claim 28, wherein the editing step comprises introducing into the cell one or more deoxyribonucleic acid (DNA) endonucleases to effect one or more single-strand breaks (SSBs) or double-strand breaks (DSBs) within or near the COL7A1 gene or COL7A1 regulatory elements that results in a permanent correction of one or more mutations or replacement of one or more exons and/or introns within or near the COL7A1 gene, thereby restoring the COL7A1 protein activity.

30. The method of claim 28, wherein the editing step comprises: introducing into the cell one or more deoxyribonucleic acid (DNA) endonucleases to effect one or more single-strand breaks (SSBs) or double-strand breaks (DSBs) within or near the COL7A1 gene or COL7A1 regulatory elements that results in a permanent insertion of one or more exons and/or introns within or near the COL7A1 gene, wherein the one or more exons and/or introns comprise the corrected COL7A1 gene sequence, thereby restoring expression of the corrected COL7A1 transcript.

31. The method of any one of claims 28-30, wherein the cell is a keratinocyte or fibroblast.

32. The method of claim 31, wherein the one or more deoxyribonucleic acid (DNA) endonuclease is delivered to the keratinocyte or fibroblast by intradermal injection.

33. The method of any one of claim 3, 8, 15, 22, or 28 wherein the COL7A1 related condition or disorder is Dystrophic Epidermolysis Bullosa (DEB).

34. A method of altering the contiguous genomic sequence of a COL7A1 gene in a cell comprising: contacting the cell with one or more deoxyribonucleic acid (DNA) endonuclease to effect one or more single-strand breaks (SSBs) or double-strand breaks (DSBs).

35. The method of claim 34, wherein the alteration of the contiguous genomic sequence occurs in exon 1, intron 1, exon 2, intron 2, exon 3, intron 3, exon 4, intron 4, exon 5, intron 5, exon 6, intron 6, exon 7, intron 7, exon 8, intron 8, exon 9, intron 9, exon 10, intron 10, exon 11, intron 11, exon 12, intron 12, exon 13, intron 13, exon 14, intron 14, exon 15, intron 15, exon 16, intron 16, exon 17, intron 17, exon 18, intron 18, exon 19, intron 19, exon 20, intron 20, exon 21, intron 21, exon 22, intron 22, exon 23, intron 23, exon 24, intron 24, exon 25, intron 25, exon 26, intron 26, exon 27, intron 27, exon 28, intron 28, exon 29, intron 29, exon 30, intron 30, exon 31, intron 31, exon 32, intron 32, exon 33, intron 33, exon 34, intron 34, exon 35, intron 35, exon 36, intron 36, exon 37, intron 37, exon 38, intron 38, exon 39, intron 39, exon 40, intron 40, exon 41, intron 41, exon 42, intron 42, exon 43, intron 43, exon 44, intron 44, exon 45, intron 45, exon 46, intron 46, exon 47, intron 47, exon 48, intron 48, exon 49, intron 49, exon 50, intron 50, exon 51, intron 51, exon 52, intron 52, exon 53, intron 53, exon 54, intron 54, exon 55, intron 55, exon 56, intron 56, exon 57, intron 57, exon 58, intron 58, exon 59, intron 59, exon 60, intron 60, exon 61, intron 61, exon 62, intron 62, exon 63, intron 63, exon 64, intron 64, exon 65, intron 65, exon 66, intron 66, exon 67, intron 67, exon 68, intron 68, exon 69, intron 69, exon 70, intron 70, exon 71, intron 71, exon 72, intron 72, exon 73, intron 73, exon 74, intron 74, exon 75, intron 75, exon 76, intron 76, exon 77, intron 77, exon 78, intron 78, exon 79, intron 79, exon 80, intron 80, exon 81, intron 81, exon 82, intron 82, exon 83, intron 83, exon 84, intron 84, exon 85, intron 85, exon 86, intron 86, exon 87, intron 87, exon 88, intron 88, exon 89, intron 89, exon 90, intron 90, exon 91, intron 91, exon 92, intron 92, exon 93, intron 93, exon 94, intron 94, exon 95, intron 95, exon 96, intron 96, exon 97, intron 97, exon 98, intron 98, exon 99, intron 99, exon 100, intron 100, exon 101, intron 101, exon 102, intron 102, exon 103, intron 103, exon 104, intron 104, exon 105, intron 105, exon 106, intron 106, exon 107, intron 107, exon 108, intron 108, exon 109, intron 109, exon 110, intron 110, exon 111, intron 111, exon 112, intron 112, exon 113, intron 113, exon 114, intron 114, exon 115, intron 115, exon 116, intron 116, exon 117, intron 117, exon 118, intron 118, exon 119, intron 119, exon 120, intron 120, exon 121, intron 121, exon 122, intron 122, exon 123, intron 123, exon 124, intron 124, exon 125, intron 125, exon 126, intron 126, exon 127, intron 127, exon 128, intron 128, exon 129, intron 129, exon 130, intron 130, exon 131, intron 131, exon 132, intron 132, exon 133, intron 133, exon 134, intron 134, exon 135, intron 135, exon 136, intron 136, exon 137, intron 137, exon 138, intron 138, exon 139, intron 139, exon 140, intron 140, exon 141, intron 141, exon 142, intron 142, exon 143, intron 143, exon 144, intron 144, exon 145, intron 145, exon 146, intron 146, exon 147, intron 147, exon 148, intron 148, exon 149, intron 149, exon 150, intron 150, exon 151, intron 151, exon 152, intron 152, exon 153, intron 153, exon 154, intron 154, exon 155, intron 155, exon 156, intron 156, exon 157, intron 157, exon 158, intron 158, exon 159, intron 159, exon 160, intron 160, exon 161, intron 161, exon 162, intron 162, exon 163, intron 163, exon 164, intron 164, exon 165, intron 165, exon 166, intron 166, exon 167, intron 167, exon 168, intron 168, exon 169, intron 169, exon 170, intron 170, exon 171, intron 171, exon 172, intron 172, exon 173, intron 173, exon 174, intron 174, exon 175, intron 175, exon 176, intron 176, exon 177, intron 177, exon 178, intron 178, exon 179, intron 179, exon 180, intron 180, exon 181, intron 181, exon 182, intron 182, exon 183, intron 183, exon 184, intron 184, exon 185, intron 185, exon 186, intron 186, exon 187, intron 187, exon 188, intron 188, exon 189, intron 189, exon 190, intron 190, exon 191, intron 191, exon 192, intron 192, exon 193, intron 193, exon 194, intron 194, exon 195, intron 195, exon 196, intron 196, exon 197, intron 197, exon 198, intron 198, exon 199, intron 199, exon 200, intron 200, exon 201, intron 201, exon 202, intron 202, exon 203, intron 203, exon 204, intron 204, exon 205, intron 205, exon 206, intron 206, exon 207, intron 207, exon 208, intron 208, exon 209, intron 209, exon 210, intron 210, exon 211, intron 211, exon 212, intron 212, exon 213, intron 213, exon 214, intron 214, exon 215, intron 215, exon 216, intron 216, exon 217, intron 217, or exon 218 of the COL7A1 gene.

36. The method of claim 35, wherein the alteration results in a permanent correction of one or more mutations or replacement of one or more exons and/or introns within or near the COL7A1 gene, thereby restoring the COL7A1 protein activity.

37. The method of claim 35, wherein the alteration results in a permanent insertion of one or more exons and/or introns of the COL7A1 gene, wherein the one or more exons and/or introns comprise the corrected COL7A1 gene sequence, thereby restoring expression of the corrected COL7A1 transcript.

38. The method of claim 37, wherein the permanent insertion of one or more exons and/or introns of the COL7A1 gene, occurs in any one or more introns or exons selected from the group consisting of: intron 31, exon 32, intron 32, exon 33, intron 33, exon 34, intron 34, exon 35, intron 35, exon 36, intron 36, exon 37, intron 37, exon 38, intron 38, exon 39, intron 39, exon 40, intron 40, exon 41, intron 41, exon 42, intron 42, exon 43, intron 43, exon 44, intron 44, exon 45, intron 45, exon 46, and intron 46.

39. The method of any one of claims 1-38, wherein the one or more deoxyribonucleic acid (DNA) endonuclease is selected from any of those sequences in SEQ ID NOs: 1-620 and variants having at least 90% homology to any of those sequences disclosed in SEQ ID NOs: 1-620.

40. The method of claim 39, wherein the one or more deoxyribonucleic acid (DNA) endonuclease is one or more proteins or polypeptides.

41. The method of claim 40, wherein the one or more proteins or polypeptides is flanked at the N-terminus, the C-terminus, or both the N-terminus and C-terminus by one or more nuclear localization signals (NLSs).

42. The method of claim 41, wherein the one or more proteins or polypeptides is flanked by two NLSs, one NLS located at the N-terminus and the second NLS located at the C-terminus.

43. The method of any one of claims 41-42, wherein the one or more NLSs is a SV40 NLS.

44. The method of claim 39, wherein the one or more deoxyribonucleic acid (DNA) endonuclease is one or more polynucleotide encoding the one or more DNA endonuclease.

45. The method of claim 44, wherein the one or more deoxyribonucleic acid (DNA) endonuclease is one or more ribonucleic acid (RNA) encoding the one or more DNA endonuclease.

46. The method of claim 45, wherein the one or more ribonucleic acid (RNA) is one or more chemically modified RNA.

47. The method of claim 46, wherein the one or more ribonucleic acid (RNA) is chemically modified in the coding region.

48. The method of any one of claim 44-47, wherein the one or more polynucleotide or one or more ribonucleic acid (RNA) is codon optimized.

49. The method of any one of claims 1-48, wherein the method further comprises: introducing one or more gRNA or one or more sgRNA.

50. The method of claim 49, wherein the one or more gRNA or one or more sgRNA is chemically modified.

51. The method of claim 50, wherein the one or more modified sgRNAs comprises three 2′-O-methyl-phosphorothioate residues at or near each of its 5′ and 3′ ends.

52. The method of any one of claims 49-51, wherein the one or more gRNA or one or more sgRNA comprises a spacer sequence that is complementary to a DNA sequence within or near exon 1, intron 1, exon 2, intron 2, exon 3, intron 3, exon 4, intron 4, exon 5, intron 5, exon 6, intron 6, exon 7, intron 7, exon 8, intron 8, exon 9, intron 9, exon 10, intron 10, exon 11, intron 11, exon 12, intron 12, exon 13, intron 13, exon 14, intron 14, exon 15, intron 15, exon 16, intron 16, exon 17, intron 17, exon 18, intron 18, exon 19, intron 19, exon 20, intron 20, exon 21, intron 21, exon 22, intron 22, exon 23, intron 23, exon 24, intron 24, exon 25, intron 25, exon 26, intron 26, exon 27, intron 27, exon 28, intron 28, exon 29, intron 29, exon 30, intron 30, exon 31, intron 31, exon 32, intron 32, exon 33, intron 33, exon 34, intron 34, exon 35, intron 35, exon 36, intron 36, exon 37, intron 37, exon 38, intron 38, exon 39, intron 39, exon 40, intron 40, exon 41, intron 41, exon 42, intron 42, exon 43, intron 43, exon 44, intron 44, exon 45, intron 45, exon 46, intron 46, exon 47, intron 47, exon 48, intron 48, exon 49, intron 49, exon 50, intron 50, exon 51, intron 51, exon 52, intron 52, exon 53, intron 53, exon 54, intron 54, exon 55, intron 55, exon 56, intron 56, exon 57, intron 57, exon 58, intron 58, exon 59, intron 59, exon 60, intron 60, exon 61, intron 61, exon 62, intron 62, exon 63, intron 63, exon 64, intron 64, exon 65, intron 65, exon 66, intron 66, exon 67, intron 67, exon 68, intron 68, exon 69, intron 69, exon 70, intron 70, exon 71, intron 71, exon 72, intron 72, exon 73, intron 73, exon 74, intron 74, exon 75, intron 75, exon 76, intron 76, exon 77, intron 77, exon 78, intron 78, exon 79, intron 79, exon 80, intron 80, exon 81, intron 81, exon 82, intron 82, exon 83, intron 83, exon 84, intron 84, exon 85, intron 85, exon 86, intron 86, exon 87, intron 87, exon 88, intron 88, exon 89, intron 89, exon 90, intron 90, exon 91, intron 91, exon 92, intron 92, exon 93, intron 93, exon 94, intron 94, exon 95, intron 95, exon 96, intron 96, exon 97, intron 97, exon 98, intron 98, exon 99, intron 99, exon 100, intron 100, exon 101, intron 101, exon 102, intron 102, exon 103, intron 103, exon 104, intron 104, exon 105, intron 105, exon 106, intron 106, exon 107, intron 107, exon 108, intron 108, exon 109, intron 109, exon 110, intron 110, exon 111, intron 111, exon 112, intron 112, exon 113, intron 113, exon 114, intron 114, exon 115, intron 115, exon 116, intron 116, exon 117, intron 117, exon 118, intron 118, exon 119, intron 119, exon 120, intron 120, exon 121, intron 121, exon 122, intron 122, exon 123, intron 123, exon 124, intron 124, exon 125, intron 125, exon 126, intron 126, exon 127, intron 127, exon 128, intron 128, exon 129, intron 129, exon 130, intron 130, exon 131, intron 131, exon 132, intron 132, exon 133, intron 133, exon 134, intron 134, exon 135, intron 135, exon 136, intron 136, exon 137, intron 137, exon 138, intron 138, exon 139, intron 139, exon 140, intron 140, exon 141, intron 141, exon 142, intron 142, exon 143, intron 143, exon 144, intron 144, exon 145, intron 145, exon 146, intron 146, exon 147, intron 147, exon 148, intron 148, exon 149, intron 149, exon 150, intron 150, exon 151, intron 151, exon 152, intron 152, exon 153, intron 153, exon 154, intron 154, exon 155, intron 155, exon 156, intron 156, exon 157, intron 157, exon 158, intron 158, exon 159, intron 159, exon 160, intron 160, exon 161, intron 161, exon 162, intron 162, exon 163, intron 163, exon 164, intron 164, exon 165, intron 165, exon 166, intron 166, exon 167, intron 167, exon 168, intron 168, exon 169, intron 169, exon 170, intron 170, exon 171, intron 171, exon 172, intron 172, exon 173, intron 173, exon 174, intron 174, exon 175, intron 175, exon 176, intron 176, exon 177, intron 177, exon 178, intron 178, exon 179, intron 179, exon 180, intron 180, exon 181, intron 181, exon 182, intron 182, exon 183, intron 183, exon 184, intron 184, exon 185, intron 185, exon 186, intron 186, exon 187, intron 187, exon 188, intron 188, exon 189, intron 189, exon 190, intron 190, exon 191, intron 191, exon 192, intron 192, exon 193, intron 193, exon 194, intron 194, exon 195, intron 195, exon 196, intron 196, exon 197, intron 197, exon 198, intron 198, exon 199, intron 199, exon 200, intron 200, exon 201, intron 201, exon 202, intron 202, exon 203, intron 203, exon 204, intron 204, exon 205, intron 205, exon 206, intron 206, exon 207, intron 207, exon 208, intron 208, exon 209, intron 209, exon 210, intron 210, exon 211, intron 211, exon 212, intron 212, exon 213, intron 213, exon 214, intron 214, exon 215, intron 215, exon 216, intron 216, exon 217, intron 217, or exon 218 of the COL7A1 gene.

53. The method of claims 49-51, wherein the one or more gRNA or one or more sgRNA comprises a spacer sequence that is complementary to a DNA sequence within or near any one or more introns or exons selected from the group consisting of: intron 31, exon 32, intron 32, exon 33, intron 33, exon 34, intron 34, exon 35, intron 35, exon 36, intron 36, exon 37, intron 37, exon 38, intron 38, exon 39, intron 39, exon 40, intron 40, exon 41, intron 41, exon 42, intron 42, exon 43, intron 43, exon 44, intron 44, exon 45, intron 45, exon 46, and intron 46.

54. The method of any one of claims 49-51, wherein the one or more gRNA or one or more sgRNA comprises a RNA sequence corresponding to a sequence selected from the group consisting of SEQ ID NOs: 20203, 12355, 12342, 20135, 20126, 12414, 20127, 20131, 12415, 20156, 12437, 20219, 20202, 12302, 12264, 20286, 12416, 20307, 20205, 12399, 20297, 20322, 20130, 12423, 12412, 20128, 12349, 20285, 12243, 20155, 12256, 20305, 20246, and 20223.

55. The method of any one of claims 49-52, wherein the one or more gRNA or one or more sgRNA is pre-complexed with the one or more deoxyribonucleic acid (DNA) endonuclease to form one or more ribonucleoproteins (RNPs).

56. The method of claim 55, wherein the pre-complexing involves a covalent attachment of the one or more gRNA or one or more sgRNA to the one or more deoxyribonucleic acid (DNA) endonuclease.

57. The method of claims 55-56, wherein the weight ratio of sgRNA to DNA endonuclease in the RNP is 1:1.

58. The method of any one of claims 39-57, wherein the one or more deoxyribonucleic acid (DNA) endonuclease is formulated in a liposome or lipid nanoparticle.

59. The method of any one of claims 49-57, wherein the one or more deoxyribonucleic acid (DNA) endonuclease is formulated in a liposome or lipid nanoparticle which also comprises the one or more gRNA or one or more sgRNA.

60. The method of any one of claim 39 or 49-52, wherein the one or more deoxyribonucleic acid (DNA) endonuclease is encoded in an AAV vector particle.

61. The method of claim 49, wherein the one or more gRNA or one or more sgRNA is encoded in an AAV vector particle.

62. The method of claim 61, wherein the one or more deoxyribonucleic acid (DNA) endonuclease is encoded in an AAV vector particle which also encodes the one or more gRNA or one or more sgRNA.

63. The method of any one of claims 61-62, wherein the AAV vector particle is selected from the group consisting of any of those sequences disclosed in SEQ ID NOs: 4734-5302 and Table 2.

64. The method of any of claims 1-63, wherein the method further comprises: introducing into the cell a donor template comprising at least a portion of the wild-type or corrected COL7A1 gene.

65. The method of claim 64, wherein the at least a portion of the wild-type or corrected COL7A1 gene comprises one or more sequences selected from the group consisting of a COL7A1 exon, a COL7A1 intron, a sequence comprising an exon:intron junction of COL7A1.

66. The method of any one of claims 64-65, wherein the donor template comprises homologous arms to the genomic locus of the COL7A1 gene.

67. The method of any one of claims 64-66, wherein the donor template is either a single or double stranded polynucleotide.

68. The method of any one of claims 64-67, wherein the donor template is encoded in an AAV vector particle, wherein the AAV vector particle is selected from the group consisting of any of those sequences listed in SEQ ID NOs: 4734-5302 and Table 2.

69. The method of any one of claims 64-67, wherein the one or more polynucleotide encoding one or more deoxyribonucleic acid (DNA) endonuclease is formulated into a lipid nanoparticle, and the one or more gRNA or one or more sgRNA is delivered to the cell ex vivo by electroporation and the donor template is delivered to the cell by an adeno-associated virus (AAV) vector.

70. The method of any one of claims 64-67, wherein the one or more polynucleotide encoding one or more deoxyribonucleic acid (DNA) endonuclease is formulated into a liposome or lipid nanoparticle which also comprises the one or more gRNA or one or more sgRNA and the donor template.

71. The method of any one of the preceding claims, wherein the COL7A1 gene is located on Chromosome 3: 48,564,073 - 48,595,267 (Genome Reference Consortium—GRCh38).

72. A single-molecule guide RNA comprising at least a spacer sequence that is an RNA sequence corresponding to any one of SEQ ID NOs: 5305-33,088.

73. The single-molecule guide RNA of claim 72, wherein the single-molecule guide RNA further comprises a spacer extension region.

74. The single-molecule guide RNA of claim 72, wherein the single-molecule guide RNA further comprises a tracrRNA extension region.

75. The single-molecule guide RNA of any one of claim 72-74, wherein the single-molecule guide RNA is chemically modified.

76. The single-molecule guide RNA of any one of claims 72-75 pre-complexed with a DNA endonuclease.

77. The single-molecule guide RNA of claim 76, wherein the DNA endonuclease is a Cas9 or Cpf1 endonuclease.

78. The single-molecule guide RNA of claim 77, wherein the Cas9 or Cpf1 endonuclease is selected from the group consisting of: S. pyogenes Cas9, S. aureus Cas9, N. meningitidis Cas9, S. thermophilus CRISPR1 Cas9, S. thermophilus CRISPR 3 Cas9, T denticola Cas9, L. bacterium ND2006 Cpf1 and Acidaminococcus sp. BV3L6 Cpf1, and variants having at least 90% homology to the endonucleases.

79. The single-molecule guide RNA of claim 78, wherein the Cas9 or Cpf1 endonuclease comprises one or more nuclear localization signals (NLSs).

80. The single-molecule guide RNA of claim 79, wherein at least one NLS is at or within 50 amino acids of the amino-terminus of the Cas9 or Cpf1 endonuclease and/or at least one NLS is at or within 50 amino acids of the carboxy-terminus of the Cas9 or Cpf1 endonuclease.

81. A DNA encoding the single-molecule guide RNA of any one of claims 72-75.

82. A therapeutic comprising at least one or more gRNAs for editing a COL7A1 gene in a cell from a patient with a COL7A1 related condition or disorder, the one or more gRNAs comprising a spacer sequence selected from the group consisting of nucleic acid sequences in any one of SEQ ID NOs: 5305-33,088 of the Sequence Listing.

83. A therapeutic for treating a patient with a COL7A1 related condition or disorder formed by the method comprising:
introducing one or more DNA endonucleases;
introducing one or more gRNA or one or more sgRNA for editing a COL7A1 gene;
wherein the one or more gRNAs or sgRNAs comprise a spacer sequence selected from the group consisting of nucleic acid sequences in SEQ ID NOs: 5305-33,088 of the Sequence Listing.

84. The method of any one of claim 82 or 83, wherein the COL7A1 related condition or disorder is Dystrophic Epidermolysis Bullosa (DEB).
